United States Patent Application Publication US 2008/0113351 A1 - sequence listing, part 21

SEQ ID NO: 505256 - DNA, 19 bp, Mus musculus
  siRNA target sequence for Kif1b (NM_008441.1,1535-1553).
caggagaggatcatgtcta

SEQ ID NO: 505257 - DNA, 19 bp, Mus musculus
  siRNA target sequence for Kif1b (NM_008441.1,1626-1644).
gggaagagaaacttcgtaa

SEQ ID NO: 505258 - DNA, 19 bp, Mus musculus
  siRNA target sequence for Kif1b (NM_008441.1,1627-1645).
ggaagagaaacttcgtaaa

SEQ ID NO: 505259 - DNA, 19 bp, Mus musculus
  siRNA target sequence for Kif1b (NM_008441.1,1776-1794).
cattaatgtcggagtgttt

SEQ ID NO: 505260 - DNA, 19 bp, Mus musculus
  siRNA target sequence for Kif1b (NM_008441.1,1785-1803).
cggagtgtttgctctatta

SEQ ID NO: 505261 - DNA, 19 bp, Mus musculus
  siRNA target sequence for Kif1b (NM_008441.1,1915-1933).
gagcaacactggtgaagtt

SEQ ID NO: 505262 - DNA, 19 bp, Mus musculus
  siRNA target sequence for Kif1b (NM_008441.1,2022-2040).
gtatcatcatgggtaaaaa

SEQ ID NO: 505263 - DNA, 19 bp, Mus musculus
  siRNA target sequence for Kif1b (NM_008441.1,2026-2044).
catcatgggtaaaaaccat

SEQ ID NO: 505264 - DNA, 19 bp, Mus musculus
  siRNA target sequence for Kif1b (NM_008441.1,2145-2163).
gagagcttctcgaaaaaca

SEQ ID NO: 505265 - DNA, 19 bp, Mus musculus
  siRNA target sequence for Kif1b (NM_008441.1,2204-2222).
gaaatggagatcctttaca

SEQ ID NO: 505266 - DNA, 19 bp, Mus musculus
  siRNA target sequence for Kif1b (NM_008441.1,2265-2283).
gactggacgcggattctga

SEQ ID NO: 505267 - DNA, 19 bp, Mus musculus
  siRNA target sequence for Kif1b (NM_008441.1,2267-2285).
ctggacgcggattctgata

SEQ ID NO: 505268 - DNA, 19 bp, Mus musculus
  siRNA target sequence for Kif1b (NM_008441.1,2353-2371).
gctgcctcccagcaagtta

SEQ ID NO: 505269 - DNA, 19 bp, Mus musculus
  siRNA target sequence for Kif1b (NM_008441.1,2356-2374).
gcctcccagcaagttacaa

SEQ ID NO: 505270 - DNA, 19 bp, Mus musculus
  siRNA target sequence for Kif1b (NM_008441.1,2365-2383).
caagttacaaaccattgtt

SEQ ID NO: 505271 - DNA, 19 bp, Mus musculus
  siRNA target sequence for Kif1b (NM_008441.1,2368-2386).
gttacaaaccattgttaaa

SEQ ID NO: 505272 - DNA, 19 bp, Mus musculus
  siRNA target sequence for Kif1b (NM_008441.1,2413-2431).
gaagcgagagccaatcaaa

SEQ ID NO: 505273 - DNA, 19 bp, Mus musculus
  siRNA target sequence for Kif1b (NM_008441.1,2484-2502).
ccatctcagatcttaagat

SEQ ID NO: 505274 - DNA, 19 bp, Mus musculus
  siRNA target sequence for Kif1b (NM_008441.1,2528-2546).
gaggttgccctcaatgact

SEQ ID NO: 505275 - DNA, 19 bp, Mus musculus
  siRNA target sequence for Kif1b (NM_008441.1,2569-2587).
cgaagccttggccattgtt

SEQ ID NO: 505276 - DNA, 19 bp, Mus musculus
  siRNA target sequence for Kif1b (NM_008441.1,2570-2588).
gaagccttggccattgtta

SEQ ID NO: 505277 - DNA, 19 bp, Mus musculus
  siRNA target sequence for Kif1b (NM_008441.1,2683-2701).
ggtaggggatgagaagatt

SEQ ID NO: 505278 - DNA, 19 bp, Mus musculus
  siRNA target sequence for Kif1b (NM_008441.1,2727-2745).
gtggaaccgatgtagatga

SEQ ID NO: 505279 - DNA, 19 bp, Mus musculus
  siRNA target sequence for Kif1b (NM_008441.1,2815-2833).
cgaagagatcaaagtctta

SEQ ID NO: 505280 - DNA, 19 bp, Mus musculus
  siRNA target sequence for Kif1b (NM_008441.1,2857-2875).
gaaagtcttgccattgatt

SEQ ID NO: 505281 - DNA, 19 bp, Mus musculus
  siRNA target sequence for Kif1b (NM_008441.1,2936-2954).
gctaacagcgtctctgata

SEQ ID NO: 505282 - DNA, 19 bp, Mus musculus
  siRNA target sequence for Kif1b (NM_008441.1,2937-2955).
ctaacagcgtctctgataa

SEQ ID NO: 505283 - DNA, 19 bp, Mus musculus
  siRNA target sequence for Kif1b (NM_008441.1,2941-2959).
cagcgtctctgataatggt

SEQ ID NO: 505284 - DNA, 19 bp, Mus musculus
  siRNA target sequence for Kif1b (NM_008441.1,2949-2967).
ctgataatggtgtcagtaa

SEQ ID NO: 505285 - DNA, 19 bp, Mus musculus
  siRNA target sequence for Kif1b (NM_008441.1,3016-3034).
gaacggggatccagctttt

SEQ ID NO: 505286 - DNA, 19 bp, Mus musculus
  siRNA target sequence for Kif1b (NM_008441.1,3019-3037).
cggggatccagcttttaga

SEQ ID NO: 505287 - DNA, 19 bp, Mus musculus
  siRNA target sequence for Kif1b (NM_008441.1,3055-3073).
gatgaggcaagaacaaatt

SEQ ID NO: 505288 - DNA, 19 bp, Mus musculus
  siRNA target sequence for Kif1b (NM_008441.1,3086-3104).
ctgcaacagcaagagataa

SEQ ID NO: 505289 - DNA, 19 bp, Mus musculus
  siRNA target sequence for Kif1b (NM_008441.1,3088-3106).
gcaacagcaagagataaca

SEQ ID NO: 505290 - DNA, 19 bp, Mus musculus
  siRNA target sequence for Kif1b (NM_008441.1,3173-3191).
ccctttaagagcaatccta

SEQ ID NO: 505291 - DNA, 19 bp, Mus musculus
  siRNA target sequence for Kif1b (NM_008441.1,3174-3192).
cctttaagagcaatcctaa

SEQ ID NO: 505292 - DNA, 19 bp, Mus musculus
  siRNA target sequence for Kif1b (NM_008441.1,3207-3225).
ggagtcctgggacacatat

SEQ ID NO: 505293 - DNA, 19 bp, Mus musculus
  siRNA target sequence for Kif1b (NM_008441.1,3208-3226).
gagtcctgggacacatatt

SEQ ID NO: 505294 - DNA, 19 bp, Mus musculus
  siRNA target sequence for Kif1b (NM_008441.1,3244-3262).
ggttattgagctaagaatt

SEQ ID NO: 505295 - DNA, 19 bp, Mus musculus
  siRNA target sequence for Kif1b (NM_008441.1,3360-3378).
gaagtcaggatcatatcca

SEQ ID NO: 505296 - DNA, 19 bp, Mus musculus
  siRNA target sequence for Kif1b (NM_008441.1,3365-3383).
caggatcatatccaagtta

SEQ ID NO: 505297 - DNA, 19 bp, Mus musculus
  siRNA target sequence for Kif1b (NM_008441.1,3422-3440).
ctacggtggagaagcaatt

SEQ ID NO: 505298 - DNA, 19 bp, Mus musculus
  siRNA target sequence for Kif1b (NM_008441.1,3430-3448).
gagaagcaattctctcaat

SEQ ID NO: 505299 - DNA, 19 bp, Mus musculus
  siRNA target sequence for Kif1b (NM_008441.1,3520-3538).
ccccaccgctgatctacaa

SEQ ID NO: 505300 - DNA, 19 bp, Mus musculus
  siRNA target sequence for Kif1b (NM_008441.1,3521-3539).
cccaccgctgatctacaaa

SEQ ID NO: 505301 - DNA, 19 bp, Mus musculus
  siRNA target sequence for Kif1b (NM_008441.1,3523-3541).
caccgctgatctacaaact

SEQ ID NO: 505302 - DNA, 19 bp, Mus musculus
  siRNA target sequence for Kif1b (NM_008441.1,3525-3543).
ccgctgatctacaaacttt

SEQ ID NO: 505303 - DNA, 19 bp, Mus musculus
  siRNA target sequence for Kif1b (NM_008441.1,3569-3587).
caccggcagccttactgta

SEQ ID NO: 505304 - DNA, 19 bp, Mus musculus
  siRNA target sequence for Kif1b (NM_008441.1,3571-3589).
ccggcagccttactgtaat

SEQ ID NO: 505305 - DNA, 19 bp, Mus musculus
  siRNA target sequence for Kif1b (NM_008441.1,3572-3590).
cggcagccttactgtaatt

SEQ ID NO: 505306 - DNA, 19 bp, Mus musculus
  siRNA target sequence for Kif1b (NM_008441.1,3573-3591).
ggcagccttactgtaatta

SEQ ID NO: 505307 - DNA, 19 bp, Mus musculus
  siRNA target sequence for Kif1b (NM_008441.1,3574-3592).
gcagccttactgtaattat

SEQ ID NO: 505308 - DNA, 19 bp, Mus musculus
  siRNA target sequence for Kif1b (NM_008441.1,3684-3702).
cgaggatgaggagacaatt

SEQ ID NO: 505309 - DNA, 19 bp, Mus musculus
  siRNA target sequence for Kif1c (NM_153103.1,30-48).
gagggttcggccctttaat

SEQ ID NO: 505310 - DNA, 19 bp, Mus musculus
  siRNA target sequence for Kif1c (NM_153103.1,99-117).
caccacctccatcattaat

SEQ ID NO: 505311 - DNA, 19 bp, Mus musculus
  siRNA target sequence for Kif1c (NM_153103.1,187-205).
gaggatccgcagtttgcat

SEQ ID NO: 505312 - DNA, 19 bp, Mus musculus
  siRNA target sequence for Kif1c (NM_153103.1,213-231).
gcaggtgtaccgagacata

SEQ ID NO: 505313 - DNA, 19 bp, Mus musculus
  siRNA target sequence for Kif1c (NM_153103.1,402-420).
gagtgcccagctttcctat

SEQ ID NO: 505314 - DNA, 19 bp, Mus musculus
  siRNA target sequence for Kif1c (NM_153103.1,432-450).
gagctatatggaaatctat

SEQ ID NO: 505315 - DNA, 19 bp, Mus musculus
  siRNA target sequence for Kif1c (NM_153103.1,458-476).
gagtacgagacctcttgaa

SEQ ID NO: 505316 - DNA, 19 bp, Mus musculus
  siRNA target sequence for Kif1c (NM_153103.1,648-666).
ctcccatgccgtctttact

SEQ ID NO: 505317 - DNA, 19 bp, Mus musculus
  siRNA target sequence for Kif1c (NM_153103.1,651-669).
ccatgccgtctttactatt

SEQ ID NO: 505318 - DNA, 19 bp, Mus musculus
  siRNA target sequence for Kif1c (NM_153103.1,655-673).
gccgtctttactattgtct

SEQ ID NO: 505319 - DNA, 19 bp, Mus musculus
  siRNA target sequence for Kif1c (NM_153103.1,656-674).
ccgtctttactattgtctt

SEQ ID NO: 505320 - DNA, 19 bp, Mus musculus
  siRNA target sequence for Kif1c (NM_153103.1,657-675).
cgtctttactattgtcttt

SEQ ID NO: 505321 - DNA, 19 bp, Mus musculus
  siRNA target sequence for Kif1c (NM_153103.1,783-801).
ggggatgcgtctaaaggaa

SEQ ID NO: 505322 - DNA, 19 bp, Mus musculus
  siRNA target sequence for Kif1c (NM_153103.1,920-938).
ggctgctcaaggagaattt

SEQ ID NO: 505323 - DNA, 19 bp, Mus musculus
  siRNA target sequence for Kif1c (NM_153103.1,975-993).
gagtcctgctgacatcaat

SEQ ID NO: 505324 - DNA, 19 bp, Mus musculus
  siRNA target sequence for Kif1c (NM_153103.1,977-995).
gtcctgctgacatcaatta

SEQ ID NO: 505325 - DNA, 19 bp, Mus musculus
  siRNA target sequence for Kif1c (NM_153103.1,980-998).
ctgctgacatcaattacga

SEQ ID NO: 505326 - DNA, 19 bp, Mus musculus
  siRNA target sequence for Kif1c (NM_153103.1,1035-1053).
caagcagatccgatgcaat

SEQ ID NO: 505327 - DNA, 19 bp, Mus musculus
  siRNA target sequence for Kif1c (NM_153103.1,1154-1172).
ctgctctaggaggtctaaa

SEQ ID NO: 505328 - DNA, 19 bp, Mus musculus
  siRNA target sequence for Kif1c (NM_153103.1,1241-1259).
catctcctcccccacataa

SEQ ID NO: 505329 - DNA, 19 bp, Mus musculus
  siRNA target sequence for Kif1c (NM_153103.1,1491-1509).
gactccccacctggtaaat

SEQ ID NO: 505330 - DNA, 19 bp, Mus musculus
  siRNA target sequence for Kif1c (NM_153103.1,1568-1586).
ccagggttggccaagtaga

SEQ ID NO: 505331 - DNA, 19 bp, Mus musculus
  siRNA target sequence for Kif1c (NM_153103.1,1569-1587).
cagggttggccaagtagat

SEQ ID NO: 505332 - DNA, 19 bp, Mus musculus
  siRNA target sequence for Kif1c (NM_153103.1,1571-1589).
gggttggccaagtagatgt

SEQ ID NO: 505333 - DNA, 19 bp, Mus musculus
  siRNA target sequence for Kif1c (NM_153103.1,1657-1675).
gatggagaagtgatggtta

SEQ ID NO: 505334 - DNA, 19 bp, Mus musculus
  siRNA target sequence for Kif1c (NM_153103.1,1746-1764).
gtcaggaaacaggattgta

SEQ ID NO: 505335 - DNA, 19 bp, Mus musculus
  siRNA target sequence for Kif1c (NM_153103.1,1776-1794).
ccatgttttccgcttcaat

SEQ ID NO: 505336 - DNA, 19 bp, Mus musculus
  siRNA target sequence for Kif1c (NM_153103.1,2037-2055).
ctctgacaagcgttcttgt

SEQ ID NO: 505337 - DNA, 19 bp, Mus musculus
  siRNA target sequence for Kif1c (NM_153103.1,2043-2061).
caagcgttcttgtgaagaa

SEQ ID NO: 505338 - DNA, 19 bp, Mus musculus
  siRNA target sequence for Kif1c (NM_153103.1,2059-2077).
gaaagctggcggctgattt

SEQ ID NO: 505339 - DNA, 19 bp, Mus musculus
  siRNA target sequence for Kif1c (NM_153103.1,2105-2123).
ccacagtacagaacattgt

SEQ ID NO: 505340 - DNA, 19 bp, Mus musculus
  siRNA target sequence for Kif1c (NM_153103.1,2162-2180).
cccctcgaagagtctatca

SEQ ID NO: 505341 - DNA, 19 bp, Mus musculus
  siRNA target sequence for Kif1c (NM_153103.1,2251-2269).
gcagtaaaggagatatgct

SEQ ID NO: 505342 - DNA, 19 bp, Mus musculus
  siRNA target sequence for Kif1c (NM_153103.1,2252-2270).
cagtaaaggagatatgcta

SEQ ID NO: 505343 - DNA, 19 bp, Mus musculus
  siRNA target sequence for Kif1c (NM_153103.1,2294-2312).
gccacggacgagcagaaat

SEQ ID NO: 505344 - DNA, 19 bp, Mus musculus
  siRNA target sequence for Kif1c (NM_153103.1,2295-2313).
ccacggacgagcagaaatt

SEQ ID NO: 505345 - DNA, 19 bp, Mus musculus
  siRNA target sequence for Kif1c (NM_153103.1,2298-2316).
cggacgagcagaaattgaa

SEQ ID NO: 505346 - DNA, 19 bp, Mus musculus
  siRNA target sequence for Kif1c (NM_153103.1,2412-2430).
ggatactgtgggtgaagaa

SEQ ID NO: 505347 - DNA, 19 bp, Mus musculus
  siRNA target sequence for Kif1c (NM_153103.1,2761-2779).
gagcgggtgtcgagattga

SEQ ID NO: 505348 - DNA, 19 bp, Mus musculus
  siRNA target sequence for Kif1c (NM_153103.1,3220-3238).
cgctacccaccatacacta

SEQ ID NO: 505349 - DNA, 19 bp, Mus musculus
  siRNA target sequence for Kif20a (NM_009004.2,111-129).
ccgccagcgggcttactct

SEQ ID NO: 505350 - DNA, 19 bp, Mus musculus
  siRNA target sequence for Kif20a (NM_009004.2,147-165).
gactctcccatattagaat

SEQ ID NO: 505351 - DNA, 19 bp, Mus musculus
  siRNA target sequence for Kif20a (NM_009004.2,275-293).
gaaggtgaaagtttacctt

SEQ ID NO: 505352 - DNA, 19 bp, Mus musculus
  siRNA target sequence for Kif20a (NM_009004.2,294-312).
cgaattcgaccattcttga

SEQ ID NO: 505353 - DNA, 19 bp, Mus musculus
  siRNA target sequence for Kif20a (NM_009004.2,342-360).
ggctgcgtctgcattgaga

SEQ ID NO: 505354 - DNA, 19 bp, Mus musculus
  siRNA target sequence for Kif20a (NM_009004.2,347-365).
cgtctgcattgagaataca

SEQ ID NO: 505355 - DNA, 19 bp, Mus musculus
  siRNA target sequence for Kif20a (NM_009004.2,378-396).
ctgcaggcacccaaagact

SEQ ID NO: 505356 - DNA, 19 bp, Mus musculus
  siRNA target sequence for Kif20a (NM_009004.2,397-415).
cctttgccttgaagagtaa

SEQ ID NO: 505357 - DNA, 19 bp, Mus musculus
  siRNA target sequence for Kif20a (NM_009004.2,402-420).
gccttgaagagtaatgaga

SEQ ID NO: 505358 - DNA, 19 bp, Mus musculus
  siRNA target sequence for Kif20a (NM_009004.2,429-447).
ggtcaggccactcacaaat

SEQ ID NO: 505359 - DNA, 19 bp, Mus musculus
  siRNA target sequence for Kif20a (NM_009004.2,436-454).
ccactcacaaatttacctt

SEQ ID NO: 505360 - DNA, 19 bp, Mus musculus
  siRNA target sequence for Kif20a (NM_009004.2,481-499).
gacaggtggccttcttcaa

SEQ ID NO: 505361 - DNA, 19 bp, Mus musculus
  siRNA target sequence for Kif20a (NM_009004.2,538-556).
ggcagaactggctcatcta

SEQ ID NO: 505362 - DNA, 19 bp, Mus musculus
  siRNA target sequence for Kif20a (NM_009004.2,571-589).
ccaactcggggaaaacgta

SEQ ID NO: 505363 - DNA, 19 bp, Mus musculus
  siRNA target sequence for Kif20a (NM_009004.2,581-599).
gaaaacgtacaccattcaa

SEQ ID NO: 505364 - DNA, 19 bp, Mus musculus
  siRNA target sequence for Kif20a (NM_009004.2,592-610).
ccattcaaggtactagtaa

SEQ ID NO: 505365 - DNA, 19 bp, Mus musculus
  siRNA target sequence for Kif20a (NM_009004.2,684-702).
gacctgaagcccttattgt

SEQ ID NO: 505366 - DNA, 19 bp, Mus musculus
  siRNA target sequence for Kif20a (NM_009004.2,692-710).
gcccttattgtccaatgaa

SEQ ID NO: 505367 - DNA, 19 bp, Mus musculus
  siRNA target sequence for Kif20a (NM_009004.2,694-712).
ccttattgtccaatgaagt

SEQ ID NO: 505368 - DNA, 19 bp, Mus musculus
  siRNA target sequence for Kif20a (NM_009004.2,797-815).
gtccacctccgtgaagaaa

SEQ ID NO: 505369 - DNA, 19 bp, Mus musculus
  siRNA target sequence for Kif20a (NM_009004.2,908-926).
ccagctagatgaaacaagt

SEQ ID NO: 505370 - DNA, 19 bp, Mus musculus
  siRNA target sequence for Kif20a (NM_009004.2,911-929).
gctagatgaaacaagtcaa

SEQ ID NO: 505371 - DNA, 19 bp, Mus musculus
  siRNA target sequence for Kif20a (NM_009004.2,912-930).
ctagatgaaacaagtcaat

SEQ ID NO: 505372 - DNA, 19 bp, Mus musculus
  siRNA target sequence for Kif20a (NM_009004.2,1007-1025).
gatctacaatgaattgctt

SEQ ID NO: 505373 - DNA, 19 bp, Mus musculus
  siRNA target sequence for Kif20a (NM_009004.2,1010-1028).
ctacaatgaattgctttat

SEQ ID NO: 505374 - DNA, 19 bp, Mus musculus
  siRNA target sequence for Kif20a (NM_009004.2,1044-1062).
cctagccatcagcataaga

SEQ ID NO: 505375 - DNA, 19 bp, Mus musculus
  siRNA target sequence for Kif20a (NM_009004.2,1086-1104).
gatcagaacggcaatcctt

SEQ ID NO: 505376 - DNA, 19 bp, Mus musculus
  siRNA target sequence for Kif20a (NM_009004.2,1096-1114).
gcaatccttacgtgaaaga

SEQ ID NO: 505377 - DNA, 19 bp, Mus musculus
  siRNA target sequence for Kif20a (NM_009004.2,1097-1115).
caatccttacgtgaaagat

SEQ ID NO: 505378 - DNA, 19 bp, Mus musculus
  siRNA target sequence for Kif20a (NM_009004.2,1102-1120).
cttacgtgaaagatctcaa

SEQ ID NO: 505379 - DNA, 19 bp, Mus musculus
  siRNA target sequence for Kif20a (NM_009004.2,1107-1125).
gtgaaagatctcaattgga

SEQ ID NO: 505380 - DNA, 19 bp, Mus musculus
  siRNA target sequence for Kif20a (NM_009004.2,1109-1127).
gaaagatctcaattggatt

SEQ ID NO: 505381 - DNA, 19 bp, Mus musculus
  siRNA target sequence for Kif20a (NM_009004.2,1124-1142).
gattcatgttcgtgatgtt

SEQ ID NO: 505382 - DNA, 19 bp, Mus musculus
  siRNA target sequence for Kif20a (NM_009004.2,1150-1168).
cctggaaactattgaaagt

SEQ ID NO: 505383 - DNA, 19 bp, Mus musculus
  siRNA target sequence for Kif20a (NM_009004.2,1272-1290).
gatatagtgcccaagatca

SEQ ID NO: 505384 - DNA, 19 bp, Mus musculus
  siRNA target sequence for Kif20a (NM_009004.2,1321-1339).
ctgagcgctgcaaacatca

SEQ ID NO: 505385 - DNA, 19 bp, Mus musculus
  siRNA target sequence for Kif20a (NM_009004.2,1345-1363).
gtggtgagcggctaaagga

SEQ ID NO: 505386 - DNA, 19 bp, Mus musculus
  siRNA target sequence for Kif20a (NM_009004.2,1362-1380).
gaggcagggaacattaaca

SEQ ID NO: 505387 - DNA, 19 bp, Mus musculus
  siRNA target sequence for Kif20a (NM_009004.2,1411-1429).
ctgccctgcgacagaatca

SEQ ID NO: 505388 - DNA, 19 bp, Mus musculus
  siRNA target sequence for Kif20a (NM_009004.2,1509-1527).
cgaggtcgttcctgtatga

SEQ ID NO: 505389 - DNA, 19 bp, Mus musculus
  siRNA target sequence for Kif20a (NM_009004.2,1510-1528).
gaggtcgttcctgtatgat

SEQ ID NO: 505390 - DNA, 19 bp, Mus musculus
  siRNA target sequence for Kif20a (NM_009004.2,1513-1531).
gtcgttcctgtatgattgt

SEQ ID NO: 505391 - DNA, 19 bp, Mus musculus
  siRNA target sequence for Kif20a (NM_009004.2,1519-1537).
cctgtatgattgtcaatgt

SEQ ID NO: 505392 - DNA, 19 bp, Mus musculus
  siRNA target sequence for Kif20a (NM_009004.2,1538-1556).
gaatccctgtgcatctaca

SEQ ID NO: 505393 - DNA, 19 bp, Mus musculus
  siRNA target sequence for Kif20a (NM_009004.2,1567-1585).
ctcttcatgcagccaaatt

SEQ ID NO: 505394 - DNA, 19 bp, Mus musculus
  siRNA target sequence for Kif20a (NM_009004.2,1569-1587).
cttcatgcagccaaattct

SEQ ID NO: 505395 - DNA, 19 bp, Mus musculus
  siRNA target sequence for Kif20a (NM_009004.2,1791-1809).
gccatgaaagcgctacttt

SEQ ID NO: 505396 - DNA, 19 bp, Mus musculus
  siRNA target sequence for Kif20a (NM_009004.2,1792-1810).
ccatgaaagcgctactttt

SEQ ID NO: 505397 - DNA, 19 bp, Mus musculus
  siRNA target sequence for Kif20a (NM_009004.2,1848-1866).
ctccgagaggaaatttgca

SEQ ID NO: 505398 - DNA, 19 bp, Mus musculus
  siRNA target sequence for Kif20a (NM_009004.2,2010-2028).
caggagcgggatgaaaaaa

SEQ ID NO: 505399 - DNA, 19 bp, Mus musculus
  siRNA target sequence for Kif20a (NM_009004.2,2153-2171).
ggaagttaaagctgaacta

SEQ ID NO: 505400 - DNA, 19 bp, Mus musculus
  siRNA target sequence for Kif20a (NM_009004.2,2166-2184).
gaactagagcaatgcaaaa

SEQ ID NO: 505401 - DNA, 19 bp, Mus musculus
  siRNA target sequence for Kif20a (NM_009004.2,2377-2395).
gcaccggagcaggaaaact

SEQ ID NO: 505402 - DNA, 19 bp, Mus musculus
  siRNA target sequence for Kif20a (NM_009004.2,2416-2434).
gtgatgacatcttaatcaa

SEQ ID NO: 505403 - DNA, 19 bp, Mus musculus
  siRNA target sequence for Kif20a (NM_009004.2,2626-2644).
cattcctgcgaaacttact

SEQ ID NO: 505404 - DNA, 19 bp, Mus musculus
  siRNA target sequence for Kif20a (NM_009004.2,2710-2728).
ggcactctcctttactcaa

SEQ ID NO: 505405 - DNA, 19 bp, Mus musculus
  siRNA target sequence for Kif20a (NM_009004.2,2711-2729).
gcactctcctttactcaaa

SEQ ID NO: 505406 - DNA, 19 bp, Mus musculus
  siRNA target sequence for Kif21a (NM_016705.1,139-157).
gcgcgtggctgtcagaata

SEQ ID NO: 505407 - DNA, 19 bp, Mus musculus
  siRNA target sequence for Kif21a (NM_016705.1,140-158).
cgcgtggctgtcagaataa

SEQ ID NO: 505408 - DNA, 19 bp, Mus musculus
  siRNA target sequence for Kif21a (NM_016705.1,142-160).
cgtggctgtcagaataaga

SEQ ID NO: 505409 - DNA, 19 bp, Mus musculus
  siRNA target sequence for Kif21a (NM_016705.1,241-259).
gaaggataaggcctttact

SEQ ID NO: 505410 - DNA, 19 bp, Mus musculus
  siRNA target sequence for Kif21a (NM_016705.1,306-324).
cccagtgcatcgaaaagct

SEQ ID NO: 505411 - DNA, 19 bp, Mus musculus
  siRNA target sequence for Kif21a (NM_016705.1,312-330).
gcatcgaaaagctcattga

SEQ ID NO: 505412 - DNA, 19 bp, Mus musculus
  siRNA target sequence for Kif21a (NM_016705.1,313-331).
catcgaaaagctcattgaa

SEQ ID NO: 505413 - DNA, 19 bp, Mus musculus
  siRNA target sequence for Kif21a (NM_016705.1,399-417).
cgatgggaaccggatttga

SEQ ID NO: 505414 - DNA, 19 bp, Mus musculus
  siRNA target sequence for Kif21a (NM_016705.1,408-426).
ccggatttgacgtgaacat

SEQ ID NO: 505415 - DNA, 19 bp, Mus musculus
  siRNA target sequence for Kif21a (NM_016705.1,448-466).
catctctcgtgctgttaga

SEQ ID NO: 505416 - DNA, 19 bp, Mus musculus
  siRNA target sequence for Kif21a (NM_016705.1,459-477).
ctgttagacacctgttcaa

SEQ ID NO: 505417 - DNA, 19 bp, Mus musculus
  siRNA target sequence for Kif21a (NM_016705.1,461-479).
gttagacacctgttcaaga

SEQ ID NO: 505418 - DNA, 19 bp, Mus musculus
  siRNA target sequence for Kif21a (NM_016705.1,520-538).
gccccctcctgaattcaaa

SEQ ID NO: 505419 - DNA, 19 bp, Mus musculus
  siRNA target sequence for Kif21a (NM_016705.1,550-568).
gttcctagagctctataat

SEQ ID NO: 505420 - DNA, 19 bp, Mus musculus
  siRNA target sequence for Kif21a (NM_016705.1,574-592).
ggtccttgacttgtttgat

SEQ ID NO: 505421 - DNA, 19 bp, Mus musculus
  siRNA target sequence for Kif21a (NM_016705.1,597-615).
ctcgggatattgatgcaaa

SEQ ID NO: 505422 - DNA, 19 bp, Mus musculus
  siRNA target sequence for Kif21a (NM_016705.1,627-645).
caaatataagaattcatga

SEQ ID NO: 505423 - DNA, 19 bp, Mus musculus
  siRNA target sequence for Kif21a (NM_016705.1,842-860).
gctgagaacgcaactgata

SEQ ID NO: 505424 - DNA, 19 bp, Mus musculus
  siRNA target sequence for Kif21a (NM_016705.1,845-863).
gagaacgcaactgataata

SEQ ID NO: 505425 - DNA, 19 bp, Mus musculus
  siRNA target sequence for Kif21a (NM_016705.1,873-891).
ccgaatcgtcgccaatgaa

SEQ ID NO: 505426 - DNA, 19 bp, Mus musculus
  siRNA target sequence for Kif21a (NM_016705.1,874-892).
cgaatcgtcgccaatgaat

SEQ ID NO: 505427 - DNA, 19 bp, Mus musculus
  siRNA target sequence for Kif21a (NM_016705.1,879-897).
cgtcgccaatgaatgagtt

SEQ ID NO: 505428 - DNA, 19 bp, Mus musculus
  siRNA target sequence for Kif21a (NM_016705.1,880-898).
gtcgccaatgaatgagttt

SEQ ID NO: 505429 - DNA, 19 bp, Mus musculus
  siRNA target sequence for Kif21a (NM_016705.1,882-900).
cgccaatgaatgagtttga

SEQ ID NO: 505430 - DNA, 19 bp, Mus musculus
  siRNA target sequence for Kif21a (NM_016705.1,901-919).
gacgctgacggcgaagttt

SEQ ID NO: 505431 - DNA, 19 bp, Mus musculus
  siRNA target sequence for Kif21a (NM_016705.1,903-921).
cgctgacggcgaagtttca

SEQ ID NO: 505432 - DNA, 19 bp, Mus musculus
  siRNA target sequence for Kif21a (NM_016705.1,905-923).
ctgacggcgaagtttcact

SEQ ID NO: 505433 - DNA, 19 bp, Mus musculus
  siRNA target sequence for Kif21a (NM_016705.1,907-925).
gacggcgaagtttcacttt

SEQ ID NO: 505434 - DNA, 19 bp, Mus musculus
  siRNA target sequence for Kif21a (NM_016705.1,909-927).
cggcgaagtttcactttgt

SEQ ID NO: 505435 - DNA, 19 bp, Mus musculus
  siRNA target sequence for Kif21a (NM_016705.1,910-928).
ggcgaagtttcactttgtt

SEQ ID NO: 505436 - DNA, 19 bp, Mus musculus
  siRNA target sequence for Kif21a (NM_016705.1,913-931).
gaagtttcactttgttgat

SEQ ID NO: 505437 - DNA, 19 bp, Mus musculus
  siRNA target sequence for Kif21a (NM_016705.1,969-987).
caggcgagagagcaaaaga

SEQ ID NO: 505438 - DNA, 19 bp, Mus musculus
  siRNA target sequence for Kif21a (NM_016705.1,1119-1137).
ggggtaacagccaaaccat

SEQ ID NO: 505439 - DNA, 19 bp, Mus musculus
  siRNA target sequence for Kif21a (NM_016705.1,1130-1148).
caaaccatcatgatagcat

SEQ ID NO: 505440 - DNA, 19 bp, Mus musculus
  siRNA target sequence for Kif21a (NM_016705.1,1182-1200).
cgttaaacactctgaagta

SEQ ID NO: 505441 - DNA, 19 bp, Mus musculus
  siRNA target sequence for Kif21a (NM_016705.1,1201-1219).
cgccaatcgagcgagaaat

SEQ ID NO: 505442 - DNA, 19 bp, Mus musculus
  siRNA target sequence for Kif21a (NM_016705.1,1202-1220).
gccaatcgagcgagaaata

SEQ ID NO: 505443 - DNA, 19 bp, Mus musculus
  siRNA target sequence for Kif21a (NM_016705.1,1203-1221).
ccaatcgagcgagaaatat

SEQ ID NO: 505444 - DNA, 19 bp, Mus musculus
  siRNA target sequence for Kif21a (NM_016705.1,1208-1226).
cgagcgagaaatatcaaga

SEQ ID NO: 505445 - DNA, 19 bp, Mus musculus
  siRNA target sequence for Kif21a (NM_016705.1,1313-1331).
gaatacaaaaccggtaaaa

SEQ ID NO: 505446 - DNA, 19 bp, Mus musculus
  siRNA target sequence for Kif21a (NM_016705.1,1323-1341).
ccggtaaaagaataattga

SEQ ID NO: 505447 - DNA, 19 bp, Mus musculus
  siRNA target sequence for Kif21a (NM_016705.1,1350-1368).
gcgtggaaagcatcaatga

SEQ ID NO: 505448 - DNA, 19 bp, Mus musculus
  siRNA target sequence for Kif21a (NM_016705.1,1486-1504).
gcaggccaaccaagttctt

SEQ ID NO: 505449 - DNA, 19 bp, Mus musculus
  siRNA target sequence for Kif21a (NM_016705.1,1515-1533).
gtgaagggaacgaagagat

SEQ ID NO: 505450 - DNA, 19 bp, Mus musculus
  siRNA target sequence for Kif21a (NM_016705.1,1522-1540).
gaacgaagagatcagtaat

SEQ ID NO: 505451 - DNA, 19 bp, Mus musculus
  siRNA target sequence for Kif21a (NM_016705.1,1531-1549).
gatcagtaatatgattcat

SEQ ID NO: 505452 - DNA, 19 bp, Mus musculus
  siRNA target sequence for Kif21a (NM_016705.1,1534-1552).
cagtaatatgattcatagt

SEQ ID NO: 505453 - DNA, 19 bp, Mus musculus
  siRNA target sequence for Kif21a (NM_016705.1,1568-1586).
gaagacctcagggcaaaat

SEQ ID NO: 505454 - DNA, 19 bp, Mus musculus
  siRNA target sequence for Kif21a (NM_016705.1,1641-1659).
cggcgagatctccttactt

SEQ ID NO: 505455 - DNA, 19 bp, Mus musculus
  siRNA target sequence for Kif21a (NM_016705.1,1643-1661).
gcgagatctccttacttca

SEQ ID NO: 505456 - DNA, 19 bp, Mus musculus
  siRNA target sequence for Kif21a (NM_016705.1,1671-1689).
cagctttctcgcctactat

SEQ ID NO: 505457 - DNA, 19 bp, Mus musculus
  siRNA target sequence for Kif21a (NM_016705.1,1674-1692).
ctttctcgcctactatact

SEQ ID NO: 505458 - DNA, 19 bp, Mus musculus
  siRNA target sequence for Kif21a (NM_016705.1,1700-1718).
gacaaggagactatcgaaa

SEQ ID NO: 505459 - DNA, 19 bp, Mus musculus
  siRNA target sequence for Kif21a (NM_016705.1,1710-1728).
ctatcgaaattatagatct

SEQ ID NO: 505460 - DNA, 19 bp, Mus musculus
  siRNA target sequence for Kif21a (NM_016705.1,1789-1807).
cgggaaagacgataatgca

SEQ ID NO: 505461 - DNA, 19 bp, Mus musculus
  siRNA target sequence for Kif21a (NM_016705.1,2009-2027).
gccgacttagcaaatatca

SEQ ID NO: 505462 - DNA, 19 bp, Mus musculus
  siRNA target sequence for Kif21a (NM_016705.1,2028-2046).
cctgcgagattgcgattaa

SEQ ID NO: 505463 - DNA, 19 bp, Mus musculus
  siRNA target sequence for Kif21a (NM_016705.1,2031-2049).
gcgagattgcgattaagca

SEQ ID NO: 505464 - DNA, 19 bp, Mus musculus
  siRNA target sequence for Kif21a (NM_016705.1,2186-2204).
ggctcggtggagtcatact

SEQ ID NO: 505465 - DNA, 19 bp, Mus musculus
  siRNA target sequence for Kif21a (NM_016705.1,2221-2239).
gaaagtgaagtgcgaatat

SEQ ID NO: 505466 - DNA, 19 bp, Mus musculus
  siRNA target sequence for Kif21a (NM_016705.1,2248-2266).
gctccacgccatgaacaaa

SEQ ID NO: 505467 - DNA, 19 bp, Mus musculus
  siRNA target sequence for Kif21a (NM_016705.1,2382-2400).
ccaaggttcgtctaatgaa

SEQ ID NO: 505468 - DNA, 19 bp, Mus musculus
  siRNA target sequence for Kif21a (NM_016705.1,2482-2500).
gcgcaagcgagatcatcaa

SEQ ID NO: 505469 - DNA, 19 bp, Mus musculus
  siRNA target sequence for Kif21a (NM_016705.1,2484-2502).
gcaagcgagatcatcaact

SEQ ID NO: 505470 - DNA, 19 bp, Mus musculus
  siRNA target sequence for Kif21a (NM_016705.1,2485-2503).
caagcgagatcatcaactt

SEQ ID NO: 505471 - DNA, 19 bp, Mus musculus
  siRNA target sequence for Kif21a (NM_016705.1,2488-2506).
gcgagatcatcaacttaga

SEQ ID NO: 505472 - DNA, 19 bp, Mus musculus
  siRNA target sequence for Kif21a (NM_016705.1,2587-2605).
gaggcccatgtctgataaa

SEQ ID NO: 505473 - DNA, 19 bp, Mus musculus
  siRNA target sequence for Kif21a (NM_016705.1,2589-2607).
ggcccatgtctgataaagt

SEQ ID NO: 505474 - DNA, 19 bp, Mus musculus
  siRNA target sequence for Kif21a (NM_016705.1,2590-2608).
gcccatgtctgataaagta

SEQ ID NO: 505475 - DNA, 19 bp, Mus musculus
  siRNA target sequence for Kif21a (NM_016705.1,2705-2723).
ggcacccagcagaaaatga

SEQ ID NO: 505476 - DNA, 19 bp, Mus musculus
  siRNA target sequence for Kif21a (NM_016705.1,2772-2790).
gcaccaggaaaaaatatca

SEQ ID NO: 505477 - DNA, 19 bp, Mus musculus
  siRNA target sequence for Kif21a (NM_016705.1,2936-2954).
cgggaagaactcacaaaaa

SEQ ID NO: 505478 - DNA, 19 bp, Mus musculus
  siRNA target sequence for Kif21a (NM_016705.1,2949-2967).
caaaaaggcgagagaaact

SEQ ID NO: 505479 - DNA, 19 bp, Mus musculus
  siRNA target sequence for Kif21a (NM_016705.1,2955-2973).
ggcgagagaaactttctaa

SEQ ID NO: 505480 - DNA, 19 bp, Mus musculus
  siRNA target sequence for Kif21a (NM_016705.1,2956-2974).
gcgagagaaactttctaaa

SEQ ID NO: 505481 - DNA, 19 bp, Mus musculus
  siRNA target sequence for Kif21a (NM_016705.1,3001-3019).
cggagagggagataaaagt

SEQ ID NO: 505482 - DNA, 19 bp, Mus musculus
  siRNA target sequence for Kif21a (NM_016705.1,3048-3066).
ccctgacagccaacataga

SEQ ID NO: 505483 - DNA, 19 bp, Mus musculus
  siRNA target sequence for Kif21a (NM_016705.1,3049-3067).
cctgacagccaacatagat

SEQ ID NO: 505484 - DNA, 19 bp, Mus musculus
  siRNA target sequence for Kif21a (NM_016705.1,3057-3075).
ccaacatagattacatcaa

SEQ ID NO: 505485 - DNA, 19 bp, Mus musculus
  siRNA target sequence for Kif21a (NM_016705.1,3061-3079).
catagattacatcaatgat

SEQ ID NO: 505486 - DNA, 19 bp, Mus musculus
  siRNA target sequence for Kif21a (NM_016705.1,3186-3204).
ctcggtacctgctagatca

SEQ ID NO: 505487 - DNA, 19 bp, Mus musculus
  siRNA target sequence for Kif21a (NM_016705.1,3189-3207).
ggtacctgctagatcactt

SEQ ID NO: 505488 - DNA, 19 bp, Mus musculus
  siRNA target sequence for Kif21a (NM_016705.1,3245-3263).
cagaaagaggctcaaatta

SEQ ID NO: 505489 - DNA, 19 bp, Mus musculus
  siRNA target sequence for Kif21a (NM_016705.1,3268-3286).
cctcgagggtcgactcaaa

SEQ ID NO: 505490 - DNA, 19 bp, Mus musculus
  siRNA target sequence for Kif21a (NM_016705.1,3272-3290).
gagggtcgactcaaacaga

SEQ ID NO: 505491 - DNA, 19 bp, Mus musculus
  siRNA target sequence for Kif21a (NM_016705.1,3281-3299).
ctcaaacagaccgaaatca

SEQ ID NO: 505492 - DNA, 19 bp, Mus musculus
  siRNA target sequence for Kif21a (NM_016705.1,3313-3331).
gaaccaactcttattccat

SEQ ID NO: 505493 - DNA, 19 bp, Mus musculus
  siRNA target sequence for Kif21a (NM_016705.1,3381-3399).
gccacgcactgcaagaaaa

SEQ ID NO: 505494 - DNA, 19 bp, Mus musculus
  siRNA target sequence for Kif21a (NM_016705.1,3448-3466).
ggagggaagcacgttatct

SEQ ID NO: 505495 - DNA, 19 bp, Mus musculus
  siRNA target sequence for Kif21a (NM_016705.1,3449-3467).
gagggaagcacgttatctt

SEQ ID NO: 505496 - DNA, 19 bp, Mus musculus
  siRNA target sequence for Kif21a (NM_016705.1,3459-3477).
cgttatcttcagaccttat

SEQ ID NO: 505497 - DNA, 19 bp, Mus musculus
  siRNA target sequence for Kif21a (NM_016705.1,3481-3499).
gctttgtggtgaagtgaaa

SEQ ID NO: 505498 - DNA, 19 bp, Mus musculus
  siRNA target sequence for Kif21a (NM_016705.1,3489-3507).
gtgaagtgaaaccaaagaa

SEQ ID NO: 505499 - DNA, 19 bp, Mus musculus
  siRNA target sequence for Kif21a (NM_016705.1,3696-3714).
catctggcttaccttctaa

SEQ ID NO: 505500 - DNA, 19 bp, Mus musculus
  siRNA target sequence for Kif21a (NM_016705.1,3699-3717).
ctggcttaccttctaagat

SEQ ID NO: 505501 - DNA, 19 bp, Mus musculus
  siRNA target sequence for Kif21a (NM_016705.1,3854-3872).
gtgctctgtgtggattcta

SEQ ID NO: 505502 - DNA, 19 bp, Mus musculus
  siRNA target sequence for Kif21a (NM_016705.1,3865-3883).
ggattctacggatgatctt

SEQ ID NO: 505503 - DNA, 19 bp, Mus musculus
  siRNA target sequence for Kif21a (NM_016705.1,3886-3904).
cttcaccggatcaaaagat

SEQ ID NO: 505504 - DNA, 19 bp, Mus musculus
  siRNA target sequence for Kif21a (NM_016705.1,3897-3915).
caaaagatcgcacttgtaa

SEQ ID NO: 505505 - DNA, 19 bp, Mus musculus
  siRNA target sequence for Kif21a (NM_016705.1,3906-3924).
gcacttgtaaagtatggaa

SEQ ID NO: 505506 - DNA, 19 bp, Mus musculus
  siRNA target sequence for Kif21a (NM_016705.1,4015-4033).
caccgtgtcgacatcttat

SEQ ID NO: 505507 - DNA, 19 bp, Mus musculus
  siRNA target sequence for Kif21a (NM_016705.1,4017-4035).
ccgtgtcgacatcttatat

SEQ ID NO: 505508 - DNA, 19 bp, Mus musculus
  siRNA target sequence for Kif21a (NM_016705.1,4018-4036).
cgtgtcgacatcttatatt

SEQ ID NO: 505509 - DNA, 19 bp, Mus musculus
  siRNA target sequence for Kif21a (NM_016705.1,4023-4041).
cgacatcttatattaaggt

SEQ ID NO: 505510 - DNA, 19 bp, Mus musculus
  siRNA target sequence for Kif21a (NM_016705.1,4053-4071).
gagagtcagcaaaatgcat

SEQ ID NO: 505511 - DNA, 19 bp, Mus musculus
  siRNA target sequence for Kif21a (NM_016705.1,4069-4087).
cattcgaacattaacatct

SEQ ID NO: 505512 - DNA, 19 bp, Mus musculus
  siRNA target sequence for Kif21a (NM_016705.1,4128-4146).
ccagccggacagtagctat

SEQ ID NO: 505513 - DNA, 19 bp, Mus musculus
  siRNA target sequence for Kif21a (NM_016705.1,4129-4147).
cagccggacagtagctatt

SEQ ID NO: 505514 - DNA, 19 bp, Mus musculus
  siRNA target sequence for Kif21a (NM_016705.1,4153-4171).
cggggagagccagatcaat

SEQ ID NO: 505515 - DNA, 19 bp, Mus musculus
  siRNA target sequence for Kif21a (NM_016705.1,4155-4173).
gggagagccagatcaatca

SEQ ID NO: 505516 - DNA, 19 bp, Mus musculus
  siRNA target sequence for Kif21a (NM_016705.1,4156-4174).
ggagagccagatcaatcaa

SEQ ID NO: 505517 - DNA, 19 bp, Mus musculus
  siRNA target sequence for Kif21a (NM_016705.1,4157-4175).
gagagccagatcaatcaaa

SEQ ID NO: 505518 - DNA, 19 bp, Mus musculus
  siRNA target sequence for Kif21a (NM_016705.1,4162-4180).
ccagatcaatcaaattgca

SEQ ID NO: 505519 - DNA, 19 bp, Mus musculus
  siRNA target sequence for Kif21a (NM_016705.1,4215-4233).
ctggaaatgccgtcagaat

SEQ ID NO: 505520 - DNA, 19 bp, Mus musculus
  siRNA target sequence for Kif21a (NM_016705.1,4217-4235).
ggaaatgccgtcagaatgt

SEQ ID NO: 505521 - DNA, 19 bp, Mus musculus
  siRNA target sequence for Kif21a (NM_016705.1,4238-4256).
gaccttaaaaggtttcagt

SEQ ID NO: 505522 - DNA, 19 bp, Mus musculus
  siRNA target sequence for Kif21a (NM_016705.1,4275-4293).
gacacctgggtcctgttat

SEQ ID NO: 505523 - DNA, 19 bp, Mus musculus
  siRNA target sequence for Kif21a (NM_016705.1,4333-4351).
catcatcactggctcaaaa

SEQ ID NO: 505524 - DNA, 19 bp, Mus musculus
  siRNA target sequence for Kif21a (NM_016705.1,4344-4362).
gctcaaaagaccactacat

SEQ ID NO: 505525 - DNA, 19 bp, Mus musculus
  siRNA target sequence for Kif21a (NM_016705.1,4347-4365).
caaaagaccactacatcaa

SEQ ID NO: 505526 - DNA, 19 bp, Mus musculus
  siRNA target sequence for Kif21a (NM_016705.1,4352-4370).
gaccactacatcaaaatgt

SEQ ID NO: 505527 - DNA, 19 bp, Mus musculus
  siRNA target sequence for Kif21a (NM_016705.1,4385-4403).
ggggctcttggaactgtaa

SEQ ID NO: 505528 - DNA, 19 bp, Mus musculus
  siRNA target sequence for Kif21a (NM_016705.1,4417-4435).
cttcgagcctcctcattat

SEQ ID NO: 505529 - DNA, 19 bp, Mus musculus
  siRNA target sequence for Kif21a (NM_016705.1,4420-4438).
cgagcctcctcattatgat

SEQ ID NO: 505530 - DNA, 19 bp, Mus musculus
  siRNA target sequence for Kif21a (NM_016705.1,4455-4473).
ccattcaaggcgataacct

SEQ ID NO: 505531 - DNA, 19 bp, Mus musculus
  siRNA target sequence for Kif21a (NM_016705.1,4456-4474).
cattcaaggcgataaccta

SEQ ID NO: 505532 - DNA, 19 bp, Mus musculus
  siRNA target sequence for Kif21a (NM_016705.1,4460-4478).
caaggcgataacctattca

SEQ ID NO: 505533 - DNA, 19 bp, Mus musculus
  siRNA target sequence for Kif21a (NM_016705.1,4587-4605).
caggccatccggttttgct

SEQ ID NO: 505534 - DNA, 19 bp, Mus musculus
  siRNA target sequence for Kif21a (NM_016705.1,4617-4635).
gaggcggcattctgaaact

SEQ ID NO: 505535 - DNA, 19 bp, Mus musculus
  siRNA target sequence for Kif21a (NM_016705.1,4739-4757).
gatcgaaccgtgagaatct

SEQ ID NO: 505536 - DNA, 19 bp, Mus musculus
  siRNA target sequence for Kif21b (NM_019962.1,353-371).
gctgtcaaaggagaagatt

SEQ ID NO: 505537 - DNA, 19 bp, Mus musculus
  siRNA target sequence for Kif21b (NM_019962.1,473-491).
ctggcaggagcaaatctat

SEQ ID NO: 505538 - DNA, 19 bp, Mus musculus
  siRNA target sequence for Kif21b (NM_019962.1,477-495).
caggagcaaatctattcga

SEQ ID NO: 505539 - DNA, 19 bp, Mus musculus
  siRNA target sequence for Kif21b (NM_019962.1,496-514).
cctgtgtgagcaaactcat

SEQ ID NO: 505540 - DNA, 19 bp, Mus musculus
  siRNA target sequence for Kif21b (NM_019962.1,520-538).
gctgctttgagggctataa

SEQ ID NO: 505541 - DNA, 19 bp, Mus musculus
  siRNA target sequence for Kif21b (NM_019962.1,521-539).
ctgctttgagggctataat

SEQ ID NO: 505542 - DNA, 19 bp, Mus musculus
  siRNA target sequence for Kif21b (NM_019962.1,643-661).
gggccattgcacatctctt

SEQ ID NO: 505543 - DNA, 19 bp, Mus musculus
  siRNA target sequence for Kif21b (NM_019962.1,709-727).
ctgggcctgagttcaaagt

SEQ ID NO: 505544 - DNA, 19 bp, Mus musculus
  siRNA target sequence for Kif21b (NM_019962.1,1093-1111).
ctctcactgctaagtttca

SEQ ID NO: 505545 - DNA, 19 bp, Mus musculus
  siRNA target sequence for Kif21b (NM_019962.1,1348-1366).
cctcggatcgggacttcat

SEQ ID NO: 505546 - DNA, 19 bp, Mus musculus
  siRNA target sequence for Kif21b (NM_019962.1,1370-1388).
gacacttaacactctcaaa

SEQ ID NO: 505547 - DNA, 19 bp, Mus musculus
  siRNA target sequence for Kif21b (NM_019962.1,1726-1744).
gtgctctgatccagaacta

SEQ ID NO: 505548 - DNA, 19 bp, Mus musculus
  siRNA target sequence for Kif21b (NM_019962.1,1729-1747).
ctctgatccagaactacat

SEQ ID NO: 505549 - DNA, 19 bp, Mus musculus
  siRNA target sequence for Kif21b (NM_019962.1,2166-2184).
gactccgaccctgaagaaa

SEQ ID NO: 505550 - DNA, 19 bp, Mus musculus
  siRNA target sequence for Kif21b (NM_019962.1,2221-2239).
cgtgtgagatcgagatcaa

SEQ ID NO: 505551 - DNA, 19 bp, Mus musculus
  siRNA target sequence for Kif21b (NM_019962.1,2414-2432).
caagataaaggcagattat

SEQ ID NO: 505552 - DNA, 19 bp, Mus musculus
  siRNA target sequence for Kif21b (NM_019962.1,2471-2489).
gctacaggctgctcaaaaa

SEQ ID NO: 505553 - DNA, 19 bp, Mus musculus
  siRNA target sequence for Kif21b (NM_019962.1,2510-2528).
gaaccagtctcgctatgaa

SEQ ID NO: 505554 - DNA, 19 bp, Mus musculus
  siRNA target sequence for Kif21b (NM_019962.1,2551-2569).
cggaggtagctgagatgaa

SEQ ID NO: 505555 - DNA, 19 bp, Mus musculus
  siRNA target sequence for Kif21b (NM_019962.1,2575-2593).
ccaaggtagccctcatgaa

SEQ ID NO: 505556 - DNA, 19 bp, Mus musculus
  siRNA target sequence for Kif21b (NM_019962.1,2580-2598).
gtagccctcatgaagcaaa

SEQ ID NO: 505557 - DNA, 19 bp, Mus musculus
  siRNA target sequence for Kif21b (NM_019962.1,2714-2732).
gaagcgccagcaggaaata

SEQ ID NO: 505558 - DNA, 19 bp, Mus musculus
  siRNA target sequence for Kif21b (NM_019962.1,2803-2821).
ctgggcgtgtaggattgaa

SEQ ID NO: 505559 - DNA, 19 bp, Mus musculus
  siRNA target sequence for Kif21b (NM_019962.1,2954-2972).
ccccaccgccactgtcaat

SEQ ID NO: 505560 - DNA, 19 bp, Mus musculus
  siRNA target sequence for Kif21b (NM_019962.1,2980-2998).
gcccagccaggaaaaagtt

SEQ ID NO: 505561 - DNA, 19 bp, Mus musculus
  siRNA target sequence for Kif21b (NM_019962.1,3056-3074).
cctggaacggaggatcatt

SEQ ID NO: 505562 - DNA, 19 bp, Mus musculus
  siRNA target sequence for Kif21b (NM_019962.1,3060-3078).
gaacggaggatcattgaca

SEQ ID NO: 505563 - DNA, 19 bp, Mus musculus
  siRNA target sequence for Kif21b (NM_019962.1,3067-3085).
ggatcattgacattgtcat

SEQ ID NO: 505564 - DNA, 19 bp, Mus musculus
  siRNA target sequence for Kif21b (NM_019962.1,3117-3135).
gatatggagcgtctcataa

SEQ ID NO: 505565 - DNA, 19 bp, Mus musculus
  siRNA target sequence for Kif21b (NM_019962.1,3122-3140).
ggagcgtctcataaagaaa

SEQ ID NO: 505566 - DNA, 19 bp, Mus musculus
  siRNA target sequence for Kif21b (NM_019962.1,3259-3277).
cagccaatattgactacat

SEQ ID NO: 505567 - DNA, 19 bp, Mus musculus
  siRNA target sequence for Kif21b (NM_019962.1,3351-3369).
gacacgtcagtggtcatta

SEQ ID NO: 505568 - DNA, 19 bp, Mus musculus
  siRNA target sequence for Kif21b (NM_019962.1,3688-3706).
gccacgatgacttcaagtt

SEQ ID NO: 505569 - DNA, 19 bp, Mus musculus
  siRNA target sequence for Kif21b (NM_019962.1,3808-3826).
cctccctcgttgagatcaa

SEQ ID NO: 505570 - DNA, 19 bp, Mus musculus
  siRNA target sequence for Kif21b (NM_019962.1,3811-3829).
ccctcgttgagatcaaaga

SEQ ID NO: 505571 - DNA, 19 bp, Mus musculus
  siRNA target sequence for Kif21b (NM_019962.1,3954-3972).
cttacccgaaggaagtctt

SEQ ID NO: 505572 - DNA, 19 bp, Mus musculus
  siRNA target sequence for Kif21b (NM_019962.1,4068-4086).
cgtctcaccagcaatcaga

SEQ ID NO: 505573 - DNA, 19 bp, Mus musculus
  siRNA target sequence for Kif21b (NM_019962.1,4140-4158).
gtcctgaggggcatcatca

SEQ ID NO: 505574 - DNA, 19 bp, Mus musculus
  siRNA target sequence for Kif21b (NM_019962.1,4265-4283).
gcttttcacgggatccaaa

SEQ ID NO: 505575 - DNA, 19 bp, Mus musculus
  siRNA target sequence for Kif21b (NM_019962.1,4284-4302).
gaccgtagctgcaagatgt

SEQ ID NO: 505576 - DNA, 19 bp, Mus musculus
  siRNA target sequence for Kif21b (NM_019962.1,4347-4365).
cccaacaacgtggtttcta

SEQ ID NO: 505577 - DNA, 19 bp, Mus musculus
  siRNA target sequence for Kif21b (NM_019962.1,4348-4366).
ccaacaacgtggtttctat

SEQ ID NO: 505578 - DNA, 19 bp, Mus musculus
  siRNA target sequence for Kif21b (NM_019962.1,4352-4370).
caacgtggtttctatcaaa

SEQ ID NO: 505579 - DNA, 19 bp, Mus musculus
  siRNA target sequence for Kif21b (NM_019962.1,4356-4374).
gtggtttctatcaaatact

SEQ ID NO: 505580 - DNA, 19 bp, Mus musculus
  siRNA target sequence for Kif21b (NM_019962.1,4569-4587).
ccctcaggctccatgctat

SEQ ID NO: 505581 - DNA, 19 bp, Mus musculus
  siRNA target sequence for Kif21b (NM_019962.1,4573-4591).
caggctccatgctatacgt

SEQ ID NO: 505582 - DNA, 19 bp, Mus musculus
  siRNA target sequence for Kif21b (NM_019962.1,4786-4804).
gcccaacccacaactttga

SEQ ID NO: 505583 - DNA, 19 bp, Mus musculus
  siRNA target sequence for Kif21b (NM_019962.1,4807-4825).
cccctcactatgatggtat

SEQ ID NO: 505584 - DNA, 19 bp, Mus musculus
  siRNA target sequence for Kif21b (NM_019962.1,4808-4826).
ccctcactatgatggtatt

SEQ ID NO: 505585 - DNA, 19 bp, Mus musculus
  siRNA target sequence for Kif21b (NM_019962.1,4810-4828).
ctcactatgatggtattga

SEQ ID NO: 505586 - DNA, 19 bp, Mus musculus
  siRNA target sequence for Kif21b (NM_019962.1,4949-4967).
gtgcgccctggcctttgta

SEQ ID NO: 505587 - DNA, 19 bp, Mus musculus
  siRNA target sequence for Kif21b (NM_019962.1,5089-5107).
ccaacagcaagcacatctt

SEQ ID NO: 505588 - DNA, 19 bp, Mus musculus
  siRNA target sequence for Kif21b (NM_019962.1,5119-5137).
gtgactgccgggtaaagct

SEQ ID NO: 505589 - DNA, 19 bp, Mus musculus
  siRNA target sequence for Kif21b (NM_019962.1,5127-5145).
cgggtaaagctgtggaatt

SEQ ID NO: 505590 - DNA, 19 bp, Mus musculus
  siRNA target sequence for Kif21b (NM_019962.1,5176-5194).
gacgagtcctggccataaa

SEQ ID NO: 505591 - DNA, 19 bp, Mus musculus
  siRNA target sequence for Kif21b (NM_019962.1,5278-5296).
gatctgagctgcttcttca

SEQ ID NO: 505592 - DNA, 19 bp, Mus musculus
  siRNA target sequence for Kif23 (NM_024245.3,150-168).
ggctaagacggtcagaaaa

SEQ ID NO: 505593 - DNA, 19 bp, Mus musculus
  siRNA target sequence for Kif23 (NM_024245.3,184-202).
ggatctcagacaaacctta

SEQ ID NO: 505594 - DNA, 19 bp, Mus musculus
  siRNA target sequence for Kif23 (NM_024245.3,185-203).
gatctcagacaaaccttaa

SEQ ID NO: 505595 - DNA, 19 bp, Mus musculus
  siRNA target sequence for Kif23 (NM_024245.3,208-226).
ccagtgggggtgtactgta

SEQ ID NO: 505596 - DNA, 19 bp, Mus musculus
  siRNA target sequence for Kif23 (NM_024245.3,268-286).
gaagtgatcaatagtacaa

SEQ ID NO: 505597 - DNA, 19 bp, Mus musculus
  siRNA target sequence for Kif23 (NM_024245.3,310-328).
ggctatcgactcaacagaa

SEQ ID NO: 505598 - DNA, 19 bp, Mus musculus
  siRNA target sequence for Kif23 (NM_024245.3,312-330).
ctatcgactcaacagaaat

SEQ ID NO: 505599 - DNA, 19 bp, Mus musculus
  siRNA target sequence for Kif23 (NM_024245.3,326-344).
gaaatggggactataagga

SEQ ID NO: 505600 - DNA, 19 bp, Mus musculus
  siRNA target sequence for Kif23 (NM_024245.3,343-361).
gagactcagtactcattca

SEQ ID NO: 505601 - DNA, 19 bp, Mus musculus
  siRNA target sequence for Kif23 (NM_024245.3,393-411).
ggaactttttgatgttgta

SEQ ID NO: 505602 - DNA, 19 bp, Mus musculus
  siRNA target sequence for Kif23 (NM_024245.3,423-441).
ggtagatgacctcattcat

SEQ ID NO: 505603 - DNA, 19 bp, Mus musculus
  siRNA target sequence for Kif23 (NM_024245.3,432-450).
cctcattcatggcaagaat

SEQ ID NO: 505604 - DNA, 19 bp, Mus musculus
  siRNA target sequence for Kif23 (NM_024245.3,471-489).
cgtgacgggaagtggaaaa

SEQ ID NO: 505605 - DNA, 19 bp, Mus musculus
  siRNA target sequence for Kif23 (NM_024245.3,484-502).
ggaaaaacctacacaatga

SEQ ID NO: 505606 - DNA, 19 bp, Mus musculus
  siRNA target sequence for Kif23 (NM_024245.3,528-546).
gcttcctcgttgtttgaat

SEQ ID NO: 505607 - DNA, 19 bp, Mus musculus
  siRNA target sequence for Kif23 (NM_024245.3,532-550).
cctcgttgtttgaatatga

SEQ ID NO: 505608 - DNA, 19 bp, Mus musculus
  siRNA target sequence for Kif23 (NM_024245.3,533-551).
ctcgttgtttgaatatgat

SEQ ID NO: 505609 - DNA, 19 bp, Mus musculus
  siRNA target sequence for Kif23 (NM_024245.3,558-576).
cagcatagggtcatttcaa

SEQ ID NO: 505610 - DNA, 19 bp, Mus musculus
  siRNA target sequence for Kif23 (NM_024245.3,567-585).
gtcatttcaagcaaaacgt

SEQ ID NO: 505611 - DNA, 19 bp, Mus musculus
  siRNA target sequence for Kif23 (NM_024245.3,569-587).
catttcaagcaaaacgtta

SEQ ID NO: 505612 - DNA, 19 bp, Mus musculus
  siRNA target sequence for Kif23 (NM_024245.3,577-595).
gcaaaacgttatgtgttta

SEQ ID NO: 505613 - DNA, 19 bp, Mus musculus
  siRNA target sequence for Kif23 (NM_024245.3,599-617).
ctaatgataggaacagtat

SEQ ID NO: 505614 - DNA, 19 bp, Mus musculus
  siRNA target sequence for Kif23 (NM_024245.3,712-730).
ccagagtttgcagatatga

SEQ ID NO: 505615 - DNA, 19 bp, Mus musculus
  siRNA target sequence for Kif23 (NM_024245.3,713-731).
cagagtttgcagatatgat

SEQ ID NO: 505616 - DNA, 19 bp, Mus musculus
  siRNA target sequence for Kif23 (NM_024245.3,774-792).
cagtgtctatggagtattt

SEQ ID NO: 505617 - DNA, 19 bp, Mus musculus
  siRNA target sequence for Kif23 (NM_024245.3,795-813).
ctcttacattgaaatctat

SEQ ID NO: 505618 - DNA, 19 bp, Mus musculus
  siRNA target sequence for Kif23 (NM_024245.3,801-819).
cattgaaatctataataat

SEQ ID NO: 505619 - DNA, 19 bp, Mus musculus
  siRNA target sequence for Kif23 (NM_024245.3,867-885).
caaactcccacaatctaaa

SEQ ID NO: 505620 - DNA, 19 bp, Mus musculus
  siRNA target sequence for Kif23 (NM_024245.3,887-905).
cgctccgagaagataagaa

SEQ ID NO: 505621 - DNA, 19 bp, Mus musculus
  siRNA target sequence for Kif23 (NM_024245.3,921-939).
ggcaggatgtacagaagta

SEQ ID NO: 505622 - DNA, 19 bp, Mus musculus
  siRNA target sequence for Kif23 (NM_024245.3,923-941).
caggatgtacagaagtaga

SEQ ID NO: 505623 - DNA, 19 bp, Mus musculus
  siRNA target sequence for Kif23 (NM_024245.3,1039-1057).
catagcgtgttcagcatta

SEQ ID NO: 505624 - DNA, 19 bp, Mus musculus
  siRNA target sequence for Kif23 (NM_024245.3,1043-1061).
gcgtgttcagcattaaact

SEQ ID NO: 505625 - DNA, 19 bp, Mus musculus
  siRNA target sequence for Kif23 (NM_024245.3,1044-1062).
cgtgttcagcattaaactt

SEQ ID NO: 505626 - DNA, 19 bp, Mus musculus
  siRNA target sequence for Kif23 (NM_024245.3,1092-1110).
caatgtcttacaggaaaaa

SEQ ID NO: 505627 - DNA, 19 bp, Mus musculus
  siRNA target sequence for Kif23 (NM_024245.3,1198-1216).
cgtgaggccggaaacatta

SEQ ID NO: 505628 - DNA, 19 bp, Mus musculus
  siRNA target sequence for Kif23 (NM_024245.3,1199-1217).
gtgaggccggaaacattaa

SEQ ID NO: 505629 - DNA, 19 bp, Mus musculus
  siRNA target sequence for Kif23 (NM_024245.3,1221-1239).
gtcattgatgacactaaga

SEQ ID NO: 505630 - DNA, 19 bp, Mus musculus
  siRNA target sequence for Kif23 (NM_024245.3,1271-1289).
cgtatggcactaacaagat

SEQ ID NO: 505631 - DNA, 19 bp, Mus musculus
  siRNA target sequence for Kif23 (NM_024245.3,1280-1298).
ctaacaagatggttccata

SEQ ID NO: 505632 - DNA, 19 bp, Mus musculus
  siRNA target sequence for Kif23 (NM_024245.3,1284-1302).
caagatggttccatatcga

SEQ ID NO: 505633 - DNA, 19 bp, Mus musculus
  siRNA target sequence for Kif23 (NM_024245.3,1291-1309).
gttccatatcgagattcaa

SEQ ID NO: 505634 - DNA, 19 bp, Mus musculus
  siRNA target sequence for Kif23 (NM_024245.3,1316-1334).
cccatctattcaagaacta

SEQ ID NO: 505635 - DNA, 19 bp, Mus musculus
  siRNA target sequence for Kif23 (NM_024245.3,1318-1336).
catctattcaagaactact

SEQ ID NO: 505636 - DNA, 19 bp, Mus musculus
  siRNA target sequence for Kif23 (NM_024245.3,1407-1425).
gcaagtcatgagatttgct

SEQ ID NO: 505637 - DNA, 19 bp, Mus musculus
  siRNA target sequence for Kif23 (NM_024245.3,1413-1431).
catgagatttgctgaagta

SEQ ID NO: 505638 - DNA, 19 bp, Mus musculus
  siRNA target sequence for Kif23 (NM_024245.3,1542-1560).
ggtgcctgaagtgattcta

SEQ ID NO: 505639 - DNA, 19 bp, Mus musculus
  siRNA target sequence for Kif23 (NM_024245.3,1580-1598).
ccccatgcaagcttttgga

SEQ ID NO: 505640 - DNA, 19 bp, Mus musculus
  siRNA target sequence for Kif23 (NM_024245.3,1581-1599).
cccatgcaagcttttggat

SEQ ID NO: 505641 - DNA, 19 bp, Mus musculus
  siRNA target sequence for Kif23 (NM_024245.3,1583-1601).
catgcaagcttttggatat

SEQ ID NO: 505642 - DNA, 19 bp, Mus musculus
  siRNA target sequence for Kif23 (NM_024245.3,1586-1604).
gcaagcttttggatatcaa

SEQ ID NO: 505643 - DNA, 19 bp, Mus musculus
  siRNA target sequence for Kif23 (NM_024245.3,1651-1669).
catcacctgcgacaactaa

SEQ ID NO: 505644 - DNA, 19 bp, Mus musculus
  siRNA target sequence for Kif23 (NM_024245.3,1654-1672).
cacctgcgacaactaatga

SEQ ID NO: 505645 - DNA, 19 bp, Mus musculus
  siRNA target sequence for Kif23 (NM_024245.3,1671-1689).
gaccgaggaccttaacaaa

SEQ ID NO: 505646 - DNA, 19 bp, Mus musculus
  siRNA target sequence for Kif23 (NM_024245.3,1673-1691).
ccgaggaccttaacaaaaa

SEQ ID NO: 505647 - DNA, 19 bp, Mus musculus
  siRNA target sequence for Kif23 (NM_024245.3,1674-1692).
cgaggaccttaacaaaaaa

SEQ ID NO: 505648 - DNA, 19 bp, Mus musculus
  siRNA target sequence for Kif23 (NM_024245.3,1677-1695).
ggaccttaacaaaaaatgt

SEQ ID NO: 505649 - DNA, 19 bp, Mus musculus
  siRNA target sequence for Kif23 (NM_024245.3,1680-1698).
ccttaacaaaaaatgtcta

SEQ ID NO: 505650 - DNA, 19 bp, Mus musculus
  siRNA target sequence for Kif23 (NM_024245.3,1699-1717).
gctttcaaggccttattaa

SEQ ID NO: 505651 - DNA, 19 bp, Mus musculus
  siRNA target sequence for Kif23 (NM_024245.3,1720-1738).
gaatttgacaattctctat

SEQ ID NO: 505652 - DNA, 19 bp, Mus musculus
  siRNA target sequence for Kif23 (NM_024245.3,1752-1770).
ctacgttcaggaaaaacta

SEQ ID NO: 505653 - DNA, 19 bp, Mus musculus
  siRNA target sequence for Kif23 (NM_024245.3,1786-1804).
gtgatctcgggacagaaat

SEQ ID NO: 505654 - DNA, 19 bp, Mus musculus
  siRNA target sequence for Kif23 (NM_024245.3,1793-1811).
cgggacagaaattggaaat

SEQ ID NO: 505655 - DNA, 19 bp, Mus musculus
  siRNA target sequence for Kif23 (NM_024245.3,1794-1812).
gggacagaaattggaaata

SEQ ID NO: 505656 - DNA, 19 bp, Mus musculus
  siRNA target sequence for Kif23 (NM_024245.3,1796-1814).
gacagaaattggaaataga

SEQ ID NO: 505657 - DNA, 19 bp, Mus musculus
  siRNA target sequence for Kif23 (NM_024245.3,1842-1860).
ggagtacaagattgagatt

SEQ ID NO: 505658 - DNA, 19 bp, Mus musculus
  siRNA target sequence for Kif23 (NM_024245.3,1857-1875).
gattctggagaaaacaact

SEQ ID NO: 505659 - DNA, 19 bp, Mus musculus
  siRNA target sequence for Kif23 (NM_024245.3,1866-1884).
gaaaacaactacgatctat

SEQ ID NO: 505660 - DNA, 19 bp, Mus musculus
  siRNA target sequence for Kif23 (NM_024245.3,1952-1970).
ctgacaagcgcagattaga

SEQ ID NO: 505661 - DNA, 19 bp, Mus musculus
  siRNA target sequence for Kif23 (NM_024245.3,2072-2090).
gggtcaaagatgaaaagct

SEQ ID NO: 505662 - DNA, 19 bp, Mus musculus
  siRNA target sequence for Kif23 (NM_024245.3,2155-2173).
cgggaccgggagaaaatca

SEQ ID NO: 505663 - DNA, 19 bp, Mus musculus
  siRNA target sequence for Kif23 (NM_024245.3,2156-2174).
gggaccgggagaaaatcat

SEQ ID NO: 505664 - DNA, 19 bp, Mus musculus
  siRNA target sequence for Kif23 (NM_024245.3,2157-2175).
ggaccgggagaaaatcatt

SEQ ID NO: 505665 - DNA, 19 bp, Mus musculus
  siRNA target sequence for Kif23 (NM_024245.3,2197-2215).
cctctacctctttctagta

SEQ ID NO: 505666 - DNA, 19 bp, Mus musculus
  siRNA target sequence for Kif23 (NM_024245.3,2198-2216).
ctctacctctttctagtaa

SEQ ID NO: 505667 - DNA, 19 bp, Mus musculus
  siRNA target sequence for Kif23 (NM_024245.3,2200-2218).
ctacctctttctagtaaca

SEQ ID NO: 505668 - DNA, 19 bp, Mus musculus
  siRNA target sequence for Kif23 (NM_024245.3,2234-2252).
ccaacggccagcaactcat

SEQ ID NO: 505669 - DNA, 19 bp, Mus musculus
  siRNA target sequence for Kif23 (NM_024245.3,2266-2284).
ctacacagacgctctaact

SEQ ID NO: 505670 - DNA, 19 bp, Mus musculus
  siRNA target sequence for Kif23 (NM_024245.3,2283-2301).
ctcttgcagcagcatttct

SEQ ID NO: 505671 - DNA, 19 bp, Mus musculus
  siRNA target sequence for Kif23 (NM_024245.3,2320-2338).
gaatgggagcagaaactat

SEQ ID NO: 505672 - DNA, 19 bp, Mus musculus
  siRNA target sequence for Kif23 (NM_024245.3,2472-2490).
cacattcagcagtgagata

SEQ ID NO: 505673 - DNA, 19 bp, Mus musculus
  siRNA target sequence for Kif23 (NM_024245.3,2564-2582).
gcagatgggtagatcataa

SEQ ID NO: 505674 - DNA, 19 bp, Mus musculus
  siRNA target sequence for Kif23 (NM_024245.3,2671-2689).
gctaagtgtgagaagtaca

SEQ ID NO: 505675 - DNA, 19 bp, Mus musculus
  siRNA target sequence for Kif23 (NM_024245.3,2672-2690).
ctaagtgtgagaagtacat

SEQ ID NO: 505676 - DNA, 19 bp, Mus musculus
  siRNA target sequence for Kif23 (NM_024245.3,2720-2738).
gggagattcagactaaagt

SEQ ID NO: 505677 - DNA, 19 bp, Mus musculus
  siRNA target sequence for Kif23 (NM_024245.3,2737-2755).
gtcattaagggtgatgttt

SEQ ID NO: 505678 - DNA, 19 bp, Mus musculus
  siRNA target sequence for Kif23 (NM_024245.3,2771-2789).
gcggacaatcggttcagtt

SEQ ID NO: 505679 - DNA, 19 bp, Mus musculus
  siRNA target sequence for Kif23 (NM_024245.3,2772-2790).
cggacaatcggttcagttt

SEQ ID NO: 505680 - DNA, 19 bp, Mus musculus
  siRNA target sequence for Kif23 (NM_024245.3,2781-2799).
ggttcagtttactgatatt

SEQ ID NO: 505681 - DNA, 19 bp, Mus musculus
  siRNA target sequence for Kif23 (NM_024245.3,2785-2803).
cagtttactgatattgaga

SEQ ID NO: 505682 - DNA, 19 bp, Mus musculus
  siRNA target sequence for Kif23 (NM_024245.3,2800-2818).
gagactttaaaacaagaat

SEQ ID NO: 505683 - DNA, 19 bp, Mus musculus
  siRNA target sequence for Kif23 (NM_024245.3,2885-2903).
ctgaatggaccgatgtaga

SEQ ID NO: 505684 - DNA, 19 bp, Mus musculus
  siRNA target sequence for Kif2a (NM_008442.1,665-683).
cctcgtcatcctcaaaagt

SEQ ID NO: 505685 - DNA, 19 bp, Mus musculus
  siRNA target sequence for Kif2a (NM_008442.1,666-684).
ctcgtcatcctcaaaagtt

SEQ ID NO: 505686 - DNA, 19 bp, Mus musculus
  siRNA target sequence for Kif2a (NM_008442.1,668-686).
cgtcatcctcaaaagttaa

SEQ ID NO: 505687 - DNA, 19 bp, Mus musculus
  siRNA target sequence for Kif2a (NM_008442.1,671-689).
catcctcaaaagttaacaa

SEQ ID NO: 505688 - DNA, 19 bp, Mus musculus
  siRNA target sequence for Kif2a (NM_008442.1,710-728).
ctgtggcagctgttaagaa

SEQ ID NO: 505689 - DNA, 19 bp, Mus musculus
  siRNA target sequence for Kif2a (NM_008442.1,730-748).
gaccctcccccgagagata

SEQ ID NO: 505690 - DNA, 19 bp, Mus musculus
  siRNA target sequence for Kif2a (NM_008442.1,733-751).
cctcccccgagagataata

SEQ ID NO: 505691 - DNA, 19 bp, Mus musculus
  siRNA target sequence for Kif2a (NM_008442.1,737-755).
ccccgagagataatagagt

SEQ ID NO: 505692 - DNA, 19 bp, Mus musculus
  siRNA target sequence for Kif2a (NM_008442.1,816-834).
gaatggtagcgtttcagat

SEQ ID NO: 505693 - DNA, 19 bp, Mus musculus
  siRNA target sequence for Kif2a (NM_008442.1,820-838).
ggtagcgtttcagatatat

SEQ ID NO: 505694 - DNA, 19 bp, Mus musculus
  siRNA target sequence for Kif2a (NM_008442.1,870-888).
ccctccttcacgtagaaaa

SEQ ID NO: 505695 - DNA, 19 bp, Mus musculus
  siRNA target sequence for Kif2a (NM_008442.1,871-889).
cctccttcacgtagaaaat

SEQ ID NO: 505696 - DNA, 19 bp, Mus musculus
  siRNA target sequence for Kif2a (NM_008442.1,874-892).
ccttcacgtagaaaatcca

SEQ ID NO: 505697 - DNA, 19 bp, Mus musculus
  siRNA target sequence for Kif2a (NM_008442.1,875-893).
cttcacgtagaaaatccaa

SEQ ID NO: 505698 - DNA, 19 bp, Mus musculus
  siRNA target sequence for Kif2a (NM_008442.1,881-899).
gtagaaaatccaattgtgt

SEQ ID NO: 505699 - DNA, 19 bp, Mus musculus
  siRNA target sequence for Kif2a (NM_008442.1,941-959).
gattgcaacagcaagaact

SEQ ID NO: 505700 - DNA, 19 bp, Mus musculus
  siRNA target sequence for Kif2a (NM_008442.1,945-963).
gcaacagcaagaacttaga

SEQ ID NO: 505701 - DNA, 19 bp, Mus musculus
  siRNA target sequence for Kif2a (NM_008442.1,989-1007).
ctacaaatccaaattacga

SEQ ID NO: 505702 - DNA, 19 bp, Mus musculus
  siRNA target sequence for Kif2a (NM_008442.1,992-1010).
caaatccaaattacgaaat

SEQ ID NO: 505703 - DNA, 19 bp, Mus musculus
  siRNA target sequence for Kif2a (NM_008442.1,1006-1024).
gaaattatgtgtatgatca

SEQ ID NO: 505704 - DNA, 19 bp, Mus musculus
  siRNA target sequence for Kif2a (NM_008442.1,1045-1063).
gattacagacccctaacaa

SEQ ID NO: 505705 - DNA, 19 bp, Mus musculus
  siRNA target sequence for Kif2a (NM_008442.1,1106-1124).
gaaaacgaccactcaataa

SEQ ID NO: 505706 - DNA, 19 bp, Mus musculus
  siRNA target sequence for Kif2a (NM_008442.1,1155-1173).
gatcacaatccctagtaaa

SEQ ID NO: 505707 - DNA, 19 bp, Mus musculus
  siRNA target sequence for Kif2a (NM_008442.1,1158-1176).
cacaatccctagtaaagat

SEQ ID NO: 505708 - DNA, 19 bp, Mus musculus
  siRNA target sequence for Kif2a (NM_008442.1,1166-1184).
ctagtaaagatgttgtgat

SEQ ID NO: 505709 - DNA, 19 bp, Mus musculus
  siRNA target sequence for Kif2a (NM_008442.1,1186-1204).
gtccacgaacccaaacaga

SEQ ID NO: 505710 - DNA, 19 bp, Mus musculus
  siRNA target sequence for Kif2a (NM_008442.1,1188-1206).
ccacgaacccaaacagaaa

SEQ ID NO: 505711 - DNA, 19 bp, Mus musculus
  siRNA target sequence for Kif2a (NM_008442.1,1196-1214).
ccaaacagaaagtagactt

SEQ ID NO: 505712 - DNA, 19 bp, Mus musculus
  siRNA target sequence for Kif2a (NM_008442.1,1197-1215).
caaacagaaagtagactta

SEQ ID NO: 505713 - DNA, 19 bp, Mus musculus
  siRNA target sequence for Kif2a (NM_008442.1,1201-1219).
cagaaagtagacttaacaa

SEQ ID NO: 505714 - DNA, 19 bp, Mus musculus
  siRNA target sequence for Kif2a (NM_008442.1,1212-1230).
cttaacaaggtacttagaa

SEQ ID NO: 505715 - DNA, 19 bp, Mus musculus
  siRNA target sequence for Kif2a (NM_008442.1,1234-1252).
cagacatttcggtttgatt

SEQ ID NO: 505716 - DNA, 19 bp, Mus musculus
  siRNA target sequence for Kif2a (NM_008442.1,1260-1278).
cgatgactcagctcctaat

SEQ ID NO: 505717 - DNA, 19 bp, Mus musculus
  siRNA target sequence for Kif2a (NM_008442.1,1271-1289).
ctcctaatgaaatggttta

SEQ ID NO: 505718 - DNA, 19 bp, Mus musculus
  siRNA target sequence for Kif2a (NM_008442.1,1304-1322).
ggccactagtggaaacaat

SEQ ID NO: 505719 - DNA, 19 bp, Mus musculus
  siRNA target sequence for Kif2a (NM_008442.1,1338-1356).
ggctacgtgctttgcttat

SEQ ID NO: 505720 - DNA, 19 bp, Mus musculus
  siRNA target sequence for Kif2a (NM_008442.1,1424-1442).
ctaagggaatttatgcatt

SEQ ID NO: 505721 - DNA, 19 bp, Mus musculus
  siRNA target sequence for Kif2a (NM_008442.1,1428-1446).
gggaatttatgcattagca

SEQ ID NO: 505722 - DNA, 19 bp, Mus musculus
  siRNA target sequence for Kif2a (NM_008442.1,1445-1463).
cagctcgcgatgtcttttt

SEQ ID NO: 505723 - DNA, 19 bp, Mus musculus
  siRNA target sequence for Kif2a (NM_008442.1,1447-1465).
gctcgcgatgtctttttaa

SEQ ID NO: 505724 - DNA, 19 bp, Mus musculus
  siRNA target sequence for Kif2a (NM_008442.1,1448-1466).
ctcgcgatgtctttttaat

SEQ ID NO: 505725 - DNA, 19 bp, Mus musculus
  siRNA target sequence for Kif2a (NM_008442.1,1451-1469).
gcgatgtctttttaatgct

SEQ ID NO: 505726 - DNA, 19 bp, Mus musculus
  siRNA target sequence for Kif2a (NM_008442.1,1482-1500).
ctataagaaactagaactt

SEQ ID NO: 505727 - DNA, 19 bp, Mus musculus
  siRNA target sequence for Kif2a (NM_008442.1,1535-1553).
gaaaggtgtttgacttact

SEQ ID NO: 505728 - DNA, 19 bp, Mus musculus
  siRNA target sequence for Kif2a (NM_008442.1,1760-1778).
ggaaactacatggtaaatt

SEQ ID NO: 505729 - DNA, 19 bp, Mus musculus
  siRNA target sequence for Kif2a (NM_008442.1,1761-1779).
gaaactacatggtaaattt

SEQ ID NO: 505730 - DNA, 19 bp, Mus musculus
  siRNA target sequence for Kif2a (NM_008442.1,1849-1867).
gaaggtgctgaaattaata

SEQ ID NO: 505731 - DNA, 19 bp, Mus musculus
  siRNA target sequence for Kif2a (NM_008442.1,1898-1916).
gagccttaggtagaaacaa

SEQ ID NO: 505732 - DNA, 19 bp, Mus musculus
  siRNA target sequence for Kif2a (NM_008442.1,1956-1974).
gctgagagattccttcata

SEQ ID NO: 505733 - DNA, 19 bp, Mus musculus
  siRNA target sequence for Kif2a (NM_008442.1,2032-2050).
gaaaatactcttaatacgt

SEQ ID NO: 505734 - DNA, 19 bp, Mus musculus
  siRNA target sequence for Kif2a (NM_008442.1,2049-2067).
gttaagatatgcaaataga

SEQ ID NO: 505735 - DNA, 19 bp, Mus musculus
  siRNA target sequence for Kif2a (NM_008442.1,2068-2086).
gtaaaggagtttggaatta

SEQ ID NO: 505736 - DNA, 19 bp, Mus musculus
  siRNA target sequence for Kif2a (NM_008442.1,2136-2154).
ctctccttcttacgattat

SEQ ID NO: 505737 - DNA, 19 bp, Mus musculus
  siRNA target sequence for Kif2a (NM_008442.1,2138-2156).
ctccttcttacgattatga

SEQ ID NO: 505738 - DNA, 19 bp, Mus musculus
  siRNA target sequence for Kif2a (NM_008442.1,2148-2166).
cgattatgacgacttttct

SEQ ID NO: 505739 - DNA, 19 bp, Mus musculus
  siRNA target sequence for Kif2a (NM_008442.1,2171-2189).
caattaccagggtgaaaga

SEQ ID NO: 505740 - DNA, 19 bp, Mus musculus
  siRNA target sequence for Kif2a (NM_008442.1,2213-2231).
ctggcgatgtccatccaat

SEQ ID NO: 505741 - DNA, 19 bp, Mus musculus
  siRNA target sequence for Kif2a (NM_008442.1,2215-2233).
ggcgatgtccatccaataa

SEQ ID NO: 505742 - DNA, 19 bp, Mus musculus
  siRNA target sequence for Kif2a (NM_008442.1,2216-2234).
gcgatgtccatccaataat

SEQ ID NO: 505743 - DNA, 19 bp, Mus musculus
  siRNA target sequence for Kif2a (NM_008442.1,2243-2261).
caccgagccagattgatga

SEQ ID NO: 505744 - DNA, 19 bp, Mus musculus
  siRNA target sequence for Kif2a (NM_008442.1,2298-2316).
gagagatgatctaaaactt

SEQ ID NO: 505745 - DNA, 19 bp, Mus musculus
  siRNA target sequence for Kif2a (NM_008442.1,2300-2318).
gagatgatctaaaacttct

SEQ ID NO: 505746 - DNA, 19 bp, Mus musculus
  siRNA target sequence for Kif2a (NM_008442.1,2400-2418).
gcaggttgtggaagatcat

SEQ ID NO: 505747 - DNA, 19 bp, Mus musculus
  siRNA target sequence for Kif2a (NM_008442.1,2423-2441).
cagtgttccaggaatccat

SEQ ID NO: 505748 - DNA, 19 bp, Mus musculus
  siRNA target sequence for Kif2a (NM_008442.1,2438-2456).
ccattcgctggatagaaga

SEQ ID NO: 505749 - DNA, 19 bp, Mus musculus
  siRNA target sequence for Kif2a (NM_008442.1,2439-2457).
cattcgctggatagaagat

SEQ ID NO: 505750 - DNA, 19 bp, Mus musculus
  siRNA target sequence for Kif2a (NM_008442.1,2493-2511).
ctatgatgtagactcatat

SEQ ID NO: 505751 - DNA, 19 bp, Mus musculus
  siRNA target sequence for Kif2a (NM_008442.1,2497-2515).
gatgtagactcatatgcta

SEQ ID NO: 505752 - DNA, 19 bp, Mus musculus
  siRNA target sequence for Kif2a (NM_008442.1,2505-2523).
ctcatatgctacacaactt

SEQ ID NO: 505753 - DNA, 19 bp, Mus musculus
  siRNA target sequence for Kif2a (NM_008442.1,2507-2525).
catatgctacacaacttga

SEQ ID NO: 505754 - DNA, 19 bp, Mus musculus
  siRNA target sequence for Kif2a (NM_008442.1,2513-2531).
ctacacaacttgaagctat

SEQ ID NO: 505755 - DNA, 19 bp, Mus musculus
  siRNA target sequence for Kif2a (NM_008442.1,2527-2545).
gctattcttgagcaaaaaa

SEQ ID NO: 505756 - DNA, 19 bp, Mus musculus
  siRNA target sequence for Kif2a (NM_008442.1,2558-2576).
ctgagttacgagataaagt

SEQ ID NO: 505757 - DNA, 19 bp, Mus musculus
  siRNA target sequence for Kif2a (NM_008442.1,2560-2578).
gagttacgagataaagtga

SEQ ID NO: 505758 - DNA, 19 bp, Mus musculus
  siRNA target sequence for Kif2a (NM_008442.1,2562-2580).
gttacgagataaagtgaaa

SEQ ID NO: 505759 - DNA, 19 bp, Mus musculus
  siRNA target sequence for Kif2c (NM_134471.2,171-189).
gtggagaaatcctgtgttt

SEQ ID NO: 505760 - DNA, 19 bp, Mus musculus
  siRNA target sequence for Kif2c (NM_134471.2,184-202).
gtgtttcggtggaatggat

SEQ ID NO: 505761 - DNA, 19 bp, Mus musculus
  siRNA target sequence for Kif2c (NM_134471.2,203-221).
cgaaggaggtaccacaaaa

SEQ ID NO: 505762 - DNA, 19 bp, Mus musculus
  siRNA target sequence for Kif2c (NM_134471.2,240-258).
gacgatgtggctgcaataa

SEQ ID NO: 505763 - DNA, 19 bp, Mus musculus
  siRNA target sequence for Kif2c (NM_134471.2,301-319).
gtctgccactgcaggaaaa

SEQ ID NO: 505764 - DNA, 19 bp, Mus musculus
  siRNA target sequence for Kif2c (NM_134471.2,305-323).
gccactgcaggaaaacgta

SEQ ID NO: 505765 - DNA, 19 bp, Mus musculus
  siRNA target sequence for Kif2c (NM_134471.2,306-324).
ccactgcaggaaaacgtaa

SEQ ID NO: 505766 - DNA, 19 bp, Mus musculus
  siRNA target sequence for Kif2c (NM_134471.2,321-339).
gtaacggtcccgaagcaaa

SEQ ID NO: 505767 - DNA, 19 bp, Mus musculus
  siRNA target sequence for Kif2c (NM_134471.2,332-350).
gaagcaaaaacgcaaatca

SEQ ID NO: 505768 - DNA, 19 bp, Mus musculus
  siRNA target sequence for Kif2c (NM_134471.2,412-430).
ctgtctcagaagttcgaat

SEQ ID NO: 505769 - DNA, 19 bp, Mus musculus
  siRNA target sequence for Kif2c (NM_134471.2,464-482).
gcctgtgcctacaaactct

SEQ ID NO: 505770 - DNA, 19 bp, Mus musculus
  siRNA target sequence for Kif2c (NM_134471.2,535-553).
cagaattgccgttgttgat

SEQ ID NO: 505771 - DNA, 19 bp, Mus musculus
  siRNA target sequence for Kif2c (NM_134471.2,693-711).
cagaactcggagctaagaa

SEQ ID NO: 505772 - DNA, 19 bp, Mus musculus
  siRNA target sequence for Kif2c (NM_134471.2,695-713).
gaactcggagctaagaata

SEQ ID NO: 505773 - DNA, 19 bp, Mus musculus
  siRNA target sequence for Kif2c (NM_134471.2,753-771).
gaatttgcccggatgatca

SEQ ID NO: 505774 - DNA, 19 bp, Mus musculus
  siRNA target sequence for Kif2c (NM_134471.2,759-777).
gcccggatgatcaaagaat

SEQ ID NO: 505775 - DNA, 19 bp, Mus musculus
  siRNA target sequence for Kif2c (NM_134471.2,760-778).
cccggatgatcaaagaatt

SEQ ID NO: 505776 - DNA, 19 bp, Mus musculus
  siRNA target sequence for Kif2c (NM_134471.2,761-779).
ccggatgatcaaagaattt

SEQ ID NO: 505777 - DNA, 19 bp, Mus musculus
  siRNA target sequence for Kif2c (NM_134471.2,780-798).
cgggttactatggaatgta

SEQ ID NO: 505778 - DNA, 19 bp, Mus musculus
  siRNA target sequence for Kif2c (NM_134471.2,859-877).
gcccactgaataaacaaga

SEQ ID NO: 505779 - DNA, 19 bp, Mus musculus
  siRNA target sequence for Kif2c (NM_134471.2,860-878).
cccactgaataaacaagaa

SEQ ID NO: 505780 - DNA, 19 bp, Mus musculus
  siRNA target sequence for Kif2c (NM_134471.2,881-899).
ggccaagaaagaaatcgat

SEQ ID NO: 505781 - DNA, 19 bp, Mus musculus
  siRNA target sequence for Kif2c (NM_134471.2,887-905).
gaaagaaatcgatgtgatt

SEQ ID NO: 505782 - DNA, 19 bp, Mus musculus
  siRNA target sequence for Kif2c (NM_134471.2,981-999).
caagctttctgctttgact

SEQ ID NO: 505783 - DNA, 19 bp, Mus musculus
  siRNA target sequence for Kif2c (NM_134471.2,1013-1031).
gacagcttccaatgaagtt

SEQ ID NO: 505784 - DNA, 19 bp, Mus musculus
  siRNA target sequence for Kif2c (NM_134471.2,1018-1036).
cttccaatgaagttgtcta

SEQ ID NO: 505785 - DNA, 19 bp, Mus musculus
  siRNA target sequence for Kif2c (NM_134471.2,1223-1241).
gcctcggtaccggaactta

SEQ ID NO: 505786 - DNA, 19 bp, Mus musculus
  siRNA target sequence for Kif2c (NM_134471.2,1224-1242).
cctcggtaccggaacttaa

SEQ ID NO: 505787 - DNA, 19 bp, Mus musculus
  siRNA target sequence for Kif2c (NM_134471.2,1225-1243).
ctcggtaccggaacttaaa

SEQ ID NO: 505788 - DNA, 19 bp, Mus musculus
  siRNA target sequence for Kif2c (NM_134471.2,1228-1246).
ggtaccggaacttaaacct

SEQ ID NO: 505789 - DNA, 19 bp, Mus musculus
  siRNA target sequence for Kif2c (NM_134471.2,1774-1792).
cctgtgaatacaccttaaa

SEQ ID NO: 505790 - DNA, 19 bp, Mus musculus
  siRNA target sequence for Kif2c (NM_134471.2,1786-1804).
ccttaaacacgctgagata

SEQ ID NO: 505791 - DNA, 19 bp, Mus musculus
  siRNA target sequence for Kif3a (NM_008443.2,147-165).
gccggaaagctgcgataat

SEQ ID NO: 505792 - DNA, 19 bp, Mus musculus
  siRNA target sequence for Kif3a (NM_008443.2,149-167).
cggaaagctgcgataatgt

SEQ ID NO: 505793 - DNA, 19 bp, Mus musculus
  siRNA target sequence for Kif3a (NM_008443.2,207-225).
gaagtcaatgtgctataga

SEQ ID NO: 505794 - DNA, 19 bp, Mus musculus
  siRNA target sequence for Kif3a (NM_008443.2,229-247).
gccgtcagcgtggatgaaa

SEQ ID NO: 505795 - DNA, 19 bp, Mus musculus
  siRNA target sequence for Kif3a (NM_008443.2,230-248).
ccgtcagcgtggatgaaat

SEQ ID NO: 505796 - DNA, 19 bp, Mus musculus
  siRNA target sequence for Kif3a (NM_008443.2,244-262).
gaaatgaggggaactatca

SEQ ID NO: 505797 - DNA, 19 bp, Mus musculus
  siRNA target sequence for Kif3a (NM_008443.2,254-272).
gaactatcaccgtccataa

SEQ ID NO: 505798 - DNA, 19 bp, Mus musculus
  siRNA target sequence for Kif3a (NM_008443.2,285-303).
caacgaacctccaaagaca

SEQ ID NO: 505799 - DNA, 19 bp, Mus musculus
  siRNA target sequence for Kif3a (NM_008443.2,292-310).
cctccaaagacatttactt

SEQ ID NO: 505800 - DNA, 19 bp, Mus musculus
  siRNA target sequence for Kif3a (NM_008443.2,302-320).
catttactttcgatactgt

SEQ ID NO: 505801 - DNA, 19 bp, Mus musculus
  siRNA target sequence for Kif3a (NM_008443.2,335-353).
gtaaacaacttgatgtgta

SEQ ID NO: 505802 - DNA, 19 bp, Mus musculus
  siRNA target sequence for Kif3a (NM_008443.2,340-358).
caacttgatgtgtataact

SEQ ID NO: 505803 - DNA, 19 bp, Mus musculus
  siRNA target sequence for Kif3a (NM_008443.2,368-386).
gaccaattattgattctgt

SEQ ID NO: 505804 - DNA, 19 bp, Mus musculus
  siRNA target sequence for Kif3a (NM_008443.2,495-513).
caactcatttgctcacata

SEQ ID NO: 505805 - DNA, 19 bp, Mus musculus
  siRNA target sequence for Kif3a (NM_008443.2,539-557).
gcgacacaaggtttttggt

SEQ ID NO: 505806 - DNA, 19 bp, Mus musculus
  siRNA target sequence for Kif3a (NM_008443.2,540-558).
cgacacaaggtttttggtt

SEQ ID NO: 505807 - DNA, 19 bp, Mus musculus
  siRNA target sequence for Kif3a (NM_008443.2,620-638).
cccagaggttagaggttaa

SEQ ID NO: 505808 - DNA, 19 bp, Mus musculus
  siRNA target sequence for Kif3a (NM_008443.2,621-639).
ccagaggttagaggttaaa

SEQ ID NO: 505809 - DNA, 19 bp, Mus musculus
  siRNA target sequence for Kif3a (NM_008443.2,644-662).
ggcctgatgtgggagtata

SEQ ID NO: 505810 - DNA, 19 bp, Mus musculus
  siRNA target sequence for Kif3a (NM_008443.2,646-664).
cctgatgtgggagtatata

SEQ ID NO: 505811 - DNA, 19 bp, Mus musculus
  siRNA target sequence for Kif3a (NM_008443.2,655-673).
ggagtatatatcaaagact

SEQ ID NO: 505812 - DNA, 19 bp, Mus musculus
  siRNA target sequence for Kif3a (NM_008443.2,697-715).
gctgacgacatggatagaa

SEQ ID NO: 505813 - DNA, 19 bp, Mus musculus
  siRNA target sequence for Kif3a (NM_008443.2,698-716).
ctgacgacatggatagaat

SEQ ID NO: 505814 - DNA, 19 bp, Mus musculus
  siRNA target sequence for Kif3a (NM_008443.2,700-718).
gacgacatggatagaatca

SEQ ID NO: 505815 - DNA, 19 bp, Mus musculus
  siRNA target sequence for Kif3a (NM_008443.2,743-761).
ctgtcggtgcgactaatat

SEQ ID NO: 505816 - DNA, 19 bp, Mus musculus
  siRNA target sequence for Kif3a (NM_008443.2,745-763).
gtcggtgcgactaatatga

SEQ ID NO: 505817 - DNA, 19 bp, Mus musculus
  siRNA target sequence for Kif3a (NM_008443.2,786-804).
cgccatctttacaattact

SEQ ID NO: 505818 - DNA, 19 bp, Mus musculus
  siRNA target sequence for Kif3a (NM_008443.2,787-805).
gccatctttacaattacta

SEQ ID NO: 505819 - DNA, 19 bp, Mus musculus
  siRNA target sequence for Kif3a (NM_008443.2,789-807).
catctttacaattactata

SEQ ID NO: 505820 - DNA, 19 bp, Mus musculus
  siRNA target sequence for Kif3a (NM_008443.2,956-974).
ctaccctgggcaacgttat

SEQ ID NO: 505821 - DNA, 19 bp, Mus musculus
  siRNA target sequence for Kif3a (NM_008443.2,960-978).
cctgggcaacgttatttct

SEQ ID NO: 505822 - DNA, 19 bp, Mus musculus
  siRNA target sequence for Kif3a (NM_008443.2,1070-1088).
ccatgatgtgtgcaaatat

SEQ ID NO: 505823 - DNA, 19 bp, Mus musculus
  siRNA target sequence for Kif3a (NM_008443.2,1090-1108).
gggccagcagattataatt

SEQ ID NO: 505824 - DNA, 19 bp, Mus musculus
  siRNA target sequence for Kif3a (NM_008443.2,1091-1109).
ggccagcagattataatta

SEQ ID NO: 505825 - DNA, 19 bp, Mus musculus
  siRNA target sequence for Kif3a (NM_008443.2,1092-1110).
gccagcagattataattat

SEQ ID NO: 505826 - DNA, 19 bp, Mus musculus
  siRNA target sequence for Kif3a (NM_008443.2,1196-1214).
ctctgctccgccagtttca

SEQ ID NO: 505827 - DNA, 19 bp, Mus musculus
  siRNA target sequence for Kif3a (NM_008443.2,1198-1216).
ctgctccgccagtttcaga

SEQ ID NO: 505828 - DNA, 19 bp, Mus musculus
  siRNA target sequence for Kif3a (NM_008443.2,1200-1218).
gctccgccagtttcagaaa

SEQ ID NO: 505829 - DNA, 19 bp, Mus musculus
  siRNA target sequence for Kif3a (NM_008443.2,1785-1803).
gctgatggctgcaaagtca

SEQ ID NO: 505830 - DNA, 19 bp, Mus musculus
  siRNA target sequence for Kif3a (NM_008443.2,1877-1895).
gggagctccgtcttcagat

SEQ ID NO: 505831 - DNA, 19 bp, Mus musculus
  siRNA target sequence for Kif3a (NM_008443.2,1886-1904).
gtcttcagatgctcatcat

SEQ ID NO: 505832 - DNA, 19 bp, Mus musculus
  siRNA target sequence for Kif3a (NM_008443.2,1891-1909).
cagatgctcatcattgata

SEQ ID NO: 505833 - DNA, 19 bp, Mus musculus
  siRNA target sequence for Kif3a (NM_008443.2,1947-1965).
ctacgtccactggaatgaa

SEQ ID NO: 505834 - DNA, 19 bp, Mus musculus
  siRNA target sequence for Kif3a (NM_008443.2,1997-2015).
cctacacaggaaataacat

SEQ ID NO: 505835 - DNA, 19 bp, Mus musculus
  siRNA target sequence for Kif3a (NM_008443.2,2027-2045).
ctccagtccctgacaagaa

SEQ ID NO: 505836 - DNA, 19 bp, Mus musculus
  siRNA target sequence for Kif3a (NM_008443.2,2079-2097).
cgtgtacctcgcctataca

SEQ ID NO: 505837 - DNA, 19 bp, Mus musculus
  siRNA target sequence for Kif3a (NM_008443.2,2196-2214).
gcctgagaccgtaattgat

SEQ ID NO: 505838 - DNA, 19 bp, Mus musculus
  siRNA target sequence for Kif3a (NM_008443.2,2197-2215).
cctgagaccgtaattgatt

SEQ ID NO: 505839 - DNA, 19 bp, Mus musculus
  siRNA target sequence for Kif3a (NM_008443.2,2200-2218).
gagaccgtaattgattctt

SEQ ID NO: 505840 - DNA, 19 bp, Mus musculus
  siRNA target sequence for Kif3a (NM_008443.2,2205-2223).
cgtaattgattctttactt

SEQ ID NO: 505841 - DNA, 19 bp, Mus musculus
  siRNA target sequence for Kif3b (NM_008444.2,312-330).
caccttcgacgctgtgtat

SEQ ID NO: 505842 - DNA, 19 bp, Mus musculus
  siRNA target sequence for Kif3b (NM_008444.2,314-332).
ccttcgacgctgtgtatga

SEQ ID NO: 505843 - DNA, 19 bp, Mus musculus
  siRNA target sequence for Kif3b (NM_008444.2,315-333).
cttcgacgctgtgtatgat

SEQ ID NO: 505844 - DNA, 19 bp, Mus musculus
  siRNA target sequence for Kif3b (NM_008444.2,399-417).
gggtttcaatggcacaatt

SEQ ID NO: 505845 - DNA, 19 bp, Mus musculus
  siRNA target sequence for Kif3b (NM_008444.2,528-546).
catctctcgatctcagaat

SEQ ID NO: 505846 - DNA, 19 bp, Mus musculus
  siRNA target sequence for Kif3b (NM_008444.2,573-591).
cttagagatctatcaagaa

SEQ ID NO: 505847 - DNA, 19 bp, Mus musculus
  siRNA target sequence for Kif3b (NM_008444.2,652-670).
gatacaggagtgtatgtaa

SEQ ID NO: 505848 - DNA, 19 bp, Mus musculus
  siRNA target sequence for Kif3b (NM_008444.2,658-676).
ggagtgtatgtaaaggatt

SEQ ID NO: 505849 - DNA, 19 bp, Mus musculus
  siRNA target sequence for Kif3b (NM_008444.2,673-691).
gatttgtcttcttttgtca

SEQ ID NO: 505850 - DNA, 19 bp, Mus musculus
  siRNA target sequence for Kif3b (NM_008444.2,743-761).
ggtctgtcggtgctacaaa

SEQ ID NO: 505851 - DNA, 19 bp, Mus musculus
  siRNA target sequence for Kif3b (NM_008444.2,748-766).
gtcggtgctacaaacatga

SEQ ID NO: 505852 - DNA, 19 bp, Mus musculus
  siRNA target sequence for Kif3b (NM_008444.2,750-768).
cggtgctacaaacatgaat

SEQ ID NO: 505853 - DNA, 19 bp, Mus musculus
  siRNA target sequence for Kif3b (NM_008444.2,776-794).
gctcacggtcgcatgcaat

SEQ ID NO: 505854 - DNA, 19 bp, Mus musculus
  siRNA target sequence for Kif3b (NM_008444.2,779-797).
cacggtcgcatgcaatctt

SEQ ID NO: 505855 - DNA, 19 bp, Mus musculus
  siRNA target sequence for Kif3b (NM_008444.2,790-808).
gcaatctttgttatcacta

SEQ ID NO: 505856 - DNA, 19 bp, Mus musculus
  siRNA target sequence for Kif3b (NM_008444.2,791-809).
caatctttgttatcactat

SEQ ID NO: 505857 - DNA, 19 bp, Mus musculus
  siRNA target sequence for Kif3b (NM_008444.2,827-845).
gcctggatggtgaaaacca

SEQ ID NO: 505858 - DNA, 19 bp, Mus musculus
  siRNA target sequence for Kif3b (NM_008444.2,959-977).
ccgccttgggtaatgttat

SEQ ID NO: 505859 - DNA, 19 bp, Mus musculus
  siRNA target sequence for Kif3b (NM_008444.2,985-1003).
cttgtagatggcaaaagca

SEQ ID NO: 505860 - DNA, 19 bp, Mus musculus
  siRNA target sequence for Kif3b (NM_008444.2,996-1014).
caaaagcacccatattcca

SEQ ID NO: 505861 - DNA, 19 bp, Mus musculus
  siRNA target sequence for Kif3b (NM_008444.2,1002-1020).
cacccatattccatataga

SEQ ID NO: 505862 - DNA, 19 bp, Mus musculus
  siRNA target sequence for Kif3b (NM_008444.2,1004-1022).
cccatattccatatagaga

SEQ ID NO: 505863 - DNA, 19 bp, Mus musculus
  siRNA target sequence for Kif3b (NM_008444.2,1121-1139).
ccctgaccactctgagata

SEQ ID NO: 505864 - DNA, 19 bp, Mus musculus
  siRNA target sequence for Kif3b (NM_008444.2,1122-1140).
cctgaccactctgagatat

SEQ ID NO: 505865 - DNA, 19 bp, Mus musculus
  siRNA target sequence for Kif3b (NM_008444.2,1147-1165).
cgtgccaaaaacattaaga

SEQ ID NO: 505866 - DNA, 19 bp, Mus musculus
  siRNA target sequence for Kif3b (NM_008444.2,1239-1257).
ggcccagctggaaaaacgt

SEQ ID NO: 505867 - DNA, 19 bp, Mus musculus
  siRNA target sequence for Kif3b (NM_008444.2,1240-1258).
gcccagctggaaaaacgtt

SEQ ID NO: 505868 - DNA, 19 bp, Mus musculus
  siRNA target sequence for Kif3b (NM_008444.2,1560-1578).
gctgcttgtcggaggaaaa

SEQ ID NO: 505869 - DNA, 19 bp, Mus musculus
  siRNA target sequence for Kif3b (NM_008444.2,1563-1581).
gcttgtcggaggaaaaaat

SEQ ID NO: 505870 - DNA, 19 bp, Mus musculus
  siRNA target sequence for Kif3b (NM_008444.2,1595-1613).
caaacgaacagcagaagat

SEQ ID NO: 505871 - DNA, 19 bp, Mus musculus
  siRNA target sequence for Kif3b (NM_008444.2,1879-1897).
ctaaagctcaagcatctta

SEQ ID NO: 505872 - DNA, 19 bp, Mus musculus
  siRNA target sequence for Kif3b (NM_008444.2,1884-1902).
gctcaagcatcttattata

SEQ ID NO: 505873 - DNA, 19 bp, Mus musculus
  siRNA target sequence for Kif3b (NM_008444.2,1891-1909).
catcttattatagaaaact

SEQ ID NO: 505874 - DNA, 19 bp, Mus musculus
  siRNA target sequence for Kif3b (NM_008444.2,2068-2086).
gcacggatgtccatgatga

SEQ ID NO: 505875 - DNA, 19 bp, Mus musculus
  siRNA target sequence for Kif3b (NM_008444.2,2241-2259).
ggatgcctcatcctttgaa

SEQ ID NO: 505876 - DNA, 19 bp, Mus musculus
  siRNA target sequence for Kif3b (NM_008444.2,2245-2263).
gcctcatcctttgaaagta

SEQ ID NO: 505877 - DNA, 19 bp, Mus musculus
  siRNA target sequence for Kif3c (NM_008445.1,655-673).
cggtgaggcccctgataga

SEQ ID NO: 505878 - DNA, 19 bp, Mus musculus
  siRNA target sequence for Kif3c (NM_008445.1,657-675).
gtgaggcccctgatagact

SEQ ID NO: 505879 - DNA, 19 bp, Mus musculus
  siRNA target sequence for Kif3c (NM_008445.1,937-955).
ctgaaacaggggtctacat

SEQ ID NO: 505880 - DNA, 19 bp, Mus musculus
  siRNA target sequence for Kif3c (NM_008445.1,939-957).
gaaacaggggtctacatca

SEQ ID NO: 505881 - DNA, 19 bp, Mus musculus
  siRNA target sequence for Kif3c (NM_008445.1,1039-1057).
gcagcacccacatgaatga

SEQ ID NO: 505882 - DNA, 19 bp, Mus musculus
  siRNA target sequence for Kif3c (NM_008445.1,1117-1135).
ctgatggccaggatcatat

SEQ ID NO: 505883 - DNA, 19 bp, Mus musculus
  siRNA target sequence for Kif3c (NM_008445.1,1324-1342).
ccgccctgggcaatgtgat

SEQ ID NO: 505884 - DNA, 19 bp, Mus musculus
  siRNA target sequence for Kif3c (NM_008445.1,1696-1714).
cagaggggtccgtgattga

SEQ ID NO: 505885 - DNA, 19 bp, Mus musculus
  siRNA target sequence for Kif3c (NM_008445.1,1982-2000).
ggaaagcaagctactcatt

SEQ ID NO: 505886 - DNA, 19 bp, Mus musculus
  siRNA target sequence for Kif3c (NM_008445.1,2063-2081).
ggagattgcggaacagaaa

SEQ ID NO: 505887 - DNA, 19 bp, Mus musculus
  siRNA target sequence for Kif3c (NM_008445.1,2083-2101).
gccgtgaacgggaaatgca

SEQ ID NO: 505888 - DNA, 19 bp, Mus musculus
  siRNA target sequence for Kif3c (NM_008445.1,2139-2157).
ctacgtggtacctactcat

SEQ ID NO: 505889 - DNA, 19 bp, Mus musculus
  siRNA target sequence for Kif3c (NM_008445.1,2166-2184).
caggaggtggaagttaaaa

SEQ ID NO: 505890 - DNA, 19 bp, Mus musculus
  siRNA target sequence for Kif3c (NM_008445.1,2295-2313).
gagcagacccgggaactaa

SEQ ID NO: 505891 - DNA, 19 bp, Mus musculus
  siRNA target sequence for Kif3c (NM_008445.1,2423-2441).
ggtgccagctggagtgaat

SEQ ID NO: 505892 - DNA, 19 bp, Mus musculus
  siRNA target sequence for Kif3c (NM_008445.1,2424-2442).
gtgccagctggagtgaata

SEQ ID NO: 505893 - DNA, 19 bp, Mus musculus
  siRNA target sequence for Kif3c (NM_008445.1,2436-2454).
gtgaataacagccaaatga

SEQ ID NO: 505894 - DNA, 19 bp, Mus musculus
  siRNA target sequence for Kif3c (NM_008445.1,2453-2471).
gaagaagcgtccaacttct

SEQ ID NO: 505895 - DNA, 19 bp, Mus musculus
  siRNA target sequence for Kif3c (NM_008445.1,2579-2597).
gtccccaccggctatcttt

SEQ ID NO: 505896 - DNA, 19 bp, Mus musculus
  siRNA target sequence for Kif3c (NM_008445.1,2583-2601).
ccaccggctatctttgaga

SEQ ID NO: 505897 - DNA, 19 bp, Mus musculus
  siRNA target sequence for Kif3c (NM_008445.1,2683-2701).
gaccgtccacaactaaagt

SEQ ID NO: 505898 - DNA, 19 bp, Mus musculus
  siRNA target sequence for Kif5a (NM_008447.2,188-206).
gcggagactaacaacgaat

SEQ ID NO: 505899 - DNA, 19 bp, Mus musculus
  siRNA target sequence for Kif5a (NM_008447.2,290-308).
ggggacgacagcgtcatta

SEQ ID NO: 505900 - DNA, 19 bp, Mus musculus
  siRNA target sequence for Kif5a (NM_008447.2,291-309).
gggacgacagcgtcattat

SEQ ID NO: 505901 - DNA, 19 bp, Mus musculus
  siRNA target sequence for Kif5a (NM_008447.2,292-310).
ggacgacagcgtcattatt

SEQ ID NO: 505902 - DNA, 19 bp, Mus musculus
  siRNA target sequence for Kif5a (NM_008447.2,312-330).
ggggaaagccatatgtctt

SEQ ID NO: 505903 - DNA, 19 bp, Mus musculus
  siRNA target sequence for Kif5a (NM_008447.2,354-372).
ccactcaggagcaggttta

SEQ ID NO: 505904 - DNA, 19 bp, Mus musculus
  siRNA target sequence for Kif5a (NM_008447.2,403-421).
cgtccttgctggttacaat

SEQ ID NO: 505905 - DNA, 19 bp, Mus musculus
  siRNA target sequence for Kif5a (NM_008447.2,424-442).
cacaatcttcgcttatgga

SEQ ID NO: 505906 - DNA, 19 bp, Mus musculus
  siRNA target sequence for Kif5a (NM_008447.2,516-534).
ggatcgctcgagacatctt

SEQ ID NO: 505907 - DNA, 19 bp, Mus musculus
  siRNA target sequence for Kif5a (NM_008447.2,572-590).
cacattaaggtatcttact

SEQ ID NO: 505908 - DNA, 19 bp, Mus musculus
  siRNA target sequence for Kif5a (NM_008447.2,585-603).
cttacttcgagatttacct

SEQ ID NO: 505909 - DNA, 19 bp, Mus musculus
  siRNA target sequence for Kif5a (NM_008447.2,610-628).
gatccgtgaccttttggat

SEQ ID NO: 505910 - DNA, 19 bp, Mus musculus
  siRNA target sequence for Kif5a (NM_008447.2,1096-1114).
ctcgccgtccagctacaat

SEQ ID NO: 505911 - DNA, 19 bp, Mus musculus
  siRNA target sequence for Kif5a (NM_008447.2,1098-1116).
cgccgtccagctacaatga

SEQ ID NO: 505912 - DNA, 19 bp, Mus musculus
  siRNA target sequence for Kif5a (NM_008447.2,1291-1309).
gtggcgcaatggagagaat

SEQ ID NO: 505913 - DNA, 19 bp, Mus musculus
  siRNA target sequence for Kif5a (NM_008447.2,1293-1311).
ggcgcaatggagagaatgt

SEQ ID NO: 505914 - DNA, 19 bp, Mus musculus
  siRNA target sequence for Kif5a (NM_008447.2,1376-1394).
cctgtgaatgacaactcat

SEQ ID NO: 505915 - DNA, 19 bp, Mus musculus
  siRNA target sequence for Kif5a (NM_008447.2,1381-1399).
gaatgacaactcatccatt

SEQ ID NO: 505916 - DNA, 19 bp, Mus musculus
  siRNA target sequence for Kif5a (NM_008447.2,1877-1895).
gtgggcaacggcgagatta

SEQ ID NO: 505917 - DNA, 19 bp, Mus musculus
  siRNA target sequence for Kif5a (NM_008447.2,1881-1899).
gcaacggcgagattaagct

SEQ ID NO: 505918 - DNA, 19 bp, Mus musculus
  siRNA target sequence for Kif5a (NM_008447.2,1949-1967).
ctctacatcagcaagatca

SEQ ID NO: 505919 - DNA, 19 bp, Mus musculus
  siRNA target sequence for Kif5a (NM_008447.2,2051-2069).
ggtagggagctgtcatctt

SEQ ID NO: 505920 - DNA, 19 bp, Mus musculus
  siRNA target sequence for Kif5a (NM_008447.2,2106-2124).
gttcactcacggagtacat

SEQ ID NO: 505921 - DNA, 19 bp, Mus musculus
  siRNA target sequence for Kif5a (NM_008447.2,2197-2215).
ccaggcgcacgaaactgta

SEQ ID NO: 505922 - DNA, 19 bp, Mus musculus
  siRNA target sequence for Kif5a (NM_008447.2,2332-2350).
cctccgggatgagattaat

SEQ ID NO: 505923 - DNA, 19 bp, Mus musculus
  siRNA target sequence for Kif5a (NM_008447.2,2428-2446).
ctatgagaggctgaagaat

SEQ ID NO: 505924 - DNA, 19 bp, Mus musculus
  siRNA target sequence for Kif5a (NM_008447.2,2577-2595).
gcaagctgttcgttcaaga

SEQ ID NO: 505925 - DNA, 19 bp, Mus musculus
  siRNA target sequence for Kif5a (NM_008447.2,2599-2617).
cacgactcgagtcaagaaa

SEQ ID NO: 505926 - DNA, 19 bp, Mus musculus
  siRNA target sequence for Kif5a (NM_008447.2,2602-2620).
gactcgagtcaagaaaagt

SEQ ID NO: 505927 - DNA, 19 bp, Mus musculus
  siRNA target sequence for Kif5a (NM_008447.2,2638-2656).
ggacagtggggggattcat

SEQ ID NO: 505928 - DNA, 19 bp, Mus musculus
  siRNA target sequence for Kif5a (NM_008447.2,2639-2657).
gacagtggggggattcatt

SEQ ID NO: 505929 - DNA, 19 bp, Mus musculus
  siRNA target sequence for Kif5a (NM_008447.2,2701-2719).
gcttacaaaggttcacaaa

SEQ ID NO: 505930 - DNA, 19 bp, Mus musculus
  siRNA target sequence for Kif5a (NM_008447.2,2746-2764).
gcgttgtgagcttcctaaa

SEQ ID NO: 505931 - DNA, 19 bp, Mus musculus
  siRNA target sequence for Kif5a (NM_008447.2,2888-2906).
gaagccgtgcggtacaaga

SEQ ID NO: 505932 - DNA, 19 bp, Mus musculus
  siRNA target sequence for Kif5a (NM_008447.2,3070-3088).
gcctagctccacttcagat

SEQ ID NO: 505933 - DNA, 19 bp, Mus musculus
  siRNA target sequence for Kif5a (NM_008447.2,3071-3089).
cctagctccacttcagata

SEQ ID NO: 505934 - DNA, 19 bp, Mus musculus
  siRNA target sequence for Kif5a (NM_008447.2,3075-3093).
gctccacttcagatatgta

SEQ ID NO: 505935 - DNA, 19 bp, Mus musculus
  siRNA target sequence for Kif5a (NM_008447.2,3078-3096).
ccacttcagatatgtactt

SEQ ID NO: 505936 - DNA, 19 bp, Mus musculus
  siRNA target sequence for Kif5a (NM_008447.2,3146-3164).
gccaacatggacaatggaa

SEQ ID NO: 505937 - DNA, 19 bp, Mus musculus
  siRNA target sequence for Kif5b (NM_008448.1,291-309).
gacctctcaacgaatctga

SEQ ID NO: 505938 - DNA, 19 bp, Mus musculus
  siRNA target sequence for Kif5b (NM_008448.1,529-547).
ggagggtaaacttcatgat

SEQ ID NO: 505939 - DNA, 19 bp, Mus musculus
  siRNA target sequence for Kif5b (NM_008448.1,548-566).
ccagaaggcatgggaatta

SEQ ID NO: 505940 - DNA, 19 bp, Mus musculus
  siRNA target sequence for Kif5b (NM_008448.1,554-572).
ggcatgggaattattccaa

SEQ ID NO: 505941 - DNA, 19 bp, Mus musculus
  siRNA target sequence for Kif5b (NM_008448.1,561-579).
gaattattccaagaatagt

SEQ ID NO: 505942 - DNA, 19 bp, Mus musculus
  siRNA target sequence for Kif5b (NM_008448.1,573-591).
gaatagtgcaagatatttt

SEQ ID NO: 505943 - DNA, 19 bp, Mus musculus
  siRNA target sequence for Kif5b (NM_008448.1,614-632).
gaaaatttggaatttcata

SEQ ID NO: 505944 - DNA, 19 bp, Mus musculus
  siRNA target sequence for Kif5b (NM_008448.1,673-691).
ggacttgttagatgtttca

SEQ ID NO: 505945 - DNA, 19 bp, Mus musculus
  siRNA target sequence for Kif5b (NM_008448.1,674-692).
gacttgttagatgtttcaa

SEQ ID NO: 505946 - DNA, 19 bp, Mus musculus
  siRNA target sequence for Kif5b (NM_008448.1,781-799).
catggataccatagatgaa

SEQ ID NO: 505947 - DNA, 19 bp, Mus musculus
  siRNA target sequence for Kif5b (NM_008448.1,811-829).
cagacatgtcgcagttaca

SEQ ID NO: 505948 - DNA, 19 bp, Mus musculus
  siRNA target sequence for Kif5b (NM_008448.1,813-831).
gacatgtcgcagttacaaa

SEQ ID NO: 505949 - DNA, 19 bp, Mus musculus
  siRNA target sequence for Kif5b (NM_008448.1,815-833).
catgtcgcagttacaaata

SEQ ID NO: 505950 - DNA, 19 bp, Mus musculus
  siRNA target sequence for Kif5b (NM_008448.1,818-836).
gtcgcagttacaaatatga

SEQ ID NO: 505951 - DNA, 19 bp, Mus musculus
  siRNA target sequence for Kif5b (NM_008448.1,820-838).
cgcagttacaaatatgaat

SEQ ID NO: 505952 - DNA, 19 bp, Mus musculus
  siRNA target sequence for Kif5b (NM_008448.1,1152-1170).
ctccatcatcatacaatga

SEQ ID NO: 505953 - DNA, 19 bp, Mus musculus
  siRNA target sequence for Kif5b (NM_008448.1,1202-1220).
caaagggccaaaacaatta

SEQ ID NO: 505954 - DNA, 19 bp, Mus musculus
  siRNA target sequence for Kif5b (NM_008448.1,1222-1240).
gaacacagtctgtgtcaat

SEQ ID NO: 505955 - DNA, 19 bp, Mus musculus
  siRNA target sequence for Kif5b (NM_008448.1,1302-1320).
ctctacggaacactattca

SEQ ID NO: 505956 - DNA, 19 bp, Mus musculus
  siRNA target sequence for Kif5b (NM_008448.1,1323-1341).
ggctggaaaacgagctaaa

SEQ ID NO: 505957 - DNA, 19 bp, Mus musculus
  siRNA target sequence for Kif5b (NM_008448.1,1410-1428).
ccttcacagcggataaaga

SEQ ID NO: 505958 - DNA, 19 bp, Mus musculus
  siRNA target sequence for Kif5b (NM_008448.1,1411-1429).
cttcacagcggataaagat

SEQ ID NO: 505959 - DNA, 19 bp, Mus musculus
  siRNA target sequence for Kif5b (NM_008448.1,1414-1432).
cacagcggataaagatatt

SEQ ID NO: 505960 - DNA, 19 bp, Mus musculus
  siRNA target sequence for Kif5b (NM_008448.1,1419-1437).
cggataaagatattgctat

SEQ ID NO: 505961 - DNA, 19 bp, Mus musculus
  siRNA target sequence for Kif5b (NM_008448.1,1506-1524).
gtgaagaagaacttgctaa

SEQ ID NO: 505962 - DNA, 19 bp, Mus musculus
  siRNA target sequence for Kif5b (NM_008448.1,1521-1539).
ctaaattgtataaacaact

SEQ ID NO: 505963 - DNA, 19 bp, Mus musculus
  siRNA target sequence for Kif5b (NM_008448.1,1549-1567).
ggatgaagagattaaccaa

SEQ ID NO: 505964 - DNA, 19 bp, Mus musculus
  siRNA target sequence for Kif5b (NM_008448.1,1629-1647).
caaccagaagggatcaaga

SEQ ID NO: 505965 - DNA, 19 bp, Mus musculus
  siRNA target sequence for Kif5b (NM_008448.1,1633-1651).
cagaagggatcaagataat

SEQ ID NO: 505966 - DNA, 19 bp, Mus musculus
  siRNA target sequence for Kif5b (NM_008448.1,1635-1653).
gaagggatcaagataatat

SEQ ID NO: 505967 - DNA, 19 bp, Mus musculus
  siRNA target sequence for Kif5b (NM_008448.1,1639-1657).
ggatcaagataatatgcaa

SEQ ID NO: 505968 - DNA, 19 bp, Mus musculus
  siRNA target sequence for Kif5b (NM_008448.1,1756-1774).
gaagtctcaggaagttgaa

SEQ ID NO: 505969 - DNA, 19 bp, Mus musculus
  siRNA target sequence for Kif5b (NM_008448.1,1782-1800).
caaaggaatatgaattgct

SEQ ID NO: 505970 - DNA, 19 bp, Mus musculus
  siRNA target sequence for Kif5b (NM_008448.1,1824-1842).
ctgcaactttagcaagtat

SEQ ID NO: 505971 - DNA, 19 bp, Mus musculus
  siRNA target sequence for Kif5b (NM_008448.1,1901-1919).
gaaatgatggcatcattat

SEQ ID NO: 505972 - DNA, 19 bp, Mus musculus
  siRNA target sequence for Kif5b (NM_008448.1,1906-1924).
gatggcatcattattaaaa

SEQ ID NO: 505973 - DNA, 19 bp, Mus musculus
  siRNA target sequence for Kif5b (NM_008448.1,1941-1959).
gaattgctgtggggaataa

SEQ ID NO: 505974 - DNA, 19 bp, Mus musculus
  siRNA target sequence for Kif5b (NM_008448.1,1974-1992).
cagaaggaactggtatgat

SEQ ID NO: 505975 - DNA, 19 bp, Mus musculus
  siRNA target sequence for Kif5b (NM_008448.1,1986-2004).
gtatgatagatgaagagtt

SEQ ID NO: 505976 - DNA, 19 bp, Mus musculus
  siRNA target sequence for Kif5b (NM_008448.1,1990-2008).
gatagatgaagagtttact

SEQ ID NO: 505977 - DNA, 19 bp, Mus musculus
  siRNA target sequence for Kif5b (NM_008448.1,2007-2025).
ctgttgcaagactctacat

SEQ ID NO: 505978 - DNA, 19 bp, Mus musculus
  siRNA target sequence for Kif5b (NM_008448.1,2012-2030).
gcaagactctacattagca

SEQ ID NO: 505979 - DNA, 19 bp, Mus musculus
  siRNA target sequence for Kif5b (NM_008448.1,2016-2034).
gactctacattagcaaaat

SEQ ID NO: 505980 - DNA, 19 bp, Mus musculus
  siRNA target sequence for Kif5b (NM_008448.1,2063-2081).
cgctgcaaacagctagaaa

SEQ ID NO: 505981 - DNA, 19 bp, Mus musculus
  siRNA target sequence for Kif5b (NM_008448.1,2089-2107).
gactgagagcaacaaaaaa

SEQ ID NO: 505982 - DNA, 19 bp, Mus musculus
  siRNA target sequence for Kif5b (NM_008448.1,2182-2200).
gactgagtaccttcagaat

SEQ ID NO: 505983 - DNA, 19 bp, Mus musculus
  siRNA target sequence for Kif5b (NM_008448.1,2392-2410).
cagtagtttgcgagatgaa

SEQ ID NO: 505984 - DNA, 19 bp, Mus musculus
  siRNA target sequence for Kif5b (NM_008448.1,2394-2412).
gtagtttgcgagatgaagt

SEQ ID NO: 505985 - DNA, 19 bp, Mus musculus
  siRNA target sequence for Kif5b (NM_008448.1,2605-2623).
gaccgtggcaaaagaactt

SEQ ID NO: 505986 - DNA, 19 bp, Mus musculus
  siRNA target sequence for Kif5b (NM_008448.1,2607-2625).
ccgtggcaaaagaacttca

SEQ ID NO: 505987 - DNA, 19 bp, Mus musculus
  siRNA target sequence for Kif5b (NM_008448.1,2638-2656).
cctgcgtaagctctttgtt

SEQ ID NO: 505988 - DNA, 19 bp, Mus musculus
  siRNA target sequence for Kif5b (NM_008448.1,2785-2803).
gcagttggtacgcgataat

SEQ ID NO: 505989 - DNA, 19 bp, Mus musculus
  siRNA target sequence for Kif5b (NM_008448.1,3066-3084).
gtggaggaggctcatttgt

SEQ ID NO: 505990 - DNA, 19 bp, Mus musculus
  siRNA target sequence for Kif5b (NM_008448.1,3072-3090).
gaggctcatttgttcagaa

SEQ ID NO: 505991 - DNA, 19 bp, Mus musculus
  siRNA target sequence for Kif5c (NM_008449.1,127-145).
caagggaagccgtatgtct

SEQ ID NO: 505992 - DNA, 19 bp, Mus musculus
  siRNA target sequence for Kif5c (NM_008449.1,197-215).
gtgcaaagcagattgtcaa

SEQ ID NO: 505993 - DNA, 19 bp, Mus musculus
  siRNA target sequence for Kif5c (NM_008449.1,200-218).
caaagcagattgtcaaaga

SEQ ID NO: 505994 - DNA, 19 bp, Mus musculus
  siRNA target sequence for Kif5c (NM_008449.1,261-279).
gacttcatcaggaaaaact

SEQ ID NO: 505995 - DNA, 19 bp, Mus musculus
  siRNA target sequence for Kif5c (NM_008449.1,288-306).
ggaggggaagttacatgat

SEQ ID NO: 505996 - DNA, 19 bp, Mus musculus
  siRNA target sequence for Kif5c (NM_008449.1,318-336).
gggtatcattccaaggatt

SEQ ID NO: 505997 - DNA, 19 bp, Mus musculus
  siRNA target sequence for Kif5c (NM_008449.1,328-346).
ccaaggattgcacatgata

SEQ ID NO: 505998 - DNA, 19 bp, Mus musculus
  siRNA target sequence for Kif5c (NM_008449.1,333-351).
gattgcacatgatattttt

SEQ ID NO: 505999 - DNA, 19 bp, Mus musculus
  siRNA target sequence for Kif5c (NM_008449.1,338-356).
cacatgatatttttgatca

SEQ ID NO: 506000 - DNA, 19 bp, Mus musculus
  siRNA target sequence for Kif5c (NM_008449.1,372-390).
cgagaacctggagtttcat

SEQ ID NO: 506001 - DNA, 19 bp, Mus musculus
  siRNA target sequence for Kif5c (NM_008449.1,455-473).
ccaacttggcagttcatga

SEQ ID NO: 506002 - DNA, 19 bp, Mus musculus
  siRNA target sequence for Kif5c (NM_008449.1,620-638).
gtatcttcctgattaacat

SEQ ID NO: 506003 - DNA, 19 bp, Mus musculus
  siRNA target sequence for Kif5c (NM_008449.1,627-645).
cctgattaacattaagcaa

SEQ ID NO: 506004 - DNA, 19 bp, Mus musculus
  siRNA target sequence for Kif5c (NM_008449.1,731-749).
ccgagggagctgttcttga

SEQ ID NO: 506005 - DNA, 19 bp, Mus musculus
  siRNA target sequence for Kif5c (NM_008449.1,732-750).
cgagggagctgttcttgat

SEQ ID NO: 506006 - DNA, 19 bp, Mus musculus
  siRNA target sequence for Kif5c (NM_008449.1,745-763).
cttgatgaagctaaaaata

SEQ ID NO: 506007 - DNA, 19 bp, Mus musculus
  siRNA target sequence for Kif5c (NM_008449.1,914-932).
ctccttcagtcttcaatga

SEQ ID NO: 506008 - DNA, 19 bp, Mus musculus
  siRNA target sequence for Kif5c (NM_008449.1,1187-1205).
cacccatcatagacaacat

SEQ ID NO: 506009 - DNA, 19 bp, Mus musculus
  siRNA target sequence for Kif5c (NM_008449.1,1274-1292).
gacagctcgatgataagga

SEQ ID NO: 506010 - DNA, 19 bp, Mus musculus
  siRNA target sequence for Kif5c (NM_008449.1,1373-1391).
cgagaagggactatgagaa

SEQ ID NO: 506011 - DNA, 19 bp, Mus musculus
  siRNA target sequence for Kif5c (NM_008449.1,1409-1427).
cacgcctccagatcgaaaa

SEQ ID NO: 506012 - DNA, 19 bp, Mus musculus
  siRNA target sequence for Kif5c (NM_008449.1,1422-1440).
cgaaaatgaggcagctaaa

SEQ ID NO: 506013 - DNA, 19 bp, Mus musculus
  siRNA target sequence for Kif5c (NM_008449.1,1433-1451).
cagctaaagacgaagtgaa

SEQ ID NO: 506014 - DNA, 19 bp, Mus musculus
  siRNA target sequence for Kif5c (NM_008449.1,1491-1509).
cgaccagaagtcacaagaa

SEQ ID NO: 506015 - DNA, 19 bp, Mus musculus
  siRNA target sequence for Kif5c (NM_008449.1,1600-1618).
cagctgcaagagcttagta

SEQ ID NO: 506016 - DNA, 19 bp, Mus musculus
  siRNA target sequence for Kif5c (NM_008449.1,1673-1691).
gggagataggcggaattat

SEQ ID NO: 506017 - DNA, 19 bp, Mus musculus
  siRNA target sequence for Kif5c (NM_008449.1,1674-1692).
ggagataggcggaattatt

SEQ ID NO: 506018 - DNA, 19 bp, Mus musculus
  siRNA target sequence for Kif5c (NM_008449.1,1751-1769).
ccatggcacgcctgtacat

SEQ ID NO: 506019 - DNA, 19 bp, Mus musculus
  siRNA target sequence for Kif5c (NM_008449.1,1756-1774).
gcacgcctgtacattagca

SEQ ID NO: 506020 - DNA, 19 bp, Mus musculus
  siRNA target sequence for Kif5c (NM_008449.1,1757-1775).
cacgcctgtacattagcaa

SEQ ID NO: 506021 - DNA, 19 bp, Mus musculus
  siRNA target sequence for Kif5c (NM_008449.1,1876-1894).
gcagcgtgccagttgctta

SEQ ID NO: 506022 - DNA, 19 bp, Mus musculus
  siRNA target sequence for Kif5c (NM_008449.1,1877-1895).
cagcgtgccagttgcttat

SEQ ID NO: 506023 - DNA, 19 bp, Mus musculus
  siRNA target sequence for Kif5c (NM_008449.1,1879-1897).
gcgtgccagttgcttatct

SEQ ID NO: 506024 - DNA, 19 bp, Mus musculus
  siRNA target sequence for Kif5c (NM_008449.1,1881-1899).
gtgccagttgcttatctca

SEQ ID NO: 506025 - DNA, 19 bp, Mus musculus
  siRNA target sequence for Kif5c (NM_008449.1,2129-2147).
gggaagcgcaccaaaagca

SEQ ID NO: 506026 - DNA, 19 bp, Mus musculus
  siRNA target sequence for Kif5c (NM_008449.1,2153-2171).
ccagacttcgcgatgagat

SEQ ID NO: 506027 - DNA, 19 bp, Mus musculus
  siRNA target sequence for Kif5c (NM_008449.1,2154-2172).
cagacttcgcgatgagatt

SEQ ID NO: 506028 - DNA, 19 bp, Mus musculus
  siRNA target sequence for Kif5c (NM_008449.1,2156-2174).
gacttcgcgatgagattga

SEQ ID NO: 506029 - DNA, 19 bp, Mus musculus
  siRNA target sequence for Kif5c (NM_008449.1,2178-2196).
gaagcagagaatcattgat

SEQ ID NO: 506030 - DNA, 19 bp, Mus musculus
  siRNA target sequence for Kif5c (NM_008449.1,2194-2212).
gatgagatccgggatttga

SEQ ID NO: 506031 - DNA, 19 bp, Mus musculus
  siRNA target sequence for Kif5c (NM_008449.1,2251-2269).
gattataacaagctgaaaa

SEQ ID NO: 506032 - DNA, 19 bp, Mus musculus
  siRNA target sequence for Kif5c (NM_008449.1,2305-2323).
ctcctattgctcaatgaca

SEQ ID NO: 506033 - DNA, 19 bp, Mus musculus
  siRNA target sequence for Kif5c (NM_008449.1,2308-2326).
ctattgctcaatgacaaaa

SEQ ID NO: 506034 - DNA, 19 bp, Mus musculus
  siRNA target sequence for Kif5c (NM_008449.1,2409-2427).
cttcgtccaggatttgaca

SEQ ID NO: 506035 - DNA, 19 bp, Mus musculus
  siRNA target sequence for Kif5c (NM_008449.1,2685-2703).
ctaccagcaggaagtagat

SEQ ID NO: 506036 - DNA, 19 bp, Mus musculus
  siRNA target sequence for Kif5c (NM_008449.1,2717-2735).
ctgtgcgagccaagaacat

SEQ ID NO: 506037 - DNA, 19 bp, Mus musculus
  siRNA target sequence for Kif5c (NM_008449.1,2830-2848).
ggaggaggtggctcttcaa

SEQ ID NO: 506038 - DNA, 19 bp, Mus musculus
  siRNA target sequence for Kif6 (NM_177052.2,167-185).
ggatttactccatagatga

SEQ ID NO: 506039 - DNA, 19 bp, Mus musculus
  siRNA target sequence for Kif6 (NM_177052.2,200-218).
cgcatagcttggaaattgt

SEQ ID NO: 506040 - DNA, 19 bp, Mus musculus
  siRNA target sequence for Kif6 (NM_177052.2,202-220).
catagcttggaaattgtct

SEQ ID NO: 506041 - DNA, 19 bp, Mus musculus
  siRNA target sequence for Kif6 (NM_177052.2,227-245).
gagacctggcagatggatt

SEQ ID NO: 506042 - DNA, 19 bp, Mus musculus
  siRNA target sequence for Kif6 (NM_177052.2,236-254).
cagatggattcgtaaacaa

SEQ ID NO: 506043 - DNA, 19 bp, Mus musculus
  siRNA target sequence for Kif6 (NM_177052.2,238-256).
gatggattcgtaaacaaca

SEQ ID NO: 506044 - DNA, 19 bp, Mus musculus
  siRNA target sequence for Kif6 (NM_177052.2,259-277).
cgagaaagctacaagttta

SEQ ID NO: 506045 - DNA, 19 bp, Mus musculus
  siRNA target sequence for Kif6 (NM_177052.2,262-280).
gaaagctacaagtttaagt

SEQ ID NO: 506046 - DNA, 19 bp, Mus musculus
  siRNA target sequence for Kif6 (NM_177052.2,266-284).
gctacaagtttaagtttca

SEQ ID NO: 506047 - DNA, 19 bp, Mus musculus
  siRNA target sequence for Kif6 (NM_177052.2,304-322).
gctaagcaagagatcattt

SEQ ID NO: 506048 - DNA, 19 bp, Mus musculus
  siRNA target sequence for Kif6 (NM_177052.2,315-333).
gatcattttcgagatcatt

SEQ ID NO: 506049 - DNA, 19 bp, Mus musculus
  siRNA target sequence for Kif6 (NM_177052.2,467-485).
ggaccctgtcgtacatttt

SEQ ID NO: 506050 - DNA, 19 bp, Mus musculus
  siRNA target sequence for Kif6 (NM_177052.2,470-488).
ccctgtcgtacatttttga

SEQ ID NO: 506051 - DNA, 19 bp, Mus musculus
  siRNA target sequence for Kif6 (NM_177052.2,513-531).
gatctacacgacacacatt

SEQ ID NO: 506052 - DNA, 19 bp, Mus musculus
  siRNA target sequence for Kif6 (NM_177052.2,516-534).
ctacacgacacacatttct

SEQ ID NO: 506053 - DNA, 19 bp, Mus musculus
  siRNA target sequence for Kif6 (NM_177052.2,601-619).
gaagatctgccgaaagtga

SEQ ID NO: 506054 - DNA, 19 bp, Mus musculus
  siRNA target sequence for Kif6 (NM_177052.2,607-625).
ctgccgaaagtgacaatat

SEQ ID NO: 506055 - DNA, 19 bp, Mus musculus
  siRNA target sequence for Kif6 (NM_177052.2,611-629).
cgaaagtgacaatattgga

SEQ ID NO: 506056 - DNA, 19 bp, Mus musculus
  siRNA target sequence for Kif6 (NM_177052.2,695-713).
ctctgaacctgctcttctt

SEQ ID NO: 506057 - DNA, 19 bp, Mus musculus
  siRNA target sequence for Kif6 (NM_177052.2,761-779).
caacccggtcacactgtat

SEQ ID NO: 506058 - DNA, 19 bp, Mus musculus
  siRNA target sequence for Kif6 (NM_177052.2,764-782).
cccggtcacactgtatttt

SEQ ID NO: 506059 - DNA, 19 bp, Mus musculus
  siRNA target sequence for Kif6 (NM_177052.2,766-784).
cggtcacactgtattttca

SEQ ID NO: 506060 - DNA, 19 bp, Mus musculus
  siRNA target sequence for Kif6 (NM_177052.2,818-836).
ccaccgtccgacatgctaa

SEQ ID NO: 506061 - DNA, 19 bp, Mus musculus
  siRNA target sequence for Kif6 (NM_177052.2,901-919).
ctgacagaggccaaataca

SEQ ID NO: 506062 - DNA, 19 bp, Mus musculus
  siRNA target sequence for Kif6 (NM_177052.2,907-925).
gaggccaaatacatcaact

SEQ ID NO: 506063 - DNA, 19 bp, Mus musculus
  siRNA target sequence for Kif6 (NM_177052.2,954-972).
cattgccctttcggaaaaa

SEQ ID NO: 506064 - DNA, 19 bp, Mus musculus
  siRNA target sequence for Kif6 (NM_177052.2,1074-1092).
ggagaagaggaacattgat

SEQ ID NO: 506065 - DNA, 19 bp, Mus musculus
  siRNA target sequence for Kif6 (NM_177052.2,1101-1119).
ctccacctgcagatttgct

SEQ ID NO: 506066 - DNA, 19 bp, Mus musculus
  siRNA target sequence for Kif6 (NM_177052.2,1120-1138).
cagcgagtggccctaatta

SEQ ID NO: 506067 - DNA, 19 bp, Mus musculus
  siRNA target sequence for Kif6 (NM_177052.2,1122-1140).
gcgagtggccctaattaaa

SEQ ID NO: 506068 - DNA, 19 bp, Mus musculus
  siRNA target sequence for Kif6 (NM_177052.2,1123-1141).
cgagtggccctaattaaaa

SEQ ID NO: 506069 - DNA, 19 bp, Mus musculus
  siRNA target sequence for Kif6 (NM_177052.2,1124-1142).
gagtggccctaattaaaaa

SEQ ID NO: 506070 - DNA, 19 bp, Mus musculus
  siRNA target sequence for Kif6 (NM_177052.2,1128-1146).
ggccctaattaaaaacgaa

SEQ ID NO: 506071 - DNA, 19 bp, Mus musculus
  siRNA target sequence for Kif6 (NM_177052.2,1284-1302).
gttggaaaaactaatagca

SEQ ID NO: 506072 - DNA, 19 bp, Mus musculus
  siRNA target sequence for Kif6 (NM_177052.2,1345-1363).
ggcgctgatatgcgtaaaa

SEQ ID NO: 506073 - DNA, 19 bp, Mus musculus
  siRNA target sequence for Kif6 (NM_177052.2,1346-1364).
gcgctgatatgcgtaaaat

SEQ ID NO: 506074 - DNA, 19 bp, Mus musculus
  siRNA target sequence for Kif6 (NM_177052.2,1349-1367).
ctgatatgcgtaaaatcca

SEQ ID NO: 506075 - DNA, 19 bp, Mus musculus
  siRNA target sequence for Kif6 (NM_177052.2,1511-1529).
gggacaacgagatcagtat

SEQ ID NO: 506076 - DNA, 19 bp, Mus musculus
  siRNA target sequence for Kif9 (NM_010628.1,67-85).
gggtactaggaaaaaggtt

SEQ ID NO: 506077 - DNA, 19 bp, Mus musculus
  siRNA target sequence for Kif9 (NM_010628.1,122-140).
gctcatgaaatgatcaaat

SEQ ID NO: 506078 - DNA, 19 bp, Mus musculus
  siRNA target sequence for Kif9 (NM_010628.1,186-204).
ctcggagaggggttgtcaa

SEQ ID NO: 506079 - DNA, 19 bp, Mus musculus
  siRNA target sequence for Kif9 (NM_010628.1,188-206).
cggagaggggttgtcaata

SEQ ID NO: 506080 - DNA, 19 bp, Mus musculus
  siRNA target sequence for Kif9 (NM_010628.1,255-273).
cctcccaggacttggttta

SEQ ID NO: 506081 - DNA, 19 bp, Mus musculus
  siRNA target sequence for Kif9 (NM_010628.1,259-277).
ccaggacttggtttatgaa

SEQ ID NO: 506082 - DNA, 19 bp, Mus musculus
  siRNA target sequence for Kif9 (NM_010628.1,260-278).
caggacttggtttatgaaa

SEQ ID NO: 506083 - DNA, 19 bp, Mus musculus
  siRNA target sequence for Kif9 (NM_010628.1,262-280).
ggacttggtttatgaaaca

SEQ ID NO: 506084 - DNA, 19 bp, Mus musculus
  siRNA target sequence for Kif9 (NM_010628.1,265-283).
cttggtttatgaaacagtt

SEQ ID NO: 506085 - DNA, 19 bp, Mus musculus
  siRNA target sequence for Kif9 (NM_010628.1,286-304).
caaggatgcggtttctcaa

SEQ ID NO: 506086 - DNA, 19 bp, Mus musculus
  siRNA target sequence for Kif9 (NM_010628.1,308-326).
cttgatgggtacaatggta

SEQ ID NO: 506087 - DNA, 19 bp, Mus musculus
  siRNA target sequence for Kif9 (NM_010628.1,375-393).
caggggcaacggagaatta

SEQ ID NO: 506088 - DNA, 19 bp, Mus musculus
  siRNA target sequence for Kif9 (NM_010628.1,377-395).
ggggcaacggagaattaca

SEQ ID NO: 506089 - DNA, 19 bp, Mus musculus
  siRNA target sequence for Kif9 (NM_010628.1,427-445).
gcaggtgttcaggatgatt

SEQ ID NO: 506090 - DNA, 19 bp, Mus musculus
  siRNA target sequence for Kif9 (NM_010628.1,658-676).
cgagaccaacaggatcatt

SEQ ID NO: 506091 - DNA, 19 bp, Mus musculus
  siRNA target sequence for Kif9 (NM_010628.1,683-701).
cacacgatgaacaagaact

SEQ ID NO: 506092 - DNA, 19 bp, Mus musculus
  siRNA target sequence for Kif9 (NM_010628.1,705-723).
ccaggtcgcactgcatttt

SEQ ID NO: 506093 - DNA, 19 bp, Mus musculus
  siRNA target sequence for Kif9 (NM_010628.1,740-758).
gcccactctcggaccttat

SEQ ID NO: 506094 - DNA, 19 bp, Mus musculus
  siRNA target sequence for Kif9 (NM_010628.1,749-767).
cggaccttatcagatgaaa

SEQ ID NO: 506095 - DNA, 19 bp, Mus musculus
  siRNA target sequence for Kif9 (NM_010628.1,754-772).
cttatcagatgaaaagtat

SEQ ID NO: 506096 - DNA, 19 bp, Mus musculus
  siRNA target sequence for Kif9 (NM_010628.1,834-852).
ctgaaggtagagtcctaaa

SEQ ID NO: 506097 - DNA, 19 bp, Mus musculus
  siRNA target sequence for Kif9 (NM_010628.1,857-875).
gccacctacatcaacaagt

SEQ ID NO: 506098 - DNA, 19 bp, Mus musculus
  siRNA target sequence for Kif9 (NM_010628.1,998-1016).
gtcctcgtgacaaacatct

SEQ ID NO: 506099 - DNA, 19 bp, Mus musculus
  siRNA target sequence for Kif9 (NM_010628.1,1000-1018).
cctcgtgacaaacatctat

SEQ ID NO: 506100 - DNA, 19 bp, Mus musculus
  siRNA target sequence for Kif9 (NM_010628.1,1037-1055).
gatgaaacgctgtcttcat

SEQ ID NO: 506101 - DNA, 19 bp, Mus musculus
  siRNA target sequence for Kif9 (NM_010628.1,1195-1213).
caaccgcacccttgtgaat

SEQ ID NO: 506102 - DNA, 19 bp, Mus musculus
  siRNA target sequence for Kif9 (NM_010628.1,1198-1216).
ccgcacccttgtgaattat

SEQ ID NO: 506103 - DNA, 19 bp, Mus musculus
  siRNA target sequence for Kif9 (NM_010628.1,1282-1300).
gctggacgagattgacata

SEQ ID NO: 506104 - DNA, 19 bp, Mus musculus
  siRNA target sequence for Kif9 (NM_010628.1,1283-1301).
ctggacgagattgacataa

SEQ ID NO: 506105 - DNA, 19 bp, Mus musculus
  siRNA target sequence for Kif9 (NM_010628.1,1286-1304).
gacgagattgacataatca

SEQ ID NO: 506106 - DNA, 19 bp, Mus musculus
  siRNA target sequence for Kif9 (NM_010628.1,1288-1306).
cgagattgacataatcaat

SEQ ID NO: 506107 - DNA, 19 bp, Mus musculus
  siRNA target sequence for Kif9 (NM_010628.1,1291-1309).
gattgacataatcaatcta

SEQ ID NO: 506108 - DNA, 19 bp, Mus musculus
  siRNA target sequence for Kif9 (NM_010628.1,1389-1407).
ggaagtacactctcataga

SEQ ID NO: 506109 - DNA, 19 bp, Mus musculus
  siRNA target sequence for Kif9 (NM_010628.1,1396-1414).
cactctcatagacaaaaat

SEQ ID NO: 506110 - DNA, 19 bp, Mus musculus
  siRNA target sequence for Kif9 (NM_010628.1,1456-1474).
ggatatagaaggtaaccta

SEQ ID NO: 506111 - DNA, 19 bp, Mus musculus
  siRNA target sequence for Kif9 (NM_010628.1,1483-1501).
gcccgatggacaaagcttt

SEQ ID NO: 506112 - DNA, 19 bp, Mus musculus
  siRNA target sequence for Kif9 (NM_010628.1,1509-1527).
gagttgctccgttttctgt

SEQ ID NO: 506113 - DNA, 19 bp, Mus musculus
  siRNA target sequence for Kif9 (NM_010628.1,1615-1633).
gagtggcaaggactttgat

SEQ ID NO: 506114 - DNA, 19 bp, Mus musculus
  siRNA target sequence for Kif9 (NM_010628.1,1660-1678).
gatcccatcttccaaagat

SEQ ID NO: 506115 - DNA, 19 bp, Mus musculus
  siRNA target sequence for Kif9 (NM_010628.1,1723-1741).
cattgaaccccttatctca

SEQ ID NO: 506116 - DNA, 19 bp, Mus musculus
  siRNA target sequence for Kif9 (NM_010628.1,1837-1855).
gatcaaccgcatcttcaaa

SEQ ID NO: 506117 - DNA, 19 bp, Mus musculus
  siRNA target sequence for Kif9 (NM_010628.1,1933-1951).
gattgatgagaccaaagat

SEQ ID NO: 506118 - DNA, 19 bp, Mus musculus
  siRNA target sequence for Kif9 (NM_010628.1,1942-1960).
gaccaaagatgcactcaat

SEQ ID NO: 506119 - DNA, 19 bp, Mus musculus
  siRNA target sequence for Kif9 (NM_010628.1,1944-1962).
ccaaagatgcactcaattt

SEQ ID NO: 506120 - DNA, 19 bp, Mus musculus
  siRNA target sequence for Kif9 (NM_010628.1,2102-2120).
ctccgggctgagatccaat

SEQ ID NO: 506121 - DNA, 19 bp, Mus musculus
  siRNA target sequence for Kif9 (NM_010628.1,2105-2123).
cgggctgagatccaatact

SEQ ID NO: 506122 - DNA, 19 bp, Mus musculus
  siRNA target sequence for Kif9 (NM_010628.1,2150-2168).
catcgcctgctcatggaat

SEQ ID NO: 506123 - DNA, 19 bp, Mus musculus
  siRNA target sequence for Kif9 (NM_010628.1,2156-2174).
ctgctcatggaatttgaca

SEQ ID NO: 506124 - DNA, 19 bp, Mus musculus
  siRNA target sequence for Kif9 (NM_010628.1,2331-2349).
ctgaaggtcttgattccat

SEQ ID NO: 506125 - DNA, 19 bp, Mus musculus
  siRNA target sequence for Kif9 (NM_010628.1,2376-2394).
cagatcagaagcacaatta

SEQ ID NO: 506126 - DNA, 19 bp, Mus musculus
  siRNA target sequence for Kif9 (NM_010628.1,2378-2396).
gatcagaagcacaattata

SEQ ID NO: 506127 - DNA, 19 bp, Mus musculus
  siRNA target sequence for Kif9 (NM_010628.1,2387-2405).
cacaattatatgaaaacca

SEQ ID NO: 506128 - DNA, 19 bp, Mus musculus
  siRNA target sequence for Kifc2 (NM_010630.1,101-119).
ggggatcccacccagaaaa

SEQ ID NO: 506129 - DNA, 19 bp, Mus musculus
  siRNA target sequence for Kifc2 (NM_010630.1,140-158).
cgtcgccgtccggatcaat

SEQ ID NO: 506130 - DNA, 19 bp, Mus musculus
  siRNA target sequence for Kifc2 (NM_010630.1,141-159).
gtcgccgtccggatcaatt

SEQ ID NO: 506131 - DNA, 19 bp, Mus musculus
  siRNA target sequence for Kifc2 (NM_010630.1,143-161).
cgccgtccggatcaattca

SEQ ID NO: 506132 - DNA, 19 bp, Mus musculus
  siRNA target sequence for Kifc2 (NM_010630.1,145-163).
ccgtccggatcaattcaca

SEQ ID NO: 506133 - DNA, 19 bp, Mus musculus
  siRNA target sequence for Kifc2 (NM_010630.1,146-164).
cgtccggatcaattcacat

SEQ ID NO: 506134 - DNA, 19 bp, Mus musculus
  siRNA target sequence for Kifc2 (NM_010630.1,487-505).
gtctctttcacaagaagaa

SEQ ID NO: 506135 - DNA, 19 bp, Mus musculus
  siRNA target sequence for Kifc2 (NM_010630.1,720-738).
gagtccagcacctcacatt

SEQ ID NO: 506136 - DNA, 19 bp, Mus musculus
  siRNA target sequence for Kifc2 (NM_010630.1,803-821).
ggaccactccccagacttt

SEQ ID NO: 506137 - DNA, 19 bp, Mus musculus
  siRNA target sequence for Kifc2 (NM_010630.1,1070-1088).
ggactggtcagcaccttta

SEQ ID NO: 506138 - DNA, 19 bp, Mus musculus
  siRNA target sequence for Kifc2 (NM_010630.1,1228-1246).
ggaactcaaggggaatatt

SEQ ID NO: 506139 - DNA, 19 bp, Mus musculus
  siRNA target sequence for Kifc2 (NM_010630.1,1319-1337).
ggaaccatcaccacatgtt

SEQ ID NO: 506140 - DNA, 19 bp, Mus musculus
  siRNA target sequence for Kifc2 (NM_010630.1,1320-1338).
gaaccatcaccacatgtta

SEQ ID NO: 506141 - DNA, 19 bp, Mus musculus
  siRNA target sequence for Kifc2 (NM_010630.1,1452-1470).
gtgtctgcatcttcactta

SEQ ID NO: 506142 - DNA, 19 bp, Mus musculus
  siRNA target sequence for Kifc2 (NM_010630.1,1456-1474).
ctgcatcttcacttatggt

SEQ ID NO: 506143 - DNA, 19 bp, Mus musculus
  siRNA target sequence for Kifc2 (NM_010630.1,1479-1497).
ctgggacagggaaaaccta

SEQ ID NO: 506144 - DNA, 19 bp, Mus musculus
  siRNA target sequence for Kifc2 (NM_010630.1,1652-1670).
ccagagcgcctggtagtaa

SEQ ID NO: 506145 - DNA, 19 bp, Mus musculus
  siRNA target sequence for Kifc2 (NM_010630.1,1686-1704).
ggcaggggggaattcaagt

SEQ ID NO: 506146 - DNA, 19 bp, Mus musculus
  siRNA target sequence for Kifc2 (NM_010630.1,1716-1734).
cacactgggacgtacctaa

SEQ ID NO: 506147 - DNA, 19 bp, Mus musculus
  siRNA target sequence for Kifc2 (NM_010630.1,1827-1845).
ccctagttacgctgacttt

SEQ ID NO: 506148 - DNA, 19 bp, Mus musculus
  siRNA target sequence for Kifc2 (NM_010630.1,1828-1846).
cctagttacgctgacttta

SEQ ID NO: 506149 - DNA, 19 bp, Mus musculus
  siRNA target sequence for Kifc2 (NM_010630.1,2145-2163).
ccacaagggcggaagatct

SEQ ID NO: 506150 - DNA, 19 bp, Mus musculus
  siRNA target sequence for Kifc2 (NM_010630.1,2172-2190).
ccatctgctcgctcaagtt

SEQ ID NO: 506151 - DNA, 19 bp, Mus musculus
  siRNA target sequence for Kifc3 (NM_010631.1,365-383).
gcatgctgtcggaactgaa

SEQ ID NO: 506152 - DNA, 19 bp, Mus musculus
  siRNA target sequence for Kifc3 (NM_010631.1,528-546).
gtccccacctgttaagtat

SEQ ID NO: 506153 - DNA, 19 bp, Mus musculus
  siRNA target sequence for Kifc3 (NM_010631.1,530-548).
ccccacctgttaagtatgt

SEQ ID NO: 506154 - DNA, 19 bp, Mus musculus
  siRNA target sequence for Kifc3 (NM_010631.1,532-550).
ccacctgttaagtatgtca

SEQ ID NO: 506155 - DNA, 19 bp, Mus musculus
  siRNA target sequence for Kifc3 (NM_010631.1,536-554).
ctgttaagtatgtcatcaa

SEQ ID NO: 506156 - DNA, 19 bp, Mus musculus
  siRNA target sequence for Kifc3 (NM_010631.1,711-729).
ggctcagattgccatgtat

SEQ ID NO: 506157 - DNA, 19 bp, Mus musculus
  siRNA target sequence for Kifc3 (NM_010631.1,909-927).
cctcaccaacgactacaat

SEQ ID NO: 506158 - DNA, 19 bp, Mus musculus
  siRNA target sequence for Kifc3 (NM_010631.1,1073-1091).
gcaagaaatgccataacga

SEQ ID NO: 506159 - DNA, 19 bp, Mus musculus
  siRNA target sequence for Kifc3 (NM_010631.1,1187-1205).
cctttgaccctgatgatga

SEQ ID NO: 506160 - DNA, 19 bp, Mus musculus
  siRNA target sequence for Kifc3 (NM_010631.1,1300-1318).
gaggtgcaggccctcatta

SEQ ID NO: 506161 - DNA, 19 bp, Mus musculus
  siRNA target sequence for Kifc3 (NM_010631.1,1333-1351).
ggcttcaatgtctgtatct

SEQ ID NO: 506162 - DNA, 19 bp, Mus musculus
  siRNA target sequence for Kifc3 (NM_010631.1,1466-1484).
cgtctgactggcagtacaa

SEQ ID NO: 506163 - DNA, 19 bp, Mus musculus
  siRNA target sequence for Kifc3 (NM_010631.1,1471-1489).
gactggcagtacaacatca

SEQ ID NO: 506164 - DNA, 19 bp, Mus musculus
  siRNA target sequence for Kifc3 (NM_010631.1,1644-1662).
caacaaggtgtttgagttt

SEQ ID NO: 506165 - DNA, 19 bp, Mus musculus
  siRNA target sequence for Kifc3 (NM_010631.1,1864-1882).
cacatcaacaggtcactat

SEQ ID NO: 506166 - DNA, 19 bp, Mus musculus
  siRNA target sequence for Kifc3 (NM_010631.1,2042-2060).
ctctgtactccctcagatt

SEQ ID NO: 506167 - DNA, 19 bp, Mus musculus
  siRNA target sequence for Kit (NM_021099.2,153-171).
cacaatcagagttaatagt

SEQ ID NO: 506168 - DNA, 19 bp, Mus musculus
  siRNA target sequence for Kit (NM_021099.2,190-208).
cagcctgacgtgcattgat

SEQ ID NO: 506169 - DNA, 19 bp, Mus musculus
  siRNA target sequence for Kit (NM_021099.2,218-236).
gtcagatggactttcaaga

SEQ ID NO: 506170 - DNA, 19 bp, Mus musculus
  siRNA target sequence for Kit (NM_021099.2,335-353).
ggcctcacgagttctattt

SEQ ID NO: 506171 - DNA, 19 bp, Mus musculus
  siRNA target sequence for Kit (NM_021099.2,449-467).
gacccacaggtgtccaatt

SEQ ID NO: 506172 - DNA, 19 bp, Mus musculus
  siRNA target sequence for Kit (NM_021099.2,451-469).
cccacaggtgtccaattat

SEQ ID NO: 506173 - DNA, 19 bp, Mus musculus
  siRNA target sequence for Kit (NM_021099.2,452-470).
ccacaggtgtccaattatt

SEQ ID NO: 506174 - DNA, 19 bp, Mus musculus
  siRNA target sequence for Kit (NM_021099.2,537-555).
gcatcaccatcaaaaacgt

SEQ ID NO: 506175 - DNA, 19 bp, Mus musculus
  siRNA target sequence for Kit (NM_021099.2,606-624).
gtacatggctgcattctga

SEQ ID NO: 506176 - DNA, 19 bp, Mus musculus
  siRNA target sequence for Kit (NM_021099.2,612-630).
ggctgcattctgacaaatt

SEQ ID NO: 506177 - DNA, 19 bp, Mus musculus
  siRNA target sequence for Kit (NM_021099.2,720-738).
cggtggtgtgcaccataaa

SEQ ID NO: 506178 - DNA, 19 bp, Mus musculus
  siRNA target sequence for Kit (NM_021099.2,800-818).
gcccaggtaaagcacaata

SEQ ID NO: 506179 - DNA, 19 bp, Mus musculus
  siRNA target sequence for Kit (NM_021099.2,822-840).
ggcaccggggtgacttcaa

SEQ ID NO: 506180 - DNA, 19 bp, Mus musculus
  siRNA target sequence for Kit (NM_021099.2,824-842).
caccggggtgacttcaatt

SEQ ID NO: 506181 - DNA, 19 bp, Mus musculus
  siRNA target sequence for Kit (NM_021099.2,826-844).
ccggggtgacttcaattat

SEQ ID NO: 506182 - DNA, 19 bp, Mus musculus
  siRNA target sequence for Kit (NM_021099.2,904-922).
gtgttatgccaataatact

SEQ ID NO: 506183 - DNA, 19 bp, Mus musculus
  siRNA target sequence for Kit (NM_021099.2,911-929).
gccaataatacttttggat

SEQ ID NO: 506184 - DNA, 19 bp, Mus musculus
  siRNA target sequence for Kit (NM_021099.2,940-958).
cacaacaaccttgaaagta

SEQ ID NO: 506185 - DNA, 19 bp, Mus musculus
  siRNA target sequence for Kit (NM_021099.2,942-960).
caacaaccttgaaagtagt

SEQ ID NO: 506186 - DNA, 19 bp, Mus musculus
  siRNA target sequence for Kit (NM_021099.2,1016-1034).
gatggagaaaacgtagatt

SEQ ID NO: 506187 - DNA, 19 bp, Mus musculus
  siRNA target sequence for Kit (NM_021099.2,1027-1045).
cgtagatttggttgttgaa

SEQ ID NO: 506188 - DNA, 19 bp, Mus musculus
  siRNA target sequence for Kit (NM_021099.2,1028-1046).
gtagatttggttgttgaat

SEQ ID NO: 506189 - DNA, 19 bp, Mus musculus
  siRNA target sequence for Kit (NM_021099.2,1069-1087).
gcaccagcagtggatatat

SEQ ID NO: 506190 - DNA, 19 bp, Mus musculus
  siRNA target sequence for Kit (NM_021099.2,1070-1088).
caccagcagtggatatata

SEQ ID NO: 506191 - DNA, 19 bp, Mus musculus
  siRNA target sequence for Kit (NM_021099.2,1073-1091).
cagcagtggatatatatga

SEQ ID NO: 506192 - DNA, 19 bp, Mus musculus
  siRNA target sequence for Kit (NM_021099.2,1076-1094).
cagtggatatatatgaaca

SEQ ID NO: 506193 - DNA, 19 bp, Mus musculus
  siRNA target sequence for Kit (NM_021099.2,1117-1135).
ggattatgtcaaatctgat

SEQ ID NO: 506194 - DNA, 19 bp, Mus musculus
  siRNA target sequence for Kit (NM_021099.2,1118-1136).
gattatgtcaaatctgata

SEQ ID NO: 506195 - DNA, 19 bp, Mus musculus
  siRNA target sequence for Kit (NM_021099.2,1143-1161).
gcaacatcagatatgtgaa

SEQ ID NO: 506196 - DNA, 19 bp, Mus musculus
  siRNA target sequence for Kit (NM_021099.2,1166-1184).
cttcgcctgaccagattaa

SEQ ID NO: 506197 - DNA, 19 bp, Mus musculus
  siRNA target sequence for Kit (NM_021099.2,1193-1211).
gaaggaggcacttatacct

SEQ ID NO: 506198 - DNA, 19 bp, Mus musculus
  siRNA target sequence for Kit (NM_021099.2,1236-1254).
gtgcttccgtgacattcaa

SEQ ID NO: 506199 - DNA, 19 bp, Mus musculus
  siRNA target sequence for Kit (NM_021099.2,1255-1273).
cgtttacgtgaacacaaaa

SEQ ID NO: 506200 - DNA, 19 bp, Mus musculus
  siRNA target sequence for Kit (NM_021099.2,1287-1305).
cgtacgacaggctcataaa

SEQ ID NO: 506201 - DNA, 19 bp, Mus musculus
  siRNA target sequence for Kit (NM_021099.2,1288-1306).
gtacgacaggctcataaat

SEQ ID NO: 506202 - DNA, 19 bp, Mus musculus
  siRNA target sequence for Kit (NM_021099.2,1336-1354).
cccggagcccacaatagat

SEQ ID NO: 506203 - DNA, 19 bp, Mus musculus
  siRNA target sequence for Kit (NM_021099.2,1337-1355).
ccggagcccacaatagatt

SEQ ID NO: 506204 - DNA, 19 bp, Mus musculus
  siRNA target sequence for Kit (NM_021099.2,1342-1360).
gcccacaatagattggtat

SEQ ID NO: 506205 - DNA, 19 bp, Mus musculus
  siRNA target sequence for Kit (NM_021099.2,1411-1429).
cgtacaggtccagaatgta

SEQ ID NO: 506206 - DNA, 19 bp, Mus musculus
  siRNA target sequence for Kit (NM_021099.2,1453-1471).
ggtggttcagagttccata

SEQ ID NO: 506207 - DNA, 19 bp, Mus musculus
  siRNA target sequence for Kit (NM_021099.2,1457-1475).
gttcagagttccatagact

SEQ ID NO: 506208 - DNA, 19 bp, Mus musculus
  siRNA target sequence for Kit (NM_021099.2,1531-1549).
caagagttccgccttcttt

SEQ ID NO: 506209 - DNA, 19 bp, Mus musculus
  siRNA target sequence for Kit (NM_021099.2,1626-1644).
gcgcgatggggatcattgt

SEQ ID NO: 506210 - DNA, 19 bp, Mus musculus
  siRNA target sequence for Kit (NM_021099.2,1629-1647).
cgatggggatcattgtgat

SEQ ID NO: 506211 - DNA, 19 bp, Mus musculus
  siRNA target sequence for Kit (NM_021099.2,1648-1666).
ggtgctcacctacaaatat

SEQ ID NO: 506212 - DNA, 19 bp, Mus musculus
  siRNA target sequence for Kit (NM_021099.2,1649-1667).
gtgctcacctacaaatatt

SEQ ID NO: 506213 - DNA, 19 bp, Mus musculus
  siRNA target sequence for Kit (NM_021099.2,1676-1694).
cccatgtatgaagtacaat

SEQ ID NO: 506214 - DNA, 19 bp, Mus musculus
  siRNA target sequence for Kit (NM_021099.2,1699-1717).
ggttgtcgaggagataaat

SEQ ID NO: 506215 - DNA, 19 bp, Mus musculus
  siRNA target sequence for Kit (NM_021099.2,1709-1727).
gagataaatggaaacaatt

SEQ ID NO: 506216 - DNA, 19 bp, Mus musculus
  siRNA target sequence for Kit (NM_021099.2,1718-1736).
ggaaacaattatgtttaca

SEQ ID NO: 506217 - DNA, 19 bp, Mus musculus
  siRNA target sequence for Kit (NM_021099.2,1719-1737).
gaaacaattatgtttacat

SEQ ID NO: 506218 - DNA, 19 bp, Mus musculus
  siRNA target sequence for Kit (NM_021099.2,1741-1759).
cccgacgcaacttccttat

SEQ ID NO: 506219 - DNA, 19 bp, Mus musculus
  siRNA target sequence for Kit (NM_021099.2,1744-1762).
gacgcaacttccttatgat

SEQ ID NO: 506220 - DNA, 19 bp, Mus musculus
  siRNA target sequence for Kit (NM_021099.2,1779-1797).
ccagaaacaggctgagttt

SEQ ID NO: 506221 - DNA, 19 bp, Mus musculus
  siRNA target sequence for Kit (NM_021099.2,1834-1852).
cgttgaggccactgcatat

SEQ ID NO: 506222 - DNA, 19 bp, Mus musculus
  siRNA target sequence for Kit (NM_021099.2,1900-1918).
caaaccaagtgcccattta

SEQ ID NO: 506223 - DNA, 19 bp, Mus musculus
  siRNA target sequence for Kit (NM_021099.2,1922-1940).
gaaagagaggccctaatgt

SEQ ID NO: 506224 - DNA, 19 bp, Mus musculus
  siRNA target sequence for Kit (NM_021099.2,1932-1950).
ccctaatgtcggaactgaa

SEQ ID NO: 506225 - DNA, 19 bp, Mus musculus
  siRNA target sequence for Kit (NM_021099.2,2015-2033).
gggcccaccctggtcatta

SEQ ID NO: 506226 - DNA, 19 bp, Mus musculus
  siRNA target sequence for Kit (NM_021099.2,2017-2035).
gcccaccctggtcattaca

SEQ ID NO: 506227 - DNA, 19 bp, Mus musculus
  siRNA target sequence for Kit (NM_021099.2,2022-2040).
ccctggtcattacagaata

SEQ ID NO: 506228 - DNA, 19 bp, Mus musculus
  siRNA target sequence for Kit (NM_021099.2,2024-2042).
ctggtcattacagaatatt

SEQ ID NO: 506229 - DNA, 19 bp, Mus musculus
  siRNA target sequence for Kit (NM_021099.2,2046-2064).
gctatggtgatcttttgaa

SEQ ID NO: 506230 - DNA, 19 bp, Mus musculus
  siRNA target sequence for Kit (NM_021099.2,2047-2065).
ctatggtgatcttttgaat

SEQ ID NO: 506231 - DNA, 19 bp, Mus musculus
  siRNA target sequence for Kit (NM_021099.2,2076-2094).
ggaagcgtgactcgtttat

SEQ ID NO: 506232 - DNA, 19 bp, Mus musculus
  siRNA target sequence for Kit (NM_021099.2,2077-2095).
gaagcgtgactcgtttatt

SEQ ID NO: 506233 - DNA, 19 bp, Mus musculus
  siRNA target sequence for Kit (NM_021099.2,2117-2135).
gcagaagcggcactttata

SEQ ID NO: 506234 - DNA, 19 bp, Mus musculus
  siRNA target sequence for Kit (NM_021099.2,2120-2138).
gaagcggcactttataaga

SEQ ID NO: 506235 - DNA, 19 bp, Mus musculus
  siRNA target sequence for Kit (NM_021099.2,2166-2184).
gtgacagttcaaatgaata

SEQ ID NO: 506236 - DNA, 19 bp, Mus musculus
  siRNA target sequence for Kit (NM_021099.2,2172-2190).
gttcaaatgaatatatgga

SEQ ID NO: 506237 - DNA, 19 bp, Mus musculus
  siRNA target sequence for Kit (NM_021099.2,2250-2268).
gaatagactcgtacataga

SEQ ID NO: 506238 - DNA, 19 bp, Mus musculus
  siRNA target sequence for Kit (NM_021099.2,2365-2383).
gttcctcgcctccaagaat

SEQ ID NO: 506239 - DNA, 19 bp, Mus musculus
  siRNA target sequence for Kit (NM_021099.2,2368-2386).
cctcgcctccaagaattgt

SEQ ID NO: 506240 - DNA, 19 bp, Mus musculus
  siRNA target sequence for Kit (NM_021099.2,2373-2391).
cctccaagaattgtattca

SEQ ID NO: 506241 - DNA, 19 bp, Mus musculus
  siRNA target sequence for Kit (NM_021099.2,2470-2488).
catcaggaatgattcgaat

SEQ ID NO: 506242 - DNA, 19 bp, Mus musculus
  siRNA target sequence for Kit (NM_021099.2,2491-2509).
cgtggtcaaaggaaatgca

SEQ ID NO: 506243 - DNA, 19 bp, Mus musculus
  siRNA target sequence for Kit (NM_021099.2,2550-2568).
gctgcgtgtacacatttga

SEQ ID NO: 506244 - DNA, 19 bp, Mus musculus
  siRNA target sequence for Kit (NM_021099.2,2551-2569).
ctgcgtgtacacatttgaa

SEQ ID NO: 506245 - DNA, 19 bp, Mus musculus
  siRNA target sequence for Kit (NM_021099.2,2554-2572).
cgtgtacacatttgaaagt

SEQ ID NO: 506246 - DNA, 19 bp, Mus musculus
  siRNA target sequence for Kit (NM_021099.2,2642-2660).
ccggtcgactccaagttct

SEQ ID NO: 506247 - DNA, 19 bp, Mus musculus
  siRNA target sequence for Kit (NM_021099.2,2643-2661).
cggtcgactccaagttcta

SEQ ID NO: 506248 - DNA, 19 bp, Mus musculus
  siRNA target sequence for Kit (NM_021099.2,2645-2663).
gtcgactccaagttctaca

SEQ ID NO: 506249 - DNA, 19 bp, Mus musculus
  siRNA target sequence for Kit (NM_021099.2,2702-2720).
cacgcgcctgccgaaatgt

SEQ ID NO: 506250 - DNA, 19 bp, Mus musculus
  siRNA target sequence for Kit (NM_021099.2,2704-2722).
cgcgcctgccgaaatgtat

SEQ ID NO: 506251 - DNA, 19 bp, Mus musculus
  siRNA target sequence for Kit (NM_021099.2,2706-2724).
cgcctgccgaaatgtatga

SEQ ID NO: 506252 - DNA, 19 bp, Mus musculus
  siRNA target sequence for Kit (NM_021099.2,2744-2762).
gacgctgaccccttgaaaa

SEQ ID NO: 506253 - DNA, 19 bp, Mus musculus
  siRNA target sequence for Kit (NM_021099.2,2776-2794).
gcaggttgtccaacttatt

SEQ ID NO: 506254 - DNA, 19 bp, Mus musculus
  siRNA target sequence for Knsl7 (NM_010620.1,62-80).
cggctgcaaatctgagtta

SEQ ID NO: 506255 - DNA, 19 bp, Mus musculus
  siRNA target sequence for Knsl7 (NM_010620.1,77-95).
gttacggaatgtgacaaat

SEQ ID NO: 506256 - DNA, 19 bp, Mus musculus
  siRNA target sequence for Knsl7 (NM_010620.1,87-105).
gtgacaaattctcattcta

SEQ ID NO: 506257 - DNA, 19 bp, Mus musculus
  siRNA target sequence for Knsl7 (NM_010620.1,123-141).
ggtgacgctatcaaagttt

SEQ ID NO: 506258 - DNA, 19 bp, Mus musculus
  siRNA target sequence for Knsl7 (NM_010620.1,124-142).
gtgacgctatcaaagtttt

SEQ ID NO: 506259 - DNA, 19 bp, Mus musculus
  siRNA target sequence for Knsl7 (NM_010620.1,247-265).
cagaccccaagacttttgt

SEQ ID NO: 506260 - DNA, 19 bp, Mus musculus
  siRNA target sequence for Knsl7 (NM_010620.1,249-267).
gaccccaagacttttgtat

SEQ ID NO: 506261 - DNA, 19 bp, Mus musculus
  siRNA target sequence for Knsl7 (NM_010620.1,340-358).
catgcatgagcggttataa

SEQ ID NO: 506262 - DNA, 19 bp, Mus musculus
  siRNA target sequence for Knsl7 (NM_010620.1,417-435).
ccatcagactctgataatt

SEQ ID NO: 506263 - DNA, 19 bp, Mus musculus
  siRNA target sequence for Knsl7 (NM_010620.1,418-436).
catcagactctgataattt

SEQ ID NO: 506264 - DNA, 19 bp, Mus musculus
  siRNA target sequence for Knsl7 (NM_010620.1,454-472).
gaataattccacgaagttt

SEQ ID NO: 506265 - DNA, 19 bp, Mus musculus
  siRNA target sequence for Knsl7 (NM_010620.1,487-505).
ccttaattgatcgtgaaaa

SEQ ID NO: 506266 - DNA, 19 bp, Mus musculus
  siRNA target sequence for Knsl7 (NM_010620.1,488-506).
cttaattgatcgtgaaaaa

SEQ ID NO: 506267 - DNA, 19 bp, Mus musculus
  siRNA target sequence for Knsl7 (NM_010620.1,548-566).
ctttattgaggtctacaat

SEQ ID NO: 506268 - DNA, 19 bp, Mus musculus
  siRNA target sequence for Knsl7 (NM_010620.1,594-612).
gcgtcagtcggactgtatt

SEQ ID NO: 506269 - DNA, 19 bp, Mus musculus
  siRNA target sequence for Knsl7 (NM_010620.1,595-613).
cgtcagtcggactgtattt

SEQ ID NO: 506270 - DNA, 19 bp, Mus musculus
  siRNA target sequence for Knsl7 (NM_010620.1,681-699).
gagacctaccaggtcttat

SEQ ID NO: 506271 - DNA, 19 bp, Mus musculus
  siRNA target sequence for Knsl7 (NM_010620.1,683-701).
gacctaccaggtcttatct

SEQ ID NO: 506272 - DNA, 19 bp, Mus musculus
  siRNA target sequence for Knsl7 (NM_010620.1,686-704).
ctaccaggtcttatctaga

SEQ ID NO: 506273 - DNA, 19 bp, Mus musculus
  siRNA target sequence for Knsl7 (NM_010620.1,716-734).
cagacgtgtagcatcaaca

SEQ ID NO: 506274 - DNA, 19 bp, Mus musculus
  siRNA target sequence for Knsl7 (NM_010620.1,720-738).
cgtgtagcatcaacatcta

SEQ ID NO: 506275 - DNA, 19 bp, Mus musculus
  siRNA target sequence for Knsl7 (NM_010620.1,721-739).
gtgtagcatcaacatctat

SEQ ID NO: 506276 - DNA, 19 bp, Mus musculus
  siRNA target sequence for Knsl7 (NM_010620.1,775-793).
ccatcacaatagaatcaat

SEQ ID NO: 506277 - DNA, 19 bp, Mus musculus
  siRNA target sequence for Knsl7 (NM_010620.1,802-820).
gcagcgagaccgtgaacat

SEQ ID NO: 506278 - DNA, 19 bp, Mus musculus
  siRNA target sequence for Knsl7 (NM_010620.1,1043-1061).
caatgccaaaacagctata

SEQ ID NO: 506279 - DNA, 19 bp, Mus musculus
  siRNA target sequence for Knsl7 (NM_010620.1,1049-1067).
caaaacagctataattgca

SEQ ID NO: 506280 - DNA, 19 bp, Mus musculus
  siRNA target sequence for Knsl7 (NM_010620.1,1102-1120).
cactgtcaacacttaattt

SEQ ID NO: 506281 - DNA, 19 bp, Mus musculus
  siRNA target sequence for Knsl7 (NM_010620.1,1218-1236).
gaacaactgtctcaattta

SEQ ID NO: 506282 - DNA, 19 bp, Mus musculus
  siRNA target sequence for Knsl7 (NM_010620.1,1221-1239).
caactgtctcaatttactt

SEQ ID NO: 506283 - DNA, 19 bp, Mus musculus
  siRNA target sequence for Knsl7 (NM_010620.1,1283-1301).
gaagactaattacatagaa

SEQ ID NO: 506284 - DNA, 19 bp, Mus musculus
  siRNA target sequence for Knsl7 (NM_010620.1,1311-1329).
gaagcaatgttattcttta

SEQ ID NO: 506285 - DNA, 19 bp, Mus musculus
  siRNA target sequence for Knsl7 (NM_010620.1,1319-1337).
gttattctttaagaaatct

SEQ ID NO: 506286 - DNA, 19 bp, Mus musculus
  siRNA target sequence for Knsl7 (NM_010620.1,1380-1398).
gaagatctcaccctcaaaa

SEQ ID NO: 506287 - DNA, 19 bp, Mus musculus
  siRNA target sequence for Knsl7 (NM_010620.1,1459-1477).
gtctagagaggctccataa

SEQ ID NO: 506288 - DNA, 19 bp, Mus musculus
  siRNA target sequence for Knsl7 (NM_010620.1,1589-1607).
gtatgctatggaaaaccat

SEQ ID NO: 506289 - DNA, 19 bp, Mus musculus
  siRNA target sequence for Knsl7 (NM_010620.1,1637-1655).
gttactagcacccgtaaaa

SEQ ID NO: 506290 - DNA, 19 bp, Mus musculus
  siRNA target sequence for Knsl7 (NM_010620.1,1670-1688).
cgatgcccagtctattgca

SEQ ID NO: 506291 - DNA, 19 bp, Mus musculus
  siRNA target sequence for Knsl7 (NM_010620.1,1671-1689).
gatgcccagtctattgcaa

SEQ ID NO: 506292 - DNA, 19 bp, Mus musculus
  siRNA target sequence for Knsl7 (NM_010620.1,1676-1694).
ccagtctattgcaagacta

SEQ ID NO: 506293 - DNA, 19 bp, Mus musculus
  siRNA target sequence for Knsl7 (NM_010620.1,1679-1697).
gtctattgcaagactagaa

SEQ ID NO: 506294 - DNA, 19 bp, Mus musculus
  siRNA target sequence for Knsl7 (NM_010620.1,1715-1733).
gtctagcacagagacaaat

SEQ ID NO: 506295 - DNA, 19 bp, Mus musculus
  siRNA target sequence for Knsl7 (NM_010620.1,1787-1805).
cacaaacaccgagaagtta

SEQ ID NO: 506296 - DNA, 19 bp, Mus musculus
  siRNA target sequence for Knsl7 (NM_010620.1,1789-1807).
caaacaccgagaagttaaa

SEQ ID NO: 506297 - DNA, 19 bp, Mus musculus
  siRNA target sequence for Knsl7 (NM_010620.1,1983-2001).
gaagtttcccagctgaata

SEQ ID NO: 506298 - DNA, 19 bp, Mus musculus
  siRNA target sequence for Knsl7 (NM_010620.1,1990-2008).
cccagctgaataaactaca

SEQ ID NO: 506299 - DNA, 19 bp, Mus musculus
  siRNA target sequence for Knsl7 (NM_010620.1,2010-2028).
gctgaaacactcaagataa

SEQ ID NO: 506300 - DNA, 19 bp, Mus musculus
  siRNA target sequence for Knsl7 (NM_010620.1,2038-2056).
caaccaaggcttatcaact

SEQ ID NO: 506301 - DNA, 19 bp, Mus musculus
  siRNA target sequence for Knsl7 (NM_010620.1,2042-2060).
caaggcttatcaactttgt

SEQ ID NO: 506302 - DNA, 19 bp, Mus musculus
  siRNA target sequence for Knsl7 (NM_010620.1,2045-2063).
ggcttatcaactttgttct

SEQ ID NO: 506303 - DNA, 19 bp, Mus musculus
  siRNA target sequence for Knsl7 (NM_010620.1,2059-2077).
gttctagactagtaccaaa

SEQ ID NO: 506304 - DNA, 19 bp, Mus musculus
  siRNA target sequence for Knsl7 (NM_010620.1,2094-2112).
gggagctttggctttctgt

SEQ ID NO: 506305 - DNA, 19 bp, Mus musculus
  siRNA target sequence for Knsl7 (NM_010620.1,2122-2140).
gctctagcaggctggataa

SEQ ID NO: 506306 - DNA, 19 bp, Mus musculus
  siRNA target sequence for Knsl7 (NM_010620.1,2123-2141).
ctctagcaggctggataat

SEQ ID NO: 506307 - DNA, 19 bp, Mus musculus
  siRNA target sequence for Knsl7 (NM_010620.1,2125-2143).
ctagcaggctggataatga

SEQ ID NO: 506308 - DNA, 19 bp, Mus musculus
  siRNA target sequence for Knsl7 (NM_010620.1,2128-2146).
gcaggctggataatgatat

SEQ ID NO: 506309 - DNA, 19 bp, Mus musculus
  siRNA target sequence for Knsl7 (NM_010620.1,2129-2147).
caggctggataatgatata

SEQ ID NO: 506310 - DNA, 19 bp, Mus musculus
  siRNA target sequence for Knsl7 (NM_010620.1,2132-2150).
gctggataatgatatatta

SEQ ID NO: 506311 - DNA, 19 bp, Mus musculus
  siRNA target sequence for Knsl7 (NM_010620.1,2185-2203).
ctctggaggccgtttcaga

SEQ ID NO: 506312 - DNA, 19 bp, Mus musculus
  siRNA target sequence for Knsl7 (NM_010620.1,2266-2284).
gtaaaaacctgaaacttca

SEQ ID NO: 506313 - DNA, 19 bp, Mus musculus
  siRNA target sequence for Knsl7 (NM_010620.1,2350-2368).
gcgattggaccaaacaaca

SEQ ID NO: 506314 - DNA, 19 bp, Mus musculus
  siRNA target sequence for Knsl7 (NM_010620.1,2414-2432).
ggatgctcagactaagaat

SEQ ID NO: 506315 - DNA, 19 bp, Mus musculus
  siRNA target sequence for Knsl7 (NM_010620.1,2418-2436).
gctcagactaagaatgagt

SEQ ID NO: 506316 - DNA, 19 bp, Mus musculus
  siRNA target sequence for Knsl7 (NM_010620.1,2459-2477).
cctgcgaattgttcttaat

SEQ ID NO: 506317 - DNA, 19 bp, Mus musculus
  siRNA target sequence for Knsl7 (NM_010620.1,2460-2478).
ctgcgaattgttcttaatt

SEQ ID NO: 506318 - DNA, 19 bp, Mus musculus
  siRNA target sequence for Knsl7 (NM_010620.1,2462-2480).
gcgaattgttcttaattct

SEQ ID NO: 506319 - DNA, 19 bp, Mus musculus
  siRNA target sequence for Knsl7 (NM_010620.1,2481-2499).
gctgacaaagaactttctt

SEQ ID NO: 506320 - DNA, 19 bp, Mus musculus
  siRNA target sequence for Knsl7 (NM_010620.1,2502-2520).
gtgaaactggagtatagca

SEQ ID NO: 506321 - DNA, 19 bp, Mus musculus
  siRNA target sequence for Knsl7 (NM_010620.1,2508-2526).
ctggagtatagcacattca

SEQ ID NO: 506322 - DNA, 19 bp, Mus musculus
  siRNA target sequence for Knsl7 (NM_010620.1,2588-2606).
gctggacaacgccagatta

SEQ ID NO: 506323 - DNA, 19 bp, Mus musculus
  siRNA target sequence for Knsl7 (NM_010620.1,2591-2609).
ggacaacgccagattagaa

SEQ ID NO: 506324 - DNA, 19 bp, Mus musculus
  siRNA target sequence for Knsl7 (NM_010620.1,2594-2612).
caacgccagattagaaaat

SEQ ID NO: 506325 - DNA, 19 bp, Mus musculus
  siRNA target sequence for Knsl7 (NM_010620.1,2640-2658).
ctacaggattcctacgata

SEQ ID NO: 506326 - DNA, 19 bp, Mus musculus
  siRNA target sequence for Knsl7 (NM_010620.1,2643-2661).
caggattcctacgataact

SEQ ID NO: 506327 - DNA, 19 bp, Mus musculus
  siRNA target sequence for Knsl7 (NM_010620.1,2645-2663).
ggattcctacgataactta

SEQ ID NO: 506328 - DNA, 19 bp, Mus musculus
  siRNA target sequence for Knsl7 (NM_010620.1,2650-2668).
cctacgataacttacaaga

SEQ ID NO: 506329 - DNA, 19 bp, Mus musculus
  siRNA target sequence for Knsl7 (NM_010620.1,2651-2669).
ctacgataacttacaagaa

SEQ ID NO: 506330 - DNA, 19 bp, Mus musculus
  siRNA target sequence for Knsl7 (NM_010620.1,2654-2672).
cgataacttacaagaagta

SEQ ID NO: 506331 - DNA, 19 bp, Mus musculus
  siRNA target sequence for Knsl7 (NM_010620.1,2682-2700).
gaaatcgaccaactttcaa

SEQ ID NO: 506332 - DNA, 19 bp, Mus musculus
  siRNA target sequence for Knsl7 (NM_010620.1,2743-2761).
ctgatctgcataatttggt

SEQ ID NO: 506333 - DNA, 19 bp, Mus musculus
  siRNA target sequence for Knsl7 (NM_010620.1,2778-2796).
gaaaaagaacgcaacaaca

SEQ ID NO: 506334 - DNA, 19 bp, Mus musculus
  siRNA target sequence for Knsl7 (NM_010620.1,2787-2805).
cgcaacaacaaattgtcat

SEQ ID NO: 506335 - DNA, 19 bp, Mus musculus
  siRNA target sequence for Knsl7 (NM_010620.1,2792-2810).
caacaaattgtcattacaa

SEQ ID NO: 506336 - DNA, 19 bp, Mus musculus
  siRNA target sequence for Knsl7 (NM_010620.1,2886-2904).
gagatggccaagtgtgaaa

SEQ ID NO: 506337 - DNA, 19 bp, Mus musculus
  siRNA target sequence for Knsl7 (NM_010620.1,3020-3038).
ccaaatccaggagttaaga

SEQ ID NO: 506338 - DNA, 19 bp, Mus musculus
  siRNA target sequence for Knsl7 (NM_010620.1,3032-3050).
gttaagaatatcaattggt

SEQ ID NO: 506339 - DNA, 19 bp, Mus musculus
  siRNA target sequence for Knsl7 (NM_010620.1,3037-3055).
gaatatcaattggtgaaaa

SEQ ID NO: 506340 - DNA, 19 bp, Mus musculus
  siRNA target sequence for Knsl7 (NM_010620.1,3043-3061).
caattggtgaaaaatcaga

SEQ ID NO: 506341 - DNA, 19 bp, Mus musculus
  siRNA target sequence for Knsl7 (NM_010620.1,3065-3083).
catagccaccctgaaacaa

SEQ ID NO: 506342 - DNA, 19 bp, Mus musculus
  siRNA target sequence for Knsl7 (NM_010620.1,3115-3133).
cttcattggctgacaaaga

SEQ ID NO: 506343 - DNA, 19 bp, Mus musculus
  siRNA target sequence for Knsl7 (NM_010620.1,3356-3374).
ggaactgcaacacaagtta

SEQ ID NO: 506344 - DNA, 19 bp, Mus musculus
  siRNA target sequence for Knsl7 (NM_010620.1,3357-3375).
gaactgcaacacaagttaa

SEQ ID NO: 506345 - DNA, 19 bp, Mus musculus
  siRNA target sequence for Knsl7 (NM_010620.1,3511-3529).
caaaactcttggaaacaca

SEQ ID NO: 506346 - DNA, 19 bp, Mus musculus
  siRNA target sequence for Knsl7 (NM_010620.1,3546-3564).
gatggaagagcctctaaga

SEQ ID NO: 506347 - DNA, 19 bp, Mus musculus
  siRNA target sequence for Knsl7 (NM_010620.1,3557-3575).
ctctaagacttctttgcaa

SEQ ID NO: 506348 - DNA, 19 bp, Mus musculus
  siRNA target sequence for Knsl7 (NM_010620.1,3782-3800).
gaatgaacatgaagagatt

SEQ ID NO: 506349 - DNA, 19 bp, Mus musculus
  siRNA target sequence for Knsl7 (NM_010620.1,3969-3987).
gagcaactgcggtcaaagt

SEQ ID NO: 506350 - DNA, 19 bp, Mus musculus
  siRNA target sequence for Knsl7 (NM_010620.1,3978-3996).
cggtcaaagttggaagaaa

SEQ ID NO: 506351 - DNA, 19 bp, Mus musculus
  siRNA target sequence for Knsl7 (NM_010620.1,4082-4100).
ggtaggtcatcaaaaccta

SEQ ID NO: 506352 - DNA, 19 bp, Mus musculus
  siRNA target sequence for Knsl7 (NM_010620.1,4176-4194).
gctgaaaatctatttttga

SEQ ID NO: 506353 - DNA, 19 bp, Mus musculus
  siRNA target sequence for Krt2-8 (NM_031170.1,627-645).
gaatttgtcctcatcaaga

SEQ ID NO: 506354 - DNA, 19 bp, Mus musculus
  siRNA target sequence for Krt2-8 (NM_031170.1,888-906).
gaaaccatgtaccagatta

SEQ ID NO: 506355 - DNA, 19 bp, Mus musculus
  siRNA target sequence for Krt2-8 (NM_031170.1,978-996).
gagatgaaccgcaacatca

SEQ ID NO: 506356 - DNA, 19 bp, Mus musculus
  siRNA target sequence for Ksr (NM_013571.1,107-125).
gcagcgatgggcgagaaaa

SEQ ID NO: 506357 - DNA, 19 bp, Mus musculus
  siRNA target sequence for Ksr (NM_013571.1,111-129).
cgatgggcgagaaaaagga

SEQ ID NO: 506358 - DNA, 19 bp, Mus musculus
  siRNA target sequence for Ksr (NM_013571.1,209-227).
cagaagctcatcgatatct

SEQ ID NO: 506359 - DNA, 19 bp, Mus musculus
  siRNA target sequence for Ksr (NM_013571.1,255-273).
ccaagtgctcagtgtctaa

SEQ ID NO: 506360 - DNA, 19 bp, Mus musculus
  siRNA target sequence for Ksr (NM_013571.1,597-615).
gaggggagcacaaaatgga

SEQ ID NO: 506361 - DNA, 19 bp, Mus musculus
  siRNA target sequence for Ksr (NM_013571.1,659-677).
cctcccatggacatgcttt

SEQ ID NO: 506362 - DNA, 19 bp, Mus musculus
  siRNA target sequence for Ksr (NM_013571.1,1004-1022).
gacgtcaccccgatgaagt

SEQ ID NO: 506363 - DNA, 19 bp, Mus musculus
  siRNA target sequence for Ksr (NM_013571.1,1170-1188).
ggttaaaatgccataacaa

SEQ ID NO: 506364 - DNA, 19 bp, Mus musculus
  siRNA target sequence for Ksr (NM_013571.1,1259-1277).
gtcccgtcagatatcaaca

SEQ ID NO: 506365 - DNA, 19 bp, Mus musculus
  siRNA target sequence for Ksr (NM_013571.1,1419-1437).
ctttcctgacctcatctaa

SEQ ID NO: 506366 - DNA, 19 bp, Mus musculus
  siRNA target sequence for Ksr (NM_013571.1,1492-1510).
gttcagcttcccagacatt

SEQ ID NO: 506367 - DNA, 19 bp, Mus musculus
  siRNA target sequence for Ksr (NM_013571.1,1567-1585).
cgaccagcccaaaacagat

SEQ ID NO: 506368 - DNA, 19 bp, Mus musculus
  siRNA target sequence for Ksr (NM_013571.1,1970-1988).
cctcacctggccattatca

SEQ ID NO: 506369 - DNA, 19 bp, Mus musculus
  siRNA target sequence for Ksr (NM_013571.1,2038-2056).
gacgtctctggacatcaat

SEQ ID NO: 506370 - DNA, 19 bp, Mus musculus
  siRNA target sequence for Ksr (NM_013571.1,2095-2113).
gggttatcttcatgcaaaa

SEQ ID NO: 506371 - DNA, 19 bp, Mus musculus
  siRNA target sequence for Ksr (NM_013571.1,2274-2292).
ccgagatcgtacgagaaat

SEQ ID NO: 506372 - DNA, 19 bp, Mus musculus
  siRNA target sequence for Ksr (NM_013571.1,2276-2294).
gagatcgtacgagaaatga

SEQ ID NO: 506373 - DNA, 19 bp, Mus musculus
  siRNA target sequence for Ksr (NM_013571.1,2328-2346).
ccaaagcagccgatgtcta

SEQ ID NO: 506374 - DNA, 19 bp, Mus musculus
  siRNA target sequence for Ksr (NM_013571.1,2329-2347).
caaagcagccgatgtctat

SEQ ID NO: 506375 - DNA, 19 bp, Mus musculus
  siRNA target sequence for Ksr (NM_013571.1,2334-2352).
cagccgatgtctatgcatt

SEQ ID NO: 506376 - DNA, 19 bp, Mus musculus
  siRNA target sequence for Ksr (NM_013571.1,2353-2371).
cgggactgtgtggtatgaa

SEQ ID NO: 506377 - DNA, 19 bp, Mus musculus
  siRNA target sequence for Ksr (NM_013571.1,2355-2373).
ggactgtgtggtatgaact

SEQ ID NO: 506378 - DNA, 19 bp, Mus musculus
  siRNA target sequence for Ksr (NM_013571.1,2356-2374).
gactgtgtggtatgaacta

SEQ ID NO: 506379 - DNA, 19 bp, Mus musculus
  siRNA target sequence for Ksr (NM_013571.1,2405-2423).
cctgctgaggccttgatct

SEQ ID NO: 506380 - DNA, 19 bp, Mus musculus
  siRNA target sequence for Ksr (NM_013571.1,2613-2631).
ggaagtcggctgacattaa

SEQ ID NO: 506381 - DNA, 19 bp, Mus musculus
  siRNA target sequence for Ksr (NM_013571.1,2677-2695).
cctggagtccggtaatcca

SEQ ID NO: 506382 - DNA, 19 bp, Mus musculus
  siRNA target sequence for Lamp2 (NM_010685.2,177-195).
gccgttcagtccaatgcat

SEQ ID NO: 506383 - DNA, 19 bp, Mus musculus
  siRNA target sequence for Lamp2 (NM_010685.2,178-196).
ccgttcagtccaatgcatt

SEQ ID NO: 506384 - DNA, 19 bp, Mus musculus
  siRNA target sequence for Lamp2 (NM_010685.2,201-219).
gttaatttgacagattcaa

SEQ ID NO: 506385 - DNA, 19 bp, Mus musculus
  siRNA target sequence for Lamp2 (NM_010685.2,221-239).
gggtacttgcctttatgca

SEQ ID NO: 506386 - DNA, 19 bp, Mus musculus
  siRNA target sequence for Lamp2 (NM_010685.2,240-258).
gaatgggagatgaatttca

SEQ ID NO: 506387 - DNA, 19 bp, Mus musculus
  siRNA target sequence for Lamp2 (NM_010685.2,246-264).
gagatgaatttcacaataa

SEQ ID NO: 506388 - DNA, 19 bp, Mus musculus
  siRNA target sequence for Lamp2 (NM_010685.2,248-266).
gatgaatttcacaataaca

SEQ ID NO: 506389 - DNA, 19 bp, Mus musculus
  siRNA target sequence for Lamp2 (NM_010685.2,251-269).
gaatttcacaataacatat

SEQ ID NO: 506390 - DNA, 19 bp, Mus musculus
  siRNA target sequence for Lamp2 (NM_010685.2,257-275).
cacaataacatatgaaact

SEQ ID NO: 506391 - DNA, 19 bp, Mus musculus
  siRNA target sequence for Lamp2 (NM_010685.2,353-371).
ccggaatagtgccaaaata

SEQ ID NO: 506392 - DNA, 19 bp, Mus musculus
  siRNA target sequence for Lamp2 (NM_010685.2,354-372).
cggaatagtgccaaaataa

SEQ ID NO: 506393 - DNA, 19 bp, Mus musculus
  siRNA target sequence for Lamp2 (NM_010685.2,355-373).
ggaatagtgccaaaataat

SEQ ID NO: 506394 - DNA, 19 bp, Mus musculus
  siRNA target sequence for Lamp2 (NM_010685.2,363-381).
gccaaaataatgatacaat

SEQ ID NO: 506395 - DNA, 19 bp, Mus musculus
  siRNA target sequence for Lamp2 (NM_010685.2,393-411).
gtctcttgggctgtgaatt

SEQ ID NO: 506396 - DNA, 19 bp, Mus musculus
  siRNA target sequence for Lamp2 (NM_010685.2,419-437).
ggaagcatctcattattca

SEQ ID NO: 506397 - DNA, 19 bp, Mus musculus
  siRNA target sequence for Lamp2 (NM_010685.2,466-484).
ctagtgatagcacagtatt

SEQ ID NO: 506398 - DNA, 19 bp, Mus musculus
  siRNA target sequence for Lamp2 (NM_010685.2,495-513).
gtagctaaaggagttcata

SEQ ID NO: 506399 - DNA, 19 bp, Mus musculus
  siRNA target sequence for Lamp2 (NM_010685.2,552-570).
gtcatctttaagtgcaata

SEQ ID NO: 506400 - DNA, 19 bp, Mus musculus
  siRNA target sequence for Lamp2 (NM_010685.2,594-612).
cctgtcgttcagaaatatt

SEQ ID NO: 506401 - DNA, 19 bp, Mus musculus
  siRNA target sequence for Lamp2 (NM_010685.2,626-644).
gcaagcttttgtccaaaat

SEQ ID NO: 506402 - DNA, 19 bp, Mus musculus
  siRNA target sequence for Lamp2 (NM_010685.2,646-664).
gtacagtgagtaaaaatga

SEQ ID NO: 506403 - DNA, 19 bp, Mus musculus
  siRNA target sequence for Lamp2 (NM_010685.2,699-717).
gtggcacccatcattcaca

SEQ ID NO: 506404 - DNA, 19 bp, Mus musculus
  siRNA target sequence for Lamp2 (NM_010685.2,723-741).
gccccgtcgactacaacta

SEQ ID NO: 506405 - DNA, 19 bp, Mus musculus
  siRNA target sequence for Lamp2 (NM_010685.2,725-743).
cccgtcgactacaactaca

SEQ ID NO: 506406 - DNA, 19 bp, Mus musculus
  siRNA target sequence for Lamp2 (NM_010685.2,781-799).
caactccaaccgttggaaa

SEQ ID NO: 506407 - DNA, 19 bp, Mus musculus
  siRNA target sequence for Lamp2 (NM_010685.2,784-802).
ctccaaccgttggaaacta

SEQ ID NO: 506408 - DNA, 19 bp, Mus musculus
  siRNA target sequence for Lamp2 (NM_010685.2,943-961).
ctcaacttaggctgaacaa

SEQ ID NO: 506409 - DNA, 19 bp, Mus musculus
  siRNA target sequence for Lamp2 (NM_010685.2,953-971).
gctgaacaacagccaaatt

SEQ ID NO: 506410 - DNA, 19 bp, Mus musculus
  siRNA target sequence for Lamp2 (NM_010685.2,962-980).
cagccaaattaagtatctt

SEQ ID NO: 506411 - DNA, 19 bp, Mus musculus
  siRNA target sequence for Lamp2 (NM_010685.2,1005-1023).
gaaaaacggttctatctga

SEQ ID NO: 506412 - DNA, 19 bp, Mus musculus
  siRNA target sequence for Lamp2 (NM_010685.2,1016-1034).
ctatctgaaggaagtgaat

SEQ ID NO: 506413 - DNA, 19 bp, Mus musculus
  siRNA target sequence for Lamp2 (NM_010685.2,1020-1038).
ctgaaggaagtgaatgtct

SEQ ID NO: 506414 - DNA, 19 bp, Mus musculus
  siRNA target sequence for Lamp2 (NM_010685.2,1026-1044).
gaagtgaatgtctacatgt

SEQ ID NO: 506415 - DNA, 19 bp, Mus musculus
  siRNA target sequence for Lamp2 (NM_010685.2,1051-1069).
ctaatggctcagctttcaa

SEQ ID NO: 506416 - DNA, 19 bp, Mus musculus
  siRNA target sequence for Lamp2 (NM_010685.2,1075-1093).
ccaacaagaaccttagctt

SEQ ID NO: 506417 - DNA, 19 bp, Mus musculus
  siRNA target sequence for Lamp2 (NM_010685.2,1117-1135).
cttatatgtgcaacaaaga

SEQ ID NO: 506418 - DNA, 19 bp, Mus musculus
  siRNA target sequence for Lamp2 (NM_010685.2,1149-1167).
gtgtctagagcgtttcaga

SEQ ID NO: 506419 - DNA, 19 bp, Mus musculus
  siRNA target sequence for Lamp2 (NM_010685.2,1253-1271).
caccattctaataccaatt

SEQ ID NO: 506420 - DNA, 19 bp, Mus musculus
  siRNA target sequence for Lamp2 (NM_010685.2,1255-1273).
ccattctaataccaattat

SEQ ID NO: 506421 - DNA, 19 bp, Mus musculus
  siRNA target sequence for Lamp2 (NM_010685.2,1256-1274).
cattctaataccaattata

SEQ ID NO: 506422 - DNA, 19 bp, Mus musculus
  siRNA target sequence for Lamp2 (NM_010685.2,1284-1302).
ggtctttcaggcttgatta

SEQ ID NO: 506423 - DNA, 19 bp, Mus musculus
  siRNA target sequence for Lamp2 (NM_010685.2,1285-1303).
gtctttcaggcttgattat

SEQ ID NO: 506424 - DNA, 19 bp, Mus musculus
  siRNA target sequence for Lamp2 (NM_010685.2,1291-1309).
caggcttgattatcgttat

SEQ ID NO: 506425 - DNA, 19 bp, Mus musculus
  siRNA target sequence for Lamp2 (NM_010685.2,1298-1316).
gattatcgttatagtgatt

SEQ ID NO: 506426 - DNA, 19 bp, Mus musculus
  siRNA target sequence for Lamp2 (NM_010685.2,1323-1341).
ctaattggcagaagaaaga

SEQ ID NO: 506427 - DNA, 19 bp, Mus musculus
  siRNA target sequence for Lats2 (NM_015771.1,180-198).
ggcagcgattgcaagagat

SEQ ID NO: 506428 - DNA, 19 bp, Mus musculus
  siRNA target sequence for Lats2 (NM_015771.1,181-199).
gcagcgattgcaagagatt

SEQ ID NO: 506429 - DNA, 19 bp, Mus musculus
  siRNA target sequence for Lats2 (NM_015771.1,322-340).
gagagccaccccgaagttt

SEQ ID NO: 506430 - DNA, 19 bp, Mus musculus
  siRNA target sequence for Lats2 (NM_015771.1,331-349).
cccgaagtttggaccttat

SEQ ID NO: 506431 - DNA, 19 bp, Mus musculus
  siRNA target sequence for Lats2 (NM_015771.1,333-351).
cgaagtttggaccttatca

SEQ ID NO: 506432 - DNA, 19 bp, Mus musculus
  siRNA target sequence for Lats2 (NM_015771.1,359-377).
ctcagggaaatccgatatt

SEQ ID NO: 506433 - DNA, 19 bp, Mus musculus
  siRNA target sequence for Lats2 (NM_015771.1,502-520).
gggcagtaggagtatcgaa

SEQ ID NO: 506434 - DNA, 19 bp, Mus musculus
  siRNA target sequence for Lats2 (NM_015771.1,859-877).
ctatggtcgtggtcatcta

SEQ ID NO: 506435 - DNA, 19 bp, Mus musculus
  siRNA target sequence for Lats2 (NM_015771.1,863-881).
ggtcgtggtcatctactat

SEQ ID NO: 506436 - DNA, 19 bp, Mus musculus
  siRNA target sequence for Lats2 (NM_015771.1,1059-1077).
cccacccattacatgtgtt

SEQ ID NO: 506437 - DNA, 19 bp, Mus musculus
  siRNA target sequence for Lats2 (NM_015771.1,1146-1164).
gcctcaatgctgacttgta

SEQ ID NO: 506438 - DNA, 19 bp, Mus musculus
  siRNA target sequence for Lats2 (NM_015771.1,1738-1756).
ggtgcctgtccgcaagaat

SEQ ID NO: 506439 - DNA, 19 bp, Mus musculus
  siRNA target sequence for Lats2 (NM_015771.1,1739-1757).
gtgcctgtccgcaagaata

SEQ ID NO: 506440 - DNA, 19 bp, Mus musculus
  siRNA target sequence for Lats2 (NM_015771.1,1778-1796).
gagtctcgcatcaagagtt

SEQ ID NO: 506441 - DNA, 19 bp, Mus musculus
  siRNA target sequence for Lats2 (NM_015771.1,1800-1818).
ccccttatgccttcaaatt

SEQ ID NO: 506442 - DNA, 19 bp, Mus musculus
  siRNA target sequence for Lats2 (NM_015771.1,1803-1821).
cttatgccttcaaattctt

SEQ ID NO: 506443 - DNA, 19 bp, Mus musculus
  siRNA target sequence for Lats2 (NM_015771.1,2004-2022).
ccatgtttgtgaaaatcaa

SEQ ID NO: 506444 - DNA, 19 bp, Mus musculus
  siRNA target sequence for Lats2 (NM_015771.1,2081-2099).
gctctgtacgccatgaaga

SEQ ID NO: 506445 - DNA, 19 bp, Mus musculus
  siRNA target sequence for Lats2 (NM_015771.1,2404-2422).
cgacctggatggtcatatt

SEQ ID NO: 506446 - DNA, 19 bp, Mus musculus
  siRNA target sequence for Lats2 (NM_015771.1,2405-2423).
gacctggatggtcatatta

SEQ ID NO: 506447 - DNA, 19 bp, Mus musculus
  siRNA target sequence for Lats2 (NM_015771.1,2525-2543).
gacctctgggacgatgttt

SEQ ID NO: 506448 - DNA, 19 bp, Mus musculus
  siRNA target sequence for Lats2 (NM_015771.1,2608-2626).
gtgcctggcacattctctt

SEQ ID NO: 506449 - DNA, 19 bp, Mus musculus
  siRNA target sequence for Lats2 (NM_015771.1,2624-2642).
cttgtcgggacaccaaatt

SEQ ID NO: 506450 - DNA, 19 bp, Mus musculus
  siRNA target sequence for Lats2 (NM_015771.1,2627-2645).
gtcgggacaccaaattaca

SEQ ID NO: 506451 - DNA, 19 bp, Mus musculus
  siRNA target sequence for Lats2 (NM_015771.1,2700-2718).
gcgtcggtgtgattctctt

SEQ ID NO: 506452 - DNA, 19 bp, Mus musculus
  siRNA target sequence for Lats2 (NM_015771.1,2701-2719).
cgtcggtgtgattctcttt

SEQ ID NO: 506453 - DNA, 19 bp, Mus musculus
  siRNA target sequence for Lats2 (NM_015771.1,2705-2723).
ggtgtgattctctttgaga

SEQ ID NO: 506454 - DNA, 19 bp, Mus musculus
  siRNA target sequence for Lats2 (NM_015771.1,2769-2787).
cgcagctgaaggtgatcaa

SEQ ID NO: 506455 - DNA, 19 bp, Mus musculus
  siRNA target sequence for Lats2 (NM_015771.1,3135-3153).
gcaggttcttcgatgacaa

SEQ ID NO: 506456 - DNA, 19 bp, Mus musculus
  siRNA target sequence for Lck (NM_010693.1,421-439).
gagacttgggctttgagaa

SEQ ID NO: 506457 - DNA, 19 bp, Mus musculus
  siRNA target sequence for Lck (NM_010693.1,513-531).
ggcttcattcccttcaact

SEQ ID NO: 506458 - DNA, 19 bp, Mus musculus
  siRNA target sequence for Lck (NM_010693.1,565-583).
cttggttcttcaagaatct

SEQ ID NO: 506459 - DNA, 19 bp, Mus musculus
  siRNA target sequence for Lck (NM_010693.1,714-732).
gaagtggtgaaacattaca

SEQ ID NO: 506460 - DNA, 19 bp, Mus musculus
  siRNA target sequence for Lck (NM_010693.1,787-805).
ccggattgcacgatctagt

SEQ ID NO: 506461 - DNA, 19 bp, Mus musculus
  siRNA target sequence for Lck (NM_010693.1,798-816).
gatctagtccgccattaca

SEQ ID NO: 506462 - DNA, 19 bp, Mus musculus
  siRNA target sequence for Lck (NM_010693.1,828-846).
gatgggctgtgcacaaagt

SEQ ID NO: 506463 - DNA, 19 bp, Mus musculus
  siRNA target sequence for Lck (NM_010693.1,831-849).
gggctgtgcacaaagttga

SEQ ID NO: 506464 - DNA, 19 bp, Mus musculus
  siRNA target sequence for Lck (NM_010693.1,963-981).
gtgtggatggggtactaca

SEQ ID NO: 506465 - DNA, 19 bp, Mus musculus
  siRNA target sequence for Lck (NM_010693.1,1085-1103).
gctagtccggctttatgca

SEQ ID NO: 506466 - DNA, 19 bp, Mus musculus
  siRNA target sequence for Lck (NM_010693.1,1151-1169).
cgggagcctagtagatttt

SEQ ID NO: 506467 - DNA, 19 bp, Mus musculus
  siRNA target sequence for Lck (NM_010693.1,1153-1171).
ggagcctagtagattttct

SEQ ID NO: 506468 - DNA, 19 bp, Mus musculus
  siRNA target sequence for Lck (NM_010693.1,1180-1198).
cctcgggcatcaagttgaa

SEQ ID NO: 506469 - DNA, 19 bp, Mus musculus
  siRNA target sequence for Lck (NM_010693.1,1181-1199).
ctcgggcatcaagttgaat

SEQ ID NO: 506470 - DNA, 19 bp, Mus musculus
  siRNA target sequence for Lck (NM_010693.1,1246-1264).
cgttcatcgaagaacagaa

SEQ ID NO: 506471 - DNA, 19 bp, Mus musculus
  siRNA target sequence for Lck (NM_010693.1,1310-1328).
cacgctgagctgcaagatt

SEQ ID NO: 506472 - DNA, 19 bp, Mus musculus
  siRNA target sequence for Lck (NM_010693.1,1520-1538).
gaccaaccctgaagtcatt

SEQ ID NO: 506473 - DNA, 19 bp, Mus musculus
  siRNA target sequence for Lig1 (NM_010715.1,1077-1095).
ccctggatccagcaaatta

SEQ ID NO: 506474 - DNA, 19 bp, Mus musculus
  siRNA target sequence for Lig1 (NM_010715.1,1078-1096).
cctggatccagcaaattat

SEQ ID NO: 506475 - DNA, 19 bp, Mus musculus
  siRNA target sequence for Lig1 (NM_010715.1,1079-1097).
ctggatccagcaaattata

SEQ ID NO: 506476 - DNA, 19 bp, Mus musculus
  siRNA target sequence for Lig1 (NM_010715.1,1101-1119).
cttccaagaataactatca

SEQ ID NO: 506477 - DNA, 19 bp, Mus musculus
  siRNA target sequence for Lig1 (NM_010715.1,1149-1167).
gccagaaggtcccttttct

SEQ ID NO: 506478 - DNA, 19 bp, Mus musculus
  siRNA target sequence for Lig1 (NM_010715.1,1177-1195).
ccggacatttgagaagatt

SEQ ID NO: 506479 - DNA, 19 bp, Mus musculus
  siRNA target sequence for Lig1 (NM_010715.1,1481-1499).
cctccacctccacttacta

SEQ ID NO: 506480 - DNA, 19 bp, Mus musculus
  siRNA target sequence for Lig1 (NM_010715.1,1482-1500).
ctccacctccacttactat

SEQ ID NO: 506481 - DNA, 19 bp, Mus musculus
  siRNA target sequence for Lig1 (NM_010715.1,1707-1725).
caccccctggccaagaatt

SEQ ID NO: 506482 - DNA, 19 bp, Mus musculus
  siRNA target sequence for Lig1 (NM_010715.1,1790-1808).
gaacaaggcatgatcttga

SEQ ID NO: 506483 - DNA, 19 bp, Mus musculus
  siRNA target sequence for Lig1 (NM_010715.1,1830-1848).
ctgacctggatcgaatcat

SEQ ID NO: 506484 - DNA, 19 bp, Mus musculus
  siRNA target sequence for Lig1 (NM_010715.1,1903-1921).
cccaggggtccctcttaaa

SEQ ID NO: 506485 - DNA, 19 bp, Mus musculus
  siRNA target sequence for Lig1 (NM_010715.1,1907-1925).
ggggtccctcttaaaccaa

SEQ ID NO: 506486 - DNA, 19 bp, Mus musculus
  siRNA target sequence for Lig1 (NM_010715.1,1947-1965).
gtgtcagtgaggtcctaaa

SEQ ID NO: 506487 - DNA, 19 bp, Mus musculus
  siRNA target sequence for Lig1 (NM_010715.1,1984-2002).
cttcacctgtgaatataaa

SEQ ID NO: 506488 - DNA, 19 bp, Mus musculus
  siRNA target sequence for Lig1 (NM_010715.1,2016-2034).
gagcacagatacatgttct

SEQ ID NO: 506489 - DNA, 19 bp, Mus musculus
  siRNA target sequence for Lig1 (NM_010715.1,2039-2057).
ggtggagaagtgaagatct

SEQ ID NO: 506490 - DNA, 19 bp, Mus musculus
  siRNA target sequence for Lig1 (NM_010715.1,2040-2058).
gtggagaagtgaagatctt

SEQ ID NO: 506491 - DNA, 19 bp, Mus musculus
  siRNA target sequence for Lig1 (NM_010715.1,2084-2102).
ggaaagtatcctgacatta

SEQ ID NO: 506492 - DNA, 19 bp, Mus musculus
  siRNA target sequence for Lig1 (NM_010715.1,2085-2103).
gaaagtatcctgacattat

SEQ ID NO: 506493 - DNA, 19 bp, Mus musculus
  siRNA target sequence for Lig1 (NM_010715.1,2106-2124).
gccgcatccccaagattaa

SEQ ID NO: 506494 - DNA, 19 bp, Mus musculus
  siRNA target sequence for Lig1 (NM_010715.1,2107-2125).
ccgcatccccaagattaaa

SEQ ID NO: 506495 - DNA, 19 bp, Mus musculus
  siRNA target sequence for Lig1 (NM_010715.1,2109-2127).
gcatccccaagattaaaca

SEQ ID NO: 506496 - DNA, 19 bp, Mus musculus
  siRNA target sequence for Lig1 (NM_010715.1,2129-2147).
ccctcagtcacatctttca

SEQ ID NO: 506497 - DNA, 19 bp, Mus musculus
  siRNA target sequence for Lig1 (NM_010715.1,2168-2186).
gcctgggaccgggaaaaga

SEQ ID NO: 506498 - DNA, 19 bp, Mus musculus
  siRNA target sequence for Lig1 (NM_010715.1,2169-2187).
cctgggaccgggaaaagaa

SEQ ID NO: 506499 - DNA, 19 bp, Mus musculus
  siRNA target sequence for Lig4 (NM_176953.2,207-225).
ggcttcctcacaaacttca

SEQ ID NO: 506500 - DNA, 19 bp, Mus musculus
  siRNA target sequence for Lig4 (NM_176953.2,215-233).
cacaaacttcacaaactgt

SEQ ID NO: 506501 - DNA, 19 bp, Mus musculus
  siRNA target sequence for Lig4 (NM_176953.2,244-262).
gtcccctttgcagacttat

SEQ ID NO: 506502 - DNA, 19 bp, Mus musculus
  siRNA target sequence for Lig4 (NM_176953.2,246-264).
cccctttgcagacttatgt

SEQ ID NO: 506503 - DNA, 19 bp, Mus musculus
  siRNA target sequence for Lig4 (NM_176953.2,247-265).
ccctttgcagacttatgtt

SEQ ID NO: 506504 - DNA, 19 bp, Mus musculus
  siRNA target sequence for Lig4 (NM_176953.2,258-276).
cttatgttccacactagaa

SEQ ID NO: 506505 - DNA, 19 bp, Mus musculus
  siRNA target sequence for Lig4 (NM_176953.2,274-292).
gaacggatacagaaaggta

SEQ ID NO: 506506 - DNA, 19 bp, Mus musculus
  siRNA target sequence for Lig4 (NM_176953.2,290-308).
gtaaagaccgtgcagaaaa

SEQ ID NO: 506507 - DNA, 19 bp, Mus musculus
  siRNA target sequence for Lig4 (NM_176953.2,295-313).
gaccgtgcagaaaaaatca

SEQ ID NO: 506508 - DNA, 19 bp, Mus musculus
  siRNA target sequence for Lig4 (NM_176953.2,333-351).
ggattcgtggagaaaattt

SEQ ID NO: 506509 - DNA, 19 bp, Mus musculus
  siRNA target sequence for Lig4 (NM_176953.2,338-356).
cgtggagaaaatttcatga

SEQ ID NO: 506510 - DNA, 19 bp, Mus musculus
  siRNA target sequence for Lig4 (NM_176953.2,399-417).
ccctgcaatgagactcatt

SEQ ID NO: 506511 - DNA, 19 bp, Mus musculus
  siRNA target sequence for Lig4 (NM_176953.2,414-432).
cattctcccccagttagaa

SEQ ID NO: 506512 - DNA, 19 bp, Mus musculus
  siRNA target sequence for Lig4 (NM_176953.2,472-490).
gctaagctctacatcgaat

SEQ ID NO: 506513 - DNA, 19 bp, Mus musculus
  siRNA target sequence for Lig4 (NM_176953.2,473-491).
ctaagctctacatcgaatt

SEQ ID NO: 506514 - DNA, 19 bp, Mus musculus
  siRNA target sequence for Lig4 (NM_176953.2,483-501).
catcgaattgctgaactta

SEQ ID NO: 506515 - DNA, 19 bp, Mus musculus
  siRNA target sequence for Lig4 (NM_176953.2,621-639).
gaaaggaagcttaaccata

SEQ ID NO: 506516 - DNA, 19 bp, Mus musculus
  siRNA target sequence for Lig4 (NM_176953.2,661-679).
gacttagttgccagcaata

SEQ ID NO: 506517 - DNA, 19 bp, Mus musculus
  siRNA target sequence for Lig4 (NM_176953.2,737-755).
gttcagcactggagcaaaa

SEQ ID NO: 506518 - DNA, 19 bp, Mus musculus
  siRNA target sequence for Lig4 (NM_176953.2,758-776).
ggctgattcgcatgattat

SEQ ID NO: 506519 - DNA, 19 bp, Mus musculus
  siRNA target sequence for Lig4 (NM_176953.2,760-778).
ctgattcgcatgattatca

SEQ ID NO: 506520 - DNA, 19 bp, Mus musculus
  siRNA target sequence for Lig4 (NM_176953.2,766-784).
cgcatgattatcaaagact

SEQ ID NO: 506521 - DNA, 19 bp, Mus musculus
  siRNA target sequence for Lig4 (NM_176953.2,768-786).
catgattatcaaagactta

SEQ ID NO: 506522 - DNA, 19 bp, Mus musculus
  siRNA target sequence for Lig4 (NM_176953.2,794-812).
gcatcagtcagcaaacaat

SEQ ID NO: 506523 - DNA, 19 bp, Mus musculus
  siRNA target sequence for Lig4 (NM_176953.2,802-820).
cagcaaacaatattttcca

SEQ ID NO: 506524 - DNA, 19 bp, Mus musculus
  siRNA target sequence for Lig4 (NM_176953.2,904-922).
gggcttagtgacatctcta

SEQ ID NO: 506525 - DNA, 19 bp, Mus musculus
  siRNA target sequence for Lig4 (NM_176953.2,905-923).
ggcttagtgacatctctat

SEQ ID NO: 506526 - DNA, 19 bp, Mus musculus
  siRNA target sequence for Lig4 (NM_176953.2,1060-1078).
gcgctgtaccggtacttct

SEQ ID NO: 506527 - DNA, 19 bp, Mus musculus
  siRNA target sequence for Lig4 (NM_176953.2,1101-1119).
cgaccagtttggtgaatct

SEQ ID NO: 506528 - DNA, 19 bp, Mus musculus
  siRNA target sequence for Lig4 (NM_176953.2,1129-1147).
ggctctctcaccccattta

SEQ ID NO: 506529 - DNA, 19 bp, Mus musculus
  siRNA target sequence for Lig4 (NM_176953.2,1130-1148).
gctctctcaccccatttat

SEQ ID NO: 506530 - DNA, 19 bp, Mus musculus
  siRNA target sequence for Lig4 (NM_176953.2,1240-1258).
ggggtcaagtttgatatca

SEQ ID NO: 506531 - DNA, 19 bp, Mus musculus
  siRNA target sequence for Lig4 (NM_176953.2,1277-1295).
ctggcctacagacttgtta

SEQ ID NO: 506532 - DNA, 19 bp, Mus musculus
  siRNA target sequence for Lig4 (NM_176953.2,1298-1316).
ctgtttttgacgtactgat

SEQ ID NO: 506533 - DNA, 19 bp, Mus musculus
  siRNA target sequence for Lig4 (NM_176953.2,1306-1324).
gacgtactgatggttaata

SEQ ID NO: 506534 - DNA, 19 bp, Mus musculus
  siRNA target sequence for Lig4 (NM_176953.2,1309-1327).
gtactgatggttaataaga

SEQ ID NO: 506535 - DNA, 19 bp, Mus musculus
  siRNA target sequence for Lig4 (NM_176953.2,1368-1386).
ccttagtagcactttcaca

SEQ ID NO: 506536 - DNA, 19 bp, Mus musculus
  siRNA target sequence for Lig4 (NM_176953.2,1377-1395).
cactttcacacccatacaa

SEQ ID NO: 506537 - DNA, 19 bp, Mus musculus
  siRNA target sequence for Lig4 (NM_176953.2,1389-1407).
catacaaggccgcatagaa

SEQ ID NO: 506538 - DNA, 19 bp, Mus musculus
  siRNA target sequence for Lig4 (NM_176953.2,1512-1530).
catttacaagccagacaaa

SEQ ID NO: 506539 - DNA, 19 bp, Mus musculus
  siRNA target sequence for Lig4 (NM_176953.2,1535-1553).
gtgaagggtggctaaagat

SEQ ID NO: 506540 - DNA, 19 bp, Mus musculus
  siRNA target sequence for Lig4 (NM_176953.2,1537-1555).
gaagggtggctaaagatta

SEQ ID NO: 506541 - DNA, 19 bp, Mus musculus
  siRNA target sequence for Lig4 (NM_176953.2,1566-1584).
cgtcagtggactaatggat

SEQ ID NO: 506542 - DNA, 19 bp, Mus musculus
  siRNA target sequence for Lig4 (NM_176953.2,1608-1626).
gggctactggggtaaaggt

SEQ ID NO: 506543 - DNA, 19 bp, Mus musculus
  siRNA target sequence for Lig4 (NM_176953.2,1609-1627).
ggctactggggtaaaggtt

SEQ ID NO: 506544 - DNA, 19 bp, Mus musculus
  siRNA target sequence for Lig4 (NM_176953.2,1684-1702).
ggtgacaggccatctgtat

SEQ ID NO: 506545 - DNA, 19 bp, Mus musculus
  siRNA target sequence for Lig4 (NM_176953.2,1725-1743).
gtctggttacaccatgaaa

SEQ ID NO: 506546 - DNA, 19 bp, Mus musculus
  siRNA target sequence for Lig4 (NM_176953.2,1727-1745).
ctggttacaccatgaaaga

SEQ ID NO: 506547 - DNA, 19 bp, Mus musculus
  siRNA target sequence for Lig4 (NM_176953.2,1749-1767).
ctatgacctgggcttgaaa

SEQ ID NO: 506548 - DNA, 19 bp, Mus musculus
  siRNA target sequence for Lig4 (NM_176953.2,1833-1851).
gaagccggaagtgtacata

SEQ ID NO: 506549 - DNA, 19 bp, Mus musculus
  siRNA target sequence for Lig4 (NM_176953.2,1933-1951).
cgcttcccacgcatcgaaa

SEQ ID NO: 506550 - DNA, 19 bp, Mus musculus
  siRNA target sequence for Lig4 (NM_176953.2,1934-1952).
gcttcccacgcatcgaaaa

SEQ ID NO: 506551 - DNA, 19 bp, Mus musculus
  siRNA target sequence for Lig4 (NM_176953.2,1939-1957).
ccacgcatcgaaaagatca

SEQ ID NO: 506552 - DNA, 19 bp, Mus musculus
  siRNA target sequence for Lig4 (NM_176953.2,1971-1989).
gtggcacgaatgtatgaca

SEQ ID NO: 506553 - DNA, 19 bp, Mus musculus
  siRNA target sequence for Lig4 (NM_176953.2,2036-2054).
ccacgaaacaccttcatgt

SEQ ID NO: 506554 - DNA, 19 bp, Mus musculus
  siRNA target sequence for Lig4 (NM_176953.2,2037-2055).
cacgaaacaccttcatgta

SEQ ID NO: 506555 - DNA, 19 bp, Mus musculus
  siRNA target sequence for Lig4 (NM_176953.2,2105-2123).
cgaagaaagccattagaat

SEQ ID NO: 506556 - DNA, 19 bp, Mus musculus
  siRNA target sequence for Lig4 (NM_176953.2,2109-2127).
gaaagccattagaatcatt

SEQ ID NO: 506557 - DNA, 19 bp, Mus musculus
  siRNA target sequence for Lig4 (NM_176953.2,2143-2161).
cccaacctttctaacgtaa

SEQ ID NO: 506558 - DNA, 19 bp, Mus musculus
  siRNA target sequence for Lig4 (NM_176953.2,2144-2162).
ccaacctttctaacgtaaa

SEQ ID NO: 506559 - DNA, 19 bp, Mus musculus
  siRNA target sequence for Lig4 (NM_176953.2,2198-2216).
gtgttatgagtggattaga

SEQ ID NO: 506560 - DNA, 19 bp, Mus musculus
  siRNA target sequence for Lig4 (NM_176953.2,2251-2269).
gcagaattcggtggttata

SEQ ID NO: 506561 - DNA, 19 bp, Mus musculus
  siRNA target sequence for Lig4 (NM_176953.2,2252-2270).
cagaattcggtggttatat

SEQ ID NO: 506562 - DNA, 19 bp, Mus musculus
  siRNA target sequence for Lig4 (NM_176953.2,2261-2279).
gtggttatatagtacagaa

SEQ ID NO: 506563 - DNA, 19 bp, Mus musculus
  siRNA target sequence for Lig4 (NM_176953.2,2287-2305).
ccggatacatactgtgtta

SEQ ID NO: 506564 - DNA, 19 bp, Mus musculus
  siRNA target sequence for Lig4 (NM_176953.2,2308-2326).
gcaggttctgagaacgtta

SEQ ID NO: 506565 - DNA, 19 bp, Mus musculus
  siRNA target sequence for Lig4 (NM_176953.2,2371-2389).
cccgagtggcttttagagt

SEQ ID NO: 506566 - DNA, 19 bp, Mus musculus
  siRNA target sequence for Lig4 (NM_176953.2,2414-2432).
cgtggcaacctcgctttat

SEQ ID NO: 506567 - DNA, 19 bp, Mus musculus
  siRNA target sequence for Lig4 (NM_176953.2,2417-2435).
ggcaacctcgctttatgat

SEQ ID NO: 506568 - DNA, 19 bp, Mus musculus
  siRNA target sequence for Lig4 (NM_176953.2,2418-2436).
gcaacctcgctttatgatt

SEQ ID NO: 506569 - DNA, 19 bp, Mus musculus
  siRNA target sequence for Lig4 (NM_176953.2,2447-2465).
cgtcgacaaagcagcattt

SEQ ID NO: 506570 - DNA, 19 bp, Mus musculus
  siRNA target sequence for Lig4 (NM_176953.2,2460-2478).
gcattttgcccgtgagtat

SEQ ID NO: 506571 - DNA, 19 bp, Mus musculus
  siRNA target sequence for Lig4 (NM_176953.2,2481-2499).
ctgctatggtgatagctat

SEQ ID NO: 506572 - DNA, 19 bp, Mus musculus
  siRNA target sequence for Lig4 (NM_176953.2,2489-2507).
gtgatagctattttgttga

SEQ ID NO: 506573 - DNA, 19 bp, Mus musculus
  siRNA target sequence for Lig4 (NM_176953.2,2510-2528).
cagatttggatcaattgaa

SEQ ID NO: 506574 - DNA, 19 bp, Mus musculus
  siRNA target sequence for Lig4 (NM_176953.2,2583-2601).
ccctgtgattgctgactta

SEQ ID NO: 506575 - DNA, 19 bp, Mus musculus
  siRNA target sequence for Lig4 (NM_176953.2,2596-2614).
gacttagaatgtcgttatt

SEQ ID NO: 506576 - DNA, 19 bp, Mus musculus
  siRNA target sequence for Lig4 (NM_176953.2,2644-2662).
cgacattacaccatttatt

SEQ ID NO: 506577 - DNA, 19 bp, Mus musculus
  siRNA target sequence for Lig4 (NM_176953.2,2654-2672).
ccatttatttggacttgta

SEQ ID NO: 506578 - DNA, 19 bp, Mus musculus
  siRNA target sequence for Lig4 (NM_176953.2,2677-2695).
gttattaatgacttgagtt

SEQ ID NO: 506579 - DNA, 19 bp, Mus musculus
  siRNA target sequence for Lig4 (NM_176953.2,2704-2722).
gaagccacgagattaggta

SEQ ID NO: 506580 - DNA, 19 bp, Mus musculus
  siRNA target sequence for Lig4 (NM_176953.2,2707-2725).
gccacgagattaggtatta

SEQ ID NO: 506581 - DNA, 19 bp, Mus musculus
  siRNA target sequence for Lig4 (NM_176953.2,2709-2727).
cacgagattaggtattaca

SEQ ID NO: 506582 - DNA, 19 bp, Mus musculus
  siRNA target sequence for Lig4 (NM_176953.2,2776-2794).
gaaggggtatctcatgtta

SEQ ID NO: 506583 - DNA, 19 bp, Mus musculus
  siRNA target sequence for Lig4 (NM_176953.2,2779-2797).
ggggtatctcatgttatca

SEQ ID NO: 506584 - DNA, 19 bp, Mus musculus
  siRNA target sequence for Lig4 (NM_176953.2,2780-2798).
gggtatctcatgttatcat

SEQ ID NO: 506585 - DNA, 19 bp, Mus musculus
  siRNA target sequence for Lig4 (NM_176953.2,2781-2799).
ggtatctcatgttatcatt

SEQ ID NO: 506586 - DNA, 19 bp, Mus musculus
  siRNA target sequence for Lig4 (NM_176953.2,2813-2831).
gacgagttactgactttaa

SEQ ID NO: 506587 - DNA, 19 bp, Mus musculus
  siRNA target sequence for Lig4 (NM_176953.2,2824-2842).
gactttaaaatattcagaa

SEQ ID NO: 506588 - DNA, 19 bp, Mus musculus
  siRNA target sequence for Lig4 (NM_176953.2,2843-2861).
gaatgcttaagaaaaagtt

SEQ ID NO: 506589 - DNA, 19 bp, Mus musculus
  siRNA target sequence for Limk1 (NM_010717.1,403-421).
ctgtggccagaggatctat

SEQ ID NO: 506590 - DNA, 19 bp, Mus musculus
  siRNA target sequence for Limk1 (NM_010717.1,405-423).
gtggccagaggatctatga

SEQ ID NO: 506591 - DNA, 19 bp, Mus musculus
  siRNA target sequence for Limk1 (NM_010717.1,635-653).
caccctgagtgtttcatct

SEQ ID NO: 506592 - DNA, 19 bp, Mus musculus
  siRNA target sequence for Limk1 (NM_010717.1,654-672).
gcctcgcctgtggaaactt

SEQ ID NO: 506593 - DNA, 19 bp, Mus musculus
  siRNA target sequence for Limk1 (NM_010717.1,656-674).
ctcgcctgtggaaacttca

SEQ ID NO: 506594 - DNA, 19 bp, Mus musculus
  siRNA target sequence for Limk1 (NM_010717.1,807-825).
cagtcaccctcgtgtctat

SEQ ID NO: 506595 - DNA, 19 bp, Mus musculus
  siRNA target sequence for Limk1 (NM_010717.1,945-963).
gcatgagcccagatgtgaa

SEQ ID NO: 506596 - DNA, 19 bp, Mus musculus
  siRNA target sequence for Limk1 (NM_010717.1,1305-1323).
gccgaccacaccgaatctt

SEQ ID NO: 506597 - DNA, 19 bp, Mus musculus
  siRNA target sequence for Limk1 (NM_010717.1,1426-1444).
ggaacttatccggtttgat

SEQ ID NO: 506598 - DNA, 19 bp, Mus musculus
  siRNA target sequence for Limk1 (NM_010717.1,1538-1556).
gacaagcggctaaacttca

SEQ ID NO: 506599 - DNA, 19 bp, Mus musculus
  siRNA target sequence for Limk1 (NM_010717.1,1673-1691).
ctccattcgatgaacatca

SEQ ID NO: 506600 - DNA, 19 bp, Mus musculus
  siRNA target sequence for Limk1 (NM_010717.1,1769-1787).
cgactcatgatcgatgaaa

SEQ ID NO: 506601 - DNA, 19 bp, Mus musculus
  siRNA target sequence for Limk1 (NM_010717.1,1770-1788).
gactcatgatcgatgaaaa

SEQ ID NO: 506602 - DNA, 19 bp, Mus musculus
  siRNA target sequence for Limk1 (NM_010717.1,1802-1820).
gacttacgcagccttaaga

SEQ ID NO: 506603 - DNA, 19 bp, Mus musculus
  siRNA target sequence for Limk1 (NM_010717.1,1870-1888).
ggcgccagagatgatcaat

SEQ ID NO: 506604 - DNA, 19 bp, Mus musculus
  siRNA target sequence for Limk1 (NM_010717.1,1882-1900).
gatcaatggtcgtagttat

SEQ ID NO: 506605 - DNA, 19 bp, Mus musculus
  siRNA target sequence for Limk1 (NM_010717.1,1885-1903).
caatggtcgtagttatgat

SEQ ID NO: 506606 - DNA, 19 bp, Mus musculus
  siRNA target sequence for Limk1 (NM_010717.1,1889-1907).
ggtcgtagttatgatgaaa

SEQ ID NO: 506607 - DNA, 19 bp, Mus musculus
  siRNA target sequence for Limk1 (NM_010717.1,1890-1908).
gtcgtagttatgatgaaaa

SEQ ID NO: 506608 - DNA, 19 bp, Mus musculus
  siRNA target sequence for Limk1 (NM_010717.1,1904-1922).
gaaaaggtggacgtgtttt

SEQ ID NO: 506609 - DNA, 19 bp, Mus musculus
  siRNA target sequence for Limk1 (NM_010717.1,1909-1927).
ggtggacgtgttttccttt

SEQ ID NO: 506610 - DNA, 19 bp, Mus musculus
  siRNA target sequence for Limk1 (NM_010717.1,1915-1933).
cgtgttttcctttggaatt

SEQ ID NO: 506611 - DNA, 19 bp, Mus musculus
  siRNA target sequence for Limk1 (NM_010717.1,1945-1963).
gattatcgggcgtgtgaat

SEQ ID NO: 506612 - DNA, 19 bp, Mus musculus
  siRNA target sequence for Limk1 (NM_010717.1,2029-2047).
ctactgtccaccaaactgt

SEQ ID NO: 506613 - DNA, 19 bp, Mus musculus
  siRNA target sequence for Limk1 (NM_010717.1,2040-2058).
caaactgtcccccaagttt

SEQ ID NO: 506614 - DNA, 19 bp, Mus musculus
  siRNA target sequence for Limk2 (NM_010718.1,251-269).
cctcaccaactggtactat

SEQ ID NO: 506615 - DNA, 19 bp, Mus musculus
  siRNA target sequence for Limk2 (NM_010718.1,412-430).
gttgcaaggtgatcattga

SEQ ID NO: 506616 - DNA, 19 bp, Mus musculus
  siRNA target sequence for Limk2 (NM_010718.1,497-515).
ggtgctggcacccatgttt

SEQ ID NO: 506617 - DNA, 19 bp, Mus musculus
  siRNA target sequence for Limk2 (NM_010718.1,505-523).
cacccatgtttgaaagact

SEQ ID NO: 506618 - DNA, 19 bp, Mus musculus
  siRNA target sequence for Limk2 (NM_010718.1,643-661).
ccaccaccgttcaagtgaa

SEQ ID NO: 506619 - DNA, 19 bp, Mus musculus
  siRNA target sequence for Limk2 (NM_010718.1,646-664).
ccaccgttcaagtgaaaga

SEQ ID NO: 506620 - DNA, 19 bp, Mus musculus
  siRNA target sequence for Limk2 (NM_010718.1,802-820).
cacttcagctgctgattga

SEQ ID NO: 506621 - DNA, 19 bp, Mus musculus
  siRNA target sequence for Limk2 (NM_010718.1,1035-1053).
gacataagccgctcagaat

SEQ ID NO: 506622 - DNA, 19 bp, Mus musculus
  siRNA target sequence for Limk2 (NM_010718.1,1337-1355).
cgagggaggcacactcaaa

SEQ ID NO: 506623 - DNA, 19 bp, Mus musculus
  siRNA target sequence for Limk2 (NM_010718.1,1525-1543).
ggctgtcacggcttatagt

SEQ ID NO: 506624 - DNA, 19 bp, Mus musculus
  siRNA target sequence for Limk2 (NM_010718.1,1526-1544).
gctgtcacggcttatagta

SEQ ID NO: 506625 - DNA, 19 bp, Mus musculus
  siRNA target sequence for Limk2 (NM_010718.1,1531-1549).
cacggcttatagtagaaga

SEQ ID NO: 506626 - DNA, 19 bp, Mus musculus
  siRNA target sequence for Limk2 (NM_010718.1,1690-1708).
cggtggatgtcttctcttt

SEQ ID NO: 506627 - DNA, 19 bp, Mus musculus
  siRNA target sequence for Limk2 (NM_010718.1,1727-1745).
gatcattgggcaggtatat

SEQ ID NO: 506628 - DNA, 19 bp, Mus musculus
  siRNA target sequence for Limk2 (NM_010718.1,1783-1801).
gcctcaatgttaagctttt

SEQ ID NO: 506629 - DNA, 19 bp, Mus musculus
  siRNA target sequence for Limk2 (NM_010718.1,1855-1873).
ctatctgctgcaaactaga

SEQ ID NO: 506630 - DNA, 19 bp, Mus musculus
  siRNA target sequence for Limk2 (NM_010718.1,1882-1900).
gcagaccggcattctcaaa

SEQ ID NO: 506631 - DNA, 19 bp, Mus musculus
  siRNA target sequence for Ltk (NM_008523.1,264-282).
ggcaggcggtgatacttct

SEQ ID NO: 506632 - DNA, 19 bp, Mus musculus
  siRNA target sequence for Ltk (NM_008523.1,387-405).
ggtggagatccgaaagcat

SEQ ID NO: 506633 - DNA, 19 bp, Mus musculus
  siRNA target sequence for Ltk (NM_008523.1,493-511).
ctagctgtggataatgtca

SEQ ID NO: 506634 - DNA, 19 bp, Mus musculus
  siRNA target sequence for Ltk (NM_008523.1,577-595).
gcactgagtctcctaatga

SEQ ID NO: 506635 - DNA, 19 bp, Mus musculus
  siRNA target sequence for Ltk (NM_008523.1,704-722).
cagcacccaacccttacta

SEQ ID NO: 506636 - DNA, 19 bp, Mus musculus
  siRNA target sequence for Ltk (NM_008523.1,706-724).
gcacccaacccttactatt

SEQ ID NO: 506637 - DNA, 19 bp, Mus musculus
  siRNA target sequence for Ltk (NM_008523.1,710-728).
ccaacccttactattgtca

SEQ ID NO: 506638 - DNA, 19 bp, Mus musculus
  siRNA target sequence for Ltk (NM_008523.1,969-987).
gttcagccatcagaacatt

SEQ ID NO: 506639 - DNA, 19 bp, Mus musculus
  siRNA target sequence for Ltk (NM_008523.1,1281-1299).
ctaccaggccagttattat

SEQ ID NO: 506640 - DNA, 19 bp, Mus musculus
  siRNA target sequence for Ltk (NM_008523.1,1436-1454).
cctaccctggacataccaa

SEQ ID NO: 506641 - DNA, 19 bp, Mus musculus
  siRNA target sequence for Ltk (NM_008523.1,1451-1469).
ccaaccaggaggttctaga

SEQ ID NO: 506642 - DNA, 19 bp, Mus musculus
  siRNA target sequence for Ltk (NM_008523.1,1647-1665).
ggaacctgggcccattcta

SEQ ID NO: 506643 - DNA, 19 bp, Mus musculus
  siRNA target sequence for Ltk (NM_008523.1,1820-1838).
gcctccaacctcagaacat

SEQ ID NO: 506644 - DNA, 19 bp, Mus musculus
  siRNA target sequence for Lyn (NM_010747.1,248-266).
gggatgtattaaatcaaaa

SEQ ID NO: 506645 - DNA, 19 bp, Mus musculus
  siRNA target sequence for Lyn (NM_010747.1,389-407).
ggccttatacccttatgat

SEQ ID NO: 506646 - DNA, 19 bp, Mus musculus
  siRNA target sequence for Lyn (NM_010747.1,442-460).
gagaaaagatgaaagttct

SEQ ID NO: 506647 - DNA, 19 bp, Mus musculus
  siRNA target sequence for Lyn (NM_010747.1,486-504).
gctaagtccctttcatcaa

SEQ ID NO: 506648 - DNA, 19 bp, Mus musculus
  siRNA target sequence for Lyn (NM_010747.1,487-505).
ctaagtccctttcatcaaa

SEQ ID NO: 506649 - DNA, 19 bp, Mus musculus
  siRNA target sequence for Lyn (NM_010747.1,1347-1365).
gcgagagtcatcgaagata

SEQ ID NO: 506650 - DNA, 19 bp, Mus musculus
  siRNA target sequence for Lyn (NM_010747.1,1348-1366).
cgagagtcatcgaagataa

SEQ ID NO: 506651 - DNA, 19 bp, Mus musculus
  siRNA target sequence for Lyn (NM_010747.1,1351-1369).
gagtcatcgaagataacga

SEQ ID NO: 506652 - DNA, 19 bp, Mus musculus
  siRNA target sequence for Lyn (NM_010747.1,1387-1405).
gtgcgaagttccctatcaa

SEQ ID NO: 506653 - DNA, 19 bp, Mus musculus
  siRNA target sequence for Lyn (NM_010747.1,1433-1451).
cggctgcttcactatcaaa

SEQ ID NO: 506654 - DNA, 19 bp, Mus musculus
  siRNA target sequence for Lyn (NM_010747.1,1434-1452).
ggctgcttcactatcaaat

SEQ ID NO: 506655 - DNA, 19 bp, Mus musculus
  siRNA target sequence for Lyn (NM_010747.1,1470-1488).
ggaattctcctgtatgaga

SEQ ID NO: 506656 - DNA, 19 bp, Mus musculus
  siRNA target sequence for Lyn (NM_010747.1,1522-1540).
gaaccaacgcagatgtgat

SEQ ID NO: 506657 - DNA, 19 bp, Mus musculus
  siRNA target sequence for Lyn (NM_010747.1,1548-1566).
ctgtcacagggatatcgaa

SEQ ID NO: 506658 - DNA, 19 bp, Mus musculus
  siRNA target sequence for Lyn (NM_010747.1,1595-1613).
gctctatgacatcatgaaa

SEQ ID NO: 506659 - DNA, 19 bp, Mus musculus
  siRNA target sequence for Lyn (NM_010747.1,1638-1656).
gagaggccaacttttgact

SEQ ID NO: 506660 - DNA, 19 bp, Mus musculus
  siRNA target sequence for Lyn (NM_010747.1,1643-1661).
gccaacttttgactactta

SEQ ID NO: 506661 - DNA, 19 bp, Mus musculus
  siRNA target sequence for Lyn (NM_010747.1,1645-1663).
caacttttgactacttaca

SEQ ID NO: 506662 - DNA, 19 bp, Mus musculus
  siRNA target sequence for Lztr1 (NM_025808.2,122-140).
ctccgagcgtggactttga

SEQ ID NO: 506663 - DNA, 19 bp, Mus musculus
  siRNA target sequence for Lztr1 (NM_025808.2,259-277).
cacacagtcgtggcatata

SEQ ID NO: 506664 - DNA, 19 bp, Mus musculus
  siRNA target sequence for Lztr1 (NM_025808.2,263-281).
cagtcgtggcatataagga

SEQ ID NO: 506665 - DNA, 19 bp, Mus musculus
  siRNA target sequence for Lztr1 (NM_025808.2,315-333).
gacgatgctcaatgatctt

SEQ ID NO: 506666 - DNA, 19 bp, Mus musculus
  siRNA target sequence for Lztr1 (NM_025808.2,317-335).
cgatgctcaatgatcttct

SEQ ID NO: 506667 - DNA, 19 bp, Mus musculus
  siRNA target sequence for Lztr1 (NM_025808.2,337-355).
cgtttcgatgtgaaggatt

SEQ ID NO: 506668 - DNA, 19 bp, Mus musculus
  siRNA target sequence for Lztr1 (NM_025808.2,449-467).
ggggctatactggagatat

SEQ ID NO: 506669 - DNA, 19 bp, Mus musculus
  siRNA target sequence for Lztr1 (NM_025808.2,450-468).
gggctatactggagatatt

SEQ ID NO: 506670 - DNA, 19 bp, Mus musculus
  siRNA target sequence for Lztr1 (NM_025808.2,451-469).
ggctatactggagatattt

SEQ ID NO: 506671 - DNA, 19 bp, Mus musculus
  siRNA target sequence for Lztr1 (NM_025808.2,452-470).
gctatactggagatattta

SEQ ID NO: 506672 - DNA, 19 bp, Mus musculus
  siRNA target sequence for Lztr1 (NM_025808.2,474-492).
caattctaacttgaagaat

SEQ ID NO: 506673 - DNA, 19 bp, Mus musculus
  siRNA target sequence for Lztr1 (NM_025808.2,531-549).
gtggacggagtggaagatt

SEQ ID NO: 506674 - DNA, 19 bp, Mus musculus
  siRNA target sequence for Lztr1 (NM_025808.2,586-604).
gctacagtgtacagtgata

SEQ ID NO: 506675 - DNA, 19 bp, Mus musculus
  siRNA target sequence for Lztr1 (NM_025808.2,587-605).
ctacagtgtacagtgataa

SEQ ID NO: 506676 - DNA, 19 bp, Mus musculus
  siRNA target sequence for Lztr1 (NM_025808.2,609-627).
ctggatctttgctggttat

SEQ ID NO: 506677 - DNA, 19 bp, Mus musculus
  siRNA target sequence for Lztr1 (NM_025808.2,611-629).
ggatctttgctggttatga

SEQ ID NO: 506678 - DNA, 19 bp, Mus musculus
  siRNA target sequence for Lztr1 (NM_025808.2,748-766).
gctgtgtgccgggataaga

SEQ ID NO: 506679 - DNA, 19 bp, Mus musculus
  siRNA target sequence for Lztr1 (NM_025808.2,749-767).
ctgtgtgccgggataagat

SEQ ID NO: 506680 - DNA, 19 bp, Mus musculus
  siRNA target sequence for Lztr1 (NM_025808.2,751-769).
gtgtgccgggataagatgt

SEQ ID NO: 506681 - DNA, 19 bp, Mus musculus
  siRNA target sequence for Lztr1 (NM_025808.2,791-809).
gagccaagataactaacaa

SEQ ID NO: 506682 - DNA, 19 bp, Mus musculus
  siRNA target sequence for Lztr1 (NM_025808.2,925-943).
gaccgccatctctatgtgt

SEQ ID NO: 506683 - DNA, 19 bp, Mus musculus
  siRNA target sequence for Lztr1 (NM_025808.2,927-945).
ccgccatctctatgtgttt

SEQ ID NO: 506684 - DNA, 19 bp, Mus musculus
  siRNA target sequence for Lztr1 (NM_025808.2,946-964).
gggggtgcagcggacaata

SEQ ID NO: 506685 - DNA, 19 bp, Mus musculus
  siRNA target sequence for Lztr1 (NM_025808.2,948-966).
gggtgcagcggacaataca

SEQ ID NO: 506686 - DNA, 19 bp, Mus musculus
  siRNA target sequence for Lztr1 (NM_025808.2,950-968).
gtgcagcggacaatacact

SEQ ID NO: 506687 - DNA, 19 bp, Mus musculus
  siRNA target sequence for Lztr1 (NM_025808.2,1081-1099).
gaggatgcatctactctaa

SEQ ID NO: 506688 - DNA, 19 bp, Mus musculus
  siRNA target sequence for Lztr1 (NM_025808.2,1105-1123).
gaagagcggagcagcttta

SEQ ID NO: 506689 - DNA, 19 bp, Mus musculus
  siRNA target sequence for Lztr1 (NM_025808.2,1108-1126).
gagcggagcagctttaaga

SEQ ID NO: 506690 - DNA, 19 bp, Mus musculus
  siRNA target sequence for Lztr1 (NM_025808.2,1238-1256).
ctgatgccatgtacatctt

SEQ ID NO: 506691 - DNA, 19 bp, Mus musculus
  siRNA target sequence for Lztr1 (NM_025808.2,1259-1277).
ggggcactgtagacaacaa

SEQ ID NO: 506692 - DNA, 19 bp, Mus musculus
  siRNA target sequence for Lztr1 (NM_025808.2,1328-1346).
gcacactgcacgaagatta

SEQ ID NO: 506693 - DNA, 19 bp, Mus musculus
  siRNA target sequence for Lztr1 (NM_025808.2,1655-1673).
cacggaaaggccatgtaga

SEQ ID NO: 506694 - DNA, 19 bp, Mus musculus
  siRNA target sequence for Lztr1 (NM_025808.2,1684-1702).
ctcatcatggatgtgtata

SEQ ID NO: 506695 - DNA, 19 bp, Mus musculus
  siRNA target sequence for Lztr1 (NM_025808.2,1755-1773).
catcgaggcctctgtagat

SEQ ID NO: 506696 - DNA, 19 bp, Mus musculus
  siRNA target sequence for Lztr1 (NM_025808.2,1836-1854).
gcattgcctgaacttcata

SEQ ID NO: 506697 - DNA, 19 bp, Mus musculus
  siRNA target sequence for Lztr1 (NM_025808.2,1908-1926).
ctcatccccactgattgta

SEQ ID NO: 506698 - DNA, 19 bp, Mus musculus
  siRNA target sequence for Lztr1 (NM_025808.2,1914-1932).
cccactgattgtagagata

SEQ ID NO: 506699 - DNA, 19 bp, Mus musculus
  siRNA target sequence for Lztr1 (NM_025808.2,2217-2235).
gctacgctacatctactat

SEQ ID NO: 506700 - DNA, 19 bp, Mus musculus
  siRNA target sequence for Lztr1 (NM_025808.2,2274-2292).
gtttgcagccccgtactat

SEQ ID NO: 506701 - DNA, 19 bp, Mus musculus
  siRNA target sequence for Lztr1 (NM_025808.2,2396-2414).
cgcaggcactggacatgaa

SEQ ID NO: 506702 - DNA, 19 bp, Mus musculus
  siRNA target sequence for Lztr1 (NM_025808.2,2421-2439).
ctgtttgcacatcattgta

SEQ ID NO: 506703 - DNA, 19 bp, Mus musculus
  siRNA target sequence for Mak (NM_008547.1,344-362).
cttgggatgagtgtatgaa

SEQ ID NO: 506704 - DNA, 19 bp, Mus musculus
  siRNA target sequence for Mak (NM_008547.1,391-409).
ctcaatcacgccaatgtga

SEQ ID NO: 506705 - DNA, 19 bp, Mus musculus
  siRNA target sequence for Mak (NM_008547.1,393-411).
caatcacgccaatgtgatt

SEQ ID NO: 506706 - DNA, 19 bp, Mus musculus
  siRNA target sequence for Mak (NM_008547.1,399-417).
cgccaatgtgattaaacta

SEQ ID NO: 506707 - DNA, 19 bp, Mus musculus
  siRNA target sequence for Mak (NM_008547.1,401-419).
ccaatgtgattaaactaaa

SEQ ID NO: 506708 - DNA, 19 bp, Mus musculus
  siRNA target sequence for Mak (NM_008547.1,514-532).
cctgagtcagtcatcagaa

SEQ ID NO: 506709 - DNA, 19 bp, Mus musculus
  siRNA target sequence for Mak (NM_008547.1,515-533).
ctgagtcagtcatcagaaa

SEQ ID NO: 506710 - DNA, 19 bp, Mus musculus
  siRNA target sequence for Mak (NM_008547.1,519-537).
gtcagtcatcagaaatatt

SEQ ID NO: 506711 - DNA, 19 bp, Mus musculus
  siRNA target sequence for Mak (NM_008547.1,550-568).
ctacaggggctggcattta

SEQ ID NO: 506712 - DNA, 19 bp, Mus musculus
  siRNA target sequence for Mak (NM_008547.1,557-575).
ggctggcatttatccataa

SEQ ID NO: 506713 - DNA, 19 bp, Mus musculus
  siRNA target sequence for Mak (NM_008547.1,558-576).
gctggcatttatccataaa

SEQ ID NO: 506714 - DNA, 19 bp, Mus musculus
  siRNA target sequence for Mak (NM_008547.1,1102-1120).
gcacaccatctggatacaa

SEQ ID NO: 506715 - DNA, 19 bp, Mus musculus
  siRNA target sequence for Mak (NM_008547.1,1103-1121).
cacaccatctggatacaaa

SEQ ID NO: 506716 - DNA, 19 bp, Mus musculus
  siRNA target sequence for Mak (NM_008547.1,1188-1206).
gcctttgccaaacatactt

SEQ ID NO: 506717 - DNA, 19 bp, Mus musculus
  siRNA target sequence for Mak (NM_008547.1,1190-1208).
ctttgccaaacatacttga

SEQ ID NO: 506718 - DNA, 19 bp, Mus musculus
  siRNA target sequence for Mak (NM_008547.1,1335-1353).
gtttccaagtatcatcaaa

SEQ ID NO: 506719 - DNA, 19 bp, Mus musculus
  siRNA target sequence for Mak (NM_008547.1,1355-1373).
ccatcccagtgaattcagt

SEQ ID NO: 506720 - DNA, 19 bp, Mus musculus
  siRNA target sequence for Mak (NM_008547.1,1409-1427).
ggggtcagacagtcttcaa

SEQ ID NO: 506721 - DNA, 19 bp, Mus musculus
  siRNA target sequence for Mak (NM_008547.1,1552-1570).
ccagtctccaatcacttta

SEQ ID NO: 506722 - DNA, 19 bp, Mus musculus
  siRNA target sequence for Mak (NM_008547.1,1574-1592).
gggaaaataggaatttaca

SEQ ID NO: 506723 - DNA, 19 bp, Mus musculus
  siRNA target sequence for Mak (NM_008547.1,1584-1602).
gaatttacatgcatctgtt

SEQ ID NO: 506724 - DNA, 19 bp, Mus musculus
  siRNA target sequence for Mak (NM_008547.1,1637-1655).
caacggctaagcagtacta

SEQ ID NO: 506725 - DNA, 19 bp, Mus musculus
  siRNA target sequence for Mak (NM_008547.1,1640-1658).
cggctaagcagtactattt

SEQ ID NO: 506726 - DNA, 19 bp, Mus musculus
  siRNA target sequence for Mak (NM_008547.1,1659-1677).
gaaacaatcaagatacctt

SEQ ID NO: 506727 - DNA, 19 bp, Mus musculus
  siRNA target sequence for Mak (NM_008547.1,1712-1730).
ctggaggcaaggatataaa

SEQ ID NO: 506728 - DNA, 19 bp, Mus musculus
  siRNA target sequence for Mak (NM_008547.1,1714-1732).
ggaggcaaggatataaatt

SEQ ID NO: 506729 - DNA, 19 bp, Mus musculus
  siRNA target sequence for Mak (NM_008547.1,1733-1751).
cacactcttggaataatca

SEQ ID NO: 506730 - DNA, 19 bp, Mus musculus
  siRNA target sequence for Mak (NM_008547.1,1783-1801).
gcggacctttccttcaaga

SEQ ID NO: 506731 - DNA, 19 bp, Mus musculus
  siRNA target sequence for Mak (NM_008547.1,1825-1843).
gggagctacaccacttaca

SEQ ID NO: 506732 - DNA, 19 bp, Mus musculus
  siRNA target sequence for Mak (NM_008547.1,1826-1844).
ggagctacaccacttacaa

SEQ ID NO: 506733 - DNA, 19 bp, Mus musculus
  siRNA target sequence for Mak (NM_008547.1,1902-1920).
gatccaattggcaccttta

SEQ ID NO: 506734 - DNA, 19 bp, Mus musculus
  siRNA target sequence for Mak (NM_008547.1,1905-1923).
ccaattggcacctttaggt

SEQ ID NO: 506735 - DNA, 19 bp, Mus musculus
  siRNA target sequence for Mak (NM_008547.1,1924-1942).
gcgtcggcttcggactata

SEQ ID NO: 506736 - DNA, 19 bp, Mus musculus
  siRNA target sequence for Mak (NM_008547.1,1989-2007).
caaccccacagccaaaaat

SEQ ID NO: 506737 - DNA, 19 bp, Mus musculus
  siRNA target sequence for Mak (NM_008547.1,1995-2013).
cacagccaaaaatctcaat

SEQ ID NO: 506738 - DNA, 19 bp, Mus musculus
  siRNA target sequence for Mak (NM_008547.1,1997-2015).
cagccaaaaatctcaatat

SEQ ID NO: 506739 - DNA, 19 bp, Mus musculus
  siRNA target sequence for Map2k1 (NM_008927.1,524-542).
cctgagcaaattttaggaa

SEQ ID NO: 506740 - DNA, 19 bp, Mus musculus
  siRNA target sequence for Map2k1 (NM_008927.1,581-599).
cgggagaagcacaagatta

SEQ ID NO: 506741 - DNA, 19 bp, Mus musculus
  siRNA target sequence for Map2k1 (NM_008927.1,637-655).
ctcacgtggggagatcaaa

SEQ ID NO: 506742 - DNA, 19 bp, Mus musculus
  siRNA target sequence for Map2k1 (NM_008927.1,639-657).
cacgtggggagatcaaact

SEQ ID NO: 506743 - DNA, 19 bp, Mus musculus
  siRNA target sequence for Map2k1 (NM_008927.1,669-687).
gggtcagcgggcagctaat

SEQ ID NO: 506744 - DNA, 19 bp, Mus musculus
  siRNA target sequence for Map2k1 (NM_008927.1,678-696).
ggcagctaattgactctat

SEQ ID NO: 506745 - DNA, 19 bp, Mus musculus
  siRNA target sequence for Map2k1 (NM_008927.1,713-731).
ggcacgagatcctacatgt

SEQ ID NO: 506746 - DNA, 19 bp, Mus musculus
  siRNA target sequence for Map2k1 (NM_008927.1,851-869).
ctggagctactgtttggat

SEQ ID NO: 506747 - DNA, 19 bp, Mus musculus
  siRNA target sequence for Map2k1 (NM_008927.1,954-972).
gacctcccatggcaatttt

SEQ ID NO: 506748 - DNA, 19 bp, Mus musculus
  siRNA target sequence for Map2k1 (NM_008927.1,959-977).
cccatggcaatttttgagt

SEQ ID NO: 506749 - DNA, 19 bp, Mus musculus
  siRNA target sequence for Map2k1 (NM_008927.1,979-997).
gttggattacattgtcaat

SEQ ID NO: 506750 - DNA, 19 bp, Mus musculus
  siRNA target sequence for Map2k1 (NM_008927.1,1015-1033).
gcccagtggagtattcagt

SEQ ID NO: 506751 - DNA, 19 bp, Mus musculus
  siRNA target sequence for Map2k1 (NM_008927.1,1108-1126).
ggtacatgctttcatcaaa

SEQ ID NO: 506752 - DNA, 19 bp, Mus musculus
  siRNA target sequence for Map2k1 (NM_008927.1,1109-1127).
gtacatgctttcatcaaaa

SEQ ID NO: 506753 - DNA, 19 bp, Mus musculus
  siRNA target sequence for Map2k2 (NM_023138.3,492-510).
ggccgtcaggcctcatcat

SEQ ID NO: 506754 - DNA, 19 bp, Mus musculus
  siRNA target sequence for Map2k2 (NM_023138.3,546-564).
ccgtgcgcaaccagatcat

SEQ ID NO: 506755 - DNA, 19 bp, Mus musculus
  siRNA target sequence for Map2k2 (NM_023138.3,902-920).
gggacgcgctcctacatgt

SEQ ID NO: 506756 - DNA, 19 bp, Mus musculus
  siRNA target sequence for Map2k2 (NM_023138.3,1256-1274).
gtgaataaatgtctcatta

SEQ ID NO: 506757 - DNA, 19 bp, Mus musculus
  siRNA target sequence for Map2k3 (NM_008928.1,203-221).
gcctcagaccaaaggaaaa

SEQ ID NO: 506758 - DNA, 19 bp, Mus musculus
  siRNA target sequence for Map2k3 (NM_008928.1,300-318).
gactcccggaccttcatca

SEQ ID NO: 506759 - DNA, 19 bp, Mus musculus
  siRNA target sequence for Map2k3 (NM_008928.1,388-406).
cctatggggtggtagagaa

SEQ ID NO: 506760 - DNA, 19 bp, Mus musculus
  siRNA target sequence for Map2k3 (NM_008928.1,389-407).
ctatggggtggtagagaaa

SEQ ID NO: 506761 - DNA, 19 bp, Mus musculus
  siRNA target sequence for Map2k3 (NM_008928.1,601-619).
cttccctggataagttcta

SEQ ID NO: 506762 - DNA, 19 bp, Mus musculus
  siRNA target sequence for Map2k3 (NM_008928.1,871-889).
ggatcaaccctgaactgaa

SEQ ID NO: 506763 - DNA, 19 bp, Mus musculus
  siRNA target sequence for Map2k3 (NM_008928.1,957-975).
ctgcgattcccttatgagt

SEQ ID NO: 506764 - DNA, 19 bp, Mus musculus
  siRNA target sequence for Map2k3 (NM_008928.1,1072-1090).
ctagccagtgcctaaggaa

SEQ ID NO: 506765 - DNA, 19 bp, Mus musculus
  siRNA target sequence for Map2k4 (NM_009157.2,223-241).
cggtttactctgaatccta

SEQ ID NO: 506766 - DNA, 19 bp, Mus musculus
  siRNA target sequence for Map2k4 (NM_009157.2,224-242).
ggtttactctgaatcctaa

SEQ ID NO: 506767 - DNA, 19 bp, Mus musculus
  siRNA target sequence for Map2k4 (NM_009157.2,312-330).
gaagatctcccctgaacaa

SEQ ID NO: 506768 - DNA, 19 bp, Mus musculus
  siRNA target sequence for Map2k4 (NM_009157.2,325-343).
gaacaacactgggatttca

SEQ ID NO: 506769 - DNA, 19 bp, Mus musculus
  siRNA target sequence for Map2k4 (NM_009157.2,376-394).
ggacgaggagcttatggtt

SEQ ID NO: 506770 - DNA, 19 bp, Mus musculus
  siRNA target sequence for Map2k4 (NM_009157.2,429-447).
gataatggcagttaaaaga

SEQ ID NO: 506771 - DNA, 19 bp, Mus musculus
  siRNA target sequence for Map2k4 (NM_009157.2,451-469).
cggtcaactgtggatgaaa

SEQ ID NO: 506772 - DNA, 19 bp, Mus musculus
  siRNA target sequence for Map2k4 (NM_009157.2,515-533).
gtagtgattgcccatacat

SEQ ID NO: 506773 - DNA, 19 bp, Mus musculus
  siRNA target sequence for Map2k4 (NM_009157.2,524-542).
gcccatacattgttcagtt

SEQ ID NO: 506774 - DNA, 19 bp, Mus musculus
  siRNA target sequence for Map2k4 (NM_009157.2,565-583).
ggcgactgttggatctgta

SEQ ID NO: 506775 - DNA, 19 bp, Mus musculus
  siRNA target sequence for Map2k4 (NM_009157.2,566-584).
gcgactgttggatctgtat

SEQ ID NO: 506776 - DNA, 19 bp, Mus musculus
  siRNA target sequence for Map2k4 (NM_009157.2,596-614).
ctacctcgttcgataagtt

SEQ ID NO: 506777 - DNA, 19 bp, Mus musculus
  siRNA target sequence for Map2k4 (NM_009157.2,602-620).
cgttcgataagttttacaa

SEQ ID NO: 506778 - DNA, 19 bp, Mus musculus
  siRNA target sequence for Map2k4 (NM_009157.2,603-621).
gttcgataagttttacaaa

SEQ ID NO: 506779 - DNA, 19 bp, Mus musculus
  siRNA target sequence for Map2k4 (NM_009157.2,632-650).
gtgtgttagatgacgttat

SEQ ID NO: 506780 - DNA, 19 bp, Mus musculus
  siRNA target sequence for Map2k4 (NM_009157.2,658-676).
gagatcttaggcaaaatca

SEQ ID NO: 506781 - DNA, 19 bp, Mus musculus
  siRNA target sequence for Map2k4 (NM_009157.2,660-678).
gatcttaggcaaaatcact

SEQ ID NO: 506782 - DNA, 19 bp, Mus musculus
  siRNA target sequence for Map2k4 (NM_009157.2,663-681).
cttaggcaaaatcacttta

SEQ ID NO: 506783 - DNA, 19 bp, Mus musculus
  siRNA target sequence for Map2k4 (NM_009157.2,667-685).
ggcaaaatcactttagcaa

SEQ ID NO: 506784 - DNA, 19 bp, Mus musculus
  siRNA target sequence for Map2k4 (NM_009157.2,695-713).
cactaaaccacttaaaaga

SEQ ID NO: 506785 - DNA, 19 bp, Mus musculus
  siRNA target sequence for Map2k4 (NM_009157.2,741-759).
caaaccttccaatattctt

SEQ ID NO: 506786 - DNA, 19 bp, Mus musculus
  siRNA target sequence for Map2k4 (NM_009157.2,806-824).
gacagcttgtggactctat

SEQ ID NO: 506787 - DNA, 19 bp, Mus musculus
  siRNA target sequence for Map2k4 (NM_009157.2,842-860).
ctgggtgtaggccgtatat

SEQ ID NO: 506788 - DNA, 19 bp, Mus musculus
  siRNA target sequence for Map2k4 (NM_009157.2,890-908).
caagacaagggtatgatgt

SEQ ID NO: 506789 - DNA, 19 bp, Mus musculus
  siRNA target sequence for Map2k4 (NM_009157.2,926-944).
gtttggggatcacattgta

SEQ ID NO: 506790 - DNA, 19 bp, Mus musculus
  siRNA target sequence for Map2k4 (NM_009157.2,951-969).
ggccacaggccgatttcct

SEQ ID NO: 506791 - DNA, 19 bp, Mus musculus
  siRNA target sequence for Map2k4 (NM_009157.2,952-970).
gccacaggccgatttcctt

SEQ ID NO: 506792 - DNA, 19 bp, Mus musculus
  siRNA target sequence for Map2k4 (NM_009157.2,954-972).
cacaggccgatttccttat

SEQ ID NO: 506793 - DNA, 19 bp, Mus musculus
  siRNA target sequence for Map2k4 (NM_009157.2,958-976).
ggccgatttccttatccaa

SEQ ID NO: 506794 - DNA, 19 bp, Mus musculus
  siRNA target sequence for Map2k4 (NM_009157.2,1028-1046).
cgcagctgagtaattctga

SEQ ID NO: 506795 - DNA, 19 bp, Mus musculus
  siRNA target sequence for Map2k4 (NM_009157.2,1062-1080).
ccccagtttcatcaacttt

SEQ ID NO: 506796 - DNA, 19 bp, Mus musculus
  siRNA target sequence for Map2k4 (NM_009157.2,1064-1082).
ccagtttcatcaactttgt

SEQ ID NO: 506797 - DNA, 19 bp, Mus musculus
  siRNA target sequence for Map2k4 (NM_009157.2,1180-1198).
gtcgcatgctatgtttgta

SEQ ID NO: 506798 - DNA, 19 bp, Mus musculus
  siRNA target sequence for Map2k4 (NM_009157.2,1182-1200).
cgcatgctatgtttgtaaa

SEQ ID NO: 506799 - DNA, 19 bp, Mus musculus
  siRNA target sequence for Map2k4 (NM_009157.2,1183-1201).
gcatgctatgtttgtaaaa

SEQ ID NO: 506800 - DNA, 19 bp, Mus musculus
  siRNA target sequence for Map2k4 (NM_009157.2,1187-1205).
gctatgtttgtaaaatcct

SEQ ID NO: 506801 - DNA, 19 bp, Mus musculus
  siRNA target sequence for Map2k5 (NM_011840.1,647-665).
ggtgattcggatcaagatt

SEQ ID NO: 506802 - DNA, 19 bp, Mus musculus
  siRNA target sequence for Map2k5 (NM_011840.1,654-672).
cggatcaagattccaaata

SEQ ID NO: 506803 - DNA, 19 bp, Mus musculus
  siRNA target sequence for Map2k5 (NM_011840.1,761-779).
gacgacgacagcgtttgaa

SEQ ID NO: 506804 - DNA, 19 bp, Mus musculus
  siRNA target sequence for Map2k5 (NM_011840.1,763-781).
cgacgacagcgtttgaata

SEQ ID NO: 506805 - DNA, 19 bp, Mus musculus
  siRNA target sequence for Map2k5 (NM_011840.1,764-782).
gacgacagcgtttgaatat

SEQ ID NO: 506806 - DNA, 19 bp, Mus musculus
  siRNA target sequence for Map2k5 (NM_011840.1,766-784).
cgacagcgtttgaatatga

SEQ ID NO: 506807 - DNA, 19 bp, Mus musculus
  siRNA target sequence for Map2k5 (NM_011840.1,767-785).
gacagcgtttgaatatgaa

SEQ ID NO: 506808 - DNA, 19 bp, Mus musculus
  siRNA target sequence for Map2k5 (NM_011840.1,789-807).
gaagatggtgataggatta

SEQ ID NO: 506809 - DNA, 19 bp, Mus musculus
  siRNA target sequence for Map2k5 (NM_011840.1,795-813).
ggtgataggattacagtaa

SEQ ID NO: 506810 - DNA, 19 bp, Mus musculus
  siRNA target sequence for Map2k5 (NM_011840.1,808-826).
cagtaagaagcgatgaaga

SEQ ID NO: 506811 - DNA, 19 bp, Mus musculus
  siRNA target sequence for Map2k5 (NM_011840.1,896-914).
gccgctgcagatatttcca

SEQ ID NO: 506812 - DNA, 19 bp, Mus musculus
  siRNA target sequence for Map2k5 (NM_011840.1,897-915).
ccgctgcagatatttccaa

SEQ ID NO: 506813 - DNA, 19 bp, Mus musculus
  siRNA target sequence for Map2k5 (NM_011840.1,948-966).
catggcctgaaggtgaata

SEQ ID NO: 506814 - DNA, 19 bp, Mus musculus
  siRNA target sequence for Map2k5 (NM_011840.1,1012-1030).
cgcttccaagcaatagctt

SEQ ID NO: 506815 - DNA, 19 bp, Mus musculus
  siRNA target sequence for Map2k5 (NM_011840.1,1064-1082).
ggccaacggccagatgaat

SEQ ID NO: 506816 - DNA, 19 bp, Mus musculus
  siRNA target sequence for Map2k5 (NM_011840.1,1067-1085).
caacggccagatgaatgaa

SEQ ID NO: 506817 - DNA, 19 bp, Mus musculus
  siRNA target sequence for Map2k5 (NM_011840.1,1070-1088).
cggccagatgaatgaacaa

SEQ ID NO: 506818 - DNA, 19 bp, Mus musculus
  siRNA target sequence for Map2k5 (NM_011840.1,1174-1192).
ctgtaaaggttattctgtt

SEQ ID NO: 506819 - DNA, 19 bp, Mus musculus
  siRNA target sequence for Map2k5 (NM_011840.1,1228-1246).
ctgagctggaaatccttta

SEQ ID NO: 506820 - DNA, 19 bp, Mus musculus
  siRNA target sequence for Map2k5 (NM_011840.1,1233-1251).
ctggaaatcctttataagt

SEQ ID NO: 506821 - DNA, 19 bp, Mus musculus
  siRNA target sequence for Map2k5 (NM_011840.1,1252-1270).
gtgactcatcgtatatcat

SEQ ID NO: 506822 - DNA, 19 bp, Mus musculus
  siRNA target sequence for Map2k5 (NM_011840.1,1258-1276).
catcgtatatcataggatt

SEQ ID NO: 506823 - DNA, 19 bp, Mus musculus
  siRNA target sequence for Map2k5 (NM_011840.1,1261-1279).
cgtatatcataggatttta

SEQ ID NO: 506824 - DNA, 19 bp, Mus musculus
  siRNA target sequence for Map2k5 (NM_011840.1,1272-1290).
ggattttacggggcatttt

SEQ ID NO: 506825 - DNA, 19 bp, Mus musculus
  siRNA target sequence for Map2k5 (NM_011840.1,1273-1291).
gattttacggggcattttt

SEQ ID NO: 506826 - DNA, 19 bp, Mus musculus
  siRNA target sequence for Map2k5 (NM_011840.1,1281-1299).
ggggcatttttcgtagaaa

SEQ ID NO: 506827 - DNA, 19 bp, Mus musculus
  siRNA target sequence for Map2k5 (NM_011840.1,1282-1300).
gggcatttttcgtagaaaa

SEQ ID NO: 506828 - DNA, 19 bp, Mus musculus
  siRNA target sequence for Map2k5 (NM_011840.1,1292-1310).
cgtagaaaacaggatttca

SEQ ID NO: 506829 - DNA, 19 bp, Mus musculus
  siRNA target sequence for Map2k5 (NM_011840.1,1293-1311).
gtagaaaacaggatttcaa

SEQ ID NO: 506830 - DNA, 19 bp, Mus musculus
  siRNA target sequence for Map2k5 (NM_011840.1,1301-1319).
caggatttcaatttgtaca

SEQ ID NO: 506831 - DNA, 19 bp, Mus musculus
  siRNA target sequence for Map2k5 (NM_011840.1,1333-1351).
gggggtctttggatgtata

SEQ ID NO: 506832 - DNA, 19 bp, Mus musculus
  siRNA target sequence for Map2k5 (NM_011840.1,1339-1357).
ctttggatgtatataggaa

SEQ ID NO: 506833 - DNA, 19 bp, Mus musculus
  siRNA target sequence for Map2k5 (NM_011840.1,1367-1385).
gcacgtccttggaagaatt

SEQ ID NO: 506834 - DNA, 19 bp, Mus musculus
  siRNA target sequence for Map2k5 (NM_011840.1,1418-1436).
gtggagtttaaagatttta

SEQ ID NO: 506835 - DNA, 19 bp, Mus musculus
  siRNA target sequence for Map2k5 (NM_011840.1,1538-1556).
gacgtatgttggaacaaat

SEQ ID NO: 506836 - DNA, 19 bp, Mus musculus
  siRNA target sequence for Map2k5 (NM_011840.1,1541-1559).
gtatgttggaacaaatgct

SEQ ID NO: 506837 - DNA, 19 bp, Mus musculus
  siRNA target sequence for Map2k5 (NM_011840.1,1613-1631).
gtggagcttaggaatctct

SEQ ID NO: 506838 - DNA, 19 bp, Mus musculus
  siRNA target sequence for Map2k5 (NM_011840.1,1618-1636).
gcttaggaatctctttcat

SEQ ID NO: 506839 - DNA, 19 bp, Mus musculus
  siRNA target sequence for Map2k5 (NM_011840.1,1645-1663).
ctcttgggaggtttccata

SEQ ID NO: 506840 - DNA, 19 bp, Mus musculus
  siRNA target sequence for Map2k5 (NM_011840.1,1757-1775).
gttctcggagccgtttgta

SEQ ID NO: 506841 - DNA, 19 bp, Mus musculus
  siRNA target sequence for Map2k5 (NM_011840.1,1760-1778).
ctcggagccgtttgtacat

SEQ ID NO: 506842 - DNA, 19 bp, Mus musculus
  siRNA target sequence for Map2k5 (NM_011840.1,1762-1780).
cggagccgtttgtacattt

SEQ ID NO: 506843 - DNA, 19 bp, Mus musculus
  siRNA target sequence for Map2k5 (NM_011840.1,1764-1782).
gagccgtttgtacatttca

SEQ ID NO: 506844 - DNA, 19 bp, Mus musculus
  siRNA target sequence for Map2k5 (NM_011840.1,1767-1785).
ccgtttgtacatttcatca

SEQ ID NO: 506845 - DNA, 19 bp, Mus musculus
  siRNA target sequence for Map2k5 (NM_011840.1,1846-1864).
cattcatcgtgcagttcaa

SEQ ID NO: 506846 - DNA, 19 bp, Mus musculus
  siRNA target sequence for Map2k5 (NM_011840.1,1850-1868).
catcgtgcagttcaatgat

SEQ ID NO: 506847 - DNA, 19 bp, Mus musculus
  siRNA target sequence for Map2k6 (NM_011943.1,336-354).
caaaagaagcgtttgaaca

SEQ ID NO: 506848 - DNA, 19 bp, Mus musculus
  siRNA target sequence for Map2k6 (NM_011943.1,389-407).
gactccaaggcttgcatat

SEQ ID NO: 506849 - DNA, 19 bp, Mus musculus
  siRNA target sequence for Map2k6 (NM_011943.1,397-415).
ggcttgcatatctattgga

SEQ ID NO: 506850 - DNA, 19 bp, Mus musculus
  siRNA target sequence for Map2k6 (NM_011943.1,398-416).
gcttgcatatctattggaa

SEQ ID NO: 506851 - DNA, 19 bp, Mus musculus
  siRNA target sequence for Map2k6 (NM_011943.1,536-554).
cggatacgggccacagtta

SEQ ID NO: 506852 - DNA, 19 bp, Mus musculus
  siRNA target sequence for Map2k6 (NM_011943.1,537-555).
ggatacgggccacagttaa

SEQ ID NO: 506853 - DNA, 19 bp, Mus musculus
  siRNA target sequence for Map2k6 (NM_011943.1,538-556).
gatacgggccacagttaat

SEQ ID NO: 506854 - DNA, 19 bp, Mus musculus
  siRNA target sequence for Map2k6 (NM_011943.1,574-592).
gctgctgatggatttggat

SEQ ID NO: 506855 - DNA, 19 bp, Mus musculus
  siRNA target sequence for Map2k6 (NM_011943.1,682-700).
catggatacgtcactagat

SEQ ID NO: 506856 - DNA, 19 bp, Mus musculus
  siRNA target sequence for Map2k6 (NM_011943.1,685-703).
ggatacgtcactagataaa

SEQ ID NO: 506857 - DNA, 19 bp, Mus musculus
  siRNA target sequence for Map2k6 (NM_011943.1,686-704).
gatacgtcactagataaat

SEQ ID NO: 506858 - DNA, 19 bp, Mus musculus
  siRNA target sequence for Map2k6 (NM_011943.1,690-708).
cgtcactagataaattcta

SEQ ID NO: 506859 - DNA, 19 bp, Mus musculus
  siRNA target sequence for Map2k6 (NM_011943.1,706-724).
ctacaaacaagttattgat

SEQ ID NO: 506860 - DNA, 19 bp, Mus musculus
  siRNA target sequence for Map2k6 (NM_011943.1,709-727).
caaacaagttattgataaa

SEQ ID NO: 506861 - DNA, 19 bp, Mus musculus
  siRNA target sequence for Map2k6 (NM_011943.1,755-773).
ggaaagatagcagtttcta

SEQ ID NO: 506862 - DNA, 19 bp, Mus musculus
  siRNA target sequence for Map2k6 (NM_011943.1,756-774).
gaaagatagcagtttctat

SEQ ID NO: 506863 - DNA, 19 bp, Mus musculus
  siRNA target sequence for Map2k6 (NM_011943.1,776-794).
gtaaaagcgttagaacatt

SEQ ID NO: 506864 - DNA, 19 bp, Mus musculus
  siRNA target sequence for Map2k6 (NM_011943.1,782-800).
gcgttagaacatttacaca

SEQ ID NO: 506865 - DNA, 19 bp, Mus musculus
  siRNA target sequence for Map2k6 (NM_011943.1,833-851).
ccttctaatgtgctcatta

SEQ ID NO: 506866 - DNA, 19 bp, Mus musculus
  siRNA target sequence for Map2k6 (NM_011943.1,901-919).
ggtcgactctgttgctaaa

SEQ ID NO: 506867 - DNA, 19 bp, Mus musculus
  siRNA target sequence for Map2k6 (NM_011943.1,902-920).
gtcgactctgttgctaaaa

SEQ ID NO: 506868 - DNA, 19 bp, Mus musculus
  siRNA target sequence for Map2k6 (NM_011943.1,922-940).
gatcgatgccggttgcaaa

SEQ ID NO: 506869 - DNA, 19 bp, Mus musculus
  siRNA target sequence for Map2k6 (NM_011943.1,930-948).
ccggttgcaaaccatacat

SEQ ID NO: 506870 - DNA, 19 bp, Mus musculus
  siRNA target sequence for Map2k6 (NM_011943.1,946-964).
catggctcctgaacgaata

SEQ ID NO: 506871 - DNA, 19 bp, Mus musculus
  siRNA target sequence for Map2k6 (NM_011943.1,949-967).
ggctcctgaacgaataaat

SEQ ID NO: 506872 - DNA, 19 bp, Mus musculus
  siRNA target sequence for Map2k6 (NM_011943.1,1040-1058).
gccatccttcggtttcctt

SEQ ID NO: 506873 - DNA, 19 bp, Mus musculus
  siRNA target sequence for Map2k6 (NM_011943.1,1045-1063).
ccttcggtttccttatgat

SEQ ID NO: 506874 - DNA, 19 bp, Mus musculus
  siRNA target sequence for Map2k6 (NM_011943.1,1046-1064).
cttcggtttccttatgatt

SEQ ID NO: 506875 - DNA, 19 bp, Mus musculus
  siRNA target sequence for Map2k6 (NM_011943.1,1049-1067).
cggtttccttatgattctt

SEQ ID NO: 506876 - DNA, 19 bp, Mus musculus
  siRNA target sequence for Map2k6 (NM_011943.1,1135-1153).
gttctccgcggactttgtt

SEQ ID NO: 506877 - DNA, 19 bp, Mus musculus
  siRNA target sequence for Map2k6 (NM_011943.1,1141-1159).
cgcggactttgttgacttt

SEQ ID NO: 506878 - DNA, 19 bp, Mus musculus
  siRNA target sequence for Map2k6 (NM_011943.1,1142-1160).
gcggactttgttgacttta

SEQ ID NO: 506879 - DNA, 19 bp, Mus musculus
  siRNA target sequence for Map2k6 (NM_011943.1,1145-1163).
gactttgttgactttacct

SEQ ID NO: 506880 - DNA, 19 bp, Mus musculus
  siRNA target sequence for Map2k6 (NM_011943.1,1162-1180).
ctcacagtgcttgaagaaa

SEQ ID NO: 506881 - DNA, 19 bp, Mus musculus
  siRNA target sequence for Map2k6 (NM_011943.1,1186-1204).
caaagaacggcccacatat

SEQ ID NO: 506882 - DNA, 19 bp, Mus musculus
  siRNA target sequence for Map2k6 (NM_011943.1,1197-1215).
ccacatatccagagcttat

SEQ ID NO: 506883 - DNA, 19 bp, Mus musculus
  siRNA target sequence for Map2k6 (NM_011943.1,1224-1242).
catttttcaccgtacatga

SEQ ID NO: 506884 - DNA, 19 bp, Mus musculus
  siRNA target sequence for Map2k6 (NM_011943.1,1231-1249).
caccgtacatgaatccaaa

SEQ ID NO: 506885 - DNA, 19 bp, Mus musculus
  siRNA target sequence for Map2k6 (NM_011943.1,1256-1274).
gacgtggcatcttttgtaa

SEQ ID NO: 506886 - DNA, 19 bp, Mus musculus
  siRNA target sequence for Map2k6 (NM_011943.1,1258-1276).
cgtggcatcttttgtaaaa

SEQ ID NO: 506887 - DNA, 19 bp, Mus musculus
  siRNA target sequence for Map2k7 (NM_011944.1,339-357).
cgttatcaggcagaaatca

SEQ ID NO: 506888 - DNA, 19 bp, Mus musculus
  siRNA target sequence for Map2k7 (NM_011944.1,340-358).
gttatcaggcagaaatcaa

SEQ ID NO: 506889 - DNA, 19 bp, Mus musculus
  siRNA target sequence for Map2k7 (NM_011944.1,424-442).
ggaagacaggccacatcat

SEQ ID NO: 506890 - DNA, 19 bp, Mus musculus
  siRNA target sequence for Map2k7 (NM_011944.1,480-498).
gagaataagcgcattttga

SEQ ID NO: 506891 - DNA, 19 bp, Mus musculus
  siRNA target sequence for Map2k7 (NM_011944.1,497-515).
gatggacctggatgtagta

SEQ ID NO: 506892 - DNA, 19 bp, Mus musculus
  siRNA target sequence for Map2k7 (NM_011944.1,523-541).
gccatgactgcccttacat

SEQ ID NO: 506893 - DNA, 19 bp, Mus musculus
  siRNA target sequence for Map2k7 (NM_011944.1,593-611).
ggagctcatgggcatatgt

SEQ ID NO: 506894 - DNA, 19 bp, Mus musculus
  siRNA target sequence for Map2k7 (NM_011944.1,671-689).
gactgtggcgattgtgaaa

SEQ ID NO: 506895 - DNA, 19 bp, Mus musculus
  siRNA target sequence for Map2k7 (NM_011944.1,960-978).
cagttcccctataagaact

SEQ ID NO: 506896 - DNA, 19 bp, Mus musculus
  siRNA target sequence for Map2k7 (NM_011944.1,1059-1077).
gacttccagtcatttgtca

SEQ ID NO: 506897 - DNA, 19 bp, Mus musculus
  siRNA target sequence for Map2k7 (NM_011944.1,1074-1092).
gtcaaagactgccttacta

SEQ ID NO: 506898 - DNA, 19 bp, Mus musculus
  siRNA target sequence for Map2k7 (NM_011944.1,1102-1120).
ggaagagaccaaagtataa

SEQ ID NO: 506899 - DNA, 19 bp, Mus musculus
  siRNA target sequence for Map2k7 (NM_011944.1,1103-1121).
gaagagaccaaagtataat

SEQ ID NO: 506900 - DNA, 19 bp, Mus musculus
  siRNA target sequence for Map2k7 (NM_011944.1,1108-1126).
gaccaaagtataataagct

SEQ ID NO: 506901 - DNA, 19 bp, Mus musculus
  siRNA target sequence for Map2k7 (NM_011944.1,1128-1146).
cttgaacacagcttcatca

SEQ ID NO: 506902 - DNA, 19 bp, Mus musculus
  siRNA target sequence for Map2k7 (NM_011944.1,1170-1188).
gatgtcgcgtcctggttta

SEQ ID NO: 506903 - DNA, 19 bp, Mus musculus
  siRNA target sequence for Map2k7 (NM_011944.1,1175-1193).
cgcgtcctggtttaaggat

SEQ ID NO: 506904 - DNA, 19 bp, Mus musculus
  siRNA target sequence for Map3k1 (NM_011945.1,480-498).
ggtcgagagatggagaata

SEQ ID NO: 506905 - DNA, 19 bp, Mus musculus
  siRNA target sequence for Map3k1 (NM_011945.1,638-656).
gaagccaatccctattaaa

SEQ ID NO: 506906 - DNA, 19 bp, Mus musculus
  siRNA target sequence for Map3k1 (NM_011945.1,960-978).
cagataggacccaactctt

SEQ ID NO: 506907 - DNA, 19 bp, Mus musculus
  siRNA target sequence for Map3k1 (NM_011945.1,991-1009).
gagacagtccagacaataa

SEQ ID NO: 506908 - DNA, 19 bp, Mus musculus
  siRNA target sequence for Map3k1 (NM_011945.1,993-1011).
gacagtccagacaataaat

SEQ ID NO: 506909 - DNA, 19 bp, Mus musculus
  siRNA target sequence for Map3k1 (NM_011945.1,1048-1066).
ggcgtggagcattctgtat

SEQ ID NO: 506910 - DNA, 19 bp, Mus musculus
  siRNA target sequence for Map3k1 (NM_011945.1,1049-1067).
gcgtggagcattctgtatt

SEQ ID NO: 506911 - DNA, 19 bp, Mus musculus
  siRNA target sequence for Map3k1 (NM_011945.1,1107-1125).
ccctctgaccccatgttat

SEQ ID NO: 506912 - DNA, 19 bp, Mus musculus
  siRNA target sequence for Map3k1 (NM_011945.1,1183-1201).
ggcgtagctcgagaatcaa

SEQ ID NO: 506913 - DNA, 19 bp, Mus musculus
  siRNA target sequence for Map3k1 (NM_011945.1,1184-1202).
gcgtagctcgagaatcaaa

SEQ ID NO: 506914 - DNA, 19 bp, Mus musculus
  siRNA target sequence for Map3k1 (NM_011945.1,1233-1251).
gtgtcacgcatgtcaaatt

SEQ ID NO: 506915 - DNA, 19 bp, Mus musculus
  siRNA target sequence for Map3k1 (NM_011945.1,1274-1292).
cacatccacatctagttca

SEQ ID NO: 506916 - DNA, 19 bp, Mus musculus
  siRNA target sequence for Map3k1 (NM_011945.1,1279-1297).
ccacatctagttcagaaaa

SEQ ID NO: 506917 - DNA, 19 bp, Mus musculus
  siRNA target sequence for Map3k1 (NM_011945.1,1424-1442).
ggcggaagagtgtagaaga

SEQ ID NO: 506918 - DNA, 19 bp, Mus musculus
  siRNA target sequence for Map3k1 (NM_011945.1,1425-1443).
gcggaagagtgtagaagaa

SEQ ID NO: 506919 - DNA, 19 bp, Mus musculus
  siRNA target sequence for Map3k1 (NM_011945.1,1462-1480).
gtcccctttgtagatctaa

SEQ ID NO: 506920 - DNA, 19 bp, Mus musculus
  siRNA target sequence for Map3k1 (NM_011945.1,1464-1482).
cccctttgtagatctaagt

SEQ ID NO: 506921 - DNA, 19 bp, Mus musculus
  siRNA target sequence for Map3k1 (NM_011945.1,1483-1501).
ggagatcccatgacttcta

SEQ ID NO: 506922 - DNA, 19 bp, Mus musculus
  siRNA target sequence for Map3k1 (NM_011945.1,1607-1625).
ggagagcagttttaacctt

SEQ ID NO: 506923 - DNA, 19 bp, Mus musculus
  siRNA target sequence for Map3k1 (NM_011945.1,1608-1626).
gagagcagttttaacctta

SEQ ID NO: 506924 - DNA, 19 bp, Mus musculus
  siRNA target sequence for Map3k1 (NM_011945.1,1612-1630).
gcagttttaaccttactca

SEQ ID NO: 506925 - DNA, 19 bp, Mus musculus
  siRNA target sequence for Map3k1 (NM_011945.1,1646-1664).
gattccttccgcttacaaa

SEQ ID NO: 506926 - DNA, 19 bp, Mus musculus
  siRNA target sequence for Map3k1 (NM_011945.1,1650-1668).
ccttccgcttacaaagatt

SEQ ID NO: 506927 - DNA, 19 bp, Mus musculus
  siRNA target sequence for Map3k1 (NM_011945.1,1701-1719).
gaactcgttggctgcttat

SEQ ID NO: 506928 - DNA, 19 bp, Mus musculus
  siRNA target sequence for Map3k1 (NM_011945.1,1704-1722).
ctcgttggctgcttattct

SEQ ID NO: 506929 - DNA, 19 bp, Mus musculus
  siRNA target sequence for Map3k1 (NM_011945.1,1710-1728).
ggctgcttattctctagaa

SEQ ID NO: 506930 - DNA, 19 bp, Mus musculus
  siRNA target sequence for Map3k1 (NM_011945.1,1906-1924).
gctgcagtgtcctgtctat

SEQ ID NO: 506931 - DNA, 19 bp, Mus musculus
  siRNA target sequence for Map3k1 (NM_011945.1,1909-1927).
gcagtgtcctgtctatagt

SEQ ID NO: 506932 - DNA, 19 bp, Mus musculus
  siRNA target sequence for Map3k1 (NM_011945.1,1935-1953).
gaccctgtctacaaagtgt

SEQ ID NO: 506933 - DNA, 19 bp, Mus musculus
  siRNA target sequence for Map3k1 (NM_011945.1,1950-1968).
gtgtacgttgctgctttaa

SEQ ID NO: 506934 - DNA, 19 bp, Mus musculus
  siRNA target sequence for Map3k1 (NM_011945.1,1959-1977).
gctgctttaaaaacattga

SEQ ID NO: 506935 - DNA, 19 bp, Mus musculus
  siRNA target sequence for Map3k1 (NM_011945.1,2044-2062).
ggccagttgtagacactat

SEQ ID NO: 506936 - DNA, 19 bp, Mus musculus
  siRNA target sequence for Map3k1 (NM_011945.1,2155-2173).
cggttgggagagaaatact

SEQ ID NO: 506937 - DNA, 19 bp, Mus musculus
  siRNA target sequence for Map3k1 (NM_011945.1,2157-2175).
gttgggagagaaatactta

SEQ ID NO: 506938 - DNA, 19 bp, Mus musculus
  siRNA target sequence for Map3k1 (NM_011945.1,2191-2209).
gggttggtggtgtcgatta

SEQ ID NO: 506939 - DNA, 19 bp, Mus musculus
  siRNA target sequence for Map3k1 (NM_011945.1,2199-2217).
ggtgtcgattacgtcttaa

SEQ ID NO: 506940 - DNA, 19 bp, Mus musculus
  siRNA target sequence for Map3k1 (NM_011945.1,2202-2220).
gtcgattacgtcttaagtt

SEQ ID NO: 506941 - DNA, 19 bp, Mus musculus
  siRNA target sequence for Map3k1 (NM_011945.1,2204-2222).
cgattacgtcttaagttgt

SEQ ID NO: 506942 - DNA, 19 bp, Mus musculus
  siRNA target sequence for Map3k1 (NM_011945.1,2229-2247).
ggaaaccaagctgaatcaa

SEQ ID NO: 506943 - DNA, 19 bp, Mus musculus
  siRNA target sequence for Map3k1 (NM_011945.1,2245-2263).
caaacaactggcaagaact

SEQ ID NO: 506944 - DNA, 19 bp, Mus musculus
  siRNA target sequence for Map3k1 (NM_011945.1,2267-2285).
gggtcgcctctgtcttata

SEQ ID NO: 506945 - DNA, 19 bp, Mus musculus
  siRNA target sequence for Map3k1 (NM_011945.1,2269-2287).
gtcgcctctgtcttataga

SEQ ID NO: 506946 - DNA, 19 bp, Mus musculus
  siRNA target sequence for Map3k1 (NM_011945.1,2286-2304).
gacaggttgctgttggaat

SEQ ID NO: 506947 - DNA, 19 bp, Mus musculus
  siRNA target sequence for Map3k1 (NM_011945.1,2288-2306).
caggttgctgttggaattt

SEQ ID NO: 506948 - DNA, 19 bp, Mus musculus
  siRNA target sequence for Map3k1 (NM_011945.1,2384-2402).
gctctccctcttaaccttt

SEQ ID NO: 506949 - DNA, 19 bp, Mus musculus
  siRNA target sequence for Map3k1 (NM_011945.1,2403-2421).
gccttgcaatccattgaca

SEQ ID NO: 506950 - DNA, 19 bp, Mus musculus
  siRNA target sequence for Map3k1 (NM_011945.1,2405-2423).
cttgcaatccattgacaat

SEQ ID NO: 506951 - DNA, 19 bp, Mus musculus
  siRNA target sequence for Map3k1 (NM_011945.1,2444-2462).
gctctctcggaggatatat

SEQ ID NO: 506952 - DNA, 19 bp, Mus musculus
  siRNA target sequence for Map3k1 (NM_011945.1,2486-2504).
cgcagtgcccgctgtgttt

SEQ ID NO: 506953 - DNA, 19 bp, Mus musculus
  siRNA target sequence for Map3k1 (NM_011945.1,2490-2508).
gtgcccgctgtgttttcca

SEQ ID NO: 506954 - DNA, 19 bp, Mus musculus
  siRNA target sequence for Map3k1 (NM_011945.1,2510-2528).
gctggtaaccatgcttaat

SEQ ID NO: 506955 - DNA, 19 bp, Mus musculus
  siRNA target sequence for Map3k1 (NM_011945.1,2513-2531).
ggtaaccatgcttaatgct

SEQ ID NO: 506956 - DNA, 19 bp, Mus musculus
  siRNA target sequence for Map3k1 (NM_011945.1,2579-2597).
cgcggatgaggtagaaatt

SEQ ID NO: 506957 - DNA, 19 bp, Mus musculus
  siRNA target sequence for Map3k1 (NM_011945.1,2754-2772).
gccagctcggaggacattt

SEQ ID NO: 506958 - DNA, 19 bp, Mus musculus
  siRNA target sequence for Map3k1 (NM_011945.1,2834-2852).
gccagcggttcaaacaaaa

SEQ ID NO: 506959 - DNA, 19 bp, Mus musculus
  siRNA target sequence for Map3k1 (NM_011945.1,2862-2880).
cacagtcagtgtttgaact

SEQ ID NO: 506960 - DNA, 19 bp, Mus musculus
  siRNA target sequence for Map3k1 (NM_011945.1,2893-2911).
ctcatgctcaattaatgtt

SEQ ID NO: 506961 - DNA, 19 bp, Mus musculus
  siRNA target sequence for Map3k1 (NM_011945.1,2942-2960).
cccgtctgtcccagatatt

SEQ ID NO: 506962 - DNA, 19 bp, Mus musculus
  siRNA target sequence for Map3k1 (NM_011945.1,2985-3003).
gttccctgcaaaatacctt

SEQ ID NO: 506963 - DNA, 19 bp, Mus musculus
  siRNA target sequence for Map3k1 (NM_011945.1,3015-3033).
cagacacagcgcaagttct

SEQ ID NO: 506964 - DNA, 19 bp, Mus musculus
  siRNA target sequence for Map3k1 (NM_011945.1,3023-3041).
gcgcaagttctctctacaa

SEQ ID NO: 506965 - DNA, 19 bp, Mus musculus
  siRNA target sequence for Map3k1 (NM_011945.1,3150-3168).
cccgttccgggcagtacaa

SEQ ID NO: 506966 - DNA, 19 bp, Mus musculus
  siRNA target sequence for Map3k1 (NM_011945.1,3158-3176).
gggcagtacaagcaaacta

SEQ ID NO: 506967 - DNA, 19 bp, Mus musculus
  siRNA target sequence for Map3k1 (NM_011945.1,3174-3192).
ctaggggacgccacaaaaa

SEQ ID NO: 506968 - DNA, 19 bp, Mus musculus
  siRNA target sequence for Map3k1 (NM_011945.1,3177-3195).
ggggacgccacaaaaagta

SEQ ID NO: 506969 - DNA, 19 bp, Mus musculus
  siRNA target sequence for Map3k1 (NM_011945.1,3308-3326).
ggacaagtgcaggttagat

SEQ ID NO: 506970 - DNA, 19 bp, Mus musculus
  siRNA target sequence for Map3k1 (NM_011945.1,3349-3367).
gcatcgaggaccttcttga

SEQ ID NO: 506971 - DNA, 19 bp, Mus musculus
  siRNA target sequence for Map3k1 (NM_011945.1,3350-3368).
catcgaggaccttcttgaa

SEQ ID NO: 506972 - DNA, 19 bp, Mus musculus
  siRNA target sequence for Map3k1 (NM_011945.1,3458-3476).
caaagacgacgtcaatcat

SEQ ID NO: 506973 - DNA, 19 bp, Mus musculus
  siRNA target sequence for Map3k1 (NM_011945.1,3464-3482).
cgacgtcaatcataatcaa

SEQ ID NO: 506974 - DNA, 19 bp, Mus musculus
  siRNA target sequence for Map3k1 (NM_011945.1,3465-3483).
gacgtcaatcataatcaaa

SEQ ID NO: 506975 - DNA, 19 bp, Mus musculus
  siRNA target sequence for Map3k1 (NM_011945.1,3595-3613).
gagaagatattatcatcat

SEQ ID NO: 506976 - DNA, 19 bp, Mus musculus
  siRNA target sequence for Map3k1 (NM_011945.1,3777-3795).
gtgacgtacgtcagaaaca

SEQ ID NO: 506977 - DNA, 19 bp, Mus musculus
  siRNA target sequence for Map3k1 (NM_011945.1,3779-3797).
gacgtacgtcagaaacaca

SEQ ID NO: 506978 - DNA, 19 bp, Mus musculus
  siRNA target sequence for Map3k1 (NM_011945.1,3948-3966).
gtggctcacctcttgagta

SEQ ID NO: 506979 - DNA, 19 bp, Mus musculus
  siRNA target sequence for Map3k1 (NM_011945.1,3950-3968).
ggctcacctcttgagtaaa

SEQ ID NO: 506980 - DNA, 19 bp, Mus musculus
  siRNA target sequence for Map3k1 (NM_011945.1,3964-3982).
gtaaatacggagctttcaa

SEQ ID NO: 506981 - DNA, 19 bp, Mus musculus
  siRNA target sequence for Map3k1 (NM_011945.1,4037-4055).
ccacgagaaccagatcatt

SEQ ID NO: 506982 - DNA, 19 bp, Mus musculus
  siRNA target sequence for Map3k1 (NM_011945.1,4097-4115).
cggtcagaggctgagaatt

SEQ ID NO: 506983 - DNA, 19 bp, Mus musculus
  siRNA target sequence for Map3k1 (NM_011945.1,4236-4254).
ggtaggagctgtgatgtat

SEQ ID NO: 506984 - DNA, 19 bp, Mus musculus
  siRNA target sequence for Map3k1 (NM_011945.1,4264-4282).
gctgcgccattatagaaat

SEQ ID NO: 506985 - DNA, 19 bp, Mus musculus
  siRNA target sequence for Map3k1 (NM_011945.1,4322-4340).
caatcatctcgccttgata

SEQ ID NO: 506986 - DNA, 19 bp, Mus musculus
  siRNA target sequence for Map3k1 (NM_011945.1,4329-4347).
ctcgccttgatatttaaga

SEQ ID NO: 506987 - DNA, 19 bp, Mus musculus
  siRNA target sequence for Map3k1 (NM_011945.1,4331-4349).
cgccttgatatttaagatt

SEQ ID NO: 506988 - DNA, 19 bp, Mus musculus
  siRNA target sequence for Map3k1 (NM_011945.1,4346-4364).
gattgctagcgcaactact

SEQ ID NO: 506989 - DNA, 19 bp, Mus musculus
  siRNA target sequence for Map3k11 (NM_022012.2,1255-1273).
gaacacaagaccctaaaga

SEQ ID NO: 506990 - DNA, 19 bp, Mus musculus
  siRNA target sequence for Map3k11 (NM_022012.2,1258-1276).
cacaagaccctaaagatta

SEQ ID NO: 506991 - DNA, 19 bp, Mus musculus
  siRNA target sequence for Map3k11 (NM_022012.2,1483-1501).
gctgtaaacaagttaacgt

SEQ ID NO: 506992 - DNA, 19 bp, Mus musculus
  siRNA target sequence for Map3k11 (NM_022012.2,1484-1502).
ctgtaaacaagttaacgtt

SEQ ID NO: 506993 - DNA, 19 bp, Mus musculus
  siRNA target sequence for Map3k11 (NM_022012.2,1686-1704).
gatccagggcctgtttgat

SEQ ID NO: 506994 - DNA, 19 bp, Mus musculus
  siRNA target sequence for Map3k11 (NM_022012.2,2082-2100).
gttggaacctacagaatca

SEQ ID NO: 506995 - DNA, 19 bp, Mus musculus
  siRNA target sequence for Map3k11 (NM_022012.2,2121-2139).
gtcccccagacgtcttgaa

SEQ ID NO: 506996 - DNA, 19 bp, Mus musculus
  siRNA target sequence for Map3k11 (NM_022012.2,2123-2141).
cccccagacgtcttgaaga

SEQ ID NO: 506997 - DNA, 19 bp, Mus musculus
  siRNA target sequence for Map3k11 (NM_022012.2,2124-2142).
ccccagacgtcttgaagat

SEQ ID NO: 506998 - DNA, 19 bp, Mus musculus
  siRNA target sequence for Map3k11 (NM_022012.2,2125-2143).
cccagacgtcttgaagatt

SEQ ID NO: 506999 - DNA, 19 bp, Mus musculus
  siRNA target sequence for Map3k11 (NM_022012.2,2127-2145).
cagacgtcttgaagattca

SEQ ID NO: 507000 - DNA, 19 bp, Mus musculus
  siRNA target sequence for Map3k11 (NM_022012.2,2242-2260).
gccacgtggtacctagatt

SEQ ID NO: 507001 - DNA, 19 bp, Mus musculus
  siRNA target sequence for Map3k11 (NM_022012.2,2244-2262).
cacgtggtacctagattca

SEQ ID NO: 507002 - DNA, 19 bp, Mus musculus
  siRNA target sequence for Map3k11 (NM_022012.2,2246-2264).
cgtggtacctagattcaga

SEQ ID NO: 507003 - DNA, 19 bp, Mus musculus
  siRNA target sequence for Map3k11 (NM_022012.2,2301-2319).
ggcactcaacggtaatcct

SEQ ID NO: 507004 - DNA, 19 bp, Mus musculus
  siRNA target sequence for Map3k11 (NM_022012.2,2384-2402).
ctgggacgcctaaactgat

SEQ ID NO: 507005 - DNA, 19 bp, Mus musculus
  siRNA target sequence for Map3k11 (NM_022012.2,2400-2418).
gatccaacgtgcattgcta

SEQ ID NO: 507006 - DNA, 19 bp, Mus musculus
  siRNA target sequence for Map3k11 (NM_022012.2,2566-2584).
ctcatccgcctctcacaaa

SEQ ID NO: 507007 - DNA, 19 bp, Mus musculus
  siRNA target sequence for Map3k11 (NM_022012.2,2568-2586).
catccgcctctcacaaaca

SEQ ID NO: 507008 - DNA, 19 bp, Mus musculus
  siRNA target sequence for Map3k11 (NM_022012.2,2609-2627).
ccactcctggacccttatt

SEQ ID NO: 507009 - DNA, 19 bp, Mus musculus
  siRNA target sequence for Map3k11 (NM_022012.2,2761-2779).
ccaccgttgggcctaatca

SEQ ID NO: 507010 - DNA, 19 bp, Mus musculus
  siRNA target sequence for Map3k11 (NM_022012.2,2798-2816).
cactccgtagccgtattga

SEQ ID NO: 507011 - DNA, 19 bp, Mus musculus
  siRNA target sequence for Map3k11 (NM_022012.2,2884-2902).
cgggcaccgtggaccttat

SEQ ID NO: 507012 - DNA, 19 bp, Mus musculus
  siRNA target sequence for Map3k11 (NM_022012.2,2885-2903).
gggcaccgtggaccttatt

SEQ ID NO: 507013 - DNA, 19 bp, Mus musculus
  siRNA target sequence for Map3k12 (NM_009582.2,119-137).
ctctaagtgaggcttctat

SEQ ID NO: 507014 - DNA, 19 bp, Mus musculus
  siRNA target sequence for Map3k12 (NM_009582.2,186-204).
gacgcccacccaatgtgta

SEQ ID NO: 507015 - DNA, 19 bp, Mus musculus
  siRNA target sequence for Map3k12 (NM_009582.2,200-218).
gtgtacttcgagatgttgt

SEQ ID NO: 507016 - DNA, 19 bp, Mus musculus
  siRNA target sequence for Map3k12 (NM_009582.2,714-732).
ctactgcatccttatggaa

SEQ ID NO: 507017 - DNA, 19 bp, Mus musculus
  siRNA target sequence for Map3k12 (NM_009582.2,738-756).
cgctcaaggacagctatat

SEQ ID NO: 507018 - DNA, 19 bp, Mus musculus
  siRNA target sequence for Map3k12 (NM_009582.2,740-758).
ctcaaggacagctatatga

SEQ ID NO: 507019 - DNA, 19 bp, Mus musculus
  siRNA target sequence for Map3k12 (NM_009582.2,837-855).
cctgcacctgcacaagatt

SEQ ID NO: 507020 - DNA, 19 bp, Mus musculus
  siRNA target sequence for Map3k12 (NM_009582.2,838-856).
ctgcacctgcacaagatta

SEQ ID NO: 507021 - DNA, 19 bp, Mus musculus
  siRNA target sequence for Map3k12 (NM_009582.2,877-895).
cccaacatgctaatcacat

SEQ ID NO: 507022 - DNA, 19 bp, Mus musculus
  siRNA target sequence for Map3k12 (NM_009582.2,878-896).
ccaacatgctaatcacata

SEQ ID NO: 507023 - DNA, 19 bp, Mus musculus
  siRNA target sequence for Map3k12 (NM_009582.2,1099-1117).
gattcctcagccatcatct

SEQ ID NO: 507024 - DNA, 19 bp, Mus musculus
  siRNA target sequence for Map3k12 (NM_009582.2,1211-1229).
cacgaaatcgcccatcatt

SEQ ID NO: 507025 - DNA, 19 bp, Mus musculus
  siRNA target sequence for Map3k12 (NM_009582.2,1223-1241).
catcattccgacagatctt

SEQ ID NO: 507026 - DNA, 19 bp, Mus musculus
  siRNA target sequence for Map3k12 (NM_009582.2,1282-1300).
ccccaggagacttacttta

SEQ ID NO: 507027 - DNA, 19 bp, Mus musculus
  siRNA target sequence for Map3k12 (NM_009582.2,1283-1301).
cccaggagacttactttaa

SEQ ID NO: 507028 - DNA, 19 bp, Mus musculus
  siRNA target sequence for Map3k12 (NM_009582.2,1310-1328).
cagagtggcgggaagaagt

SEQ ID NO: 507029 - DNA, 19 bp, Mus musculus
  siRNA target sequence for Map3k12 (NM_009582.2,1314-1332).
gtggcgggaagaagtaaaa

SEQ ID NO: 507030 - DNA, 19 bp, Mus musculus
  siRNA target sequence for Map3k12 (NM_009582.2,1316-1334).
ggcgggaagaagtaaaact

SEQ ID NO: 507031 - DNA, 19 bp, Mus musculus
  siRNA target sequence for Map3k12 (NM_009582.2,1333-1351).
ctgcactttgaaaagatta

SEQ ID NO: 507032 - DNA, 19 bp, Mus musculus
  siRNA target sequence for Map3k12 (NM_009582.2,1473-1491).
cctgtacatggaactgaat

SEQ ID NO: 507033 - DNA, 19 bp, Mus musculus
  siRNA target sequence for Map3k12 (NM_009582.2,1493-1511).
ccctcatgctgcaactaga

SEQ ID NO: 507034 - DNA, 19 bp, Mus musculus
  siRNA target sequence for Map3k12 (NM_009582.2,1494-1512).
cctcatgctgcaactagaa

SEQ ID NO: 507035 - DNA, 19 bp, Mus musculus
  siRNA target sequence for Map3k12 (NM_009582.2,1535-1553).
ggcgagagcaggctttaga

SEQ ID NO: 507036 - DNA, 19 bp, Mus musculus
  siRNA target sequence for Map3k12 (NM_009582.2,1557-1575).
gcggtgtcctggtctacta

SEQ ID NO: 507037 - DNA, 19 bp, Mus musculus
  siRNA target sequence for Map3k12 (NM_009582.2,1637-1655).
ggaacgtgccacagaaact

SEQ ID NO: 507038 - DNA, 19 bp, Mus musculus
  siRNA target sequence for Map3k12 (NM_009582.2,1654-1672).
ctgtcgccccacagcaaaa

SEQ ID NO: 507039 - DNA, 19 bp, Mus musculus
  siRNA target sequence for Map3k12 (NM_009582.2,1691-1709).
cagagtcgttgctacctaa

SEQ ID NO: 507040 - DNA, 19 bp, Mus musculus
  siRNA target sequence for Map3k12 (NM_009582.2,1695-1713).
gtcgttgctacctaaacta

SEQ ID NO: 507041 - DNA, 19 bp, Mus musculus
  siRNA target sequence for Map3k12 (NM_009582.2,1697-1715).
cgttgctacctaaactaga

SEQ ID NO: 507042 - DNA, 19 bp, Mus musculus
  siRNA target sequence for Map3k12 (NM_009582.2,1698-1716).
gttgctacctaaactagat

SEQ ID NO: 507043 - DNA, 19 bp, Mus musculus
  siRNA target sequence for Map3k12 (NM_009582.2,1960-1978).
cttctactccgaaagatgt

SEQ ID NO: 507044 - DNA, 19 bp, Mus musculus
  siRNA target sequence for Map3k12 (NM_009582.2,1963-1981).
ctactccgaaagatgtcat

SEQ ID NO: 507045 - DNA, 19 bp, Mus musculus
  siRNA target sequence for Map3k12 (NM_009582.2,1966-1984).
ctccgaaagatgtcatcat

SEQ ID NO: 507046 - DNA, 19 bp, Mus musculus
  siRNA target sequence for Map3k12 (NM_009582.2,2296-2314).
cagaaacgtggtatctcat

SEQ ID NO: 507047 - DNA, 19 bp, Mus musculus
  siRNA target sequence for Map3k12 (NM_009582.2,2388-2406).
catgcgtcagtcactatct

SEQ ID NO: 507048 - DNA, 19 bp, Mus musculus
  siRNA target sequence for Map3k12 (NM_009582.2,2391-2409).
gcgtcagtcactatctaca

SEQ ID NO: 507049 - DNA, 19 bp, Mus musculus
  siRNA target sequence for Map3k12 (NM_009582.2,2395-2413).
cagtcactatctacattca

SEQ ID NO: 507050 - DNA, 19 bp, Mus musculus
  siRNA target sequence for Map3k14 (NM_016896.2,341-359).
gtgagaatagccaagagtt

SEQ ID NO: 507051 - DNA, 19 bp, Mus musculus
  siRNA target sequence for Map3k14 (NM_016896.2,416-434).
ctgagagtctcgatcaaat

SEQ ID NO: 507052 - DNA, 19 bp, Mus musculus
  siRNA target sequence for Map3k14 (NM_016896.2,426-444).
cgatcaaatccccaacaat

SEQ ID NO: 507053 - DNA, 19 bp, Mus musculus
  siRNA target sequence for Map3k14 (NM_016896.2,642-660).
caacctctatgccagaaat

SEQ ID NO: 507054 - DNA, 19 bp, Mus musculus
  siRNA target sequence for Map3k14 (NM_016896.2,710-728).
gctttaagaaacaagatga

SEQ ID NO: 507055 - DNA, 19 bp, Mus musculus
  siRNA target sequence for Map3k14 (NM_016896.2,755-773).
cagaactccacaaactgat

SEQ ID NO: 507056 - DNA, 19 bp, Mus musculus
  siRNA target sequence for Map3k14 (NM_016896.2,769-787).
ctgatcagccccttgcaat

SEQ ID NO: 507057 - DNA, 19 bp, Mus musculus
  siRNA target sequence for Map3k14 (NM_016896.2,776-794).
gccccttgcaatgtctaaa

SEQ ID NO: 507058 - DNA, 19 bp, Mus musculus
  siRNA target sequence for Map3k14 (NM_016896.2,866-884).
gcggaatgccccatccttt

SEQ ID NO: 507059 - DNA, 19 bp, Mus musculus
  siRNA target sequence for Map3k14 (NM_016896.2,929-947).
ctgccgtcctggacaaact

SEQ ID NO: 507060 - DNA, 19 bp, Mus musculus
  siRNA target sequence for Map3k14 (NM_016896.2,1061-1079).
ctcggggtgccctagaaaa

SEQ ID NO: 507061 - DNA, 19 bp, Mus musculus
  siRNA target sequence for Map3k14 (NM_016896.2,1231-1249).
ctgcttactgagaaactca

SEQ ID NO: 507062 - DNA, 19 bp, Mus musculus
  siRNA target sequence for Map3k14 (NM_016896.2,1440-1458).
cagaatcgtccctctctat

SEQ ID NO: 507063 - DNA, 19 bp, Mus musculus
  siRNA target sequence for Map3k14 (NM_016896.2,1477-1495).
ccgtgggtgaacatcttca

SEQ ID NO: 507064 - DNA, 19 bp, Mus musculus
  siRNA target sequence for Map3k14 (NM_016896.2,1478-1496).
cgtgggtgaacatcttcat

SEQ ID NO: 507065 - DNA, 19 bp, Mus musculus
  siRNA target sequence for Map3k14 (NM_016896.2,1555-1573).
gaagaccgagccctttact

SEQ ID NO: 507066 - DNA, 19 bp, Mus musculus
  siRNA target sequence for Map3k14 (NM_016896.2,1720-1738).
gacggcctagggaaatcct

SEQ ID NO: 507067 - DNA, 19 bp, Mus musculus
  siRNA target sequence for Map3k14 (NM_016896.2,1740-1758).
gctcacaggggactacatt

SEQ ID NO: 507068 - DNA, 19 bp, Mus musculus
  siRNA target sequence for Map3k14 (NM_016896.2,2078-2096).
gcccttggaaaggagaata

SEQ ID NO: 507069 - DNA, 19 bp, Mus musculus
  siRNA target sequence for Map3k2 (NM_011946.1,436-454).
cagcaagctttgaattcaa

SEQ ID NO: 507070 - DNA, 19 bp, Mus musculus
  siRNA target sequence for Map3k2 (NM_011946.1,483-501).
gccagtcggccagcattat

SEQ ID NO: 507071 - DNA, 19 bp, Mus musculus
  siRNA target sequence for Map3k2 (NM_011946.1,485-503).
cagtcggccagcattatct

SEQ ID NO: 507072 - DNA, 19 bp, Mus musculus
  siRNA target sequence for Map3k2 (NM_011946.1,487-505).
gtcggccagcattatcttt

SEQ ID NO: 507073 - DNA, 19 bp, Mus musculus
  siRNA target sequence for Map3k2 (NM_011946.1,548-566).
gaatgatgttcgagtcaaa

SEQ ID NO: 507074 - DNA, 19 bp, Mus musculus
  siRNA target sequence for Map3k2 (NM_011946.1,600-618).
ggttactagaccagttaaa

SEQ ID NO: 507075 - DNA, 19 bp, Mus musculus
  siRNA target sequence for Map3k2 (NM_011946.1,605-623).
ctagaccagttaaactaga

SEQ ID NO: 507076 - DNA, 19 bp, Mus musculus
  siRNA target sequence for Map3k2 (NM_011946.1,625-643).
gacctgagatctaagtcta

SEQ ID NO: 507077 - DNA, 19 bp, Mus musculus
  siRNA target sequence for Map3k2 (NM_011946.1,628-646).
ctgagatctaagtctaaga

SEQ ID NO: 507078 - DNA, 19 bp, Mus musculus
  siRNA target sequence for Map3k2 (NM_011946.1,660-678).
gtctatggatctacactat

SEQ ID NO: 507079 - DNA, 19 bp, Mus musculus
  siRNA target sequence for Map3k2 (NM_011946.1,673-691).
cactataccaacaatgagt

SEQ ID NO: 507080 - DNA, 19 bp, Mus musculus
  siRNA target sequence for Map3k2 (NM_011946.1,681-699).
caacaatgagttggtaatt

SEQ ID NO: 507081 - DNA, 19 bp, Mus musculus
  siRNA target sequence for Map3k2 (NM_011946.1,690-708).
gttggtaattccgttaact

SEQ ID NO: 507082 - DNA, 19 bp, Mus musculus
  siRNA target sequence for Map3k2 (NM_011946.1,701-719).
cgttaactacccaagatga

SEQ ID NO: 507083 - DNA, 19 bp, Mus musculus
  siRNA target sequence for Map3k2 (NM_011946.1,742-760).
ctggatcgcagtattcaca

SEQ ID NO: 507084 - DNA, 19 bp, Mus musculus
  siRNA target sequence for Map3k2 (NM_011946.1,759-777).
catgaagagtctcaagata

SEQ ID NO: 507085 - DNA, 19 bp, Mus musculus
  siRNA target sequence for Map3k2 (NM_011946.1,767-785).
gtctcaagatattacttgt

SEQ ID NO: 507086 - DNA, 19 bp, Mus musculus
  siRNA target sequence for Map3k2 (NM_011946.1,771-789).
caagatattacttgtagta

SEQ ID NO: 507087 - DNA, 19 bp, Mus musculus
  siRNA target sequence for Map3k2 (NM_011946.1,794-812).
ggagtacacaggctactaa

SEQ ID NO: 507088 - DNA, 19 bp, Mus musculus
  siRNA target sequence for Map3k2 (NM_011946.1,795-813).
gagtacacaggctactaat

SEQ ID NO: 507089 - DNA, 19 bp, Mus musculus
  siRNA target sequence for Map3k2 (NM_011946.1,797-815).
gtacacaggctactaattt

SEQ ID NO: 507090 - DNA, 19 bp, Mus musculus
  siRNA target sequence for Map3k2 (NM_011946.1,800-818).
cacaggctactaatttaga

SEQ ID NO: 507091 - DNA, 19 bp, Mus musculus
  siRNA target sequence for Map3k2 (NM_011946.1,827-845).
cgtcaccagaagatttgaa

SEQ ID NO: 507092 - DNA, 19 bp, Mus musculus
  siRNA target sequence for Map3k2 (NM_011946.1,828-846).
gtcaccagaagatttgaat

SEQ ID NO: 507093 - DNA, 19 bp, Mus musculus
  siRNA target sequence for Map3k2 (NM_011946.1,832-850).
ccagaagatttgaataata

SEQ ID NO: 507094 - DNA, 19 bp, Mus musculus
  siRNA target sequence for Map3k2 (NM_011946.1,869-887).
ggaaaaagcggctatctgt

SEQ ID NO: 507095 - DNA, 19 bp, Mus musculus
  siRNA target sequence for Map3k2 (NM_011946.1,870-888).
gaaaaagcggctatctgta

SEQ ID NO: 507096 - DNA, 19 bp, Mus musculus
  siRNA target sequence for Map3k2 (NM_011946.1,895-913).
ccccctaatagggatagaa

SEQ ID NO: 507097 - DNA, 19 bp, Mus musculus
  siRNA target sequence for Map3k2 (NM_011946.1,897-915).
ccctaatagggatagaagt

SEQ ID NO: 507098 - DNA, 19 bp, Mus musculus
  siRNA target sequence for Map3k2 (NM_011946.1,918-936).
ccctcctccaggatacatt

SEQ ID NO: 507099 - DNA, 19 bp, Mus musculus
  siRNA target sequence for Map3k2 (NM_011946.1,958-976).
gcccggaatgggtcattca

SEQ ID NO: 507100 - DNA, 19 bp, Mus musculus
  siRNA target sequence for Map3k2 (NM_011946.1,960-978).
ccggaatgggtcattcact

SEQ ID NO: 507101 - DNA, 19 bp, Mus musculus
  siRNA target sequence for Map3k2 (NM_011946.1,961-979).
cggaatgggtcattcacta

SEQ ID NO: 507102 - DNA, 19 bp, Mus musculus
  siRNA target sequence for Map3k2 (NM_011946.1,1026-1044).
gctggatccattgtcttta

SEQ ID NO: 507103 - DNA, 19 bp, Mus musculus
  siRNA target sequence for Map3k2 (NM_011946.1,1030-1048).
gatccattgtctttaagca

SEQ ID NO: 507104 - DNA, 19 bp, Mus musculus
  siRNA target sequence for Map3k2 (NM_011946.1,1094-1112).
ctttggatggagaaagcta

SEQ ID NO: 507105 - DNA, 19 bp, Mus musculus
  siRNA target sequence for Map3k2 (NM_011946.1,1102-1120).
ggagaaagctacccaaaat

SEQ ID NO: 507106 - DNA, 19 bp, Mus musculus
  siRNA target sequence for Map3k2 (NM_011946.1,1161-1179).
ggagtttacagactatgat

SEQ ID NO: 507107 - DNA, 19 bp, Mus musculus
  siRNA target sequence for Map3k2 (NM_011946.1,1177-1195).
gataaccccatttttgaga

SEQ ID NO: 507108 - DNA, 19 bp, Mus musculus
  siRNA target sequence for Map3k2 (NM_011946.1,1182-1200).
ccccatttttgagaaattt

SEQ ID NO: 507109 - DNA, 19 bp, Mus musculus
  siRNA target sequence for Map3k2 (NM_011946.1,1223-1241).
gaaggtaccacgtttccta

SEQ ID NO: 507110 - DNA, 19 bp, Mus musculus
  siRNA target sequence for Map3k2 (NM_011946.1,1263-1281).
cggtcggaagacttttcca

SEQ ID NO: 507111 - DNA, 19 bp, Mus musculus
  siRNA target sequence for Map3k2 (NM_011946.1,1386-1404).
gtatgacgacagtcgaata

SEQ ID NO: 507112 - DNA, 19 bp, Mus musculus
  siRNA target sequence for Map3k2 (NM_011946.1,1390-1408).
gacgacagtcgaataagaa

SEQ ID NO: 507113 - DNA, 19 bp, Mus musculus
  siRNA target sequence for Map3k2 (NM_011946.1,1409-1427).
gacgggggagtgacataga

SEQ ID NO: 507114 - DNA, 19 bp, Mus musculus
  siRNA target sequence for Map3k2 (NM_011946.1,1539-1557).
cctctgctatgatgttgat

SEQ ID NO: 507115 - DNA, 19 bp, Mus musculus
  siRNA target sequence for Map3k2 (NM_011946.1,1540-1558).
ctctgctatgatgttgata

SEQ ID NO: 507116 - DNA, 19 bp, Mus musculus
  siRNA target sequence for Map3k2 (NM_011946.1,1574-1592).
ctgttaagcaagttcagtt

SEQ ID NO: 507117 - DNA, 19 bp, Mus musculus
  siRNA target sequence for Map3k2 (NM_011946.1,1611-1629).
gaccagcaaggaagtaaat

SEQ ID NO: 507118 - DNA, 19 bp, Mus musculus
  siRNA target sequence for Map3k2 (NM_011946.1,1640-1658).
gtgaaattcagttgttgaa

SEQ ID NO: 507119 - DNA, 19 bp, Mus musculus
  siRNA target sequence for Map3k2 (NM_011946.1,1665-1683).
gttgcatgagcgaattgtt

SEQ ID NO: 507120 - DNA, 19 bp, Mus musculus
  siRNA target sequence for Map3k2 (NM_011946.1,1672-1690).
gagcgaattgttcagtatt

SEQ ID NO: 507121 - DNA, 19 bp, Mus musculus
  siRNA target sequence for Map3k2 (NM_011946.1,1748-1766).
cagggggttcaattaagga

SEQ ID NO: 507122 - DNA, 19 bp, Mus musculus
  siRNA target sequence for Map3k2 (NM_011946.1,1828-1846).
ctggagggggtccattatt

SEQ ID NO: 507123 - DNA, 19 bp, Mus musculus
  siRNA target sequence for Map3k2 (NM_011946.1,1833-1851).
gggggtccattatttgcat

SEQ ID NO: 507124 - DNA, 19 bp, Mus musculus
  siRNA target sequence for Map3k2 (NM_011946.1,1834-1852).
ggggtccattatttgcata

SEQ ID NO: 507125 - DNA, 19 bp, Mus musculus
  siRNA target sequence for Map3k2 (NM_011946.1,1837-1855).
gtccattatttgcatagta

SEQ ID NO: 507126 - DNA, 19 bp, Mus musculus
  siRNA target sequence for Map3k2 (NM_011946.1,1840-1858).
cattatttgcatagtaata

SEQ ID NO: 507127 - DNA, 19 bp, Mus musculus
  siRNA target sequence for Map3k2 (NM_011946.1,1900-1918).
gattccacaggcaatatca

SEQ ID NO: 507128 - DNA, 19 bp, Mus musculus
  siRNA target sequence for Map3k2 (NM_011946.1,1905-1923).
cacaggcaatatcaagtta

SEQ ID NO: 507129 - DNA, 19 bp, Mus musculus
  siRNA target sequence for Map3k2 (NM_011946.1,1925-1943).
gagactttggggctagtaa

SEQ ID NO: 507130 - DNA, 19 bp, Mus musculus
  siRNA target sequence for Map3k2 (NM_011946.1,2068-2086).
gcatgtactgtggtagaaa

SEQ ID NO: 507131 - DNA, 19 bp, Mus musculus
  siRNA target sequence for Map3k2 (NM_011946.1,2079-2097).
ggtagaaatgctaactgaa

SEQ ID NO: 507132 - DNA, 19 bp, Mus musculus
  siRNA target sequence for Map3k2 (NM_011946.1,2080-2098).
gtagaaatgctaactgaaa

SEQ ID NO: 507133 - DNA, 19 bp, Mus musculus
  siRNA target sequence for Map3k2 (NM_011946.1,2100-2118).
gccaccttgggctgaattt

SEQ ID NO: 507134 - DNA, 19 bp, Mus musculus
  siRNA target sequence for Map3k2 (NM_011946.1,2176-2194).
cctcatgtctcagactata

SEQ ID NO: 507135 - DNA, 19 bp, Mus musculus
  siRNA target sequence for Map3k2 (NM_011946.1,2205-2223).
cctcaaacggatttttgta

SEQ ID NO: 507136 - DNA, 19 bp, Mus musculus
  siRNA target sequence for Map3k2 (NM_011946.1,2261-2279).
ggcacatgtttgtgcatta

SEQ ID NO: 507137 - DNA, 19 bp, Mus musculus
  siRNA target sequence for Map3k3 (NM_011947.1,49-67).
cattagactcgatcatgaa

SEQ ID NO: 507138 - DNA, 19 bp, Mus musculus
  siRNA target sequence for Map3k3 (NM_011947.1,192-210).
gagagacgaattatagcat

SEQ ID NO: 507139 - DNA, 19 bp, Mus musculus
  siRNA target sequence for Map3k3 (NM_011947.1,265-283).
ggcagcctcttgatttgca

SEQ ID NO: 507140 - DNA, 19 bp, Mus musculus
  siRNA target sequence for Map3k3 (NM_011947.1,266-284).
gcagcctcttgatttgcat

SEQ ID NO: 507141 - DNA, 19 bp, Mus musculus
  siRNA target sequence for Map3k3 (NM_011947.1,270-288).
cctcttgatttgcattata

SEQ ID NO: 507142 - DNA, 19 bp, Mus musculus
  siRNA target sequence for Map3k3 (NM_011947.1,276-294).
gatttgcattatatgaata

SEQ ID NO: 507143 - DNA, 19 bp, Mus musculus
  siRNA target sequence for Map3k3 (NM_011947.1,320-338).
ccaagatgatctcgataaa

SEQ ID NO: 507144 - DNA, 19 bp, Mus musculus
  siRNA target sequence for Map3k3 (NM_011947.1,332-350).
cgataaagccattgacatt

SEQ ID NO: 507145 - DNA, 19 bp, Mus musculus
  siRNA target sequence for Map3k3 (NM_011947.1,354-372).
gatagaagctcaagtatga

SEQ ID NO: 507146 - DNA, 19 bp, Mus musculus
  siRNA target sequence for Map3k3 (NM_011947.1,367-385).
gtatgaaaagccttaggat

SEQ ID NO: 507147 - DNA, 19 bp, Mus musculus
  siRNA target sequence for Map3k3 (NM_011947.1,376-394).
gccttaggatactactgtt

SEQ ID NO: 507148 - DNA, 19 bp, Mus musculus
  siRNA target sequence for Map3k3 (NM_011947.1,467-485).
ccagtctgcaggggatata

SEQ ID NO: 507149 - DNA, 19 bp, Mus musculus
  siRNA target sequence for Map3k3 (NM_011947.1,475-493).
caggggatataaataccat

SEQ ID NO: 507150 - DNA, 19 bp, Mus musculus
  siRNA target sequence for Map3k3 (NM_011947.1,603-621).
cggcaaggatcctatacga

SEQ ID NO: 507151 - DNA, 19 bp, Mus musculus
  siRNA target sequence for Map3k3 (NM_011947.1,680-698).
cctcagcagtgccgaaaat

SEQ ID NO: 507152 - DNA, 19 bp, Mus musculus
  siRNA target sequence for Map3k3 (NM_011947.1,681-699).
ctcagcagtgccgaaaatt

SEQ ID NO: 507153 - DNA, 19 bp, Mus musculus
  siRNA target sequence for Map3k3 (NM_011947.1,821-839).
ccagctctatgataaaggt

SEQ ID NO: 507154 - DNA, 19 bp, Mus musculus
  siRNA target sequence for Map3k3 (NM_011947.1,827-845).
ctatgataaaggtgtcaaa

SEQ ID NO: 507155 - DNA, 19 bp, Mus musculus
  siRNA target sequence for Map3k3 (NM_011947.1,930-948).
cggcatcaaggcaacctat

SEQ ID NO: 507156 - DNA, 19 bp, Mus musculus
  siRNA target sequence for Map3k3 (NM_011947.1,931-949).
ggcatcaaggcaacctatt

SEQ ID NO: 507157 - DNA, 19 bp, Mus musculus
  siRNA target sequence for Map3k3 (NM_011947.1,933-951).
catcaaggcaacctattca

SEQ ID NO: 507158 - DNA, 19 bp, Mus musculus
  siRNA target sequence for Map3k3 (NM_011947.1,1000-1018).
gtgtagctgtgcaatacct

SEQ ID NO: 507159 - DNA, 19 bp, Mus musculus
  siRNA target sequence for Map3k3 (NM_011947.1,1098-1116).
cctagtgctcccatcaatt

SEQ ID NO: 507160 - DNA, 19 bp, Mus musculus
  siRNA target sequence for Map3k3 (NM_011947.1,1147-1165).
ccttcggcagggtctactt

SEQ ID NO: 507161 - DNA, 19 bp, Mus musculus
  siRNA target sequence for Map3k3 (NM_011947.1,1178-1196).
ggacacaggacgtgaactt

SEQ ID NO: 507162 - DNA, 19 bp, Mus musculus
  siRNA target sequence for Map3k3 (NM_011947.1,1186-1204).
gacgtgaacttgcttctaa

SEQ ID NO: 507163 - DNA, 19 bp, Mus musculus
  siRNA target sequence for Map3k3 (NM_011947.1,1201-1219).
ctaagcaggtccagtttga

SEQ ID NO: 507164 - DNA, 19 bp, Mus musculus
  siRNA target sequence for Map3k3 (NM_011947.1,1340-1358).
gaagatcctcaccatcttt

SEQ ID NO: 507165 - DNA, 19 bp, Mus musculus
  siRNA target sequence for Map3k3 (NM_011947.1,1370-1388).
gccagggggctctgtaaaa

SEQ ID NO: 507166 - DNA, 19 bp, Mus musculus
  siRNA target sequence for Map3k3 (NM_011947.1,1381-1399).
ctgtaaaagaccagttgaa

SEQ ID NO: 507167 - DNA, 19 bp, Mus musculus
  siRNA target sequence for Map3k4 (NM_011948.1,276-294).
ggctcgcaaaagtatggaa

SEQ ID NO: 507168 - DNA, 19 bp, Mus musculus
  siRNA target sequence for Map3k4 (NM_011948.1,277-295).
gctcgcaaaagtatggaat

SEQ ID NO: 507169 - DNA, 19 bp, Mus musculus
  siRNA target sequence for Map3k4 (NM_011948.1,297-315).
cgatccagaggacttttct

SEQ ID NO: 507170 - DNA, 19 bp, Mus musculus
  siRNA target sequence for Map3k4 (NM_011948.1,359-377).
gcacacctcgacagatgaa

SEQ ID NO: 507171 - DNA, 19 bp, Mus musculus
  siRNA target sequence for Map3k4 (NM_011948.1,422-440).
ccagccgatcgaacttgaa

SEQ ID NO: 507172 - DNA, 19 bp, Mus musculus
  siRNA target sequence for Map3k4 (NM_011948.1,423-441).
cagccgatcgaacttgaaa

SEQ ID NO: 507173 - DNA, 19 bp, Mus musculus
  siRNA target sequence for Map3k4 (NM_011948.1,425-443).
gccgatcgaacttgaaaga

SEQ ID NO: 507174 - DNA, 19 bp, Mus musculus
  siRNA target sequence for Map3k4 (NM_011948.1,426-444).
ccgatcgaacttgaaagaa

SEQ ID NO: 507175 - DNA, 19 bp, Mus musculus
  siRNA target sequence for Map3k4 (NM_011948.1,427-445).
cgatcgaacttgaaagaaa

SEQ ID NO: 507176 - DNA, 19 bp, Mus musculus
  siRNA target sequence for Map3k4 (NM_011948.1,428-446).
gatcgaacttgaaagaaaa

SEQ ID NO: 507177 - DNA, 19 bp, Mus musculus
  siRNA target sequence for Map3k4 (NM_011948.1,461-479).
gtcagtctccacataaaga

SEQ ID NO: 507178 - DNA, 19 bp, Mus musculus
  siRNA target sequence for Map3k4 (NM_011948.1,538-556).
cgagcaactctgagaacaa

SEQ ID NO: 507179 - DNA, 19 bp, Mus musculus
  siRNA target sequence for Map3k4 (NM_011948.1,554-572).
caacggagcgagaccataa

SEQ ID NO: 507180 - DNA, 19 bp, Mus musculus
  siRNA target sequence for Map3k4 (NM_011948.1,557-575).
cggagcgagaccataagaa

SEQ ID NO: 507181 - DNA, 19 bp, Mus musculus
  siRNA target sequence for Map3k4 (NM_011948.1,638-656).
cagatgtggatctcaataa

SEQ ID NO: 507182 - DNA, 19 bp, Mus musculus
  siRNA target sequence for Map3k4 (NM_011948.1,666-684).
cagtctcggctgtagcaat

SEQ ID NO: 507183 - DNA, 19 bp, Mus musculus
  siRNA target sequence for Map3k4 (NM_011948.1,755-773).
ccgcagatcgcttaaagtt

SEQ ID NO: 507184 - DNA, 19 bp, Mus musculus
  siRNA target sequence for Map3k4 (NM_011948.1,757-775).
gcagatcgcttaaagttct

SEQ ID NO: 507185 - DNA, 19 bp, Mus musculus
  siRNA target sequence for Map3k4 (NM_011948.1,758-776).
cagatcgcttaaagttctt

SEQ ID NO: 507186 - DNA, 19 bp, Mus musculus
  siRNA target sequence for Map3k4 (NM_011948.1,763-781).
cgcttaaagttctttgaaa

SEQ ID NO: 507187 - DNA, 19 bp, Mus musculus
  siRNA target sequence for Map3k4 (NM_011948.1,782-800).
cactgcgccttttgctaaa

SEQ ID NO: 507188 - DNA, 19 bp, Mus musculus
  siRNA target sequence for Map3k4 (NM_011948.1,786-804).
gcgccttttgctaaagctt

SEQ ID NO: 507189 - DNA, 19 bp, Mus musculus
  siRNA target sequence for Map3k4 (NM_011948.1,787-805).
cgccttttgctaaagctta

SEQ ID NO: 507190 - DNA, 19 bp, Mus musculus
  siRNA target sequence for Map3k4 (NM_011948.1,882-900).
cgaactgatctggttagaa

SEQ ID NO: 507191 - DNA, 19 bp, Mus musculus
  siRNA target sequence for Map3k4 (NM_011948.1,934-952).
gaccaggacctctttctct

SEQ ID NO: 507192 - DNA, 19 bp, Mus musculus
  siRNA target sequence for Map3k4 (NM_011948.1,1034-1052).
gcaatggagccggtttcaa

SEQ ID NO: 507193 - DNA, 19 bp, Mus musculus
  siRNA target sequence for Map3k4 (NM_011948.1,1079-1097).
gaacccctcaggagacaaa

SEQ ID NO: 507194 - DNA, 19 bp, Mus musculus
  siRNA target sequence for Map3k4 (NM_011948.1,1287-1305).
gctcaacatcacgaaagat

SEQ ID NO: 507195 - DNA, 19 bp, Mus musculus
  siRNA target sequence for Map3k4 (NM_011948.1,1293-1311).
catcacgaaagatctaaat

SEQ ID NO: 507196 - DNA, 19 bp, Mus musculus
  siRNA target sequence for Map3k4 (NM_011948.1,1347-1365).
caagaacctatcagacatt

SEQ ID NO: 507197 - DNA, 19 bp, Mus musculus
  siRNA target sequence for Map3k4 (NM_011948.1,1588-1606).
ctcgagtcagaggaagatt

SEQ ID NO: 507198 - DNA, 19 bp, Mus musculus
  siRNA target sequence for Map3k4 (NM_011948.1,1651-1669).
cattgtttgacttctatct

SEQ ID NO: 507199 - DNA, 19 bp, Mus musculus
  siRNA target sequence for Map3k4 (NM_011948.1,1699-1717).
caaatggggctaagaaagt

SEQ ID NO: 507200 - DNA, 19 bp, Mus musculus
  siRNA target sequence for Map3k4 (NM_011948.1,1704-1722).
ggggctaagaaagttaatt

SEQ ID NO: 507201 - DNA, 19 bp, Mus musculus
  siRNA target sequence for Map3k4 (NM_011948.1,1705-1723).
gggctaagaaagttaattt

SEQ ID NO: 507202 - DNA, 19 bp, Mus musculus
  siRNA target sequence for Map3k4 (NM_011948.1,1716-1734).
gttaattttacgacttcat

SEQ ID NO: 507203 - DNA, 19 bp, Mus musculus
  siRNA target sequence for Map3k4 (NM_011948.1,1726-1744).
cgacttcataagcttatga

SEQ ID NO: 507204 - DNA, 19 bp, Mus musculus
  siRNA target sequence for Map3k4 (NM_011948.1,1727-1745).
gacttcataagcttatgaa

SEQ ID NO: 507205 - DNA, 19 bp, Mus musculus
  siRNA target sequence for Map3k4 (NM_011948.1,2017-2035).
gagccttccctcttgagta

SEQ ID NO: 507206 - DNA, 19 bp, Mus musculus
  siRNA target sequence for Map3k4 (NM_011948.1,2020-2038).
ccttccctcttgagtatca

SEQ ID NO: 507207 - DNA, 19 bp, Mus musculus
  siRNA target sequence for Map3k4 (NM_011948.1,2024-2042).
ccctcttgagtatcaaaca

SEQ ID NO: 507208 - DNA, 19 bp, Mus musculus
  siRNA target sequence for Map3k4 (NM_011948.1,2043-2061).
gctagtgcgagagtgtaaa

SEQ ID NO: 507209 - DNA, 19 bp, Mus musculus
  siRNA target sequence for Map3k4 (NM_011948.1,2535-2553).
ggccctgggctttgctaaa

SEQ ID NO: 507210 - DNA, 19 bp, Mus musculus
  siRNA target sequence for Map3k4 (NM_011948.1,2536-2554).
gccctgggctttgctaaaa

SEQ ID NO: 507211 - DNA, 19 bp, Mus musculus
  siRNA target sequence for Map3k4 (NM_011948.1,2633-2651).
caaagcagtatgttaaggt

SEQ ID NO: 507212 - DNA, 19 bp, Mus musculus
  siRNA target sequence for Map3k4 (NM_011948.1,2653-2671).
cagattcccgggttagaga

SEQ ID NO: 507213 - DNA, 19 bp, Mus musculus
  siRNA target sequence for Map3k4 (NM_011948.1,2660-2678).
ccgggttagagaatttgca

SEQ ID NO: 507214 - DNA, 19 bp, Mus musculus
  siRNA target sequence for Map3k4 (NM_011948.1,2853-2871).
ggaagctcgggctgtcaaa

SEQ ID NO: 507215 - DNA, 19 bp, Mus musculus
  siRNA target sequence for Map3k4 (NM_011948.1,2858-2876).
ctcgggctgtcaaaattgt

SEQ ID NO: 507216 - DNA, 19 bp, Mus musculus
  siRNA target sequence for Map3k4 (NM_011948.1,2955-2973).
cctcgtacttcagagaaaa

SEQ ID NO: 507217 - DNA, 19 bp, Mus musculus
  siRNA target sequence for Map3k4 (NM_011948.1,3034-3052).
cccatcatcgccaaaggtt

SEQ ID NO: 507218 - DNA, 19 bp, Mus musculus
  siRNA target sequence for Map3k4 (NM_011948.1,3035-3053).
ccatcatcgccaaaggttt

SEQ ID NO: 507219 - DNA, 19 bp, Mus musculus
  siRNA target sequence for Map3k4 (NM_011948.1,3079-3097).
gagctatgcaacagaatca

SEQ ID NO: 507220 - DNA, 19 bp, Mus musculus
  siRNA target sequence for Map3k4 (NM_011948.1,3112-3130).
cgtgtggaccacatgttca

SEQ ID NO: 507221 - DNA, 19 bp, Mus musculus
  siRNA target sequence for Map3k4 (NM_011948.1,3170-3188).
ccacgctgcagcagtacta

SEQ ID NO: 507222 - DNA, 19 bp, Mus musculus
  siRNA target sequence for Map3k4 (NM_011948.1,3186-3204).
ctaccgagaagccatgatt

SEQ ID NO: 507223 - DNA, 19 bp, Mus musculus
  siRNA target sequence for Map3k4 (NM_011948.1,3201-3219).
gattcagggctacaacttt

SEQ ID NO: 507224 - DNA, 19 bp, Mus musculus
  siRNA target sequence for Map3k4 (NM_011948.1,3213-3231).
caactttgggtttgagtat

SEQ ID NO: 507225 - DNA, 19 bp, Mus musculus
  siRNA target sequence for Map3k4 (NM_011948.1,3238-3256).
gaagttgttcgtttgatgt

SEQ ID NO: 507226 - DNA, 19 bp, Mus musculus
  siRNA target sequence for Map3k4 (NM_011948.1,3276-3294).
gataggagacaaatatata

SEQ ID NO: 507227 - DNA, 19 bp, Mus musculus
  siRNA target sequence for Map3k4 (NM_011948.1,3280-3298).
ggagacaaatatataagct

SEQ ID NO: 507228 - DNA, 19 bp, Mus musculus
  siRNA target sequence for Map3k4 (NM_011948.1,3281-3299).
gagacaaatatataagctt

SEQ ID NO: 507229 - DNA, 19 bp, Mus musculus
  siRNA target sequence for Map3k4 (NM_011948.1,3362-3380).
gatgggccacccaaggatt

SEQ ID NO: 507230 - DNA, 19 bp, Mus musculus
  siRNA target sequence for Map3k4 (NM_011948.1,3366-3384).
ggccacccaaggatttgat

SEQ ID NO: 507231 - DNA, 19 bp, Mus musculus
  siRNA target sequence for Map3k4 (NM_011948.1,3367-3385).
gccacccaaggatttgatt

SEQ ID NO: 507232 - DNA, 19 bp, Mus musculus
  siRNA target sequence for Map3k4 (NM_011948.1,3443-3461).
gtttgcaagccctgatgaa

SEQ ID NO: 507233 - DNA, 19 bp, Mus musculus
  siRNA target sequence for Map3k4 (NM_011948.1,3825-3843).
gaagtcagtccgactgttt

SEQ ID NO: 507234 - DNA, 19 bp, Mus musculus
  siRNA target sequence for Map3k4 (NM_011948.1,3828-3846).
gtcagtccgactgtttgaa

SEQ ID NO: 507235 - DNA, 19 bp, Mus musculus
  siRNA target sequence for Map3k4 (NM_011948.1,3902-3920).
cccctaagtcctatgataa

SEQ ID NO: 507236 - DNA, 19 bp, Mus musculus
  siRNA target sequence for Map3k4 (NM_011948.1,3905-3923).
ctaagtcctatgataacgt

SEQ ID NO: 507237 - DNA, 19 bp, Mus musculus
  siRNA target sequence for Map3k4 (NM_011948.1,3988-4006).
cagtatggaaaagtataca

SEQ ID NO: 507238 - DNA, 19 bp, Mus musculus
  siRNA target sequence for Map3k4 (NM_011948.1,4063-4081).
cctaacgaccacaagacta

SEQ ID NO: 507239 - DNA, 19 bp, Mus musculus
  siRNA target sequence for Map3k4 (NM_011948.1,4064-4082).
ctaacgaccacaagactat

SEQ ID NO: 507240 - DNA, 19 bp, Mus musculus
  siRNA target sequence for Map3k4 (NM_011948.1,4091-4109).
ctgcagacgagttgaaaat

SEQ ID NO: 507241 - DNA, 19 bp, Mus musculus
  siRNA target sequence for Map3k4 (NM_011948.1,4093-4111).
gcagacgagttgaaaatat

SEQ ID NO: 507242 - DNA, 19 bp, Mus musculus
  siRNA target sequence for Map3k4 (NM_011948.1,4098-4116).
cgagttgaaaatatttgaa

SEQ ID NO: 507243 - DNA, 19 bp, Mus musculus
  siRNA target sequence for Map3k4 (NM_011948.1,4130-4148).
ccaacctggtccggtattt

SEQ ID NO: 507244 - DNA, 19 bp, Mus musculus
  siRNA target sequence for Map3k4 (NM_011948.1,4131-4149).
caacctggtccggtatttt

SEQ ID NO: 507245 - DNA, 19 bp, Mus musculus
  siRNA target sequence for Map3k4 (NM_011948.1,4194-4212).
ctgtgatgagggtacacta

SEQ ID NO: 507246 - DNA, 19 bp, Mus musculus
  siRNA target sequence for Map3k4 (NM_011948.1,4240-4258).
gagcacgtcatcaggttat

SEQ ID NO: 507247 - DNA, 19 bp, Mus musculus
  siRNA target sequence for Map3k4 (NM_011948.1,4242-4260).
gcacgtcatcaggttatat

SEQ ID NO: 507248 - DNA, 19 bp, Mus musculus
  siRNA target sequence for Map3k4 (NM_011948.1,4346-4364).
cgtcatctggactaatcaa

SEQ ID NO: 507249 - DNA, 19 bp, Mus musculus
  siRNA target sequence for Map3k4 (NM_011948.1,4372-4390).
gattttggatgctctgtaa

SEQ ID NO: 507250 - DNA, 19 bp, Mus musculus
  siRNA target sequence for Map3k4 (NM_011948.1,4378-4396).
ggatgctctgtaaaactta

SEQ ID NO: 507251 - DNA, 19 bp, Mus musculus
  siRNA target sequence for Map3k4 (NM_011948.1,4379-4397).
gatgctctgtaaaacttaa

SEQ ID NO: 507252 - DNA, 19 bp, Mus musculus
  siRNA target sequence for Map3k5 (NM_008580.1,148-166).
ggcgagggcatcactttct

SEQ ID NO: 507253 - DNA, 19 bp, Mus musculus
  siRNA target sequence for Map3k5 (NM_008580.1,574-592).
gccgtgctggaccgttttt

SEQ ID NO: 507254 - DNA, 19 bp, Mus musculus
  siRNA target sequence for Map3k5 (NM_008580.1,575-593).
ccgtgctggaccgttttta

SEQ ID NO: 507255 - DNA, 19 bp, Mus musculus
  siRNA target sequence for Map3k5 (NM_008580.1,577-595).
gtgctggaccgtttttaca

SEQ ID NO: 507256 - DNA, 19 bp, Mus musculus
  siRNA target sequence for Map3k5 (NM_008580.1,699-717).
cctctactgcgatactaat

SEQ ID NO: 507257 - DNA, 19 bp, Mus musculus
  siRNA target sequence for Map3k5 (NM_008580.1,700-718).
ctctactgcgatactaatt

SEQ ID NO: 507258 - DNA, 19 bp, Mus musculus
  siRNA target sequence for Map3k5 (NM_008580.1,963-981).
gtacttccgggaatccata

SEQ ID NO: 507259 - DNA, 19 bp, Mus musculus
  siRNA target sequence for Map3k5 (NM_008580.1,1050-1068).
ccggcaacgggtagacaat

SEQ ID NO: 507260 - DNA, 19 bp, Mus musculus
  siRNA target sequence for Map3k5 (NM_008580.1,1051-1069).
cggcaacgggtagacaata

SEQ ID NO: 507261 - DNA, 19 bp, Mus musculus
  siRNA target sequence for Map3k5 (NM_008580.1,1052-1070).
ggcaacgggtagacaatat

SEQ ID NO: 507262 - DNA, 19 bp, Mus musculus
  siRNA target sequence for Map3k5 (NM_008580.1,1053-1071).
gcaacgggtagacaatatt

SEQ ID NO: 507263 - DNA, 19 bp, Mus musculus
  siRNA target sequence for Map3k5 (NM_008580.1,1093-1111).
gttatcaacctgttgcttt

SEQ ID NO: 507264 - DNA, 19 bp, Mus musculus
  siRNA target sequence for Map3k5 (NM_008580.1,1149-1167).
gctggtagagacgttagaa

SEQ ID NO: 507265 - DNA, 19 bp, Mus musculus
  siRNA target sequence for Map3k5 (NM_008580.1,1150-1168).
ctggtagagacgttagaaa

SEQ ID NO: 507266 - DNA, 19 bp, Mus musculus
  siRNA target sequence for Map3k5 (NM_008580.1,1152-1170).
ggtagagacgttagaaaaa

SEQ ID NO: 507267 - DNA, 19 bp, Mus musculus
  siRNA target sequence for Map3k5 (NM_008580.1,1193-1211).
cgcaccaccacgtgaagtt

SEQ ID NO: 507268 - DNA, 19 bp, Mus musculus
  siRNA target sequence for Map3k5 (NM_008580.1,1194-1212).
gcaccaccacgtgaagttt

SEQ ID NO: 507269 - DNA, 19 bp, Mus musculus
  siRNA target sequence for Map3k5 (NM_008580.1,1198-1216).
caccacgtgaagtttcatt

SEQ ID NO: 507270 - DNA, 19 bp, Mus musculus
  siRNA target sequence for Map3k5 (NM_008580.1,1278-1296).
gatccccatggtacaaagt

SEQ ID NO: 507271 - DNA, 19 bp, Mus musculus
  siRNA target sequence for Map3k5 (NM_008580.1,1303-1321).
caagttgcttcggatatgt

SEQ ID NO: 507272 - DNA, 19 bp, Mus musculus
  siRNA target sequence for Map3k5 (NM_008580.1,1310-1328).
cttcggatatgtattgtct

SEQ ID NO: 507273 - DNA, 19 bp, Mus musculus
  siRNA target sequence for Map3k5 (NM_008580.1,1325-1343).
gtctcgttggccgaatcta

SEQ ID NO: 507274 - DNA, 19 bp, Mus musculus
  siRNA target sequence for Map3k5 (NM_008580.1,1327-1345).
ctcgttggccgaatctaca

SEQ ID NO: 507275 - DNA, 19 bp, Mus musculus
  siRNA target sequence for Map3k5 (NM_008580.1,1329-1347).
cgttggccgaatctacaaa

SEQ ID NO: 507276 - DNA, 19 bp, Mus musculus
  siRNA target sequence for Map3k5 (NM_008580.1,1333-1351).
ggccgaatctacaaagata

SEQ ID NO: 507277 - DNA, 19 bp, Mus musculus
  siRNA target sequence for Map3k5 (NM_008580.1,1334-1352).
gccgaatctacaaagatat

SEQ ID NO: 507278 - DNA, 19 bp, Mus musculus
  siRNA target sequence for Map3k5 (NM_008580.1,1344-1362).
caaagatatgtttttggat

SEQ ID NO: 507279 - DNA, 19 bp, Mus musculus
  siRNA target sequence for Map3k5 (NM_008580.1,1396-1414).
ggagcatcttggttcaaaa

SEQ ID NO: 507280 - DNA, 19 bp, Mus musculus
  siRNA target sequence for Map3k5 (NM_008580.1,1397-1415).
gagcatcttggttcaaaaa

SEQ ID NO: 507281 - DNA, 19 bp, Mus musculus
  siRNA target sequence for Map3k5 (NM_008580.1,1436-1454).
cactacagtcaggaattaa

SEQ ID NO: 507282 - DNA, 19 bp, Mus musculus
  siRNA target sequence for Map3k5 (NM_008580.1,1476-1494).
ggctgggcaccagtttgaa

SEQ ID NO: 507283 - DNA, 19 bp, Mus musculus
  siRNA target sequence for Map3k5 (NM_008580.1,1477-1495).
gctgggcaccagtttgaat

SEQ ID NO: 507284 - DNA, 19 bp, Mus musculus
  siRNA target sequence for Map3k5 (NM_008580.1,1480-1498).
gggcaccagtttgaatctt

SEQ ID NO: 507285 - DNA, 19 bp, Mus musculus
  siRNA target sequence for Map3k5 (NM_008580.1,1695-1713).
cgtggagaccattctgata

SEQ ID NO: 507286 - DNA, 19 bp, Mus musculus
  siRNA target sequence for Map3k5 (NM_008580.1,1698-1716).
ggagaccattctgatatat

SEQ ID NO: 507287 - DNA, 19 bp, Mus musculus
  siRNA target sequence for Map3k5 (NM_008580.1,1788-1806).
cctggtcgaggccacaaaa

SEQ ID NO: 507288 - DNA, 19 bp, Mus musculus
  siRNA target sequence for Map3k5 (NM_008580.1,1789-1807).
ctggtcgaggccacaaaaa

SEQ ID NO: 507289 - DNA, 19 bp, Mus musculus
  siRNA target sequence for Map3k5 (NM_008580.1,1791-1809).
ggtcgaggccacaaaaaca

SEQ ID NO: 507290 - DNA, 19 bp, Mus musculus
  siRNA target sequence for Map3k5 (NM_008580.1,1822-1840).
gtcaggttcccagtattaa

SEQ ID NO: 507291 - DNA, 19 bp, Mus musculus
  siRNA target sequence for Map3k5 (NM_008580.1,1824-1842).
caggttcccagtattaata

SEQ ID NO: 507292 - DNA, 19 bp, Mus musculus
  siRNA target sequence for Map3k5 (NM_008580.1,1875-1893).
cctgtctatcaataatgaa

SEQ ID NO: 507293 - DNA, 19 bp, Mus musculus
  siRNA target sequence for Map3k5 (NM_008580.1,1894-1912).
gttgaggagaagacaatat

SEQ ID NO: 507294 - DNA, 19 bp, Mus musculus
  siRNA target sequence for Map3k5 (NM_008580.1,1982-2000).
ggggagtgagcatctctaa

SEQ ID NO: 507295 - DNA, 19 bp, Mus musculus
  siRNA target sequence for Map3k5 (NM_008580.1,2022-2040).
cctttatgtgcttcacaat

SEQ ID NO: 507296 - DNA, 19 bp, Mus musculus
  siRNA target sequence for Map3k5 (NM_008580.1,2023-2041).
ctttatgtgcttcacaatt

SEQ ID NO: 507297 - DNA, 19 bp, Mus musculus
  siRNA target sequence for Map3k5 (NM_008580.1,2066-2084).
gcacagaacttcactgtaa

SEQ ID NO: 507298 - DNA, 19 bp, Mus musculus
  siRNA target sequence for Map3k5 (NM_008580.1,2156-2174).
gtgactccctggagtatga

SEQ ID NO: 507299 - DNA, 19 bp, Mus musculus
  siRNA target sequence for Map3k5 (NM_008580.1,2164-2182).
ctggagtatgactacgaat

SEQ ID NO: 507300 - DNA, 19 bp, Mus musculus
  siRNA target sequence for Map3k5 (NM_008580.1,2169-2187).
gtatgactacgaatacgat

SEQ ID NO: 507301 - DNA, 19 bp, Mus musculus
  siRNA target sequence for Map3k5 (NM_008580.1,2173-2191).
gactacgaatacgatgaaa

SEQ ID NO: 507302 - DNA, 19 bp, Mus musculus
  siRNA target sequence for Map3k5 (NM_008580.1,2175-2193).
ctacgaatacgatgaaaat

SEQ ID NO: 507303 - DNA, 19 bp, Mus musculus
  siRNA target sequence for Map3k5 (NM_008580.1,2208-2226).
gttagggaagggcacttat

SEQ ID NO: 507304 - DNA, 19 bp, Mus musculus
  siRNA target sequence for Map3k5 (NM_008580.1,2265-2283).
cagaattgctattaaggaa

SEQ ID NO: 507305 - DNA, 19 bp, Mus musculus
  siRNA target sequence for Map3k5 (NM_008580.1,2338-2356).
cacaagcatctgaaacaca

SEQ ID NO: 507306 - DNA, 19 bp, Mus musculus
  siRNA target sequence for Map3k5 (NM_008580.1,2443-2461).
gctctccttcgttcaaaat

SEQ ID NO: 507307 - DNA, 19 bp, Mus musculus
  siRNA target sequence for Map3k5 (NM_008580.1,2489-2507).
cgattggcttctatacgaa

SEQ ID NO: 507308 - DNA, 19 bp, Mus musculus
  siRNA target sequence for Map3k5 (NM_008580.1,2508-2526).
gcagatactggaaggatta

SEQ ID NO: 507309 - DNA, 19 bp, Mus musculus
  siRNA target sequence for Map3k5 (NM_008580.1,2511-2529).
gatactggaaggattaaaa

SEQ ID NO: 507310 - DNA, 19 bp, Mus musculus
  siRNA target sequence for Map3k5 (NM_008580.1,2532-2550).
ccttcacgacaatcagata

SEQ ID NO: 507311 - DNA, 19 bp, Mus musculus
  siRNA target sequence for Map3k5 (NM_008580.1,2547-2565).
gatagtccaccgggatata

SEQ ID NO: 507312 - DNA, 19 bp, Mus musculus
  siRNA target sequence for Map3k5 (NM_008580.1,2559-2577).
ggatataaagggtgacaat

SEQ ID NO: 507313 - DNA, 19 bp, Mus musculus
  siRNA target sequence for Map3k5 (NM_008580.1,2685-2703).
gtatatggcgccagaaata

SEQ ID NO: 507314 - DNA, 19 bp, Mus musculus
  siRNA target sequence for Map3k5 (NM_008580.1,2691-2709).
ggcgccagaaataatcgat

SEQ ID NO: 507315 - DNA, 19 bp, Mus musculus
  siRNA target sequence for Map3k5 (NM_008580.1,2692-2710).
gcgccagaaataatcgata

SEQ ID NO: 507316 - DNA, 19 bp, Mus musculus
  siRNA target sequence for Map3k5 (NM_008580.1,2693-2711).
cgccagaaataatcgataa

SEQ ID NO: 507317 - DNA, 19 bp, Mus musculus
  siRNA target sequence for Map3k5 (NM_008580.1,2694-2712).
gccagaaataatcgataaa

SEQ ID NO: 507318 - DNA, 19 bp, Mus musculus
  siRNA target sequence for Map3k5 (NM_008580.1,2755-2773).
ggctgcacaatcatcgaaa

SEQ ID NO: 507319 - DNA, 19 bp, Mus musculus
  siRNA target sequence for Map3k5 (NM_008580.1,2756-2774).
gctgcacaatcatcgaaat

SEQ ID NO: 507320 - DNA, 19 bp, Mus musculus
  siRNA target sequence for Map3k5 (NM_008580.1,2884-2902).
gccaaggcgttcatactga

SEQ ID NO: 507321 - DNA, 19 bp, Mus musculus
  siRNA target sequence for Map3k5 (NM_008580.1,2885-2903).
ccaaggcgttcatactgaa

SEQ ID NO: 507322 - DNA, 19 bp, Mus musculus
  siRNA target sequence for Map3k5 (NM_008580.1,2890-2908).
gcgttcatactgaagtgtt

SEQ ID NO: 507323 - DNA, 19 bp, Mus musculus
  siRNA target sequence for Map3k5 (NM_008580.1,2891-2909).
cgttcatactgaagtgttt

SEQ ID NO: 507324 - DNA, 19 bp, Mus musculus
  siRNA target sequence for Map3k5 (NM_008580.1,2892-2910).
gttcatactgaagtgtttt

SEQ ID NO: 507325 - DNA, 19 bp, Mus musculus
  siRNA target sequence for Map3k5 (NM_008580.1,2930-2948).
gagcctgtgctaatgactt

SEQ ID NO: 507326 - DNA, 19 bp, Mus musculus
  siRNA target sequence for Map3k5 (NM_008580.1,2939-2957).
ctaatgacttgcttattga

SEQ ID NO: 507327 - DNA, 19 bp, Mus musculus
  siRNA target sequence for Map3k5 (NM_008580.1,2949-2967).
gcttattgatgagttctta

SEQ ID NO: 507328 - DNA, 19 bp, Mus musculus
  siRNA target sequence for Map3k5 (NM_008580.1,2950-2968).
cttattgatgagttcttaa

SEQ ID NO: 507329 - DNA, 19 bp, Mus musculus
  siRNA target sequence for Map3k5 (NM_008580.1,2956-2974).
gatgagttcttaaaagtgt

SEQ ID NO: 507330 - DNA, 19 bp, Mus musculus
  siRNA target sequence for Map3k5 (NM_008580.1,2991-3009).
gacacaacccaaactttca

SEQ ID NO: 507331 - DNA, 19 bp, Mus musculus
  siRNA target sequence for Map3k5 (NM_008580.1,3207-3225).
gggcattccagatgaaaat

SEQ ID NO: 507332 - DNA, 19 bp, Mus musculus
  siRNA target sequence for Map3k5 (NM_008580.1,3208-3226).
ggcattccagatgaaaatt

SEQ ID NO: 507333 - DNA, 19 bp, Mus musculus
  siRNA target sequence for Map3k5 (NM_008580.1,3209-3227).
gcattccagatgaaaattt

SEQ ID NO: 507334 - DNA, 19 bp, Mus musculus
  siRNA target sequence for Map3k5 (NM_008580.1,3261-3279).
gaaagactcgggctttttt

SEQ ID NO: 507335 - DNA, 19 bp, Mus musculus
  siRNA target sequence for Map3k5 (NM_008580.1,3349-3367).
gtaaggaacctaatggaat

SEQ ID NO: 507336 - DNA, 19 bp, Mus musculus
  siRNA target sequence for Map3k5 (NM_008580.1,3353-3371).
ggaacctaatggaatctct

SEQ ID NO: 507337 - DNA, 19 bp, Mus musculus
  siRNA target sequence for Map3k5 (NM_008580.1,3383-3401).
ctgaagagcctaaactaaa

SEQ ID NO: 507338 - DNA, 19 bp, Mus musculus
  siRNA target sequence for Map3k5 (NM_008580.1,3555-3573).
ccaggatgcggtcaataaa

SEQ ID NO: 507339 - DNA, 19 bp, Mus musculus
  siRNA target sequence for Map3k5 (NM_008580.1,3558-3576).
ggatgcggtcaataaagtt

SEQ ID NO: 507340 - DNA, 19 bp, Mus musculus
  siRNA target sequence for Map3k5 (NM_008580.1,3574-3592).
gttcttcggaatcataaca

SEQ ID NO: 507341 - DNA, 19 bp, Mus musculus
  siRNA target sequence for Map3k5 (NM_008580.1,3577-3595).
cttcggaatcataacatca

SEQ ID NO: 507342 - DNA, 19 bp, Mus musculus
  siRNA target sequence for Map3k5 (NM_008580.1,3668-3686).
cagagttgaggccacattt

SEQ ID NO: 507343 - DNA, 19 bp, Mus musculus
  siRNA target sequence for Map3k5 (NM_008580.1,3739-3757).
gatgaacacgaggaattgt

SEQ ID NO: 507344 - DNA, 19 bp, Mus musculus
  siRNA target sequence for Map3k5 (NM_008580.1,3745-3763).
cacgaggaattgtcttcaa

SEQ ID NO: 507345 - DNA, 19 bp, Mus musculus
  siRNA target sequence for Map3k5 (NM_008580.1,3885-3903).
gcttggaaggatgaagatt

SEQ ID NO: 507346 - DNA, 19 bp, Mus musculus
  siRNA target sequence for Map3k5 (NM_008580.1,3900-3918).
gattgaaactaataggtta

SEQ ID NO: 507347 - DNA, 19 bp, Mus musculus
  siRNA target sequence for Map3k5 (NM_008580.1,3908-3926).
ctaataggttacttgaaga

SEQ ID NO: 507348 - DNA, 19 bp, Mus musculus
  siRNA target sequence for Map3k5 (NM_008580.1,4063-4081).
ggcacgaccacggaagatt

SEQ ID NO: 507349 - DNA, 19 bp, Mus musculus
  siRNA target sequence for Map3k5 (NM_008580.1,4067-4085).
cgaccacggaagattctga

SEQ ID NO: 507350 - DNA, 19 bp, Mus musculus
  siRNA target sequence for Map3k5 (NM_008580.1,4068-4086).
gaccacggaagattctgaa

SEQ ID NO: 507351 - DNA, 19 bp, Mus musculus
  siRNA target sequence for Map3k5 (NM_008580.1,4071-4089).
cacggaagattctgaactt

SEQ ID NO: 507352 - DNA, 19 bp, Mus musculus
  siRNA target sequence for Map3k5 (NM_008580.1,4114-4132).
gctgatgaagacactataa

SEQ ID NO: 507353 - DNA, 19 bp, Mus musculus
  siRNA target sequence for Map3k5 (NM_008580.1,4136-4154).
ggtttctggctgaggatta

SEQ ID NO: 507354 - DNA, 19 bp, Mus musculus
  siRNA target sequence for Map3k5 (NM_008580.1,4157-4175).
cgctagtggatgttcttta

SEQ ID NO: 507355 - DNA, 19 bp, Mus musculus
  siRNA target sequence for Map3k5 (NM_008580.1,4176-4194).
ctacgtcacacgtgatgat

SEQ ID NO: 507356 - DNA, 19 bp, Mus musculus
  siRNA target sequence for Map3k5 (NM_008580.1,4248-4266).
cattgactttcggaacaaa

SEQ ID NO: 507357 - DNA, 19 bp, Mus musculus
  siRNA target sequence for Map3k6 (NM_016693.2,588-606).
gcgctggactccttctaca

SEQ ID NO: 507358 - DNA, 19 bp, Mus musculus
  siRNA target sequence for Map3k6 (NM_016693.2,589-607).
cgctggactccttctacaa

SEQ ID NO: 507359 - DNA, 19 bp, Mus musculus
  siRNA target sequence for Map3k6 (NM_016693.2,767-785).
gaagaactcggattgtgtt

SEQ ID NO: 507360 - DNA, 19 bp, Mus musculus
  siRNA target sequence for Map3k6 (NM_016693.2,791-809).
ctacacactgattccttat

SEQ ID NO: 507361 - DNA, 19 bp, Mus musculus
  siRNA target sequence for Map3k6 (NM_016693.2,958-976).
cagactcttgcggctattt

SEQ ID NO: 507362 - DNA, 19 bp, Mus musculus
  siRNA target sequence for Map3k6 (NM_016693.2,1007-1025).
ggctcgggagcgattcagt

SEQ ID NO: 507363 - DNA, 19 bp, Mus musculus
  siRNA target sequence for Map3k6 (NM_016693.2,1093-1111).
ctgacattgtcatgaatct

SEQ ID NO: 507364 - DNA, 19 bp, Mus musculus
  siRNA target sequence for Map3k6 (NM_016693.2,1197-1215).
gctgaacagcacaatgtct

SEQ ID NO: 507365 - DNA, 19 bp, Mus musculus
  siRNA target sequence for Map3k6 (NM_016693.2,1206-1224).
cacaatgtctgctttcact

SEQ ID NO: 507366 - DNA, 19 bp, Mus musculus
  siRNA target sequence for Map3k6 (NM_016693.2,1286-1304).
gctgccattggtgaagtat

SEQ ID NO: 507367 - DNA, 19 bp, Mus musculus
  siRNA target sequence for Map3k6 (NM_016693.2,1289-1307).
gccattggtgaagtatgaa

SEQ ID NO: 507368 - DNA, 19 bp, Mus musculus
  siRNA target sequence for Map3k6 (NM_016693.2,1312-1330).
ccgtggctccggatctgta

SEQ ID NO: 507369 - DNA, 19 bp, Mus musculus
  siRNA target sequence for Map3k6 (NM_016693.2,1333-1351).
gcatgtgtggtcgtatcta

SEQ ID NO: 507370 - DNA, 19 bp, Mus musculus
  siRNA target sequence for Map3k6 (NM_016693.2,1415-1433).
gtaccgcaaggcgtttgat

SEQ ID NO: 507371 - DNA, 19 bp, Mus musculus
  siRNA target sequence for Map3k6 (NM_016693.2,1658-1676).
gcaactgtacaagcttaat

SEQ ID NO: 507372 - DNA, 19 bp, Mus musculus
  siRNA target sequence for Map3k6 (NM_016693.2,1671-1689).
cttaatgcccccatttggt

SEQ ID NO: 507373 - DNA, 19 bp, Mus musculus
  siRNA target sequence for Map3k6 (NM_016693.2,1851-1869).
gtactggtgctggagataa

SEQ ID NO: 507374 - DNA, 19 bp, Mus musculus
  siRNA target sequence for Map3k6 (NM_016693.2,2183-2201).
ggtgctggagtttgattat

SEQ ID NO: 507375 - DNA, 19 bp, Mus musculus
  siRNA target sequence for Map3k6 (NM_016693.2,2275-2293).
ggcacacgagggtacgaat

SEQ ID NO: 507376 - DNA, 19 bp, Mus musculus
  siRNA target sequence for Map3k6 (NM_016693.2,2367-2385).
cgacttcgtcataagaata

SEQ ID NO: 507377 - DNA, 19 bp, Mus musculus
  siRNA target sequence for Map3k6 (NM_016693.2,2510-2528).
cactattagcttctataca

SEQ ID NO: 507378 - DNA, 19 bp, Mus musculus
  siRNA target sequence for Map3k6 (NM_016693.2,2618-2636).
cagtgggctgctcaagatt

SEQ ID NO: 507379 - DNA, 19 bp, Mus musculus
  siRNA target sequence for Map3k6 (NM_016693.2,2623-2641).
ggctgctcaagatttctga

SEQ ID NO: 507380 - DNA, 19 bp, Mus musculus
  siRNA target sequence for Map3k6 (NM_016693.2,2674-2692).
caccgtgcacggagacttt

SEQ ID NO: 507381 - DNA, 19 bp, Mus musculus
  siRNA target sequence for Map3k6 (NM_016693.2,2676-2694).
ccgtgcacggagactttca

SEQ ID NO: 507382 - DNA, 19 bp, Mus musculus
  siRNA target sequence for Map3k6 (NM_016693.2,2914-2932).
ccttcctcctccgaacttt

SEQ ID NO: 507383 - DNA, 19 bp, Mus musculus
  siRNA target sequence for Map3k6 (NM_016693.2,3147-3165).
ccaaagcgctgccttagtt

SEQ ID NO: 507384 - DNA, 19 bp, Mus musculus
  siRNA target sequence for Map3k6 (NM_016693.2,3148-3166).
caaagcgctgccttagtta

SEQ ID NO: 507385 - DNA, 19 bp, Mus musculus
  siRNA target sequence for Map3k6 (NM_016693.2,3308-3326).
gcccacactagcagagaat

SEQ ID NO: 507386 - DNA, 19 bp, Mus musculus
  siRNA target sequence for Map3k6 (NM_016693.2,3310-3328).
ccacactagcagagaatct

SEQ ID NO: 507387 - DNA, 19 bp, Mus musculus
  siRNA target sequence for Map3k6 (NM_016693.2,3352-3370).
gactcagcaagattcatgt

SEQ ID NO: 507388 - DNA, 19 bp, Mus musculus
  siRNA target sequence for Map3k6 (NM_016693.2,3972-3990).
caaacgctcctgagtcata

SEQ ID NO: 507389 - DNA, 19 bp, Mus musculus
  siRNA target sequence for Map3k6 (NM_016693.2,3987-4005).
catagcttcacccttcaaa

SEQ ID NO: 507390 - DNA, 19 bp, Mus musculus
  siRNA target sequence for Map3k6 (NM_016693.2,4018-4036).
gtgccactcaagatgatct

SEQ ID NO: 507391 - DNA, 19 bp, Mus musculus
  siRNA target sequence for Map3k7 (NM_172688.1,207-225).
cgtcgcaggtcctgaactt

SEQ ID NO: 507392 - DNA, 19 bp, Mus musculus
  siRNA target sequence for Map3k7 (NM_172688.1,730-748).
ggcgcctgaagtatttgaa

SEQ ID NO: 507393 - DNA, 19 bp, Mus musculus
  siRNA target sequence for Map3k7 (NM_172688.1,819-837).
ggaaacccttcgatgagat

SEQ ID NO: 507394 - DNA, 19 bp, Mus musculus
  siRNA target sequence for Map3k7 (NM_172688.1,1181-1199).
cgcttggagtcaaaacttt

SEQ ID NO: 507395 - DNA, 19 bp, Mus musculus
  siRNA target sequence for Map3k7 (NM_172688.1,1437-1455).
gccctagtgtcagaatgat

SEQ ID NO: 507396 - DNA, 19 bp, Mus musculus
  siRNA target sequence for Map3k8 (NM_007746.1,191-209).
gtgtcagaagtcatagaca

SEQ ID NO: 507397 - DNA, 19 bp, Mus musculus
  siRNA target sequence for Map3k8 (NM_007746.1,193-211).
gtcagaagtcatagacata

SEQ ID NO: 507398 - DNA, 19 bp, Mus musculus
  siRNA target sequence for Map3k8 (NM_007746.1,195-213).
cagaagtcatagacataat

SEQ ID NO: 507399 - DNA, 19 bp, Mus musculus
  siRNA target sequence for Map3k8 (NM_007746.1,256-274).
cagtctgatgaccatgtat

SEQ ID NO: 507400 - DNA, 19 bp, Mus musculus
  siRNA target sequence for Map3k8 (NM_007746.1,340-358).
gctgtcatctgtcagatat

SEQ ID NO: 507401 - DNA, 19 bp, Mus musculus
  siRNA target sequence for Map3k8 (NM_007746.1,376-394).
gcttgcatttgcaaaccat

SEQ ID NO: 507402 - DNA, 19 bp, Mus musculus
  siRNA target sequence for Map3k8 (NM_007746.1,387-405).
caaaccatgtctccaatat

SEQ ID NO: 507403 - DNA, 19 bp, Mus musculus
  siRNA target sequence for Map3k8 (NM_007746.1,391-409).
ccatgtctccaatatgaca

SEQ ID NO: 507404 - DNA, 19 bp, Mus musculus
  siRNA target sequence for Map3k8 (NM_007746.1,392-410).
catgtctccaatatgacaa

SEQ ID NO: 507405 - DNA, 19 bp, Mus musculus
  siRNA target sequence for Map3k8 (NM_007746.1,399-417).
ccaatatgacaaagcattt

SEQ ID NO: 507406 - DNA, 19 bp, Mus musculus
  siRNA target sequence for Map3k8 (NM_007746.1,422-440).
ggacgtcgaccacaagaat

SEQ ID NO: 507407 - DNA, 19 bp, Mus musculus
  siRNA target sequence for Map3k8 (NM_007746.1,434-452).
caagaatgtggaattttat

SEQ ID NO: 507408 - DNA, 19 bp, Mus musculus
  siRNA target sequence for Map3k8 (NM_007746.1,479-497).
ggccgctaccaaatcgatt

SEQ ID NO: 507409 - DNA, 19 bp, Mus musculus
  siRNA target sequence for Map3k8 (NM_007746.1,515-533).
ccttggaagctgacataca

SEQ ID NO: 507410 - DNA, 19 bp, Mus musculus
  siRNA target sequence for Map3k8 (NM_007746.1,538-556).
catcggctctggtttcgtt

SEQ ID NO: 507411 - DNA, 19 bp, Mus musculus
  siRNA target sequence for Map3k8 (NM_007746.1,612-630).
gaatggcgtgcaaactgat

SEQ ID NO: 507412 - DNA, 19 bp, Mus musculus
  siRNA target sequence for Map3k8 (NM_007746.1,622-640).
caaactgatccctatagat

SEQ ID NO: 507413 - DNA, 19 bp, Mus musculus
  siRNA target sequence for Map3k8 (NM_007746.1,628-646).
gatccctatagatcagttt

SEQ ID NO: 507414 - DNA, 19 bp, Mus musculus
  siRNA target sequence for Map3k8 (NM_007746.1,651-669).
catcggatgtggaaatcca

SEQ ID NO: 507415 - DNA, 19 bp, Mus musculus
  siRNA target sequence for Map3k8 (NM_007746.1,672-690).
cctgtttccggcatgagaa

SEQ ID NO: 507416 - DNA, 19 bp, Mus musculus
  siRNA target sequence for Map3k8 (NM_007746.1,675-693).
gtttccggcatgagaacat

SEQ ID NO: 507417 - DNA, 19 bp, Mus musculus
  siRNA target sequence for Map3k8 (NM_007746.1,688-706).
gaacattgctgagttatat

SEQ ID NO: 507418 - DNA, 19 bp, Mus musculus
  siRNA target sequence for Map3k8 (NM_007746.1,723-741).
gcgatactgtccatctctt

SEQ ID NO: 507419 - DNA, 19 bp, Mus musculus
  siRNA target sequence for Map3k8 (NM_007746.1,729-747).
ctgtccatctctttatgga

SEQ ID NO: 507420 - DNA, 19 bp, Mus musculus
  siRNA target sequence for Map3k8 (NM_007746.1,793-811).
gcccatgagagaatttgaa

SEQ ID NO: 507421 - DNA, 19 bp, Mus musculus
  siRNA target sequence for Map3k8 (NM_007746.1,795-813).
ccatgagagaatttgaaat

SEQ ID NO: 507422 - DNA, 19 bp, Mus musculus
  siRNA target sequence for Map3k8 (NM_007746.1,819-837).
gggtgacgaagcacattct

SEQ ID NO: 507423 - DNA, 19 bp, Mus musculus
  siRNA target sequence for Map3k8 (NM_007746.1,821-839).
gtgacgaagcacattctca

SEQ ID NO: 507424 - DNA, 19 bp, Mus musculus
  siRNA target sequence for Map3k8 (NM_007746.1,832-850).
cattctcaagggacttgat

SEQ ID NO: 507425 - DNA, 19 bp, Mus musculus
  siRNA target sequence for Map3k8 (NM_007746.1,869-887).
gtgatccaccatgatatta

SEQ ID NO: 507426 - DNA, 19 bp, Mus musculus
  siRNA target sequence for Map3k8 (NM_007746.1,871-889).
gatccaccatgatattaaa

SEQ ID NO: 507427 - DNA, 19 bp, Mus musculus
  siRNA target sequence for Map3k8 (NM_007746.1,874-892).
ccaccatgatattaaacct

SEQ ID NO: 507428 - DNA, 19 bp, Mus musculus
  siRNA target sequence for Map3k8 (NM_007746.1,875-893).
caccatgatattaaaccta

SEQ ID NO: 507429 - DNA, 19 bp, Mus musculus
  siRNA target sequence for Map3k8 (NM_007746.1,891-909).
ctagcaacattgtattcat

SEQ ID NO: 507430 - DNA, 19 bp, Mus musculus
  siRNA target sequence for Map3k8 (NM_007746.1,938-956).
ggcctgagtgttaagatga

SEQ ID NO: 507431 - DNA, 19 bp, Mus musculus
  siRNA target sequence for Map3k8 (NM_007746.1,983-1001).
ctccggggaacagagatat

SEQ ID NO: 507432 - DNA, 19 bp, Mus musculus
  siRNA target sequence for Map3k8 (NM_007746.1,986-1004).
cggggaacagagatataca

SEQ ID NO: 507433 - DNA, 19 bp, Mus musculus
  siRNA target sequence for Map3k8 (NM_007746.1,1038-1056).
ccacaaaagccgacatcta

SEQ ID NO: 507434 - DNA, 19 bp, Mus musculus
  siRNA target sequence for Map3k8 (NM_007746.1,1128-1146).
cctatccctcctacctata

SEQ ID NO: 507435 - DNA, 19 bp, Mus musculus
  siRNA target sequence for Map3k8 (NM_007746.1,1134-1152).
cctcctacctatacattat

SEQ ID NO: 507436 - DNA, 19 bp, Mus musculus
  siRNA target sequence for Map3k8 (NM_007746.1,1137-1155).
cctacctatacattatcca

SEQ ID NO: 507437 - DNA, 19 bp, Mus musculus
  siRNA target sequence for Map3k8 (NM_007746.1,1204-1222).
catgagggagctgatagaa

SEQ ID NO: 507438 - DNA, 19 bp, Mus musculus
  siRNA target sequence for Map3k8 (NM_007746.1,1327-1345).
ggactctgccctctttgaa

SEQ ID NO: 507439 - DNA, 19 bp, Mus musculus
  siRNA target sequence for Map3k8 (NM_007746.1,1363-1381).
caggaaggaactacaactt

SEQ ID NO: 507440 - DNA, 19 bp, Mus musculus
  siRNA target sequence for Map3k8 (NM_007746.1,1503-1521).
ggccaccaaccctggaata

SEQ ID NO: 507441 - DNA, 19 bp, Mus musculus
  siRNA target sequence for Map3k9 (NM_177395.2,513-531).
cccattcagctgttagaga

SEQ ID NO: 507442 - DNA, 19 bp, Mus musculus
  siRNA target sequence for Map3k9 (NM_177395.2,792-810).
gggcctctgaacagagtat

SEQ ID NO: 507443 - DNA, 19 bp, Mus musculus
  siRNA target sequence for Map3k9 (NM_177395.2,793-811).
ggcctctgaacagagtatt

SEQ ID NO: 507444 - DNA, 19 bp, Mus musculus
  siRNA target sequence for Map3k9 (NM_177395.2,795-813).
cctctgaacagagtattgt

SEQ ID NO: 507445 - DNA, 19 bp, Mus musculus
  siRNA target sequence for Map3k9 (NM_177395.2,863-881).
cgccagagggatgaactat

SEQ ID NO: 507446 - DNA, 19 bp, Mus musculus
  siRNA target sequence for Map3k9 (NM_177395.2,865-883).
ccagagggatgaactatct

SEQ ID NO: 507447 - DNA, 19 bp, Mus musculus
  siRNA target sequence for Map3k9 (NM_177395.2,866-884).
cagagggatgaactatcta

SEQ ID NO: 507448 - DNA, 19 bp, Mus musculus
  siRNA target sequence for Map3k9 (NM_177395.2,964-982).
gagacctgagtaacaagat

SEQ ID NO: 507449 - DNA, 19 bp, Mus musculus
  siRNA target sequence for Map3k9 (NM_177395.2,1081-1099).
gtgcttccatgttttccaa

SEQ ID NO: 507450 - DNA, 19 bp, Mus musculus
  siRNA target sequence for Map3k9 (NM_177395.2,1316-1334).
ggaccagctaacgactata

SEQ ID NO: 507451 - DNA, 19 bp, Mus musculus
  siRNA target sequence for Map3k9 (NM_177395.2,1388-1406).
cgactggaaacatgagatt

SEQ ID NO: 507452 - DNA, 19 bp, Mus musculus
  siRNA target sequence for Map3k9 (NM_177395.2,1710-1728).
gcctccccgaccatggata

SEQ ID NO: 507453 - DNA, 19 bp, Mus musculus
  siRNA target sequence for Map3k9 (NM_177395.2,1716-1734).
ccgaccatggataaaagga

SEQ ID NO: 507454 - DNA, 19 bp, Mus musculus
  siRNA target sequence for Map3k9 (NM_177395.2,1840-1858).
ggagctcagttgttccaaa

SEQ ID NO: 507455 - DNA, 19 bp, Mus musculus
  siRNA target sequence for Map3k9 (NM_177395.2,1841-1859).
gagctcagttgttccaaaa

SEQ ID NO: 507456 - DNA, 19 bp, Mus musculus
  siRNA target sequence for Map3k9 (NM_177395.2,1940-1958).
gctcacatcaggagatgaa

SEQ ID NO: 507457 - DNA, 19 bp, Mus musculus
  siRNA target sequence for Map4k2 (NM_009006.1,74-92).
ggacctatggcgacgttta

SEQ ID NO: 507458 - DNA, 19 bp, Mus musculus
  siRNA target sequence for Map4k2 (NM_009006.1,286-304).
gggtcactgcaggagattt

SEQ ID NO: 507459 - DNA, 19 bp, Mus musculus
  siRNA target sequence for Map4k2 (NM_009006.1,287-305).
ggtcactgcaggagattta

SEQ ID NO: 507460 - DNA, 19 bp, Mus musculus
  siRNA target sequence for Map4k2 (NM_009006.1,434-452).
ctctgcagggtgatgtcaa

SEQ ID NO: 507461 - DNA, 19 bp, Mus musculus
  siRNA target sequence for Map4k2 (NM_009006.1,496-514).
gccaaaagacgttctttca

SEQ ID NO: 507462 - DNA, 19 bp, Mus musculus
  siRNA target sequence for Map4k2 (NM_009006.1,497-515).
ccaaaagacgttctttcat

SEQ ID NO: 507463 - DNA, 19 bp, Mus musculus
  siRNA target sequence for Map4k2 (NM_009006.1,498-516).
caaaagacgttctttcatt

SEQ ID NO: 507464 - DNA, 19 bp, Mus musculus
  siRNA target sequence for Map4k2 (NM_009006.1,698-716).
cacccaagctaagagataa

SEQ ID NO: 507465 - DNA, 19 bp, Mus musculus
  siRNA target sequence for Map4k2 (NM_009006.1,700-718).
cccaagctaagagataaga

SEQ ID NO: 507466 - DNA, 19 bp, Mus musculus
  siRNA target sequence for Map4k2 (NM_009006.1,719-737).
cgcgttggacccagaattt

SEQ ID NO: 507467 - DNA, 19 bp, Mus musculus
  siRNA target sequence for Map4k2 (NM_009006.1,722-740).
gttggacccagaatttcca

SEQ ID NO: 507468 - DNA, 19 bp, Mus musculus
  siRNA target sequence for Map4k2 (NM_009006.1,990-1008).
ccagtttcaccaagtgaaa

SEQ ID NO: 507469 - DNA, 19 bp, Mus musculus
  siRNA target sequence for Map4k2 (NM_009006.1,1029-1047).
ggagacagatcctctcaat

SEQ ID NO: 507470 - DNA, 19 bp, Mus musculus
  siRNA target sequence for Map4k2 (NM_009006.1,1032-1050).
gacagatcctctcaatgaa

SEQ ID NO: 507471 - DNA, 19 bp, Mus musculus
  siRNA target sequence for Map4k2 (NM_009006.1,1203-1221).
catcaaacgggctccattt

SEQ ID NO: 507472 - DNA, 19 bp, Mus musculus
  siRNA target sequence for Map4k2 (NM_009006.1,1598-1616).
ggctctactgtgtgaacaa

SEQ ID NO: 507473 - DNA, 19 bp, Mus musculus
  siRNA target sequence for Map4k2 (NM_009006.1,1869-1887).
gcttctgctgcaatggtat

SEQ ID NO: 507474 - DNA, 19 bp, Mus musculus
  siRNA target sequence for Map4k2 (NM_009006.1,2164-2182).
cgctgtgtgagaattgtta

SEQ ID NO: 507475 - DNA, 19 bp, Mus musculus
  siRNA target sequence for Map4k2 (NM_009006.1,2165-2183).
gctgtgtgagaattgttaa

SEQ ID NO: 507476 - DNA, 19 bp, Mus musculus
  siRNA target sequence for Map4k2 (NM_009006.1,2168-2186).
gtgtgagaattgttaacct

SEQ ID NO: 507477 - DNA, 19 bp, Mus musculus
  siRNA target sequence for Map4k2 (NM_009006.1,2221-2239).
ctaacctttgacttcacta

SEQ ID NO: 507478 - DNA, 19 bp, Mus musculus
  siRNA target sequence for Map4k2 (NM_009006.1,2300-2318).
gccgaagcctcgataccaa

SEQ ID NO: 507479 - DNA, 19 bp, Mus musculus
  siRNA target sequence for Map4k2 (NM_009006.1,2325-2343).
gacgcaggagataacagat

SEQ ID NO: 507480 - DNA, 19 bp, Mus musculus
  siRNA target sequence for Map4k2 (NM_009006.1,2392-2410).
gaaagcatcccaactgata

SEQ ID NO: 507481 - DNA, 19 bp, Mus musculus
  siRNA target sequence for Map4k4 (NM_008696.1,101-119).
gcacctatggacaagtcta

SEQ ID NO: 507482 - DNA, 19 bp, Mus musculus
  siRNA target sequence for Map4k4 (NM_008696.1,222-240).
gtattctcatcatcgaaat

SEQ ID NO: 507483 - DNA, 19 bp, Mus musculus
  siRNA target sequence for Map4k4 (NM_008696.1,248-266).
cgtactatggtgctttcat

SEQ ID NO: 507484 - DNA, 19 bp, Mus musculus
  siRNA target sequence for Map4k4 (NM_008696.1,249-267).
gtactatggtgctttcatt

SEQ ID NO: 507485 - DNA, 19 bp, Mus musculus
  siRNA target sequence for Map4k4 (NM_008696.1,486-504).
gaatgctgaggtgaaactt

SEQ ID NO: 507486 - DNA, 19 bp, Mus musculus
  siRNA target sequence for Map4k4 (NM_008696.1,493-511).
gaggtgaaacttgttgatt

SEQ ID NO: 507487 - DNA, 19 bp, Mus musculus
  siRNA target sequence for Map4k4 (NM_008696.1,537-555).
gacggttggacggagaaat

SEQ ID NO: 507488 - DNA, 19 bp, Mus musculus
  siRNA target sequence for Map4k4 (NM_008696.1,541-559).
gttggacggagaaatacgt

SEQ ID NO: 507489 - DNA, 19 bp, Mus musculus
  siRNA target sequence for Map4k4 (NM_008696.1,619-637).
gccacttacgactacagaa

SEQ ID NO: 507490 - DNA, 19 bp, Mus musculus
  siRNA target sequence for Map4k4 (NM_008696.1,800-818).
gctgtctggtgaagaatta

SEQ ID NO: 507491 - DNA, 19 bp, Mus musculus
  siRNA target sequence for Map4k4 (NM_008696.1,803-821).
gtctggtgaagaattacat

SEQ ID NO: 507492 - DNA, 19 bp, Mus musculus
  siRNA target sequence for Map4k4 (NM_008696.1,830-848).
cctctacagagcaactttt

SEQ ID NO: 507493 - DNA, 19 bp, Mus musculus
  siRNA target sequence for Map4k4 (NM_008696.1,897-915).
ccagcttaaggatcacata

SEQ ID NO: 507494 - DNA, 19 bp, Mus musculus
  siRNA target sequence for Map4k4 (NM_008696.1,1016-1034).
caagttccatcgtcaatgt

SEQ ID NO: 507495 - DNA, 19 bp, Mus musculus
  siRNA target sequence for Map4k4 (NM_008696.1,1049-1067).
ctctgcgacgtgatttcct

SEQ ID NO: 507496 - DNA, 19 bp, Mus musculus
  siRNA target sequence for Map4k4 (NM_008696.1,1539-1557).
gagcaaaccgagctttcat

SEQ ID NO: 507497 - DNA, 19 bp, Mus musculus
  siRNA target sequence for Map4k4 (NM_008696.1,1621-1639).
ctggcatctctcaagaaca

SEQ ID NO: 507498 - DNA, 19 bp, Mus musculus
  siRNA target sequence for Map4k4 (NM_008696.1,1623-1641).
ggcatctctcaagaacaat

SEQ ID NO: 507499 - DNA, 19 bp, Mus musculus
  siRNA target sequence for Map4k4 (NM_008696.1,1897-1915).
ggcggtggacagcagaata

SEQ ID NO: 507500 - DNA, 19 bp, Mus musculus
  siRNA target sequence for Map4k4 (NM_008696.1,2080-2098).
cgcttcagagtgagatcat

SEQ ID NO: 507501 - DNA, 19 bp, Mus musculus
  siRNA target sequence for Map4k4 (NM_008696.1,2144-2162).
ccaaaaagcctgacgataa

SEQ ID NO: 507502 - DNA, 19 bp, Mus musculus
  siRNA target sequence for Map4k4 (NM_008696.1,2151-2169).
gcctgacgataagaaagaa

SEQ ID NO: 507503 - DNA, 19 bp, Mus musculus
  siRNA target sequence for Map4k4 (NM_008696.1,2155-2173).
gacgataagaaagaagtat

SEQ ID NO: 507504 - DNA, 19 bp, Mus musculus
  siRNA target sequence for Map4k4 (NM_008696.1,2248-2266).
cggccacctcacaaagtaa

SEQ ID NO: 507505 - DNA, 19 bp, Mus musculus
  siRNA target sequence for Map4k4 (NM_008696.1,2397-2415).
caacggtgaaacagaatct

SEQ ID NO: 507506 - DNA, 19 bp, Mus musculus
  siRNA target sequence for Map4k4 (NM_008696.1,2408-2426).
cagaatctgtgaaaacaat

SEQ ID NO: 507507 - DNA, 19 bp, Mus musculus
  siRNA target sequence for Map4k4 (NM_008696.1,2423-2441).
caatgatcgttcatgatga

SEQ ID NO: 507508 - DNA, 19 bp, Mus musculus
  siRNA target sequence for Map4k4 (NM_008696.1,2427-2445).
gatcgttcatgatgatgta

SEQ ID NO: 507509 - DNA, 19 bp, Mus musculus
  siRNA target sequence for Map4k4 (NM_008696.1,2513-2531).
gtagcacactccagaaaca

SEQ ID NO: 507510 - DNA, 19 bp, Mus musculus
  siRNA target sequence for Map4k4 (NM_008696.1,2541-2559).
ctcctcctttacacctttt

SEQ ID NO: 507511 - DNA, 19 bp, Mus musculus
  siRNA target sequence for Map4k4 (NM_008696.1,2692-2710).
gtgaaccccacgaacacta

SEQ ID NO: 507512 - DNA, 19 bp, Mus musculus
  siRNA target sequence for Map4k4 (NM_008696.1,2722-2740).
gatacccccgagattcgta

SEQ ID NO: 507513 - DNA, 19 bp, Mus musculus
  siRNA target sequence for Map4k4 (NM_008696.1,2726-2744).
cccccgagattcgtaaata

SEQ ID NO: 507514 - DNA, 19 bp, Mus musculus
  siRNA target sequence for Map4k4 (NM_008696.1,2728-2746).
cccgagattcgtaaataca

SEQ ID NO: 507515 - DNA, 19 bp, Mus musculus
  siRNA target sequence for Map4k4 (NM_008696.1,2729-2747).
ccgagattcgtaaatacaa

SEQ ID NO: 507516 - DNA, 19 bp, Mus musculus
  siRNA target sequence for Map4k4 (NM_008696.1,2738-2756).
gtaaatacaagaagagatt

SEQ ID NO: 507517 - DNA, 19 bp, Mus musculus
  siRNA target sequence for Map4k4 (NM_008696.1,2780-2798).
ccttatggggagtgaactt

SEQ ID NO: 507518 - DNA, 19 bp, Mus musculus
  siRNA target sequence for Map4k4 (NM_008696.1,2946-2964).
gttacgtgtctactattta

SEQ ID NO: 507519 - DNA, 19 bp, Mus musculus
  siRNA target sequence for Map4k4 (NM_008696.1,2950-2968).
cgtgtctactatttatcct

SEQ ID NO: 507520 - DNA, 19 bp, Mus musculus
  siRNA target sequence for Map4k4 (NM_008696.1,2967-2985).
ctggctaagaaataagatt

SEQ ID NO: 507521 - DNA, 19 bp, Mus musculus
  siRNA target sequence for Map4k4 (NM_008696.1,2969-2987).
ggctaagaaataagattct

SEQ ID NO: 507522 - DNA, 19 bp, Mus musculus
  siRNA target sequence for Map4k4 (NM_008696.1,2970-2988).
gctaagaaataagattctt

SEQ ID NO: 507523 - DNA, 19 bp, Mus musculus
  siRNA target sequence for Map4k4 (NM_008696.1,3047-3065).
ggtgcgtgcactataaagt

SEQ ID NO: 507524 - DNA, 19 bp, Mus musculus
  siRNA target sequence for Map4k4 (NM_008696.1,3054-3072).
gcactataaagtcgtaaaa

SEQ ID NO: 507525 - DNA, 19 bp, Mus musculus
  siRNA target sequence for Map4k4 (NM_008696.1,3055-3073).
cactataaagtcgtaaaat

SEQ ID NO: 507526 - DNA, 19 bp, Mus musculus
  siRNA target sequence for Map4k4 (NM_008696.1,3131-3149).
gggcaccgaagccatatca

SEQ ID NO: 507527 - DNA, 19 bp, Mus musculus
  siRNA target sequence for Map4k4 (NM_008696.1,3133-3151).
gcaccgaagccatatcaca

SEQ ID NO: 507528 - DNA, 19 bp, Mus musculus
  siRNA target sequence for Map4k4 (NM_008696.1,3134-3152).
caccgaagccatatcacaa

SEQ ID NO: 507529 - DNA, 19 bp, Mus musculus
  siRNA target sequence for Map4k4 (NM_008696.1,3136-3154).
ccgaagccatatcacaaat

SEQ ID NO: 507530 - DNA, 19 bp, Mus musculus
  siRNA target sequence for Map4k4 (NM_008696.1,3137-3155).
cgaagccatatcacaaatt

SEQ ID NO: 507531 - DNA, 19 bp, Mus musculus
  siRNA target sequence for Map4k4 (NM_008696.1,3290-3308).
cagtctatgacatttatct

SEQ ID NO: 507532 - DNA, 19 bp, Mus musculus
  siRNA target sequence for Map4k4 (NM_008696.1,3300-3318).
catttatctaccaacacat

SEQ ID NO: 507533 - DNA, 19 bp, Mus musculus
  siRNA target sequence for Map4k4 (NM_008696.1,3329-3347).
gcatcaaaccccatgcaat

SEQ ID NO: 507534 - DNA, 19 bp, Mus musculus
  siRNA target sequence for Map4k4 (NM_008696.1,3338-3356).
cccatgcaatcattatcct

SEQ ID NO: 507535 - DNA, 19 bp, Mus musculus
  siRNA target sequence for Map4k4 (NM_008696.1,3397-3415).
gacgagggggtttacgtta

SEQ ID NO: 507536 - DNA, 19 bp, Mus musculus
  siRNA target sequence for Map4k4 (NM_008696.1,3465-3483).
gccgacatctgtagcatat

SEQ ID NO: 507537 - DNA, 19 bp, Mus musculus
  siRNA target sequence for Map4k4 (NM_008696.1,3466-3484).
ccgacatctgtagcatata

SEQ ID NO: 507538 - DNA, 19 bp, Mus musculus
  siRNA target sequence for Map4k4 (NM_008696.1,3467-3485).
cgacatctgtagcatatat

SEQ ID NO: 507539 - DNA, 19 bp, Mus musculus
  siRNA target sequence for Map4k4 (NM_008696.1,3647-3665).
gcagcagccaggtctattt

SEQ ID NO: 507540 - DNA, 19 bp, Mus musculus
  siRNA target sequence for Map4k4 (NM_008696.1,3650-3668).
gcagccaggtctatttcat

SEQ ID NO: 507541 - DNA, 19 bp, Mus musculus
  siRNA target sequence for Map4k6 (NM_016713.1,259-277).
gaggtggttggcaatggaa

SEQ ID NO: 507542 - DNA, 19 bp, Mus musculus
  siRNA target sequence for Map4k6 (NM_016713.1,402-420).
ctctcaccatcgcaatatt

SEQ ID NO: 507543 - DNA, 19 bp, Mus musculus
  siRNA target sequence for Map4k6 (NM_016713.1,509-527).
cagtgaccgacctggtaaa

SEQ ID NO: 507544 - DNA, 19 bp, Mus musculus
  siRNA target sequence for Map4k6 (NM_016713.1,511-529).
gtgaccgacctggtaaaga

SEQ ID NO: 507545 - DNA, 19 bp, Mus musculus
  siRNA target sequence for Map4k6 (NM_016713.1,517-535).
gacctggtaaagaacacaa

SEQ ID NO: 507546 - DNA, 19 bp, Mus musculus
  siRNA target sequence for Map4k6 (NM_016713.1,723-741).
caggcggaacactttcatt

SEQ ID NO: 507547 - DNA, 19 bp, Mus musculus
  siRNA target sequence for Map4k6 (NM_016713.1,727-745).
cggaacactttcattggaa

SEQ ID NO: 507548 - DNA, 19 bp, Mus musculus
  siRNA target sequence for Map4k6 (NM_016713.1,973-991).
gacacgtgtctcatcaaga

SEQ ID NO: 507549 - DNA, 19 bp, Mus musculus
  siRNA target sequence for Map4k6 (NM_016713.1,977-995).
cgtgtctcatcaagactta

SEQ ID NO: 507550 - DNA, 19 bp, Mus musculus
  siRNA target sequence for Map4k6 (NM_016713.1,1004-1022).
gcccacccaccgaacagtt

SEQ ID NO: 507551 - DNA, 19 bp, Mus musculus
  siRNA target sequence for Map4k6 (NM_016713.1,1005-1023).
cccacccaccgaacagtta

SEQ ID NO: 507552 - DNA, 19 bp, Mus musculus
  siRNA target sequence for Map4k6 (NM_016713.1,1007-1025).
cacccaccgaacagttact

SEQ ID NO: 507553 - DNA, 19 bp, Mus musculus
  siRNA target sequence for Map4k6 (NM_016713.1,1013-1031).
ccgaacagttactcaaatt

SEQ ID NO: 507554 - DNA, 19 bp, Mus musculus
  siRNA target sequence for Map4k6 (NM_016713.1,1188-1206).
gccaagctccatcatgaat

SEQ ID NO: 507555 - DNA, 19 bp, Mus musculus
  siRNA target sequence for Map4k6 (NM_016713.1,1223-1241).
cactgcgcagagaattcct

SEQ ID NO: 507556 - DNA, 19 bp, Mus musculus
  siRNA target sequence for Map4k6 (NM_016713.1,1265-1283).
gcaactctgaggctttaaa

SEQ ID NO: 507557 - DNA, 19 bp, Mus musculus
  siRNA target sequence for Map4k6 (NM_016713.1,1320-1338).
cccggaggcacacatcaaa

SEQ ID NO: 507558 - DNA, 19 bp, Mus musculus
  siRNA target sequence for Map4k6 (NM_016713.1,1419-1437).
gcgagaacagcgtaagcta

SEQ ID NO: 507559 - DNA, 19 bp, Mus musculus
  siRNA target sequence for Map4k6 (NM_016713.1,1680-1698).
caggaagcccctgtatcat

SEQ ID NO: 507560 - DNA, 19 bp, Mus musculus
  siRNA target sequence for Map4k6 (NM_016713.1,1701-1719).
cggtcggggcattaatcct

SEQ ID NO: 507561 - DNA, 19 bp, Mus musculus
  siRNA target sequence for Map4k6 (NM_016713.1,2150-2168).
cctgggttcggcctgataa

SEQ ID NO: 507562 - DNA, 19 bp, Mus musculus
  siRNA target sequence for Map4k6 (NM_016713.1,2151-2169).
ctgggttcggcctgataat

SEQ ID NO: 507563 - DNA, 19 bp, Mus musculus
  siRNA target sequence for Map4k6 (NM_016713.1,2153-2171).
gggttcggcctgataatga

SEQ ID NO: 507564 - DNA, 19 bp, Mus musculus
  siRNA target sequence for Map4k6 (NM_016713.1,2672-2690).
ccatggtggttcatgatgt

SEQ ID NO: 507565 - DNA, 19 bp, Mus musculus
  siRNA target sequence for Map4k6 (NM_016713.1,2852-2870).
gtcaaagccctccaacaaa

SEQ ID NO: 507566 - DNA, 19 bp, Mus musculus
  siRNA target sequence for Map4k6 (NM_016713.1,3014-3032).
gtggtcgccttgatcaact

SEQ ID NO: 507567 - DNA, 19 bp, Mus musculus
  siRNA target sequence for Map4k6 (NM_016713.1,3078-3096).
caacacccgagctcatagt

SEQ ID NO: 507568 - DNA, 19 bp, Mus musculus
  siRNA target sequence for Map4k6 (NM_016713.1,3081-3099).
cacccgagctcatagtgaa

SEQ ID NO: 507569 - DNA, 19 bp, Mus musculus
  siRNA target sequence for Map4k6 (NM_016713.1,3261-3279).
gcaaatggatgtcttagaa

SEQ ID NO: 507570 - DNA, 19 bp, Mus musculus
  siRNA target sequence for Map4k6 (NM_016713.1,3315-3333).
gaacaaactgcgggtatat

SEQ ID NO: 507571 - DNA, 19 bp, Mus musculus
  siRNA target sequence for Map4k6 (NM_016713.1,3428-3446).
gccactaccgtgttgtgaa

SEQ ID NO: 507572 - DNA, 19 bp, Mus musculus
  siRNA target sequence for Map4k6 (NM_016713.1,3429-3447).
ccactaccgtgttgtgaaa

SEQ ID NO: 507573 - DNA, 19 bp, Mus musculus
  siRNA target sequence for Map4k6 (NM_016713.1,3430-3448).
cactaccgtgttgtgaaat

SEQ ID NO: 507574 - DNA, 19 bp, Mus musculus
  siRNA target sequence for Map4k6 (NM_016713.1,3432-3450).
ctaccgtgttgtgaaatat

SEQ ID NO: 507575 - DNA, 19 bp, Mus musculus
  siRNA target sequence for Map4k6 (NM_016713.1,3483-3501).
gaactccgtggaggtttat

SEQ ID NO: 507576 - DNA, 19 bp, Mus musculus
  siRNA target sequence for Map4k6 (NM_016713.1,3512-3530).
ccaaaccctaccacaaatt

SEQ ID NO: 507577 - DNA, 19 bp, Mus musculus
  siRNA target sequence for Map4k6 (NM_016713.1,3662-3680).
ggaacagctatgacatcta

SEQ ID NO: 507578 - DNA, 19 bp, Mus musculus
  siRNA target sequence for Map4k6 (NM_016713.1,3779-3797).
gtgtctatgtcaacactta

SEQ ID NO: 507579 - DNA, 19 bp, Mus musculus
  siRNA target sequence for Map4k6 (NM_016713.1,3953-3971).
gagcccagaggctcaagtt

SEQ ID NO: 507580 - DNA, 19 bp, Mus musculus
  siRNA target sequence for Map4k6 (NM_016713.1,4022-4040).
gaagcagccaagtttactt

SEQ ID NO: 507581 - DNA, 19 bp, Mus musculus
  siRNA target sequence for Map4k6 (NM_016713.1,4054-4072).
cgtaactgcatcatgaact

SEQ ID NO: 507582 - DNA, 19 bp, Mus musculus
  siRNA target sequence for Map4k6 (NM_176893.1,2493-2511).
caattggcgaggactttgt

SEQ ID NO: 507583 - DNA, 19 bp, Mus musculus
  siRNA target sequence for Mapk1 (NM_011949.2,313-331).
ggcgcctacggcatggttt

SEQ ID NO: 507584 - DNA, 19 bp, Mus musculus
  siRNA target sequence for Mapk1 (NM_011949.2,332-350).
gctctgcttatgataatct

SEQ ID NO: 507585 - DNA, 19 bp, Mus musculus
  siRNA target sequence for Mapk1 (NM_011949.2,335-353).
ctgcttatgataatctcaa

SEQ ID NO: 507586 - DNA, 19 bp, Mus musculus
  siRNA target sequence for Mapk1 (NM_011949.2,338-356).
cttatgataatctcaacaa

SEQ ID NO: 507587 - DNA, 19 bp, Mus musculus
  siRNA target sequence for Mapk1 (NM_011949.2,361-379).
cgagttgctatcaagaaaa

SEQ ID NO: 507588 - DNA, 19 bp, Mus musculus
  siRNA target sequence for Mapk1 (NM_011949.2,364-382).
gttgctatcaagaaaatca

SEQ ID NO: 507589 - DNA, 19 bp, Mus musculus
  siRNA target sequence for Mapk1 (NM_011949.2,394-412).
caccagacctactgtcaaa

SEQ ID NO: 507590 - DNA, 19 bp, Mus musculus
  siRNA target sequence for Mapk1 (NM_011949.2,413-431).
gaaccctaagagagataaa

SEQ ID NO: 507591 - DNA, 19 bp, Mus musculus
  siRNA target sequence for Mapk1 (NM_011949.2,480-498).
catccgggcaccaaccatt

SEQ ID NO: 507592 - DNA, 19 bp, Mus musculus
  siRNA target sequence for Mapk1 (NM_011949.2,490-508).
ccaaccattgagcaaatga

SEQ ID NO: 507593 - DNA, 19 bp, Mus musculus
  siRNA target sequence for Mapk1 (NM_011949.2,585-603).
ccacatctgctattttctt

SEQ ID NO: 507594 - DNA, 19 bp, Mus musculus
  siRNA target sequence for Mapk1 (NM_011949.2,586-604).
cacatctgctattttcttt

SEQ ID NO: 507595 - DNA, 19 bp, Mus musculus
  siRNA target sequence for Mapk1 (NM_011949.2,613-631).
ctgagagggctaaagtata

SEQ ID NO: 507596 - DNA, 19 bp, Mus musculus
  siRNA target sequence for Mapk1 (NM_011949.2,681-699).
gctgaacaccacttgtgat

SEQ ID NO: 507597 - DNA, 19 bp, Mus musculus
  siRNA target sequence for Mapk1 (NM_011949.2,689-707).
ccacttgtgatctcaagat

SEQ ID NO: 507598 - DNA, 19 bp, Mus musculus
  siRNA target sequence for Mapk1 (NM_011949.2,796-814).
gctccagaaattatgttga

SEQ ID NO: 507599 - DNA, 19 bp, Mus musculus
  siRNA target sequence for Mapk1 (NM_011949.2,960-978).
ggaagatctgaattgtata

SEQ ID NO: 507600 - DNA, 19 bp, Mus musculus
  siRNA target sequence for Mapk1 (NM_011949.2,961-979).
gaagatctgaattgtataa

SEQ ID NO: 507601 - DNA, 19 bp, Mus musculus
  siRNA target sequence for Mapk1 (NM_011949.2,1041-1059).
caggttgttcccaaatgct

SEQ ID NO: 507602 - DNA, 19 bp, Mus musculus
  siRNA target sequence for Mapk1 (NM_011949.2,1106-1124).
ctcacaagaggattgaagt

SEQ ID NO: 507603 - DNA, 19 bp, Mus musculus
  siRNA target sequence for Mapk1 (NM_011949.2,1144-1162).
ccatacctggagcagtatt

SEQ ID NO: 507604 - DNA, 19 bp, Mus musculus
  siRNA target sequence for Mapk1 (NM_011949.2,1145-1163).
catacctggagcagtatta

SEQ ID NO: 507605 - DNA, 19 bp, Mus musculus
  siRNA target sequence for Mapk1 (NM_011949.2,1158-1176).
gtattatgacccaagtgat

SEQ ID NO: 507606 - DNA, 19 bp, Mus musculus
  siRNA target sequence for Mapk1 (NM_011949.2,1186-1204).
gctgaagcgccattcaagt

SEQ ID NO: 507607 - DNA, 19 bp, Mus musculus
  siRNA target sequence for Mapk1 (NM_011949.2,1187-1205).
ctgaagcgccattcaagtt

SEQ ID NO: 507608 - DNA, 19 bp, Mus musculus
  siRNA target sequence for Mapk1 (NM_011949.2,1192-1210).
gcgccattcaagtttgaca

SEQ ID NO: 507609 - DNA, 19 bp, Mus musculus
  siRNA target sequence for Mapk1 (NM_011949.2,1213-1231).
gagttggacgacttaccta

SEQ ID NO: 507610 - DNA, 19 bp, Mus musculus
  siRNA target sequence for Mapk10 (NM_009158.1,343-361).
ccaaccttggatgtgaaaa

SEQ ID NO: 507611 - DNA, 19 bp, Mus musculus
  siRNA target sequence for Mapk10 (NM_009158.1,371-389).
gtcagggattcgataaaca

SEQ ID NO: 507612 - DNA, 19 bp, Mus musculus
  siRNA target sequence for Mapk10 (NM_009158.1,388-406).
cacgtggatgtgtcatcta

SEQ ID NO: 507613 - DNA, 19 bp, Mus musculus
  siRNA target sequence for Mapk10 (NM_009158.1,390-408).
cgtggatgtgtcatctatt

SEQ ID NO: 507614 - DNA, 19 bp, Mus musculus
  siRNA target sequence for Mapk10 (NM_009158.1,399-417).
gtcatctattgccaaacat

SEQ ID NO: 507615 - DNA, 19 bp, Mus musculus
  siRNA target sequence for Mapk10 (NM_009158.1,404-422).
ctattgccaaacattacaa

SEQ ID NO: 507616 - DNA, 19 bp, Mus musculus
  siRNA target sequence for Mapk10 (NM_009158.1,558-576).
cgctgtccttgacagaaat

SEQ ID NO: 507617 - DNA, 19 bp, Mus musculus
  siRNA target sequence for Mapk10 (NM_009158.1,560-578).
ctgtccttgacagaaatgt

SEQ ID NO: 507618 - DNA, 19 bp, Mus musculus
  siRNA target sequence for Mapk10 (NM_009158.1,793-811).
gaccacgagcggatgtctt

SEQ ID NO: 507619 - DNA, 19 bp, Mus musculus
  siRNA target sequence for Mapk10 (NM_009158.1,796-814).
cacgagcggatgtcttact

SEQ ID NO: 507620 - DNA, 19 bp, Mus musculus
  siRNA target sequence for Mapk10 (NM_009158.1,876-894).
cttaaaacccagtaacatt

SEQ ID NO: 507621 - DNA, 19 bp, Mus musculus
  siRNA target sequence for Mapk10 (NM_009158.1,903-921).
gtctgattgcacactgaaa

SEQ ID NO: 507622 - DNA, 19 bp, Mus musculus
  siRNA target sequence for Mapk10 (NM_009158.1,949-967).
gcgggtacaagcttcatga

SEQ ID NO: 507623 - DNA, 19 bp, Mus musculus
  siRNA target sequence for Mapk10 (NM_009158.1,979-997).
gtggtgacgcgatattaca

SEQ ID NO: 507624 - DNA, 19 bp, Mus musculus
  siRNA target sequence for Mapk10 (NM_009158.1,981-999).
ggtgacgcgatattacaga

SEQ ID NO: 507625 - DNA, 19 bp, Mus musculus
  siRNA target sequence for Mapk10 (NM_009158.1,1100-1118).
ccggaaggagctatattga

SEQ ID NO: 507626 - DNA, 19 bp, Mus musculus
  siRNA target sequence for Mapk10 (NM_009158.1,1153-1171).
ccgtgtccagagttcatga

SEQ ID NO: 507627 - DNA, 19 bp, Mus musculus
  siRNA target sequence for Mapk10 (NM_009158.1,1267-1285).
gcggattctgagcacaata

SEQ ID NO: 507628 - DNA, 19 bp, Mus musculus
  siRNA target sequence for Mapk10 (NM_009158.1,1268-1286).
cggattctgagcacaataa

SEQ ID NO: 507629 - DNA, 19 bp, Mus musculus
  siRNA target sequence for Mapk10 (NM_009158.1,1274-1292).
ctgagcacaataaacttaa

SEQ ID NO: 507630 - DNA, 19 bp, Mus musculus
  siRNA target sequence for Mapk10 (NM_009158.1,1298-1316).
gccaagccagggatttgtt

SEQ ID NO: 507631 - DNA, 19 bp, Mus musculus
  siRNA target sequence for Mapk10 (NM_009158.1,1304-1322).
ccagggatttgttgtctaa

SEQ ID NO: 507632 - DNA, 19 bp, Mus musculus
  siRNA target sequence for Mapk10 (NM_009158.1,1307-1325).
gggatttgttgtctaagat

SEQ ID NO: 507633 - DNA, 19 bp, Mus musculus
  siRNA target sequence for Mapk10 (NM_009158.1,1369-1387).
ctgcagcatccgtacatca

SEQ ID NO: 507634 - DNA, 19 bp, Mus musculus
  siRNA target sequence for Mapk10 (NM_009158.1,1375-1393).
catccgtacatcaacgttt

SEQ ID NO: 507635 - DNA, 19 bp, Mus musculus
  siRNA target sequence for Mapk10 (NM_009158.1,1416-1434).
ggcgcctccgcctcagata

SEQ ID NO: 507636 - DNA, 19 bp, Mus musculus
  siRNA target sequence for Mapk10 (NM_009158.1,1417-1435).
gcgcctccgcctcagatat

SEQ ID NO: 507637 - DNA, 19 bp, Mus musculus
  siRNA target sequence for Mapk10 (NM_009158.1,1418-1436).
cgcctccgcctcagatata

SEQ ID NO: 507638 - DNA, 19 bp, Mus musculus
  siRNA target sequence for Mapk10 (NM_009158.1,1421-1439).
ctccgcctcagatatatga

SEQ ID NO: 507639 - DNA, 19 bp, Mus musculus
  siRNA target sequence for Mapk10 (NM_009158.1,1423-1441).
ccgcctcagatatatgata

SEQ ID NO: 507640 - DNA, 19 bp, Mus musculus
  siRNA target sequence for Mapk10 (NM_009158.1,1424-1442).
cgcctcagatatatgataa

SEQ ID NO: 507641 - DNA, 19 bp, Mus musculus
  siRNA target sequence for Mapk10 (NM_009158.1,1459-1477).
gagcacaccatcgaagaat

SEQ ID NO: 507642 - DNA, 19 bp, Mus musculus
  siRNA target sequence for Mapk11 (NM_011161.4,206-224).
gctgtctcgccctttccaa

SEQ ID NO: 507643 - DNA, 19 bp, Mus musculus
  siRNA target sequence for Mapk11 (NM_011161.4,410-428).
gagcgatgagcatgttcaa

SEQ ID NO: 507644 - DNA, 19 bp, Mus musculus
  siRNA target sequence for Mapk11 (NM_011161.4,446-464).
gctgcgtgggctgaagtat

SEQ ID NO: 507645 - DNA, 19 bp, Mus musculus
  siRNA target sequence for Mapk11 (NM_011161.4,901-919).
gaagaatgctggtactaga

SEQ ID NO: 507646 - DNA, 19 bp, Mus musculus
  siRNA target sequence for Mapk11 (NM_011161.4,949-967).
ccttggcccacgcatactt

SEQ ID NO: 507647 - DNA, 19 bp, Mus musculus
  siRNA target sequence for Mapk11 (NM_011161.4,1007-1025).
gccctatgatgaaagtgtt

SEQ ID NO: 507648 - DNA, 19 bp, Mus musculus
  siRNA target sequence for Mapk11 (NM_011161.4,1112-1130).
ccctggcacccatgaaatt

SEQ ID NO: 507649 - DNA, 19 bp, Mus musculus
  siRNA target sequence for Mapk11 (NM_011161.4,1114-1132).
ctggcacccatgaaattga

SEQ ID NO: 507650 - DNA, 19 bp, Mus musculus
  siRNA target sequence for Mapk12 (NM_013871.2,520-538).
ccctgagtgaagacagaat

SEQ ID NO: 507651 - DNA, 19 bp, Mus musculus
  siRNA target sequence for Mapk12 (NM_013871.2,688-706).
gtgagatgacaggatatgt

SEQ ID NO: 507652 - DNA, 19 bp, Mus musculus
  siRNA target sequence for Mapk12 (NM_013871.2,729-747).
ccagaggtcatcttgaatt

SEQ ID NO: 507653 - DNA, 19 bp, Mus musculus
  siRNA target sequence for Mapk12 (NM_013871.2,794-812).
catggcggagatgattact

SEQ ID NO: 507654 - DNA, 19 bp, Mus musculus
  siRNA target sequence for Mapk12 (NM_013871.2,915-933).
gcagaggccaagaactaca

SEQ ID NO: 507655 - DNA, 19 bp, Mus musculus
  siRNA target sequence for Mapk12 (NM_013871.2,916-934).
cagaggccaagaactacat

SEQ ID NO: 507656 - DNA, 19 bp, Mus musculus
  siRNA target sequence for Mapk12 (NM_013871.2,991-1009).
gccctcaggctgtgaatct

SEQ ID NO: 507657 - DNA, 19 bp, Mus musculus
  siRNA target sequence for Mapk13 (NM_011950.1,63-81).
cggaaaaggggcttctaca

SEQ ID NO: 507658 - DNA, 19 bp, Mus musculus
  siRNA target sequence for Mapk13 (NM_011950.1,262-280).
gcgagcttctgctcttgaa

SEQ ID NO: 507659 - DNA, 19 bp, Mus musculus
  siRNA target sequence for Mapk13 (NM_011950.1,339-357).
cttcggagcttccatgatt

SEQ ID NO: 507660 - DNA, 19 bp, Mus musculus
  siRNA target sequence for Mapk13 (NM_011950.1,633-651).
ctcagctggatgcattaca

SEQ ID NO: 507661 - DNA, 19 bp, Mus musculus
  siRNA target sequence for Mapk13 (NM_011950.1,1049-1067).
cagcgtggacgaatggaaa

SEQ ID NO: 507662 - DNA, 19 bp, Mus musculus
  siRNA target sequence for Mapk14 (NM_011951.1,349-367).
gggaggtgcccgaacgata

SEQ ID NO: 507663 - DNA, 19 bp, Mus musculus
  siRNA target sequence for Mapk14 (NM_011951.1,438-456).
catcgtgtggcagttaaga

SEQ ID NO: 507664 - DNA, 19 bp, Mus musculus
  siRNA target sequence for Mapk14 (NM_011951.1,459-477).
ctgtcgagaccgtttcagt

SEQ ID NO: 507665 - DNA, 19 bp, Mus musculus
  siRNA target sequence for Mapk14 (NM_011951.1,469-487).
cgtttcagtccatcattca

SEQ ID NO: 507666 - DNA, 19 bp, Mus musculus
  siRNA target sequence for Mapk14 (NM_011951.1,524-542).
gcacatgaaacacgaaaat

SEQ ID NO: 507667 - DNA, 19 bp, Mus musculus
  siRNA target sequence for Mapk14 (NM_011951.1,530-548).
gaaacacgaaaatgtgatt

SEQ ID NO: 507668 - DNA, 19 bp, Mus musculus
  siRNA target sequence for Mapk14 (NM_011951.1,664-682).
ccgacgaccacgttcagtt

SEQ ID NO: 507669 - DNA, 19 bp, Mus musculus
  siRNA target sequence for Mapk14 (NM_011951.1,665-683).
cgacgaccacgttcagttt

SEQ ID NO: 507670 - DNA, 19 bp, Mus musculus
  siRNA target sequence for Mapk14 (NM_011951.1,669-687).
gaccacgttcagtttctca

SEQ ID NO: 507671 - DNA, 19 bp, Mus musculus
  siRNA target sequence for Mapk14 (NM_011951.1,698-716).
cctccgagggctgaagtat

SEQ ID NO: 507672 - DNA, 19 bp, Mus musculus
  siRNA target sequence for Mapk14 (NM_011951.1,701-719).
ccgagggctgaagtatata

SEQ ID NO: 507673 - DNA, 19 bp, Mus musculus
  siRNA target sequence for Mapk14 (NM_011951.1,809-827).
ggctcggcacactgatgat

SEQ ID NO: 507674 - DNA, 19 bp, Mus musculus
  siRNA target sequence for Mapk14 (NM_011951.1,814-832).
ggcacactgatgatgagat

SEQ ID NO: 507675 - DNA, 19 bp, Mus musculus
  siRNA target sequence for Mapk14 (NM_011951.1,984-1002).
gatcagttgaagctcattt

SEQ ID NO: 507676 - DNA, 19 bp, Mus musculus
  siRNA target sequence for Mapk14 (NM_011951.1,987-1005).
cagttgaagctcattttaa

SEQ ID NO: 507677 - DNA, 19 bp, Mus musculus
  siRNA target sequence for Mapk14 (NM_011951.1,989-1007).
gttgaagctcattttaaga

SEQ ID NO: 507678 - DNA, 19 bp, Mus musculus
  siRNA target sequence for Mapk14 (NM_011951.1,1025-1043).
ggctgagcttctgaagaaa

SEQ ID NO: 507679 - DNA, 19 bp, Mus musculus
  siRNA target sequence for Mapk14 (NM_011951.1,1053-1071).
gagtctgcaagaaactaca

SEQ ID NO: 507680 - DNA, 19 bp, Mus musculus
  siRNA target sequence for Mapk14 (NM_011951.1,1055-1073).
gtctgcaagaaactacatt

SEQ ID NO: 507681 - DNA, 19 bp, Mus musculus
  siRNA target sequence for Mapk14 (NM_011951.1,1059-1077).
gcaagaaactacattcagt

SEQ ID NO: 507682 - DNA, 19 bp, Mus musculus
  siRNA target sequence for Mapk14 (NM_011951.1,1083-1101).
gcccagatgccgaagatga

SEQ ID NO: 507683 - DNA, 19 bp, Mus musculus
  siRNA target sequence for Mapk14 (NM_011951.1,1086-1104).
cagatgccgaagatgaact

SEQ ID NO: 507684 - DNA, 19 bp, Mus musculus
  siRNA target sequence for Mapk14 (NM_011951.1,1097-1115).
gatgaacttcgcaaatgta

SEQ ID NO: 507685 - DNA, 19 bp, Mus musculus
  siRNA target sequence for Mapk14 (NM_011951.1,1106-1124).
cgcaaatgtatttattggt

SEQ ID NO: 507686 - DNA, 19 bp, Mus musculus
  siRNA target sequence for Mapk14 (NM_011951.1,1164-1182).
gttttggactcagataaga

SEQ ID NO: 507687 - DNA, 19 bp, Mus musculus
  siRNA target sequence for Mapk3 (NM_011952.1,110-128).
gaaggggcagccattcgat

SEQ ID NO: 507688 - DNA, 19 bp, Mus musculus
  siRNA target sequence for Mapk3 (NM_011952.1,296-314).
gcgattccgccatgagaat

SEQ ID NO: 507689 - DNA, 19 bp, Mus musculus
  siRNA target sequence for Mapk3 (NM_011952.1,298-316).
gattccgccatgagaatgt

SEQ ID NO: 507690 - DNA, 19 bp, Mus musculus
  siRNA target sequence for Mapk3 (NM_011952.1,1000-1018).
cttacctggaacagtacta

SEQ ID NO: 507691 - DNA, 19 bp, Mus musculus
  siRNA target sequence for Mapk4 (NM_172632.1,973-991).
ccttggtgggcgcttcatt

SEQ ID NO: 507692 - DNA, 19 bp, Mus musculus
  siRNA target sequence for Mapk4 (NM_172632.1,1111-1129).
cgcgctccgagagatcaaa

SEQ ID NO: 507693 - DNA, 19 bp, Mus musculus
  siRNA target sequence for Mapk4 (NM_172632.1,1112-1130).
gcgctccgagagatcaaaa

SEQ ID NO: 507694 - DNA, 19 bp, Mus musculus
  siRNA target sequence for Mapk4 (NM_172632.1,1113-1131).
cgctccgagagatcaaaat

SEQ ID NO: 507695 - DNA, 19 bp, Mus musculus
  siRNA target sequence for Mapk4 (NM_172632.1,1202-1220).
cagggcgagctcttcaagt

SEQ ID NO: 507696 - DNA, 19 bp, Mus musculus
  siRNA target sequence for Mapk4 (NM_172632.1,1204-1222).
gggcgagctcttcaagttt

SEQ ID NO: 507697 - DNA, 19 bp, Mus musculus
  siRNA target sequence for Mapk4 (NM_172632.1,1205-1223).
ggcgagctcttcaagttta

SEQ ID NO: 507698 - DNA, 19 bp, Mus musculus
  siRNA target sequence for Mapk4 (NM_172632.1,1230-1248).
cctatatcgtccaagagta

SEQ ID NO: 507699 - DNA, 19 bp, Mus musculus
  siRNA target sequence for Mapk4 (NM_172632.1,1301-1319).
cacgccaagctgttcatgt

SEQ ID NO: 507700 - DNA, 19 bp, Mus musculus
  siRNA target sequence for Mapk4 (NM_172632.1,1303-1321).
cgccaagctgttcatgtat

SEQ ID NO: 507701 - DNA, 19 bp, Mus musculus
  siRNA target sequence for Mapk4 (NM_172632.1,1328-1346).
ctccgtgggctcaagtaca

SEQ ID NO: 507702 - DNA, 19 bp, Mus musculus
  siRNA target sequence for Mapk4 (NM_172632.1,1443-1461).
caaggatcgtggatcaaca

SEQ ID NO: 507703 - DNA, 19 bp, Mus musculus
  siRNA target sequence for Mapk4 (NM_172632.1,1446-1464).
ggatcgtggatcaacatta

SEQ ID NO: 507704 - DNA, 19 bp, Mus musculus
  siRNA target sequence for Mapk4 (NM_172632.1,1487-1505).
gaagggttggtgacaaagt

SEQ ID NO: 507705 - DNA, 19 bp, Mus musculus
  siRNA target sequence for Mapk4 (NM_172632.1,1796-1814).
gagaagatcctgaccttta

SEQ ID NO: 507706 - DNA, 19 bp, Mus musculus
  siRNA target sequence for Mapk4 (NM_172632.1,1816-1834).
ccccatggaccgcttaaca

SEQ ID NO: 507707 - DNA, 19 bp, Mus musculus
  siRNA target sequence for Mapk4 (NM_172632.1,2079-2097).
cgctggcggaggatgttca

SEQ ID NO: 507708 - DNA, 19 bp, Mus musculus
  siRNA target sequence for Mapk4 (NM_172632.1,2190-2208).
gacggtcctgcgactacaa

SEQ ID NO: 507709 - DNA, 19 bp, Mus musculus
  siRNA target sequence for Mapk4 (NM_172632.1,2193-2211).
ggtcctgcgactacaaagt

SEQ ID NO: 507710 - DNA, 19 bp, Mus musculus
  siRNA target sequence for Mapk6 (NM_015806.2,279-297).
cagagaaattcgaaagtct

SEQ ID NO: 507711 - DNA, 19 bp, Mus musculus
  siRNA target sequence for Mapk6 (NM_015806.2,436-454).
cgatccccagagtgtcaaa

SEQ ID NO: 507712 - DNA, 19 bp, Mus musculus
  siRNA target sequence for Mapk6 (NM_015806.2,461-479).
ctccgtgaaatcaaaatta

SEQ ID NO: 507713 - DNA, 19 bp, Mus musculus
  siRNA target sequence for Mapk6 (NM_015806.2,483-501).
gaagacttgaccacgataa

SEQ ID NO: 507714 - DNA, 19 bp, Mus musculus
  siRNA target sequence for Mapk6 (NM_015806.2,486-504).
gacttgaccacgataacat

SEQ ID NO: 507715 - DNA, 19 bp, Mus musculus
  siRNA target sequence for Mapk6 (NM_015806.2,493-511).
ccacgataacattgtgaaa

SEQ ID NO: 507716 - DNA, 19 bp, Mus musculus
  siRNA target sequence for Mapk6 (NM_015806.2,532-550).
cagtggaagccagttaaca

SEQ ID NO: 507717 - DNA, 19 bp, Mus musculus
  siRNA target sequence for Mapk6 (NM_015806.2,574-592).
gctgaatagcgtctacatt

SEQ ID NO: 507718 - DNA, 19 bp, Mus musculus
  siRNA target sequence for Mapk6 (NM_015806.2,577-595).
gaatagcgtctacattgtt

SEQ ID NO: 507719 - DNA, 19 bp, Mus musculus
  siRNA target sequence for Mapk6 (NM_015806.2,682-700).
gctacgtgggctcaaatat

SEQ ID NO: 507720 - DNA, 19 bp, Mus musculus
  siRNA target sequence for Mapk6 (NM_015806.2,683-701).
ctacgtgggctcaaatata

SEQ ID NO: 507721 - DNA, 19 bp, Mus musculus
  siRNA target sequence for Mapk6 (NM_015806.2,731-749).
ctcaagccagctaatcttt

SEQ ID NO: 507722 - DNA, 19 bp, Mus musculus
  siRNA target sequence for Mapk6 (NM_015806.2,801-819).
ggatcatggatcctcatta

SEQ ID NO: 507723 - DNA, 19 bp, Mus musculus
  siRNA target sequence for Mapk6 (NM_015806.2,802-820).
gatcatggatcctcattat

SEQ ID NO: 507724 - DNA, 19 bp, Mus musculus
  siRNA target sequence for Mapk6 (NM_015806.2,840-858).
ctgaaggattggttaccaa

SEQ ID NO: 507725 - DNA, 19 bp, Mus musculus
  siRNA target sequence for Mapk6 (NM_015806.2,842-860).
gaaggattggttaccaaat

SEQ ID NO: 507726 - DNA, 19 bp, Mus musculus
  siRNA target sequence for Mapk6 (NM_015806.2,846-864).
gattggttaccaaatggta

SEQ ID NO: 507727 - DNA, 19 bp, Mus musculus
  siRNA target sequence for Mapk6 (NM_015806.2,851-869).
gttaccaaatggtacagat

SEQ ID NO: 507728 - DNA, 19 bp, Mus musculus
  siRNA target sequence for Mapk6 (NM_015806.2,865-883).
cagatctccacggctttta

SEQ ID NO: 507729 - DNA, 19 bp, Mus musculus
  siRNA target sequence for Mapk6 (NM_015806.2,867-885).
gatctccacggcttttact

SEQ ID NO: 507730 - DNA, 19 bp, Mus musculus
  siRNA target sequence for Mapk6 (NM_015806.2,944-962).
gagatgctgactggtaaaa

SEQ ID NO: 507731 - DNA, 19 bp, Mus musculus
  siRNA target sequence for Mapk6 (NM_015806.2,1056-1074).
gcgtgattccagtttacat

SEQ ID NO: 507732 - DNA, 19 bp, Mus musculus
  siRNA target sequence for Mapk6 (NM_015806.2,1057-1075).
cgtgattccagtttacatt

SEQ ID NO: 507733 - DNA, 19 bp, Mus musculus
  siRNA target sequence for Mapk6 (NM_015806.2,1058-1076).
gtgattccagtttacatta

SEQ ID NO: 507734 - DNA, 19 bp, Mus musculus
  siRNA target sequence for Mapk6 (NM_015806.2,1060-1078).
gattccagtttacattaga

SEQ ID NO: 507735 - DNA, 19 bp, Mus musculus
  siRNA target sequence for Mapk6 (NM_015806.2,1131-1149).
gccgagaagcactggattt

SEQ ID NO: 507736 - DNA, 19 bp, Mus musculus
  siRNA target sequence for Mapk6 (NM_015806.2,1260-1278).
gccaccctttccacataga

SEQ ID NO: 507737 - DNA, 19 bp, Mus musculus
  siRNA target sequence for Mapk6 (NM_015806.2,1280-1298).
gacgaagtggacgacattt

SEQ ID NO: 507738 - DNA, 19 bp, Mus musculus
  siRNA target sequence for Mapk6 (NM_015806.2,1291-1309).
cgacattttgcttatggat

SEQ ID NO: 507739 - DNA, 19 bp, Mus musculus
  siRNA target sequence for Mapk6 (NM_015806.2,1366-1384).
gcatgactggcctattcat

SEQ ID NO: 507740 - DNA, 19 bp, Mus musculus
  siRNA target sequence for Mapk6 (NM_015806.2,1370-1388).
gactggcctattcataaca

SEQ ID NO: 507741 - DNA, 19 bp, Mus musculus
  siRNA target sequence for Mapk6 (NM_015806.2,1374-1392).
ggcctattcataacaactt

SEQ ID NO: 507742 - DNA, 19 bp, Mus musculus
  siRNA target sequence for Mapk6 (NM_015806.2,1377-1395).
ctattcataacaactttga

SEQ ID NO: 507743 - DNA, 19 bp, Mus musculus
  siRNA target sequence for Mapk6 (NM_015806.2,1457-1475).
caagttgatcctcgaaaat

SEQ ID NO: 507744 - DNA, 19 bp, Mus musculus
  siRNA target sequence for Mapk6 (NM_015806.2,1460-1478).
gttgatcctcgaaaatact

SEQ ID NO: 507745 - DNA, 19 bp, Mus musculus
  siRNA target sequence for Mapk6 (NM_015806.2,1557-1575).
cagatcaccacgagaacaa

SEQ ID NO: 507746 - DNA, 19 bp, Mus musculus
  siRNA target sequence for Mapk6 (NM_015806.2,1593-1611).
gtagccacacctgtaacta

SEQ ID NO: 507747 - DNA, 19 bp, Mus musculus
  siRNA target sequence for Mapk6 (NM_015806.2,1596-1614).
gccacacctgtaactacaa

SEQ ID NO: 507748 - DNA, 19 bp, Mus musculus
  siRNA target sequence for Mapk6 (NM_015806.2,1597-1615).
ccacacctgtaactacaaa

SEQ ID NO: 507749 - DNA, 19 bp, Mus musculus
  siRNA target sequence for Mapk6 (NM_015806.2,1598-1616).
cacacctgtaactacaaaa

SEQ ID NO: 507750 - DNA, 19 bp, Mus musculus
  siRNA target sequence for Mapk6 (NM_015806.2,1620-1638).
gatcatcaccatacttaga

SEQ ID NO: 507751 - DNA, 19 bp, Mus musculus
  siRNA target sequence for Mapk6 (NM_015806.2,1623-1641).
catcaccatacttagataa

SEQ ID NO: 507752 - DNA, 19 bp, Mus musculus
  siRNA target sequence for Mapk6 (NM_015806.2,1626-1644).
caccatacttagataacct

SEQ ID NO: 507753 - DNA, 19 bp, Mus musculus
  siRNA target sequence for Mapk6 (NM_015806.2,1653-1671).
gggagagcgaggttaacca

SEQ ID NO: 507754 - DNA, 19 bp, Mus musculus
  siRNA target sequence for Mapk6 (NM_015806.2,1654-1672).
ggagagcgaggttaaccat

SEQ ID NO: 507755 - DNA, 19 bp, Mus musculus
  siRNA target sequence for Mapk6 (NM_015806.2,1655-1673).
gagagcgaggttaaccatt

SEQ ID NO: 507756 - DNA, 19 bp, Mus musculus
  siRNA target sequence for Mapk6 (NM_015806.2,1659-1677).
gcgaggttaaccattacta

SEQ ID NO: 507757 - DNA, 19 bp, Mus musculus
  siRNA target sequence for Mapk6 (NM_015806.2,1660-1678).
cgaggttaaccattactat

SEQ ID NO: 507758 - DNA, 19 bp, Mus musculus
  siRNA target sequence for Mapk6 (NM_015806.2,1899-1917).
ctgacgtagttgacaagtt

SEQ ID NO: 507759 - DNA, 19 bp, Mus musculus
  siRNA target sequence for Mapk6 (NM_015806.2,1901-1919).
gacgtagttgacaagttaa

SEQ ID NO: 507760 - DNA, 19 bp, Mus musculus
  siRNA target sequence for Mapk6 (NM_015806.2,1912-1930).
caagttaaacgacttgaat

SEQ ID NO: 507761 - DNA, 19 bp, Mus musculus
  siRNA target sequence for Mapk6 (NM_015806.2,1935-1953).
cagtgtcccagctagaatt

SEQ ID NO: 507762 - DNA, 19 bp, Mus musculus
  siRNA target sequence for Mapk6 (NM_015806.2,1937-1955).
gtgtcccagctagaattga

SEQ ID NO: 507763 - DNA, 19 bp, Mus musculus
  siRNA target sequence for Mapk6 (NM_015806.2,2043-2061).
cctgggacagccagtttgt

SEQ ID NO: 507764 - DNA, 19 bp, Mus musculus
  siRNA target sequence for Mapk6 (NM_015806.2,2083-2101).
cctcatcagtcagttttgt

SEQ ID NO: 507765 - DNA, 19 bp, Mus musculus
  siRNA target sequence for Mapk6 (NM_015806.2,2142-2160).
cctacaccagctatttgga

SEQ ID NO: 507766 - DNA, 19 bp, Mus musculus
  siRNA target sequence for Mapk6 (NM_015806.2,2151-2169).
gctatttggacaagttttt

SEQ ID NO: 507767 - DNA, 19 bp, Mus musculus
  siRNA target sequence for Mapk7 (NM_011841.1,368-386).
gggacgagtacgagatcat

SEQ ID NO: 507768 - DNA, 19 bp, Mus musculus
  siRNA target sequence for Mapk7 (NM_011841.1,468-486).
gatacctaatgcttttgat

SEQ ID NO: 507769 - DNA, 19 bp, Mus musculus
  siRNA target sequence for Mapk7 (NM_011841.1,586-604).
gtgccctatggagaattca

SEQ ID NO: 507770 - DNA, 19 bp, Mus musculus
  siRNA target sequence for Mapk7 (NM_011841.1,745-763).
gtcatccaccgtgatctta

SEQ ID NO: 507771 - DNA, 19 bp, Mus musculus
  siRNA target sequence for Mapk7 (NM_011841.1,770-788).
ctaaccttctggtcaatga

SEQ ID NO: 507772 - DNA, 19 bp, Mus musculus
  siRNA target sequence for Mapk7 (NM_011841.1,845-863).
ctgccgagcaccagtactt

SEQ ID NO: 507773 - DNA, 19 bp, Mus musculus
  siRNA target sequence for Mapk7 (NM_011841.1,858-876).
gtacttcatgactgagtat

SEQ ID NO: 507774 - DNA, 19 bp, Mus musculus
  siRNA target sequence for Mapk7 (NM_011841.1,913-931).
ctttccctgcacgagtata

SEQ ID NO: 507775 - DNA, 19 bp, Mus musculus
  siRNA target sequence for Mapk7 (NM_011841.1,1091-1109).
gggtgcgagcctatatcca

SEQ ID NO: 507776 - DNA, 19 bp, Mus musculus
  siRNA target sequence for Mapk7 (NM_011841.1,1187-1205).
gacgcatgttgcgatttga

SEQ ID NO: 507777 - DNA, 19 bp, Mus musculus
  siRNA target sequence for Mapk7 (NM_011841.1,1547-1565).
cacctgacaccgttgatct

SEQ ID NO: 507778 - DNA, 19 bp, Mus musculus
  siRNA target sequence for Mapk7 (NM_011841.1,1618-1636).
ggtgccatctccgacaata

SEQ ID NO: 507779 - DNA, 19 bp, Mus musculus
  siRNA target sequence for Mapk7 (NM_011841.1,1621-1639).
gccatctccgacaatacca

SEQ ID NO: 507780 - DNA, 19 bp, Mus musculus
  siRNA target sequence for Mapk7 (NM_011841.1,1622-1640).
ccatctccgacaataccaa

SEQ ID NO: 507781 - DNA, 19 bp, Mus musculus
  siRNA target sequence for Mapk7 (NM_011841.1,1623-1641).
catctccgacaataccaaa

SEQ ID NO: 507782 - DNA, 19 bp, Mus musculus
  siRNA target sequence for Mapk7 (NM_011841.1,2419-2437).
gatctggaggaattcttaa

SEQ ID NO: 507783 - DNA, 19 bp, Mus musculus
  siRNA target sequence for Mapk7 (NM_011841.1,2427-2445).
ggaattcttaaatcaatct

SEQ ID NO: 507784 - DNA, 19 bp, Mus musculus
  siRNA target sequence for Mapk7 (NM_011841.1,2428-2446).
gaattcttaaatcaatctt

SEQ ID NO: 507785 - DNA, 19 bp, Mus musculus
  siRNA target sequence for Mapk8 (NM_016700.2,199-217).
gaagcaaacgtgacaacaa

SEQ ID NO: 507786 - DNA, 19 bp, Mus musculus
  siRNA target sequence for Mapk8 (NM_016700.2,207-225).
cgtgacaacaatttttata

SEQ ID NO: 507787 - DNA, 19 bp, Mus musculus
  siRNA target sequence for Mapk8 (NM_016700.2,228-246).
gtagagattggagattcta

SEQ ID NO: 507788 - DNA, 19 bp, Mus musculus
  siRNA target sequence for Mapk8 (NM_016700.2,258-276).
ctaaaacgataccagaatt

SEQ ID NO: 507789 - DNA, 19 bp, Mus musculus
  siRNA target sequence for Mapk8 (NM_016700.2,294-312).
ggagctcaaggaatagtgt

SEQ ID NO: 507790 - DNA, 19 bp, Mus musculus
  siRNA target sequence for Mapk8 (NM_016700.2,319-337).
cttatgatgccattcttga

SEQ ID NO: 507791 - DNA, 19 bp, Mus musculus
  siRNA target sequence for Mapk8 (NM_016700.2,398-416).
cgcctaccgagaactagtt

SEQ ID NO: 507792 - DNA, 19 bp, Mus musculus
  siRNA target sequence for Mapk8 (NM_016700.2,400-418).
cctaccgagaactagttct

SEQ ID NO: 507793 - DNA, 19 bp, Mus musculus
  siRNA target sequence for Mapk8 (NM_016700.2,401-419).
ctaccgagaactagttctt

SEQ ID NO: 507794 - DNA, 19 bp, Mus musculus
  siRNA target sequence for Mapk8 (NM_016700.2,405-423).
cgagaactagttcttatga

SEQ ID NO: 507795 - DNA, 19 bp, Mus musculus
  siRNA target sequence for Mapk8 (NM_016700.2,406-424).
gagaactagttcttatgaa

SEQ ID NO: 507796 - DNA, 19 bp, Mus musculus
  siRNA target sequence for Mapk8 (NM_016700.2,462-480).
gttttcacaccacagaaat

SEQ ID NO: 507797 - DNA, 19 bp, Mus musculus
  siRNA target sequence for Mapk8 (NM_016700.2,518-536).
gctcatggatgcaaatctt

SEQ ID NO: 507798 - DNA, 19 bp, Mus musculus
  siRNA target sequence for Mapk8 (NM_016700.2,529-547).
caaatctttgccaagtgat

SEQ ID NO: 507799 - DNA, 19 bp, Mus musculus
  siRNA target sequence for Mapk8 (NM_016700.2,545-563).
gattcagatggagttagat

SEQ ID NO: 507800 - DNA, 19 bp, Mus musculus
  siRNA target sequence for Mapk8 (NM_016700.2,641-659).
ggacttaaagcctagtaat

SEQ ID NO: 507801 - DNA, 19 bp, Mus musculus
  siRNA target sequence for Mapk8 (NM_016700.2,642-660).
gacttaaagcctagtaata

SEQ ID NO: 507802 - DNA, 19 bp, Mus musculus
  siRNA target sequence for Mapk8 (NM_016700.2,652-670).
ctagtaatatagtagtcaa

SEQ ID NO: 507803 - DNA, 19 bp, Mus musculus
  siRNA target sequence for Mapk8 (NM_016700.2,679-697).
gcactttgaagattcttga

SEQ ID NO: 507804 - DNA, 19 bp, Mus musculus
  siRNA target sequence for Mapk8 (NM_016700.2,713-731).
gactgcaggaacgagtttt

SEQ ID NO: 507805 - DNA, 19 bp, Mus musculus
  siRNA target sequence for Mapk8 (NM_016700.2,720-738).
ggaacgagttttatgatga

SEQ ID NO: 507806 - DNA, 19 bp, Mus musculus
  siRNA target sequence for Mapk8 (NM_016700.2,747-765).
gtggtgactcgctactaca

SEQ ID NO: 507807 - DNA, 19 bp, Mus musculus
  siRNA target sequence for Mapk8 (NM_016700.2,919-937).
caccttgtcctgaattcat

SEQ ID NO: 507808 - DNA, 19 bp, Mus musculus
  siRNA target sequence for Mapk8 (NM_016700.2,955-973).
cagtaaggacttatgttga

SEQ ID NO: 507809 - DNA, 19 bp, Mus musculus
  siRNA target sequence for Mapk8 (NM_016700.2,969-987).
gttgaaaacaggcctaaat

SEQ ID NO: 507810 - DNA, 19 bp, Mus musculus
  siRNA target sequence for Mapk8 (NM_016700.2,980-998).
gcctaaatacgctggatat

SEQ ID NO: 507811 - DNA, 19 bp, Mus musculus
  siRNA target sequence for Mapk8 (NM_016700.2,981-999).
cctaaatacgctggatata

SEQ ID NO: 507812 - DNA, 19 bp, Mus musculus
  siRNA target sequence for Mapk8 (NM_016700.2,991-1009).
ctggatatagctttgagaa

SEQ ID NO: 507813 - DNA, 19 bp, Mus musculus
  siRNA target sequence for Mapk8 (NM_016700.2,1033-1051).
cagctgactcagagcataa

SEQ ID NO: 507814 - DNA, 19 bp, Mus musculus
  siRNA target sequence for Mapk8 (NM_016700.2,1068-1086).
caggcaagagatttgttat

SEQ ID NO: 507815 - DNA, 19 bp, Mus musculus
  siRNA target sequence for Mapk8 (NM_016700.2,1071-1089).
gcaagagatttgttatcca

SEQ ID NO: 507816 - DNA, 19 bp, Mus musculus
  siRNA target sequence for Mapk8 (NM_016700.2,1072-1090).
caagagatttgttatccaa

SEQ ID NO: 507817 - DNA, 19 bp, Mus musculus
  siRNA target sequence for Mapk8 (NM_016700.2,1087-1105).
ccaaaatgctagtaataga

SEQ ID NO: 507818 - DNA, 19 bp, Mus musculus
  siRNA target sequence for Mapk8 (NM_016700.2,1151-1169).
catcaacgtctggtatgat

SEQ ID NO: 507819 - DNA, 19 bp, Mus musculus
  siRNA target sequence for Mapk8 (NM_016700.2,1160-1178).
ctggtatgatccttcagaa

SEQ ID NO: 507820 - DNA, 19 bp, Mus musculus
  siRNA target sequence for Mapk8 (NM_016700.2,1280-1298).
ggaggaacgaactaagaat

SEQ ID NO: 507821 - DNA, 19 bp, Mus musculus
  siRNA target sequence for Mapk9 (NM_016961.1,27-45).
cgatggtcagttttacagt

SEQ ID NO: 507822 - DNA, 19 bp, Mus musculus
  siRNA target sequence for Mapk9 (NM_016961.1,49-67).
caggtggcggactcaactt

SEQ ID NO: 507823 - DNA, 19 bp, Mus musculus
  siRNA target sequence for Mapk9 (NM_016961.1,54-72).
ggcggactcaactttcact

SEQ ID NO: 507824 - DNA, 19 bp, Mus musculus
  siRNA target sequence for Mapk9 (NM_016961.1,184-202).
cgtccttttcagaaccaaa

SEQ ID NO: 507825 - DNA, 19 bp, Mus musculus
  siRNA target sequence for Mapk9 (NM_016961.1,198-216).
ccaaacgcacgcaaagaga

SEQ ID NO: 507826 - DNA, 19 bp, Mus musculus
  siRNA target sequence for Mapk9 (NM_016961.1,223-241).
cgtgaactcgtcctcttaa

SEQ ID NO: 507827 - DNA, 19 bp, Mus musculus
  siRNA target sequence for Mapk9 (NM_016961.1,224-242).
gtgaactcgtcctcttaaa

SEQ ID NO: 507828 - DNA, 19 bp, Mus musculus
  siRNA target sequence for Mapk9 (NM_016961.1,226-244).
gaactcgtcctcttaaagt

SEQ ID NO: 507829 - DNA, 19 bp, Mus musculus
  siRNA target sequence for Mapk9 (NM_016961.1,337-355).
ctaatggatgctaacttat

SEQ ID NO: 507830 - DNA, 19 bp, Mus musculus
  siRNA target sequence for Mapk9 (NM_016961.1,351-369).
cttatgtcaggttattcat

SEQ ID NO: 507831 - DNA, 19 bp, Mus musculus
  siRNA target sequence for Mapk9 (NM_016961.1,445-463).
ggtatcattcatagagatt

SEQ ID NO: 507832 - DNA, 19 bp, Mus musculus
  siRNA target sequence for Mapk9 (NM_016961.1,468-486).
gcctagcaacattgtagta

SEQ ID NO: 507833 - DNA, 19 bp, Mus musculus
  siRNA target sequence for Mapk9 (NM_016961.1,470-488).
ctagcaacattgtagtaaa

SEQ ID NO: 507834 - DNA, 19 bp, Mus musculus
  siRNA target sequence for Mapk9 (NM_016961.1,474-492).
caacattgtagtaaaatca

SEQ ID NO: 507835 - DNA, 19 bp, Mus musculus
  siRNA target sequence for Mapk9 (NM_016961.1,491-509).
cagactgtaccctcaagat

SEQ ID NO: 507836 - DNA, 19 bp, Mus musculus
  siRNA target sequence for Mapk9 (NM_016961.1,533-551).
cagcctgtaccaactttat

SEQ ID NO: 507837 - DNA, 19 bp, Mus musculus
  siRNA target sequence for Mapk9 (NM_016961.1,535-553).
gcctgtaccaactttatga

SEQ ID NO: 507838 - DNA, 19 bp, Mus musculus
  siRNA target sequence for Mapk9 (NM_016961.1,737-755).
caccatccgcagagttcat

SEQ ID NO: 507839 - DNA, 19 bp, Mus musculus
  siRNA target sequence for Mapk9 (NM_016961.1,759-777).
gaaacttcagccaactgta

SEQ ID NO: 507840 - DNA, 19 bp, Mus musculus
  siRNA target sequence for Mapk9 (NM_016961.1,780-798).
gaattatgtggaaaacaga

SEQ ID NO: 507841 - DNA, 19 bp, Mus musculus
  siRNA target sequence for Mapk9 (NM_016961.1,843-861).
gatatttccgtcagaatct

SEQ ID NO: 507842 - DNA, 19 bp, Mus musculus
  siRNA target sequence for Mapk9 (NM_016961.1,889-907).
gccagagatctgttatcaa

SEQ ID NO: 507843 - DNA, 19 bp, Mus musculus
  siRNA target sequence for Mapk9 (NM_016961.1,953-971).
ccttgcgccacccgtatat

SEQ ID NO: 507844 - DNA, 19 bp, Mus musculus
  siRNA target sequence for Mapk9 (NM_016961.1,954-972).
cttgcgccacccgtatatt

SEQ ID NO: 507845 - DNA, 19 bp, Mus musculus
  siRNA target sequence for Mapk9 (NM_016961.1,957-975).
gcgccacccgtatattact

SEQ ID NO: 507846 - DNA, 19 bp, Mus musculus
  siRNA target sequence for Mapk9 (NM_016961.1,959-977).
gccacccgtatattactgt

SEQ ID NO: 507847 - DNA, 19 bp, Mus musculus
  siRNA target sequence for Mapk9 (NM_016961.1,960-978).
ccacccgtatattactgtt

SEQ ID NO: 507848 - DNA, 19 bp, Mus musculus
  siRNA target sequence for Mapk9 (NM_016961.1,961-979).
cacccgtatattactgttt

SEQ ID NO: 507849 - DNA, 19 bp, Mus musculus
  siRNA target sequence for Mapk9 (NM_016961.1,965-983).
cgtatattactgtttggta

SEQ ID NO: 507850 - DNA, 19 bp, Mus musculus
  siRNA target sequence for Mapk9 (NM_016961.1,966-984).
gtatattactgtttggtat

SEQ ID NO: 507851 - DNA, 19 bp, Mus musculus
  siRNA target sequence for Mapk9 (NM_016961.1,1004-1022).
cgccaccacctcaaattta

SEQ ID NO: 507852 - DNA, 19 bp, Mus musculus
  siRNA target sequence for Mapk9 (NM_016961.1,1005-1023).
gccaccacctcaaatttat

SEQ ID NO: 507853 - DNA, 19 bp, Mus musculus
  siRNA target sequence for Mapk9 (NM_016961.1,1007-1025).
caccacctcaaatttatga

SEQ ID NO: 507854 - DNA, 19 bp, Mus musculus
  siRNA target sequence for Mapk9 (NM_016961.1,1043-1061).
gagagcatgcgattgaaga

SEQ ID NO: 507855 - DNA, 19 bp, Mus musculus
  siRNA target sequence for Mapk9 (NM_016961.1,1064-1082).
ggaaagagctaatttacaa

SEQ ID NO: 507856 - DNA, 19 bp, Mus musculus
  siRNA target sequence for Mapk9 (NM_016961.1,1109-1127).
gcaagaatggggtaaaaga

SEQ ID NO: 507857 - DNA, 19 bp, Mus musculus
  siRNA target sequence for Mapkapk5 (NM_010765.1,742-760).
ggagacctccattttagaa

SEQ ID NO: 507858 - DNA, 19 bp, Mus musculus
  siRNA target sequence for Mapkapk5 (NM_010765.1,761-779).
gaatatagtatcaattgga

SEQ ID NO: 507859 - DNA, 19 bp, Mus musculus
  siRNA target sequence for Mapkapk5 (NM_010765.1,842-860).
gaacggtttgcactgaaaa

SEQ ID NO: 507860 - DNA, 19 bp, Mus musculus
  siRNA target sequence for Mapkapk5 (NM_010765.1,866-884).
cttgatcgtccaaaagcta

SEQ ID NO: 507861 - DNA, 19 bp, Mus musculus
  siRNA target sequence for Mapkapk5 (NM_010765.1,915-933).
ccacacaccccaacatagt

SEQ ID NO: 507862 - DNA, 19 bp, Mus musculus
  siRNA target sequence for Mapkapk5 (NM_010765.1,918-936).
cacaccccaacatagttca

SEQ ID NO: 507863 - DNA, 19 bp, Mus musculus
  siRNA target sequence for Mapkapk5 (NM_010765.1,922-940).
ccccaacatagttcagatt

SEQ ID NO: 507864 - DNA, 19 bp, Mus musculus
  siRNA target sequence for Mapkapk5 (NM_010765.1,924-942).
ccaacatagttcagattat

SEQ ID NO: 507865 - DNA, 19 bp, Mus musculus
  siRNA target sequence for Mapkapk5 (NM_010765.1,925-943).
caacatagttcagattatt

SEQ ID NO: 507866 - DNA, 19 bp, Mus musculus
  siRNA target sequence for Mapkapk5 (NM_010765.1,928-946).
catagttcagattattgaa

SEQ ID NO: 507867 - DNA, 19 bp, Mus musculus
  siRNA target sequence for Mapkapk5 (NM_010765.1,985-1003).
ccccagggctcgactctta

SEQ ID NO: 507868 - DNA, 19 bp, Mus musculus
  siRNA target sequence for Mapkapk5 (NM_010765.1,990-1008).
gggctcgactcttaattgt

SEQ ID NO: 507869 - DNA, 19 bp, Mus musculus
  siRNA target sequence for Mapkapk5 (NM_010765.1,991-1009).
ggctcgactcttaattgta

SEQ ID NO: 507870 - DNA, 19 bp, Mus musculus
  siRNA target sequence for Mapkapk5 (NM_010765.1,992-1010).
gctcgactcttaattgtaa

SEQ ID NO: 507871 - DNA, 19 bp, Mus musculus
  siRNA target sequence for Mapkapk5 (NM_010765.1,993-1011).
ctcgactcttaattgtaat

SEQ ID NO: 507872 - DNA, 19 bp, Mus musculus
  siRNA target sequence for Mapkapk5 (NM_010765.1,1029-1047).
gagagctatttcacagaat

SEQ ID NO: 507873 - DNA, 19 bp, Mus musculus
  siRNA target sequence for Mapkapk5 (NM_010765.1,1031-1049).
gagctatttcacagaatca

SEQ ID NO: 507874 - DNA, 19 bp, Mus musculus
  siRNA target sequence for Mapkapk5 (NM_010765.1,1168-1186).
gcttttcaaggataactct

SEQ ID NO: 507875 - DNA, 19 bp, Mus musculus
  siRNA target sequence for Mapkapk5 (NM_010765.1,1187-1205).
ctggacgcccctgtgaaat

SEQ ID NO: 507876 - DNA, 19 bp, Mus musculus
  siRNA target sequence for Mapkapk5 (NM_010765.1,1189-1207).
ggacgcccctgtgaaatta

SEQ ID NO: 507877 - DNA, 19 bp, Mus musculus
  siRNA target sequence for Mapkapk5 (NM_010765.1,1190-1208).
gacgcccctgtgaaattat

SEQ ID NO: 507878 - DNA, 19 bp, Mus musculus
  siRNA target sequence for Mapkapk5 (NM_010765.1,1192-1210).
cgcccctgtgaaattatgt

SEQ ID NO: 507879 - DNA, 19 bp, Mus musculus
  siRNA target sequence for Mapkapk5 (NM_010765.1,1254-1272).
cccagtttaccccttacta

SEQ ID NO: 507880 - DNA, 19 bp, Mus musculus
  siRNA target sequence for Mapkapk5 (NM_010765.1,1258-1276).
gtttaccccttactatgta

SEQ ID NO: 507881 - DNA, 19 bp, Mus musculus
  siRNA target sequence for Mapkapk5 (NM_010765.1,1341-1359).
cgccaacaccctacactta

SEQ ID NO: 507882 - DNA, 19 bp, Mus musculus
  siRNA target sequence for Mapkapk5 (NM_010765.1,1343-1361).
ccaacaccctacacttaca

SEQ ID NO: 507883 - DNA, 19 bp, Mus musculus
  siRNA target sequence for Mapkapk5 (NM_010765.1,1344-1362).
caacaccctacacttacaa

SEQ ID NO: 507884 - DNA, 19 bp, Mus musculus
  siRNA target sequence for Mapkapk5 (NM_010765.1,1380-1398).
ggtccctaggggtgataat

SEQ ID NO: 507885 - DNA, 19 bp, Mus musculus
  siRNA target sequence for Mapkapk5 (NM_010765.1,1381-1399).
gtccctaggggtgataatt

SEQ ID NO: 507886 - DNA, 19 bp, Mus musculus
  siRNA target sequence for Mapkapk5 (NM_010765.1,1383-1401).
ccctaggggtgataattta

SEQ ID NO: 507887 - DNA, 19 bp, Mus musculus
  siRNA target sequence for Mapkapk5 (NM_010765.1,1384-1402).
cctaggggtgataatttat

SEQ ID NO: 507888 - DNA, 19 bp, Mus musculus
  siRNA target sequence for Mapkapk5 (NM_010765.1,1389-1407).
gggtgataatttatgtgat

SEQ ID NO: 507889 - DNA, 19 bp, Mus musculus
  siRNA target sequence for Mapkapk5 (NM_010765.1,1405-1423).
gatgctgtgcggatatcct

SEQ ID NO: 507890 - DNA, 19 bp, Mus musculus
  siRNA target sequence for Mapkapk5 (NM_010765.1,1411-1429).
gtgcggatatcctcctttt

SEQ ID NO: 507891 - DNA, 19 bp, Mus musculus
  siRNA target sequence for Mapkapk5 (NM_010765.1,1413-1431).
gcggatatcctccttttta

SEQ ID NO: 507892 - DNA, 19 bp, Mus musculus
  siRNA target sequence for Mapkapk5 (NM_010765.1,1463-1481).
gatatgcggaaaaagatca

SEQ ID NO: 507893 - DNA, 19 bp, Mus musculus
  siRNA target sequence for Mapkapk5 (NM_010765.1,1572-1590).
cagaggaaagactcacaat

SEQ ID NO: 507894 - DNA, 19 bp, Mus musculus
  siRNA target sequence for Mapkapk5 (NM_010765.1,1758-1776).
ccctgcactctgtcaacaa

SEQ ID NO: 507895 - DNA, 19 bp, Mus musculus
  siRNA target sequence for Mapkapk5 (NM_010765.1,1813-1831).
gccaaaggacggtatttat

SEQ ID NO: 507896 - DNA, 19 bp, Mus musculus
  siRNA target sequence for Mapkapk5 (NM_010765.1,1835-1853).
cacgaccatgagaatggaa

SEQ ID NO: 507897 - DNA, 19 bp, Mus musculus
  siRNA target sequence for Mapkapk5 (NM_010765.1,1863-1881).
caaatgttgccttggaaaa

SEQ ID NO: 507898 - DNA, 19 bp, Mus musculus
  siRNA target sequence for Mapkapk5 (NM_010765.1,2034-2052).
gccgtggattcacagataa

SEQ ID NO: 507899 - DNA, 19 bp, Mus musculus
  siRNA target sequence for Mark1 (NM_145515.1,44-62).
cgggacacggagaaccata

SEQ ID NO: 507900 - DNA, 19 bp, Mus musculus
  siRNA target sequence for Mark1 (NM_145515.1,70-88).
ggatggctacactgaaaca

SEQ ID NO: 507901 - DNA, 19 bp, Mus musculus
  siRNA target sequence for Mark1 (NM_145515.1,74-92).
ggctacactgaaacacata

SEQ ID NO: 507902 - DNA, 19 bp, Mus musculus
  siRNA target sequence for Mark1 (NM_145515.1,75-93).
gctacactgaaacacatat

SEQ ID NO: 507903 - DNA, 19 bp, Mus musculus
  siRNA target sequence for Mark1 (NM_145515.1,150-168).
cgtcagcgacagatgaaca

SEQ ID NO: 507904 - DNA, 19 bp, Mus musculus
  siRNA target sequence for Mark1 (NM_145515.1,179-197).
ggaaattaccgcttacaga

SEQ ID NO: 507905 - DNA, 19 bp, Mus musculus
  siRNA target sequence for Mark1 (NM_145515.1,212-230).
ggaaattttgccaaagtga

SEQ ID NO: 507906 - DNA, 19 bp, Mus musculus
  siRNA target sequence for Mark1 (NM_145515.1,213-231).
gaaattttgccaaagtgaa

SEQ ID NO: 507907 - DNA, 19 bp, Mus musculus
  siRNA target sequence for Mark1 (NM_145515.1,229-247).
gaaattggcaagacatgtt

SEQ ID NO: 507908 - DNA, 19 bp, Mus musculus
  siRNA target sequence for Mark1 (NM_145515.1,262-280).
ggtcgctgtgaaaataata

SEQ ID NO: 507909 - DNA, 19 bp, Mus musculus
  siRNA target sequence for Mark1 (NM_145515.1,352-370).
ccatcctaacatagtgaaa

SEQ ID NO: 507910 - DNA, 19 bp, Mus musculus
  siRNA target sequence for Mark1 (NM_145515.1,365-383).
gtgaaactgtttgaagtta

SEQ ID NO: 507911 - DNA, 19 bp, Mus musculus
  siRNA target sequence for Mark1 (NM_145515.1,401-419).
ctctatttggtcatggaat

SEQ ID NO: 507912 - DNA, 19 bp, Mus musculus
  siRNA target sequence for Mark1 (NM_145515.1,429-447).
ggggtgaagtctttgatta

SEQ ID NO: 507913 - DNA, 19 bp, Mus musculus
  siRNA target sequence for Mark1 (NM_145515.1,431-449).
ggtgaagtctttgattact

SEQ ID NO: 507914 - DNA, 19 bp, Mus musculus
  siRNA target sequence for Mark1 (NM_145515.1,456-474).
cccacggaagaatgaaaga

SEQ ID NO: 507915 - DNA, 19 bp, Mus musculus
  siRNA target sequence for Mark1 (NM_145515.1,489-507).
ccaaattcaggcagattgt

SEQ ID NO: 507916 - DNA, 19 bp, Mus musculus
  siRNA target sequence for Mark1 (NM_145515.1,490-508).
caaattcaggcagattgta

SEQ ID NO: 507917 - DNA, 19 bp, Mus musculus
  siRNA target sequence for Mark1 (NM_145515.1,1001-1019).
gatgcaaaaagaatagaca

SEQ ID NO: 507918 - DNA, 19 bp, Mus musculus
  siRNA target sequence for Mark1 (NM_145515.1,1054-1072).
caatgatgccttagtaagt

SEQ ID NO: 507919 - DNA, 19 bp, Mus musculus
  siRNA target sequence for Mark1 (NM_145515.1,1061-1079).
gccttagtaagtcagaaat

SEQ ID NO: 507920 - DNA, 19 bp, Mus musculus
  siRNA target sequence for Mark1 (NM_145515.1,1071-1089).
gtcagaaatatgatgaagt

SEQ ID NO: 507921 - DNA, 19 bp, Mus musculus
  siRNA target sequence for Mark1 (NM_145515.1,1182-1200).
cgagcagcgacctgaacaa

SEQ ID NO: 507922 - DNA, 19 bp, Mus musculus
  siRNA target sequence for Mark1 (NM_145515.1,1298-1316).
ccccctgccgtctcataca

SEQ ID NO: 507923 - DNA, 19 bp, Mus musculus
  siRNA target sequence for Mark1 (NM_145515.1,1338-1356).
gcgtggagagtgaacagaa

SEQ ID NO: 507924 - DNA, 19 bp, Mus musculus
  siRNA target sequence for Mark1 (NM_145515.1,1470-1488).
gcccaagtaacaacgtata

SEQ ID NO: 507925 - DNA, 19 bp, Mus musculus
  siRNA target sequence for Mark1 (NM_145515.1,1471-1489).
cccaagtaacaacgtatat

SEQ ID NO: 507926 - DNA, 19 bp, Mus musculus
  siRNA target sequence for Mark1 (NM_145515.1,1472-1490).
ccaagtaacaacgtatatt

SEQ ID NO: 507927 - DNA, 19 bp, Mus musculus
  siRNA target sequence for Mark1 (NM_145515.1,1504-1522).
ggcgaggaggaatacgtat

SEQ ID NO: 507928 - DNA, 19 bp, Mus musculus
  siRNA target sequence for Mark1 (NM_145515.1,1657-1675).
ccaccagaaatctatgtca

SEQ ID NO: 507929 - DNA, 19 bp, Mus musculus
  siRNA target sequence for Mark1 (NM_145515.1,1658-1676).
caccagaaatctatgtcaa

SEQ ID NO: 507930 - DNA, 19 bp, Mus musculus
  siRNA target sequence for Mark1 (NM_145515.1,1677-1695).
cctctggccaccctataaa

SEQ ID NO: 507931 - DNA, 19 bp, Mus musculus
  siRNA target sequence for Mark1 (NM_145515.1,1680-1698).
ctggccaccctataaaagt

SEQ ID NO: 507932 - DNA, 19 bp, Mus musculus
  siRNA target sequence for Mark1 (NM_145515.1,1682-1700).
ggccaccctataaaagtta

SEQ ID NO: 507933 - DNA, 19 bp, Mus musculus
  siRNA target sequence for Mark1 (NM_145515.1,1697-1715).
gttacactgccaaccatta

SEQ ID NO: 507934 - DNA, 19 bp, Mus musculus
  siRNA target sequence for Mark1 (NM_145515.1,2315-2333).
gtccgcttcaagcgaatat

SEQ ID NO: 507935 - DNA, 19 bp, Mus musculus
  siRNA target sequence for Mark1 (NM_145515.1,2317-2335).
ccgcttcaagcgaatatct

SEQ ID NO: 507936 - DNA, 19 bp, Mus musculus
  siRNA target sequence for Mark1 (NM_145515.1,2327-2345).
cgaatatctgggacatcta

SEQ ID NO: 507937 - DNA, 19 bp, Mus musculus
  siRNA target sequence for Mark1 (NM_145515.1,2328-2346).
gaatatctgggacatctat

SEQ ID NO: 507938 - DNA, 19 bp, Mus musculus
  siRNA target sequence for Mark1 (NM_145515.1,2337-2355).
ggacatctattgcctttaa

SEQ ID NO: 507939 - DNA, 19 bp, Mus musculus
  siRNA target sequence for Mark1 (NM_145515.1,2348-2366).
gcctttaagaacattgcat

SEQ ID NO: 507940 - DNA, 19 bp, Mus musculus
  siRNA target sequence for Mark2 (NM_007928.1,245-263).
gcaactaccggctccttaa

SEQ ID NO: 507941 - DNA, 19 bp, Mus musculus
  siRNA target sequence for Mark2 (NM_007928.1,491-509).
gtggcggagaggtgtttga

SEQ ID NO: 507942 - DNA, 19 bp, Mus musculus
  siRNA target sequence for Mark2 (NM_007928.1,493-511).
ggcggagaggtgtttgatt

SEQ ID NO: 507943 - DNA, 19 bp, Mus musculus
  siRNA target sequence for Mark2 (NM_007928.1,522-540).
ccatggcaggatgaaagaa

SEQ ID NO: 507944 - DNA, 19 bp, Mus musculus
  siRNA target sequence for Mark2 (NM_007928.1,554-572).
ccaaatttcgccagatagt

SEQ ID NO: 507945 - DNA, 19 bp, Mus musculus
  siRNA target sequence for Mark2 (NM_007928.1,597-615).
gaagttcattgttcataga

SEQ ID NO: 507946 - DNA, 19 bp, Mus musculus
  siRNA target sequence for Mark2 (NM_007928.1,603-621).
cattgttcatagagatcta

SEQ ID NO: 507947 - DNA, 19 bp, Mus musculus
  siRNA target sequence for Mark2 (NM_007928.1,700-718).
gggaacaagctggatactt

SEQ ID NO: 507948 - DNA, 19 bp, Mus musculus
  siRNA target sequence for Mark2 (NM_007928.1,701-719).
ggaacaagctggatacttt

SEQ ID NO: 507949 - DNA, 19 bp, Mus musculus
  siRNA target sequence for Mark2 (NM_007928.1,720-738).
ctgtggcagtcctccttat

SEQ ID NO: 507950 - DNA, 19 bp, Mus musculus
  siRNA target sequence for Mark2 (NM_007928.1,803-821).
gagtcatcctctatacact

SEQ ID NO: 507951 - DNA, 19 bp, Mus musculus
  siRNA target sequence for Mark2 (NM_007928.1,827-845).
gcggatccctgccttttga

SEQ ID NO: 507952 - DNA, 19 bp, Mus musculus
  siRNA target sequence for Mark2 (NM_007928.1,828-846).
cggatccctgccttttgat

SEQ ID NO: 507953 - DNA, 19 bp, Mus musculus
  siRNA target sequence for Mark2 (NM_007928.1,875-893).
gggtactgagggggaaata

SEQ ID NO: 507954 - DNA, 19 bp, Mus musculus
  siRNA target sequence for Mark2 (NM_007928.1,895-913).
cgtattccgttctacatgt

SEQ ID NO: 507955 - DNA, 19 bp, Mus musculus
  siRNA target sequence for Mark2 (NM_007928.1,962-980).
gtaagagaggcactttaga

SEQ ID NO: 507956 - DNA, 19 bp, Mus musculus
  siRNA target sequence for Mark2 (NM_007928.1,971-989).
gcactttagagcaaattat

SEQ ID NO: 507957 - DNA, 19 bp, Mus musculus
  siRNA target sequence for Mark2 (NM_007928.1,1192-1210).
gaaggtgataccatcactt

SEQ ID NO: 507958 - DNA, 19 bp, Mus musculus
  siRNA target sequence for Mark2 (NM_007928.1,1195-1213).
ggtgataccatcactttga

SEQ ID NO: 507959 - DNA, 19 bp, Mus musculus
  siRNA target sequence for Mark2 (NM_007928.1,1340-1358).
cctcgaattcctactctaa

SEQ ID NO: 507960 - DNA, 19 bp, Mus musculus
  siRNA target sequence for Mark2 (NM_007928.1,1526-1544).
gcaggaactccccactttt

SEQ ID NO: 507961 - DNA, 19 bp, Mus musculus
  siRNA target sequence for Mark2 (NM_007928.1,1529-1547).
ggaactccccacttttgga

SEQ ID NO: 507962 - DNA, 19 bp, Mus musculus
  siRNA target sequence for Mark2 (NM_007928.1,1571-1589).
ccatccagaatggtaaaga

SEQ ID NO: 507963 - DNA, 19 bp, Mus musculus
  siRNA target sequence for Mark2 (NM_007928.1,1719-1737).
ccccacggagagtaactgt

SEQ ID NO: 507964 - DNA, 19 bp, Mus musculus
  siRNA target sequence for Mark2 (NM_007928.1,1817-1835).
gagccccagaccgaactaa

SEQ ID NO: 507965 - DNA, 19 bp, Mus musculus
  siRNA target sequence for Mark2 (NM_007928.1,1819-1837).
gccccagaccgaactaatt

SEQ ID NO: 507966 - DNA, 19 bp, Mus musculus
  siRNA target sequence for Mark2 (NM_007928.1,1820-1838).
ccccagaccgaactaattt

SEQ ID NO: 507967 - DNA, 19 bp, Mus musculus
  siRNA target sequence for Mark2 (NM_007928.1,1893-1911).
gcgggaccagcagaatcta

SEQ ID NO: 507968 - DNA, 19 bp, Mus musculus
  siRNA target sequence for Mark2 (NM_007928.1,2270-2288).
caggccacgagaactttgt

SEQ ID NO: 507969 - DNA, 19 bp, Mus musculus
  siRNA target sequence for Mark3 (NM_021516.1,103-121).
ctttgccaacggtgaatga

SEQ ID NO: 507970 - DNA, 19 bp, Mus musculus
  siRNA target sequence for Mark3 (NM_021516.1,195-213).
gctcggtgtagaaactcaa

SEQ ID NO: 507971 - DNA, 19 bp, Mus musculus
  siRNA target sequence for Mark3 (NM_021516.1,279-297).
gggaactttgcaaaagtga

SEQ ID NO: 507972 - DNA, 19 bp, Mus musculus
  siRNA target sequence for Mark3 (NM_021516.1,324-342).
cgagaggttgcaataaaaa

SEQ ID NO: 507973 - DNA, 19 bp, Mus musculus
  siRNA target sequence for Mark3 (NM_021516.1,362-380).
gaatccaacaagtctacaa

SEQ ID NO: 507974 - DNA, 19 bp, Mus musculus
  siRNA target sequence for Mark3 (NM_021516.1,367-385).
caacaagtctacaaaagct

SEQ ID NO: 507975 - DNA, 19 bp, Mus musculus
  siRNA target sequence for Mark3 (NM_021516.1,437-455).
gttgttcgaagtcattgaa

SEQ ID NO: 507976 - DNA, 19 bp, Mus musculus
  siRNA target sequence for Mark3 (NM_021516.1,496-514).
gaggtgaagtatttgacta

SEQ ID NO: 507977 - DNA, 19 bp, Mus musculus
  siRNA target sequence for Mark3 (NM_021516.1,498-516).
ggtgaagtatttgactatt

SEQ ID NO: 507978 - DNA, 19 bp, Mus musculus
  siRNA target sequence for Mark3 (NM_021516.1,573-591).
gtttccgcagtacagtatt

SEQ ID NO: 507979 - DNA, 19 bp, Mus musculus
  siRNA target sequence for Mark3 (NM_021516.1,626-644).
ggctgaaaatctgttatta

SEQ ID NO: 507980 - DNA, 19 bp, Mus musculus
  siRNA target sequence for Mark3 (NM_021516.1,697-715).
ctgttggcagtaaactaga

SEQ ID NO: 507981 - DNA, 19 bp, Mus musculus
  siRNA target sequence for Mark3 (NM_021516.1,970-988).
ggggcactctcgagcaaat

SEQ ID NO: 507982 - DNA, 19 bp, Mus musculus
  siRNA target sequence for Mark3 (NM_021516.1,972-990).
ggcactctcgagcaaatca

SEQ ID NO: 507983 - DNA, 19 bp, Mus musculus
  siRNA target sequence for Mark3 (NM_021516.1,1142-1160).
gaaatacgatgaaatcaca

SEQ ID NO: 507984 - DNA, 19 bp, Mus musculus
  siRNA target sequence for Mark3 (NM_021516.1,1219-1237).
ctagcagcaacctttcact

SEQ ID NO: 507985 - DNA, 19 bp, Mus musculus
  siRNA target sequence for Mark3 (NM_021516.1,1279-1297).
gccagtctcctcatcacaa

SEQ ID NO: 507986 - DNA, 19 bp, Mus musculus
  siRNA target sequence for Mark3 (NM_021516.1,1350-1368).
gctggaccagctattcctt

SEQ ID NO: 507987 - DNA, 19 bp, Mus musculus
  siRNA target sequence for Mark3 (NM_021516.1,1369-1387).
cagttgtggcatatccaaa

SEQ ID NO: 507988 - DNA, 19 bp, Mus musculus
  siRNA target sequence for Mark3 (NM_021516.1,1397-1415).
gaccagcactgcagatagt

SEQ ID NO: 507989 - DNA, 19 bp, Mus musculus
  siRNA target sequence for Mark3 (NM_021516.1,1596-1614).
cggcggaacacttacgttt

SEQ ID NO: 507990 - DNA, 19 bp, Mus musculus
  siRNA target sequence for Mark3 (NM_021516.1,1639-1657).
gacattctgtgattcagaa

SEQ ID NO: 507991 - DNA, 19 bp, Mus musculus
  siRNA target sequence for Mark3 (NM_021516.1,1649-1667).
gattcagaacggcaaagaa

SEQ ID NO: 507992 - DNA, 19 bp, Mus musculus
  siRNA target sequence for Mark3 (NM_021516.1,1701-1719).
gcttcaacccacagtatta

SEQ ID NO: 507993 - DNA, 19 bp, Mus musculus
  siRNA target sequence for Mark3 (NM_021516.1,1737-1755).
gatcgcatccgctttccaa

SEQ ID NO: 507994 - DNA, 19 bp, Mus musculus
  siRNA target sequence for Mark3 (NM_021516.1,1799-1817).
gcggcgaaccgcaacatat

SEQ ID NO: 507995 - DNA, 19 bp, Mus musculus
  siRNA target sequence for Mark3 (NM_021516.1,1800-1818).
cggcgaaccgcaacatata

SEQ ID NO: 507996 - DNA, 19 bp, Mus musculus
  siRNA target sequence for Mark3 (NM_021516.1,1801-1819).
ggcgaaccgcaacatataa

SEQ ID NO: 507997 - DNA, 19 bp, Mus musculus
  siRNA target sequence for Mark3 (NM_021516.1,1802-1820).
gcgaaccgcaacatataat

SEQ ID NO: 507998 - DNA, 19 bp, Mus musculus
  siRNA target sequence for Mark3 (NM_021516.1,1879-1897).
gccgaggttccactaatct

SEQ ID NO: 507999 - DNA, 19 bp, Mus musculus
  siRNA target sequence for Mark3 (NM_021516.1,1880-1898).
ccgaggttccactaatctt

SEQ ID NO: 508000 - DNA, 19 bp, Mus musculus
  siRNA target sequence for Mark3 (NM_021516.1,1881-1899).
cgaggttccactaatcttt

SEQ ID NO: 508001 - DNA, 19 bp, Mus musculus
  siRNA target sequence for Mark3 (NM_021516.1,1882-1900).
gaggttccactaatctttt

SEQ ID NO: 508002 - DNA, 19 bp, Mus musculus
  siRNA target sequence for Mark3 (NM_021516.1,1889-1907).
cactaatctttttagtaaa

SEQ ID NO: 508003 - DNA, 19 bp, Mus musculus
  siRNA target sequence for Mark3 (NM_021516.1,1932-1950).
cttccaactgaatatgaga

SEQ ID NO: 508004 - DNA, 19 bp, Mus musculus
  siRNA target sequence for Mark3 (NM_021516.1,2189-2207).
ggtacagtgggaaatggaa

SEQ ID NO: 508005 - DNA, 19 bp, Mus musculus
  siRNA target sequence for Mark3 (NM_021516.1,2255-2273).
gatatcagggacatccata

SEQ ID NO: 508006 - DNA, 19 bp, Mus musculus
  siRNA target sequence for Mark3 (NM_021516.1,2260-2278).
cagggacatccatagcttt

SEQ ID NO: 508007 - DNA, 19 bp, Mus musculus
  siRNA target sequence for Mark3 (NM_021516.1,2263-2281).
ggacatccatagctttcaa

SEQ ID NO: 508008 - DNA, 19 bp, Mus musculus
  siRNA target sequence for Mark3 (NM_021516.1,2264-2282).
gacatccatagctttcaaa

SEQ ID NO: 508009 - DNA, 19 bp, Mus musculus
  siRNA target sequence for Mark4 (NM_172279.1,118-136).
gcccgttgccggaactcta

SEQ ID NO: 508010 - DNA, 19 bp, Mus musculus
  siRNA target sequence for Mark4 (NM_172279.1,119-137).
cccgttgccggaactctat

SEQ ID NO: 508011 - DNA, 19 bp, Mus musculus
  siRNA target sequence for Mark4 (NM_172279.1,160-178).
ccccatgtgggcaactata

SEQ ID NO: 508012 - DNA, 19 bp, Mus musculus
  siRNA target sequence for Mark4 (NM_172279.1,247-265).
cgggaggtcgctattaaga

SEQ ID NO: 508013 - DNA, 19 bp, Mus musculus
  siRNA target sequence for Mark4 (NM_172279.1,248-266).
gggaggtcgctattaagat

SEQ ID NO: 508014 - DNA, 19 bp, Mus musculus
  siRNA target sequence for Mark4 (NM_172279.1,252-270).
ggtcgctattaagatcatt

SEQ ID NO: 508015 - DNA, 19 bp, Mus musculus
  siRNA target sequence for Mark4 (NM_172279.1,255-273).
cgctattaagatcattgat

SEQ ID NO: 508016 - DNA, 19 bp, Mus musculus
  siRNA target sequence for Mark4 (NM_172279.1,346-364).
cccaacatcgtgaagcttt

SEQ ID NO: 508017 - DNA, 19 bp, Mus musculus
  siRNA target sequence for Mark4 (NM_172279.1,380-398).
cggagaagacgctatacct

SEQ ID NO: 508018 - DNA, 19 bp, Mus musculus
  siRNA target sequence for Mark4 (NM_172279.1,413-431).
ctagcgcaggagaagtgtt

SEQ ID NO: 508019 - DNA, 19 bp, Mus musculus
  siRNA target sequence for Mark4 (NM_172279.1,572-590).
ccgaggccaacatcaaaat

SEQ ID NO: 508020 - DNA, 19 bp, Mus musculus
  siRNA target sequence for Mark4 (NM_172279.1,854-872).
gcattctgcggagatttct

SEQ ID NO: 508021 - DNA, 19 bp, Mus musculus
  siRNA target sequence for Mark4 (NM_172279.1,987-1005).
cggggacaccaagagaatt

SEQ ID NO: 508022 - DNA, 19 bp, Mus musculus
  siRNA target sequence for Mark4 (NM_172279.1,989-1007).
gggacaccaagagaattga

SEQ ID NO: 508023 - DNA, 19 bp, Mus musculus
  siRNA target sequence for Mark4 (NM_172279.1,1052-1070).
ccttgaccaaccagaagta

SEQ ID NO: 508024 - DNA, 19 bp, Mus musculus
  siRNA target sequence for Mark4 (NM_172279.1,1328-1346).
gagacacggagctcaaaga

SEQ ID NO: 508025 - DNA, 19 bp, Mus musculus
  siRNA target sequence for Mark4 (NM_172279.1,1433-1451).
gtgcccacaaccccaataa

SEQ ID NO: 508026 - DNA, 19 bp, Mus musculus
  siRNA target sequence for Mark4 (NM_172279.1,1511-1529).
gcatgatgacccgaagaaa

SEQ ID NO: 508027 - DNA, 19 bp, Mus musculus
  siRNA target sequence for Mark4 (NM_172279.1,1522-1540).
cgaagaaacacctatgtgt

SEQ ID NO: 508028 - DNA, 19 bp, Mus musculus
  siRNA target sequence for Mark4 (NM_172279.1,1624-1642).
gcctcgccttccagtcata

SEQ ID NO: 508029 - DNA, 19 bp, Mus musculus
  siRNA target sequence for Mark4 (NM_172279.1,1926-1944).
ccatctaccttgggataaa

SEQ ID NO: 508030 - DNA, 19 bp, Mus musculus
  siRNA target sequence for Mark4 (NM_172279.1,1927-1945).
catctaccttgggataaaa

SEQ ID NO: 508031 - DNA, 19 bp, Mus musculus
  siRNA target sequence for Mark4 (NM_172279.1,2121-2139).
gcccctgtcccatttcgaa

SEQ ID NO: 508032 - DNA, 19 bp, Mus musculus
  siRNA target sequence for Mat1a (NM_133653.1,256-274).
gagggagccttcatgttca

SEQ ID NO: 508033 - DNA, 19 bp, Mus musculus
  siRNA target sequence for Mat1a (NM_133653.1,264-282).
cttcatgttcacatcagaa

SEQ ID NO: 508034 - DNA, 19 bp, Mus musculus
  siRNA target sequence for Mat1a (NM_133653.1,267-285).
catgttcacatcagaatct

SEQ ID NO: 508035 - DNA, 19 bp, Mus musculus
  siRNA target sequence for Mat1a (NM_133653.1,292-310).
gaggggcatccagataaga

SEQ ID NO: 508036 - DNA, 19 bp, Mus musculus
  siRNA target sequence for Mat1a (NM_133653.1,295-313).
gggcatccagataagatct

SEQ ID NO: 508037 - DNA, 19 bp, Mus musculus
  siRNA target sequence for Mat1a (NM_133653.1,309-327).
gatctgtgaccagattagt

SEQ ID NO: 508038 - DNA, 19 bp, Mus musculus
  siRNA target sequence for Mat1a (NM_133653.1,572-590).
gtgtccacctagacagaaa

SEQ ID NO: 508039 - DNA, 19 bp, Mus musculus
  siRNA target sequence for Mat1a (NM_133653.1,622-640).
ctgatgtttggctatgcta

SEQ ID NO: 508040 - DNA, 19 bp, Mus musculus
  siRNA target sequence for Mat1a (NM_133653.1,672-690).
catcgtgctcgctcacaaa

SEQ ID NO: 508041 - DNA, 19 bp, Mus musculus
  siRNA target sequence for Mat1a (NM_133653.1,676-694).
gtgctcgctcacaaactca

SEQ ID NO: 508042 - DNA, 19 bp, Mus musculus
  siRNA target sequence for Mat1a (NM_133653.1,737-755).
ggctgagacctgattctaa

SEQ ID NO: 508043 - DNA, 19 bp, Mus musculus
  siRNA target sequence for Mat1a (NM_133653.1,774-792).
gtacatgcaggataatggt

SEQ ID NO: 508044 - DNA, 19 bp, Mus musculus
  siRNA target sequence for Mat1a (NM_133653.1,948-966).
gccaagtgggcggtttgtt

SEQ ID NO: 508045 - DNA, 19 bp, Mus musculus
  siRNA target sequence for Mat1a (NM_133653.1,949-967).
ccaagtgggcggtttgtta

SEQ ID NO: 508046 - DNA, 19 bp, Mus musculus
  siRNA target sequence for Mat1a (NM_133653.1,1145-1163).
gccggagagtgcttgttca

SEQ ID NO: 508047 - DNA, 19 bp, Mus musculus
  siRNA target sequence for Mat1a (NM_133653.1,1186-1204).
gcagaacctctgtccattt

SEQ ID NO: 508048 - DNA, 19 bp, Mus musculus
  siRNA target sequence for Mat1a (NM_133653.1,1218-1236).
cgggacctccaataagact

SEQ ID NO: 508049 - DNA, 19 bp, Mus musculus
  siRNA target sequence for Mat1a (NM_133653.1,1275-1293).
ccttcggcctggtgttatt

SEQ ID NO: 508050 - DNA, 19 bp, Mus musculus
  siRNA target sequence for Mat1a (NM_133653.1,1279-1297).
cggcctggtgttattgtca

SEQ ID NO: 508051 - DNA, 19 bp, Mus musculus
  siRNA target sequence for Mat2a (NM_145569.2,144-162).
cttccacgaggcgttcatt

SEQ ID NO: 508052 - DNA, 19 bp, Mus musculus
  siRNA target sequence for Mat2a (NM_145569.2,1053-1071).
gtgcaggagggttcttgtt

SEQ ID NO: 508053 - DNA, 19 bp, Mus musculus
  siRNA target sequence for Mat2a (NM_145569.2,1074-1092).
ggtctcttatgctattgga

SEQ ID NO: 508054 - DNA, 19 bp, Mus musculus
  siRNA target sequence for Mat2a (NM_145569.2,1103-1121).
cattgtcgatctccatttt

SEQ ID NO: 508055 - DNA, 19 bp, Mus musculus
  siRNA target sequence for Mat2a (NM_145569.2,1107-1125).
gtcgatctccattttccat

SEQ ID NO: 508056 - DNA, 19 bp, Mus musculus
  siRNA target sequence for Mat2a (NM_145569.2,1109-1127).
cgatctccattttccatta

SEQ ID NO: 508057 - DNA, 19 bp, Mus musculus
  siRNA target sequence for Matk (NM_010768.1,162-180).
ctcgggtgagccctagatt

SEQ ID NO: 508058 - DNA, 19 bp, Mus musculus
  siRNA target sequence for Matk (NM_010768.1,164-182).
cgggtgagccctagattgt

SEQ ID NO: 508059 - DNA, 19 bp, Mus musculus
  siRNA target sequence for Matk (NM_010768.1,165-183).
gggtgagccctagattgtt

SEQ ID NO: 508060 - DNA, 19 bp, Mus musculus
  siRNA target sequence for Matk (NM_010768.1,234-252).
cccctgggactcaatgcat

SEQ ID NO: 508061 - DNA, 19 bp, Mus musculus
  siRNA target sequence for Matk (NM_010768.1,284-302).
ggtgagctagcctttcgaa

SEQ ID NO: 508062 - DNA, 19 bp, Mus musculus
  siRNA target sequence for Matk (NM_010768.1,442-460).
cagcctcatgccatggttt

SEQ ID NO: 508063 - DNA, 19 bp, Mus musculus
  siRNA target sequence for Matk (NM_010768.1,543-561).
gtcaccctggagactatgt

SEQ ID NO: 508064 - DNA, 19 bp, Mus musculus
  siRNA target sequence for Matk (NM_010768.1,592-610).
ccactaccgtgttttgcat

SEQ ID NO: 508065 - DNA, 19 bp, Mus musculus
  siRNA target sequence for Matk (NM_010768.1,632-650).
gatgaggccgtgtgtttct

SEQ ID NO: 508066 - DNA, 19 bp, Mus musculus
  siRNA target sequence for Matk (NM_010768.1,635-653).
gaggccgtgtgtttctgta

SEQ ID NO: 508067 - DNA, 19 bp, Mus musculus
  siRNA target sequence for Matk (NM_010768.1,727-745).
gaaacagggcgcaaagtct

SEQ ID NO: 508068 - DNA, 19 bp, Mus musculus
  siRNA target sequence for Matk (NM_010768.1,977-995).
ctgcaccacggcttgtaca

SEQ ID NO: 508069 - DNA, 19 bp, Mus musculus
  siRNA target sequence for Matk (NM_010768.1,979-997).
gcaccacggcttgtacatt

SEQ ID NO: 508070 - DNA, 19 bp, Mus musculus
  siRNA target sequence for Matk (NM_010768.1,983-1001).
cacggcttgtacattgtca

SEQ ID NO: 508071 - DNA, 19 bp, Mus musculus
  siRNA target sequence for Matk (NM_010768.1,1303-1321).
gtcggatgtctggagtttt

SEQ ID NO: 508072 - DNA, 19 bp, Mus musculus
  siRNA target sequence for Matk (NM_010768.1,1336-1354).
ggaagtcttctcttatgga

SEQ ID NO: 508073 - DNA, 19 bp, Mus musculus
  siRNA target sequence for Matk (NM_010768.1,1377-1395).
cgctaaaggaggtttcaga

SEQ ID NO: 508074 - DNA, 19 bp, Mus musculus
  siRNA target sequence for Matk (NM_010768.1,1494-1512).
gaccacccttccgcaaaat

SEQ ID NO: 508075 - DNA, 19 bp, Mus musculus
  siRNA target sequence for Mccc1 (NM_023644.2,164-182).
gaatgggcttggaagttga

SEQ ID NO: 508076 - DNA, 19 bp, Mus musculus
  siRNA target sequence for Mccc1 (NM_023644.2,178-196).
gttgagaaccatgaagtat

SEQ ID NO: 508077 - DNA, 19 bp, Mus musculus
  siRNA target sequence for Mccc1 (NM_023644.2,222-240).
ccaaggtcctcattgcaaa

SEQ ID NO: 508078 - DNA, 19 bp, Mus musculus
  siRNA target sequence for Mccc1 (NM_023644.2,254-272).
gcctgcagggtgatacgaa

SEQ ID NO: 508079 - DNA, 19 bp, Mus musculus
  siRNA target sequence for Mccc1 (NM_023644.2,314-332).
gaggccgaccggaattcca

SEQ ID NO: 508080 - DNA, 19 bp, Mus musculus
  siRNA target sequence for Mccc1 (NM_023644.2,347-365).
gcagacgaggcatattcca

SEQ ID NO: 508081 - DNA, 19 bp, Mus musculus
  siRNA target sequence for Mccc1 (NM_023644.2,348-366).
cagacgaggcatattccat

SEQ ID NO: 508082 - DNA, 19 bp, Mus musculus
  siRNA target sequence for Mccc1 (NM_023644.2,395-413).
ctcgcaatggagaaaatca

SEQ ID NO: 508083 - DNA, 19 bp, Mus musculus
  siRNA target sequence for Mccc1 (NM_023644.2,397-415).
cgcaatggagaaaatcatt

SEQ ID NO: 508084 - DNA, 19 bp, Mus musculus
  siRNA target sequence for Mccc1 (NM_023644.2,399-417).
caatggagaaaatcattca

SEQ ID NO: 508085 - DNA, 19 bp, Mus musculus
  siRNA target sequence for Mccc1 (NM_023644.2,527-545).
cctccttcgtctgcaatta

SEQ ID NO: 508086 - DNA, 19 bp, Mus musculus
  siRNA target sequence for Mccc1 (NM_023644.2,531-549).
cttcgtctgcaattagaga

SEQ ID NO: 508087 - DNA, 19 bp, Mus musculus
  siRNA target sequence for Mccc1 (NM_023644.2,668-686).
gggtatcctgttatgatca

SEQ ID NO: 508088 - DNA, 19 bp, Mus musculus
  siRNA target sequence for Mccc1 (NM_023644.2,669-687).
ggtatcctgttatgatcaa

SEQ ID NO: 508089 - DNA, 19 bp, Mus musculus
  siRNA target sequence for Mccc1 (NM_023644.2,725-743).
gttagatcagagagagaat

SEQ ID NO: 508090 - DNA, 19 bp, Mus musculus
  siRNA target sequence for Mccc1 (NM_023644.2,729-747).
gatcagagagagaattcca

SEQ ID NO: 508091 - DNA, 19 bp, Mus musculus
  siRNA target sequence for Mccc1 (NM_023644.2,777-795).
cgaagaagtctttcaatga

SEQ ID NO: 508092 - DNA, 19 bp, Mus musculus
  siRNA target sequence for Mccc1 (NM_023644.2,801-819).
caatgttgatcgagaagtt

SEQ ID NO: 508093 - DNA, 19 bp, Mus musculus
  siRNA target sequence for Mccc1 (NM_023644.2,870-888).
gcaacgcagtgtacttgtt

SEQ ID NO: 508094 - DNA, 19 bp, Mus musculus
  siRNA target sequence for Mccc1 (NM_023644.2,871-889).
caacgcagtgtacttgttt

SEQ ID NO: 508095 - DNA, 19 bp, Mus musculus
  siRNA target sequence for Mccc1 (NM_023644.2,875-893).
gcagtgtacttgtttgaaa

SEQ ID NO: 508096 - DNA, 19 bp, Mus musculus
  siRNA target sequence for Mccc1 (NM_023644.2,937-955).
ggccccagcgcctggtatt

SEQ ID NO: 508097 - DNA, 19 bp, Mus musculus
  siRNA target sequence for Mccc1 (NM_023644.2,938-956).
gccccagcgcctggtatta

SEQ ID NO: 508098 - DNA, 19 bp, Mus musculus
  siRNA target sequence for Mccc1 (NM_023644.2,939-957).
ccccagcgcctggtattaa

SEQ ID NO: 508099 - DNA, 19 bp, Mus musculus
  siRNA target sequence for Mccc1 (NM_023644.2,940-958).
cccagcgcctggtattaat

SEQ ID NO: 508100 - DNA, 19 bp, Mus musculus
  siRNA target sequence for Mccc1 (NM_023644.2,1215-1233).
cctttgaggctagaatcta

SEQ ID NO: 508101 - DNA, 19 bp, Mus musculus
  siRNA target sequence for Mccc1 (NM_023644.2,1216-1234).
ctttgaggctagaatctat

SEQ ID NO: 508102 - DNA, 19 bp, Mus musculus
  siRNA target sequence for Mccc1 (NM_023644.2,1269-1287).
ctggaccgttggttcatct

SEQ ID NO: 508103 - DNA, 19 bp, Mus musculus
  siRNA target sequence for Mccc1 (NM_023644.2,1306-1324).
catgtctacgaggattgaa

SEQ ID NO: 508104 - DNA, 19 bp, Mus musculus
  siRNA target sequence for Mccc1 (NM_023644.2,1428-1446).
ggtactgccttcatcagta

SEQ ID NO: 508105 - DNA, 19 bp, Mus musculus
  siRNA target sequence for Mccc1 (NM_023644.2,1434-1452).
gccttcatcagtacaacat

SEQ ID NO: 508106 - DNA, 19 bp, Mus musculus
  siRNA target sequence for Mccc1 (NM_023644.2,1435-1453).
ccttcatcagtacaacatt

SEQ ID NO: 508107 - DNA, 19 bp, Mus musculus
  siRNA target sequence for Mccc1 (NM_023644.2,1634-1652).
gaaatgaccagcgctttta

SEQ ID NO: 508108 - DNA, 19 bp, Mus musculus
  siRNA target sequence for Mccc1 (NM_023644.2,1655-1673).
ctccacactcaagatcaat

SEQ ID NO: 508109 - DNA, 19 bp, Mus musculus
  siRNA target sequence for Mccc1 (NM_023644.2,1699-1717).
gagaagactgaatatctct

SEQ ID NO: 508110 - DNA, 19 bp, Mus musculus
  siRNA target sequence for Mccc1 (NM_023644.2,1701-1719).
gaagactgaatatctctta

SEQ ID NO: 508111 - DNA, 19 bp, Mus musculus
  siRNA target sequence for Mccc1 (NM_023644.2,1743-1761).
gtggtaaaagtgatatagt

SEQ ID NO: 508112 - DNA, 19 bp, Mus musculus
  siRNA target sequence for Mccc1 (NM_023644.2,1745-1763).
ggtaaaagtgatatagtca

SEQ ID NO: 508113 - DNA, 19 bp, Mus musculus
  siRNA target sequence for Mccc1 (NM_023644.2,1780-1798).
ccgcgatgggtcatatgat

SEQ ID NO: 508114 - DNA, 19 bp, Mus musculus
  siRNA target sequence for Mccc1 (NM_023644.2,1781-1799).
cgcgatgggtcatatgata

SEQ ID NO: 508115 - DNA, 19 bp, Mus musculus
  siRNA target sequence for Mccc1 (NM_023644.2,1782-1800).
gcgatgggtcatatgatat

SEQ ID NO: 508116 - DNA, 19 bp, Mus musculus
  siRNA target sequence for Mccc1 (NM_023644.2,1791-1809).
catatgatatgcagattga

SEQ ID NO: 508117 - DNA, 19 bp, Mus musculus
  siRNA target sequence for Mccc1 (NM_023644.2,1823-1841).
cgagtcctgggcgatcttt

SEQ ID NO: 508118 - DNA, 19 bp, Mus musculus
  siRNA target sequence for Mccc1 (NM_023644.2,1861-1879).
ctacctgaagtcttctatt

SEQ ID NO: 508119 - DNA, 19 bp, Mus musculus
  siRNA target sequence for Mccc1 (NM_023644.2,1864-1882).
cctgaagtcttctattaat

SEQ ID NO: 508120 - DNA, 19 bp, Mus musculus
  siRNA target sequence for Mccc1 (NM_023644.2,1883-1901).
ggggtagcccgtaaatcca

SEQ ID NO: 508121 - DNA, 19 bp, Mus musculus
  siRNA target sequence for Mccc1 (NM_023644.2,1884-1902).
gggtagcccgtaaatccaa

SEQ ID NO: 508122 - DNA, 19 bp, Mus musculus
  siRNA target sequence for Mccc1 (NM_023644.2,1889-1907).
gcccgtaaatccaagttca

SEQ ID NO: 508123 - DNA, 19 bp, Mus musculus
  siRNA target sequence for Mccc1 (NM_023644.2,1890-1908).
cccgtaaatccaagttcat

SEQ ID NO: 508124 - DNA, 19 bp, Mus musculus
  siRNA target sequence for Mccc1 (NM_023644.2,2099-2117).
gttatgattgccatgaaga

SEQ ID NO: 508125 - DNA, 19 bp, Mus musculus
  siRNA target sequence for Mccc1 (NM_023644.2,2113-2131).
gaagatggagcataccata

SEQ ID NO: 508126 - DNA, 19 bp, Mus musculus
  siRNA target sequence for Mccc1 (NM_023644.2,2138-2156).
ccaaaggatggcaggataa

SEQ ID NO: 508127 - DNA, 19 bp, Mus musculus
  siRNA target sequence for Melk (NM_010790.2,207-225).
gacgaactcctcaaatact

SEQ ID NO: 508128 - DNA, 19 bp, Mus musculus
  siRNA target sequence for Melk (NM_010790.2,215-233).
cctcaaatactatgaacta

SEQ ID NO: 508129 - DNA, 19 bp, Mus musculus
  siRNA target sequence for Melk (NM_010790.2,216-234).
ctcaaatactatgaactat

SEQ ID NO: 508130 - DNA, 19 bp, Mus musculus
  siRNA target sequence for Melk (NM_010790.2,246-264).
gggacaggtggctttgcaa

SEQ ID NO: 508131 - DNA, 19 bp, Mus musculus
  siRNA target sequence for Melk (NM_010790.2,247-265).
ggacaggtggctttgcaaa

SEQ ID NO: 508132 - DNA, 19 bp, Mus musculus
  siRNA target sequence for Melk (NM_010790.2,256-274).
gctttgcaaaggtcaaact

SEQ ID NO: 508133 - DNA, 19 bp, Mus musculus
  siRNA target sequence for Melk (NM_010790.2,307-325).
ctataaaaatcatggataa

SEQ ID NO: 508134 - DNA, 19 bp, Mus musculus
  siRNA target sequence for Melk (NM_010790.2,342-360).
gatttgccccgagtcaaaa

SEQ ID NO: 508135 - DNA, 19 bp, Mus musculus
  siRNA target sequence for Melk (NM_010790.2,471-489).
gagctgtttgactacataa

SEQ ID NO: 508136 - DNA, 19 bp, Mus musculus
  siRNA target sequence for Melk (NM_010790.2,524-542).
ggtcgtcttccgtcagata

SEQ ID NO: 508137 - DNA, 19 bp, Mus musculus
  siRNA target sequence for Melk (NM_010790.2,528-546).
gtcttccgtcagatactgt

SEQ ID NO: 508138 - DNA, 19 bp, Mus musculus
  siRNA target sequence for Melk (NM_010790.2,887-905).
gctctctcccagtagcatt

SEQ ID NO: 508139 - DNA, 19 bp, Mus musculus
  siRNA target sequence for Melk (NM_010790.2,937-955).
caaagaaacggatttctat

SEQ ID NO: 508140 - DNA, 19 bp, Mus musculus
  siRNA target sequence for Melk (NM_010790.2,941-959).
gaaacggatttctatgaga

SEQ ID NO: 508141 - DNA, 19 bp, Mus musculus
  siRNA target sequence for Melk (NM_010790.2,975-993).
ccctgggtcatgcaagatt

SEQ ID NO: 508142 - DNA, 19 bp, Mus musculus
  siRNA target sequence for Melk (NM_010790.2,1051-1069).
gcgtgacagagctttctgt

SEQ ID NO: 508143 - DNA, 19 bp, Mus musculus
  siRNA target sequence for Melk (NM_010790.2,1055-1073).
gacagagctttctgtacat

SEQ ID NO: 508144 - DNA, 19 bp, Mus musculus
  siRNA target sequence for Melk (NM_010790.2,1057-1075).
cagagctttctgtacatca

SEQ ID NO: 508145 - DNA, 19 bp, Mus musculus
  siRNA target sequence for Melk (NM_010790.2,1222-1240).
gcaccactccaaagtcaaa

SEQ ID NO: 508146 - DNA, 19 bp, Mus musculus
  siRNA target sequence for Melk (NM_010790.2,1265-1283).
cacaagtgatgataactgt

SEQ ID NO: 508147 - DNA, 19 bp, Mus musculus
  siRNA target sequence for Melk (NM_010790.2,1286-1304).
ggctggattgatagactat

SEQ ID NO: 508148 - DNA, 19 bp, Mus musculus
  siRNA target sequence for Melk (NM_010790.2,1288-1306).
ctggattgatagactatga

SEQ ID NO: 508149 - DNA, 19 bp, Mus musculus
  siRNA target sequence for Melk (NM_010790.2,1290-1308).
ggattgatagactatgaat

SEQ ID NO: 508150 - DNA, 19 bp, Mus musculus
  siRNA target sequence for Melk (NM_010790.2,1369-1387).
caaatcacgcagcatctaa

SEQ ID NO: 508151 - DNA, 19 bp, Mus musculus
  siRNA target sequence for Melk (NM_010790.2,1407-1425).
cgcagagcagtggcaaata

SEQ ID NO: 508152 - DNA, 19 bp, Mus musculus
  siRNA target sequence for Melk (NM_010790.2,1408-1426).
gcagagcagtggcaaataa

SEQ ID NO: 508153 - DNA, 19 bp, Mus musculus
  siRNA target sequence for Melk (NM_010790.2,1409-1427).
cagagcagtggcaaataaa

SEQ ID NO: 508154 - DNA, 19 bp, Mus musculus
  siRNA target sequence for Melk (NM_010790.2,1472-1490).
gaatgaagagcagtttgta

SEQ ID NO: 508155 - DNA, 19 bp, Mus musculus
  siRNA target sequence for Melk (NM_010790.2,1499-1517).
gccgaagattccagttagt

SEQ ID NO: 508156 - DNA, 19 bp, Mus musculus
  siRNA target sequence for Melk (NM_010790.2,1500-1518).
ccgaagattccagttagta

SEQ ID NO: 508157 - DNA, 19 bp, Mus musculus
  siRNA target sequence for Melk (NM_010790.2,1501-1519).
cgaagattccagttagtaa

SEQ ID NO: 508158 - DNA, 19 bp, Mus musculus
  siRNA target sequence for Melk (NM_010790.2,1512-1530).
gttagtaagaaccagtata

SEQ ID NO: 508159 - DNA, 19 bp, Mus musculus
  siRNA target sequence for Melk (NM_010790.2,1523-1541).
ccagtataagagagaaata

SEQ ID NO: 508160 - DNA, 19 bp, Mus musculus
  siRNA target sequence for Melk (NM_010790.2,1562-1580).
cccaacacctgcaaaagct

SEQ ID NO: 508161 - DNA, 19 bp, Mus musculus
  siRNA target sequence for Melk (NM_010790.2,1644-1662).
ctaacgacaggtgtcatta

SEQ ID NO: 508162 - DNA, 19 bp, Mus musculus
  siRNA target sequence for Melk (NM_010790.2,1684-1702).
caatggacgtggatctcaa

SEQ ID NO: 508163 - DNA, 19 bp, Mus musculus
  siRNA target sequence for Melk (NM_010790.2,1718-1736).
ggataccccgaaaaagaaa

SEQ ID NO: 508164 - DNA, 19 bp, Mus musculus
  siRNA target sequence for Melk (NM_010790.2,1838-1856).
gcgaaagctgcactacaat

SEQ ID NO: 508165 - DNA, 19 bp, Mus musculus
  siRNA target sequence for Melk (NM_010790.2,1840-1858).
gaaagctgcactacaatgt

SEQ ID NO: 508166 - DNA, 19 bp, Mus musculus
  siRNA target sequence for Melk (NM_010790.2,1850-1868).
ctacaatgtgactacaact

SEQ ID NO: 508167 - DNA, 19 bp, Mus musculus
  siRNA target sequence for Melk (NM_010790.2,1897-1915).
gcgaaatcatggctattct

SEQ ID NO: 508168 - DNA, 19 bp, Mus musculus
  siRNA target sequence for Melk (NM_010790.2,1898-1916).
cgaaatcatggctattctt

SEQ ID NO: 508169 - DNA, 19 bp, Mus musculus
  siRNA target sequence for Melk (NM_010790.2,1928-1946).
cgtggacttcgtacagaaa

SEQ ID NO: 508170 - DNA, 19 bp, Mus musculus
  siRNA target sequence for Melk (NM_010790.2,1932-1950).
gacttcgtacagaaaggtt

SEQ ID NO: 508171 - DNA, 19 bp, Mus musculus
  siRNA target sequence for Melk (NM_010790.2,1937-1955).
cgtacagaaaggttacact

SEQ ID NO: 508172 - DNA, 19 bp, Mus musculus
  siRNA target sequence for Melk (NM_010790.2,2067-2085).
ggtgatgcctgggtttaca

SEQ ID NO: 508173 - DNA, 19 bp, Mus musculus
  siRNA target sequence for Melk (NM_010790.2,2068-2086).
gtgatgcctgggtttacaa

SEQ ID NO: 508174 - DNA, 19 bp, Mus musculus
  siRNA target sequence for Melk (NM_010790.2,2074-2092).
cctgggtttacaagagatt

SEQ ID NO: 508175 - DNA, 19 bp, Mus musculus
  siRNA target sequence for Melk (NM_010790.2,2075-2093).
ctgggtttacaagagatta

SEQ ID NO: 508176 - DNA, 19 bp, Mus musculus
  siRNA target sequence for Melk (NM_010790.2,2077-2095).
gggtttacaagagattagt

SEQ ID NO: 508177 - DNA, 19 bp, Mus musculus
  siRNA target sequence for Mertk (NM_008587.1,132-150).
ccgagctagatcagctatt

SEQ ID NO: 508178 - DNA, 19 bp, Mus musculus
  siRNA target sequence for Mertk (NM_008587.1,133-151).
cgagctagatcagctattt

SEQ ID NO: 508179 - DNA, 19 bp, Mus musculus
  siRNA target sequence for Mertk (NM_008587.1,136-154).
gctagatcagctattttca

SEQ ID NO: 508180 - DNA, 19 bp, Mus musculus
  siRNA target sequence for Mertk (NM_008587.1,306-324).
ctcctgttgcgtttaatca

SEQ ID NO: 508181 - DNA, 19 bp, Mus musculus
  siRNA target sequence for Mertk (NM_008587.1,308-326).
cctgttgcgtttaatcaca

SEQ ID NO: 508182 - DNA, 19 bp, Mus musculus
  siRNA target sequence for Mertk (NM_008587.1,327-345).
ccattggacacatagtact

SEQ ID NO: 508183 - DNA, 19 bp, Mus musculus
  siRNA target sequence for Mertk (NM_008587.1,341-359).
gtactgtcggaacataaaa

SEQ ID NO: 508184 - DNA, 19 bp, Mus musculus
  siRNA target sequence for Mertk (NM_008587.1,389-407).
cctaacacataccaagaaa

SEQ ID NO: 508185 - DNA, 19 bp, Mus musculus
  siRNA target sequence for Mertk (NM_008587.1,415-433).
catttcatggtggaaagat

SEQ ID NO: 508186 - DNA, 19 bp, Mus musculus
  siRNA target sequence for Mertk (NM_008587.1,445-463).
gctcggggcacatcattca

SEQ ID NO: 508187 - DNA, 19 bp, Mus musculus
  siRNA target sequence for Mertk (NM_008587.1,446-464).
ctcggggcacatcattcaa

SEQ ID NO: 508188 - DNA, 19 bp, Mus musculus
  siRNA target sequence for Mertk (NM_008587.1,449-467).
ggggcacatcattcaatca

SEQ ID NO: 508189 - DNA, 19 bp, Mus musculus
  siRNA target sequence for Mertk (NM_008587.1,451-469).
ggcacatcattcaatcaca

SEQ ID NO: 508190 - DNA, 19 bp, Mus musculus
  siRNA target sequence for Mertk (NM_008587.1,482-500).
gatgaggaaggggtatcaa

SEQ ID NO: 508191 - DNA, 19 bp, Mus musculus
  siRNA target sequence for Mertk (NM_008587.1,487-505).
ggaaggggtatcaataatt

SEQ ID NO: 508192 - DNA, 19 bp, Mus musculus
  siRNA target sequence for Mertk (NM_008587.1,491-509).
ggggtatcaataattgcat

SEQ ID NO: 508193 - DNA, 19 bp, Mus musculus
  siRNA target sequence for Mertk (NM_008587.1,539-557).
gacaatgggtcgtacttct

SEQ ID NO: 508194 - DNA, 19 bp, Mus musculus
  siRNA target sequence for Mertk (NM_008587.1,546-564).
ggtcgtacttctgtaagat

SEQ ID NO: 508195 - DNA, 19 bp, Mus musculus
  siRNA target sequence for Mertk (NM_008587.1,558-576).
gtaagatgaaggtgaacaa

SEQ ID NO: 508196 - DNA, 19 bp, Mus musculus
  siRNA target sequence for Mertk (NM_008587.1,562-580).
gatgaaggtgaacaataga

SEQ ID NO: 508197 - DNA, 19 bp, Mus musculus
  siRNA target sequence for Mertk (NM_008587.1,574-592).
caatagagagattgtatct

SEQ ID NO: 508198 - DNA, 19 bp, Mus musculus
  siRNA target sequence for Mertk (NM_008587.1,597-615).
ccatatacgtggaagttca

SEQ ID NO: 508199 - DNA, 19 bp, Mus musculus
  siRNA target sequence for Mertk (NM_008587.1,598-616).
catatacgtggaagttcaa

SEQ ID NO: 508200 - DNA, 19 bp, Mus musculus
  siRNA target sequence for Mertk (NM_008587.1,614-632).
caaggactcccttacttta

SEQ ID NO: 508201 - DNA, 19 bp, Mus musculus
  siRNA target sequence for Mertk (NM_008587.1,618-636).
gactcccttactttattaa

SEQ ID NO: 508202 - DNA, 19 bp, Mus musculus
  siRNA target sequence for Mertk (NM_008587.1,637-655).
gcagcctgagagtgtgaat

SEQ ID NO: 508203 - DNA, 19 bp, Mus musculus
  siRNA target sequence for Mertk (NM_008587.1,701-719).
cctcctgagcccgtcaata

SEQ ID NO: 508204 - DNA, 19 bp, Mus musculus
  siRNA target sequence for Mertk (NM_008587.1,705-723).
ctgagcccgtcaatatctt

SEQ ID NO: 508205 - DNA, 19 bp, Mus musculus
  siRNA target sequence for Mertk (NM_008587.1,707-725).
gagcccgtcaatatcttct

SEQ ID NO: 508206 - DNA, 19 bp, Mus musculus
  siRNA target sequence for Mertk (NM_008587.1,738-756).
gcagccgtgttaatgaaaa

SEQ ID NO: 508207 - DNA, 19 bp, Mus musculus
  siRNA target sequence for Mertk (NM_008587.1,847-865).
ggtgtccaagggtgtacat

SEQ ID NO: 508208 - DNA, 19 bp, Mus musculus
  siRNA target sequence for Mertk (NM_008587.1,863-881).
catatcaacatcaaagtaa

SEQ ID NO: 508209 - DNA, 19 bp, Mus musculus
  siRNA target sequence for Mertk (NM_008587.1,942-960).
cctgggtccctggttttga

SEQ ID NO: 508210 - DNA, 19 bp, Mus musculus
  siRNA target sequence for Mertk (NM_008587.1,943-961).
ctgggtccctggttttgat

SEQ ID NO: 508211 - DNA, 19 bp, Mus musculus
  siRNA target sequence for Mertk (NM_008587.1,1022-1040).
ggctcagtcatggttttta

SEQ ID NO: 508212 - DNA, 19 bp, Mus musculus
  siRNA target sequence for Mertk (NM_008587.1,1024-1042).
ctcagtcatggtttttaat

SEQ ID NO: 508213 - DNA, 19 bp, Mus musculus
  siRNA target sequence for Mertk (NM_008587.1,1050-1068).
cttcgccacatctgtatga

SEQ ID NO: 508214 - DNA, 19 bp, Mus musculus
  siRNA target sequence for Mertk (NM_008587.1,1053-1071).
cgccacatctgtatgagat

SEQ ID NO: 508215 - DNA, 19 bp, Mus musculus
  siRNA target sequence for Mertk (NM_008587.1,1082-1100).
caagccctggctaattaca

SEQ ID NO: 508216 - DNA, 19 bp, Mus musculus
  siRNA target sequence for Mertk (NM_008587.1,1111-1129).
gtcctgtcggaatgagatt

SEQ ID NO: 508217 - DNA, 19 bp, Mus musculus
  siRNA target sequence for Mertk (NM_008587.1,1182-1200).
catctgtagcacctttaaa

SEQ ID NO: 508218 - DNA, 19 bp, Mus musculus
  siRNA target sequence for Mertk (NM_008587.1,1185-1203).
ctgtagcacctttaaacat

SEQ ID NO: 508219 - DNA, 19 bp, Mus musculus
  siRNA target sequence for Mertk (NM_008587.1,1187-1205).
gtagcacctttaaacatca

SEQ ID NO: 508220 - DNA, 19 bp, Mus musculus
  siRNA target sequence for Mertk (NM_008587.1,1248-1266).
ggacgaagcctccaattaa

SEQ ID NO: 508221 - DNA, 19 bp, Mus musculus
  siRNA target sequence for Mertk (NM_008587.1,1285-1303).
ggtgggctaccggatatct

SEQ ID NO: 508222 - DNA, 19 bp, Mus musculus
  siRNA target sequence for Mertk (NM_008587.1,1313-1331).
gaaagcgcagggacttaca

SEQ ID NO: 508223 - DNA, 19 bp, Mus musculus
  siRNA target sequence for Mertk (NM_008587.1,1317-1335).
gcgcagggacttacaaaga

SEQ ID NO: 508224 - DNA, 19 bp, Mus musculus
  siRNA target sequence for Mertk (NM_008587.1,1456-1474).
gccagtgaatatcatcatt

SEQ ID NO: 508225 - DNA, 19 bp, Mus musculus
  siRNA target sequence for Mertk (NM_008587.1,1478-1496).
gaacacagtaaggtagatt

SEQ ID NO: 508226 - DNA, 19 bp, Mus musculus
  siRNA target sequence for Mertk (NM_008587.1,1521-1539).
ctggcaacaccgactctat

SEQ ID NO: 508227 - DNA, 19 bp, Mus musculus
  siRNA target sequence for Mertk (NM_008587.1,1523-1541).
ggcaacaccgactctatgt

SEQ ID NO: 508228 - DNA, 19 bp, Mus musculus
  siRNA target sequence for Mertk (NM_008587.1,1530-1548).
ccgactctatgttcatcat

SEQ ID NO: 508229 - DNA, 19 bp, Mus musculus
  siRNA target sequence for Mertk (NM_008587.1,1570-1588).
cattttaatcgggttaatt

SEQ ID NO: 508230 - DNA, 19 bp, Mus musculus
  siRNA target sequence for Mertk (NM_008587.1,1662-1680).
cccaactggtcgtaaatta

SEQ ID NO: 508231 - DNA, 19 bp, Mus musculus
  siRNA target sequence for Mertk (NM_008587.1,1663-1681).
ccaactggtcgtaaattat

SEQ ID NO: 508232 - DNA, 19 bp, Mus musculus
  siRNA target sequence for Mertk (NM_008587.1,1664-1682).
caactggtcgtaaattata

SEQ ID NO: 508233 - DNA, 19 bp, Mus musculus
  siRNA target sequence for Mertk (NM_008587.1,1825-1843).
gtttgggtctgtaatggaa

SEQ ID NO: 508234 - DNA, 19 bp, Mus musculus
  siRNA target sequence for Mertk (NM_008587.1,1893-1911).
ccatgaagttggacaactt

SEQ ID NO: 508235 - DNA, 19 bp, Mus musculus
  siRNA target sequence for Mertk (NM_008587.1,1986-2004).
gacttctaggcgtgtgtat

SEQ ID NO: 508236 - DNA, 19 bp, Mus musculus
  siRNA target sequence for Mertk (NM_008587.1,2027-2045).
ccgaagcccatggtgattt

SEQ ID NO: 508237 - DNA, 19 bp, Mus musculus
  siRNA target sequence for Mertk (NM_008587.1,2028-2046).
cgaagcccatggtgatttt

SEQ ID NO: 508238 - DNA, 19 bp, Mus musculus
  siRNA target sequence for Mertk (NM_008587.1,2039-2057).
gtgattttacccttcatga

SEQ ID NO: 508239 - DNA, 19 bp, Mus musculus
  siRNA target sequence for Mertk (NM_008587.1,2041-2059).
gattttacccttcatgaaa

SEQ ID NO: 508240 - DNA, 19 bp, Mus musculus
  siRNA target sequence for Mertk (NM_008587.1,2081-2099).
ctgttatattcccgattaa

SEQ ID NO: 508241 - DNA, 19 bp, Mus musculus
  siRNA target sequence for Mertk (NM_008587.1,2157-2175).
cccagggaatggagtatct

SEQ ID NO: 508242 - DNA, 19 bp, Mus musculus
  siRNA target sequence for Mertk (NM_008587.1,2178-2196).
gcaacaggaattttcttca

SEQ ID NO: 508243 - DNA, 19 bp, Mus musculus
  siRNA target sequence for Mertk (NM_008587.1,2220-2238).
gcatgttgcgggatgacat

SEQ ID NO: 508244 - DNA, 19 bp, Mus musculus
  siRNA target sequence for Mertk (NM_008587.1,2261-2279).
ggcctctcaaagaagattt

SEQ ID NO: 508245 - DNA, 19 bp, Mus musculus
  siRNA target sequence for Mertk (NM_008587.1,2262-2280).
gcctctcaaagaagattta

SEQ ID NO: 508246 - DNA, 19 bp, Mus musculus
  siRNA target sequence for Mertk (NM_008587.1,2275-2293).
gatttacagtggtgattat

SEQ ID NO: 508247 - DNA, 19 bp, Mus musculus
  siRNA target sequence for Mertk (NM_008587.1,2351-2369).
gcggaccgagtctacacaa

SEQ ID NO: 508248 - DNA, 19 bp, Mus musculus
  siRNA target sequence for Mertk (NM_008587.1,2395-2413).
cgtgaccatgtgggaaata

SEQ ID NO: 508249 - DNA, 19 bp, Mus musculus
  siRNA target sequence for Mertk (NM_008587.1,2506-2524).
ctgcttggatgaactgtat

SEQ ID NO: 508250 - DNA, 19 bp, Mus musculus
  siRNA target sequence for Mertk (NM_008587.1,2621-2639).
gatgcgcaggacaaagaat

SEQ ID NO: 508251 - DNA, 19 bp, Mus musculus
  siRNA target sequence for Mertk (NM_008587.1,2625-2643).
cgcaggacaaagaatccat

SEQ ID NO: 508252 - DNA, 19 bp, Mus musculus
  siRNA target sequence for Mertk (NM_008587.1,2700-2718).
cactcacggggctagacat

SEQ ID NO: 508253 - DNA, 19 bp, Mus musculus
  siRNA target sequence for Mertk (NM_008587.1,2773-2791).
cgtggtcacggcagaagtt

SEQ ID NO: 508254 - DNA, 19 bp, Mus musculus
  siRNA target sequence for Mertk (NM_008587.1,2784-2802).
cagaagttcacgagaacaa

SEQ ID NO: 508255 - DNA, 19 bp, Mus musculus
  siRNA target sequence for Mertk (NM_008587.1,2807-2825).
cgtgaggaaagatacatct

SEQ ID NO: 508256 - DNA, 19 bp, Mus musculus
  siRNA target sequence for Mertk (NM_008587.1,2810-2828).
gaggaaagatacatcttga

SEQ ID NO: 508257 - DNA, 19 bp, Mus musculus
  siRNA target sequence for Mertk (NM_008587.1,2938-2956).
ctggtctcaccatagtaca

SEQ ID NO: 508258 - DNA, 19 bp, Mus musculus
  siRNA target sequence for Mertk (NM_008587.1,2941-2959).
gtctcaccatagtacacta

SEQ ID NO: 508259 - DNA, 19 bp, Mus musculus
  siRNA target sequence for Mertk (NM_008587.1,2971-2989).
cccatcaccagatgaactt

SEQ ID NO: 508260 - DNA, 19 bp, Mus musculus
  siRNA target sequence for Mertk (NM_008587.1,2972-2990).
ccatcaccagatgaacttt

SEQ ID NO: 508261 - DNA, 19 bp, Mus musculus
  siRNA target sequence for Mertk (NM_008587.1,3007-3025).
cttggaagactctgaagtt

SEQ ID NO: 508262 - DNA, 19 bp, Mus musculus
  siRNA target sequence for Met (NM_008591.1,105-123).
gaacgtgaacatgaagtat

SEQ ID NO: 508263 - DNA, 19 bp, Mus musculus
  siRNA target sequence for Met (NM_008591.1,166-184).
gtcctacacggccatcata

SEQ ID NO: 508264 - DNA, 19 bp, Mus musculus
  siRNA target sequence for Met (NM_008591.1,168-186).
cctacacggccatcatatt

SEQ ID NO: 508265 - DNA, 19 bp, Mus musculus
  siRNA target sequence for Met (NM_008591.1,169-187).
ctacacggccatcatattt

SEQ ID NO: 508266 - DNA, 19 bp, Mus musculus
  siRNA target sequence for Met (NM_008591.1,190-208).
ctcggagccacaaactaca

SEQ ID NO: 508267 - DNA, 19 bp, Mus musculus
  siRNA target sequence for Met (NM_008591.1,193-211).
ggagccacaaactacattt

SEQ ID NO: 508268 - DNA, 19 bp, Mus musculus
  siRNA target sequence for Met (NM_008591.1,200-218).
caaactacatttatgtttt

SEQ ID NO: 508269 - DNA, 19 bp, Mus musculus
  siRNA target sequence for Met (NM_008591.1,235-253).
cagaaggtatccgaattca

SEQ ID NO: 508270 - DNA, 19 bp, Mus musculus
  siRNA target sequence for Met (NM_008591.1,267-285).
gttggaacacccagattgt

SEQ ID NO: 508271 - DNA, 19 bp, Mus musculus
  siRNA target sequence for Met (NM_008591.1,274-292).
cacccagattgtttacctt

SEQ ID NO: 508272 - DNA, 19 bp, Mus musculus
  siRNA target sequence for Met (NM_008591.1,320-338).
catcaggaggggtttggaa

SEQ ID NO: 508273 - DNA, 19 bp, Mus musculus
  siRNA target sequence for Met (NM_008591.1,325-343).
ggaggggtttggaaagaca

SEQ ID NO: 508274 - DNA, 19 bp, Mus musculus
  siRNA target sequence for Met (NM_008591.1,326-344).
gaggggtttggaaagacaa

SEQ ID NO: 508275 - DNA, 19 bp, Mus musculus
  siRNA target sequence for Met (NM_008591.1,331-349).
gtttggaaagacaacatca

SEQ ID NO: 508276 - DNA, 19 bp, Mus musculus
  siRNA target sequence for Met (NM_008591.1,356-374).
ctctgcttgttgacacata

SEQ ID NO: 508277 - DNA, 19 bp, Mus musculus
  siRNA target sequence for Met (NM_008591.1,358-376).
ctgcttgttgacacatact

SEQ ID NO: 508278 - DNA, 19 bp, Mus musculus
  siRNA target sequence for Met (NM_008591.1,360-378).
gcttgttgacacatactat

SEQ ID NO: 508279 - DNA, 19 bp, Mus musculus
  siRNA target sequence for Met (NM_008591.1,369-387).
cacatactatgatgatcaa

SEQ ID NO: 508280 - DNA, 19 bp, Mus musculus
  siRNA target sequence for Met (NM_008591.1,371-389).
catactatgatgatcaact

SEQ ID NO: 508281 - DNA, 19 bp, Mus musculus
  siRNA target sequence for Met (NM_008591.1,469-487).
gaggtccactgcatgttct

SEQ ID NO: 508282 - DNA, 19 bp, Mus musculus
  siRNA target sequence for Met (NM_008591.1,567-585).
ccggttcatcaatttcttt

SEQ ID NO: 508283 - DNA, 19 bp, Mus musculus
  siRNA target sequence for Met (NM_008591.1,586-604).
gtggggaatacgatcaatt

SEQ ID NO: 508284 - DNA, 19 bp, Mus musculus
  siRNA target sequence for Met (NM_008591.1,589-607).
gggaatacgatcaattcct

SEQ ID NO: 508285 - DNA, 19 bp, Mus musculus
  siRNA target sequence for Met (NM_008591.1,620-638).
gttattcactgcattcgat

SEQ ID NO: 508286 - DNA, 19 bp, Mus musculus
  siRNA target sequence for Met (NM_008591.1,662-680).
cccaagatggttttaagtt

SEQ ID NO: 508287 - DNA, 19 bp, Mus musculus
  siRNA target sequence for Met (NM_008591.1,684-702).
gacagaccagtcctatatt

SEQ ID NO: 508288 - DNA, 19 bp, Mus musculus
  siRNA target sequence for Met (NM_008591.1,686-704).
cagaccagtcctatattga

SEQ ID NO: 508289 - DNA, 19 bp, Mus musculus
  siRNA target sequence for Met (NM_008591.1,693-711).
gtcctatattgatgtctta

SEQ ID NO: 508290 - DNA, 19 bp, Mus musculus
  siRNA target sequence for Met (NM_008591.1,729-747).
ctaccccataaagtacata

SEQ ID NO: 508291 - DNA, 19 bp, Mus musculus
  siRNA target sequence for Met (NM_008591.1,732-750).
ccccataaagtacatacat

SEQ ID NO: 508292 - DNA, 19 bp, Mus musculus
  siRNA target sequence for Met (NM_008591.1,752-770).
ccttcgaaagcaaccattt

SEQ ID NO: 508293 - DNA, 19 bp, Mus musculus
  siRNA target sequence for Met (NM_008591.1,756-774).
cgaaagcaaccattttatt

SEQ ID NO: 508294 - DNA, 19 bp, Mus musculus
  siRNA target sequence for Met (NM_008591.1,785-803).
ctgtccaaaaggaaactct

SEQ ID NO: 508295 - DNA, 19 bp, Mus musculus
  siRNA target sequence for Met (NM_008591.1,920-938).
ccacaagggaagaagtgtt

SEQ ID NO: 508296 - DNA, 19 bp, Mus musculus
  siRNA target sequence for Met (NM_008591.1,946-964).
ctccaagccgcgtatgtca

SEQ ID NO: 508297 - DNA, 19 bp, Mus musculus
  siRNA target sequence for Met (NM_008591.1,975-993).
ggccaatcttgctaagcaa

SEQ ID NO: 508298 - DNA, 19 bp, Mus musculus
  siRNA target sequence for Met (NM_008591.1,976-994).
gccaatcttgctaagcaaa

SEQ ID NO: 508299 - DNA, 19 bp, Mus musculus
  siRNA target sequence for Met (NM_008591.1,977-995).
ccaatcttgctaagcaaat

SEQ ID NO: 508300 - DNA, 19 bp, Mus musculus
  siRNA target sequence for Met (NM_008591.1,1006-1024).
ccttctgatgacattctct

SEQ ID NO: 508301 - DNA, 19 bp, Mus musculus
  siRNA target sequence for Met (NM_008591.1,1057-1075).
gctgaacctgtgaatcgat

SEQ ID NO: 508302 - DNA, 19 bp, Mus musculus
  siRNA target sequence for Met (NM_008591.1,1083-1101).
ctgtgcattccccatcaaa

SEQ ID NO: 508303 - DNA, 19 bp, Mus musculus
  siRNA target sequence for Met (NM_008591.1,1085-1103).
gtgcattccccatcaaata

SEQ ID NO: 508304 - DNA, 19 bp, Mus musculus
  siRNA target sequence for Met (NM_008591.1,1239-1257).
cgagtatcggacagagttt

SEQ ID NO: 508305 - DNA, 19 bp, Mus musculus
  siRNA target sequence for Met (NM_008591.1,1240-1258).
gagtatcggacagagttta

SEQ ID NO: 508306 - DNA, 19 bp, Mus musculus
  siRNA target sequence for Met (NM_008591.1,1270-1288).
cagcgcgtcgacttattca

SEQ ID NO: 508307 - DNA, 19 bp, Mus musculus
  siRNA target sequence for Met (NM_008591.1,1340-1358).
gtgacctcaccattgctaa

SEQ ID NO: 508308 - DNA, 19 bp, Mus musculus
  siRNA target sequence for Met (NM_008591.1,1344-1362).
cctcaccattgctaatcta

SEQ ID NO: 508309 - DNA, 19 bp, Mus musculus
  siRNA target sequence for Met (NM_008591.1,1474-1492).
gagcatccatcaaatcaaa

SEQ ID NO: 508310 - DNA, 19 bp, Mus musculus
  siRNA target sequence for Met (NM_008591.1,1476-1494).
gcatccatcaaatcaaaat

SEQ ID NO: 508311 - DNA, 19 bp, Mus musculus
  siRNA target sequence for Met (NM_008591.1,1587-1605).
ctctgccccttactttata

SEQ ID NO: 508312 - DNA, 19 bp, Mus musculus
  siRNA target sequence for Met (NM_008591.1,1591-1609).
gccccttactttatacagt

SEQ ID NO: 508313 - DNA, 19 bp, Mus musculus
  siRNA target sequence for Met (NM_008591.1,1612-1630).
ggctggtgccacaatcaat

SEQ ID NO: 508314 - DNA, 19 bp, Mus musculus
  siRNA target sequence for Met (NM_008591.1,1748-1766).
gtggctgggactttggatt

SEQ ID NO: 508315 - DNA, 19 bp, Mus musculus
  siRNA target sequence for Met (NM_008591.1,1843-1861).
gagagcacgacaaatacgt

SEQ ID NO: 508316 - DNA, 19 bp, Mus musculus
  siRNA target sequence for Met (NM_008591.1,1884-1902).
gatgagtgagcacttcaat

SEQ ID NO: 508317 - DNA, 19 bp, Mus musculus
  siRNA target sequence for Met (NM_008591.1,1894-1912).
cacttcaatgtgtctgtaa

SEQ ID NO: 508318 - DNA, 19 bp, Mus musculus
  siRNA target sequence for Met (NM_008591.1,1946-1964).
gtgcattctcctatgtaga

SEQ ID NO: 508319 - DNA, 19 bp, Mus musculus
  siRNA target sequence for Met (NM_008591.1,1960-1978).
gtagatcctgtaataacaa

SEQ ID NO: 508320 - DNA, 19 bp, Mus musculus
  siRNA target sequence for Met (NM_008591.1,2024-2042).
ctcttactgggaaatacct

SEQ ID NO: 508321 - DNA, 19 bp, Mus musculus
  siRNA target sequence for Met (NM_008591.1,2041-2059).
ctcaacagtggcaattcta

SEQ ID NO: 508322 - DNA, 19 bp, Mus musculus
  siRNA target sequence for Met (NM_008591.1,2043-2061).
caacagtggcaattctaga

SEQ ID NO: 508323 - DNA, 19 bp, Mus musculus
  siRNA target sequence for Met (NM_008591.1,2078-2096).
ggaaaacatgtactttaaa

SEQ ID NO: 508324 - DNA, 19 bp, Mus musculus
  siRNA target sequence for Met (NM_008591.1,2099-2117).
gtgtatcagatagtattct

SEQ ID NO: 508325 - DNA, 19 bp, Mus musculus
  siRNA target sequence for Met (NM_008591.1,2159-2177).
ctgtgaaattgaagattga

SEQ ID NO: 508326 - DNA, 19 bp, Mus musculus
  siRNA target sequence for Met (NM_008591.1,2191-2209).
gagaccagcagcttcagtt

SEQ ID NO: 508327 - DNA, 19 bp, Mus musculus
  siRNA target sequence for Met (NM_008591.1,2213-2231).
gggaagaccccgttgtcta

SEQ ID NO: 508328 - DNA, 19 bp, Mus musculus
  siRNA target sequence for Met (NM_008591.1,2218-2236).
gaccccgttgtctatgaaa

SEQ ID NO: 508329 - DNA, 19 bp, Mus musculus
  siRNA target sequence for Met (NM_008591.1,2338-2356).
gaagtgggtgtgaactaca

SEQ ID NO: 508330 - DNA, 19 bp, Mus musculus
  siRNA target sequence for Met (NM_008591.1,2460-2478).
cctgttagacgggattctt

SEQ ID NO: 508331 - DNA, 19 bp, Mus musculus
  siRNA target sequence for Met (NM_008591.1,2461-2479).
ctgttagacgggattcttt

SEQ ID NO: 508332 - DNA, 19 bp, Mus musculus
  siRNA target sequence for Met (NM_008591.1,2496-2514).
cacttatgtgcataatcct

SEQ ID NO: 508333 - DNA, 19 bp, Mus musculus
  siRNA target sequence for Met (NM_008591.1,2603-2621).
cagttaaaggtgaagtgtt

SEQ ID NO: 508334 - DNA, 19 bp, Mus musculus
  siRNA target sequence for Met (NM_008591.1,2744-2762).
cttcaactgttcttggaaa

SEQ ID NO: 508335 - DNA, 19 bp, Mus musculus
  siRNA target sequence for Met (NM_008591.1,2769-2787).
cgttcaaccggatcagaat

SEQ ID NO: 508336 - DNA, 19 bp, Mus musculus
  siRNA target sequence for Met (NM_008591.1,2807-2825).
gtgcggtctcaatatcagt

SEQ ID NO: 508337 - DNA, 19 bp, Mus musculus
  siRNA target sequence for Met (NM_008591.1,2811-2829).
ggtctcaatatcagtagta

SEQ ID NO: 508338 - DNA, 19 bp, Mus musculus
  siRNA target sequence for Met (NM_008591.1,2814-2832).
ctcaatatcagtagtagtt

SEQ ID NO: 508339 - DNA, 19 bp, Mus musculus
  siRNA target sequence for Met (NM_008591.1,2915-2933).
gagtacacactcctcattt

SEQ ID NO: 508340 - DNA, 19 bp, Mus musculus
  siRNA target sequence for Met (NM_008591.1,2920-2938).
cacactcctcatttggata

SEQ ID NO: 508341 - DNA, 19 bp, Mus musculus
  siRNA target sequence for Met (NM_008591.1,2944-2962).
gtaagtgcccgaagtgtaa

SEQ ID NO: 508342 - DNA, 19 bp, Mus musculus
  siRNA target sequence for Met (NM_008591.1,2984-3002).
caaatgagtctgtagacta

SEQ ID NO: 508343 - DNA, 19 bp, Mus musculus
  siRNA target sequence for Met (NM_008591.1,3106-3124).
ggagactctgatatatcca

SEQ ID NO: 508344 - DNA, 19 bp, Mus musculus
  siRNA target sequence for Met (NM_008591.1,3122-3140).
ccagcccattactacaaaa

SEQ ID NO: 508345 - DNA, 19 bp, Mus musculus
  siRNA target sequence for Met (NM_008591.1,3156-3174).
cctcagtgctctaaatcca

SEQ ID NO: 508346 - DNA, 19 bp, Mus musculus
  siRNA target sequence for Met (NM_008591.1,3188-3206).
cagttcagcacgtagtgat

SEQ ID NO: 508347 - DNA, 19 bp, Mus musculus
  siRNA target sequence for Met (NM_008591.1,3215-3233).
gcagcctgattgtgcattt

SEQ ID NO: 508348 - DNA, 19 bp, Mus musculus
  siRNA target sequence for Met (NM_008591.1,3218-3236).
gcctgattgtgcatttcaa

SEQ ID NO: 508349 - DNA, 19 bp, Mus musculus
  siRNA target sequence for Met (NM_008591.1,3219-3237).
cctgattgtgcatttcaat

SEQ ID NO: 508350 - DNA, 19 bp, Mus musculus
  siRNA target sequence for Met (NM_008591.1,3222-3240).
gattgtgcatttcaatgaa

SEQ ID NO: 508351 - DNA, 19 bp, Mus musculus
  siRNA target sequence for Met (NM_008591.1,3457-3475).
gtggtcctgccctatatga

SEQ ID NO: 508352 - DNA, 19 bp, Mus musculus
  siRNA target sequence for Met (NM_008591.1,3478-3496).
catggagatctgcgaaatt

SEQ ID NO: 508353 - DNA, 19 bp, Mus musculus
  siRNA target sequence for Met (NM_008591.1,3481-3499).
ggagatctgcgaaatttca

SEQ ID NO: 508354 - DNA, 19 bp, Mus musculus
  siRNA target sequence for Met (NM_008591.1,3487-3505).
ctgcgaaatttcattcgaa

SEQ ID NO: 508355 - DNA, 19 bp, Mus musculus
  siRNA target sequence for Met (NM_008591.1,3520-3538).
ccaactgtgaaagatctta

SEQ ID NO: 508356 - DNA, 19 bp, Mus musculus
  siRNA target sequence for Met (NM_008591.1,3604-3622).
gacttagctgcaagaaact

SEQ ID NO: 508357 - DNA, 19 bp, Mus musculus
  siRNA target sequence for Met (NM_008591.1,3623-3641).
gcatgttggatgaaaaatt

SEQ ID NO: 508358 - DNA, 19 bp, Mus musculus
  siRNA target sequence for Met (NM_008591.1,3644-3662).
ctgtcaaggttgctgattt

SEQ ID NO: 508359 - DNA, 19 bp, Mus musculus
  siRNA target sequence for Met (NM_008591.1,3665-3683).
gtcttgccagagacatgta

SEQ ID NO: 508360 - DNA, 19 bp, Mus musculus
  siRNA target sequence for Met (NM_008591.1,3670-3688).
gccagagacatgtacgata

SEQ ID NO: 508361 - DNA, 19 bp, Mus musculus
  siRNA target sequence for Met (NM_008591.1,3672-3690).
cagagacatgtacgataaa

SEQ ID NO: 508362 - DNA, 19 bp, Mus musculus
  siRNA target sequence for Met (NM_008591.1,3674-3692).
gagacatgtacgataaaga

SEQ ID NO: 508363 - DNA, 19 bp, Mus musculus
  siRNA target sequence for Met (NM_008591.1,3676-3694).
gacatgtacgataaagagt

SEQ ID NO: 508364 - DNA, 19 bp, Mus musculus
  siRNA target sequence for Met (NM_008591.1,3681-3699).
gtacgataaagagtactat

SEQ ID NO: 508365 - DNA, 19 bp, Mus musculus
  siRNA target sequence for Met (NM_008591.1,3684-3702).
cgataaagagtactatagt

SEQ ID NO: 508366 - DNA, 19 bp, Mus musculus
  siRNA target sequence for Met (NM_008591.1,3719-3737).
gtgccaagctaccagtaaa

SEQ ID NO: 508367 - DNA, 19 bp, Mus musculus
  siRNA target sequence for Met (NM_008591.1,3721-3739).
gccaagctaccagtaaagt

SEQ ID NO: 508368 - DNA, 19 bp, Mus musculus
  siRNA target sequence for Met (NM_008591.1,3755-3773).
gtctgcaaacgcagaagtt

SEQ ID NO: 508369 - DNA, 19 bp, Mus musculus
  siRNA target sequence for Met (NM_008591.1,3848-3866).
ccgacgtgaacacatttga

SEQ ID NO: 508370 - DNA, 19 bp, Mus musculus
  siRNA target sequence for Met (NM_008591.1,3849-3867).
cgacgtgaacacatttgat

SEQ ID NO: 508371 - DNA, 19 bp, Mus musculus
  siRNA target sequence for Met (NM_008591.1,3850-3868).
gacgtgaacacatttgata

SEQ ID NO: 508372 - DNA, 19 bp, Mus musculus
  siRNA target sequence for Met (NM_008591.1,3853-3871).
gtgaacacatttgatatca

SEQ ID NO: 508373 - DNA, 19 bp, Mus musculus
  siRNA target sequence for Met (NM_008591.1,3896-3914).
gactcttgcaaccagaata

SEQ ID NO: 508374 - DNA, 19 bp, Mus musculus
  siRNA target sequence for Met (NM_008591.1,3900-3918).
cttgcaaccagaatactgt

SEQ ID NO: 508375 - DNA, 19 bp, Mus musculus
  siRNA target sequence for Met (NM_008591.1,4022-4040).
cgttcattggggaacacta

SEQ ID NO: 508376 - DNA, 19 bp, Mus musculus
  siRNA target sequence for Met (NM_008591.1,4044-4062).
ccacgtgaacgctacttat

SEQ ID NO: 508377 - DNA, 19 bp, Mus musculus
  siRNA target sequence for Met (NM_008591.1,4048-4066).
gtgaacgctacttatgtga

SEQ ID NO: 508378 - DNA, 19 bp, Mus musculus
  siRNA target sequence for Met (NM_008591.1,4050-4068).
gaacgctacttatgtgaat

SEQ ID NO: 508379 - DNA, 19 bp, Mus musculus
  siRNA target sequence for Met (NM_008591.1,4053-4071).
cgctacttatgtgaatgta

SEQ ID NO: 508380 - DNA, 19 bp, Mus musculus
  siRNA target sequence for MGC40859 (NM_153572.1,714-732).
gtccaggaaccctagcatt

SEQ ID NO: 508381 - DNA, 19 bp, Mus musculus
  siRNA target sequence for MGC40859 (NM_153572.1,865-883).
ccaggcactggtaagacta

SEQ ID NO: 508382 - DNA, 19 bp, Mus musculus
  siRNA target sequence for MGC40859 (NM_153572.1,911-929).
gtgggacaacctttttcaa

SEQ ID NO: 508383 - DNA, 19 bp, Mus musculus
  siRNA target sequence for MGC40859 (NM_153572.1,978-996).
gttggtccgactgttgttt

SEQ ID NO: 508384 - DNA, 19 bp, Mus musculus
  siRNA target sequence for MGC40859 (NM_153572.1,1015-1033).
gcccctaccacgatcttca

SEQ ID NO: 508385 - DNA, 19 bp, Mus musculus
  siRNA target sequence for MGC40859 (NM_153572.1,1016-1034).
cccctaccacgatcttcat

SEQ ID NO: 508386 - DNA, 19 bp, Mus musculus
  siRNA target sequence for MGC40859 (NM_153572.1,1025-1043).
cgatcttcatcgacgaaat

SEQ ID NO: 508387 - DNA, 19 bp, Mus musculus
  siRNA target sequence for MGC40859 (NM_153572.1,1026-1044).
gatcttcatcgacgaaatt

SEQ ID NO: 508388 - DNA, 19 bp, Mus musculus
  siRNA target sequence for MGC40859 (NM_153572.1,1036-1054).
gacgaaattgattctatct

SEQ ID NO: 508389 - DNA, 19 bp, Mus musculus
  siRNA target sequence for MGC40859 (NM_153572.1,1139-1157).
gagccttagaaaatgatga

SEQ ID NO: 508390 - DNA, 19 bp, Mus musculus
  siRNA target sequence for MGC40859 (NM_153572.1,1229-1247).
gactagagaaaaggattta

SEQ ID NO: 508391 - DNA, 19 bp, Mus musculus
  siRNA target sequence for MGC40859 (NM_153572.1,1364-1382).
cgggtgccgacatcactaa

SEQ ID NO: 508392 - DNA, 19 bp, Mus musculus
  siRNA target sequence for Mip (NM_008600.2,68-86).
ccttttggagggccatatt

SEQ ID NO: 508393 - DNA, 19 bp, Mus musculus
  siRNA target sequence for Mip (NM_008600.2,100-118).
gccaccctcttctatgtct

SEQ ID NO: 508394 - DNA, 19 bp, Mus musculus
  siRNA target sequence for Mip (NM_008600.2,191-209).
gcctggccttggctacatt

SEQ ID NO: 508395 - DNA, 19 bp, Mus musculus
  siRNA target sequence for Mip (NM_008600.2,295-313).
ctccgggctttctgctata

SEQ ID NO: 508396 - DNA, 19 bp, Mus musculus
  siRNA target sequence for Mip (NM_008600.2,297-315).
ccgggctttctgctatata

SEQ ID NO: 508397 - DNA, 19 bp, Mus musculus
  siRNA target sequence for Mip (NM_008600.2,300-318).
ggctttctgctatatagca

SEQ ID NO: 508398 - DNA, 19 bp, Mus musculus
  siRNA target sequence for Mip (NM_008600.2,558-576).
gcacctctttgggatgtat

SEQ ID NO: 508399 - DNA, 19 bp, Mus musculus
  siRNA target sequence for Mip (NM_008600.2,564-582).
ctttgggatgtattacact

SEQ ID NO: 508400 - DNA, 19 bp, Mus musculus
  siRNA target sequence for Mip (NM_008600.2,688-706).
ggcagcctactctatgact

SEQ ID NO: 508401 - DNA, 19 bp, Mus musculus
  siRNA target sequence for Mip (NM_008600.2,722-740).
ggctcaagagtgtttctga

SEQ ID NO: 508402 - DNA, 19 bp, Mus musculus
  siRNA target sequence for Mip (NM_008600.2,803-821).
gggaacctgtcgaactgaa

SEQ ID NO: 508403 - DNA, 19 bp, Mus musculus
  siRNA target sequence for Mkks (NM_021527.1,773-791).
ctcggttagaagctaagaa

SEQ ID NO: 508404 - DNA, 19 bp, Mus musculus
  siRNA target sequence for Mkks (NM_021527.1,792-810).
gccatcgttgtgtaaaact

SEQ ID NO: 508405 - DNA, 19 bp, Mus musculus
  siRNA target sequence for Mkks (NM_021527.1,815-833).
cattgacaagtgagaaagt

SEQ ID NO: 508406 - DNA, 19 bp, Mus musculus
  siRNA target sequence for Mkks (NM_021527.1,893-911).
ggctgaagcagctacacaa

SEQ ID NO: 508407 - DNA, 19 bp, Mus musculus
  siRNA target sequence for Mkks (NM_021527.1,894-912).
gctgaagcagctacacaat

SEQ ID NO: 508408 - DNA, 19 bp, Mus musculus
  siRNA target sequence for Mkks (NM_021527.1,919-937).
ggaggttgtgtgtacacaa

SEQ ID NO: 508409 - DNA, 19 bp, Mus musculus
  siRNA target sequence for Mkks (NM_021527.1,952-970).
gccctgcttcgaaaccttt

SEQ ID NO: 508410 - DNA, 19 bp, Mus musculus
  siRNA target sequence for Mkks (NM_021527.1,977-995).
cccatcccgtattaaagat

SEQ ID NO: 508411 - DNA, 19 bp, Mus musculus
  siRNA target sequence for Mkks (NM_021527.1,1001-1019).
cgtcatccgtgcagaatca

SEQ ID NO: 508412 - DNA, 19 bp, Mus musculus
  siRNA target sequence for Mkks (NM_021527.1,1064-1082).
gctgcaacttgattgaaaa

SEQ ID NO: 508413 - DNA, 19 bp, Mus musculus
  siRNA target sequence for Mkks (NM_021527.1,1065-1083).
ctgcaacttgattgaaaat

SEQ ID NO: 508414 - DNA, 19 bp, Mus musculus
  siRNA target sequence for Mkks (NM_021527.1,1101-1119).
gacacccgcaactgctatt

SEQ ID NO: 508415 - DNA, 19 bp, Mus musculus
  siRNA target sequence for Mkks (NM_021527.1,1103-1121).
cacccgcaactgctattaa

SEQ ID NO: 508416 - DNA, 19 bp, Mus musculus
  siRNA target sequence for Mkks (NM_021527.1,1140-1158).
gagtctctgtaccagttat

SEQ ID NO: 508417 - DNA, 19 bp, Mus musculus
  siRNA target sequence for Mkks (NM_021527.1,1142-1160).
gtctctgtaccagttatct

SEQ ID NO: 508418 - DNA, 19 bp, Mus musculus
  siRNA target sequence for Mkks (NM_021527.1,1144-1162).
ctctgtaccagttatctca

SEQ ID NO: 508419 - DNA, 19 bp, Mus musculus
  siRNA target sequence for Mkks (NM_021527.1,1181-1199).
gtcgaatcccagttgactt

SEQ ID NO: 508420 - DNA, 19 bp, Mus musculus
  siRNA target sequence for Mkks (NM_021527.1,1195-1213).
gacttcagaagtacacata

SEQ ID NO: 508421 - DNA, 19 bp, Mus musculus
  siRNA target sequence for Mkks (NM_021527.1,1227-1245).
ggtacacagtatcttaaca

SEQ ID NO: 508422 - DNA, 19 bp, Mus musculus
  siRNA target sequence for Mkks (NM_021527.1,1228-1246).
gtacacagtatcttaacaa

SEQ ID NO: 508423 - DNA, 19 bp, Mus musculus
  siRNA target sequence for Mkks (NM_021527.1,1350-1368).
ggttttagggaagagtata

SEQ ID NO: 508424 - DNA, 19 bp, Mus musculus
  siRNA target sequence for Mkks (NM_021527.1,1376-1394).
ccttaaagggccaaagagt

SEQ ID NO: 508425 - DNA, 19 bp, Mus musculus
  siRNA target sequence for Mkks (NM_021527.1,1377-1395).
cttaaagggccaaagagtt

SEQ ID NO: 508426 - DNA, 19 bp, Mus musculus
  siRNA target sequence for Mkks (NM_021527.1,1386-1404).
ccaaagagttacagattct

SEQ ID NO: 508427 - DNA, 19 bp, Mus musculus
  siRNA target sequence for Mkks (NM_021527.1,1387-1405).
caaagagttacagattcta

SEQ ID NO: 508428 - DNA, 19 bp, Mus musculus
  siRNA target sequence for Mkks (NM_021527.1,1393-1411).
gttacagattctactgtat

SEQ ID NO: 508429 - DNA, 19 bp, Mus musculus
  siRNA target sequence for Mkks (NM_021527.1,1432-1450).
gcatcagaagttcaattaa

SEQ ID NO: 508430 - DNA, 19 bp, Mus musculus
  siRNA target sequence for Mkks (NM_021527.1,1441-1459).
gttcaattaaggaggttat

SEQ ID NO: 508431 - DNA, 19 bp, Mus musculus
  siRNA target sequence for Mkks (NM_021527.1,1454-1472).
ggttattacccactcaaaa

SEQ ID NO: 508432 - DNA, 19 bp, Mus musculus
  siRNA target sequence for Mkks (NM_021527.1,1505-1523).
catctttatctggagattt

SEQ ID NO: 508433 - DNA, 19 bp, Mus musculus
  siRNA target sequence for Mkks (NM_021527.1,1545-1563).
ggtggtggcccattaccaa

SEQ ID NO: 508434 - DNA, 19 bp, Mus musculus
  siRNA target sequence for Mkks (NM_021527.1,1568-1586).
cccttgagaatgcagtttt

SEQ ID NO: 508435 - DNA, 19 bp, Mus musculus
  siRNA target sequence for Mkks (NM_021527.1,1569-1587).
ccttgagaatgcagtttta

SEQ ID NO: 508436 - DNA, 19 bp, Mus musculus
  siRNA target sequence for Mkks (NM_021527.1,1611-1629).
gcgactagtcactgatcat

SEQ ID NO: 508437 - DNA, 19 bp, Mus musculus
  siRNA target sequence for Mkks (NM_021527.1,1654-1672).
gtaatccacccatctttga

SEQ ID NO: 508438 - DNA, 19 bp, Mus musculus
  siRNA target sequence for Mkks (NM_021527.1,1722-1740).
gactctgatggaatctcta

SEQ ID NO: 508439 - DNA, 19 bp, Mus musculus
  siRNA target sequence for Mkks (NM_021527.1,1760-1778).
cgcctattggttctctaaa

SEQ ID NO: 508440 - DNA, 19 bp, Mus musculus
  siRNA target sequence for Mkks (NM_021527.1,1779-1797).
cccaatagtttctactact

SEQ ID NO: 508441 - DNA, 19 bp, Mus musculus
  siRNA target sequence for Mkks (NM_021527.1,1780-1798).
ccaatagtttctactactt

SEQ ID NO: 508442 - DNA, 19 bp, Mus musculus
  siRNA target sequence for Mkks (NM_021527.1,1950-1968).
gcacgtcttgcagttaaca

SEQ ID NO: 508443 - DNA, 19 bp, Mus musculus
  siRNA target sequence for Mkks (NM_021527.1,1951-1969).
cacgtcttgcagttaacaa

SEQ ID NO: 508444 - DNA, 19 bp, Mus musculus
  siRNA target sequence for Mkks (NM_021527.1,1971-1989).
caaggaaccgtgggtttta

SEQ ID NO: 508445 - DNA, 19 bp, Mus musculus
  siRNA target sequence for Mkks (NM_021527.1,2014-2032).
cacttggctgcatatgtca

SEQ ID NO: 508446 - DNA, 19 bp, Mus musculus
  siRNA target sequence for Mkks (NM_021527.1,2202-2220).
gtcctgtcaagcagattct

SEQ ID NO: 508447 - DNA, 19 bp, Mus musculus
  siRNA target sequence for Mkks (NM_021527.1,2227-2245).
gttggtaactggtcagata

SEQ ID NO: 508448 - DNA, 19 bp, Mus musculus
  siRNA target sequence for Mkks (NM_021527.1,2292-2310).
cagctggtctgtcttaaga

SEQ ID NO: 508449 - DNA, 19 bp, Mus musculus
  siRNA target sequence for Mkks (NM_021527.1,2304-2322).
cttaagaagtacttatcat

SEQ ID NO: 508450 - DNA, 19 bp, Mus musculus
  siRNA target sequence for Mkks (NM_021527.1,2309-2327).
gaagtacttatcatccttt

SEQ ID NO: 508451 - DNA, 19 bp, Mus musculus
  siRNA target sequence for Mkks (NM_021527.1,2423-2441).
ctgtagagacagccaattt

SEQ ID NO: 508452 - DNA, 19 bp, Mus musculus
  siRNA target sequence for Mkks (NM_021527.1,2425-2443).
gtagagacagccaatttga

SEQ ID NO: 508453 - DNA, 19 bp, Mus musculus
  siRNA target sequence for Mkks (NM_021527.1,2430-2448).
gacagccaatttgatttta

SEQ ID NO: 508454 - DNA, 19 bp, Mus musculus
  siRNA target sequence for Mknk2 (NM_021462.2,143-161).
ggttcgaagatgtctatca

SEQ ID NO: 508455 - DNA, 19 bp, Mus musculus
  siRNA target sequence for Mknk2 (NM_021462.2,334-352).
gttctagaactgattgagt

SEQ ID NO: 508456 - DNA, 19 bp, Mus musculus
  siRNA target sequence for Mknk2 (NM_021462.2,397-415).
cgtggcggatccatcctaa

SEQ ID NO: 508457 - DNA, 19 bp, Mus musculus
  siRNA target sequence for Mknk2 (NM_021462.2,412-430).
ctaagccacatccatagaa

SEQ ID NO: 508458 - DNA, 19 bp, Mus musculus
  siRNA target sequence for Mknk2 (NM_021462.2,424-442).
catagaaggcgccacttta

SEQ ID NO: 508459 - DNA, 19 bp, Mus musculus
  siRNA target sequence for Mknk2 (NM_021462.2,428-446).
gaaggcgccactttaacga

SEQ ID NO: 508460 - DNA, 19 bp, Mus musculus
  siRNA target sequence for Mknk2 (NM_021462.2,489-507).
ggacttcctgcataacaaa

SEQ ID NO: 508461 - DNA, 19 bp, Mus musculus
  siRNA target sequence for Mknk2 (NM_021462.2,565-583).
gtctcgccagtgaagatct

SEQ ID NO: 508462 - DNA, 19 bp, Mus musculus
  siRNA target sequence for Mknk2 (NM_021462.2,662-680).
gtgggtcagctgagtacat

SEQ ID NO: 508463 - DNA, 19 bp, Mus musculus
  siRNA target sequence for Mlh1 (NM_026810.1,43-61).
cgtttgtagcaggagttat

SEQ ID NO: 508464 - DNA, 19 bp, Mus musculus
  siRNA target sequence for Mlh1 (NM_026810.1,44-62).
gtttgtagcaggagttatt

SEQ ID NO: 508465 - DNA, 19 bp, Mus musculus
  siRNA target sequence for Mlh1 (NM_026810.1,140-158).
gatgatagaaaactgttta

SEQ ID NO: 508466 - DNA, 19 bp, Mus musculus
  siRNA target sequence for Mlh1 (NM_026810.1,264-282).
gtgtgtgagaggttcacta

SEQ ID NO: 508467 - DNA, 19 bp, Mus musculus
  siRNA target sequence for Mlh1 (NM_026810.1,272-290).
gaggttcactacgagtaaa

SEQ ID NO: 508468 - DNA, 19 bp, Mus musculus
  siRNA target sequence for Mlh1 (NM_026810.1,274-292).
ggttcactacgagtaaact

SEQ ID NO: 508469 - DNA, 19 bp, Mus musculus
  siRNA target sequence for Mlh1 (NM_026810.1,286-304).
gtaaactgcagacttttga

SEQ ID NO: 508470 - DNA, 19 bp, Mus musculus
  siRNA target sequence for Mlh1 (NM_026810.1,366-384).
gtggcccatgtcactatta

SEQ ID NO: 508471 - DNA, 19 bp, Mus musculus
  siRNA target sequence for Mlh1 (NM_026810.1,368-386).
ggcccatgtcactattaca

SEQ ID NO: 508472 - DNA, 19 bp, Mus musculus
  siRNA target sequence for Mlh1 (NM_026810.1,369-387).
gcccatgtcactattacaa

SEQ ID NO: 508473 - DNA, 19 bp, Mus musculus
  siRNA target sequence for Mlh1 (NM_026810.1,409-427).
gtgcgtacagagcaagtta

SEQ ID NO: 508474 - DNA, 19 bp, Mus musculus
  siRNA target sequence for Mlh1 (NM_026810.1,411-429).
gcgtacagagcaagttact

SEQ ID NO: 508475 - DNA, 19 bp, Mus musculus
  siRNA target sequence for Mlh1 (NM_026810.1,413-431).
gtacagagcaagttactca

SEQ ID NO: 508476 - DNA, 19 bp, Mus musculus
  siRNA target sequence for Mlh1 (NM_026810.1,440-458).
gctgcaagcccctcctaaa

SEQ ID NO: 508477 - DNA, 19 bp, Mus musculus
  siRNA target sequence for Mlh1 (NM_026810.1,488-506).
cacggtggaagaccttttt

SEQ ID NO: 508478 - DNA, 19 bp, Mus musculus
  siRNA target sequence for Mlh1 (NM_026810.1,490-508).
cggtggaagacctttttta

SEQ ID NO: 508479 - DNA, 19 bp, Mus musculus
  siRNA target sequence for Mlh1 (NM_026810.1,498-516).
gaccttttttacaacataa

SEQ ID NO: 508480 - DNA, 19 bp, Mus musculus
  siRNA target sequence for Mlh1 (NM_026810.1,501-519).
cttttttacaacataatca

SEQ ID NO: 508481 - DNA, 19 bp, Mus musculus
  siRNA target sequence for Mlh1 (NM_026810.1,554-572).
gtacggaaaaattttggaa

SEQ ID NO: 508482 - DNA, 19 bp, Mus musculus
  siRNA target sequence for Mlh1 (NM_026810.1,573-591).
gttgttggcaggtattcaa

SEQ ID NO: 508483 - DNA, 19 bp, Mus musculus
  siRNA target sequence for Mlh1 (NM_026810.1,580-598).
gcaggtattcaatacacaa

SEQ ID NO: 508484 - DNA, 19 bp, Mus musculus
  siRNA target sequence for Mlh1 (NM_026810.1,581-599).
caggtattcaatacacaat

SEQ ID NO: 508485 - DNA, 19 bp, Mus musculus
  siRNA target sequence for Mlh1 (NM_026810.1,584-602).
gtattcaatacacaattca

SEQ ID NO: 508486 - DNA, 19 bp, Mus musculus
  siRNA target sequence for Mlh1 (NM_026810.1,667-685).
ccacaaccgtggacaacat

SEQ ID NO: 508487 - DNA, 19 bp, Mus musculus
  siRNA target sequence for Mlh1 (NM_026810.1,668-686).
cacaaccgtggacaacatt

SEQ ID NO: 508488 - DNA, 19 bp, Mus musculus
  siRNA target sequence for Mlh1 (NM_026810.1,706-724).
cggttagtcgagaactgat

SEQ ID NO: 508489 - DNA, 19 bp, Mus musculus
  siRNA target sequence for Mlh1 (NM_026810.1,707-725).
ggttagtcgagaactgata

SEQ ID NO: 508490 - DNA, 19 bp, Mus musculus
  siRNA target sequence for Mlh1 (NM_026810.1,748-766).
ccctagctttcaaaatgaa

SEQ ID NO: 508491 - DNA, 19 bp, Mus musculus
  siRNA target sequence for Mlh1 (NM_026810.1,749-767).
cctagctttcaaaatgaat

SEQ ID NO: 508492 - DNA, 19 bp, Mus musculus
  siRNA target sequence for Mlh1 (NM_026810.1,768-786).
ggctatatatcgaatgcaa

SEQ ID NO: 508493 - DNA, 19 bp, Mus musculus
  siRNA target sequence for Mlh1 (NM_026810.1,769-787).
gctatatatcgaatgcaaa

SEQ ID NO: 508494 - DNA, 19 bp, Mus musculus
  siRNA target sequence for Mlh1 (NM_026810.1,827-845).
ccaccgtctggtagaatca

SEQ ID NO: 508495 - DNA, 19 bp, Mus musculus
  siRNA target sequence for Mlh1 (NM_026810.1,863-881).
cattgaaactgtatatgca

SEQ ID NO: 508496 - DNA, 19 bp, Mus musculus
  siRNA target sequence for Mlh1 (NM_026810.1,911-929).
cctgtacctcagtttggaa

SEQ ID NO: 508497 - DNA, 19 bp, Mus musculus
  siRNA target sequence for Mlh1 (NM_026810.1,941-959).
gaacgtggacgtcaatgta

SEQ ID NO: 508498 - DNA, 19 bp, Mus musculus
  siRNA target sequence for Mlh1 (NM_026810.1,964-982).
ccaccaagcacgaagttca

SEQ ID NO: 508499 - DNA, 19 bp, Mus musculus
  siRNA target sequence for Mlh1 (NM_026810.1,1049-1067).
caattcctccaggatgtat

SEQ ID NO: 508500 - DNA, 19 bp, Mus musculus
  siRNA target sequence for Mlh1 (NM_026810.1,1366-1384).
ctgctgagagtgagaactt

SEQ ID NO: 508501 - DNA, 19 bp, Mus musculus
  siRNA target sequence for Mlh1 (NM_026810.1,1536-1554).
cccaggaggaggatcatta

SEQ ID NO: 508502 - DNA, 19 bp, Mus musculus
  siRNA target sequence for Mlh1 (NM_026810.1,1537-1555).
ccaggaggaggatcattaa

SEQ ID NO: 508503 - DNA, 19 bp, Mus musculus
  siRNA target sequence for Mlh1 (NM_026810.1,1725-1743).
ctgttctaccagatactca

SEQ ID NO: 508504 - DNA, 19 bp, Mus musculus
  siRNA target sequence for Mlh1 (NM_026810.1,1727-1745).
gttctaccagatactcatt

SEQ ID NO: 508505 - DNA, 19 bp, Mus musculus
  siRNA target sequence for Mlh1 (NM_026810.1,1867-1885).
ggcttgcagagtacattgt

SEQ ID NO: 508506 - DNA, 19 bp, Mus musculus
  siRNA target sequence for Mlh1 (NM_026810.1,1913-1931).
gcttgcagactatttctct

SEQ ID NO: 508507 - DNA, 19 bp, Mus musculus
  siRNA target sequence for Mlh1 (NM_026810.1,1963-1981).
gattacctcttctgattga

SEQ ID NO: 508508 - DNA, 19 bp, Mus musculus
  siRNA target sequence for Mlh1 (NM_026810.1,2001-2019).
gagggactgcctatcttca

SEQ ID NO: 508509 - DNA, 19 bp, Mus musculus
  siRNA target sequence for Mlh1 (NM_026810.1,2105-2123).
cattcggaagcagtatata

SEQ ID NO: 508510 - DNA, 19 bp, Mus musculus
  siRNA target sequence for Mlh1 (NM_026810.1,2191-2209).
ggactgtggagcacattat

SEQ ID NO: 508511 - DNA, 19 bp, Mus musculus
  siRNA target sequence for Mlh1 (NM_026810.1,2196-2214).
gtggagcacattatctata

SEQ ID NO: 508512 - DNA, 19 bp, Mus musculus
  siRNA target sequence for Mlh1 (NM_026810.1,2198-2216).
ggagcacattatctataaa

SEQ ID NO: 508513 - DNA, 19 bp, Mus musculus
  siRNA target sequence for Mlh1 (NM_026810.1,2232-2250).
ctcctacctccgaagcatt

SEQ ID NO: 508514 - DNA, 19 bp, Mus musculus
  siRNA target sequence for Mlh1 (NM_026810.1,2235-2253).
ctacctccgaagcatttca

SEQ ID NO: 508515 - DNA, 19 bp, Mus musculus
  siRNA target sequence for Mlh1 (NM_026810.1,2280-2298).
gccaacctgccagatctat

SEQ ID NO: 508516 - DNA, 19 bp, Mus musculus
  siRNA target sequence for Mlh1 (NM_026810.1,2281-2299).
ccaacctgccagatctata

SEQ ID NO: 508517 - DNA, 19 bp, Mus musculus
  siRNA target sequence for Morc (NM_010816.1,234-252).
gtaagactcgatgtgtttt

SEQ ID NO: 508518 - DNA, 19 bp, Mus musculus
  siRNA target sequence for Morc (NM_010816.1,238-256).
gactcgatgtgttttcagt

SEQ ID NO: 508519 - DNA, 19 bp, Mus musculus
  siRNA target sequence for Morc (NM_010816.1,253-271).
cagtggataatgaaacact

SEQ ID NO: 508520 - DNA, 19 bp, Mus musculus
  siRNA target sequence for Morc (NM_010816.1,270-288).
ctgcagggaggattcatgt

SEQ ID NO: 508521 - DNA, 19 bp, Mus musculus
  siRNA target sequence for Morc (NM_010816.1,327-345).
gaagcttcagacgtaattt

SEQ ID NO: 508522 - DNA, 19 bp, Mus musculus
  siRNA target sequence for Morc (NM_010816.1,330-348).
gcttcagacgtaatttact

SEQ ID NO: 508523 - DNA, 19 bp, Mus musculus
  siRNA target sequence for Morc (NM_010816.1,366-384).
cgcttgtcgaccttgaagt

SEQ ID NO: 508524 - DNA, 19 bp, Mus musculus
  siRNA target sequence for Morc (NM_010816.1,367-385).
gcttgtcgaccttgaagtt

SEQ ID NO: 508525 - DNA, 19 bp, Mus musculus
  siRNA target sequence for Morc (NM_010816.1,427-445).
gaatcggcaaagactgtat

SEQ ID NO: 508526 - DNA, 19 bp, Mus musculus
  siRNA target sequence for Morc (NM_010816.1,514-532).
gtctcactgaggttgtagt

SEQ ID NO: 508527 - DNA, 19 bp, Mus musculus
  siRNA target sequence for Morc (NM_010816.1,524-542).
ggttgtagttccaatacct

SEQ ID NO: 508528 - DNA, 19 bp, Mus musculus
  siRNA target sequence for Morc (NM_010816.1,525-543).
gttgtagttccaatacctt

SEQ ID NO: 508529 - DNA, 19 bp, Mus musculus
  siRNA target sequence for Morc (NM_010816.1,600-618).
gaattgtccatcattttca

SEQ ID NO: 508530 - DNA, 19 bp, Mus musculus
  siRNA target sequence for Morc (NM_010816.1,682-700).
gtggaactttgctgattat

SEQ ID NO: 508531 - DNA, 19 bp, Mus musculus
  siRNA target sequence for Morc (NM_010816.1,684-702).
ggaactttgctgattattt

SEQ ID NO: 508532 - DNA, 19 bp, Mus musculus
  siRNA target sequence for Morc (NM_010816.1,688-706).
ctttgctgattatttataa

SEQ ID NO: 508533 - DNA, 19 bp, Mus musculus
  siRNA target sequence for Morc (NM_010816.1,751-769).
ccgacaaagaagatatact

SEQ ID NO: 508534 - DNA, 19 bp, Mus musculus
  siRNA target sequence for Morc (NM_010816.1,776-794).
cgaggctccggaggaaatt

SEQ ID NO: 508535 - DNA, 19 bp, Mus musculus
  siRNA target sequence for Morc (NM_010816.1,823-841).
cagctgttctgtattttga

SEQ ID NO: 508536 - DNA, 19 bp, Mus musculus
  siRNA target sequence for Morc (NM_010816.1,840-858).
gaaccccggatgaaaatat

SEQ ID NO: 508537 - DNA, 19 bp, Mus musculus
  siRNA target sequence for Morc (NM_010816.1,843-861).
ccccggatgaaaatattta

SEQ ID NO: 508538 - DNA, 19 bp, Mus musculus
  siRNA target sequence for Morc (NM_010816.1,844-862).
cccggatgaaaatatttat

SEQ ID NO: 508539 - DNA, 19 bp, Mus musculus
  siRNA target sequence for Morc (NM_010816.1,994-1012).
gggctgaactcctgtttaa

SEQ ID NO: 508540 - DNA, 19 bp, Mus musculus
  siRNA target sequence for Morc (NM_010816.1,995-1013).
ggctgaactcctgtttaaa

SEQ ID NO: 508541 - DNA, 19 bp, Mus musculus
  siRNA target sequence for Morc (NM_010816.1,1034-1052).
ccagccggacagaattgct

SEQ ID NO: 508542 - DNA, 19 bp, Mus musculus
  siRNA target sequence for Morc (NM_010816.1,1035-1053).
cagccggacagaattgctt

SEQ ID NO: 508543 - DNA, 19 bp, Mus musculus
  siRNA target sequence for Morc (NM_010816.1,1040-1058).
ggacagaattgctttgtct

SEQ ID NO: 508544 - DNA, 19 bp, Mus musculus
  siRNA target sequence for Morc (NM_010816.1,1060-1078).
ctacccaggatgcattaca

SEQ ID NO: 508545 - DNA, 19 bp, Mus musculus
  siRNA target sequence for Morc (NM_010816.1,1100-1118).
cacaaagcataaaagtctt

SEQ ID NO: 508546 - DNA, 19 bp, Mus musculus
  siRNA target sequence for Morc (NM_010816.1,1136-1154).
cctaaggaaagcaagaact

SEQ ID NO: 508547 - DNA, 19 bp, Mus musculus
  siRNA target sequence for Morc (NM_010816.1,1193-1211).
ccaagctggaatgttcatt

SEQ ID NO: 508548 - DNA, 19 bp, Mus musculus
  siRNA target sequence for Morc (NM_010816.1,1194-1212).
caagctggaatgttcattt

SEQ ID NO: 508549 - DNA, 19 bp, Mus musculus
  siRNA target sequence for Morc (NM_010816.1,1197-1215).
gctggaatgttcatttaca

SEQ ID NO: 508550 - DNA, 19 bp, Mus musculus
  siRNA target sequence for Morc (NM_010816.1,1200-1218).
ggaatgttcatttacagta

SEQ ID NO: 508551 - DNA, 19 bp, Mus musculus
  siRNA target sequence for Morc (NM_010816.1,1201-1219).
gaatgttcatttacagtaa

SEQ ID NO: 508552 - DNA, 19 bp, Mus musculus
  siRNA target sequence for Morc (NM_010816.1,1262-1280).
gaaaatgaagtcattactt

SEQ ID NO: 508553 - DNA, 19 bp, Mus musculus
  siRNA target sequence for Morc (NM_010816.1,1282-1300).
gtgcaggtataattggaat

SEQ ID NO: 508554 - DNA, 19 bp, Mus musculus
  siRNA target sequence for Morc (NM_010816.1,1285-1303).
caggtataattggaattgt

SEQ ID NO: 508555 - DNA, 19 bp, Mus musculus
  siRNA target sequence for Morc (NM_010816.1,1287-1305).
ggtataattggaattgtga

SEQ ID NO: 508556 - DNA, 19 bp, Mus musculus
  siRNA target sequence for Morc (NM_010816.1,1330-1348).
catcccataataaacaaga

SEQ ID NO: 508557 - DNA, 19 bp, Mus musculus
  siRNA target sequence for Morc (NM_010816.1,1353-1371).
ctcaatgtccaagaataca

SEQ ID NO: 508558 - DNA, 19 bp, Mus musculus
  siRNA target sequence for Morc (NM_010816.1,1365-1383).
gaatacaatcatctactaa

SEQ ID NO: 508559 - DNA, 19 bp, Mus musculus
  siRNA target sequence for Morc (NM_010816.1,1427-1445).
gatcagtaatagaaaccta

SEQ ID NO: 508560 - DNA, 19 bp, Mus musculus
  siRNA target sequence for Morc (NM_010816.1,1447-1465).
cactgttttgggacgaatt

SEQ ID NO: 508561 - DNA, 19 bp, Mus musculus
  siRNA target sequence for Morc (NM_010816.1,1531-1549).
ccatgggtatcccattcat

SEQ ID NO: 508562 - DNA, 19 bp, Mus musculus
  siRNA target sequence for Morc (NM_010816.1,1604-1622).
ccaggaaaaaggattacct

SEQ ID NO: 508563 - DNA, 19 bp, Mus musculus
  siRNA target sequence for Morc (NM_010816.1,1799-1817).
gccgcagaagtctcaactt

SEQ ID NO: 508564 - DNA, 19 bp, Mus musculus
  siRNA target sequence for Morc (NM_010816.1,1800-1818).
ccgcagaagtctcaactta

SEQ ID NO: 508565 - DNA, 19 bp, Mus musculus
  siRNA target sequence for Morc (NM_010816.1,1801-1819).
cgcagaagtctcaacttat

SEQ ID NO: 508566 - DNA, 19 bp, Mus musculus
  siRNA target sequence for Morc (NM_010816.1,1802-1820).
gcagaagtctcaacttata

SEQ ID NO: 508567 - DNA, 19 bp, Mus musculus
  siRNA target sequence for Morc (NM_010816.1,1805-1823).
gaagtctcaacttatagta

SEQ ID NO: 508568 - DNA, 19 bp, Mus musculus
  siRNA target sequence for Morc (NM_010816.1,1808-1826).
gtctcaacttatagtaaca

SEQ ID NO: 508569 - DNA, 19 bp, Mus musculus
  siRNA target sequence for Morc (NM_010816.1,1871-1889).
caaggaaaaatccaaactt

SEQ ID NO: 508570 - DNA, 19 bp, Mus musculus
  siRNA target sequence for Morc (NM_010816.1,1947-1965).
ctttcgttcatgcaaagaa

SEQ ID NO: 508571 - DNA, 19 bp, Mus musculus
  siRNA target sequence for Morc (NM_010816.1,2009-2027).
catctgcatgacgaagatt

SEQ ID NO: 508572 - DNA, 19 bp, Mus musculus
  siRNA target sequence for Morc (NM_010816.1,2120-2138).
ggtttcttcacgggaaata

SEQ ID NO: 508573 - DNA, 19 bp, Mus musculus
  siRNA target sequence for Morc (NM_010816.1,2121-2139).
gtttcttcacgggaaataa

SEQ ID NO: 508574 - DNA, 19 bp, Mus musculus
  siRNA target sequence for Morc (NM_010816.1,2125-2143).
cttcacgggaaataaaaaa

SEQ ID NO: 508575 - DNA, 19 bp, Mus musculus
  siRNA target sequence for Morc (NM_010816.1,2240-2258).
caccaaggtctcactgaaa

SEQ ID NO: 508576 - DNA, 19 bp, Mus musculus
  siRNA target sequence for Morc (NM_010816.1,2271-2289).
gaggaagttcccctcataa

SEQ ID NO: 508577 - DNA, 19 bp, Mus musculus
  siRNA target sequence for Morc (NM_010816.1,2325-2343).
gtagtgaaaggaaattctt

SEQ ID NO: 508578 - DNA, 19 bp, Mus musculus
  siRNA target sequence for Morc (NM_010816.1,2346-2364).
gcgcttcactggaaaagct

SEQ ID NO: 508579 - DNA, 19 bp, Mus musculus
  siRNA target sequence for Morc (NM_010816.1,2347-2365).
cgcttcactggaaaagctt

SEQ ID NO: 508580 - DNA, 19 bp, Mus musculus
  siRNA target sequence for Morc (NM_010816.1,2371-2389).
gggtgcaaatggaagattt

SEQ ID NO: 508581 - DNA, 19 bp, Mus musculus
  siRNA target sequence for Morc (NM_010816.1,2372-2390).
ggtgcaaatggaagattta

SEQ ID NO: 508582 - DNA, 19 bp, Mus musculus
  siRNA target sequence for Morc (NM_010816.1,2373-2391).
gtgcaaatggaagatttaa

SEQ ID NO: 508583 - DNA, 19 bp, Mus musculus
  siRNA target sequence for Morc (NM_010816.1,2397-2415).
cgttctggacacaaaatca

SEQ ID NO: 508584 - DNA, 19 bp, Mus musculus
  siRNA target sequence for Morc (NM_010816.1,2398-2416).
gttctggacacaaaatcaa

SEQ ID NO: 508585 - DNA, 19 bp, Mus musculus
  siRNA target sequence for Morc (NM_010816.1,2491-2509).
gaaaactgctgtctaactt

SEQ ID NO: 508586 - DNA, 19 bp, Mus musculus
  siRNA target sequence for Morc (NM_010816.1,2501-2519).
gtctaacttaagggaaatt

SEQ ID NO: 508587 - DNA, 19 bp, Mus musculus
  siRNA target sequence for Morc (NM_010816.1,2535-2553).
cccgagtttcagctatcat

SEQ ID NO: 508588 - DNA, 19 bp, Mus musculus
  siRNA target sequence for Morc (NM_010816.1,2537-2555).
cgagtttcagctatcatca

SEQ ID NO: 508589 - DNA, 19 bp, Mus musculus
  siRNA target sequence for Morc (NM_010816.1,2547-2565).
ctatcatcagaatttgagt

SEQ ID NO: 508590 - DNA, 19 bp, Mus musculus
  siRNA target sequence for Morc (NM_010816.1,2569-2587).
catctgtggaagaactcat

SEQ ID NO: 508591 - DNA, 19 bp, Mus musculus
  siRNA target sequence for Morc (NM_010816.1,2604-2622).
gagcgatgcccagagaata

SEQ ID NO: 508592 - DNA, 19 bp, Mus musculus
  siRNA target sequence for Morc (NM_010816.1,2606-2624).
gcgatgcccagagaatata

SEQ ID NO: 508593 - DNA, 19 bp, Mus musculus
  siRNA target sequence for Morc (NM_010816.1,2607-2625).
cgatgcccagagaatataa

SEQ ID NO: 508594 - DNA, 19 bp, Mus musculus
  siRNA target sequence for Morc (NM_010816.1,2608-2626).
gatgcccagagaatataaa

SEQ ID NO: 508595 - DNA, 19 bp, Mus musculus
  siRNA target sequence for Morc (NM_010816.1,2618-2636).
gaatataaacgaaaagcta

SEQ ID NO: 508596 - DNA, 19 bp, Mus musculus
  siRNA target sequence for Morc (NM_010816.1,2674-2692).
ctcagtatgagaaaagact

SEQ ID NO: 508597 - DNA, 19 bp, Mus musculus
  siRNA target sequence for Morc (NM_010816.1,2715-2733).
gtctatgaggcaaacagaa

SEQ ID NO: 508598 - DNA, 19 bp, Mus musculus
  siRNA target sequence for Morc (NM_010816.1,2738-2756).
cttactcaaccaagtgttt

SEQ ID NO: 508599 - DNA, 19 bp, Mus musculus
  siRNA target sequence for Morc (NM_010816.1,2869-2887).
cgcagcagattgatgctta

SEQ ID NO: 508600 - DNA, 19 bp, Mus musculus
  siRNA target sequence for Morc (NM_010816.1,2873-2891).
gcagattgatgcttactta

SEQ ID NO: 508601 - DNA, 19 bp, Mus musculus
  siRNA target sequence for Morc (NM_010816.1,2876-2894).
gattgatgcttacttagaa

SEQ ID NO: 508602 - DNA, 19 bp, Mus musculus
  siRNA target sequence for Morc (NM_010816.1,2880-2898).
gatgcttacttagaagatt

SEQ ID NO: 508603 - DNA, 19 bp, Mus musculus
  siRNA target sequence for Morc (NM_010816.1,2914-2932).
ggctcccgaccgctttaca

SEQ ID NO: 508604 - DNA, 19 bp, Mus musculus
  siRNA target sequence for Morc (NM_010816.1,2918-2936).
cccgaccgctttacatgaa

SEQ ID NO: 508605 - DNA, 19 bp, Mus musculus
  siRNA target sequence for Morc (NM_010816.1,2919-2937).
ccgaccgctttacatgaaa

SEQ ID NO: 508606 - DNA, 19 bp, Mus musculus
  siRNA target sequence for Morc (NM_010816.1,2920-2938).
cgaccgctttacatgaaaa

SEQ ID NO: 508607 - DNA, 19 bp, Mus musculus
  siRNA target sequence for Morc (NM_010816.1,2924-2942).
cgctttacatgaaaagtct

SEQ ID NO: 508608 - DNA, 19 bp, Mus musculus
  siRNA target sequence for Mos (NM_020021.1,209-227).
ggtcctgcagcattccttt

SEQ ID NO: 508609 - DNA, 19 bp, Mus musculus
  siRNA target sequence for Mos (NM_020021.1,328-346).
caggtatgtctgatgcata

SEQ ID NO: 508610 - DNA, 19 bp, Mus musculus
  siRNA target sequence for Mos (NM_020021.1,361-379).
gggtttggctcggtgtata

SEQ ID NO: 508611 - DNA, 19 bp, Mus musculus
  siRNA target sequence for Mos (NM_020021.1,362-380).
ggtttggctcggtgtataa

SEQ ID NO: 508612 - DNA, 19 bp, Mus musculus
  siRNA target sequence for Mos (NM_020021.1,363-381).
gtttggctcggtgtataaa

SEQ ID NO: 508613 - DNA, 19 bp, Mus musculus
  siRNA target sequence for Mos (NM_020021.1,403-421).
gtggccatcaagcaagtaa

SEQ ID NO: 508614 - DNA, 19 bp, Mus musculus
  siRNA target sequence for Mos (NM_020021.1,445-463).
gcatcccagcggagtttct

SEQ ID NO: 508615 - DNA, 19 bp, Mus musculus
  siRNA target sequence for Mos (NM_020021.1,485-503).
gactacgccacgacaacat

SEQ ID NO: 508616 - DNA, 19 bp, Mus musculus
  siRNA target sequence for Mos (NM_020021.1,551-569).
gcctaggtaccataatcat

SEQ ID NO: 508617 - DNA, 19 bp, Mus musculus
  siRNA target sequence for Mos (NM_020021.1,709-727).
ctccactcacaaagcattt

SEQ ID NO: 508618 - DNA, 19 bp, Mus musculus
  siRNA target sequence for Mos (NM_020021.1,764-782).
gtgagcaagacgtttgtaa

SEQ ID NO: 508619 - DNA, 19 bp, Mus musculus
  siRNA target sequence for Mos (NM_020021.1,769-787).
caagacgtttgtaagatca

SEQ ID NO: 508620 - DNA, 19 bp, Mus musculus
  siRNA target sequence for Mov10 (NM_008619.1,211-229).
gccagaggttcgagagttt

SEQ ID NO: 508621 - DNA, 19 bp, Mus musculus
  siRNA target sequence for Mov10 (NM_008619.1,267-285).
gagcggctgcggacgattt

SEQ ID NO: 508622 - DNA, 19 bp, Mus musculus
  siRNA target sequence for Mov10 (NM_008619.1,270-288).
cggctgcggacgatttaca

SEQ ID NO: 508623 - DNA, 19 bp, Mus musculus
  siRNA target sequence for Mov10 (NM_008619.1,334-352).
cctccatgctgtatggaat

SEQ ID NO: 508624 - DNA, 19 bp, Mus musculus
  siRNA target sequence for Mov10 (NM_008619.1,349-367).
gaatgaagatcgcaaatct

SEQ ID NO: 508625 - DNA, 19 bp, Mus musculus
  siRNA target sequence for Mov10 (NM_008619.1,385-403).
ctcgggtcaggttcttcaa

SEQ ID NO: 508626 - DNA, 19 bp, Mus musculus
  siRNA target sequence for Mov10 (NM_008619.1,388-406).
gggtcaggttcttcaaact

SEQ ID NO: 508627 - DNA, 19 bp, Mus musculus
  siRNA target sequence for Mov10 (NM_008619.1,458-476).
gtcgaacatcagcaaacaa

SEQ ID NO: 508628 - DNA, 19 bp, Mus musculus
  siRNA target sequence for Mov10 (NM_008619.1,574-592).
gagacgggcaactccttat

SEQ ID NO: 508629 - DNA, 19 bp, Mus musculus
  siRNA target sequence for Mov10 (NM_008619.1,685-703).
gctggacgccccagtttgt

SEQ ID NO: 508630 - DNA, 19 bp, Mus musculus
  siRNA target sequence for Mov10 (NM_008619.1,688-706).
ggacgccccagtttgtctt

SEQ ID NO: 508631 - DNA, 19 bp, Mus musculus
  siRNA target sequence for Mov10 (NM_008619.1,691-709).
cgccccagtttgtcttcta

SEQ ID NO: 508632 - DNA, 19 bp, Mus musculus
  siRNA target sequence for Mov10 (NM_008619.1,745-763).
ccggtgaaagctatgaact

SEQ ID NO: 508633 - DNA, 19 bp, Mus musculus
  siRNA target sequence for Mov10 (NM_008619.1,754-772).
gctatgaactccacatcta

SEQ ID NO: 508634 - DNA, 19 bp, Mus musculus
  siRNA target sequence for Mov10 (NM_008619.1,1007-1025).
ccgagccaagggctatgaa

SEQ ID NO: 508635 - DNA, 19 bp, Mus musculus
  siRNA target sequence for Mov10 (NM_008619.1,1012-1030).
ccaagggctatgaactaga

SEQ ID NO: 508636 - DNA, 19 bp, Mus musculus
  siRNA target sequence for Mov10 (NM_008619.1,1163-1181).
cctgaaatccaggaactat

SEQ ID NO: 508637 - DNA, 19 bp, Mus musculus
  siRNA target sequence for Mov10 (NM_008619.1,1174-1192).
ggaactatgaggtgaaact

SEQ ID NO: 508638 - DNA, 19 bp, Mus musculus
  siRNA target sequence for Mov10 (NM_008619.1,1443-1461).
cgtgtcaagctgagctttt

SEQ ID NO: 508639 - DNA, 19 bp, Mus musculus
  siRNA target sequence for Mov10 (NM_008619.1,1446-1464).
gtcaagctgagcttttcta

SEQ ID NO: 508640 - DNA, 19 bp, Mus musculus
  siRNA target sequence for Mov10 (NM_008619.1,1468-1486).
gcctcctgagccgatttgt

SEQ ID NO: 508641 - DNA, 19 bp, Mus musculus
  siRNA target sequence for Mov10 (NM_008619.1,1575-1593).
gtgctatggcccatgcttt

SEQ ID NO: 508642 - DNA, 19 bp, Mus musculus
  siRNA target sequence for Mov10 (NM_008619.1,1577-1595).
gctatggcccatgcttttt

SEQ ID NO: 508643 - DNA, 19 bp, Mus musculus
  siRNA target sequence for Mov10 (NM_008619.1,1720-1738).
ggcctgccccctacatcat

SEQ ID NO: 508644 - DNA, 19 bp, Mus musculus
  siRNA target sequence for Mov10 (NM_008619.1,1756-1774).
ccggcaagactgtcacatt

SEQ ID NO: 508645 - DNA, 19 bp, Mus musculus
  siRNA target sequence for Mov10 (NM_008619.1,1759-1777).
gcaagactgtcacattagt

SEQ ID NO: 508646 - DNA, 19 bp, Mus musculus
  siRNA target sequence for Mov10 (NM_008619.1,1972-1990).
ctaagaagggagaatatgt

SEQ ID NO: 508647 - DNA, 19 bp, Mus musculus
  siRNA target sequence for Mov10 (NM_008619.1,2013-2031).
cagcaatatcgggtcttaa

SEQ ID NO: 508648 - DNA, 19 bp, Mus musculus
  siRNA target sequence for Mov10 (NM_008619.1,2015-2033).
gcaatatcgggtcttaatt

SEQ ID NO: 508649 - DNA, 19 bp, Mus musculus
  siRNA target sequence for Mov10 (NM_008619.1,2016-2034).
caatatcgggtcttaatta

SEQ ID NO: 508650 - DNA, 19 bp, Mus musculus
  siRNA target sequence for Mov10 (NM_008619.1,2152-2170).
caggactgatggatgtcaa

SEQ ID NO: 508651 - DNA, 19 bp, Mus musculus
  siRNA target sequence for Mov10 (NM_008619.1,2157-2175).
ctgatggatgtcaaggaaa

SEQ ID NO: 508652 - DNA, 19 bp, Mus musculus
  siRNA target sequence for Mov10 (NM_008619.1,2294-2312).
cgcctacaactccttgtat

SEQ ID NO: 508653 - DNA, 19 bp, Mus musculus
  siRNA target sequence for Mov10 (NM_008619.1,2295-2313).
gcctacaactccttgtata

SEQ ID NO: 508654 - DNA, 19 bp, Mus musculus
  siRNA target sequence for Mov10 (NM_008619.1,2296-2314).
cctacaactccttgtataa

SEQ ID NO: 508655 - DNA, 19 bp, Mus musculus
  siRNA target sequence for Mov10 (NM_008619.1,2512-2530).
gtgtaatgggcaaagatga

SEQ ID NO: 508656 - DNA, 19 bp, Mus musculus
  siRNA target sequence for Mov10 (NM_008619.1,2582-2600).
gacgtcatacctgaaacaa

SEQ ID NO: 508657 - DNA, 19 bp, Mus musculus
  siRNA target sequence for Mov10 (NM_008619.1,2584-2602).
cgtcatacctgaaacaact

SEQ ID NO: 508658 - DNA, 19 bp, Mus musculus
  siRNA target sequence for Mov10 (NM_008619.1,2693-2711).
ccgttactgcatcacaaaa

SEQ ID NO: 508659 - DNA, 19 bp, Mus musculus
  siRNA target sequence for Mov10 (NM_008619.1,2729-2747).
cggactggatgacatcaaa

SEQ ID NO: 508660 - DNA, 19 bp, Mus musculus
  siRNA target sequence for Mov10 (NM_008619.1,2873-2891).
gaaccccaagaggttcaat

SEQ ID NO: 508661 - DNA, 19 bp, Mus musculus
  siRNA target sequence for Mov10 (NM_008619.1,2952-2970).
cacgacccagactggaaaa

SEQ ID NO: 508662 - DNA, 19 bp, Mus musculus
  siRNA target sequence for Mov10 (NM_008619.1,2955-2973).
gacccagactggaaaacgt

SEQ ID NO: 508663 - DNA, 19 bp, Mus musculus
  siRNA target sequence for Mst1r (NM_009074.1,266-284).
cctctgccgctgcttcaat

SEQ ID NO: 508664 - DNA, 19 bp, Mus musculus
  siRNA target sequence for Mst1r (NM_009074.1,440-458).
gcctacgaggacagtacaa

SEQ ID NO: 508665 - DNA, 19 bp, Mus musculus
  siRNA target sequence for Mst1r (NM_009074.1,441-459).
cctacgaggacagtacaaa

SEQ ID NO: 508666 - DNA, 19 bp, Mus musculus
  siRNA target sequence for Mst1r (NM_009074.1,442-460).
ctacgaggacagtacaaat

SEQ ID NO: 508667 - DNA, 19 bp, Mus musculus
  siRNA target sequence for Mst1r (NM_009074.1,445-463).
cgaggacagtacaaatagt

SEQ ID NO: 508668 - DNA, 19 bp, Mus musculus
  siRNA target sequence for Mst1r (NM_009074.1,456-474).
caaatagtgcggtgtttgt

SEQ ID NO: 508669 - DNA, 19 bp, Mus musculus
  siRNA target sequence for Mst1r (NM_009074.1,505-523).
gcctgacctgcagttcata

SEQ ID NO: 508670 - DNA, 19 bp, Mus musculus
  siRNA target sequence for Mst1r (NM_009074.1,734-752).
gctccagcctgcctattct

SEQ ID NO: 508671 - DNA, 19 bp, Mus musculus
  siRNA target sequence for Mst1r (NM_009074.1,745-763).
cctattctcagcaaacaat

SEQ ID NO: 508672 - DNA, 19 bp, Mus musculus
  siRNA target sequence for Mst1r (NM_009074.1,746-764).
ctattctcagcaaacaata

SEQ ID NO: 508673 - DNA, 19 bp, Mus musculus
  siRNA target sequence for Mst1r (NM_009074.1,833-851).
gggcatgcttcctacttct

SEQ ID NO: 508674 - DNA, 19 bp, Mus musculus
  siRNA target sequence for Mst1r (NM_009074.1,875-893).
gagttggccgctagcttta

SEQ ID NO: 508675 - DNA, 19 bp, Mus musculus
  siRNA target sequence for Mst1r (NM_009074.1,910-928).
catccgtcgtctaaagtct

SEQ ID NO: 508676 - DNA, 19 bp, Mus musculus
  siRNA target sequence for Mst1r (NM_009074.1,914-932).
cgtcgtctaaagtctgata

SEQ ID NO: 508677 - DNA, 19 bp, Mus musculus
  siRNA target sequence for Mst1r (NM_009074.1,964-982).
gtcggtgctgcccaaatat

SEQ ID NO: 508678 - DNA, 19 bp, Mus musculus
  siRNA target sequence for Mst1r (NM_009074.1,986-1004).
gcctcctacctcatcaaat

SEQ ID NO: 508679 - DNA, 19 bp, Mus musculus
  siRNA target sequence for Mst1r (NM_009074.1,988-1006).
ctcctacctcatcaaatat

SEQ ID NO: 508680 - DNA, 19 bp, Mus musculus
  siRNA target sequence for Mst1r (NM_009074.1,990-1008).
cctacctcatcaaatatgt

SEQ ID NO: 508681 - DNA, 19 bp, Mus musculus
  siRNA target sequence for Mst1r (NM_009074.1,1015-1033).
cttccactcgggggatttt

SEQ ID NO: 508682 - DNA, 19 bp, Mus musculus
  siRNA target sequence for Mst1r (NM_009074.1,1023-1041).
cgggggattttgtctactt

SEQ ID NO: 508683 - DNA, 19 bp, Mus musculus
  siRNA target sequence for Mst1r (NM_009074.1,1024-1042).
gggggattttgtctacttt

SEQ ID NO: 508684 - DNA, 19 bp, Mus musculus
  siRNA target sequence for Mst1r (NM_009074.1,1145-1163).
ctggtcttggactgtcatt

SEQ ID NO: 508685 - DNA, 19 bp, Mus musculus
  siRNA target sequence for Mst1r (NM_009074.1,1150-1168).
cttggactgtcattttgca

SEQ ID NO: 508686 - DNA, 19 bp, Mus musculus
  siRNA target sequence for Mst1r (NM_009074.1,1339-1357).
gggtcccaactctgttgta

SEQ ID NO: 508687 - DNA, 19 bp, Mus musculus
  siRNA target sequence for Mst1r (NM_009074.1,1340-1358).
ggtcccaactctgttgtat

SEQ ID NO: 508688 - DNA, 19 bp, Mus musculus
  siRNA target sequence for Mst1r (NM_009074.1,1359-1377).
gtgccttccccatttacca

SEQ ID NO: 508689 - DNA, 19 bp, Mus musculus
  siRNA target sequence for Mst1r (NM_009074.1,1368-1386).
ccatttaccacctgaacat

SEQ ID NO: 508690 - DNA, 19 bp, Mus musculus
  siRNA target sequence for Mst1r (NM_009074.1,1378-1396).
cctgaacatcctgattgaa

SEQ ID NO: 508691 - DNA, 19 bp, Mus musculus
  siRNA target sequence for Mst1r (NM_009074.1,1397-1415).
gagggtgtcgaatattgct

SEQ ID NO: 508692 - DNA, 19 bp, Mus musculus
  siRNA target sequence for Mst1r (NM_009074.1,1446-1464).
cgagaggccttgacttctt

SEQ ID NO: 508693 - DNA, 19 bp, Mus musculus
  siRNA target sequence for Mst1r (NM_009074.1,1462-1480).
cttccagacgcccagtttt

SEQ ID NO: 508694 - DNA, 19 bp, Mus musculus
  siRNA target sequence for Mst1r (NM_009074.1,1465-1483).
ccagacgcccagtttttgt

SEQ ID NO: 508695 - DNA, 19 bp, Mus musculus
  siRNA target sequence for Mst1r (NM_009074.1,1527-1545).
gccactacttccctttgat

SEQ ID NO: 508696 - DNA, 19 bp, Mus musculus
  siRNA target sequence for Mst1r (NM_009074.1,1564-1582).
ccgtgtggacctcttcaat

SEQ ID NO: 508697 - DNA, 19 bp, Mus musculus
  siRNA target sequence for Mst1r (NM_009074.1,1621-1639).
gacacgtcttggcaatgtt

SEQ ID NO: 508698 - DNA, 19 bp, Mus musculus
  siRNA target sequence for Mst1r (NM_009074.1,1777-1795).
cgggaatgacctactcttt

SEQ ID NO: 508699 - DNA, 19 bp, Mus musculus
  siRNA target sequence for Mst1r (NM_009074.1,2117-2135).
ctgcctaaggactcttcaa

SEQ ID NO: 508700 - DNA, 19 bp, Mus musculus
  siRNA target sequence for Mst1r (NM_009074.1,2148-2166).
ggtccctcaaggaattcat

SEQ ID NO: 508701 - DNA, 19 bp, Mus musculus
  siRNA target sequence for Mst1r (NM_009074.1,2151-2169).
ccctcaaggaattcataca

SEQ ID NO: 508702 - DNA, 19 bp, Mus musculus
  siRNA target sequence for Mst1r (NM_009074.1,2164-2182).
catacaggaacttgaatgt

SEQ ID NO: 508703 - DNA, 19 bp, Mus musculus
  siRNA target sequence for Mst1r (NM_009074.1,2285-2303).
gtacaggaaggcttctctt

SEQ ID NO: 508704 - DNA, 19 bp, Mus musculus
  siRNA target sequence for Mst1r (NM_009074.1,2317-2335).
gctgacatcaataaaacct

SEQ ID NO: 508705 - DNA, 19 bp, Mus musculus
  siRNA target sequence for Mst1r (NM_009074.1,2349-2367).
gggctgggggtacttatct

SEQ ID NO: 508706 - DNA, 19 bp, Mus musculus
  siRNA target sequence for Mst1r (NM_009074.1,2351-2369).
gctgggggtacttatctca

SEQ ID NO: 508707 - DNA, 19 bp, Mus musculus
  siRNA target sequence for Mst1r (NM_009074.1,2449-2467).
caatgaggagcagatctta

SEQ ID NO: 508708 - DNA, 19 bp, Mus musculus
  siRNA target sequence for Mst1r (NM_009074.1,2496-2514).
ccagggtcccccttcatct

SEQ ID NO: 508709 - DNA, 19 bp, Mus musculus
  siRNA target sequence for Mst1r (NM_009074.1,2544-2562).
cctggacctttcactacaa

SEQ ID NO: 508710 - DNA, 19 bp, Mus musculus
  siRNA target sequence for Mst1r (NM_009074.1,2652-2670).
ggcacttcacgctatcatt

SEQ ID NO: 508711 - DNA, 19 bp, Mus musculus
  siRNA target sequence for Mst1r (NM_009074.1,2656-2674).
cttcacgctatcattccat

SEQ ID NO: 508712 - DNA, 19 bp, Mus musculus
  siRNA target sequence for Mst1r (NM_009074.1,2709-2727).
ggcagtttgtggaacaaca

SEQ ID NO: 508713 - DNA, 19 bp, Mus musculus
  siRNA target sequence for Mst1r (NM_009074.1,2871-2889).
ctggcctggttgagttgaa

SEQ ID NO: 508714 - DNA, 19 bp, Mus musculus
  siRNA target sequence for Mst1r (NM_009074.1,2973-2991).
gtgaggtctgccaacatga

SEQ ID NO: 508715 - DNA, 19 bp, Mus musculus
  siRNA target sequence for Mst1r (NM_009074.1,3129-3147).
cacagaggatactccttat

SEQ ID NO: 508716 - DNA, 19 bp, Mus musculus
  siRNA target sequence for Mst1r (NM_009074.1,3184-3202).
ggccgttgccctgatcttt

SEQ ID NO: 508717 - DNA, 19 bp, Mus musculus
  siRNA target sequence for Mst1r (NM_009074.1,3185-3203).
gccgttgccctgatcttta

SEQ ID NO: 508718 - DNA, 19 bp, Mus musculus
  siRNA target sequence for Mst1r (NM_009074.1,3252-3270).
caacactctctgacatcaa

SEQ ID NO: 508719 - DNA, 19 bp, Mus musculus
  siRNA target sequence for Mst1r (NM_009074.1,3285-3303).
gggctccgaaccatgaaga

SEQ ID NO: 508720 - DNA, 19 bp, Mus musculus
  siRNA target sequence for Mst1r (NM_009074.1,3390-3408).
ctgaggtcaaggatgtact

SEQ ID NO: 508721 - DNA, 19 bp, Mus musculus
  siRNA target sequence for Mst1r (NM_009074.1,3419-3437).
gaacaagtggtcatccata

SEQ ID NO: 508722 - DNA, 19 bp, Mus musculus
  siRNA target sequence for Mst1r (NM_009074.1,3433-3451).
ccatactgaccaagtcatt

SEQ ID NO: 508723 - DNA, 19 bp, Mus musculus
  siRNA target sequence for Mst1r (NM_009074.1,3473-3491).
gtctaccacggagaatata

SEQ ID NO: 508724 - DNA, 19 bp, Mus musculus
  siRNA target sequence for Mst1r (NM_009074.1,3475-3493).
ctaccacggagaatataca

SEQ ID NO: 508725 - DNA, 19 bp, Mus musculus
  siRNA target sequence for Mst1r (NM_009074.1,3529-3547).
gtctctgagtcgcattaca

SEQ ID NO: 508726 - DNA, 19 bp, Mus musculus
  siRNA target sequence for Mst1r (NM_009074.1,3726-3744).
ccactgtgaaggatcttgt

SEQ ID NO: 508727 - DNA, 19 bp, Mus musculus
  siRNA target sequence for Mst1r (NM_009074.1,3828-3846).
gcatgctggacgagtcatt

SEQ ID NO: 508728 - DNA, 19 bp, Mus musculus
  siRNA target sequence for Mst1r (NM_009074.1,3832-3850).
gctggacgagtcattcaca

SEQ ID NO: 508729 - DNA, 19 bp, Mus musculus
  siRNA target sequence for Mst1r (NM_009074.1,3881-3899).
ggcgtcctagacaaggaat

SEQ ID NO: 508730 - DNA, 19 bp, Mus musculus
  siRNA target sequence for Mst1r (NM_009074.1,3882-3900).
gcgtcctagacaaggaata

SEQ ID NO: 508731 - DNA, 19 bp, Mus musculus
  siRNA target sequence for Mst1r (NM_009074.1,3884-3902).
gtcctagacaaggaatact

SEQ ID NO: 508732 - DNA, 19 bp, Mus musculus
  siRNA target sequence for Mst1r (NM_009074.1,4013-4031).
ctgctctgggagctactaa

SEQ ID NO: 508733 - DNA, 19 bp, Mus musculus
  siRNA target sequence for Mst1r (NM_009074.1,4044-4062).
caccctacccccatatcga

SEQ ID NO: 508734 - DNA, 19 bp, Mus musculus
  siRNA target sequence for Mthfd1 (NM_138745.1,223-241).
gttggcgacagagatgatt

SEQ ID NO: 508735 - DNA, 19 bp, Mus musculus
  siRNA target sequence for Mthfd1 (NM_138745.1,400-418).
cctttagattcagagaatt

SEQ ID NO: 508736 - DNA, 19 bp, Mus musculus
  siRNA target sequence for Mthfd1 (NM_138745.1,406-424).
gattcagagaattccatta

SEQ ID NO: 508737 - DNA, 19 bp, Mus musculus
  siRNA target sequence for Mthfd1 (NM_138745.1,498-516).
gctcgccagaggtgatcta

SEQ ID NO: 508738 - DNA, 19 bp, Mus musculus
  siRNA target sequence for Mthfd1 (NM_138745.1,501-519).
cgccagaggtgatctaaat

SEQ ID NO: 508739 - DNA, 19 bp, Mus musculus
  siRNA target sequence for Mthfd1 (NM_138745.1,503-521).
ccagaggtgatctaaatga

SEQ ID NO: 508740 - DNA, 19 bp, Mus musculus
  siRNA target sequence for Mthfd1 (NM_138745.1,604-622).
gtggttggtcgaagtaaga

SEQ ID NO: 508741 - DNA, 19 bp, Mus musculus
  siRNA target sequence for Mthfd1 (NM_138745.1,606-624).
ggttggtcgaagtaagata

SEQ ID NO: 508742 - DNA, 19 bp, Mus musculus
  siRNA target sequence for Mthfd1 (NM_138745.1,705-723).
caaggaggtaaataaagga

SEQ ID NO: 508743 - DNA, 19 bp, Mus musculus
  siRNA target sequence for Mthfd1 (NM_138745.1,795-813).
catagactgtgggatcaat

SEQ ID NO: 508744 - DNA, 19 bp, Mus musculus
  siRNA target sequence for Mthfd1 (NM_138745.1,801-819).
ctgtgggatcaattatgtt

SEQ ID NO: 508745 - DNA, 19 bp, Mus musculus
  siRNA target sequence for Mthfd1 (NM_138745.1,883-901).
gagagggcgagctttatca

SEQ ID NO: 508746 - DNA, 19 bp, Mus musculus
  siRNA target sequence for Mthfd1 (NM_138745.1,972-990).
gcgcttcctacagaaattt

SEQ ID NO: 508747 - DNA, 19 bp, Mus musculus
  siRNA target sequence for Mthfd1 (NM_138745.1,973-991).
cgcttcctacagaaattta

SEQ ID NO: 508748 - DNA, 19 bp, Mus musculus
  siRNA target sequence for Mthfd1 (NM_138745.1,993-1011).
gccagggaagtggacaatt

SEQ ID NO: 508749 - DNA, 19 bp, Mus musculus
  siRNA target sequence for Mthfd1 (NM_138745.1,995-1013).
cagggaagtggacaattca

SEQ ID NO: 508750 - DNA, 19 bp, Mus musculus
  siRNA target sequence for Mthfd1 (NM_138745.1,1004-1022).
ggacaattcagtataacaa

SEQ ID NO: 508751 - DNA, 19 bp, Mus musculus
  siRNA target sequence for Mthfd1 (NM_138745.1,1064-1082).
cacgatcttgcaaaccaaa

SEQ ID NO: 508752 - DNA, 19 bp, Mus musculus
  siRNA target sequence for Mthfd1 (NM_138745.1,1121-1139).
ccgaagaggtggagttgta

SEQ ID NO: 508753 - DNA, 19 bp, Mus musculus
  siRNA target sequence for Mthfd1 (NM_138745.1,1210-1228).
gtcgtggtgactggaatta

SEQ ID NO: 508754 - DNA, 19 bp, Mus musculus
  siRNA target sequence for Mthfd1 (NM_138745.1,1212-1230).
cgtggtgactggaattact

SEQ ID NO: 508755 - DNA, 19 bp, Mus musculus
  siRNA target sequence for Mthfd1 (NM_138745.1,1472-1490).
ccattgatgctcggatatt

SEQ ID NO: 508756 - DNA, 19 bp, Mus musculus
  siRNA target sequence for Mthfd1 (NM_138745.1,1473-1491).
cattgatgctcggatattt

SEQ ID NO: 508757 - DNA, 19 bp, Mus musculus
  siRNA target sequence for Mthfd1 (NM_138745.1,1512-1530).
caaggctctctttaatcgt

SEQ ID NO: 508758 - DNA, 19 bp, Mus musculus
  siRNA target sequence for Mthfd1 (NM_138745.1,1528-1546).
cgtctggtaccttcagtaa

SEQ ID NO: 508759 - DNA, 19 bp, Mus musculus
  siRNA target sequence for Mthfd1 (NM_138745.1,1529-1547).
gtctggtaccttcagtaaa

SEQ ID NO: 508760 - DNA, 19 bp, Mus musculus
  siRNA target sequence for Mthfd1 (NM_138745.1,1537-1555).
ccttcagtaaacggaataa

SEQ ID NO: 508761 - DNA, 19 bp, Mus musculus
  siRNA target sequence for Mthfd1 (NM_138745.1,1589-1607).
ggaggctaggcattgagaa

SEQ ID NO: 508762 - DNA, 19 bp, Mus musculus
  siRNA target sequence for Mthfd1 (NM_138745.1,1635-1653).
cgagataaacagatttgca

SEQ ID NO: 508763 - DNA, 19 bp, Mus musculus
  siRNA target sequence for Mthfd1 (NM_138745.1,1666-1684).
gacccagaaaccataacat

SEQ ID NO: 508764 - DNA, 19 bp, Mus musculus
  siRNA target sequence for Mthfd1 (NM_138745.1,1716-1734).
cctgaggaagatcacaatt

SEQ ID NO: 508765 - DNA, 19 bp, Mus musculus
  siRNA target sequence for Mthfd1 (NM_138745.1,1763-1781).
cacgcacggcccagtttga

SEQ ID NO: 508766 - DNA, 19 bp, Mus musculus
  siRNA target sequence for Mthfd1 (NM_138745.1,1770-1788).
ggcccagtttgatatctct

SEQ ID NO: 508767 - DNA, 19 bp, Mus musculus
  siRNA target sequence for Mthfd1 (NM_138745.1,2142-2160).
catcaagtgccggtattct

SEQ ID NO: 508768 - DNA, 19 bp, Mus musculus
  siRNA target sequence for Mthfd1 (NM_138745.1,2195-2213).
ctgtcagggcccttaagat

SEQ ID NO: 508769 - DNA, 19 bp, Mus musculus
  siRNA target sequence for Mthfd1 (NM_138745.1,2287-2305).
gttgaaaagggcttcagta

SEQ ID NO: 508770 - DNA, 19 bp, Mus musculus
  siRNA target sequence for Mthfd1 (NM_138745.1,2303-2321).
gtaacttgaggaaacaaat

SEQ ID NO: 508771 - DNA, 19 bp, Mus musculus
  siRNA target sequence for Mthfd1 (NM_138745.1,2359-2377).
gctgtgaacgtgttcaaga

SEQ ID NO: 508772 - DNA, 19 bp, Mus musculus
  siRNA target sequence for Mthfd1 (NM_138745.1,2367-2385).
cgtgttcaagacagataca

SEQ ID NO: 508773 - DNA, 19 bp, Mus musculus
  siRNA target sequence for Mthfd1 (NM_138745.1,2563-2581).
gaggataaaatcaggatta

SEQ ID NO: 508774 - DNA, 19 bp, Mus musculus
  siRNA target sequence for Mthfd1 (NM_138745.1,2565-2583).
ggataaaatcaggattatt

SEQ ID NO: 508775 - DNA, 19 bp, Mus musculus
  siRNA target sequence for Mthfd1 (NM_138745.1,2603-2621).
ccgatgacatcgaattgct

SEQ ID NO: 508776 - DNA, 19 bp, Mus musculus
  siRNA target sequence for Mthfd1 (NM_138745.1,2658-2676).
gcagggctttgggaatcta

SEQ ID NO: 508777 - DNA, 19 bp, Mus musculus
  siRNA target sequence for Mthfd1 (NM_138745.1,2733-2751).
ggtgcctactggtttcgtt

SEQ ID NO: 508778 - DNA, 19 bp, Mus musculus
  siRNA target sequence for Mthfd1 (NM_138745.1,2785-2803).
gcaggtttcctgtatcctt

SEQ ID NO: 508779 - DNA, 19 bp, Mus musculus
  siRNA target sequence for Mthfd1 (NM_138745.1,2873-2891).
ctgaaacggaacaagtgaa

SEQ ID NO: 508780 - DNA, 19 bp, Mus musculus
  siRNA target sequence for Mtssk (NM_008641.1,141-159).
ctcttcaggaagcttagta

SEQ ID NO: 508781 - DNA, 19 bp, Mus musculus
  siRNA target sequence for Mtssk (NM_008641.1,143-161).
cttcaggaagcttagtaat

SEQ ID NO: 508782 - DNA, 19 bp, Mus musculus
  siRNA target sequence for Mtssk (NM_008641.1,152-170).
gcttagtaatcctgacata

SEQ ID NO: 508783 - DNA, 19 bp, Mus musculus
  siRNA target sequence for Mtssk (NM_008641.1,337-355).
catcaaacctggttcgaat

SEQ ID NO: 508784 - DNA, 19 bp, Mus musculus
  siRNA target sequence for Mtssk (NM_008641.1,394-412).
cggctggcttgaaggaatt

SEQ ID NO: 508785 - DNA, 19 bp, Mus musculus
  siRNA target sequence for Mtssk (NM_008641.1,433-451).
gcttttgtcggacaagtaa

SEQ ID NO: 508786 - DNA, 19 bp, Mus musculus
  siRNA target sequence for Mtssk (NM_008641.1,452-470).
ccgcaagagcttgattgta

SEQ ID NO: 508787 - DNA, 19 bp, Mus musculus
  siRNA target sequence for Mtssk (NM_008641.1,551-569).
ccggaatttctctccaaat

SEQ ID NO: 508788 - DNA, 19 bp, Mus musculus
  siRNA target sequence for Mtssk (NM_008641.1,691-709).
gttcctcacaagaaaagct

SEQ ID NO: 508789 - DNA, 19 bp, Mus musculus
  siRNA target sequence for Mtssk (NM_008641.1,733-751).
cagctgatgaactacactt

SEQ ID NO: 508790 - DNA, 19 bp, Mus musculus
  siRNA target sequence for Mtssk (NM_008641.1,738-756).
gatgaactacactttctga

SEQ ID NO: 508791 - DNA, 19 bp, Mus musculus
  siRNA target sequence for Mtssk (NM_008641.1,753-771).
ctgacgaagcattttagca

SEQ ID NO: 508792 - DNA, 19 bp, Mus musculus
  siRNA target sequence for Mtssk (NM_008641.1,859-877).
cctttgacagtgaaataat

SEQ ID NO: 508793 - DNA, 19 bp, Mus musculus
  siRNA target sequence for Mtssk (NM_008641.1,864-882).
gacagtgaaataataatga

SEQ ID NO: 508794 - DNA, 19 bp, Mus musculus
  siRNA target sequence for Mtssk (NM_008641.1,959-977).
ctctaacactccagatagt

SEQ ID NO: 508795 - DNA, 19 bp, Mus musculus
  siRNA target sequence for Mtssk (NM_008641.1,961-979).
ctaacactccagatagtgt

SEQ ID NO: 508796 - DNA, 19 bp, Mus musculus
  siRNA target sequence for Mtssk (NM_008641.1,991-1009).
cagatggagcactaagctt

SEQ ID NO: 508797 - DNA, 19 bp, Mus musculus
  siRNA target sequence for Mtssk (NM_008641.1,993-1011).
gatggagcactaagcttta

SEQ ID NO: 508798 - DNA, 19 bp, Mus musculus
  siRNA target sequence for Mtssk (NM_008641.1,1000-1018).
cactaagctttattcatca

SEQ ID NO: 508799 - DNA, 19 bp, Mus musculus
  siRNA target sequence for Mtssk (NM_008641.1,1014-1032).
catcatcaggtgattgaga

SEQ ID NO: 508800 - DNA, 19 bp, Mus musculus
  siRNA target sequence for Mtssk (NM_008641.1,1036-1054).
cccgagactgcctggataa

SEQ ID NO: 508801 - DNA, 19 bp, Mus musculus
  siRNA target sequence for Mtssk (NM_008641.1,1037-1055).
ccgagactgcctggataaa

SEQ ID NO: 508802 - DNA, 19 bp, Mus musculus
  siRNA target sequence for Mtssk (NM_008641.1,1038-1056).
cgagactgcctggataaat

SEQ ID NO: 508803 - DNA, 19 bp, Mus musculus
  siRNA target sequence for Mtssk (NM_008641.1,1059-1077).
cggagtggcctcattacgt

SEQ ID NO: 508804 - DNA, 19 bp, Mus musculus
  siRNA target sequence for Mtssk (NM_008641.1,1067-1085).
cctcattacgtcacactat

SEQ ID NO: 508805 - DNA, 19 bp, Mus musculus
  siRNA target sequence for Mtssk (NM_008641.1,1068-1086).
ctcattacgtcacactatt

SEQ ID NO: 508806 - DNA, 19 bp, Mus musculus
  siRNA target sequence for Mtssk (NM_008641.1,1139-1157).
ctcagaaagctcagatgta

SEQ ID NO: 508807 - DNA, 19 bp, Mus musculus
  siRNA target sequence for Mtssk (NM_008641.1,1282-1300).
ccaaagagggacatggaat

SEQ ID NO: 508808 - DNA, 19 bp, Mus musculus
  siRNA target sequence for Mtssk (NM_008641.1,1382-1400).
ctatgacagtccagatact

SEQ ID NO: 508809 - DNA, 19 bp, Mus musculus
  siRNA target sequence for Mtssk (NM_008641.1,1540-1558).
cgcggcagcgctttgcaat

SEQ ID NO: 508810 - DNA, 19 bp, Mus musculus
  siRNA target sequence for Mtssk (NM_008641.1,1614-1632).
gtggaacgcgacatactga

SEQ ID NO: 508811 - DNA, 19 bp, Mus musculus
  siRNA target sequence for Mtssk (NM_008641.1,1804-1822).
ctttggaatacttacacaa

SEQ ID NO: 508812 - DNA, 19 bp, Mus musculus
  siRNA target sequence for Mtssk (NM_008641.1,1916-1934).
cggcctcatgagtttgaca

SEQ ID NO: 508813 - DNA, 19 bp, Mus musculus
  siRNA target sequence for Mtssk (NM_008641.1,1917-1935).
ggcctcatgagtttgacaa

SEQ ID NO: 508814 - DNA, 19 bp, Mus musculus
  siRNA target sequence for Mtssk (NM_008641.1,1927-1945).
gtttgacaaccaacttgta

SEQ ID NO: 508815 - DNA, 19 bp, Mus musculus
  siRNA target sequence for Mtssk (NM_008641.1,1940-1958).
cttgtatgagggtcatatt

SEQ ID NO: 508816 - DNA, 19 bp, Mus musculus
  siRNA target sequence for Mtssk (NM_008641.1,1949-1967).
gggtcatattgaaaaggat

SEQ ID NO: 508817 - DNA, 19 bp, Mus musculus
  siRNA target sequence for Mtssk (NM_008641.1,1996-2014).
gcgggaccccggaatacat

SEQ ID NO: 508818 - DNA, 19 bp, Mus musculus
  siRNA target sequence for Mtssk (NM_008641.1,1997-2015).
cgggaccccggaatacata

SEQ ID NO: 508819 - DNA, 19 bp, Mus musculus
  siRNA target sequence for Mtssk (NM_008641.1,2073-2091).
ggcataatcctgtatgagt

SEQ ID NO: 508820 - DNA, 19 bp, Mus musculus
  siRNA target sequence for Mtssk (NM_008641.1,2215-2233).
cttccaaactgcttcatca

SEQ ID NO: 508821 - DNA, 19 bp, Mus musculus
  siRNA target sequence for Mtssk (NM_008641.1,2244-2262).
gaaagactgggcacaagta

SEQ ID NO: 508822 - DNA, 19 bp, Mus musculus
  siRNA target sequence for Mtssk (NM_008641.1,2257-2275).
caagtagtgcctatgaagt

SEQ ID NO: 508823 - DNA, 19 bp, Mus musculus
  siRNA target sequence for Mtssk (NM_008641.1,2322-2340).
cggcagaaggctgaattta

SEQ ID NO: 508824 - DNA, 19 bp, Mus musculus
  siRNA target sequence for Mtssk (NM_008641.1,2438-2456).
ggatggctgccttgagatt

SEQ ID NO: 508825 - DNA, 19 bp, Mus musculus
  siRNA target sequence for Mtssk (NM_008641.1,2448-2466).
cttgagattcgccagtttt

SEQ ID NO: 508826 - DNA, 19 bp, Mus musculus
  siRNA target sequence for Mtssk (NM_008641.1,2451-2469).
gagattcgccagttttctt

SEQ ID NO: 508827 - DNA, 19 bp, Mus musculus
  siRNA target sequence for Mtssk (NM_008641.1,2479-2497).
caaggttcagcaaggttta

SEQ ID NO: 508828 - DNA, 19 bp, Mus musculus
  siRNA target sequence for Mtssk (NM_008641.1,2630-2648).
gattgggtcccctgagata

SEQ ID NO: 508829 - DNA, 19 bp, Mus musculus
  siRNA target sequence for Mtssk (NM_008641.1,2776-2794).
cccctcggaagcaacaaca

SEQ ID NO: 508830 - DNA, 19 bp, Mus musculus
  siRNA target sequence for Mtssk (NM_008641.1,2860-2878).
cgttggagaggcaactgaa

SEQ ID NO: 508831 - DNA, 19 bp, Mus musculus
  siRNA target sequence for Mtssk (NM_008641.1,3020-3038).
gctctctggggactctata

SEQ ID NO: 508832 - DNA, 19 bp, Mus musculus
  siRNA target sequence for Mtssk (NM_008641.1,3049-3067).
ccactcgccctgtcaacaa

SEQ ID NO: 508833 - DNA, 19 bp, Mus musculus
  siRNA target sequence for Mtssk (NM_008641.1,3050-3068).
cactcgccctgtcaacaaa

SEQ ID NO: 508834 - DNA, 19 bp, Mus musculus
  siRNA target sequence for Mtssk (NM_008641.1,3054-3072).
cgccctgtcaacaaagtaa

SEQ ID NO: 508835 - DNA, 19 bp, Mus musculus
  siRNA target sequence for Mtssk (NM_008641.1,3060-3078).
gtcaacaaagtaatcaagt

SEQ ID NO: 508836 - DNA, 19 bp, Mus musculus
  siRNA target sequence for Mtssk (NM_008641.1,3252-3270).
caccgagctggcaagaagt

SEQ ID NO: 508837 - DNA, 19 bp, Mus musculus
  siRNA target sequence for Mtssk (NM_008641.1,3469-3487).
gtggaaacaaggtatcaat

SEQ ID NO: 508838 - DNA, 19 bp, Mus musculus
  siRNA target sequence for Mtssk (NM_008641.1,3476-3494).
caaggtatcaatttcaaca

SEQ ID NO: 508839 - DNA, 19 bp, Mus musculus
  siRNA target sequence for Mtssk (NM_008641.1,3479-3497).
ggtatcaatttcaacaact

SEQ ID NO: 508840 - DNA, 19 bp, Mus musculus
  siRNA target sequence for Mtssk (NM_008641.1,3503-3521).
ggagaacacgtcaatcaaa

SEQ ID NO: 508841 - DNA, 19 bp, Mus musculus
  siRNA target sequence for Mtssk (NM_008641.1,3594-3612).
gggcaagaaagccgaaaaa

SEQ ID NO: 508842 - DNA, 19 bp, Mus musculus
  siRNA target sequence for Mtssk (NM_008641.1,3616-3634).
gctccctattccggaaaat

SEQ ID NO: 508843 - DNA, 19 bp, Mus musculus
  siRNA target sequence for Mtssk (NM_008641.1,3681-3699).
cttaaccgctccttgtcat

SEQ ID NO: 508844 - DNA, 19 bp, Mus musculus
  siRNA target sequence for Mtssk (NM_008641.1,4393-4411).
gccgtgagtcactgcaaaa

SEQ ID NO: 508845 - DNA, 19 bp, Mus musculus
  siRNA target sequence for Mtssk (NM_008641.1,4523-4541).
caatctactccctaaaggt

SEQ ID NO: 508846 - DNA, 19 bp, Mus musculus
  siRNA target sequence for Mtssk (NM_008641.1,4802-4820).
ggcactaactgcactttgt

SEQ ID NO: 508847 - DNA, 19 bp, Mus musculus
  siRNA target sequence for Mtssk (NM_008641.1,4884-4902).
gggacatggtcctggaaat

SEQ ID NO: 508848 - DNA, 19 bp, Mus musculus
  siRNA target sequence for Mtssk (NM_008641.1,4894-4912).
cctggaaattccttattga

SEQ ID NO: 508849 - DNA, 19 bp, Mus musculus
  siRNA target sequence for Mtssk (NM_008641.1,4962-4980).
ccagctaactcccaagata

SEQ ID NO: 508850 - DNA, 19 bp, Mus musculus
  siRNA target sequence for Mtssk (NM_008641.1,4966-4984).
ctaactcccaagatacgaa

SEQ ID NO: 508851 - DNA, 19 bp, Mus musculus
  siRNA target sequence for Mtssk (NM_008641.1,4987-5005).
ccacggtcccaaatcttct

SEQ ID NO: 508852 - DNA, 19 bp, Mus musculus
  siRNA target sequence for Mtssk (NM_008641.1,5098-5116).
catgggagtctgaatgtga

SEQ ID NO: 508853 - DNA, 19 bp, Mus musculus
  siRNA target sequence for Mtssk (NM_008641.1,5102-5120).
ggagtctgaatgtgaacaa

SEQ ID NO: 508854 - DNA, 19 bp, Mus musculus
  siRNA target sequence for Mtssk (NM_008641.1,5293-5311).
catcagatgagctcttaaa

SEQ ID NO: 508855 - DNA, 19 bp, Mus musculus
  siRNA target sequence for Mucdhl (NM_028069.1,276-294).
ctttaggatcgaaggaaaa

SEQ ID NO: 508856 - DNA, 19 bp, Mus musculus
  siRNA target sequence for Mucdhl (NM_028069.1,429-447).
gccaaaattctcctttgaa

SEQ ID NO: 508857 - DNA, 19 bp, Mus musculus
  siRNA target sequence for Mucdhl (NM_028069.1,440-458).
cctttgaaatcaagacatt

SEQ ID NO: 508858 - DNA, 19 bp, Mus musculus
  siRNA target sequence for Mucdhl (NM_028069.1,469-487).
gaggacaccaaagtgaata

SEQ ID NO: 508859 - DNA, 19 bp, Mus musculus
  siRNA target sequence for Mucdhl (NM_028069.1,517-535).
gctacagatgctgacataa

SEQ ID NO: 508860 - DNA, 19 bp, Mus musculus
  siRNA target sequence for Mucdhl (NM_028069.1,593-611).
ccctggagggcgtaaacta

SEQ ID NO: 508861 - DNA, 19 bp, Mus musculus
  siRNA target sequence for Mucdhl (NM_028069.1,631-649).
cagaccctggattacttca

SEQ ID NO: 508862 - DNA, 19 bp, Mus musculus
  siRNA target sequence for Mucdhl (NM_028069.1,727-745).
gccaccctggtcttgaaca

SEQ ID NO: 508863 - DNA, 19 bp, Mus musculus
  siRNA target sequence for Mucdhl (NM_028069.1,902-920).
gagatcaggccattaacca

SEQ ID NO: 508864 - DNA, 19 bp, Mus musculus
  siRNA target sequence for Mucdhl (NM_028069.1,923-941).
ctatcatctacagcattat

SEQ ID NO: 508865 - DNA, 19 bp, Mus musculus
  siRNA target sequence for Mucdhl (NM_028069.1,936-954).
cattatagcgggaaacaca

SEQ ID NO: 508866 - DNA, 19 bp, Mus musculus
  siRNA target sequence for Mucdhl (NM_028069.1,953-971).
cagatggcacattcatcat

SEQ ID NO: 508867 - DNA, 19 bp, Mus musculus
  siRNA target sequence for Mucdhl (NM_028069.1,991-1009).
ctcacaatgaccaaaagta

SEQ ID NO: 508868 - DNA, 19 bp, Mus musculus
  siRNA target sequence for Mucdhl (NM_028069.1,1012-1030).
ccgagccccatgaagttca

SEQ ID NO: 508869 - DNA, 19 bp, Mus musculus
  siRNA target sequence for Mucdhl (NM_028069.1,1128-1146).
ctcccagagcctgtactat

SEQ ID NO: 508870 - DNA, 19 bp, Mus musculus
  siRNA target sequence for Mucdhl (NM_028069.1,1389-1407).
cacagccaccgctgttgtt

SEQ ID NO: 508871 - DNA, 19 bp, Mus musculus
  siRNA target sequence for Mucdhl (NM_028069.1,1391-1409).
cagccaccgctgttgttga

SEQ ID NO: 508872 - DNA, 19 bp, Mus musculus
  siRNA target sequence for Mucdhl (NM_028069.1,1462-1480).
gatggccagagattttcca

SEQ ID NO: 508873 - DNA, 19 bp, Mus musculus
  siRNA target sequence for Musk (NM_010944.1,3-21).
gagagagcttgtcaacatt

SEQ ID NO: 508874 - DNA, 19 bp, Mus musculus
  siRNA target sequence for Musk (NM_010944.1,54-72).
cagcgggactgagaaactt

SEQ ID NO: 508875 - DNA, 19 bp, Mus musculus
  siRNA target sequence for Musk (NM_010944.1,92-110).
ccacgcctcttgaaactgt

SEQ ID NO: 508876 - DNA, 19 bp, Mus musculus
  siRNA target sequence for Musk (NM_010944.1,93-111).
cacgcctcttgaaactgta

SEQ ID NO: 508877 - DNA, 19 bp, Mus musculus
  siRNA target sequence for Musk (NM_010944.1,124-142).
gaagaagtagcgactttca

SEQ ID NO: 508878 - DNA, 19 bp, Mus musculus
  siRNA target sequence for Musk (NM_010944.1,127-145).
gaagtagcgactttcatgt

SEQ ID NO: 508879 - DNA, 19 bp, Mus musculus
  siRNA target sequence for Musk (NM_010944.1,162-180).
ccctcagcccgagatttct

SEQ ID NO: 508880 - DNA, 19 bp, Mus musculus
  siRNA target sequence for Musk (NM_010944.1,244-262).
cagctcctcaccattctga

SEQ ID NO: 508881 - DNA, 19 bp, Mus musculus
  siRNA target sequence for Musk (NM_010944.1,354-372).
gatgaaacctaaaataact

SEQ ID NO: 508882 - DNA, 19 bp, Mus musculus
  siRNA target sequence for Musk (NM_010944.1,474-492).
caatgctctcagggaaaat

SEQ ID NO: 508883 - DNA, 19 bp, Mus musculus
  siRNA target sequence for Musk (NM_010944.1,521-539).
gcttaaggatccataatgt

SEQ ID NO: 508884 - DNA, 19 bp, Mus musculus
  siRNA target sequence for Musk (NM_010944.1,527-545).
ggatccataatgtgcaaaa

SEQ ID NO: 508885 - DNA, 19 bp, Mus musculus
  siRNA target sequence for Musk (NM_010944.1,565-583).
cgctgtgtggccaaaaaca

SEQ ID NO: 508886 - DNA, 19 bp, Mus musculus
  siRNA target sequence for Musk (NM_010944.1,650-668).
ctcctgaatcccacaatgt

SEQ ID NO: 508887 - DNA, 19 bp, Mus musculus
  siRNA target sequence for Musk (NM_010944.1,661-679).
cacaatgtcacctttggtt

SEQ ID NO: 508888 - DNA, 19 bp, Mus musculus
  siRNA target sequence for Musk (NM_010944.1,835-853).
ctctacacatgcatagcta

SEQ ID NO: 508889 - DNA, 19 bp, Mus musculus
  siRNA target sequence for Musk (NM_010944.1,845-863).
gcatagctaccaataagca

SEQ ID NO: 508890 - DNA, 19 bp, Mus musculus
  siRNA target sequence for Musk (NM_010944.1,917-935).
ggagtaagtcacagaaaga

SEQ ID NO: 508891 - DNA, 19 bp, Mus musculus
  siRNA target sequence for Musk (NM_010944.1,1218-1236).
gctcttctgtgcaaaggaa

SEQ ID NO: 508892 - DNA, 19 bp, Mus musculus
  siRNA target sequence for Musk (NM_010944.1,1349-1367).
gcacaagactgccatattt

SEQ ID NO: 508893 - DNA, 19 bp, Mus musculus
  siRNA target sequence for Musk (NM_010944.1,1350-1368).
cacaagactgccatattta

SEQ ID NO: 508894 - DNA, 19 bp, Mus musculus
  siRNA target sequence for Musk (NM_010944.1,1352-1370).
caagactgccatatttaga

SEQ ID NO: 508895 - DNA, 19 bp, Mus musculus
  siRNA target sequence for Musk (NM_010944.1,1420-1438).
ccgagcgcggacattccaa

SEQ ID NO: 508896 - DNA, 19 bp, Mus musculus
  siRNA target sequence for Musk (NM_010944.1,1421-1439).
cgagcgcggacattccaaa

SEQ ID NO: 508897 - DNA, 19 bp, Mus musculus
  siRNA target sequence for Musk (NM_010944.1,1678-1696).
ccactccttctgaatccta

SEQ ID NO: 508898 - DNA, 19 bp, Mus musculus
  siRNA target sequence for Musk (NM_010944.1,1679-1697).
cactccttctgaatcctaa

SEQ ID NO: 508899 - DNA, 19 bp, Mus musculus
  siRNA target sequence for Musk (NM_010944.1,1708-1726).
ctggagtatccgaggaata

SEQ ID NO: 508900 - DNA, 19 bp, Mus musculus
  siRNA target sequence for Musk (NM_010944.1,1711-1729).
gagtatccgaggaataaca

SEQ ID NO: 508901 - DNA, 19 bp, Mus musculus
  siRNA target sequence for Musk (NM_010944.1,1713-1731).
gtatccgaggaataacatt

SEQ ID NO: 508902 - DNA, 19 bp, Mus musculus
  siRNA target sequence for Musk (NM_010944.1,1718-1736).
cgaggaataacattgagta

SEQ ID NO: 508903 - DNA, 19 bp, Mus musculus
  siRNA target sequence for Musk (NM_010944.1,1719-1737).
gaggaataacattgagtat

SEQ ID NO: 508904 - DNA, 19 bp, Mus musculus
  siRNA target sequence for Musk (NM_010944.1,1800-1818).
gccttatgaacctttcact

SEQ ID NO: 508905 - DNA, 19 bp, Mus musculus
  siRNA target sequence for Musk (NM_010944.1,1801-1819).
ccttatgaacctttcacta

SEQ ID NO: 508906 - DNA, 19 bp, Mus musculus
  siRNA target sequence for Musk (NM_010944.1,1802-1820).
cttatgaacctttcactat

SEQ ID NO: 508907 - DNA, 19 bp, Mus musculus
  siRNA target sequence for Musk (NM_010944.1,1817-1835).
ctatggtggccgtgaagat

SEQ ID NO: 508908 - DNA, 19 bp, Mus musculus
  siRNA target sequence for Musk (NM_010944.1,1891-1909).
ctcatggcagagtttgaca

SEQ ID NO: 508909 - DNA, 19 bp, Mus musculus
  siRNA target sequence for Musk (NM_010944.1,1913-1931).
ccaacattgtgaaactctt

SEQ ID NO: 508910 - DNA, 19 bp, Mus musculus
  siRNA target sequence for Musk (NM_010944.1,1999-2017).
gagttcctccgaagtatgt

SEQ ID NO: 508911 - DNA, 19 bp, Mus musculus
  siRNA target sequence for Musk (NM_010944.1,2239-2257).
ggcctctccaggaacatct

SEQ ID NO: 508912 - DNA, 19 bp, Mus musculus
  siRNA target sequence for Musk (NM_010944.1,2240-2258).
gcctctccaggaacatcta

SEQ ID NO: 508913 - DNA, 19 bp, Mus musculus
  siRNA target sequence for Musk (NM_010944.1,2317-2335).
cccgagtctatcttctaca

SEQ ID NO: 508914 - DNA, 19 bp, Mus musculus
  siRNA target sequence for Musk (NM_010944.1,2404-2422).
ctgcagccctactatggaa

SEQ ID NO: 508915 - DNA, 19 bp, Mus musculus
  siRNA target sequence for Musk (NM_010944.1,2425-2443).
gcccacgaggaggtcattt

SEQ ID NO: 508916 - DNA, 19 bp, Mus musculus
  siRNA target sequence for Musk (NM_010944.1,2430-2448).
cgaggaggtcatttactat

SEQ ID NO: 508917 - DNA, 19 bp, Mus musculus
  siRNA target sequence for Musk (NM_010944.1,2434-2452).
gaggtcatttactatgtga

SEQ ID NO: 508918 - DNA, 19 bp, Mus musculus
  siRNA target sequence for Musk (NM_010944.1,2611-2629).
ggcagagcccatttctttt

SEQ ID NO: 508919 - DNA, 19 bp, Mus musculus
  siRNA target sequence for Mvd (NM_138656.1,71-89).
cggtcaacatcgcagttat

SEQ ID NO: 508920 - DNA, 19 bp, Mus musculus
  siRNA target sequence for Mvd (NM_138656.1,73-91).
gtcaacatcgcagttatca

SEQ ID NO: 508921 - DNA, 19 bp, Mus musculus
  siRNA target sequence for Mvd (NM_138656.1,160-178).
caggaccagctaaaaacga

SEQ ID NO: 508922 - DNA, 19 bp, Mus musculus
  siRNA target sequence for Mvd (NM_138656.1,182-200).
caaccgttgccattagcaa

SEQ ID NO: 508923 - DNA, 19 bp, Mus musculus
  siRNA target sequence for Mvd (NM_138656.1,604-622).
ccccagctccgaatcctta

SEQ ID NO: 508924 - DNA, 19 bp, Mus musculus
  siRNA target sequence for Mvd (NM_138656.1,605-623).
cccagctccgaatccttat

SEQ ID NO: 508925 - DNA, 19 bp, Mus musculus
  siRNA target sequence for Mvd (NM_138656.1,609-627).
gctccgaatccttatcctt

SEQ ID NO: 508926 - DNA, 19 bp, Mus musculus
  siRNA target sequence for Mvd (NM_138656.1,689-707).
ccagcaccctgctcaagtt

SEQ ID NO: 508927 - DNA, 19 bp, Mus musculus
  siRNA target sequence for Mvd (NM_138656.1,787-805).
cagctgaccatgaaggata

SEQ ID NO: 508928 - DNA, 19 bp, Mus musculus
  siRNA target sequence for Mvd (NM_138656.1,845-863).
cgatctcctacctcaatga

SEQ ID NO: 508929 - DNA, 19 bp, Mus musculus
  siRNA target sequence for Mvd (NM_138656.1,918-936).
gacgaaggtggcatacaca

SEQ ID NO: 508930 - DNA, 19 bp, Mus musculus
  siRNA target sequence for Mvd (NM_138656.1,920-938).
cgaaggtggcatacacatt

SEQ ID NO: 508931 - DNA, 19 bp, Mus musculus
  siRNA target sequence for Mvd (NM_138656.1,1118-1136).
ctggtggggtccagtacat

SEQ ID NO: 508932 - DNA, 19 bp, Mus musculus
  siRNA target sequence for Mvd (NM_138656.1,1120-1138).
ggtggggtccagtacatca

SEQ ID NO: 508933 - DNA, 19 bp, Mus musculus
  siRNA target sequence for Mvd (NM_138656.1,1121-1139).
gtggggtccagtacatcat

SEQ ID NO: 508934 - DNA, 19 bp, Mus musculus
  siRNA target sequence for Mvd (NM_138656.1,1170-1188).
cctagacgacactcatgat

SEQ ID NO: 508935 - DNA, 19 bp, Mus musculus
  siRNA target sequence for Mvk (NM_023556.2,211-229).
gggaaagtgagcgtcaatt

SEQ ID NO: 508936 - DNA, 19 bp, Mus musculus
  siRNA target sequence for Mvk (NM_023556.2,212-230).
ggaaagtgagcgtcaattt

SEQ ID NO: 508937 - DNA, 19 bp, Mus musculus
  siRNA target sequence for Mvk (NM_023556.2,213-231).
gaaagtgagcgtcaattta

SEQ ID NO: 508938 - DNA, 19 bp, Mus musculus
  siRNA target sequence for Mvk (NM_023556.2,233-251).
ccaacatcggtattaagca

SEQ ID NO: 508939 - DNA, 19 bp, Mus musculus
  siRNA target sequence for Mvk (NM_023556.2,613-631).
gatctgaagtcaatcaaca

SEQ ID NO: 508940 - DNA, 19 bp, Mus musculus
  siRNA target sequence for Mvk (NM_023556.2,616-634).
ctgaagtcaatcaacaagt

SEQ ID NO: 508941 - DNA, 19 bp, Mus musculus
  siRNA target sequence for Mvk (NM_023556.2,952-970).
ctagaagagctgatagaca

SEQ ID NO: 508942 - DNA, 19 bp, Mus musculus
  siRNA target sequence for Mvk (NM_023556.2,1018-1036).
gaccagctctgccaagtaa

SEQ ID NO: 508943 - DNA, 19 bp, Mus musculus
  siRNA target sequence for Myh10 (NM_175260.1,272-290).
gatcccgagaggtatctct

SEQ ID NO: 508944 - DNA, 19 bp, Mus musculus
  siRNA target sequence for Myh10 (NM_175260.1,329-347).
gctgactggacagctaaaa

SEQ ID NO: 508945 - DNA, 19 bp, Mus musculus
  siRNA target sequence for Myh10 (NM_175260.1,330-348).
ctgactggacagctaaaaa

SEQ ID NO: 508946 - DNA, 19 bp, Mus musculus
  siRNA target sequence for Myh10 (NM_175260.1,363-381).
catcggaacgccatggttt

SEQ ID NO: 508947 - DNA, 19 bp, Mus musculus
  siRNA target sequence for Myh10 (NM_175260.1,366-384).
cggaacgccatggttttga

SEQ ID NO: 508948 - DNA, 19 bp, Mus musculus
  siRNA target sequence for Myh10 (NM_175260.1,448-466).
gaaagcaatggtcaacaaa

SEQ ID NO: 508949 - DNA, 19 bp, Mus musculus
  siRNA target sequence for Myh10 (NM_175260.1,538-556).
cgaagcctctgtcttacat

SEQ ID NO: 508950 - DNA, 19 bp, Mus musculus
  siRNA target sequence for Myh10 (NM_175260.1,542-560).
gcctctgtcttacataatt

SEQ ID NO: 508951 - DNA, 19 bp, Mus musculus
  siRNA target sequence for Myh10 (NM_175260.1,570-588).
gctactattcaggacttat

SEQ ID NO: 508952 - DNA, 19 bp, Mus musculus
  siRNA target sequence for Myh10 (NM_175260.1,581-599).
ggacttatctatacttact

SEQ ID NO: 508953 - DNA, 19 bp, Mus musculus
  siRNA target sequence for Myh10 (NM_175260.1,607-625).
cttctgtgtggtgataaat

SEQ ID NO: 508954 - DNA, 19 bp, Mus musculus
  siRNA target sequence for Myh10 (NM_175260.1,651-669).
ctgagaatattattgaaat

SEQ ID NO: 508955 - DNA, 19 bp, Mus musculus
  siRNA target sequence for Myh10 (NM_175260.1,678-696).
ggaagaaacgccatgagat

SEQ ID NO: 508956 - DNA, 19 bp, Mus musculus
  siRNA target sequence for Myh10 (NM_175260.1,858-876).
gaagaaaggaccataatat

SEQ ID NO: 508957 - DNA, 19 bp, Mus musculus
  siRNA target sequence for Myh10 (NM_175260.1,899-917).
cttttacaagcaaatccaa

SEQ ID NO: 508958 - DNA, 19 bp, Mus musculus
  siRNA target sequence for Myh10 (NM_175260.1,947-965).
gtgaaaaatgataactcat

SEQ ID NO: 508959 - DNA, 19 bp, Mus musculus
  siRNA target sequence for Myh10 (NM_175260.1,979-997).
gtttatccggatcaacttt

SEQ ID NO: 508960 - DNA, 19 bp, Mus musculus
  siRNA target sequence for Myh10 (NM_175260.1,985-1003).
ccggatcaactttgatgta

SEQ ID NO: 508961 - DNA, 19 bp, Mus musculus
  siRNA target sequence for Myh10 (NM_175260.1,1059-1077).
ctgttcgtcaagctaaaga

SEQ ID NO: 508962 - DNA, 19 bp, Mus musculus
  siRNA target sequence for Myh10 (NM_175260.1,1079-1097).
gagcgtacatttcatatct

SEQ ID NO: 508963 - DNA, 19 bp, Mus musculus
  siRNA target sequence for Myh10 (NM_175260.1,1148-1166).
ctggaaggtttcaacaact

SEQ ID NO: 508964 - DNA, 19 bp, Mus musculus
  siRNA target sequence for Myh10 (NM_175260.1,1154-1172).
ggtttcaacaactacagat

SEQ ID NO: 508965 - DNA, 19 bp, Mus musculus
  siRNA target sequence for Myh10 (NM_175260.1,1180-1198).
caatggctatattcctatt

SEQ ID NO: 508966 - DNA, 19 bp, Mus musculus
  siRNA target sequence for Myh10 (NM_175260.1,1202-1220).
ggacagcaagacaaggata

SEQ ID NO: 508967 - DNA, 19 bp, Mus musculus
  siRNA target sequence for Myh10 (NM_175260.1,1257-1275).
gcttctctcacgaagagat

SEQ ID NO: 508968 - DNA, 19 bp, Mus musculus
  siRNA target sequence for Myh10 (NM_175260.1,1273-1291).
gatcctctcaatgcttaaa

SEQ ID NO: 508969 - DNA, 19 bp, Mus musculus
  siRNA target sequence for Myh10 (NM_175260.1,1285-1303).
gcttaaagtcgtatcttca

SEQ ID NO: 508970 - DNA, 19 bp, Mus musculus
  siRNA target sequence for Myh10 (NM_175260.1,1393-1411).
ccacctgctcgggatgaat

SEQ ID NO: 508971 - DNA, 19 bp, Mus musculus
  siRNA target sequence for Myh10 (NM_175260.1,1552-1570).
gctcgttcaccgcatcaat

SEQ ID NO: 508972 - DNA, 19 bp, Mus musculus
  siRNA target sequence for Myh10 (NM_175260.1,1555-1573).
cgttcaccgcatcaataaa

SEQ ID NO: 508973 - DNA, 19 bp, Mus musculus
  siRNA target sequence for Myh10 (NM_175260.1,1881-1899).
cagataaaacatttgttga

SEQ ID NO: 508974 - DNA, 19 bp, Mus musculus
  siRNA target sequence for Myh10 (NM_175260.1,1920-1938).
gttcccactccaagtttca

SEQ ID NO: 508975 - DNA, 19 bp, Mus musculus
  siRNA target sequence for Myh10 (NM_175260.1,2071-2089).
ccagtcctcggacagattt

SEQ ID NO: 508976 - DNA, 19 bp, Mus musculus
  siRNA target sequence for Myh10 (NM_175260.1,2107-2125).
ggacgtggaccgaattgta

SEQ ID NO: 508977 - DNA, 19 bp, Mus musculus
  siRNA target sequence for Myh10 (NM_175260.1,2165-2183).
ggctctgcatacaaaacca

SEQ ID NO: 508978 - DNA, 19 bp, Mus musculus
  siRNA target sequence for Myh10 (NM_175260.1,2389-2407).
gttccccaaccggatagtt

SEQ ID NO: 508979 - DNA, 19 bp, Mus musculus
  siRNA target sequence for Myh10 (NM_175260.1,2394-2412).
ccaaccggatagttttcca

SEQ ID NO: 508980 - DNA, 19 bp, Mus musculus
  siRNA target sequence for Myh10 (NM_175260.1,2437-2455).
cctaactcccaatgctatt

SEQ ID NO: 508981 - DNA, 19 bp, Mus musculus
  siRNA target sequence for Myh10 (NM_175260.1,2442-2460).
ctcccaatgctattcctaa

SEQ ID NO: 508982 - DNA, 19 bp, Mus musculus
  siRNA target sequence for Myh10 (NM_175260.1,2491-2509).
gcgaatgatccgagcttta

SEQ ID NO: 508983 - DNA, 19 bp, Mus musculus
  siRNA target sequence for Myh10 (NM_175260.1,2493-2511).
gaatgatccgagctttaga

SEQ ID NO: 508984 - DNA, 19 bp, Mus musculus
  siRNA target sequence for Myh10 (NM_175260.1,2516-2534).
gacccaaacctgtatagaa

SEQ ID NO: 508985 - DNA, 19 bp, Mus musculus
  siRNA target sequence for Myh10 (NM_175260.1,2518-2536).
cccaaacctgtatagaatt

SEQ ID NO: 508986 - DNA, 19 bp, Mus musculus
  siRNA target sequence for Myh10 (NM_175260.1,2565-2583).
gagttttggcgcacttaga

SEQ ID NO: 508987 - DNA, 19 bp, Mus musculus
  siRNA target sequence for Myh10 (NM_175260.1,2914-2932).
gaatatcctggcagaacaa

SEQ ID NO: 508988 - DNA, 19 bp, Mus musculus
  siRNA target sequence for Myh10 (NM_175260.1,2982-3000).
ggcttgctgccaaaaagca

SEQ ID NO: 508989 - DNA, 19 bp, Mus musculus
  siRNA target sequence for Myh10 (NM_175260.1,3221-3239).
gaccagaattccaaattta

SEQ ID NO: 508990 - DNA, 19 bp, Mus musculus
  siRNA target sequence for Myh10 (NM_175260.1,3256-3274).
catggaagaccgaattgct

SEQ ID NO: 508991 - DNA, 19 bp, Mus musculus
  siRNA target sequence for Myh10 (NM_175260.1,3312-3330).
caaaaaacttggccaaaat

SEQ ID NO: 508992 - DNA, 19 bp, Mus musculus
  siRNA target sequence for Myh10 (NM_175260.1,3324-3342).
ccaaaatcaggaataagca

SEQ ID NO: 508993 - DNA, 19 bp, Mus musculus
  siRNA target sequence for Myh10 (NM_175260.1,3325-3343).
caaaatcaggaataagcaa

SEQ ID NO: 508994 - DNA, 19 bp, Mus musculus
  siRNA target sequence for Myh10 (NM_175260.1,3349-3367).
gatgatctcggacttagaa

SEQ ID NO: 508995 - DNA, 19 bp, Mus musculus
  siRNA target sequence for Myh10 (NM_175260.1,3352-3370).
gatctcggacttagaagaa

SEQ ID NO: 508996 - DNA, 19 bp, Mus musculus
  siRNA target sequence for Myh10 (NM_175260.1,3393-3411).
ctcgacaggaactggaaaa

SEQ ID NO: 508997 - DNA, 19 bp, Mus musculus
  siRNA target sequence for Myh10 (NM_175260.1,3553-3571).
gacactgcacaagaataat

SEQ ID NO: 508998 - DNA, 19 bp, Mus musculus
  siRNA target sequence for Myh10 (NM_175260.1,3565-3583).
gaataatgcacttaaagtt

SEQ ID NO: 508999 - DNA, 19 bp, Mus musculus
  siRNA target sequence for Myh10 (NM_175260.1,3742-3760).
gcaggaactccgcacaaaa

SEQ ID NO: 509000 - DNA, 19 bp, Mus musculus
  siRNA target sequence for Myh10 (NM_175260.1,3745-3763).
ggaactccgcacaaaacgt

SEQ ID NO: 509001 - DNA, 19 bp, Mus musculus
  siRNA target sequence for Myh10 (NM_175260.1,3791-3809).
gctcttgaggatgaaacta

SEQ ID NO: 509002 - DNA, 19 bp, Mus musculus
  siRNA target sequence for Myh10 (NM_175260.1,3792-3810).
ctcttgaggatgaaactaa

SEQ ID NO: 509003 - DNA, 19 bp, Mus musculus
  siRNA target sequence for Myh10 (NM_175260.1,3794-3812).
cttgaggatgaaactaaga

SEQ ID NO: 509004 - DNA, 19 bp, Mus musculus
  siRNA target sequence for Myh10 (NM_175260.1,3881-3899).
ctggagcaagcgaaaaggt

SEQ ID NO: 509005 - DNA, 19 bp, Mus musculus
  siRNA target sequence for Myh10 (NM_175260.1,3886-3904).
gcaagcgaaaaggttcaaa

SEQ ID NO: 509006 - DNA, 19 bp, Mus musculus
  siRNA target sequence for Myh10 (NM_175260.1,4182-4200).
gtctcgagtctcaactaca

SEQ ID NO: 509007 - DNA, 19 bp, Mus musculus
  siRNA target sequence for Myh10 (NM_175260.1,4825-4843).
cgtccacgagcttgagaaa

SEQ ID NO: 509008 - DNA, 19 bp, Mus musculus
  siRNA target sequence for Myh10 (NM_175260.1,5087-5105).
ctggctgtggcgtcaaaga

SEQ ID NO: 509009 - DNA, 19 bp, Mus musculus
  siRNA target sequence for Myh10 (NM_175260.1,5091-5109).
ctgtggcgtcaaagaagaa

SEQ ID NO: 509010 - DNA, 19 bp, Mus musculus
  siRNA target sequence for Myh10 (NM_175260.1,5143-5161).
gatcgaggctgcgaacaaa

SEQ ID NO: 509011 - DNA, 19 bp, Mus musculus
  siRNA target sequence for Myh10 (NM_175260.1,5212-5230).
ggattaccagcgtgaacta

SEQ ID NO: 509012 - DNA, 19 bp, Mus musculus
  siRNA target sequence for Myh10 (NM_175260.1,5236-5254).
ggctcgagcatctagagat

SEQ ID NO: 509013 - DNA, 19 bp, Mus musculus
  siRNA target sequence for Myh10 (NM_175260.1,5241-5259).
gagcatctagagatgagat

SEQ ID NO: 509014 - DNA, 19 bp, Mus musculus
  siRNA target sequence for Myh10 (NM_175260.1,5257-5275).
gatttttgctcaatccaaa

SEQ ID NO: 509015 - DNA, 19 bp, Mus musculus
  siRNA target sequence for Myh10 (NM_175260.1,5265-5283).
ctcaatccaaagaaagtga

SEQ ID NO: 509016 - DNA, 19 bp, Mus musculus
  siRNA target sequence for Myh10 (NM_175260.1,5296-5314).
gagtctagaagcagaaatt

SEQ ID NO: 509017 - DNA, 19 bp, Mus musculus
  siRNA target sequence for Myh10 (NM_175260.1,5421-5439).
ctgcgctgttggatgagaa

SEQ ID NO: 509018 - DNA, 19 bp, Mus musculus
  siRNA target sequence for Myh10 (NM_175260.1,5760-5778).
cagctgccaacaaactagt

SEQ ID NO: 509019 - DNA, 19 bp, Mus musculus
  siRNA target sequence for Myh10 (NM_175260.1,5779-5797).
ccgtcgaacagagaagaaa

SEQ ID NO: 509020 - DNA, 19 bp, Mus musculus
  siRNA target sequence for Myh10 (NM_175260.1,5832-5850).
gtcggcatgcggatcagta

SEQ ID NO: 509021 - DNA, 19 bp, Mus musculus
  siRNA target sequence for Myh10 (NM_175260.1,5834-5852).
cggcatgcggatcagtata

SEQ ID NO: 509022 - DNA, 19 bp, Mus musculus
  siRNA target sequence for Myh10 (NM_175260.1,5835-5853).
ggcatgcggatcagtataa

SEQ ID NO: 509023 - DNA, 19 bp, Mus musculus
  siRNA target sequence for Myh10 (NM_175260.1,5881-5899).
gatgaagcagcttaaacga

SEQ ID NO: 509024 - DNA, 19 bp, Mus musculus
  siRNA target sequence for Myh10 (NM_175260.1,6041-6059).
ggtccaatcagcttttctt

SEQ ID NO: 509025 - DNA, 19 bp, Mus musculus
  siRNA target sequence for Myh10 (NM_175260.1,6116-6134).
gatgacgacacagaaagta

SEQ ID NO: 509026 - DNA, 19 bp, Mus musculus
  siRNA target sequence for Myh11 (NM_013607.1,417-435).
ctgagggagcgatacttct

SEQ ID NO: 509027 - DNA, 19 bp, Mus musculus
  siRNA target sequence for Myh11 (NM_013607.1,854-872).
cgatgtcactggttacatt

SEQ ID NO: 509028 - DNA, 19 bp, Mus musculus
  siRNA target sequence for Myh11 (NM_013607.1,873-891).
gtaggtgccaatattgaaa

SEQ ID NO: 509029 - DNA, 19 bp, Mus musculus
  siRNA target sequence for Myh11 (NM_013607.1,927-945).
gctagggatgagagaacat

SEQ ID NO: 509030 - DNA, 19 bp, Mus musculus
  siRNA target sequence for Myh11 (NM_013607.1,933-951).
gatgagagaacatttcaca

SEQ ID NO: 509031 - DNA, 19 bp, Mus musculus
  siRNA target sequence for Myh11 (NM_013607.1,966-984).
ctcgccggagccaaggaaa

SEQ ID NO: 509032 - DNA, 19 bp, Mus musculus
  siRNA target sequence for Myh11 (NM_013607.1,1063-1081).
cacaagatgatgagatgtt

SEQ ID NO: 509033 - DNA, 19 bp, Mus musculus
  siRNA target sequence for Myh11 (NM_013607.1,1105-1123).
ctatcatgggcttcaatga

SEQ ID NO: 509034 - DNA, 19 bp, Mus musculus
  siRNA target sequence for Myh11 (NM_013607.1,1249-1267).
gccacctcgtggggattaa

SEQ ID NO: 509035 - DNA, 19 bp, Mus musculus
  siRNA target sequence for Myh11 (NM_013607.1,1260-1278).
gggattaatgtgacagatt

SEQ ID NO: 509036 - DNA, 19 bp, Mus musculus
  siRNA target sequence for Myh11 (NM_013607.1,1261-1279).
ggattaatgtgacagattt

SEQ ID NO: 509037 - DNA, 19 bp, Mus musculus
  siRNA target sequence for Myh11 (NM_013607.1,1292-1310).
cctgaccccacgtatcaaa

SEQ ID NO: 509038 - DNA, 19 bp, Mus musculus
  siRNA target sequence for Myh11 (NM_013607.1,1295-1313).
gaccccacgtatcaaagtt

SEQ ID NO: 509039 - DNA, 19 bp, Mus musculus
  siRNA target sequence for Myh11 (NM_013607.1,1394-1412).
gcgccttttccgatggatt

SEQ ID NO: 509040 - DNA, 19 bp, Mus musculus
  siRNA target sequence for Myh11 (NM_013607.1,1408-1426).
ggattctcagccgtgtaaa

SEQ ID NO: 509041 - DNA, 19 bp, Mus musculus
  siRNA target sequence for Myh11 (NM_013607.1,1896-1914).
ccgctaaatgacaatgtga

SEQ ID NO: 509042 - DNA, 19 bp, Mus musculus
  siRNA target sequence for Myh11 (NM_013607.1,2394-2412).
gggcagagcaaaatcttct

SEQ ID NO: 509043 - DNA, 19 bp, Mus musculus
  siRNA target sequence for Myh11 (NM_013607.1,2445-2463).
gaacgagacctgaaaatta

SEQ ID NO: 509044 - DNA, 19 bp, Mus musculus
  siRNA target sequence for Myh11 (NM_013607.1,2477-2495).
ggccttccaggcaatgtgt

SEQ ID NO: 509045 - DNA, 19 bp, Mus musculus
  siRNA target sequence for Myh11 (NM_013607.1,2609-2627).
gcggctcttcaccaaagta

SEQ ID NO: 509046 - DNA, 19 bp, Mus musculus
  siRNA target sequence for Myh11 (NM_013607.1,2610-2628).
cggctcttcaccaaagtaa

SEQ ID NO: 509047 - DNA, 19 bp, Mus musculus
  siRNA target sequence for Myh11 (NM_013607.1,3028-3046).
cggctgaggccaagatcaa

SEQ ID NO: 509048 - DNA, 19 bp, Mus musculus
  siRNA target sequence for Myh11 (NM_013607.1,3054-3072).
gaggatgacatcttggtta

SEQ ID NO: 509049 - DNA, 19 bp, Mus musculus
  siRNA target sequence for Myh11 (NM_013607.1,3074-3092).
ggatgatcagaacagtaaa

SEQ ID NO: 509050 - DNA, 19 bp, Mus musculus
  siRNA target sequence for Myh11 (NM_013607.1,3078-3096).
gatcagaacagtaaacttt

SEQ ID NO: 509051 - DNA, 19 bp, Mus musculus
  siRNA target sequence for Myh11 (NM_013607.1,3193-3211).
gcaagcatgagtctatgat

SEQ ID NO: 509052 - DNA, 19 bp, Mus musculus
  siRNA target sequence for Myh11 (NM_013607.1,3410-3428).
gatcgcccagaaaaacaat

SEQ ID NO: 509053 - DNA, 19 bp, Mus musculus
  siRNA target sequence for Myh11 (NM_013607.1,3425-3443).
caatgccctaaagaagatt

SEQ ID NO: 509054 - DNA, 19 bp, Mus musculus
  siRNA target sequence for Myh11 (NM_013607.1,3447-3465).
gagctagagggccatatct

SEQ ID NO: 509055 - DNA, 19 bp, Mus musculus
  siRNA target sequence for Myh11 (NM_013607.1,4089-4107).
cggcagaagctcaatgtgt

SEQ ID NO: 509056 - DNA, 19 bp, Mus musculus
  siRNA target sequence for Myh11 (NM_013607.1,4337-4355).
ggcggctgcctatgacaaa

SEQ ID NO: 509057 - DNA, 19 bp, Mus musculus
  siRNA target sequence for Myh11 (NM_013607.1,4339-4357).
cggctgcctatgacaaact

SEQ ID NO: 509058 - DNA, 19 bp, Mus musculus
  siRNA target sequence for Myh11 (NM_013607.1,4421-4439).
gcggcaactggtatccaat

SEQ ID NO: 509059 - DNA, 19 bp, Mus musculus
  siRNA target sequence for Myh11 (NM_013607.1,4847-4865).
ggctcgggatgaacagaat

SEQ ID NO: 509060 - DNA, 19 bp, Mus musculus
  siRNA target sequence for Myh11 (NM_013607.1,4849-4867).
ctcgggatgaacagaatga

SEQ ID NO: 509061 - DNA, 19 bp, Mus musculus
  siRNA target sequence for Myh11 (NM_013607.1,5261-5279).
cagcttgtcaggaaggaat

SEQ ID NO: 509062 - DNA, 19 bp, Mus musculus
  siRNA target sequence for Myh11 (NM_013607.1,5264-5282).
cttgtcaggaaggaataca

SEQ ID NO: 509063 - DNA, 19 bp, Mus musculus
  siRNA target sequence for Myh11 (NM_013607.1,5437-5455).
gcacggctcagaagaatga

SEQ ID NO: 509064 - DNA, 19 bp, Mus musculus
  siRNA target sequence for Myh2 (NM_144961.1,206-224).
gtcaaaggaaccattcaga

SEQ ID NO: 509065 - DNA, 19 bp, Mus musculus
  siRNA target sequence for Myh2 (NM_144961.1,908-926).
gcggaaagaagctaccata

SEQ ID NO: 509066 - DNA, 19 bp, Mus musculus
  siRNA target sequence for Myh2 (NM_144961.1,911-929).
gaaagaagctaccatatat

SEQ ID NO: 509067 - DNA, 19 bp, Mus musculus
  siRNA target sequence for Myh2 (NM_144961.1,918-936).
gctaccatatattttatca

SEQ ID NO: 509068 - DNA, 19 bp, Mus musculus
  siRNA target sequence for Myh2 (NM_144961.1,982-1000).
caccacgaacccatatgat

SEQ ID NO: 509069 - DNA, 19 bp, Mus musculus
  siRNA target sequence for Myh2 (NM_144961.1,984-1002).
ccacgaacccatatgatta

SEQ ID NO: 509070 - DNA, 19 bp, Mus musculus
  siRNA target sequence for Myh2 (NM_144961.1,1070-1088).
gatagtgctatcgacattt

SEQ ID NO: 509071 - DNA, 19 bp, Mus musculus
  siRNA target sequence for Myh2 (NM_144961.1,1092-1110).
gctttacaaatgatgaaaa

SEQ ID NO: 509072 - DNA, 19 bp, Mus musculus
  siRNA target sequence for Myh2 (NM_144961.1,1933-1951).
cttctctggggcacaaact

SEQ ID NO: 509073 - DNA, 19 bp, Mus musculus
  siRNA target sequence for Myh2 (NM_144961.1,2031-2049).
ccctgttcagagagaattt

SEQ ID NO: 509074 - DNA, 19 bp, Mus musculus
  siRNA target sequence for Myh2 (NM_144961.1,2716-2734).
ggtgtccctcttgaaagaa

SEQ ID NO: 509075 - DNA, 19 bp, Mus musculus
  siRNA target sequence for Myh2 (NM_144961.1,2717-2735).
gtgtccctcttgaaagaaa

SEQ ID NO: 509076 - DNA, 19 bp, Mus musculus
  siRNA target sequence for Myh2 (NM_144961.1,2719-2737).
gtccctcttgaaagaaaaa

SEQ ID NO: 509077 - DNA, 19 bp, Mus musculus
  siRNA target sequence for Myh2 (NM_144961.1,3215-3233).
cttcgcatggacctagaaa

SEQ ID NO: 509078 - DNA, 19 bp, Mus musculus
  siRNA target sequence for Myh2 (NM_144961.1,3248-3266).
cttgagggcgacttgaagt

SEQ ID NO: 509079 - DNA, 19 bp, Mus musculus
  siRNA target sequence for Myh2 (NM_144961.1,3769-3787).
cgatgatcttgccagtaat

SEQ ID NO: 509080 - DNA, 19 bp, Mus musculus
  siRNA target sequence for Myh2 (NM_144961.1,3928-3946).
gaccgaatccggtgaattt

SEQ ID NO: 509081 - DNA, 19 bp, Mus musculus
  siRNA target sequence for Myh2 (NM_144961.1,3932-3950).
gaatccggtgaattttcca

SEQ ID NO: 509082 - DNA, 19 bp, Mus musculus
  siRNA target sequence for Myh6 (NM_010856.2,141-159).
ccagtacctccgaaagtca

SEQ ID NO: 509083 - DNA, 19 bp, Mus musculus
  siRNA target sequence for Myh6 (NM_010856.2,226-244).
gacaaggaggagtatgtta

SEQ ID NO: 509084 - DNA, 19 bp, Mus musculus
  siRNA target sequence for Myh6 (NM_010856.2,299-317).
gaaagacggtgaccataaa

SEQ ID NO: 509085 - DNA, 19 bp, Mus musculus
  siRNA target sequence for Myh6 (NM_010856.2,709-727).
gaccgtagcaagaaggaaa

SEQ ID NO: 509086 - DNA, 19 bp, Mus musculus
  siRNA target sequence for Myh6 (NM_010856.2,711-729).
ccgtagcaagaaggaaaat

SEQ ID NO: 509087 - DNA, 19 bp, Mus musculus
  siRNA target sequence for Myh6 (NM_010856.2,1357-1375).
cagcaagtgtactattcca

SEQ ID NO: 509088 - DNA, 19 bp, Mus musculus
  siRNA target sequence for Myh6 (NM_010856.2,1963-1981).
ctcttctctacctatgctt

SEQ ID NO: 509089 - DNA, 19 bp, Mus musculus
  siRNA target sequence for Myh6 (NM_010856.2,2056-2074).
ctccaccgggaaaatctga

SEQ ID NO: 509090 - DNA, 19 bp, Mus musculus
  siRNA target sequence for Myh6 (NM_010856.2,2356-2374).
gacattgaccacaaccaat

SEQ ID NO: 509091 - DNA, 19 bp, Mus musculus
  siRNA target sequence for Myh6 (NM_010856.2,2362-2380).
gaccacaaccaatacaagt

SEQ ID NO: 509092 - DNA, 19 bp, Mus musculus
  siRNA target sequence for Myh6 (NM_010856.2,2364-2382).
ccacaaccaatacaagttt

SEQ ID NO: 509093 - DNA, 19 bp, Mus musculus
  siRNA target sequence for Myh6 (NM_010856.2,2491-2509).
cagctcatgcgcattgagt

SEQ ID NO: 509094 - DNA, 19 bp, Mus musculus
  siRNA target sequence for Myh6 (NM_010856.2,3055-3073).
gctgggctggatgaaatca

SEQ ID NO: 509095 - DNA, 19 bp, Mus musculus
  siRNA target sequence for Myh6 (NM_010856.2,3907-3925).
cagcgctccctcaatgact

SEQ ID NO: 509096 - DNA, 19 bp, Mus musculus
  siRNA target sequence for Myh6 (NM_010856.2,4992-5010).
gctcagccaggccaataga

SEQ ID NO: 509097 - DNA, 19 bp, Mus musculus
  siRNA target sequence for Myh9 (NM_022410.1,463-481).
ctcaaggagcgatactact

SEQ ID NO: 509098 - DNA, 19 bp, Mus musculus
  siRNA target sequence for Myh9 (NM_022410.1,612-630).
ctacgccatcacagatact

SEQ ID NO: 509099 - DNA, 19 bp, Mus musculus
  siRNA target sequence for Myh9 (NM_022410.1,869-887).
gtaaattcattcgtatcaa

SEQ ID NO: 509100 - DNA, 19 bp, Mus musculus
  siRNA target sequence for Myh9 (NM_022410.1,914-932).
gtgccaacattgagactta

SEQ ID NO: 509101 - DNA, 19 bp, Mus musculus
  siRNA target sequence for Myh9 (NM_022410.1,918-936).
caacattgagacttatctt

SEQ ID NO: 509102 - DNA, 19 bp, Mus musculus
  siRNA target sequence for Myh9 (NM_022410.1,1447-1465).
ctggtgcttcgcatcaaca

SEQ ID NO: 509103 - DNA, 19 bp, Mus musculus
  siRNA target sequence for Myh9 (NM_022410.1,1449-1467).
ggtgcttcgcatcaacaaa

SEQ ID NO: 509104 - DNA, 19 bp, Mus musculus
  siRNA target sequence for Myh9 (NM_022410.1,1887-1905).
caaggtggactataaagct

SEQ ID NO: 509105 - DNA, 19 bp, Mus musculus
  siRNA target sequence for Myh9 (NM_022410.1,2001-2019).
ggatgtggatcggatcatt

SEQ ID NO: 509106 - DNA, 19 bp, Mus musculus
  siRNA target sequence for Myh9 (NM_022410.1,2137-2155).
gccacgttgaggaatacca

SEQ ID NO: 509107 - DNA, 19 bp, Mus musculus
  siRNA target sequence for Myh9 (NM_022410.1,2138-2156).
ccacgttgaggaataccaa

SEQ ID NO: 509108 - DNA, 19 bp, Mus musculus
  siRNA target sequence for Myh9 (NM_022410.1,2662-2680).
gtcaagcccctgttgaact

SEQ ID NO: 509109 - DNA, 19 bp, Mus musculus
  siRNA target sequence for Myh9 (NM_022410.1,2667-2685).
gcccctgttgaactcaata

SEQ ID NO: 509110 - DNA, 19 bp, Mus musculus
  siRNA target sequence for Myh9 (NM_022410.1,2670-2688).
cctgttgaactcaataaga

SEQ ID NO: 509111 - DNA, 19 bp, Mus musculus
  siRNA target sequence for Myh9 (NM_022410.1,3157-3175).
gacagagtagctgaattca

SEQ ID NO: 509112 - DNA, 19 bp, Mus musculus
  siRNA target sequence for Myh9 (NM_022410.1,3780-3798).
gcagacgaagcgggtaaaa

SEQ ID NO: 509113 - DNA, 19 bp, Mus musculus
  siRNA target sequence for Myh9 (NM_022410.1,3783-3801).
gacgaagcgggtaaaagct

SEQ ID NO: 509114 - DNA, 19 bp, Mus musculus
  siRNA target sequence for Myh9 (NM_022410.1,4253-4271).
cccaggtgaccgacatgaa

SEQ ID NO: 509115 - DNA, 19 bp, Mus musculus
  siRNA target sequence for Myh9 (NM_022410.1,4466-4484).
gcgtctccaacctggaaaa

SEQ ID NO: 509116 - DNA, 19 bp, Mus musculus
  siRNA target sequence for Myh9 (NM_022410.1,4986-5004).
catggccgcacgcaagaaa

SEQ ID NO: 509117 - DNA, 19 bp, Mus musculus
  siRNA target sequence for Myh9 (NM_022410.1,5430-5448).
cctgcagatcgaccaaata

SEQ ID NO: 509118 - DNA, 19 bp, Mus musculus
  siRNA target sequence for Myh9 (NM_022410.1,5431-5449).
ctgcagatcgaccaaataa

SEQ ID NO: 509119 - DNA, 19 bp, Mus musculus
  siRNA target sequence for Myh9 (NM_022410.1,5478-5496).
cgcacagaagaatgagaat

SEQ ID NO: 509120 - DNA, 19 bp, Mus musculus
  siRNA target sequence for Myh9 (NM_022410.1,5771-5789).
cccgcctgaagcagcttaa

SEQ ID NO: 509121 - DNA, 19 bp, Mus musculus
  siRNA target sequence for Myh9 (NM_022410.1,5772-5790).
ccgcctgaagcagcttaaa

SEQ ID NO: 509122 - DNA, 19 bp, Mus musculus
  siRNA target sequence for Myh9 (NM_022410.1,5949-5967).
cgtgactcgccgaattgtt

SEQ ID NO: 509123 - DNA, 19 bp, Mus musculus
  siRNA target sequence for Myh9 (NM_022410.1,5997-6015).
ggaggtcgacggtaaagca

SEQ ID NO: 509124 - DNA, 19 bp, Mus musculus
  siRNA target sequence for Mylk (NM_139300.2,113-131).
gggggacgtgaaactgttt

SEQ ID NO: 509125 - DNA, 19 bp, Mus musculus
  siRNA target sequence for Mylk (NM_139300.2,230-248).
gaacctctgcgtcaaagaa

SEQ ID NO: 509126 - DNA, 19 bp, Mus musculus
  siRNA target sequence for Mylk (NM_139300.2,370-388).
ggacttttagtcttgtcat

SEQ ID NO: 509127 - DNA, 19 bp, Mus musculus
  siRNA target sequence for Mylk (NM_139300.2,501-519).
cgtgatcagcctgttcttt

SEQ ID NO: 509128 - DNA, 19 bp, Mus musculus
  siRNA target sequence for Mylk (NM_139300.2,565-583).
gtgagtgcccaccaaagtt

SEQ ID NO: 509129 - DNA, 19 bp, Mus musculus
  siRNA target sequence for Mylk (NM_139300.2,673-691).
cctggctcaagggaaatgt

SEQ ID NO: 509130 - DNA, 19 bp, Mus musculus
  siRNA target sequence for Mylk (NM_139300.2,872-890).
ggctgtgagaggaaccaaa

SEQ ID NO: 509131 - DNA, 19 bp, Mus musculus
  siRNA target sequence for Mylk (NM_139300.2,951-969).
gtggctgaaagtaagaact

SEQ ID NO: 509132 - DNA, 19 bp, Mus musculus
  siRNA target sequence for Mylk (NM_139300.2,1117-1135).
ctctgcaggccttgaaagt

SEQ ID NO: 509133 - DNA, 19 bp, Mus musculus
  siRNA target sequence for Mylk (NM_139300.2,1248-1266).
ggttccgttgggaacaagt

SEQ ID NO: 509134 - DNA, 19 bp, Mus musculus
  siRNA target sequence for Mylk (NM_139300.2,1252-1270).
ccgttgggaacaagtttgt

SEQ ID NO: 509135 - DNA, 19 bp, Mus musculus
  siRNA target sequence for Mylk (NM_139300.2,1253-1271).
cgttgggaacaagtttgtt

SEQ ID NO: 509136 - DNA, 19 bp, Mus musculus
  siRNA target sequence for Mylk (NM_139300.2,1254-1272).
gttgggaacaagtttgtta

SEQ ID NO: 509137 - DNA, 19 bp, Mus musculus
  siRNA target sequence for Mylk (NM_139300.2,1304-1322).
gtcaacattccccagattt

SEQ ID NO: 509138 - DNA, 19 bp, Mus musculus
  siRNA target sequence for Mylk (NM_139300.2,1356-1374).
ggtcagacagtcaagttca

SEQ ID NO: 509139 - DNA, 19 bp, Mus musculus
  siRNA target sequence for Mylk (NM_139300.2,1376-1394).
ctgcgaggtttcaggtata

SEQ ID NO: 509140 - DNA, 19 bp, Mus musculus
  siRNA target sequence for Mylk (NM_139300.2,1379-1397).
cgaggtttcaggtatacca

SEQ ID NO: 509141 - DNA, 19 bp, Mus musculus
  siRNA target sequence for Mylk (NM_139300.2,1380-1398).
gaggtttcaggtataccaa

SEQ ID NO: 509142 - DNA, 19 bp, Mus musculus
  siRNA target sequence for Mylk (NM_139300.2,1864-1882).
ctgtcaccgtccaagagaa

SEQ ID NO: 509143 - DNA, 19 bp, Mus musculus
  siRNA target sequence for Mylk (NM_139300.2,1957-1975).
gcctctccgacctcaaagt

SEQ ID NO: 509144 - DNA, 19 bp, Mus musculus
  siRNA target sequence for Mylk (NM_139300.2,2043-2061).
cttcacgacgggaatgaga

SEQ ID NO: 509145 - DNA, 19 bp, Mus musculus
  siRNA target sequence for Mylk (NM_139300.2,2207-2225).
cgtgcaagagcctcatgat

SEQ ID NO: 509146 - DNA, 19 bp, Mus musculus
  siRNA target sequence for Mylk (NM_139300.2,2469-2487).
cgggttggcgagtgtagtt

SEQ ID NO: 509147 - DNA, 19 bp, Mus musculus
  siRNA target sequence for Mylk (NM_139300.2,2829-2847).
ccagccgagcagatggatt

SEQ ID NO: 509148 - DNA, 19 bp, Mus musculus
  siRNA target sequence for Mylk (NM_139300.2,2830-2848).
cagccgagcagatggattt

SEQ ID NO: 509149 - DNA, 19 bp, Mus musculus
  siRNA target sequence for Mylk (NM_139300.2,2871-2889).
gtgaagccaaagaccatat

SEQ ID NO: 509150 - DNA, 19 bp, Mus musculus
  siRNA target sequence for Mylk (NM_139300.2,2914-2932).
gccctcagcaggttgactt

SEQ ID NO: 509151 - DNA, 19 bp, Mus musculus
  siRNA target sequence for Mylk (NM_139300.2,2981-2999).
gaaggcacctccaaaagct

SEQ ID NO: 509152 - DNA, 19 bp, Mus musculus
  siRNA target sequence for Mylk (NM_139300.2,3067-3085).
gcgctgaggtcttgaatgt

SEQ ID NO: 509153 - DNA, 19 bp, Mus musculus
  siRNA target sequence for Mylk (NM_139300.2,3165-3183).
gctgagaccccgaaaccta

SEQ ID NO: 509154 - DNA, 19 bp, Mus musculus
  siRNA target sequence for Mylk (NM_139300.2,3170-3188).
gaccccgaaacctataggt

SEQ ID NO: 509155 - DNA, 19 bp, Mus musculus
  siRNA target sequence for Mylk (NM_139300.2,3172-3190).
ccccgaaacctataggtaa

SEQ ID NO: 509156 - DNA, 19 bp, Mus musculus
  siRNA target sequence for Mylk (NM_139300.2,3173-3191).
cccgaaacctataggtaat

SEQ ID NO: 509157 - DNA, 19 bp, Mus musculus
  siRNA target sequence for Mylk (NM_139300.2,3280-3298).
ccctgaaacctgtaaccaa

SEQ ID NO: 509158 - DNA, 19 bp, Mus musculus
  siRNA target sequence for Mylk (NM_139300.2,3661-3679).
ctgaggaccgaggtttgta

SEQ ID NO: 509159 - DNA, 19 bp, Mus musculus
  siRNA target sequence for Mylk (NM_139300.2,3663-3681).
gaggaccgaggtttgtaca

SEQ ID NO: 509160 - DNA, 19 bp, Mus musculus
  siRNA target sequence for Mylk (NM_139300.2,3827-3845).
gagcgacgcaactgtgaaa

SEQ ID NO: 509161 - DNA, 19 bp, Mus musculus
  siRNA target sequence for Mylk (NM_139300.2,3829-3847).
gcgacgcaactgtgaaaaa

SEQ ID NO: 509162 - DNA, 19 bp, Mus musculus
  siRNA target sequence for Mylk (NM_139300.2,3877-3895).
cagctatgccccctcaaat

SEQ ID NO: 509163 - DNA, 19 bp, Mus musculus
  siRNA target sequence for Mylk (NM_139300.2,3879-3897).
gctatgccccctcaaatca

SEQ ID NO: 509164 - DNA, 19 bp, Mus musculus
  siRNA target sequence for Mylk (NM_139300.2,3979-3997).
cctgcaagtggatgaagtt

SEQ ID NO: 509165 - DNA, 19 bp, Mus musculus
  siRNA target sequence for Mylk (NM_139300.2,4261-4279).
ctgtacagtcctacaatgt

SEQ ID NO: 509166 - DNA, 19 bp, Mus musculus
  siRNA target sequence for Mylk (NM_139300.2,4361-4379).
gcctgaccgcgagtacaaa

SEQ ID NO: 509167 - DNA, 19 bp, Mus musculus
  siRNA target sequence for Mylk (NM_139300.2,4362-4380).
cctgaccgcgagtacaaat

SEQ ID NO: 509168 - DNA, 19 bp, Mus musculus
  siRNA target sequence for Mylk (NM_139300.2,4363-4381).
ctgaccgcgagtacaaatt

SEQ ID NO: 509169 - DNA, 19 bp, Mus musculus
  siRNA target sequence for Mylk (NM_139300.2,4392-4410).
gcagtcaacgtctatggaa

SEQ ID NO: 509170 - DNA, 19 bp, Mus musculus
  siRNA target sequence for Mylk (NM_139300.2,4489-4507).
ccgatgatgacgaaaagga

SEQ ID NO: 509171 - DNA, 19 bp, Mus musculus
  siRNA target sequence for Mylk (NM_139300.2,4524-4542).
cggacggtgactgttaaca

SEQ ID NO: 509172 - DNA, 19 bp, Mus musculus
  siRNA target sequence for Mylk (NM_139300.2,4550-4568).
gaaagtgtctgatgtgtat

SEQ ID NO: 509173 - DNA, 19 bp, Mus musculus
  siRNA target sequence for Mylk (NM_139300.2,4614-4632).
cgacttgtggaaaagaaaa

SEQ ID NO: 509174 - DNA, 19 bp, Mus musculus
  siRNA target sequence for Mylk (NM_139300.2,4811-4829).
gctgtttgagcgtatcatt

SEQ ID NO: 509175 - DNA, 19 bp, Mus musculus
  siRNA target sequence for Mylk (NM_139300.2,4849-4867).
cggagcgggagtgtatcaa

SEQ ID NO: 509176 - DNA, 19 bp, Mus musculus
  siRNA target sequence for Mylk (NM_139300.2,4854-4872).
cgggagtgtatcaagtaca

SEQ ID NO: 509177 - DNA, 19 bp, Mus musculus
  siRNA target sequence for Mylk (NM_139300.2,4857-4875).
gagtgtatcaagtacatga

SEQ ID NO: 509178 - DNA, 19 bp, Mus musculus
  siRNA target sequence for Mylk (NM_139300.2,4885-4903).
cggaaggggtggagtacat

SEQ ID NO: 509179 - DNA, 19 bp, Mus musculus
  siRNA target sequence for Mylk (NM_139300.2,4972-4990).
ccaggatcaagctcattga

SEQ ID NO: 509180 - DNA, 19 bp, Mus musculus
  siRNA target sequence for Mylk (NM_139300.2,5062-5080).
ctcctgaagtgatcaacta

SEQ ID NO: 509181 - DNA, 19 bp, Mus musculus
  siRNA target sequence for Mylk (NM_139300.2,5117-5135).
cggggtcatctgctatatt

SEQ ID NO: 509182 - DNA, 19 bp, Mus musculus
  siRNA target sequence for Mylk (NM_139300.2,5240-5258).
ctccgatgacgcaaaggat

SEQ ID NO: 509183 - DNA, 19 bp, Mus musculus
  siRNA target sequence for Mylk (NM_139300.2,5242-5260).
ccgatgacgcaaaggattt

SEQ ID NO: 509184 - DNA, 19 bp, Mus musculus
  siRNA target sequence for Mylk (NM_139300.2,5244-5262).
gatgacgcaaaggatttca

SEQ ID NO: 509185 - DNA, 19 bp, Mus musculus
  siRNA target sequence for Mylk (NM_139300.2,5321-5339).
gcacccatggctgatgaaa

SEQ ID NO: 509186 - DNA, 19 bp, Mus musculus
  siRNA target sequence for Mylk (NM_139300.2,5515-5533).
caatcaatgcggagaaact

SEQ ID NO: 509187 - DNA, 19 bp, Mus musculus
  siRNA target sequence for Mylk (NM_139300.2,5642-5660).
gggaagcgctgctagattt

SEQ ID NO: 509188 - DNA, 19 bp, Mus musculus
  siRNA target sequence for Mylk (NM_139300.2,5644-5662).
gaagcgctgctagatttga

SEQ ID NO: 509189 - DNA, 19 bp, Mus musculus
  siRNA target sequence for Mylk (NM_139300.2,5656-5674).
gatttgactgcaagattga

SEQ ID NO: 509190 - DNA, 19 bp, Mus musculus
  siRNA target sequence for Myo10 (NM_019472.1,112-130).
cgggtctggctaagagaaa

SEQ ID NO: 509191 - DNA, 19 bp, Mus musculus
  siRNA target sequence for Myo10 (NM_019472.1,145-163).
ccgagtactgtaaattcct

SEQ ID NO: 509192 - DNA, 19 bp, Mus musculus
  siRNA target sequence for Myo10 (NM_019472.1,193-211).
gactatgggcaggtattca

SEQ ID NO: 509193 - DNA, 19 bp, Mus musculus
  siRNA target sequence for Myo10 (NM_019472.1,212-230).
cctacaagcagagtacaat

SEQ ID NO: 509194 - DNA, 19 bp, Mus musculus
  siRNA target sequence for Myo10 (NM_019472.1,311-329).
gggttgccatcatgtacaa

SEQ ID NO: 509195 - DNA, 19 bp, Mus musculus
  siRNA target sequence for Myo10 (NM_019472.1,339-357).
gcgctacaagagaaaccaa

SEQ ID NO: 509196 - DNA, 19 bp, Mus musculus
  siRNA target sequence for Myo10 (NM_019472.1,340-358).
cgctacaagagaaaccaaa

SEQ ID NO: 509197 - DNA, 19 bp, Mus musculus
  siRNA target sequence for Myo10 (NM_019472.1,489-507).
cattgccaacgaatgctat

SEQ ID NO: 509198 - DNA, 19 bp, Mus musculus
  siRNA target sequence for Myo10 (NM_019472.1,664-682).
gagcaagccatccttcaaa

SEQ ID NO: 509199 - DNA, 19 bp, Mus musculus
  siRNA target sequence for Myo10 (NM_019472.1,706-724).
ggcaatgcgaagacagtat

SEQ ID NO: 509200 - DNA, 19 bp, Mus musculus
  siRNA target sequence for Myo10 (NM_019472.1,707-725).
gcaatgcgaagacagtata

SEQ ID NO: 509201 - DNA, 19 bp, Mus musculus
  siRNA target sequence for Myo10 (NM_019472.1,713-731).
cgaagacagtatacaacaa

SEQ ID NO: 509202 - DNA, 19 bp, Mus musculus
  siRNA target sequence for Myo10 (NM_019472.1,786-804).
cattcagggagggagaatt

SEQ ID NO: 509203 - DNA, 19 bp, Mus musculus
  siRNA target sequence for Myo10 (NM_019472.1,793-811).
ggagggagaattgtagatt

SEQ ID NO: 509204 - DNA, 19 bp, Mus musculus
  siRNA target sequence for Myo10 (NM_019472.1,794-812).
gagggagaattgtagatta

SEQ ID NO: 509205 - DNA, 19 bp, Mus musculus
  siRNA target sequence for Myo10 (NM_019472.1,907-925).
cgagaagaattttatttat

SEQ ID NO: 509206 - DNA, 19 bp, Mus musculus
  siRNA target sequence for Myo10 (NM_019472.1,959-977).
ctgggtgtacggaagacaa

SEQ ID NO: 509207 - DNA, 19 bp, Mus musculus
  siRNA target sequence for Myo10 (NM_019472.1,993-1011).
ggaatccttcagacaagtt

SEQ ID NO: 509208 - DNA, 19 bp, Mus musculus
  siRNA target sequence for Myo10 (NM_019472.1,994-1012).
gaatccttcagacaagtta

SEQ ID NO: 509209 - DNA, 19 bp, Mus musculus
  siRNA target sequence for Myo10 (NM_019472.1,1048-1066).
gaagttcgggaagttttga

SEQ ID NO: 509210 - DNA, 19 bp, Mus musculus
  siRNA target sequence for Myo10 (NM_019472.1,1067-1085).
ggttgctggcgggaattct

SEQ ID NO: 509211 - DNA, 19 bp, Mus musculus
  siRNA target sequence for Myo10 (NM_019472.1,1087-1105).
catctcggcaacatagagt

SEQ ID NO: 509212 - DNA, 19 bp, Mus musculus
  siRNA target sequence for Myo10 (NM_019472.1,1090-1108).
ctcggcaacatagagttta

SEQ ID NO: 509213 - DNA, 19 bp, Mus musculus
  siRNA target sequence for Myo10 (NM_019472.1,1417-1435).
cactttgagcagttcaata

SEQ ID NO: 509214 - DNA, 19 bp, Mus musculus
  siRNA target sequence for Myo10 (NM_019472.1,1585-1603).
cggctcctcgccttgatca

SEQ ID NO: 509215 - DNA, 19 bp, Mus musculus
  siRNA target sequence for Myo10 (NM_019472.1,1590-1608).
cctcgccttgatcaatgaa

SEQ ID NO: 509216 - DNA, 19 bp, Mus musculus
  siRNA target sequence for Myo10 (NM_019472.1,1657-1675).
cacagtcagcatgctaata

SEQ ID NO: 509217 - DNA, 19 bp, Mus musculus
  siRNA target sequence for Myo10 (NM_019472.1,1661-1679).
gtcagcatgctaataacca

SEQ ID NO: 509218 - DNA, 19 bp, Mus musculus
  siRNA target sequence for Myo10 (NM_019472.1,1666-1684).
catgctaataaccactttt

SEQ ID NO: 509219 - DNA, 19 bp, Mus musculus
  siRNA target sequence for Myo10 (NM_019472.1,1696-1714).
cgcgttgcagtcaacaatt

SEQ ID NO: 509220 - DNA, 19 bp, Mus musculus
  siRNA target sequence for Myo10 (NM_019472.1,1697-1715).
gcgttgcagtcaacaattt

SEQ ID NO: 509221 - DNA, 19 bp, Mus musculus
  siRNA target sequence for Myo10 (NM_019472.1,1698-1716).
cgttgcagtcaacaatttt

SEQ ID NO: 509222 - DNA, 19 bp, Mus musculus
  siRNA target sequence for Myo10 (NM_019472.1,1753-1771).
gtccgaggcatcttggaaa

SEQ ID NO: 509223 - DNA, 19 bp, Mus musculus
  siRNA target sequence for Myo10 (NM_019472.1,1820-1838).
gcaggttcgacttcatcta

SEQ ID NO: 509224 - DNA, 19 bp, Mus musculus
  siRNA target sequence for Myo10 (NM_019472.1,1823-1841).
ggttcgacttcatctatga

SEQ ID NO: 509225 - DNA, 19 bp, Mus musculus
  siRNA target sequence for Myo10 (NM_019472.1,1869-1887).
caaccaggacaccttgaaa

SEQ ID NO: 509226 - DNA, 19 bp, Mus musculus
  siRNA target sequence for Myo10 (NM_019472.1,1913-1931).
ctgtcagctcgcagttcaa

SEQ ID NO: 509227 - DNA, 19 bp, Mus musculus
  siRNA target sequence for Myo10 (NM_019472.1,1933-1951).
gactccctgcactccttaa

SEQ ID NO: 509228 - DNA, 19 bp, Mus musculus
  siRNA target sequence for Myo10 (NM_019472.1,1944-1962).
ctccttaatggcaacacta

SEQ ID NO: 509229 - DNA, 19 bp, Mus musculus
  siRNA target sequence for Myo10 (NM_019472.1,2122-2140).
caggacttttacaaaaggt

SEQ ID NO: 509230 - DNA, 19 bp, Mus musculus
  siRNA target sequence for Myo10 (NM_019472.1,2125-2143).
gacttttacaaaaggtata

SEQ ID NO: 509231 - DNA, 19 bp, Mus musculus
  siRNA target sequence for Myo10 (NM_019472.1,2209-2227).
gtctatgacgcttctaaca

SEQ ID NO: 509232 - DNA, 19 bp, Mus musculus
  siRNA target sequence for Myo10 (NM_019472.1,2328-2346).
gatccgagctcacatctta

SEQ ID NO: 509233 - DNA, 19 bp, Mus musculus
  siRNA target sequence for Myo10 (NM_019472.1,2352-2370).
cttggcacgaaagcaatat

SEQ ID NO: 509234 - DNA, 19 bp, Mus musculus
  siRNA target sequence for Myo10 (NM_019472.1,2355-2373).
ggcacgaaagcaatataga

SEQ ID NO: 509235 - DNA, 19 bp, Mus musculus
  siRNA target sequence for Myo10 (NM_019472.1,2386-2404).
ggtgtggtgaccatacaga

SEQ ID NO: 509236 - DNA, 19 bp, Mus musculus
  siRNA target sequence for Myo10 (NM_019472.1,2387-2405).
gtgtggtgaccatacagaa

SEQ ID NO: 509237 - DNA, 19 bp, Mus musculus
  siRNA target sequence for Myo10 (NM_019472.1,2391-2409).
ggtgaccatacagaagaat

SEQ ID NO: 509238 - DNA, 19 bp, Mus musculus
  siRNA target sequence for Myo10 (NM_019472.1,2392-2410).
gtgaccatacagaagaatt

SEQ ID NO: 509239 - DNA, 19 bp, Mus musculus
  siRNA target sequence for Myo10 (NM_019472.1,2397-2415).
catacagaagaattacaga

SEQ ID NO: 509240 - DNA, 19 bp, Mus musculus
  siRNA target sequence for Myo10 (NM_019472.1,2426-2444).
cgaggaagaaatttttgca

SEQ ID NO: 509241 - DNA, 19 bp, Mus musculus
  siRNA target sequence for Myo10 (NM_019472.1,3347-3365).
cccccgacggcgactatga

SEQ ID NO: 509242 - DNA, 19 bp, Mus musculus
  siRNA target sequence for Myo10 (NM_019472.1,3349-3367).
cccgacggcgactatgact

SEQ ID NO: 509243 - DNA, 19 bp, Mus musculus
  siRNA target sequence for Myo10 (NM_019472.1,3350-3368).
ccgacggcgactatgacta

SEQ ID NO: 509244 - DNA, 19 bp, Mus musculus
  siRNA target sequence for Myo10 (NM_019472.1,3406-3424).
ggcagcagcgtgactttct

SEQ ID NO: 509245 - DNA, 19 bp, Mus musculus
  siRNA target sequence for Myo10 (NM_019472.1,3549-3567).
cttcgactccaggtttgat

SEQ ID NO: 509246 - DNA, 19 bp, Mus musculus
  siRNA target sequence for Myo10 (NM_019472.1,3552-3570).
cgactccaggtttgataca

SEQ ID NO: 509247 - DNA, 19 bp, Mus musculus
  siRNA target sequence for Myo10 (NM_019472.1,3558-3576).
caggtttgatacagatgat

SEQ ID NO: 509248 - DNA, 19 bp, Mus musculus
  siRNA target sequence for Myo10 (NM_019472.1,3565-3583).
gatacagatgatgaacttt

SEQ ID NO: 509249 - DNA, 19 bp, Mus musculus
  siRNA target sequence for Myo10 (NM_019472.1,3588-3606).
ccggcgagactctgtgtat

SEQ ID NO: 509250 - DNA, 19 bp, Mus musculus
  siRNA target sequence for Myo10 (NM_019472.1,3589-3607).
cggcgagactctgtgtata

SEQ ID NO: 509251 - DNA, 19 bp, Mus musculus
  siRNA target sequence for Myo10 (NM_019472.1,3592-3610).
cgagactctgtgtatagct

SEQ ID NO: 509252 - DNA, 19 bp, Mus musculus
  siRNA target sequence for Myo10 (NM_019472.1,3611-3629).
gcgtcacactgccctattt

SEQ ID NO: 509253 - DNA, 19 bp, Mus musculus
  siRNA target sequence for Myo10 (NM_019472.1,3821-3839).
gccagtcgaagctgatgta

SEQ ID NO: 509254 - DNA, 19 bp, Mus musculus
  siRNA target sequence for Myo10 (NM_019472.1,3834-3852).
gatgtactttgaaaacgat

SEQ ID NO: 509255 - DNA, 19 bp, Mus musculus
  siRNA target sequence for Myo10 (NM_019472.1,3898-3916).
gagatcatagacaacacaa

SEQ ID NO: 509256 - DNA, 19 bp, Mus musculus
  siRNA target sequence for Myo10 (NM_019472.1,4095-4113).
ggatgtcgggctgattgat

SEQ ID NO: 509257 - DNA, 19 bp, Mus musculus
  siRNA target sequence for Myo10 (NM_019472.1,4096-4114).
gatgtcgggctgattgatt

SEQ ID NO: 509258 - DNA, 19 bp, Mus musculus
  siRNA target sequence for Myo10 (NM_019472.1,4101-4119).
cgggctgattgattctgta

SEQ ID NO: 509259 - DNA, 19 bp, Mus musculus
  siRNA target sequence for Myo10 (NM_019472.1,4135-4153).
cctgatagacccaactcat

SEQ ID NO: 509260 - DNA, 19 bp, Mus musculus
  siRNA target sequence for Myo10 (NM_019472.1,4136-4154).
ctgatagacccaactcatt

SEQ ID NO: 509261 - DNA, 19 bp, Mus musculus
  siRNA target sequence for Myo10 (NM_019472.1,4289-4307).
ggctgcataaggaagtgaa

SEQ ID NO: 509262 - DNA, 19 bp, Mus musculus
  siRNA target sequence for Myo10 (NM_019472.1,4449-4467).
gcccccagacgagaagata

SEQ ID NO: 509263 - DNA, 19 bp, Mus musculus
  siRNA target sequence for Myo10 (NM_019472.1,4450-4468).
cccccagacgagaagatat

SEQ ID NO: 509264 - DNA, 19 bp, Mus musculus
  siRNA target sequence for Myo10 (NM_019472.1,4451-4469).
ccccagacgagaagatatt

SEQ ID NO: 509265 - DNA, 19 bp, Mus musculus
  siRNA target sequence for Myo10 (NM_019472.1,4453-4471).
ccagacgagaagatattta

SEQ ID NO: 509266 - DNA, 19 bp, Mus musculus
  siRNA target sequence for Myo10 (NM_019472.1,4496-4514).
ccgtgtatgggcgtaaaca

SEQ ID NO: 509267 - DNA, 19 bp, Mus musculus
  siRNA target sequence for Myo10 (NM_019472.1,4498-4516).
gtgtatgggcgtaaacact

SEQ ID NO: 509268 - DNA, 19 bp, Mus musculus
  siRNA target sequence for Myo10 (NM_019472.1,4521-4539).
ccgactctacacgaaacta

SEQ ID NO: 509269 - DNA, 19 bp, Mus musculus
  siRNA target sequence for Myo10 (NM_019472.1,4618-4636).
cagctgatccaagatatta

SEQ ID NO: 509270 - DNA, 19 bp, Mus musculus
  siRNA target sequence for Myo10 (NM_019472.1,4657-4675).
gacgtggtggagcagattt

SEQ ID NO: 509271 - DNA, 19 bp, Mus musculus
  siRNA target sequence for Myo10 (NM_019472.1,4794-4812).
ggacgaagccatcaagata

SEQ ID NO: 509272 - DNA, 19 bp, Mus musculus
  siRNA target sequence for Myo10 (NM_019472.1,4795-4813).
gacgaagccatcaagatat

SEQ ID NO: 509273 - DNA, 19 bp, Mus musculus
  siRNA target sequence for Myo10 (NM_019472.1,4801-4819).
gccatcaagatattcaatt

SEQ ID NO: 509274 - DNA, 19 bp, Mus musculus
  siRNA target sequence for Myo10 (NM_019472.1,4895-4913).
ggcctctgcgggatgaact

SEQ ID NO: 509275 - DNA, 19 bp, Mus musculus
  siRNA target sequence for Myo10 (NM_019472.1,4904-4922).
gggatgaactgtattgtca

SEQ ID NO: 509276 - DNA, 19 bp, Mus musculus
  siRNA target sequence for Myo10 (NM_019472.1,4914-4932).
gtattgtcagctcatcaaa

SEQ ID NO: 509277 - DNA, 19 bp, Mus musculus
  siRNA target sequence for Myo10 (NM_019472.1,4957-4975).
ggcagcgtgggcaaccttt

SEQ ID NO: 509278 - DNA, 19 bp, Mus musculus
  siRNA target sequence for Myo10 (NM_019472.1,4958-4976).
gcagcgtgggcaaccttta

SEQ ID NO: 509279 - DNA, 19 bp, Mus musculus
  siRNA target sequence for Myo10 (NM_019472.1,5092-5110).
gagaagtacgccctcttta

SEQ ID NO: 509280 - DNA, 19 bp, Mus musculus
  siRNA target sequence for Myo10 (NM_019472.1,5112-5130).
ctacgaatcccttaagaaa

SEQ ID NO: 509281 - DNA, 19 bp, Mus musculus
  siRNA target sequence for Myo10 (NM_019472.1,5149-5167).
gtgccttcccgagatgaaa

SEQ ID NO: 509282 - DNA, 19 bp, Mus musculus
  siRNA target sequence for Myo10 (NM_019472.1,5153-5171).
cttcccgagatgaaatcga

SEQ ID NO: 509283 - DNA, 19 bp, Mus musculus
  siRNA target sequence for Myo10 (NM_019472.1,5347-5365).
gtggacaaggccatcgaaa

SEQ ID NO: 509284 - DNA, 19 bp, Mus musculus
  siRNA target sequence for Myo10 (NM_019472.1,5385-5403).
cgtcctggcaaagtttgaa

SEQ ID NO: 509285 - DNA, 19 bp, Mus musculus
  siRNA target sequence for Myo10 (NM_019472.1,5428-5446).
ggggacgcgccatggaaat

SEQ ID NO: 509286 - DNA, 19 bp, Mus musculus
  siRNA target sequence for Myo10 (NM_019472.1,5434-5452).
gcgccatggaaattctact

SEQ ID NO: 509287 - DNA, 19 bp, Mus musculus
  siRNA target sequence for Myo10 (NM_019472.1,5435-5453).
cgccatggaaattctactt

SEQ ID NO: 509288 - DNA, 19 bp, Mus musculus
  siRNA target sequence for Myo10 (NM_019472.1,5437-5455).
ccatggaaattctacttca

SEQ ID NO: 509289 - DNA, 19 bp, Mus musculus
  siRNA target sequence for Myo10 (NM_019472.1,5477-5495).
ccgacagcatgccaaaaga

SEQ ID NO: 509290 - DNA, 19 bp, Mus musculus
  siRNA target sequence for Myo10 (NM_019472.1,5498-5516).
gcgtggagtttgcgtttat

SEQ ID NO: 509291 - DNA, 19 bp, Mus musculus
  siRNA target sequence for Myo10 (NM_019472.1,5505-5523).
gtttgcgtttatgtttgaa

SEQ ID NO: 509292 - DNA, 19 bp, Mus musculus
  siRNA target sequence for Myo10 (NM_019472.1,5642-5660).
cacccctcgaggaggttta

SEQ ID NO: 509293 - DNA, 19 bp, Mus musculus
  siRNA target sequence for Myo10 (NM_019472.1,5644-5662).
cccctcgaggaggtttact

SEQ ID NO: 509294 - DNA, 19 bp, Mus musculus
  siRNA target sequence for Myo10 (NM_019472.1,5690-5708).
gtcagtcgaccaaaacctt

SEQ ID NO: 509295 - DNA, 19 bp, Mus musculus
  siRNA target sequence for Myo10 (NM_019472.1,5853-5871).
ggctcgcaccagcatcatt

SEQ ID NO: 509296 - DNA, 19 bp, Mus musculus
  siRNA target sequence for Myo10 (NM_019472.1,5946-5964).
gcctggttatggatcaaca

SEQ ID NO: 509297 - DNA, 19 bp, Mus musculus
  siRNA target sequence for Myo10 (NM_019472.1,6112-6130).
ctggccaacacgtacaaga

SEQ ID NO: 509298 - DNA, 19 bp, Mus musculus
  siRNA target sequence for Myo10 (NM_019472.1,6122-6140).
cgtacaagatcgtagttga

SEQ ID NO: 509299 - DNA, 19 bp, Mus musculus
  siRNA target sequence for Myo10 (NM_019472.1,6190-6208).
ctcatgaaagcgtatatca

SEQ ID NO: 509300 - DNA, 19 bp, Mus musculus
  siRNA target sequence for Myo10 (NM_019472.1,6217-6235).
gtgaagaagcgctatagca

SEQ ID NO: 509301 - DNA, 19 bp, Mus musculus
  siRNA target sequence for Myo15 (NM_010862.1,375-393).
gcacatctcggctcttcat

SEQ ID NO: 509302 - DNA, 19 bp, Mus musculus
  siRNA target sequence for Myo15 (NM_010862.1,404-422).
gaccgcacgcccaagatct

SEQ ID NO: 509303 - DNA, 19 bp, Mus musculus
  siRNA target sequence for Myo15 (NM_010862.1,411-429).
cgcccaagatctctaagaa

SEQ ID NO: 509304 - DNA, 19 bp, Mus musculus
  siRNA target sequence for Myo15 (NM_010862.1,499-517).
gaagaaggcccgtactgtt

SEQ ID NO: 509305 - DNA, 19 bp, Mus musculus
  siRNA target sequence for Myo15 (NM_010862.1,505-523).
ggcccgtactgttctcaaa

SEQ ID NO: 509306 - DNA, 19 bp, Mus musculus
  siRNA target sequence for Myo15 (NM_010862.1,506-524).
gcccgtactgttctcaaat

SEQ ID NO: 509307 - DNA, 19 bp, Mus musculus
  siRNA target sequence for Myo15 (NM_010862.1,644-662).
cctcgtgcccagtcactta

SEQ ID NO: 509308 - DNA, 19 bp, Mus musculus
  siRNA target sequence for Myo15 (NM_010862.1,648-666).
gtgcccagtcacttagcaa

SEQ ID NO: 509309 - DNA, 19 bp, Mus musculus
  siRNA target sequence for Myo15 (NM_010862.1,930-948).
caggctcccgcaagtcatt

SEQ ID NO: 509310 - DNA, 19 bp, Mus musculus
  siRNA target sequence for Myo15 (NM_010862.1,932-950).
ggctcccgcaagtcattgt

SEQ ID NO: 509311 - DNA, 19 bp, Mus musculus
  siRNA target sequence for Myo15 (NM_010862.1,933-951).
gctcccgcaagtcattgta

SEQ ID NO: 509312 - DNA, 19 bp, Mus musculus
  siRNA target sequence for Myo15 (NM_010862.1,968-986).
caggacctgggtgaatatt

SEQ ID NO: 509313 - DNA, 19 bp, Mus musculus
  siRNA target sequence for Myo15 (NM_010862.1,999-1017).
gggaaggcgacgactacta

SEQ ID NO: 509314 - DNA, 19 bp, Mus musculus
  siRNA target sequence for Myo15 (NM_010862.1,1000-1018).
ggaaggcgacgactactat

SEQ ID NO: 509315 - DNA, 19 bp, Mus musculus
  siRNA target sequence for Myo15 (NM_010862.1,1089-1107).
cctggccaccctatgatga

SEQ ID NO: 509316 - DNA, 19 bp, Mus musculus
  siRNA target sequence for Myo15 (NM_010862.1,1121-1139).
cccggagacccgtacaact

SEQ ID NO: 509317 - DNA, 19 bp, Mus musculus
  siRNA target sequence for Myo15 (NM_010862.1,1122-1140).
ccggagacccgtacaacta

SEQ ID NO: 509318 - DNA, 19 bp, Mus musculus
  siRNA target sequence for Myo15 (NM_010862.1,1196-1214).
ggctacggctacgatgatt

SEQ ID NO: 509319 - DNA, 19 bp, Mus musculus
  siRNA target sequence for Myo15 (NM_010862.1,1197-1215).
gctacggctacgatgattt

SEQ ID NO: 509320 - DNA, 19 bp, Mus musculus
  siRNA target sequence for Myo15 (NM_010862.1,1340-1358).
ccaccctatgactttccat

SEQ ID NO: 509321 - DNA, 19 bp, Mus musculus
  siRNA target sequence for Myo15 (NM_010862.1,1344-1362).
cctatgactttccatatga

SEQ ID NO: 509322 - DNA, 19 bp, Mus musculus
  siRNA target sequence for Myo15 (NM_010862.1,1372-1390).
cgacataccctactttgat

SEQ ID NO: 509323 - DNA, 19 bp, Mus musculus
  siRNA target sequence for Myo15 (NM_010862.1,1472-1490).
ccagaagagccagctttta

SEQ ID NO: 509324 - DNA, 19 bp, Mus musculus
  siRNA target sequence for Myo15 (NM_010862.1,1473-1491).
cagaagagccagcttttat

SEQ ID NO: 509325 - DNA, 19 bp, Mus musculus
  siRNA target sequence for Myo15 (NM_010862.1,1502-1520).
gtgccgccacccataatgt

SEQ ID NO: 509326 - DNA, 19 bp, Mus musculus
  siRNA target sequence for Myo15 (NM_010862.1,1976-1994).
ctggcacggttcctcaaaa

SEQ ID NO: 509327 - DNA, 19 bp, Mus musculus
  siRNA target sequence for Myo15 (NM_010862.1,1978-1996).
ggcacggttcctcaaaaaa

SEQ ID NO: 509328 - DNA, 19 bp, Mus musculus
  siRNA target sequence for Myo15 (NM_010862.1,2159-2177).
ccacaagctcgcaacaaca

SEQ ID NO: 509329 - DNA, 19 bp, Mus musculus
  siRNA target sequence for Myo15 (NM_010862.1,2160-2178).
cacaagctcgcaacaacaa

SEQ ID NO: 509330 - DNA, 19 bp, Mus musculus
  siRNA target sequence for Myo15 (NM_010862.1,2399-2417).
ccaccccaggcaaattggt

SEQ ID NO: 509331 - DNA, 19 bp, Mus musculus
  siRNA target sequence for Myo15 (NM_010862.1,2519-2537).
cggagggcagcttatggtt

SEQ ID NO: 509332 - DNA, 19 bp, Mus musculus
  siRNA target sequence for Myo15 (NM_010862.1,3138-3156).
cccctcctgtgcctgaaaa

SEQ ID NO: 509333 - DNA, 19 bp, Mus musculus
  siRNA target sequence for Myo15 (NM_010862.1,3200-3218).
gaggaccgagtctctaatt

SEQ ID NO: 509334 - DNA, 19 bp, Mus musculus
  siRNA target sequence for Myo15 (NM_010862.1,3202-3220).
ggaccgagtctctaattta

SEQ ID NO: 509335 - DNA, 19 bp, Mus musculus
  siRNA target sequence for Myo15 (NM_010862.1,3203-3221).
gaccgagtctctaatttaa

SEQ ID NO: 509336 - DNA, 19 bp, Mus musculus
  siRNA target sequence for Myo15 (NM_010862.1,3205-3223).
ccgagtctctaatttaact

SEQ ID NO: 509337 - DNA, 19 bp, Mus musculus
  siRNA target sequence for Myo15 (NM_010862.1,3951-3969).
ctgtgctagccaacctaaa

SEQ ID NO: 509338 - DNA, 19 bp, Mus musculus
  siRNA target sequence for Myo15 (NM_010862.1,3980-3998).
gagcgaaacctcatctata

SEQ ID NO: 509339 - DNA, 19 bp, Mus musculus
  siRNA target sequence for Myo15 (NM_010862.1,4021-4039).
gtcggtgaacccatatcga

SEQ ID NO: 509340 - DNA, 19 bp, Mus musculus
  siRNA target sequence for Myo15 (NM_010862.1,4023-4041).
cggtgaacccatatcgaat

SEQ ID NO: 509341 - DNA, 19 bp, Mus musculus
  siRNA target sequence for Myo15 (NM_010862.1,4027-4045).
gaacccatatcgaatgttt

SEQ ID NO: 509342 - DNA, 19 bp, Mus musculus
  siRNA target sequence for Myo15 (NM_010862.1,4031-4049).
ccatatcgaatgtttgcaa

SEQ ID NO: 509343 - DNA, 19 bp, Mus musculus
  siRNA target sequence for Myo15 (NM_010862.1,4032-4050).
catatcgaatgtttgcaat

SEQ ID NO: 509344 - DNA, 19 bp, Mus musculus
  siRNA target sequence for Myo15 (NM_010862.1,4108-4126).
gcacctctttgcaattgct

SEQ ID NO: 509345 - DNA, 19 bp, Mus musculus
  siRNA target sequence for Myo15 (NM_010862.1,4424-4442).
gagaagtcaaggattgtgt

SEQ ID NO: 509346 - DNA, 19 bp, Mus musculus
  siRNA target sequence for Myo15 (NM_010862.1,4445-4463).
caggccaaaaatgaaagaa

SEQ ID NO: 509347 - DNA, 19 bp, Mus musculus
  siRNA target sequence for Myo15 (NM_010862.1,4447-4465).
ggccaaaaatgaaagaaat

SEQ ID NO: 509348 - DNA, 19 bp, Mus musculus
  siRNA target sequence for Myo15 (NM_010862.1,4493-4511).
gggctccctgctcaactaa

SEQ ID NO: 509349 - DNA, 19 bp, Mus musculus
  siRNA target sequence for Myo15 (NM_010862.1,4813-4831).
gaaggctatcaccttcaaa

SEQ ID NO: 509350 - DNA, 19 bp, Mus musculus
  siRNA target sequence for Myo15 (NM_010862.1,4817-4835).
gctatcaccttcaaagtga

SEQ ID NO: 509351 - DNA, 19 bp, Mus musculus
  siRNA target sequence for Myo15 (NM_010862.1,4902-4920).
ccatcgccaaggtcttgta

SEQ ID NO: 509352 - DNA, 19 bp, Mus musculus
  siRNA target sequence for Myo15 (NM_010862.1,4903-4921).
catcgccaaggtcttgtat

SEQ ID NO: 509353 - DNA, 19 bp, Mus musculus
  siRNA target sequence for Myo15 (NM_010862.1,4964-4982).
gtgtccccaaaacaagata

SEQ ID NO: 509354 - DNA, 19 bp, Mus musculus
  siRNA target sequence for Myo15 (NM_010862.1,4966-4984).
gtccccaaaacaagataca

SEQ ID NO: 509355 - DNA, 19 bp, Mus musculus
  siRNA target sequence for Myo15 (NM_010862.1,4968-4986).
ccccaaaacaagatacatt

SEQ ID NO: 509356 - DNA, 19 bp, Mus musculus
  siRNA target sequence for Myo15 (NM_010862.1,4993-5011).
cgccatcttggacatatat

SEQ ID NO: 509357 - DNA, 19 bp, Mus musculus
  siRNA target sequence for Myo15 (NM_010862.1,5028-5046).
gcttcaacagctttgaaca

SEQ ID NO: 509358 - DNA, 19 bp, Mus musculus
  siRNA target sequence for Myo15 (NM_010862.1,5029-5047).
cttcaacagctttgaacaa

SEQ ID NO: 509359 - DNA, 19 bp, Mus musculus
  siRNA target sequence for Myo15 (NM_010862.1,5295-5313).
ccaacccgctctactctaa

SEQ ID NO: 509360 - DNA, 19 bp, Mus musculus
  siRNA target sequence for Myo15 (NM_010862.1,5367-5385).
cctaccaggtgcacaagtt

SEQ ID NO: 509361 - DNA, 19 bp, Mus musculus
  siRNA target sequence for Myo15 (NM_010862.1,5507-5525).
ggcaagagcagctccatta

SEQ ID NO: 509362 - DNA, 19 bp, Mus musculus
  siRNA target sequence for Myo15 (NM_010862.1,5520-5538).
ccattacccgtctctacaa

SEQ ID NO: 509363 - DNA, 19 bp, Mus musculus
  siRNA target sequence for Myo15 (NM_010862.1,5625-5643).
gcctgaagcccaaccataa

SEQ ID NO: 509364 - DNA, 19 bp, Mus musculus
  siRNA target sequence for Myo15 (NM_010862.1,5751-5769).
ccttccaggtgtttatcga

SEQ ID NO: 509365 - DNA, 19 bp, Mus musculus
  siRNA target sequence for Myo15 (NM_010862.1,5971-5989).
gcgctacctgcgaggtttt

SEQ ID NO: 509366 - DNA, 19 bp, Mus musculus
  siRNA target sequence for Myo15 (NM_010862.1,5972-5990).
cgctacctgcgaggttttt

SEQ ID NO: 509367 - DNA, 19 bp, Mus musculus
  siRNA target sequence for Myo15 (NM_010862.1,5973-5991).
gctacctgcgaggtttttt

SEQ ID NO: 509368 - DNA, 19 bp, Mus musculus
  siRNA target sequence for Myo15 (NM_010862.1,6040-6058).
gagcagagcccgtggtttt

SEQ ID NO: 509369 - DNA, 19 bp, Mus musculus
  siRNA target sequence for Myo15 (NM_010862.1,6042-6060).
gcagagcccgtggttttct

SEQ ID NO: 509370 - DNA, 19 bp, Mus musculus
  siRNA target sequence for Myo15 (NM_010862.1,6484-6502).
ccacgcagaagccataagt

SEQ ID NO: 509371 - DNA, 19 bp, Mus musculus
  siRNA target sequence for Myo15 (NM_010862.1,6501-6519).
gtgtctttaagctaatcct

SEQ ID NO: 509372 - DNA, 19 bp, Mus musculus
  siRNA target sequence for Myo15 (NM_010862.1,6548-6566).
ggcacccaagagatgatct

SEQ ID NO: 509373 - DNA, 19 bp, Mus musculus
  siRNA target sequence for Myo15 (NM_010862.1,6549-6567).
gcacccaagagatgatctt

SEQ ID NO: 509374 - DNA, 19 bp, Mus musculus
  siRNA target sequence for Myo15 (NM_010862.1,6720-6738).
cttccccgcaccttgacaa

SEQ ID NO: 509375 - DNA, 19 bp, Mus musculus
  siRNA target sequence for Myo15 (NM_010862.1,6736-6754).
caagttcctcctcaagttt

SEQ ID NO: 509376 - DNA, 19 bp, Mus musculus
  siRNA target sequence for Myo15 (NM_010862.1,6882-6900).
ccagtatggctctagatgt

SEQ ID NO: 509377 - DNA, 19 bp, Mus musculus
  siRNA target sequence for Myo15 (NM_010862.1,6962-6980).
gtggctggagacatcctaa

SEQ ID NO: 509378 - DNA, 19 bp, Mus musculus
  siRNA target sequence for Myo15 (NM_010862.1,7106-7124).
gacttcccacgacagaaat

SEQ ID NO: 509379 - DNA, 19 bp, Mus musculus
  siRNA target sequence for Myo15 (NM_010862.1,7502-7520).
ggcagtacttctgaagata

SEQ ID NO: 509380 - DNA, 19 bp, Mus musculus
  siRNA target sequence for Myo15 (NM_010862.1,7849-7867).
cccaatcctagctcaagat

SEQ ID NO: 509381 - DNA, 19 bp, Mus musculus
  siRNA target sequence for Myo15 (NM_010862.1,7901-7919).
gagctggttcggtattcca

SEQ ID NO: 509382 - DNA, 19 bp, Mus musculus
  siRNA target sequence for Myo15 (NM_010862.1,8086-8104).
gggacagaagactcaacta

SEQ ID NO: 509383 - DNA, 19 bp, Mus musculus
  siRNA target sequence for Myo15 (NM_010862.1,8308-8326).
cctgcgcaaggaggtattt

SEQ ID NO: 509384 - DNA, 19 bp, Mus musculus
  siRNA target sequence for Myo15 (NM_010862.1,8309-8327).
ctgcgcaaggaggtatttt

SEQ ID NO: 509385 - DNA, 19 bp, Mus musculus
  siRNA target sequence for Myo15 (NM_010862.1,8404-8422).
ggcttgcctgcgcatatct

SEQ ID NO: 509386 - DNA, 19 bp, Mus musculus
  siRNA target sequence for Myo15 (NM_010862.1,8480-8498).
cgacctctggtaacagaaa

SEQ ID NO: 509387 - DNA, 19 bp, Mus musculus
  siRNA target sequence for Myo15 (NM_010862.1,8484-8502).
ctctggtaacagaaagtgt

SEQ ID NO: 509388 - DNA, 19 bp, Mus musculus
  siRNA target sequence for Myo15 (NM_010862.1,8531-8549).
gacagctgggagatctact

SEQ ID NO: 509389 - DNA, 19 bp, Mus musculus
  siRNA target sequence for Myo15 (NM_010862.1,8724-8742).
ctcagaacatgctagagtt

SEQ ID NO: 509390 - DNA, 19 bp, Mus musculus
  siRNA target sequence for Myo15 (NM_010862.1,8827-8845).
gaagaaggattctgattat

SEQ ID NO: 509391 - DNA, 19 bp, Mus musculus
  siRNA target sequence for Myo15 (NM_010862.1,8961-8979).
gtgtagtccgcaagaaact

SEQ ID NO: 509392 - DNA, 19 bp, Mus musculus
  siRNA target sequence for Myo15 (NM_010862.1,9001-9019).
gcggagaggccctgacttt

SEQ ID NO: 509393 - DNA, 19 bp, Mus musculus
  siRNA target sequence for Myo15 (NM_010862.1,9047-9065).
cgcgtaggacgttttcctt

SEQ ID NO: 509394 - DNA, 19 bp, Mus musculus
  siRNA target sequence for Myo15 (NM_010862.1,9258-9276).
cgagcacaatgctcgaatt

SEQ ID NO: 509395 - DNA, 19 bp, Mus musculus
  siRNA target sequence for Myo15 (NM_010862.1,9259-9277).
gagcacaatgctcgaattt

SEQ ID NO: 509396 - DNA, 19 bp, Mus musculus
  siRNA target sequence for Myo15 (NM_010862.1,9321-9339).
gcctcaagctgaagtctaa

SEQ ID NO: 509397 - DNA, 19 bp, Mus musculus
  siRNA target sequence for Myo15 (NM_010862.1,9343-9361).
ggatcgggagtccaaaact

SEQ ID NO: 509398 - DNA, 19 bp, Mus musculus
  siRNA target sequence for Myo15 (NM_010862.1,9439-9457).
gatggcggttgacatgttt

SEQ ID NO: 509399 - DNA, 19 bp, Mus musculus
  siRNA target sequence for Myo15 (NM_010862.1,9442-9460).
ggcggttgacatgtttgta

SEQ ID NO: 509400 - DNA, 19 bp, Mus musculus
  siRNA target sequence for Myo15 (NM_010862.1,9570-9588).
gctactgccagattgtgaa

SEQ ID NO: 509401 - DNA, 19 bp, Mus musculus
  siRNA target sequence for Myo15 (NM_010862.1,9655-9673).
catggctgcctactatagt

SEQ ID NO: 509402 - DNA, 19 bp, Mus musculus
  siRNA target sequence for Myo15 (NM_010862.1,9806-9824).
ctggagttccccagcaata

SEQ ID NO: 509403 - DNA, 19 bp, Mus musculus
  siRNA target sequence for Myo15 (NM_010862.1,9896-9914).
cgccatctgaaaatcaaaa

SEQ ID NO: 509404 - DNA, 19 bp, Mus musculus
  siRNA target sequence for Myo15 (NM_010862.1,9899-9917).
catctgaaaatcaaaacgt

SEQ ID NO: 509405 - DNA, 19 bp, Mus musculus
  siRNA target sequence for Myo15 (NM_010862.1,9980-9998).
gcctttgatgagtatgtca

SEQ ID NO: 509406 - DNA, 19 bp, Mus musculus
  siRNA target sequence for Myo15 (NM_010862.1,10125-10143).
gggatcagccactgaagtt

SEQ ID NO: 509407 - DNA, 19 bp, Mus musculus
  siRNA target sequence for Myo15 (NM_010862.1,10317-10335).
gtgaagtccaagagtacat

SEQ ID NO: 509408 - DNA, 19 bp, Mus musculus
  siRNA target sequence for Myo18a (NM_011586.1,634-652).
gagctggtgactaaaagat

SEQ ID NO: 509409 - DNA, 19 bp, Mus musculus
  siRNA target sequence for Myo18a (NM_011586.1,871-889).
gatcgactggtggagatta

SEQ ID NO: 509410 - DNA, 19 bp, Mus musculus
  siRNA target sequence for Myo18a (NM_011586.1,1078-1096).
gaagaggcctggtatgaga

SEQ ID NO: 509411 - DNA, 19 bp, Mus musculus
  siRNA target sequence for Myo18a (NM_011586.1,1107-1125).
gtggctggtccatagagat

SEQ ID NO: 509412 - DNA, 19 bp, Mus musculus
  siRNA target sequence for Myo18a (NM_011586.1,1259-1277).
catgtgaccgtctagaaga

SEQ ID NO: 509413 - DNA, 19 bp, Mus musculus
  siRNA target sequence for Myo18a (NM_011586.1,1262-1280).
gtgaccgtctagaagatct

SEQ ID NO: 509414 - DNA, 19 bp, Mus musculus
  siRNA target sequence for Myo18a (NM_011586.1,1492-1510).
gcatatagggcgatgttga

SEQ ID NO: 509415 - DNA, 19 bp, Mus musculus
  siRNA target sequence for Myo18a (NM_011586.1,1493-1511).
catatagggcgatgttgat

SEQ ID NO: 509416 - DNA, 19 bp, Mus musculus
  siRNA target sequence for Myo18a (NM_011586.1,1819-1837).
gccagtgaggctactttca

SEQ ID NO: 509417 - DNA, 19 bp, Mus musculus
  siRNA target sequence for Myo18a (NM_011586.1,1821-1839).
cagtgaggctactttcaat

SEQ ID NO: 509418 - DNA, 19 bp, Mus musculus
  siRNA target sequence for Myo18a (NM_011586.1,1825-1843).
gaggctactttcaatgtct

SEQ ID NO: 509419 - DNA, 19 bp, Mus musculus
  siRNA target sequence for Myo18a (NM_011586.1,1911-1929).
gaacaatgtgtttggaatt

SEQ ID NO: 509420 - DNA, 19 bp, Mus musculus
  siRNA target sequence for Myo18a (NM_011586.1,2180-2198).
cctcggctatcttcaaaca

SEQ ID NO: 509421 - DNA, 19 bp, Mus musculus
  siRNA target sequence for Myo18a (NM_011586.1,2322-2340).
ctacagtgagctctttact

SEQ ID NO: 509422 - DNA, 19 bp, Mus musculus
  siRNA target sequence for Myo18a (NM_011586.1,2387-2405).
cactctgttccatgatgat

SEQ ID NO: 509423 - DNA, 19 bp, Mus musculus
  siRNA target sequence for Myo18a (NM_011586.1,2469-2487).
ggagctgtgccacaactat

SEQ ID NO: 509424 - DNA, 19 bp, Mus musculus
  siRNA target sequence for Myo18a (NM_011586.1,2562-2580).
catagaactggcgtttgat

SEQ ID NO: 509425 - DNA, 19 bp, Mus musculus
  siRNA target sequence for Myo18a (NM_011586.1,2726-2744).
ccctccttgatcgtctttt

SEQ ID NO: 509426 - DNA, 19 bp, Mus musculus
  siRNA target sequence for Myo18a (NM_011586.1,2734-2752).
gatcgtcttttctcctatt

SEQ ID NO: 509427 - DNA, 19 bp, Mus musculus
  siRNA target sequence for Myo18a (NM_011586.1,2843-2861).
ccaactgggtggagtacaa

SEQ ID NO: 509428 - DNA, 19 bp, Mus musculus
  siRNA target sequence for Myo18a (NM_011586.1,3098-3116).
cgctgtgcatacagattaa

SEQ ID NO: 509429 - DNA, 19 bp, Mus musculus
  siRNA target sequence for Myo18a (NM_011586.1,3111-3129).
gattaagctgcaagtagat

SEQ ID NO: 509430 - DNA, 19 bp, Mus musculus
  siRNA target sequence for Myo18a (NM_011586.1,3124-3142).
gtagatgccctcattgata

SEQ ID NO: 509431 - DNA, 19 bp, Mus musculus
  siRNA target sequence for Myo18a (NM_011586.1,3152-3170).
ggtccaagatgcatttcgt

SEQ ID NO: 509432 - DNA, 19 bp, Mus musculus
  siRNA target sequence for Myo18a (NM_011586.1,3356-3374).
gcatgtaccgccaaggtta

SEQ ID NO: 509433 - DNA, 19 bp, Mus musculus
  siRNA target sequence for Myo18a (NM_011586.1,3536-3554).
gcctaagccgggtgttctt

SEQ ID NO: 509434 - DNA, 19 bp, Mus musculus
  siRNA target sequence for Myo18a (NM_011586.1,3570-3588).
ggcacggttggaagaacaa

SEQ ID NO: 509435 - DNA, 19 bp, Mus musculus
  siRNA target sequence for Myo18a (NM_011586.1,3652-3670).
cgccagcacttcaagaaga

SEQ ID NO: 509436 - DNA, 19 bp, Mus musculus
  siRNA target sequence for Myo18a (NM_011586.1,3698-3716).
gtgtgcagaagaacatcaa

SEQ ID NO: 509437 - DNA, 19 bp, Mus musculus
  siRNA target sequence for Myo18a (NM_011586.1,4881-4899).
gctcgaggaggagtatgaa

SEQ ID NO: 509438 - DNA, 19 bp, Mus musculus
  siRNA target sequence for Myo18a (NM_011586.1,5370-5388).
cgatctccaggctcagatt

SEQ ID NO: 509439 - DNA, 19 bp, Mus musculus
  siRNA target sequence for Myo18a (NM_011586.1,5525-5543).
cacgcctggagttcgaaaa

SEQ ID NO: 509440 - DNA, 19 bp, Mus musculus
  siRNA target sequence for Myo18a (NM_011586.1,5527-5545).
cgcctggagttcgaaaaga

SEQ ID NO: 509441 - DNA, 19 bp, Mus musculus
  siRNA target sequence for Myo18a (NM_011586.1,5571-5589).
ggccagtcggctcaaagaa

SEQ ID NO: 509442 - DNA, 19 bp, Mus musculus
  siRNA target sequence for Myo18a (NM_011586.1,5572-5590).
gccagtcggctcaaagaaa

SEQ ID NO: 509443 - DNA, 19 bp, Mus musculus
  siRNA target sequence for Myo18a (NM_011586.1,5576-5594).
gtcggctcaaagaaaccat

SEQ ID NO: 509444 - DNA, 19 bp, Mus musculus
  siRNA target sequence for Myo18a (NM_011586.1,5732-5750).
gccgcaagaagcatgaact

SEQ ID NO: 509445 - DNA, 19 bp, Mus musculus
  siRNA target sequence for Myo18a (NM_011586.1,5948-5966).
cctggttgtcaaagaacaa

SEQ ID NO: 509446 - DNA, 19 bp, Mus musculus
  siRNA target sequence for Myo18a (NM_011586.1,6044-6062).
ctgacccatcggatgatga

SEQ ID NO: 509447 - DNA, 19 bp, Mus musculus
  siRNA target sequence for Myo1b (NM_010863.1,308-326).
cgcttcgaccacaatgaga

SEQ ID NO: 509448 - DNA, 19 bp, Mus musculus
  siRNA target sequence for Myo1b (NM_010863.1,309-327).
gcttcgaccacaatgagat

SEQ ID NO: 509449 - DNA, 19 bp, Mus musculus
  siRNA target sequence for Myo1b (NM_010863.1,313-331).
cgaccacaatgagatatat

SEQ ID NO: 509450 - DNA, 19 bp, Mus musculus
  siRNA target sequence for Myo1b (NM_010863.1,337-355).
cattgggagcgtggttata

SEQ ID NO: 509451 - DNA, 19 bp, Mus musculus
  siRNA target sequence for Myo1b (NM_010863.1,342-360).
ggagcgtggttatatctgt

SEQ ID NO: 509452 - DNA, 19 bp, Mus musculus
  siRNA target sequence for Myo1b (NM_010863.1,345-363).
gcgtggttatatctgttaa

SEQ ID NO: 509453 - DNA, 19 bp, Mus musculus
  siRNA target sequence for Myo1b (NM_010863.1,392-410).
ccggagaaagtggaagatt

SEQ ID NO: 509454 - DNA, 19 bp, Mus musculus
  siRNA target sequence for Myo1b (NM_010863.1,393-411).
cggagaaagtggaagatta

SEQ ID NO: 509455 - DNA, 19 bp, Mus musculus
  siRNA target sequence for Myo1b (NM_010863.1,453-471).
ctttgtcggatgaagcata

SEQ ID NO: 509456 - DNA, 19 bp, Mus musculus
  siRNA target sequence for Myo1b (NM_010863.1,457-475).
gtcggatgaagcatacaga

SEQ ID NO: 509457 - DNA, 19 bp, Mus musculus
  siRNA target sequence for Myo1b (NM_010863.1,472-490).
cagatccctccgtgatcaa

SEQ ID NO: 509458 - DNA, 19 bp, Mus musculus
  siRNA target sequence for Myo1b (NM_010863.1,474-492).
gatccctccgtgatcaaga

SEQ ID NO: 509459 - DNA, 19 bp, Mus musculus
  siRNA target sequence for Myo1b (NM_010863.1,477-495).
ccctccgtgatcaagataa

SEQ ID NO: 509460 - DNA, 19 bp, Mus musculus
  siRNA target sequence for Myo1b (NM_010863.1,478-496).
cctccgtgatcaagataaa

SEQ ID NO: 509461 - DNA, 19 bp, Mus musculus
  siRNA target sequence for Myo1b (NM_010863.1,481-499).
ccgtgatcaagataaagat

SEQ ID NO: 509462 - DNA, 19 bp, Mus musculus
  siRNA target sequence for Myo1b (NM_010863.1,485-503).
gatcaagataaagatcaat

SEQ ID NO: 509463 - DNA, 19 bp, Mus musculus
  siRNA target sequence for Myo1b (NM_010863.1,497-515).
gatcaatgcattctcatta

SEQ ID NO: 509464 - DNA, 19 bp, Mus musculus
  siRNA target sequence for Myo1b (NM_010863.1,634-652).
ccctgtcctggaagctttt

SEQ ID NO: 509465 - DNA, 19 bp, Mus musculus
  siRNA target sequence for Myo1b (NM_010863.1,684-702).
catctagattcggcaaata

SEQ ID NO: 509466 - DNA, 19 bp, Mus musculus
  siRNA target sequence for Myo1b (NM_010863.1,734-752).
ccgctgggaggagtgataa

SEQ ID NO: 509467 - DNA, 19 bp, Mus musculus
  siRNA target sequence for Myo1b (NM_010863.1,741-759).
gaggagtgataagtaacta

SEQ ID NO: 509468 - DNA, 19 bp, Mus musculus
  siRNA target sequence for Myo1b (NM_010863.1,744-762).
gagtgataagtaactatct

SEQ ID NO: 509469 - DNA, 19 bp, Mus musculus
  siRNA target sequence for Myo1b (NM_010863.1,748-766).
gataagtaactatctttta

SEQ ID NO: 509470 - DNA, 19 bp, Mus musculus
  siRNA target sequence for Myo1b (NM_010863.1,753-771).
gtaactatcttttagagaa

SEQ ID NO: 509471 - DNA, 19 bp, Mus musculus
  siRNA target sequence for Myo1b (NM_010863.1,907-925).
ggactctgctaaagttaat

SEQ ID NO: 509472 - DNA, 19 bp, Mus musculus
  siRNA target sequence for Myo1b (NM_010863.1,941-959).
gccaatttcagaactgtta

SEQ ID NO: 509473 - DNA, 19 bp, Mus musculus
  siRNA target sequence for Myo1b (NM_010863.1,1016-1034).
gtagtggcagccgttttga

SEQ ID NO: 509474 - DNA, 19 bp, Mus musculus
  siRNA target sequence for Myo1b (NM_010863.1,1057-1075).
gcctgaatcacgagtgaat

SEQ ID NO: 509475 - DNA, 19 bp, Mus musculus
  siRNA target sequence for Myo1b (NM_010863.1,1061-1079).
gaatcacgagtgaatggtt

SEQ ID NO: 509476 - DNA, 19 bp, Mus musculus
  siRNA target sequence for Myo1b (NM_010863.1,1076-1094).
ggtttggatgaaagcaaaa

SEQ ID NO: 509477 - DNA, 19 bp, Mus musculus
  siRNA target sequence for Myo1b (NM_010863.1,1168-1186).
gttcagtttccgaacagtt

SEQ ID NO: 509478 - DNA, 19 bp, Mus musculus
  siRNA target sequence for Myo1b (NM_010863.1,1171-1189).
cagtttccgaacagttgaa

SEQ ID NO: 509479 - DNA, 19 bp, Mus musculus
  siRNA target sequence for Myo1b (NM_010863.1,1244-1262).
cgtgatgccctggctaaaa

SEQ ID NO: 509480 - DNA, 19 bp, Mus musculus
  siRNA target sequence for Myo1b (NM_010863.1,1264-1282).
cctctacagccgcttgttt

SEQ ID NO: 509481 - DNA, 19 bp, Mus musculus
  siRNA target sequence for Myo1b (NM_010863.1,1267-1285).
ctacagccgcttgttttca

SEQ ID NO: 509482 - DNA, 19 bp, Mus musculus
  siRNA target sequence for Myo1b (NM_010863.1,1284-1302).
catggttggtaaatcgtat

SEQ ID NO: 509483 - DNA, 19 bp, Mus musculus
  siRNA target sequence for Myo1b (NM_010863.1,1287-1305).
ggttggtaaatcgtatcaa

SEQ ID NO: 509484 - DNA, 19 bp, Mus musculus
  siRNA target sequence for Myo1b (NM_010863.1,1298-1316).
cgtatcaacgaaagcatta

SEQ ID NO: 509485 - DNA, 19 bp, Mus musculus
  siRNA target sequence for Myo1b (NM_010863.1,1390-1408).
cagcttcgagcagtttatt

SEQ ID NO: 509486 - DNA, 19 bp, Mus musculus
  siRNA target sequence for Myo1b (NM_010863.1,1393-1411).
cttcgagcagtttattatt

SEQ ID NO: 509487 - DNA, 19 bp, Mus musculus
  siRNA target sequence for Myo1b (NM_010863.1,1414-1432).
ctattgtaatgaaaagctt

SEQ ID NO: 509488 - DNA, 19 bp, Mus musculus
  siRNA target sequence for Myo1b (NM_010863.1,1436-1454).
caaatcttcatcgaactta

SEQ ID NO: 509489 - DNA, 19 bp, Mus musculus
  siRNA target sequence for Myo1b (NM_010863.1,1447-1465).
cgaacttaccctcaaagaa

SEQ ID NO: 509490 - DNA, 19 bp, Mus musculus
  siRNA target sequence for Myo1b (NM_010863.1,1492-1510).
catagaatggactcacatt

SEQ ID NO: 509491 - DNA, 19 bp, Mus musculus
  siRNA target sequence for Myo1b (NM_010863.1,1503-1521).
ctcacattgactacttcaa

SEQ ID NO: 509492 - DNA, 19 bp, Mus musculus
  siRNA target sequence for Myo1b (NM_010863.1,1519-1537).
caacaatgctatcatttgt

SEQ ID NO: 509493 - DNA, 19 bp, Mus musculus
  siRNA target sequence for Myo1b (NM_010863.1,1536-1554).
gtgacctaatagaaaataa

SEQ ID NO: 509494 - DNA, 19 bp, Mus musculus
  siRNA target sequence for Myo1b (NM_010863.1,1592-1610).
ctgagacccggcactgtta

SEQ ID NO: 509495 - DNA, 19 bp, Mus musculus
  siRNA target sequence for Myo1b (NM_010863.1,1594-1612).
gagacccggcactgttaca

SEQ ID NO: 509496 - DNA, 19 bp, Mus musculus
  siRNA target sequence for Myo1b (NM_010863.1,1725-1743).
gcttcagaatccagcatta

SEQ ID NO: 509497 - DNA, 19 bp, Mus musculus
  siRNA target sequence for Myo1b (NM_010863.1,1759-1777).
ctaccaggtggaaggattt

SEQ ID NO: 509498 - DNA, 19 bp, Mus musculus
  siRNA target sequence for Myo1b (NM_010863.1,1858-1876).
gtttcctgaaggaaatcct

SEQ ID NO: 509499 - DNA, 19 bp, Mus musculus
  siRNA target sequence for Myo1b (NM_010863.1,1905-1923).
ccgcaggctcccagttcaa

SEQ ID NO: 509500 - DNA, 19 bp, Mus musculus
  siRNA target sequence for Myo1b (NM_010863.1,2028-2046).
gtctcgtatgccatcagat

SEQ ID NO: 509501 - DNA, 19 bp, Mus musculus
  siRNA target sequence for Myo1b (NM_010863.1,2117-2135).
ccttgcctggaaagataca

SEQ ID NO: 509502 - DNA, 19 bp, Mus musculus
  siRNA target sequence for Myo1b (NM_010863.1,2134-2152).
caagatgctttgcaaacaa

SEQ ID NO: 509503 - DNA, 19 bp, Mus musculus
  siRNA target sequence for Myo1b (NM_010863.1,2184-2202).
ctggcgtggaggttctgtt

SEQ ID NO: 509504 - DNA, 19 bp, Mus musculus
  siRNA target sequence for Myo1b (NM_010863.1,2186-2204).
ggcgtggaggttctgttta

SEQ ID NO: 509505 - DNA, 19 bp, Mus musculus
  siRNA target sequence for Myo1b (NM_010863.1,2236-2254).
cttcgggagatccaagata

SEQ ID NO: 509506 - DNA, 19 bp, Mus musculus
  siRNA target sequence for Myo1b (NM_010863.1,2260-2278).
ccgaaacccacggacatta

SEQ ID NO: 509507 - DNA, 19 bp, Mus musculus
  siRNA target sequence for Myo1b (NM_010863.1,2261-2279).
cgaaacccacggacattat

SEQ ID NO: 509508 - DNA, 19 bp, Mus musculus
  siRNA target sequence for Myo1b (NM_010863.1,2262-2280).
gaaacccacggacattatt

SEQ ID NO: 509509 - DNA, 19 bp, Mus musculus
  siRNA target sequence for Myo1b (NM_010863.1,2266-2284).
cccacggacattattccaa

SEQ ID NO: 509510 - DNA, 19 bp, Mus musculus
  siRNA target sequence for Myo1b (NM_010863.1,2272-2290).
gacattattccaactagaa

SEQ ID NO: 509511 - DNA, 19 bp, Mus musculus
  siRNA target sequence for Myo1b (NM_010863.1,2487-2505).
gctggaaggctcgaaaaat

SEQ ID NO: 509512 - DNA, 19 bp, Mus musculus
  siRNA target sequence for Myo1b (NM_010863.1,2585-2603).
cgcagggaatacaggaaat

SEQ ID NO: 509513 - DNA, 19 bp, Mus musculus
  siRNA target sequence for Myo1b (NM_010863.1,2586-2604).
gcagggaatacaggaaatt

SEQ ID NO: 509514 - DNA, 19 bp, Mus musculus
  siRNA target sequence for Myo1b (NM_010863.1,2626-2644).
gaaaatctatgagtttaca

SEQ ID NO: 509515 - DNA, 19 bp, Mus musculus
  siRNA target sequence for Myo1b (NM_010863.1,2701-2719).
gtcaccgatagataaaaat

SEQ ID NO: 509516 - DNA, 19 bp, Mus musculus
  siRNA target sequence for Myo1b (NM_010863.1,2751-2769).
cgactcacaaggagctaaa

SEQ ID NO: 509517 - DNA, 19 bp, Mus musculus
  siRNA target sequence for Myo1b (NM_010863.1,2779-2797).
ccacttgtggaggtgtaaa

SEQ ID NO: 509518 - DNA, 19 bp, Mus musculus
  siRNA target sequence for Myo1b (NM_010863.1,2780-2798).
cacttgtggaggtgtaaaa

SEQ ID NO: 509519 - DNA, 19 bp, Mus musculus
  siRNA target sequence for Myo1b (NM_010863.1,2782-2800).
cttgtggaggtgtaaaaaa

SEQ ID NO: 509520 - DNA, 19 bp, Mus musculus
  siRNA target sequence for Myo1b (NM_010863.1,2819-2837).
gaccagcagaaacttattt

SEQ ID NO: 509521 - DNA, 19 bp, Mus musculus
  siRNA target sequence for Myo1b (NM_010863.1,2881-2899).
ggctttatatccttctagt

SEQ ID NO: 509522 - DNA, 19 bp, Mus musculus
  siRNA target sequence for Myo1b (NM_010863.1,2895-2913).
ctagtgttgggcaaccatt

SEQ ID NO: 509523 - DNA, 19 bp, Mus musculus
  siRNA target sequence for Myo1b (NM_010863.1,3020-3038).
gctaatgggaagagtacat

SEQ ID NO: 509524 - DNA, 19 bp, Mus musculus
  siRNA target sequence for Myo1b (NM_010863.1,3041-3059).
cggattttcctcttaacaa

SEQ ID NO: 509525 - DNA, 19 bp, Mus musculus
  siRNA target sequence for Myo1b (NM_010863.1,3119-3137).
gtagatgtgaccaaggttt

SEQ ID NO: 509526 - DNA, 19 bp, Mus musculus
  siRNA target sequence for Myo1b (NM_010863.1,3186-3204).
gttcagaagcggctagtaa

SEQ ID NO: 509527 - DNA, 19 bp, Mus musculus
  siRNA target sequence for Myo1b (NM_010863.1,3222-3240).
gcagtgaccacctgattga

SEQ ID NO: 509528 - DNA, 19 bp, Mus musculus
  siRNA target sequence for Myo1b (NM_010863.1,3225-3243).
gtgaccacctgattgaaat

SEQ ID NO: 509529 - DNA, 19 bp, Mus musculus
  siRNA target sequence for Myo1b (NM_010863.1,3383-3401).
gtgccaacctgcaaacgaa

SEQ ID NO: 509530 - DNA, 19 bp, Mus musculus
  siRNA target sequence for Myo1c (NM_008659.2,201-219).
gaggctgccttcattgaga

SEQ ID NO: 509531 - DNA, 19 bp, Mus musculus
  siRNA target sequence for Myo1c (NM_008659.2,236-254).
ccgggagaacctcatttat

SEQ ID NO: 509532 - DNA, 19 bp, Mus musculus
  siRNA target sequence for Myo1c (NM_008659.2,237-255).
cgggagaacctcatttata

SEQ ID NO: 509533 - DNA, 19 bp, Mus musculus
  siRNA target sequence for Myo1c (NM_008659.2,240-258).
gagaacctcatttatacct

SEQ ID NO: 509534 - DNA, 19 bp, Mus musculus
  siRNA target sequence for Myo1c (NM_008659.2,289-307).
cctaccgagacctacagat

SEQ ID NO: 509535 - DNA, 19 bp, Mus musculus
  siRNA target sequence for Myo1c (NM_008659.2,331-349).
gctaccgtggtgtcagttt

SEQ ID NO: 509536 - DNA, 19 bp, Mus musculus
  siRNA target sequence for Myo1c (NM_008659.2,354-372).
gaagtaccacctcatttgt

SEQ ID NO: 509537 - DNA, 19 bp, Mus musculus
  siRNA target sequence for Myo1c (NM_008659.2,418-436).
gggaccaggcagtgatgat

SEQ ID NO: 509538 - DNA, 19 bp, Mus musculus
  siRNA target sequence for Myo1c (NM_008659.2,697-715).
cccgggtggtgcaccaaaa

SEQ ID NO: 509539 - DNA, 19 bp, Mus musculus
  siRNA target sequence for Myo1c (NM_008659.2,698-716).
ccgggtggtgcaccaaaat

SEQ ID NO: 509540 - DNA, 19 bp, Mus musculus
  siRNA target sequence for Myo1c (NM_008659.2,700-718).
gggtggtgcaccaaaatca

SEQ ID NO: 509541 - DNA, 19 bp, Mus musculus
  siRNA target sequence for Myo1c (NM_008659.2,892-910).
cgctgtccgtcattgactt

SEQ ID NO: 509542 - DNA, 19 bp, Mus musculus
  siRNA target sequence for Myo1c (NM_008659.2,1137-1155).
gaacaggcggcatatgcaa

SEQ ID NO: 509543 - DNA, 19 bp, Mus musculus
  siRNA target sequence for Myo1c (NM_008659.2,1176-1194).
gtgtacagccggacattca

SEQ ID NO: 509544 - DNA, 19 bp, Mus musculus
  siRNA target sequence for Myo1c (NM_008659.2,1203-1221).
gtcagaaagatcaataggt

SEQ ID NO: 509545 - DNA, 19 bp, Mus musculus
  siRNA target sequence for Myo1c (NM_008659.2,1616-1634).
gaagaccaggaaatctcta

SEQ ID NO: 509546 - DNA, 19 bp, Mus musculus
  siRNA target sequence for Myo1c (NM_008659.2,1646-1664).
gttccgccttctgcattat

SEQ ID NO: 509547 - DNA, 19 bp, Mus musculus
  siRNA target sequence for Myo1c (NM_008659.2,1919-1937).
gcagccgggtcgctttgat

SEQ ID NO: 509548 - DNA, 19 bp, Mus musculus
  siRNA target sequence for Myo1c (NM_008659.2,2011-2029).
cctatcgtcgcaaatatga

SEQ ID NO: 509549 - DNA, 19 bp, Mus musculus
  siRNA target sequence for Myo1c (NM_008659.2,2391-2409).
ctcatccgtggcttcattt

SEQ ID NO: 509550 - DNA, 19 bp, Mus musculus
  siRNA target sequence for Myo1c (NM_008659.2,2565-2583).
cgggaactgtgcatgaaga

SEQ ID NO: 509551 - DNA, 19 bp, Mus musculus
  siRNA target sequence for Myo1c (NM_008659.2,2645-2663).
ggcggtggctagtgaaatt

SEQ ID NO: 509552 - DNA, 19 bp, Mus musculus
  siRNA target sequence for Myo1c (NM_008659.2,2646-2664).
gcggtggctagtgaaattt

SEQ ID NO: 509553 - DNA, 19 bp, Mus musculus
  siRNA target sequence for Myo1c (NM_008659.2,2647-2665).
cggtggctagtgaaatttt

SEQ ID NO: 509554 - DNA, 19 bp, Mus musculus
  siRNA target sequence for Myo1c (NM_008659.2,2700-2718).
cccagactcttcattagca

SEQ ID NO: 509555 - DNA, 19 bp, Mus musculus
  siRNA target sequence for Myo1c (NM_008659.2,2746-2764).
ccagagtgcttcaatcctt

SEQ ID NO: 509556 - DNA, 19 bp, Mus musculus
  siRNA target sequence for Myo1c (NM_008659.2,2787-2805).
gccgtgcccgtggtaaaat

SEQ ID NO: 509557 - DNA, 19 bp, Mus musculus
  siRNA target sequence for Myo1c (NM_008659.2,2788-2806).
ccgtgcccgtggtaaaata

SEQ ID NO: 509558 - DNA, 19 bp, Mus musculus
  siRNA target sequence for Myo1c (NM_008659.2,2881-2899).
ctaaagtcaagcagagaat

SEQ ID NO: 509559 - DNA, 19 bp, Mus musculus
  siRNA target sequence for Myo1c (NM_008659.2,2888-2906).
caagcagagaattgattat

SEQ ID NO: 509560 - DNA, 19 bp, Mus musculus
  siRNA target sequence for Myo1c (NM_008659.2,2909-2927).
caacctaaccggaatctct

SEQ ID NO: 509561 - DNA, 19 bp, Mus musculus
  siRNA target sequence for Myo1c (NM_008659.2,2928-2946).
gtcagtagcctgagtgata

SEQ ID NO: 509562 - DNA, 19 bp, Mus musculus
  siRNA target sequence for Myo1c (NM_008659.2,2936-2954).
cctgagtgatagcctattt

SEQ ID NO: 509563 - DNA, 19 bp, Mus musculus
  siRNA target sequence for Myo1c (NM_008659.2,3015-3033).
catgtgatcgagacactaa

SEQ ID NO: 509564 - DNA, 19 bp, Mus musculus
  siRNA target sequence for Myo1c (NM_008659.2,3049-3067).
gtgctgaccgcgtgaacaa

SEQ ID NO: 509565 - DNA, 19 bp, Mus musculus
  siRNA target sequence for Myo1c (NM_008659.2,3052-3070).
ctgaccgcgtgaacaatat

SEQ ID NO: 509566 - DNA, 19 bp, Mus musculus
  siRNA target sequence for Myo1c (NM_008659.2,3054-3072).
gaccgcgtgaacaatatca

SEQ ID NO: 509567 - DNA, 19 bp, Mus musculus
  siRNA target sequence for Myo1c (NM_008659.2,3057-3075).
cgcgtgaacaatatcaaca

SEQ ID NO: 509568 - DNA, 19 bp, Mus musculus
  siRNA target sequence for Myo1c (NM_008659.2,3080-3098).
ccagggcagcataacgttt

SEQ ID NO: 509569 - DNA, 19 bp, Mus musculus
  siRNA target sequence for Myo1c (NM_008659.2,3112-3130).
gcagggacggcatcattga

SEQ ID NO: 509570 - DNA, 19 bp, Mus musculus
  siRNA target sequence for Myo1f (NM_053214.1,397-415).
gccctcaccgacaacatgt

SEQ ID NO: 509571 - DNA, 19 bp, Mus musculus
  siRNA target sequence for Myo1f (NM_053214.1,398-416).
ccctcaccgacaacatgta

SEQ ID NO: 509572 - DNA, 19 bp, Mus musculus
  siRNA target sequence for Myo1f (NM_053214.1,487-505).
gtggctgctaaatacatca

SEQ ID NO: 509573 - DNA, 19 bp, Mus musculus
  siRNA target sequence for Myo1f (NM_053214.1,547-565).
cagcacgtcaaagacataa

SEQ ID NO: 509574 - DNA, 19 bp, Mus musculus
  siRNA target sequence for Myo1f (NM_053214.1,938-956).
gcgtgcagcagcttgtctt

SEQ ID NO: 509575 - DNA, 19 bp, Mus musculus
  siRNA target sequence for Myo1f (NM_053214.1,1031-1049).
gcgtagacctcttagcttt

SEQ ID NO: 509576 - DNA, 19 bp, Mus musculus
  siRNA target sequence for Myo1f (NM_053214.1,1341-1359).
catcaacttcgtcaatgaa

SEQ ID NO: 509577 - DNA, 19 bp, Mus musculus
  siRNA target sequence for Myo1f (NM_053214.1,1429-1447).
cgctggacccccatcgaat

SEQ ID NO: 509578 - DNA, 19 bp, Mus musculus
  siRNA target sequence for Myo1f (NM_053214.1,1430-1448).
gctggacccccatcgaata

SEQ ID NO: 509579 - DNA, 19 bp, Mus musculus
  siRNA target sequence for Myo1f (NM_053214.1,1436-1454).
cccccatcgaatacttcaa

SEQ ID NO: 509580 - DNA, 19 bp, Mus musculus
  siRNA target sequence for Myo1f (NM_053214.1,1506-1524).
catgagcgtgctagatgat

SEQ ID NO: 509581 - DNA, 19 bp, Mus musculus
  siRNA target sequence for Myo1f (NM_053214.1,1598-1616).
gcacccacgagcacttcaa

SEQ ID NO: 509582 - DNA, 19 bp, Mus musculus
  siRNA target sequence for Myo1f (NM_053214.1,1702-1720).
gtgctgttctctgatctta

SEQ ID NO: 509583 - DNA, 19 bp, Mus musculus
  siRNA target sequence for Myo1f (NM_053214.1,1704-1722).
gctgttctctgatcttata

SEQ ID NO: 509584 - DNA, 19 bp, Mus musculus
  siRNA target sequence for Myo1f (NM_053214.1,1712-1730).
ctgatcttatagaactgat

SEQ ID NO: 509585 - DNA, 19 bp, Mus musculus
  siRNA target sequence for Myo1f (NM_053214.1,1808-1826).
ctgctggctccaagatcaa

SEQ ID NO: 509586 - DNA, 19 bp, Mus musculus
  siRNA target sequence for Myo1f (NM_053214.1,2005-2023).
cgtcggcagttctccaaat

SEQ ID NO: 509587 - DNA, 19 bp, Mus musculus
  siRNA target sequence for Myo1f (NM_053214.1,2006-2024).
gtcggcagttctccaaatt

SEQ ID NO: 509588 - DNA, 19 bp, Mus musculus
  siRNA target sequence for Myo1f (NM_053214.1,2018-2036).
ccaaattcctgcaaaggta

SEQ ID NO: 509589 - DNA, 19 bp, Mus musculus
  siRNA target sequence for Myo1f (NM_053214.1,2019-2037).
caaattcctgcaaaggtat

SEQ ID NO: 509590 - DNA, 19 bp, Mus musculus
  siRNA target sequence for Myo1f (NM_053214.1,2151-2169).
caaggtctttgttaagaat

SEQ ID NO: 509591 - DNA, 19 bp, Mus musculus
  siRNA target sequence for Myo1f (NM_053214.1,2261-2279).
cagtccgaaagtatgaaga

SEQ ID NO: 509592 - DNA, 19 bp, Mus musculus
  siRNA target sequence for Myo1f (NM_053214.1,2294-2312).
cttctaacatcctactgaa

SEQ ID NO: 509593 - DNA, 19 bp, Mus musculus
  siRNA target sequence for Myo1f (NM_053214.1,2392-2410).
cgccagttcctggctaaaa

SEQ ID NO: 509594 - DNA, 19 bp, Mus musculus
  siRNA target sequence for Myo1f (NM_053214.1,2454-2472).
ccgcttcaagcctatcaaa

SEQ ID NO: 509595 - DNA, 19 bp, Mus musculus
  siRNA target sequence for Myo1f (NM_053214.1,2609-2627).
gcacccgacaggatgactt

SEQ ID NO: 509596 - DNA, 19 bp, Mus musculus
  siRNA target sequence for Myo1f (NM_053214.1,2646-2664).
ggctgcggacagcttctta

SEQ ID NO: 509597 - DNA, 19 bp, Mus musculus
  siRNA target sequence for Myo1f (NM_053214.1,2650-2668).
gcggacagcttcttagaaa

SEQ ID NO: 509598 - DNA, 19 bp, Mus musculus
  siRNA target sequence for Myo1f (NM_053214.1,2744-2762).
ccttcagtgacctactaca

SEQ ID NO: 509599 - DNA, 19 bp, Mus musculus
  siRNA target sequence for Myo1f (NM_053214.1,2763-2781).
gttccgggtgaagaaagaa

SEQ ID NO: 509600 - DNA, 19 bp, Mus musculus
  siRNA target sequence for Myo1f (NM_053214.1,2792-2810).
gaggtagtacccgaaatgt

SEQ ID NO: 509601 - DNA, 19 bp, Mus musculus
  siRNA target sequence for Myo1f (NM_053214.1,2794-2812).
ggtagtacccgaaatgtca

SEQ ID NO: 509602 - DNA, 19 bp, Mus musculus
  siRNA target sequence for Myo1f (NM_053214.1,2855-2873).
ggggtcgagctctcactat

SEQ ID NO: 509603 - DNA, 19 bp, Mus musculus
  siRNA target sequence for Myo1f (NM_053214.1,2857-2875).
ggtcgagctctcactatca

SEQ ID NO: 509604 - DNA, 19 bp, Mus musculus
  siRNA target sequence for Myo1f (NM_053214.1,2983-3001).
cccagaggtttgaatcgaa

SEQ ID NO: 509605 - DNA, 19 bp, Mus musculus
  siRNA target sequence for Myo1f (NM_053214.1,3034-3052).
ctacccctggagatcacat

SEQ ID NO: 509606 - DNA, 19 bp, Mus musculus
  siRNA target sequence for Myo1f (NM_053214.1,3189-3207).
gcaaaggaagcgaagtata

SEQ ID NO: 509607 - DNA, 19 bp, Mus musculus
  siRNA target sequence for Myo1f (NM_053214.1,3336-3354).
cattgagatcctcatagaa

SEQ ID NO: 509608 - DNA, 19 bp, Mus musculus
  siRNA target sequence for Myo1f (NM_053214.1,3410-3428).
gaaactatgtggagaagat

SEQ ID NO: 509609 - DNA, 19 bp, Mus musculus
  siRNA target sequence for Myo1g (NM_178440.2,132-150).
cgaagaaggccctgagtat

SEQ ID NO: 509610 - DNA, 19 bp, Mus musculus
  siRNA target sequence for Myo1g (NM_178440.2,231-249).
ccgtatctatacctacatt

SEQ ID NO: 509611 - DNA, 19 bp, Mus musculus
  siRNA target sequence for Myo1g (NM_178440.2,279-297).
ccaggaactgccattgtat

SEQ ID NO: 509612 - DNA, 19 bp, Mus musculus
  siRNA target sequence for Myo1g (NM_178440.2,692-710).
gggttctcaagcaacatgt

SEQ ID NO: 509613 - DNA, 19 bp, Mus musculus
  siRNA target sequence for Myo1g (NM_178440.2,944-962).
gcatccttgccgccatatt

SEQ ID NO: 509614 - DNA, 19 bp, Mus musculus
  siRNA target sequence for Myo1g (NM_178440.2,945-963).
catccttgccgccatatta

SEQ ID NO: 509615 - DNA, 19 bp, Mus musculus
  siRNA target sequence for Myo1g (NM_178440.2,1197-1215).
gatgtaccagcgactgttt

SEQ ID NO: 509616 - DNA, 19 bp, Mus musculus
  siRNA target sequence for Myo1g (NM_178440.2,1220-1238).
gggttgtgaacaagatcaa

SEQ ID NO: 509617 - DNA, 19 bp, Mus musculus
  siRNA target sequence for Myo1g (NM_178440.2,1270-1288).
cggtgtgatggcaaggata

SEQ ID NO: 509618 - DNA, 19 bp, Mus musculus
  siRNA target sequence for Myo1g (NM_178440.2,1448-1466).
ggcagaccatcgagtactt

SEQ ID NO: 509619 - DNA, 19 bp, Mus musculus
  siRNA target sequence for Myo1g (NM_178440.2,1596-1614).
ccgccaccacccacactat

SEQ ID NO: 509620 - DNA, 19 bp, Mus musculus
  siRNA target sequence for Myo1g (NM_178440.2,1658-1676).
gccgagacttccagatcaa

SEQ ID NO: 509621 - DNA, 19 bp, Mus musculus
  siRNA target sequence for Myo1g (NM_178440.2,1663-1681).
gacttccagatcaaacact

SEQ ID NO: 509622 - DNA, 19 bp, Mus musculus
  siRNA target sequence for Myo1g (NM_178440.2,1736-1754).
ctctcttccaggacttcaa

SEQ ID NO: 509623 - DNA, 19 bp, Mus musculus
  siRNA target sequence for Myo1g (NM_178440.2,1752-1770).
caaacggctgctgtacaat

SEQ ID NO: 509624 - DNA, 19 bp, Mus musculus
  siRNA target sequence for Myo1g (NM_178440.2,1849-1867).
gccggcacactctttaaga

SEQ ID NO: 509625 - DNA, 19 bp, Mus musculus
  siRNA target sequence for Myo1g (NM_178440.2,1851-1869).
cggcacactctttaagaat

SEQ ID NO: 509626 - DNA, 19 bp, Mus musculus
  siRNA target sequence for Myo1g (NM_178440.2,1976-1994).
gtcgtcaccaggtcgaata

SEQ ID NO: 509627 - DNA, 19 bp, Mus musculus
  siRNA target sequence for Myo1g (NM_178440.2,1979-1997).
gtcaccaggtcgaatacct

SEQ ID NO: 509628 - DNA, 19 bp, Mus musculus
  siRNA target sequence for Myo1g (NM_178440.2,2317-2335).
cgactaagggccatctaca

SEQ ID NO: 509629 - DNA, 19 bp, Mus musculus
  siRNA target sequence for Myo1g (NM_178440.2,2367-2385).
gcgtgctcacctgattgaa

SEQ ID NO: 509630 - DNA, 19 bp, Mus musculus
  siRNA target sequence for Myo1g (NM_178440.2,2369-2387).
gtgctcacctgattgaact

SEQ ID NO: 509631 - DNA, 19 bp, Mus musculus
  siRNA target sequence for Myo1g (NM_178440.2,2510-2528).
gggcacggcagttagtgaa

SEQ ID NO: 509632 - DNA, 19 bp, Mus musculus
  siRNA target sequence for Myo1g (NM_178440.2,2513-2531).
cacggcagttagtgaagaa

SEQ ID NO: 509633 - DNA, 19 bp, Mus musculus
  siRNA target sequence for Myo1g (NM_178440.2,2515-2533).
cggcagttagtgaagaaca

SEQ ID NO: 509634 - DNA, 19 bp, Mus musculus
  siRNA target sequence for Myo1g (NM_178440.2,2794-2812).
ctcacagatcggtatctgt

SEQ ID NO: 509635 - DNA, 19 bp, Mus musculus
  siRNA target sequence for Myo1g (NM_178440.2,2798-2816).
cagatcggtatctgtacaa

SEQ ID NO: 509636 - DNA, 19 bp, Mus musculus
  siRNA target sequence for Myo1g (NM_178440.2,2927-2945).
gctatgatgatcttgtagt

SEQ ID NO: 509637 - DNA, 19 bp, Mus musculus
  siRNA target sequence for Myo1g (NM_178440.2,2965-2983).
ccaccactggacaatcgaa

SEQ ID NO: 509638 - DNA, 19 bp, Mus musculus
  siRNA target sequence for Myo1g (NM_178440.2,2966-2984).
caccactggacaatcgaat

SEQ ID NO: 509639 - DNA, 19 bp, Mus musculus
  siRNA target sequence for Myo5a (NM_010864.1,113-131).
gcagagttgctcaaggatt

SEQ ID NO: 509640 - DNA, 19 bp, Mus musculus
  siRNA target sequence for Myo5a (NM_010864.1,114-132).
cagagttgctcaaggatta

SEQ ID NO: 509641 - DNA, 19 bp, Mus musculus
  siRNA target sequence for Myo5a (NM_010864.1,208-226).
cggtgagctccctcactta

SEQ ID NO: 509642 - DNA, 19 bp, Mus musculus
  siRNA target sequence for Myo5a (NM_010864.1,308-326).
cgagttcgcttcatcgatt

SEQ ID NO: 509643 - DNA, 19 bp, Mus musculus
  siRNA target sequence for Myo5a (NM_010864.1,316-334).
cttcatcgattccaaactt

SEQ ID NO: 509644 - DNA, 19 bp, Mus musculus
  siRNA target sequence for Myo5a (NM_010864.1,319-337).
catcgattccaaacttatt

SEQ ID NO: 509645 - DNA, 19 bp, Mus musculus
  siRNA target sequence for Myo5a (NM_010864.1,322-340).
cgattccaaacttatttat

SEQ ID NO: 509646 - DNA, 19 bp, Mus musculus
  siRNA target sequence for Myo5a (NM_010864.1,327-345).
ccaaacttatttatacgta

SEQ ID NO: 509647 - DNA, 19 bp, Mus musculus
  siRNA target sequence for Myo5a (NM_010864.1,328-346).
caaacttatttatacgtat

SEQ ID NO: 509648 - DNA, 19 bp, Mus musculus
  siRNA target sequence for Myo5a (NM_010864.1,342-360).
cgtattgtggaatagttct

SEQ ID NO: 509649 - DNA, 19 bp, Mus musculus
  siRNA target sequence for Myo5a (NM_010864.1,470-488).
gaagaggcttacaagcaaa

SEQ ID NO: 509650 - DNA, 19 bp, Mus musculus
  siRNA target sequence for Myo5a (NM_010864.1,490-508).
ggcaagggatgaacgaaat

SEQ ID NO: 509651 - DNA, 19 bp, Mus musculus
  siRNA target sequence for Myo5a (NM_010864.1,492-510).
caagggatgaacgaaatca

SEQ ID NO: 509652 - DNA, 19 bp, Mus musculus
  siRNA target sequence for Myo5a (NM_010864.1,547-565).
gacggtctctgctaagtat

SEQ ID NO: 509653 - DNA, 19 bp, Mus musculus
  siRNA target sequence for Myo5a (NM_010864.1,571-589).
gcggtacttcgcaactgta

SEQ ID NO: 509654 - DNA, 19 bp, Mus musculus
  siRNA target sequence for Myo5a (NM_010864.1,572-590).
cggtacttcgcaactgtaa

SEQ ID NO: 509655 - DNA, 19 bp, Mus musculus
  siRNA target sequence for Myo5a (NM_010864.1,574-592).
gtacttcgcaactgtaagt

SEQ ID NO: 509656 - DNA, 19 bp, Mus musculus
  siRNA target sequence for Myo5a (NM_010864.1,738-756).
gaatcatcggtgccaatat

SEQ ID NO: 509657 - DNA, 19 bp, Mus musculus
  siRNA target sequence for Myo5a (NM_010864.1,803-821).
gaggagagaaactaccata

SEQ ID NO: 509658 - DNA, 19 bp, Mus musculus
  siRNA target sequence for Myo5a (NM_010864.1,835-853).
ctgtgcttcggcaaagtta

SEQ ID NO: 509659 - DNA, 19 bp, Mus musculus
  siRNA target sequence for Myo5a (NM_010864.1,874-892).
gttaggaaatgcagatagt

SEQ ID NO: 509660 - DNA, 19 bp, Mus musculus
  siRNA target sequence for Myo5a (NM_010864.1,912-930).
gaggcagccctatgataga

SEQ ID NO: 509661 - DNA, 19 bp, Mus musculus
  siRNA target sequence for Myo5a (NM_010864.1,976-994).
cactctgctgggaattagt

SEQ ID NO: 509662 - DNA, 19 bp, Mus musculus
  siRNA target sequence for Myo5a (NM_010864.1,978-996).
ctctgctgggaattagtga

SEQ ID NO: 509663 - DNA, 19 bp, Mus musculus
  siRNA target sequence for Myo5a (NM_010864.1,1003-1021).
ccaaatgggaatttttcga

SEQ ID NO: 509664 - DNA, 19 bp, Mus musculus
  siRNA target sequence for Myo5a (NM_010864.1,1009-1027).
gggaatttttcgaatactt

SEQ ID NO: 509665 - DNA, 19 bp, Mus musculus
  siRNA target sequence for Myo5a (NM_010864.1,1042-1060).
cttaggcaatgttggattt

SEQ ID NO: 509666 - DNA, 19 bp, Mus musculus
  siRNA target sequence for Myo5a (NM_010864.1,1113-1131).
ccatcttctgtgaccttat

SEQ ID NO: 509667 - DNA, 19 bp, Mus musculus
  siRNA target sequence for Myo5a (NM_010864.1,1126-1144).
ccttatgggtgtggattat

SEQ ID NO: 509668 - DNA, 19 bp, Mus musculus
  siRNA target sequence for Myo5a (NM_010864.1,1182-1200).
ctactgccacagagacata

SEQ ID NO: 509669 - DNA, 19 bp, Mus musculus
  siRNA target sequence for Myo5a (NM_010864.1,1216-1234).
caagctgcaggccacaaat

SEQ ID NO: 509670 - DNA, 19 bp, Mus musculus
  siRNA target sequence for Myo5a (NM_010864.1,1230-1248).
caaatgcccgagatgcttt

SEQ ID NO: 509671 - DNA, 19 bp, Mus musculus
  siRNA target sequence for Myo5a (NM_010864.1,1235-1253).
gcccgagatgctttagcaa

SEQ ID NO: 509672 - DNA, 19 bp, Mus musculus
  siRNA target sequence for Myo5a (NM_010864.1,1270-1288).
gctctttaactggattgtt

SEQ ID NO: 509673 - DNA, 19 bp, Mus musculus
  siRNA target sequence for Myo5a (NM_010864.1,1483-1501).
gattccatggacacttata

SEQ ID NO: 509674 - DNA, 19 bp, Mus musculus
  siRNA target sequence for Myo5a (NM_010864.1,1491-1509).
ggacacttatagatttcta

SEQ ID NO: 509675 - DNA, 19 bp, Mus musculus
  siRNA target sequence for Myo5a (NM_010864.1,1492-1510).
gacacttatagatttctat

SEQ ID NO: 509676 - DNA, 19 bp, Mus musculus
  siRNA target sequence for Myo5a (NM_010864.1,1511-1529).
gataatcagccttgtatca

SEQ ID NO: 509677 - DNA, 19 bp, Mus musculus
  siRNA target sequence for Myo5a (NM_010864.1,1517-1535).
cagccttgtatcaatctta

SEQ ID NO: 509678 - DNA, 19 bp, Mus musculus
  siRNA target sequence for Myo5a (NM_010864.1,1519-1537).
gccttgtatcaatcttata

SEQ ID NO: 509679 - DNA, 19 bp, Mus musculus
  siRNA target sequence for Myo5a (NM_010864.1,1605-1623).
catgggcccaaaaactgta

SEQ ID NO: 509680 - DNA, 19 bp, Mus musculus
  siRNA target sequence for Myo5a (NM_010864.1,1608-1626).
gggcccaaaaactgtacaa

SEQ ID NO: 509681 - DNA, 19 bp, Mus musculus
  siRNA target sequence for Myo5a (NM_010864.1,1610-1628).
gcccaaaaactgtacaaca

SEQ ID NO: 509682 - DNA, 19 bp, Mus musculus
  siRNA target sequence for Myo5a (NM_010864.1,1627-1645).
cacacatttgaacaaatgt

SEQ ID NO: 509683 - DNA, 19 bp, Mus musculus
  siRNA target sequence for Myo5a (NM_010864.1,1665-1683).
gcatgtcaaacaaagcttt

SEQ ID NO: 509684 - DNA, 19 bp, Mus musculus
  siRNA target sequence for Myo5a (NM_010864.1,1778-1796).
cttaagtcaagcaagttta

SEQ ID NO: 509685 - DNA, 19 bp, Mus musculus
  siRNA target sequence for Myo5a (NM_010864.1,1939-1957).
gacagtgggacatcagttt

SEQ ID NO: 509686 - DNA, 19 bp, Mus musculus
  siRNA target sequence for Myo5a (NM_010864.1,1943-1961).
gtgggacatcagtttcgaa

SEQ ID NO: 509687 - DNA, 19 bp, Mus musculus
  siRNA target sequence for Myo5a (NM_010864.1,1966-1984).
ccttcacctgcttatggaa

SEQ ID NO: 509688 - DNA, 19 bp, Mus musculus
  siRNA target sequence for Myo5a (NM_010864.1,1967-1985).
cttcacctgcttatggaaa

SEQ ID NO: 509689 - DNA, 19 bp, Mus musculus
  siRNA target sequence for Myo5a (NM_010864.1,2026-2044).
gcctaatgatttcaagttt

SEQ ID NO: 509690 - DNA, 19 bp, Mus musculus
  siRNA target sequence for Myo5a (NM_010864.1,2046-2064).
cattcacatttgatgagaa

SEQ ID NO: 509691 - DNA, 19 bp, Mus musculus
  siRNA target sequence for Myo5a (NM_010864.1,2134-2152).
ctcacggtggacttaccaa

SEQ ID NO: 509692 - DNA, 19 bp, Mus musculus
  siRNA target sequence for Myo5a (NM_010864.1,2139-2157).
ggtggacttaccaagagtt

SEQ ID NO: 509693 - DNA, 19 bp, Mus musculus
  siRNA target sequence for Myo5a (NM_010864.1,2165-2183).
cggtaccgggtcctaatga

SEQ ID NO: 509694 - DNA, 19 bp, Mus musculus
  siRNA target sequence for Myo5a (NM_010864.1,2166-2184).
ggtaccgggtcctaatgaa

SEQ ID NO: 509695 - DNA, 19 bp, Mus musculus
  siRNA target sequence for Myo5a (NM_010864.1,2171-2189).
cgggtcctaatgaagcaaa

SEQ ID NO: 509696 - DNA, 19 bp, Mus musculus
  siRNA target sequence for Myo5a (NM_010864.1,2172-2190).
gggtcctaatgaagcaaaa

SEQ ID NO: 509697 - DNA, 19 bp, Mus musculus
  siRNA target sequence for Myo5a (NM_010864.1,2176-2194).
cctaatgaagcaaaaagat

SEQ ID NO: 509698 - DNA, 19 bp, Mus musculus
  siRNA target sequence for Myo5a (NM_010864.1,2212-2230).
gcaaacgtgcaagaatgta

SEQ ID NO: 509699 - DNA, 19 bp, Mus musculus
  siRNA target sequence for Myo5a (NM_010864.1,2213-2231).
caaacgtgcaagaatgtat

SEQ ID NO: 509700 - DNA, 19 bp, Mus musculus
  siRNA target sequence for Myo5a (NM_010864.1,2240-2258).
ctaatattggacaaggata

SEQ ID NO: 509701 - DNA, 19 bp, Mus musculus
  siRNA target sequence for Myo5a (NM_010864.1,2255-2273).
gataaataccagtttggta

SEQ ID NO: 509702 - DNA, 19 bp, Mus musculus
  siRNA target sequence for Myo5a (NM_010864.1,2270-2288).
ggtaagacaaagatctttt

SEQ ID NO: 509703 - DNA, 19 bp, Mus musculus
  siRNA target sequence for Myo5a (NM_010864.1,2300-2318).
caagtggcctatcttgaaa

SEQ ID NO: 509704 - DNA, 19 bp, Mus musculus
  siRNA target sequence for Myo5a (NM_010864.1,2446-2464).
ctatcaggctcgatgctat

SEQ ID NO: 509705 - DNA, 19 bp, Mus musculus
  siRNA target sequence for Myo5a (NM_010864.1,2450-2468).
caggctcgatgctatgcta

SEQ ID NO: 509706 - DNA, 19 bp, Mus musculus
  siRNA target sequence for Myo5a (NM_010864.1,2454-2472).
ctcgatgctatgctaagtt

SEQ ID NO: 509707 - DNA, 19 bp, Mus musculus
  siRNA target sequence for Myo5a (NM_010864.1,2492-2510).
gcaaccaccattcaaaagt

SEQ ID NO: 509708 - DNA, 19 bp, Mus musculus
  siRNA target sequence for Myo5a (NM_010864.1,2528-2546).
gtccgcaggaggtacaaga

SEQ ID NO: 509709 - DNA, 19 bp, Mus musculus
  siRNA target sequence for Myo5a (NM_010864.1,2530-2548).
ccgcaggaggtacaagatt

SEQ ID NO: 509710 - DNA, 19 bp, Mus musculus
  siRNA target sequence for Myo5a (NM_010864.1,2531-2549).
cgcaggaggtacaagatta

SEQ ID NO: 509711 - DNA, 19 bp, Mus musculus
  siRNA target sequence for Myo5a (NM_010864.1,2533-2551).
caggaggtacaagattaga

SEQ ID NO: 509712 - DNA, 19 bp, Mus musculus
  siRNA target sequence for Myo5a (NM_010864.1,2552-2570).
cgagctgccacgattgtta

SEQ ID NO: 509713 - DNA, 19 bp, Mus musculus
  siRNA target sequence for Myo5a (NM_010864.1,2556-2574).
ctgccacgattgttattca

SEQ ID NO: 509714 - DNA, 19 bp, Mus musculus
  siRNA target sequence for Myo5a (NM_010864.1,2562-2580).
cgattgttattcagtctta

SEQ ID NO: 509715 - DNA, 19 bp, Mus musculus
  siRNA target sequence for Myo5a (NM_010864.1,2617-2635).
gatactccgtgaatacaaa

SEQ ID NO: 509716 - DNA, 19 bp, Mus musculus
  siRNA target sequence for Myo5a (NM_010864.1,2665-2683).
ctggctggcccgtacacat

SEQ ID NO: 509717 - DNA, 19 bp, Mus musculus
  siRNA target sequence for Myo5a (NM_010864.1,2667-2685).
ggctggcccgtacacatta

SEQ ID NO: 509718 - DNA, 19 bp, Mus musculus
  siRNA target sequence for Myo5a (NM_010864.1,2668-2686).
gctggcccgtacacattat

SEQ ID NO: 509719 - DNA, 19 bp, Mus musculus
  siRNA target sequence for Myo5a (NM_010864.1,2669-2687).
ctggcccgtacacattata

SEQ ID NO: 509720 - DNA, 19 bp, Mus musculus
  siRNA target sequence for Myo5a (NM_010864.1,2790-2808).
gctacaagaagctccatat

SEQ ID NO: 509721 - DNA, 19 bp, Mus musculus
  siRNA target sequence for Myo5a (NM_010864.1,2897-2915).
ctggaaggagtatacaact

SEQ ID NO: 509722 - DNA, 19 bp, Mus musculus
  siRNA target sequence for Myo5a (NM_010864.1,2914-2932).
ctctgagactgaaaaacta

SEQ ID NO: 509723 - DNA, 19 bp, Mus musculus
  siRNA target sequence for Myo5a (NM_010864.1,2996-3014).
cttagtctgcaggaagaaa

SEQ ID NO: 509724 - DNA, 19 bp, Mus musculus
  siRNA target sequence for Myo5a (NM_010864.1,3047-3065).
cgatcagagaaaaagtcta

SEQ ID NO: 509725 - DNA, 19 bp, Mus musculus
  siRNA target sequence for Myo5a (NM_010864.1,3382-3400).
ctctacccacagcagtaat

SEQ ID NO: 509726 - DNA, 19 bp, Mus musculus
  siRNA target sequence for Myo5a (NM_010864.1,3393-3411).
gcagtaatgagtctgaata

SEQ ID NO: 509727 - DNA, 19 bp, Mus musculus
  siRNA target sequence for Myo5a (NM_010864.1,3490-3508).
ggatatgtcactattcctt

SEQ ID NO: 509728 - DNA, 19 bp, Mus musculus
  siRNA target sequence for Myo5a (NM_010864.1,3491-3509).
gatatgtcactattcctta

SEQ ID NO: 509729 - DNA, 19 bp, Mus musculus
  siRNA target sequence for Myo5a (NM_010864.1,3592-3610).
ccgcagcaaggcaaaggaa

SEQ ID NO: 509730 - DNA, 19 bp, Mus musculus
  siRNA target sequence for Myo5a (NM_010864.1,3654-3672).
ctctcaagcgtcaagaact

SEQ ID NO: 509731 - DNA, 19 bp, Mus musculus
  siRNA target sequence for Myo5a (NM_010864.1,3957-3975).
gtgaaatagcacaagcata

SEQ ID NO: 509732 - DNA, 19 bp, Mus musculus
  siRNA target sequence for Myo5a (NM_010864.1,3959-3977).
gaaatagcacaagcatata

SEQ ID NO: 509733 - DNA, 19 bp, Mus musculus
  siRNA target sequence for Myo5a (NM_010864.1,3966-3984).
cacaagcatatattggttt

SEQ ID NO: 509734 - DNA, 19 bp, Mus musculus
  siRNA target sequence for Myo5a (NM_010864.1,4217-4235).
gcagatgaccctaagaagt

SEQ ID NO: 509735 - DNA, 19 bp, Mus musculus
  siRNA target sequence for Myo5a (NM_010864.1,4223-4241).
gaccctaagaagtatcaat

SEQ ID NO: 509736 - DNA, 19 bp, Mus musculus
  siRNA target sequence for Myo5a (NM_010864.1,4227-4245).
ctaagaagtatcaatccta

SEQ ID NO: 509737 - DNA, 19 bp, Mus musculus
  siRNA target sequence for Myo5a (NM_010864.1,4242-4260).
cctatcggatttcacttta

SEQ ID NO: 509738 - DNA, 19 bp, Mus musculus
  siRNA target sequence for Myo5a (NM_010864.1,4247-4265).
cggatttcactttacaaaa

SEQ ID NO: 509739 - DNA, 19 bp, Mus musculus
  siRNA target sequence for Myo5a (NM_010864.1,4426-4444).
caacattccccggaaagaa

SEQ ID NO: 509740 - DNA, 19 bp, Mus musculus
  siRNA target sequence for Myo5a (NM_010864.1,4501-4519).
gaacctgattctagaacta

SEQ ID NO: 509741 - DNA, 19 bp, Mus musculus
  siRNA target sequence for Myo5a (NM_010864.1,4550-4568).
ccagggttaccagcatata

SEQ ID NO: 509742 - DNA, 19 bp, Mus musculus
  siRNA target sequence for Myo5a (NM_010864.1,4553-4571).
gggttaccagcatatatct

SEQ ID NO: 509743 - DNA, 19 bp, Mus musculus
  siRNA target sequence for Myo5a (NM_010864.1,4554-4572).
ggttaccagcatatatctt

SEQ ID NO: 509744 - DNA, 19 bp, Mus musculus
  siRNA target sequence for Myo5a (NM_010864.1,4559-4577).
ccagcatatatcttgttta

SEQ ID NO: 509745 - DNA, 19 bp, Mus musculus
  siRNA target sequence for Myo5a (NM_010864.1,4586-4604).
cgacatgctgactatctga

SEQ ID NO: 509746 - DNA, 19 bp, Mus musculus
  siRNA target sequence for Myo5a (NM_010864.1,4587-4605).
gacatgctgactatctgaa

SEQ ID NO: 509747 - DNA, 19 bp, Mus musculus
  siRNA target sequence for Myo5a (NM_010864.1,4603-4621).
gaacgatgatcagaaagta

SEQ ID NO: 509748 - DNA, 19 bp, Mus musculus
  siRNA target sequence for Myo5a (NM_010864.1,4626-4644).
cattgctgacatcaacaat

SEQ ID NO: 509749 - DNA, 19 bp, Mus musculus
  siRNA target sequence for Myo5a (NM_010864.1,4631-4649).
ctgacatcaacaattaaca

SEQ ID NO: 509750 - DNA, 19 bp, Mus musculus
  siRNA target sequence for Myo5a (NM_010864.1,4677-4695).
gtgacgattttgaaactgt

SEQ ID NO: 509751 - DNA, 19 bp, Mus musculus
  siRNA target sequence for Myo5a (NM_010864.1,4708-4726).
ctctaacacatgtcgattt

SEQ ID NO: 509752 - DNA, 19 bp, Mus musculus
  siRNA target sequence for Myo5a (NM_010864.1,4710-4728).
ctaacacatgtcgattttt

SEQ ID NO: 509753 - DNA, 19 bp, Mus musculus
  siRNA target sequence for Myo5a (NM_010864.1,4752-4770).
gagaggagggctttatgaa

SEQ ID NO: 509754 - DNA, 19 bp, Mus musculus
  siRNA target sequence for Myo5a (NM_010864.1,4821-4839).
ctgaatatcggcaagtact

SEQ ID NO: 509755 - DNA, 19 bp, Mus musculus
  siRNA target sequence for Myo5a (NM_010864.1,4906-4924).
gatagtctcaggtatgcta

SEQ ID NO: 509756 - DNA, 19 bp, Mus musculus
  siRNA target sequence for Myo5a (NM_010864.1,4916-4934).
ggtatgctagagcatgaaa

SEQ ID NO: 509757 - DNA, 19 bp, Mus musculus
  siRNA target sequence for Myo5a (NM_010864.1,4963-4981).
cacagggctcagaaaacga

SEQ ID NO: 509758 - DNA, 19 bp, Mus musculus
  siRNA target sequence for Myo5a (NM_010864.1,5070-5088).
gcatggacccggagctaat

SEQ ID NO: 509759 - DNA, 19 bp, Mus musculus
  siRNA target sequence for Myo5a (NM_010864.1,5096-5114).
gtagtcaaacagatgttct

SEQ ID NO: 509760 - DNA, 19 bp, Mus musculus
  siRNA target sequence for Myo5a (NM_010864.1,5099-5117).
gtcaaacagatgttctaca

SEQ ID NO: 509761 - DNA, 19 bp, Mus musculus
  siRNA target sequence for Myo5a (NM_010864.1,5222-5240).
ctacgtgacaagaatctaa

SEQ ID NO: 509762 - DNA, 19 bp, Mus musculus
  siRNA target sequence for Myo5a (NM_010864.1,5363-5381).
gcccagattgtcaaagtgt

SEQ ID NO: 509763 - DNA, 19 bp, Mus musculus
  siRNA target sequence for Myo5a (NM_010864.1,5394-5412).
caccggttaatgagtttga

SEQ ID NO: 509764 - DNA, 19 bp, Mus musculus
  siRNA target sequence for Myo5a (NM_010864.1,5397-5415).
cggttaatgagtttgaaga

SEQ ID NO: 509765 - DNA, 19 bp, Mus musculus
  siRNA target sequence for Myo5a (NM_010864.1,5430-5448).
catttatccgcactataca

SEQ ID NO: 509766 - DNA, 19 bp, Mus musculus
  siRNA target sequence for Myo5a (NM_010864.1,5482-5500).
gctgctcatggatgcaaaa

SEQ ID NO: 509767 - DNA, 19 bp, Mus musculus
  siRNA target sequence for Myo5a (NM_010864.1,5491-5509).
ggatgcaaaacacatcttt

SEQ ID NO: 509768 - DNA, 19 bp, Mus musculus
  siRNA target sequence for Myo6 (NM_008662.1,189-207).
ccaccccacagatggattt

SEQ ID NO: 509769 - DNA, 19 bp, Mus musculus
  siRNA target sequence for Myo6 (NM_008662.1,232-250).
ggccctgacagcttaacaa

SEQ ID NO: 509770 - DNA, 19 bp, Mus musculus
  siRNA target sequence for Myo6 (NM_008662.1,242-260).
gcttaacaattgaaccttt

SEQ ID NO: 509771 - DNA, 19 bp, Mus musculus
  siRNA target sequence for Myo6 (NM_008662.1,264-282).
ccaaaaaggcaagacattt

SEQ ID NO: 509772 - DNA, 19 bp, Mus musculus
  siRNA target sequence for Myo6 (NM_008662.1,286-304).
gctctcataaaccaagtat

SEQ ID NO: 509773 - DNA, 19 bp, Mus musculus
  siRNA target sequence for Myo6 (NM_008662.1,287-305).
ctctcataaaccaagtatt

SEQ ID NO: 509774 - DNA, 19 bp, Mus musculus
  siRNA target sequence for Myo6 (NM_008662.1,291-309).
cataaaccaagtatttcct

SEQ ID NO: 509775 - DNA, 19 bp, Mus musculus
  siRNA target sequence for Myo6 (NM_008662.1,347-365).
gttcactgatgtacttaaa

SEQ ID NO: 509776 - DNA, 19 bp, Mus musculus
  siRNA target sequence for Myo6 (NM_008662.1,446-464).
cagtgaatccatactttga

SEQ ID NO: 509777 - DNA, 19 bp, Mus musculus
  siRNA target sequence for Myo6 (NM_008662.1,448-466).
gtgaatccatactttgata

SEQ ID NO: 509778 - DNA, 19 bp, Mus musculus
  siRNA target sequence for Myo6 (NM_008662.1,450-468).
gaatccatactttgatata

SEQ ID NO: 509779 - DNA, 19 bp, Mus musculus
  siRNA target sequence for Myo6 (NM_008662.1,454-472).
ccatactttgatataccta

SEQ ID NO: 509780 - DNA, 19 bp, Mus musculus
  siRNA target sequence for Myo6 (NM_008662.1,455-473).
catactttgatatacctaa

SEQ ID NO: 509781 - DNA, 19 bp, Mus musculus
  siRNA target sequence for Myo6 (NM_008662.1,463-481).
gatatacctaagatatatt

SEQ ID NO: 509782 - DNA, 19 bp, Mus musculus
  siRNA target sequence for Myo6 (NM_008662.1,747-765).
gactgttcgcaacaataat

SEQ ID NO: 509783 - DNA, 19 bp, Mus musculus
  siRNA target sequence for Myo6 (NM_008662.1,751-769).
gttcgcaacaataatagca

SEQ ID NO: 509784 - DNA, 19 bp, Mus musculus
  siRNA target sequence for Myo6 (NM_008662.1,759-777).
caataatagcagtcgattt

SEQ ID NO: 509785 - DNA, 19 bp, Mus musculus
  siRNA target sequence for Myo6 (NM_008662.1,855-873).
gtctaggatctgtgttcaa

SEQ ID NO: 509786 - DNA, 19 bp, Mus musculus
  siRNA target sequence for Myo6 (NM_008662.1,964-982).
gataatttccggtatttaa

SEQ ID NO: 509787 - DNA, 19 bp, Mus musculus
  siRNA target sequence for Myo6 (NM_008662.1,995-1013).
ctagattcttcgctaacaa

SEQ ID NO: 509788 - DNA, 19 bp, Mus musculus
  siRNA target sequence for Myo6 (NM_008662.1,1015-1033).
gaaacggacaaacagattt

SEQ ID NO: 509789 - DNA, 19 bp, Mus musculus
  siRNA target sequence for Myo6 (NM_008662.1,1019-1037).
cggacaaacagattttaca

SEQ ID NO: 509790 - DNA, 19 bp, Mus musculus
  siRNA target sequence for Myo6 (NM_008662.1,1094-1112).
gacgaccatggagatttta

SEQ ID NO: 509791 - DNA, 19 bp, Mus musculus
  siRNA target sequence for Myo6 (NM_008662.1,1194-1212).
cctgcaccttggaaatatt

SEQ ID NO: 509792 - DNA, 19 bp, Mus musculus
  siRNA target sequence for Myo6 (NM_008662.1,1197-1215).
gcaccttggaaatattgat

SEQ ID NO: 509793 - DNA, 19 bp, Mus musculus
  siRNA target sequence for Myo6 (NM_008662.1,1244-1262).
gctgcaatctgaagaacaa

SEQ ID NO: 509794 - DNA, 19 bp, Mus musculus
  siRNA target sequence for Myo6 (NM_008662.1,1267-1285).
gccccatccctggaatact

SEQ ID NO: 509795 - DNA, 19 bp, Mus musculus
  siRNA target sequence for Myo6 (NM_008662.1,1269-1287).
cccatccctggaatactgt

SEQ ID NO: 509796 - DNA, 19 bp, Mus musculus
  siRNA target sequence for Myo6 (NM_008662.1,1299-1317).
gggcttggaccaagatgat

SEQ ID NO: 509797 - DNA, 19 bp, Mus musculus
  siRNA target sequence for Myo6 (NM_008662.1,1318-1336).
cttcgagtcagtttaacca

SEQ ID NO: 509798 - DNA, 19 bp, Mus musculus
  siRNA target sequence for Myo6 (NM_008662.1,1429-1447).
ctggcaaagactgtctata

SEQ ID NO: 509799 - DNA, 19 bp, Mus musculus
  siRNA target sequence for Myo6 (NM_008662.1,1464-1482).
cgtggtgaacagggtaaat

SEQ ID NO: 509800 - DNA, 19 bp, Mus musculus
  siRNA target sequence for Myo6 (NM_008662.1,1468-1486).
gtgaacagggtaaatcagt

SEQ ID NO: 509801 - DNA, 19 bp, Mus musculus
  siRNA target sequence for Myo6 (NM_008662.1,1560-1578).
cagcttcgagcaattttgt

SEQ ID NO: 509802 - DNA, 19 bp, Mus musculus
  siRNA target sequence for Myo6 (NM_008662.1,1659-1677).
gggcctgggtgttaatgaa

SEQ ID NO: 509803 - DNA, 19 bp, Mus musculus
  siRNA target sequence for Myo6 (NM_008662.1,1661-1679).
gcctgggtgttaatgaagt

SEQ ID NO: 509804 - DNA, 19 bp, Mus musculus
  siRNA target sequence for Myo6 (NM_008662.1,1667-1685).
gtgttaatgaagtccatta

SEQ ID NO: 509805 - DNA, 19 bp, Mus musculus
  siRNA target sequence for Myo6 (NM_008662.1,1821-1839).
ccacttccggctcactatt

SEQ ID NO: 509806 - DNA, 19 bp, Mus musculus
  siRNA target sequence for Myo6 (NM_008662.1,1835-1853).
ctattcccaggaaatctaa

SEQ ID NO: 509807 - DNA, 19 bp, Mus musculus
  siRNA target sequence for Myo6 (NM_008662.1,1969-1987).
ctacatatgtctcttgaat

SEQ ID NO: 509808 - DNA, 19 bp, Mus musculus
  siRNA target sequence for Myo6 (NM_008662.1,1997-2015).
gtgagtccagggataagtt

SEQ ID NO: 509809 - DNA, 19 bp, Mus musculus
  siRNA target sequence for Myo6 (NM_008662.1,1999-2017).
gagtccagggataagttta

SEQ ID NO: 509810 - DNA, 19 bp, Mus musculus
  siRNA target sequence for Myo6 (NM_008662.1,2001-2019).
gtccagggataagtttata

SEQ ID NO: 509811 - DNA, 19 bp, Mus musculus
  siRNA target sequence for Myo6 (NM_008662.1,2023-2041).
gcattatttgagtcatcta

SEQ ID NO: 509812 - DNA, 19 bp, Mus musculus
  siRNA target sequence for Myo6 (NM_008662.1,2295-2313).
ctcgttccatgaactctat

SEQ ID NO: 509813 - DNA, 19 bp, Mus musculus
  siRNA target sequence for Myo6 (NM_008662.1,2297-2315).
cgttccatgaactctataa

SEQ ID NO: 509814 - DNA, 19 bp, Mus musculus
  siRNA target sequence for Myo6 (NM_008662.1,2328-2346).
gtacatgccagaaaaactt

SEQ ID NO: 509815 - DNA, 19 bp, Mus musculus
  siRNA target sequence for Myo6 (NM_008662.1,2351-2369).
gattggatccgaggttatt

SEQ ID NO: 509816 - DNA, 19 bp, Mus musculus
  siRNA target sequence for Myo6 (NM_008662.1,2356-2374).
gatccgaggttattttgta

SEQ ID NO: 509817 - DNA, 19 bp, Mus musculus
  siRNA target sequence for Myo6 (NM_008662.1,2461-2479).
gaatttgatcagattatga

SEQ ID NO: 509818 - DNA, 19 bp, Mus musculus
  siRNA target sequence for Myo6 (NM_008662.1,2481-2499).
gtctgaccctgatcactta

SEQ ID NO: 509819 - DNA, 19 bp, Mus musculus
  siRNA target sequence for Myo6 (NM_008662.1,2540-2558).
gtcgctggaagaaagttca

SEQ ID NO: 509820 - DNA, 19 bp, Mus musculus
  siRNA target sequence for Myo6 (NM_008662.1,2640-2658).
ccgaatgtggctttgcaaa

SEQ ID NO: 509821 - DNA, 19 bp, Mus musculus
  siRNA target sequence for Myo6 (NM_008662.1,2641-2659).
cgaatgtggctttgcaaaa

SEQ ID NO: 509822 - DNA, 19 bp, Mus musculus
  siRNA target sequence for Myo6 (NM_008662.1,2714-2732).
gactcgataagttcaatga

SEQ ID NO: 509823 - DNA, 19 bp, Mus musculus
  siRNA target sequence for Myo6 (NM_008662.1,2736-2754).
cgtaagtgcgctgaaagat

SEQ ID NO: 509824 - DNA, 19 bp, Mus musculus
  siRNA target sequence for Myo6 (NM_008662.1,2840-2858).
cgagggagcagatacagaa

SEQ ID NO: 509825 - DNA, 19 bp, Mus musculus
  siRNA target sequence for Myo6 (NM_008662.1,2866-2884).
gatgcacttgttaaaagct

SEQ ID NO: 509826 - DNA, 19 bp, Mus musculus
  siRNA target sequence for Myo6 (NM_008662.1,3024-3042).
ggagaggcggatgaaactt

SEQ ID NO: 509827 - DNA, 19 bp, Mus musculus
  siRNA target sequence for Myo6 (NM_008662.1,3029-3047).
ggcggatgaaacttgagat

SEQ ID NO: 509828 - DNA, 19 bp, Mus musculus
  siRNA target sequence for Myo6 (NM_008662.1,3346-3364).
gcagaactacgcgatacaa

SEQ ID NO: 509829 - DNA, 19 bp, Mus musculus
  siRNA target sequence for Myo6 (NM_008662.1,3347-3365).
cagaactacgcgatacaat

SEQ ID NO: 509830 - DNA, 19 bp, Mus musculus
  siRNA target sequence for Myo6 (NM_008662.1,3349-3367).
gaactacgcgatacaatca

SEQ ID NO: 509831 - DNA, 19 bp, Mus musculus
  siRNA target sequence for Myo6 (NM_008662.1,3352-3370).
ctacgcgatacaatcaata

SEQ ID NO: 509832 - DNA, 19 bp, Mus musculus
  siRNA target sequence for Myo6 (NM_008662.1,3417-3435).
caggagactgaaagtgtat

SEQ ID NO: 509833 - DNA, 19 bp, Mus musculus
  siRNA target sequence for Myo6 (NM_008662.1,3488-3506).
ctcccaagtcggttactga

SEQ ID NO: 509834 - DNA, 19 bp, Mus musculus
  siRNA target sequence for Myo6 (NM_008662.1,3490-3508).
cccaagtcggttactgatt

SEQ ID NO: 509835 - DNA, 19 bp, Mus musculus
  siRNA target sequence for Myo6 (NM_008662.1,3491-3509).
ccaagtcggttactgatta

SEQ ID NO: 509836 - DNA, 19 bp, Mus musculus
  siRNA target sequence for Myo6 (NM_008662.1,3492-3510).
caagtcggttactgattat

SEQ ID NO: 509837 - DNA, 19 bp, Mus musculus
  siRNA target sequence for Myo6 (NM_008662.1,3495-3513).
gtcggttactgattatgat

SEQ ID NO: 509838 - DNA, 19 bp, Mus musculus
  siRNA target sequence for Myo6 (NM_008662.1,3630-3648).
ccctgcggaccagtacaaa

SEQ ID NO: 509839 - DNA, 19 bp, Mus musculus
  siRNA target sequence for Myo6 (NM_008662.1,3828-3846).
gatcttgcccagacagttt

SEQ ID NO: 509840 - DNA, 19 bp, Mus musculus
  siRNA target sequence for Myo6 (NM_008662.1,3883-3901).
cttcagagcgccattgaga

SEQ ID NO: 509841 - DNA, 19 bp, Mus musculus
  siRNA target sequence for Myo7a (NM_008663.1,148-166).
ctggatatcccctcagaat

SEQ ID NO: 509842 - DNA, 19 bp, Mus musculus
  siRNA target sequence for Myo7a (NM_008663.1,368-386).
cgccagtacaccaacaaga

SEQ ID NO: 509843 - DNA, 19 bp, Mus musculus
  siRNA target sequence for Myo7a (NM_008663.1,422-440).
gctgacaactgctacttca

SEQ ID NO: 509844 - DNA, 19 bp, Mus musculus
  siRNA target sequence for Myo7a (NM_008663.1,423-441).
ctgacaactgctacttcaa

SEQ ID NO: 509845 - DNA, 19 bp, Mus musculus
  siRNA target sequence for Myo7a (NM_008663.1,457-475).
ccgggaccagtgctgtatt

SEQ ID NO: 509846 - DNA, 19 bp, Mus musculus
  siRNA target sequence for Myo7a (NM_008663.1,588-606).
ccccgatcctggaagcatt

SEQ ID NO: 509847 - DNA, 19 bp, Mus musculus
  siRNA target sequence for Myo7a (NM_008663.1,699-717).
ccaaaatagagcaatacct

SEQ ID NO: 509848 - DNA, 19 bp, Mus musculus
  siRNA target sequence for Myo7a (NM_008663.1,830-848).
caggccgctgactacaact

SEQ ID NO: 509849 - DNA, 19 bp, Mus musculus
  siRNA target sequence for Myo7a (NM_008663.1,833-851).
gccgctgactacaactact

SEQ ID NO: 509850 - DNA, 19 bp, Mus musculus
  siRNA target sequence for Myo7a (NM_008663.1,834-852).
ccgctgactacaactactt

SEQ ID NO: 509851 - DNA, 19 bp, Mus musculus
  siRNA target sequence for Myo7a (NM_008663.1,918-936).
ctgccatgaaggttctcat

SEQ ID NO: 509852 - DNA, 19 bp, Mus musculus
  siRNA target sequence for Myo7a (NM_008663.1,921-939).
ccatgaaggttctcatgtt

SEQ ID NO: 509853 - DNA, 19 bp, Mus musculus
  siRNA target sequence for Myo7a (NM_008663.1,1190-1208).
gtgcgagatgcctttgtca

SEQ ID NO: 509854 - DNA, 19 bp, Mus musculus
  siRNA target sequence for Myo7a (NM_008663.1,1914-1932).
gtatcaaacccaatgagtt

SEQ ID NO: 509855 - DNA, 19 bp, Mus musculus
  siRNA target sequence for Myo7a (NM_008663.1,1967-1985).
gtacgccagctgcgatatt

SEQ ID NO: 509856 - DNA, 19 bp, Mus musculus
  siRNA target sequence for Myo7a (NM_008663.1,2082-2100).
gtgtgaagccagcatacaa

SEQ ID NO: 509857 - DNA, 19 bp, Mus musculus
  siRNA target sequence for Myo7a (NM_008663.1,2166-2184).
ggcagattggcaaaaccaa

SEQ ID NO: 509858 - DNA, 19 bp, Mus musculus
  siRNA target sequence for Myo7a (NM_008663.1,2348-2366).
ggccaccactgtaggaaaa

SEQ ID NO: 509859 - DNA, 19 bp, Mus musculus
  siRNA target sequence for Myo7a (NM_008663.1,2349-2367).
gccaccactgtaggaaaaa

SEQ ID NO: 509860 - DNA, 19 bp, Mus musculus
  siRNA target sequence for Myo7a (NM_008663.1,2353-2371).
ccactgtaggaaaaactat

SEQ ID NO: 509861 - DNA, 19 bp, Mus musculus
  siRNA target sequence for Myo7a (NM_008663.1,2448-2466).
ccagacagcgcataataga

SEQ ID NO: 509862 - DNA, 19 bp, Mus musculus
  siRNA target sequence for Myo7a (NM_008663.1,2451-2469).
gacagcgcataatagagtt

SEQ ID NO: 509863 - DNA, 19 bp, Mus musculus
  siRNA target sequence for Myo7a (NM_008663.1,2817-2835).
ccatcaaccactcagatat

SEQ ID NO: 509864 - DNA, 19 bp, Mus musculus
  siRNA target sequence for Myo7a (NM_008663.1,2992-3010).
ggacctttctgagtacaaa

SEQ ID NO: 509865 - DNA, 19 bp, Mus musculus
  siRNA target sequence for Myo7a (NM_008663.1,3195-3213).
gcgacggcagtgagaagat

SEQ ID NO: 509866 - DNA, 19 bp, Mus musculus
  siRNA target sequence for Myo7a (NM_008663.1,3215-3233).
ccagtgatgactaagatct

SEQ ID NO: 509867 - DNA, 19 bp, Mus musculus
  siRNA target sequence for Myo7a (NM_008663.1,3216-3234).
cagtgatgactaagatcta

SEQ ID NO: 509868 - DNA, 19 bp, Mus musculus
  siRNA target sequence for Myo7a (NM_008663.1,3240-3258).
ccctaggcaagaagacata

SEQ ID NO: 509869 - DNA, 19 bp, Mus musculus
  siRNA target sequence for Myo7a (NM_008663.1,3442-3460).
ggatcggcccacctcaaat

SEQ ID NO: 509870 - DNA, 19 bp, Mus musculus
  siRNA target sequence for Myo7a (NM_008663.1,3447-3465).
ggcccacctcaaatctaga

SEQ ID NO: 509871 - DNA, 19 bp, Mus musculus
  siRNA target sequence for Myo7a (NM_008663.1,3506-3524).
gcgctgcgggacgagattt

SEQ ID NO: 509872 - DNA, 19 bp, Mus musculus
  siRNA target sequence for Myo7a (NM_008663.1,3507-3525).
cgctgcgggacgagattta

SEQ ID NO: 509873 - DNA, 19 bp, Mus musculus
  siRNA target sequence for Myo7a (NM_008663.1,3509-3527).
ctgcgggacgagatttact

SEQ ID NO: 509874 - DNA, 19 bp, Mus musculus
  siRNA target sequence for Myo7a (NM_008663.1,3620-3638).
ccctctgagaagttcgtta

SEQ ID NO: 509875 - DNA, 19 bp, Mus musculus
  siRNA target sequence for Myo7a (NM_008663.1,3621-3639).
cctctgagaagttcgttaa

SEQ ID NO: 509876 - DNA, 19 bp, Mus musculus
  siRNA target sequence for Myo7a (NM_008663.1,4035-4053).
ggaggctcttctttagaaa

SEQ ID NO: 509877 - DNA, 19 bp, Mus musculus
  siRNA target sequence for Myo7a (NM_008663.1,4123-4141).
ggtgcgaggagtcaagttt

SEQ ID NO: 509878 - DNA, 19 bp, Mus musculus
  siRNA target sequence for Myo7a (NM_008663.1,4183-4201).
ggcttctcagcagtacttt

SEQ ID NO: 509879 - DNA, 19 bp, Mus musculus
  siRNA target sequence for Myo7a (NM_008663.1,4618-4636).
gggctgtgctacttgtcaa

SEQ ID NO: 509880 - DNA, 19 bp, Mus musculus
  siRNA target sequence for Myo7a (NM_008663.1,4683-4701).
ggtcctgtaggggaacaaa

SEQ ID NO: 509881 - DNA, 19 bp, Mus musculus
  siRNA target sequence for Myo7a (NM_008663.1,4686-4704).
cctgtaggggaacaaagat

SEQ ID NO: 509882 - DNA, 19 bp, Mus musculus
  siRNA target sequence for Myo7a (NM_008663.1,4742-4760).
gatgagtacaccttcacat

SEQ ID NO: 509883 - DNA, 19 bp, Mus musculus
  siRNA target sequence for Myo7a (NM_008663.1,5373-5391).
ggatgcgatccgtcaatga

SEQ ID NO: 509884 - DNA, 19 bp, Mus musculus
  siRNA target sequence for Myo7a (NM_008663.1,5684-5702).
gtggaggccatccaacata

SEQ ID NO: 509885 - DNA, 19 bp, Mus musculus
  siRNA target sequence for Myo7a (NM_008663.1,5689-5707).
ggccatccaacataagact

SEQ ID NO: 509886 - DNA, 19 bp, Mus musculus
  siRNA target sequence for Myo7a (NM_008663.1,5690-5708).
gccatccaacataagacta

SEQ ID NO: 509887 - DNA, 19 bp, Mus musculus
  siRNA target sequence for Myo7a (NM_008663.1,5830-5848).
cgagggattcagccttttt

SEQ ID NO: 509888 - DNA, 19 bp, Mus musculus
  siRNA target sequence for Myo7a (NM_008663.1,5835-5853).
gattcagcctttttgtcaa

SEQ ID NO: 509889 - DNA, 19 bp, Mus musculus
  siRNA target sequence for Myo7a (NM_008663.1,5912-5930).
cacctgacagactggataa

SEQ ID NO: 509890 - DNA, 19 bp, Mus musculus
  siRNA target sequence for Myo7a (NM_008663.1,5954-5972).
ggaatcgtgccctcactaa

SEQ ID NO: 509891 - DNA, 19 bp, Mus musculus
  siRNA target sequence for Myo7a (NM_008663.1,6130-6148).
catctacagggtcaagttt

SEQ ID NO: 509892 - DNA, 19 bp, Mus musculus
  siRNA target sequence for Myo7a (NM_008663.1,6256-6274).
cgcctacttcaacaaacat

SEQ ID NO: 509893 - DNA, 19 bp, Mus musculus
  siRNA target sequence for Myo7a (NM_008663.1,6559-6577).
gacatcgctgggatacaaa

SEQ ID NO: 509894 - DNA, 19 bp, Mus musculus
  siRNA target sequence for Myo7a (NM_008663.1,6561-6579).
catcgctgggatacaaaat

SEQ ID NO: 509895 - DNA, 19 bp, Mus musculus
  siRNA target sequence for Myo7a (NM_008663.1,6565-6583).
gctgggatacaaaatggat

SEQ ID NO: 509896 - DNA, 19 bp, Mus musculus
  siRNA target sequence for Myo7b (NM_032394.1,310-328).
cccaaggagtggatgacat

SEQ ID NO: 509897 - DNA, 19 bp, Mus musculus
  siRNA target sequence for Myo7b (NM_032394.1,387-405).
cagcagcacaagatctata

SEQ ID NO: 509898 - DNA, 19 bp, Mus musculus
  siRNA target sequence for Myo7b (NM_032394.1,465-483).
ctggagcaggtacaaatct

SEQ ID NO: 509899 - DNA, 19 bp, Mus musculus
  siRNA target sequence for Myo7b (NM_032394.1,541-559).
gctacttcaacatgaagaa

SEQ ID NO: 509900 - DNA, 19 bp, Mus musculus
  siRNA target sequence for Myo7b (NM_032394.1,617-635).
gaccaccaagcttatcctt

SEQ ID NO: 509901 - DNA, 19 bp, Mus musculus
  siRNA target sequence for Myo7b (NM_032394.1,622-640).
ccaagcttatccttcagtt

SEQ ID NO: 509902 - DNA, 19 bp, Mus musculus
  siRNA target sequence for Myo7b (NM_032394.1,773-791).
catccacttcaattctagt

SEQ ID NO: 509903 - DNA, 19 bp, Mus musculus
  siRNA target sequence for Myo7b (NM_032394.1,805-823).
gcgcaagcattgaacactt

SEQ ID NO: 509904 - DNA, 19 bp, Mus musculus
  siRNA target sequence for Myo7b (NM_032394.1,1171-1189).
ccttccccttggcaatgaa

SEQ ID NO: 509905 - DNA, 19 bp, Mus musculus
  siRNA target sequence for Myo7b (NM_032394.1,1212-1230).
gctctccgagactgtttga

SEQ ID NO: 509906 - DNA, 19 bp, Mus musculus
  siRNA target sequence for Myo7b (NM_032394.1,1213-1231).
ctctccgagactgtttgat

SEQ ID NO: 509907 - DNA, 19 bp, Mus musculus
  siRNA target sequence for Myo7b (NM_032394.1,1215-1233).
ctccgagactgtttgatca

SEQ ID NO: 509908 - DNA, 19 bp, Mus musculus
  siRNA target sequence for Myo7b (NM_032394.1,1217-1235).
ccgagactgtttgatcaaa

SEQ ID NO: 509909 - DNA, 19 bp, Mus musculus
  siRNA target sequence for Myo7b (NM_032394.1,1219-1237).
gagactgtttgatcaaaca

SEQ ID NO: 509910 - DNA, 19 bp, Mus musculus
  siRNA target sequence for Myo7b (NM_032394.1,1221-1239).
gactgtttgatcaaacaca

SEQ ID NO: 509911 - DNA, 19 bp, Mus musculus
  siRNA target sequence for Myo7b (NM_032394.1,1346-1364).
gattgtcaagaaaatcaat

SEQ ID NO: 509912 - DNA, 19 bp, Mus musculus
  siRNA target sequence for Myo7b (NM_032394.1,1531-1549).
cgatggagcaggaagagta

SEQ ID NO: 509913 - DNA, 19 bp, Mus musculus
  siRNA target sequence for Myo7b (NM_032394.1,1708-1726).
gtatccatgccaacaacaa

SEQ ID NO: 509914 - DNA, 19 bp, Mus musculus
  siRNA target sequence for Myo7b (NM_032394.1,1840-1858).
gcacagatatcctaatcct

SEQ ID NO: 509915 - DNA, 19 bp, Mus musculus
  siRNA target sequence for Myo7b (NM_032394.1,1863-1881).
cattcctcgaaaaacaagt

SEQ ID NO: 509916 - DNA, 19 bp, Mus musculus
  siRNA target sequence for Myo7b (NM_032394.1,1956-1974).
ggaagccagctcttcaagt

SEQ ID NO: 509917 - DNA, 19 bp, Mus musculus
  siRNA target sequence for Myo7b (NM_032394.1,2080-2098).
gcattaaacccaatgagta

SEQ ID NO: 509918 - DNA, 19 bp, Mus musculus
  siRNA target sequence for Myo7b (NM_032394.1,2194-2212).
ccatccgctacacatttga

SEQ ID NO: 509919 - DNA, 19 bp, Mus musculus
  siRNA target sequence for Myo7b (NM_032394.1,2195-2213).
catccgctacacatttgat

SEQ ID NO: 509920 - DNA, 19 bp, Mus musculus
  siRNA target sequence for Myo7b (NM_032394.1,2251-2269).
cggagcgtatgcagtttca

SEQ ID NO: 509921 - DNA, 19 bp, Mus musculus
  siRNA target sequence for Myo7b (NM_032394.1,2257-2275).
gtatgcagtttcagaacaa

SEQ ID NO: 509922 - DNA, 19 bp, Mus musculus
  siRNA target sequence for Myo7b (NM_032394.1,2337-2355).
gtcggaaagaccaaaatct

SEQ ID NO: 509923 - DNA, 19 bp, Mus musculus
  siRNA target sequence for Myo7b (NM_032394.1,2511-2529).
cgaggctatagccaaagaa

SEQ ID NO: 509924 - DNA, 19 bp, Mus musculus
  siRNA target sequence for Myo7b (NM_032394.1,2690-2708).
ggcagtggtgatcattcaa

SEQ ID NO: 509925 - DNA, 19 bp, Mus musculus
  siRNA target sequence for Myo7b (NM_032394.1,2761-2779).
ctgggcctcaggtcattct

SEQ ID NO: 509926 - DNA, 19 bp, Mus musculus
  siRNA target sequence for Myo7b (NM_032394.1,2819-2837).
gaagcgtaagtccatctat

SEQ ID NO: 509927 - DNA, 19 bp, Mus musculus
  siRNA target sequence for Myo7b (NM_032394.1,2823-2841).
cgtaagtccatctatgaca

SEQ ID NO: 509928 - DNA, 19 bp, Mus musculus
  siRNA target sequence for Myo7b (NM_032394.1,2856-2874).
gcgatggtggagaaagtgt

SEQ ID NO: 509929 - DNA, 19 bp, Mus musculus
  siRNA target sequence for Myo7b (NM_032394.1,3019-3037).
gcctggctgagtatacctt

SEQ ID NO: 509930 - DNA, 19 bp, Mus musculus
  siRNA target sequence for Myo7b (NM_032394.1,3029-3047).
gtataccttccccaagttt

SEQ ID NO: 509931 - DNA, 19 bp, Mus musculus
  siRNA target sequence for Myo7b (NM_032394.1,3137-3155).
ccactcggctgctctagat

SEQ ID NO: 509932 - DNA, 19 bp, Mus musculus
  siRNA target sequence for Myo7b (NM_032394.1,3140-3158).
ctcggctgctctagatgtt

SEQ ID NO: 509933 - DNA, 19 bp, Mus musculus
  siRNA target sequence for Myo7b (NM_032394.1,3150-3168).
ctagatgtttggattatca

SEQ ID NO: 509934 - DNA, 19 bp, Mus musculus
  siRNA target sequence for Myo7b (NM_032394.1,3358-3376).
cagacagacccatgtctaa

SEQ ID NO: 509935 - DNA, 19 bp, Mus musculus
  siRNA target sequence for Myo7b (NM_032394.1,3362-3380).
cagacccatgtctaaccta

SEQ ID NO: 509936 - DNA, 19 bp, Mus musculus
  siRNA target sequence for Myo7b (NM_032394.1,3459-3477).
cagctctccgagaactaca

SEQ ID NO: 509937 - DNA, 19 bp, Mus musculus
  siRNA target sequence for Myo7b (NM_032394.1,3563-3581).
gctgaatttcattagtcaa

SEQ ID NO: 509938 - DNA, 19 bp, Mus musculus
  siRNA target sequence for Myo7b (NM_032394.1,3827-3845).
cctccaggtcgctgtatat

SEQ ID NO: 509939 - DNA, 19 bp, Mus musculus
  siRNA target sequence for Myo7b (NM_032394.1,3830-3848).
ccaggtcgctgtatatgat

SEQ ID NO: 509940 - DNA, 19 bp, Mus musculus
  siRNA target sequence for Myo7b (NM_032394.1,3831-3849).
caggtcgctgtatatgata

SEQ ID NO: 509941 - DNA, 19 bp, Mus musculus
  siRNA target sequence for Myo7b (NM_032394.1,3834-3852).
gtcgctgtatatgataagt

SEQ ID NO: 509942 - DNA, 19 bp, Mus musculus
  siRNA target sequence for Myo7b (NM_032394.1,3868-3886).
gcggctgtgaccatttgat

SEQ ID NO: 509943 - DNA, 19 bp, Mus musculus
  siRNA target sequence for Myo7b (NM_032394.1,4011-4029).
gtgagcactgagctcattt

SEQ ID NO: 509944 - DNA, 19 bp, Mus musculus
  siRNA target sequence for Myo7b (NM_032394.1,4129-4147).
gggccacggtgaagagtaa

SEQ ID NO: 509945 - DNA, 19 bp, Mus musculus
  siRNA target sequence for Myo7b (NM_032394.1,4239-4257).
catgccaaggcccagtata

SEQ ID NO: 509946 - DNA, 19 bp, Mus musculus
  siRNA target sequence for Myo7b (NM_032394.1,4328-4346).
gctcttctcccggctattt

SEQ ID NO: 509947 - DNA, 19 bp, Mus musculus
  siRNA target sequence for Myo7b (NM_032394.1,4379-4397).
caagacgcagctggtttta

SEQ ID NO: 509948 - DNA, 19 bp, Mus musculus
  siRNA target sequence for Myo7b (NM_032394.1,4559-4577).
cagcagcgtggctattgca

SEQ ID NO: 509949 - DNA, 19 bp, Mus musculus
  siRNA target sequence for Myo7b (NM_032394.1,5058-5076).
cgccagccactgctcaaat

SEQ ID NO: 509950 - DNA, 19 bp, Mus musculus
  siRNA target sequence for Myo7b (NM_032394.1,5060-5078).
ccagccactgctcaaatct

SEQ ID NO: 509951 - DNA, 19 bp, Mus musculus
  siRNA target sequence for Myo7b (NM_032394.1,5355-5373).
ccccacgctcagaagttca

SEQ ID NO: 509952 - DNA, 19 bp, Mus musculus
  siRNA target sequence for Myo7b (NM_032394.1,5357-5375).
ccacgctcagaagttcata

SEQ ID NO: 509953 - DNA, 19 bp, Mus musculus
  siRNA target sequence for Myo7b (NM_032394.1,5450-5468).
gaagcagcccccacatgat

SEQ ID NO: 509954 - DNA, 19 bp, Mus musculus
  siRNA target sequence for Myo7b (NM_032394.1,5453-5471).
gcagcccccacatgatgta

SEQ ID NO: 509955 - DNA, 19 bp, Mus musculus
  siRNA target sequence for Myo7b (NM_032394.1,5481-5499).
gcggctgagcagaatgtct

SEQ ID NO: 509956 - DNA, 19 bp, Mus musculus
  siRNA target sequence for Myo7b (NM_032394.1,5827-5845).
cagacaccatactccatta

SEQ ID NO: 509957 - DNA, 19 bp, Mus musculus
  siRNA target sequence for Myo7b (NM_032394.1,5912-5930).
gggaggtctcatctgtaaa

SEQ ID NO: 509958 - DNA, 19 bp, Mus musculus
  siRNA target sequence for Myo7b (NM_032394.1,5913-5931).
ggaggtctcatctgtaaaa

SEQ ID NO: 509959 - DNA, 19 bp, Mus musculus
  siRNA target sequence for Myo7b (NM_032394.1,5917-5935).
gtctcatctgtaaaatcca

SEQ ID NO: 509960 - DNA, 19 bp, Mus musculus
  siRNA target sequence for Myo7b (NM_032394.1,6045-6063).
cttctggaatgtgacaaaa

SEQ ID NO: 509961 - DNA, 19 bp, Mus musculus
  siRNA target sequence for Myo7b (NM_032394.1,6374-6392).
cgacctgctgacctcatat

SEQ ID NO: 509962 - DNA, 19 bp, Mus musculus
  siRNA target sequence for Myo7b (NM_032394.1,6377-6395).
cctgctgacctcatatgta

SEQ ID NO: 509963 - DNA, 19 bp, Mus musculus
  siRNA target sequence for Myo9b (NM_015742.1,275-293).
gcacaacaagcgatgtcat

SEQ ID NO: 509964 - DNA, 19 bp, Mus musculus
  siRNA target sequence for Myo9b (NM_015742.1,486-504).
caatgctgatggcagtatt

SEQ ID NO: 509965 - DNA, 19 bp, Mus musculus
  siRNA target sequence for Myo9b (NM_015742.1,576-594).
gaggcctcaagcagacttt

SEQ ID NO: 509966 - DNA, 19 bp, Mus musculus
  siRNA target sequence for Myo9b (NM_015742.1,578-596).
ggcctcaagcagactttga

SEQ ID NO: 509967 - DNA, 19 bp, Mus musculus
  siRNA target sequence for Myo9b (NM_015742.1,655-673).
cgcttcatgcagcaaaaga

SEQ ID NO: 509968 - DNA, 19 bp, Mus musculus
  siRNA target sequence for Myo9b (NM_015742.1,656-674).
gcttcatgcagcaaaagat

SEQ ID NO: 509969 - DNA, 19 bp, Mus musculus
  siRNA target sequence for Myo9b (NM_015742.1,703-721).
gccatcaacccctttaagt

SEQ ID NO: 509970 - DNA, 19 bp, Mus musculus
  siRNA target sequence for Myo9b (NM_015742.1,704-722).
ccatcaacccctttaagtt

SEQ ID NO: 509971 - DNA, 19 bp, Mus musculus
  siRNA target sequence for Myo9b (NM_015742.1,1004-1022).
ccaagacagcccacaacaa

SEQ ID NO: 509972 - DNA, 19 bp, Mus musculus
  siRNA target sequence for Myo9b (NM_015742.1,1082-1100).
ggggagctgttgtggaaaa

SEQ ID NO: 509973 - DNA, 19 bp, Mus musculus
  siRNA target sequence for Myo9b (NM_015742.1,1146-1164).
gcggaactaccatgtgttt

SEQ ID NO: 509974 - DNA, 19 bp, Mus musculus
  siRNA target sequence for Myo9b (NM_015742.1,1147-1165).
cggaactaccatgtgtttt

SEQ ID NO: 509975 - DNA, 19 bp, Mus musculus
  siRNA target sequence for Myo9b (NM_015742.1,1191-1209).
ggaggagcgcctggaattt

SEQ ID NO: 509976 - DNA, 19 bp, Mus musculus
  siRNA target sequence for Myo9b (NM_015742.1,1219-1237).
cagcctcaagactatttct

SEQ ID NO: 509977 - DNA, 19 bp, Mus musculus
  siRNA target sequence for Myo9b (NM_015742.1,1248-1266).
gcataacttgaatattgaa

SEQ ID NO: 509978 - DNA, 19 bp, Mus musculus
  siRNA target sequence for Myo9b (NM_015742.1,1384-1402).
ggcaatgtcacctacaaga

SEQ ID NO: 509979 - DNA, 19 bp, Mus musculus
  siRNA target sequence for Myo9b (NM_015742.1,1523-1541).
cagttacagtcaatgacaa

SEQ ID NO: 509980 - DNA, 19 bp, Mus musculus
  siRNA target sequence for Myo9b (NM_015742.1,1529-1547).
cagtcaatgacaaactcat

SEQ ID NO: 509981 - DNA, 19 bp, Mus musculus
  siRNA target sequence for Myo9b (NM_015742.1,1723-1741).
gaggacttcgaaaggaata

SEQ ID NO: 509982 - DNA, 19 bp, Mus musculus
  siRNA target sequence for Myo9b (NM_015742.1,1726-1744).
gacttcgaaaggaatagct

SEQ ID NO: 509983 - DNA, 19 bp, Mus musculus
  siRNA target sequence for Myo9b (NM_015742.1,1841-1859).
gcatctcgtggcacaacat

SEQ ID NO: 509984 - DNA, 19 bp, Mus musculus
  siRNA target sequence for Myo9b (NM_015742.1,1842-1860).
catctcgtggcacaacatt

SEQ ID NO: 509985 - DNA, 19 bp, Mus musculus
  siRNA target sequence for Myo9b (NM_015742.1,1847-1865).
cgtggcacaacattgacta

SEQ ID NO: 509986 - DNA, 19 bp, Mus musculus
  siRNA target sequence for Myo9b (NM_015742.1,1987-2005).
cagcagcatgaggacaata

SEQ ID NO: 509987 - DNA, 19 bp, Mus musculus
  siRNA target sequence for Myo9b (NM_015742.1,2196-2214).
gttccgctgggctgtacta

SEQ ID NO: 509988 - DNA, 19 bp, Mus musculus
  siRNA target sequence for Myo9b (NM_015742.1,2345-2363).
gtaccccttcagaaaaact

SEQ ID NO: 509989 - DNA, 19 bp, Mus musculus
  siRNA target sequence for Myo9b (NM_015742.1,2362-2380).
ctgtaccgcgatttgcata

SEQ ID NO: 509990 - DNA, 19 bp, Mus musculus
  siRNA target sequence for Myo9b (NM_015742.1,2367-2385).
ccgcgatttgcataaccaa

SEQ ID NO: 509991 - DNA, 19 bp, Mus musculus
  siRNA target sequence for Myo9b (NM_015742.1,2368-2386).
cgcgatttgcataaccaaa

SEQ ID NO: 509992 - DNA, 19 bp, Mus musculus
  siRNA target sequence for Myo9b (NM_015742.1,2369-2387).
gcgatttgcataaccaaat

SEQ ID NO: 509993 - DNA, 19 bp, Mus musculus
  siRNA target sequence for Myo9b (NM_015742.1,2377-2395).
cataaccaaatcatcaaga

SEQ ID NO: 509994 - DNA, 19 bp, Mus musculus
  siRNA target sequence for Myo9b (NM_015742.1,2812-2830).
ggctacagcgccaagtaca

SEQ ID NO: 509995 - DNA, 19 bp, Mus musculus
  siRNA target sequence for Myo9b (NM_015742.1,2935-2953).
cagaactaccagattggaa

SEQ ID NO: 509996 - DNA, 19 bp, Mus musculus
  siRNA target sequence for Myo9b (NM_015742.1,3011-3029).
gtgaggtcctgcgtagaat

SEQ ID NO: 509997 - DNA, 19 bp, Mus musculus
  siRNA target sequence for Myo9b (NM_015742.1,3063-3081).
ggaacgcaagcactttgta

SEQ ID NO: 509998 - DNA, 19 bp, Mus musculus
  siRNA target sequence for Myo9b (NM_015742.1,3499-3517).
gagaccgcagcccaaaaga

SEQ ID NO: 509999 - DNA, 19 bp, Mus musculus
  siRNA target sequence for Myo9b (NM_015742.1,3584-3602).
gagggttggagcatgttga

SEQ ID NO: 510000 - DNA, 19 bp, Mus musculus
  siRNA target sequence for Myo9b (NM_015742.1,3594-3612).
gcatgttgaacgacagaat

SEQ ID NO: 510001 - DNA, 19 bp, Mus musculus
  siRNA target sequence for Myo9b (NM_015742.1,3595-3613).
catgttgaacgacagaata

SEQ ID NO: 510002 - DNA, 19 bp, Mus musculus
  siRNA target sequence for Myo9b (NM_015742.1,3601-3619).
gaacgacagaataaacaca

SEQ ID NO: 510003 - DNA, 19 bp, Mus musculus
  siRNA target sequence for Myo9b (NM_015742.1,3752-3770).
cagccccctctagttcaaa

SEQ ID NO: 510004 - DNA, 19 bp, Mus musculus
  siRNA target sequence for Myo9b (NM_015742.1,3877-3895).
ctggaatcccccaaagata

SEQ ID NO: 510005 - DNA, 19 bp, Mus musculus
  siRNA target sequence for Myo9b (NM_015742.1,3953-3971).
ccacccagatccaacgata

SEQ ID NO: 510006 - DNA, 19 bp, Mus musculus
  siRNA target sequence for Myo9b (NM_015742.1,3957-3975).
ccagatccaacgataccaa

SEQ ID NO: 510007 - DNA, 19 bp, Mus musculus
  siRNA target sequence for Myo9b (NM_015742.1,4108-4126).
gaggagaggcgcatctctt

SEQ ID NO: 510008 - DNA, 19 bp, Mus musculus
  siRNA target sequence for Myo9b (NM_015742.1,4150-4168).
ctgtccccagtcaagactt

SEQ ID NO: 510009 - DNA, 19 bp, Mus musculus
  siRNA target sequence for Myo9b (NM_015742.1,4164-4182).
gacttcagctgaaatcgat

SEQ ID NO: 510010 - DNA, 19 bp, Mus musculus
  siRNA target sequence for Myo9b (NM_015742.1,4174-4192).
gaaatcgatggggacttta

SEQ ID NO: 510011 - DNA, 19 bp, Mus musculus
  siRNA target sequence for Myo9b (NM_015742.1,4204-4222).
ccatccatccataagaaga

SEQ ID NO: 510012 - DNA, 19 bp, Mus musculus
  siRNA target sequence for Myo9b (NM_015742.1,4272-4290).
ccagggtgactctaaatct

SEQ ID NO: 510013 - DNA, 19 bp, Mus musculus
  siRNA target sequence for Myo9b (NM_015742.1,4279-4297).
gactctaaatctgcattta

SEQ ID NO: 510014 - DNA, 19 bp, Mus musculus
  siRNA target sequence for Myo9b (NM_015742.1,4473-4491).
gaaccgaaatcgcaaagtt

SEQ ID NO: 510015 - DNA, 19 bp, Mus musculus
  siRNA target sequence for Myo9b (NM_015742.1,4530-4548).
gttccgtaagatcactaat

SEQ ID NO: 510016 - DNA, 19 bp, Mus musculus
  siRNA target sequence for Myo9b (NM_015742.1,4618-4636).
cccatcgaaagcttgttca

SEQ ID NO: 510017 - DNA, 19 bp, Mus musculus
  siRNA target sequence for Myo9b (NM_015742.1,4619-4637).
ccatcgaaagcttgttcat

SEQ ID NO: 510018 - DNA, 19 bp, Mus musculus
  siRNA target sequence for Myo9b (NM_015742.1,4620-4638).
catcgaaagcttgttcatt

SEQ ID NO: 510019 - DNA, 19 bp, Mus musculus
  siRNA target sequence for Myo9b (NM_015742.1,5037-5055).
gaaatgcgtgcacaagatt

SEQ ID NO: 510020 - DNA, 19 bp, Mus musculus
  siRNA target sequence for Myo9b (NM_015742.1,5244-5262).
caaccggacacgggaatta

SEQ ID NO: 510021 - DNA, 19 bp, Mus musculus
  siRNA target sequence for Myo9b (NM_015742.1,5381-5399).
cccagtatggagatttcct

SEQ ID NO: 510022 - DNA, 19 bp, Mus musculus
  siRNA target sequence for Myo9b (NM_015742.1,5549-5567).
ctccgggagctctagctat

SEQ ID NO: 510023 - DNA, 19 bp, Mus musculus
  siRNA target sequence for Myo9b (NM_015742.1,5552-5570).
cgggagctctagctatcat

SEQ ID NO: 510024 - DNA, 19 bp, Mus musculus
  siRNA target sequence for Myo9b (NM_015742.1,5554-5572).
ggagctctagctatcatct

SEQ ID NO: 510025 - DNA, 19 bp, Mus musculus
  siRNA target sequence for Myo9b (NM_015742.1,5555-5573).
gagctctagctatcatctt

SEQ ID NO: 510026 - DNA, 19 bp, Mus musculus
  siRNA target sequence for Myo9b (NM_015742.1,5843-5861).
gcgacgaggaccgagaaaa

SEQ ID NO: 510027 - DNA, 19 bp, Mus musculus
  siRNA target sequence for Myo9b (NM_015742.1,5904-5922).
ggaggacatcacatatcga

SEQ ID NO: 510028 - DNA, 19 bp, Mus musculus
  siRNA target sequence for Myo9b (NM_015742.1,5934-5952).
ggacccacggggttctgat

SEQ ID NO: 510029 - DNA, 19 bp, Mus musculus
  siRNA target sequence for Nagk (NM_019542.1,496-514).
ccaacctgagtgaaaacta

SEQ ID NO: 510030 - DNA, 19 bp, Mus musculus
  siRNA target sequence for Nagk (NM_019542.1,731-749).
ggaggcagctcctcatgat

SEQ ID NO: 510031 - DNA, 19 bp, Mus musculus
  siRNA target sequence for Nagk (NM_019542.1,765-783).
caggccatgttcgactatt

SEQ ID NO: 510032 - DNA, 19 bp, Mus musculus
  siRNA target sequence for Nagk (NM_019542.1,821-839).
gtatagggactttgataaa

SEQ ID NO: 510033 - DNA, 19 bp, Mus musculus
  siRNA target sequence for Nagk (NM_019542.1,894-912).
cctctttccaggtacatct

SEQ ID NO: 510034 - DNA, 19 bp, Mus musculus
  siRNA target sequence for Nagk (NM_019542.1,897-915).
ctttccaggtacatcttca

SEQ ID NO: 510035 - DNA, 19 bp, Mus musculus
  siRNA target sequence for Nagk (NM_019542.1,940-958).
gacatgttgtggcagtatt

SEQ ID NO: 510036 - DNA, 19 bp, Mus musculus
  siRNA target sequence for Nagk (NM_019542.1,963-981).
gagattgacccggttttgt

SEQ ID NO: 510037 - DNA, 19 bp, Mus musculus
  siRNA target sequence for Nagk (NM_019542.1,1124-1142).
gaagttgcggcattcttct

SEQ ID NO: 510038 - DNA, 19 bp, Mus musculus
  siRNA target sequence for Nagk (NM_019542.1,1188-1206).
cttcccatggactacagta

SEQ ID NO: 510039 - DNA, 19 bp, Mus musculus
  siRNA target sequence for Nagk (NM_019542.1,1192-1210).
ccatggactacagtatcaa

SEQ ID NO: 510040 - DNA, 19 bp, Mus musculus
  siRNA target sequence for Nalp5 (NM_011860.1,451-469).
gtgacttacaagactacaa

SEQ ID NO: 510041 - DNA, 19 bp, Mus musculus
  siRNA target sequence for Nalp5 (NM_011860.1,472-490).
cccatgtgattgctaagtt

SEQ ID NO: 510042 - DNA, 19 bp, Mus musculus
  siRNA target sequence for Nalp5 (NM_011860.1,499-517).
gtgtggatctacactatga

SEQ ID NO: 510043 - DNA, 19 bp, Mus musculus
  siRNA target sequence for Nalp5 (NM_011860.1,501-519).
gtggatctacactatgaca

SEQ ID NO: 510044 - DNA, 19 bp, Mus musculus
  siRNA target sequence for Nalp5 (NM_011860.1,575-593).
gcctcacaccattatccta

SEQ ID NO: 510045 - DNA, 19 bp, Mus musculus
  siRNA target sequence for Nalp5 (NM_011860.1,646-664).
gctgggcacagggtaaact

SEQ ID NO: 510046 - DNA, 19 bp, Mus musculus
  siRNA target sequence for Nalp5 (NM_011860.1,656-674).
gggtaaactcttccaaaaa

SEQ ID NO: 510047 - DNA, 19 bp, Mus musculus
  siRNA target sequence for Nalp5 (NM_011860.1,686-704).
catcttcttctctgttaga

SEQ ID NO: 510048 - DNA, 19 bp, Mus musculus
  siRNA target sequence for Nalp5 (NM_011860.1,692-710).
cttctctgttagagaaata

SEQ ID NO: 510049 - DNA, 19 bp, Mus musculus
  siRNA target sequence for Nalp5 (NM_011860.1,766-784).
cctgggatctagtgacaaa

SEQ ID NO: 510050 - DNA, 19 bp, Mus musculus
  siRNA target sequence for Nalp5 (NM_011860.1,769-787).
gggatctagtgacaaagat

SEQ ID NO: 510051 - DNA, 19 bp, Mus musculus
  siRNA target sequence for Nalp5 (NM_011860.1,774-792).
ctagtgacaaagatcatgt

SEQ ID NO: 510052 - DNA, 19 bp, Mus musculus
  siRNA target sequence for Nalp5 (NM_011860.1,846-864).
gtcctccaacatgatgata

SEQ ID NO: 510053 - DNA, 19 bp, Mus musculus
  siRNA target sequence for Nalp5 (NM_011860.1,851-869).
ccaacatgatgatatgaca

SEQ ID NO: 510054 - DNA, 19 bp, Mus musculus
  siRNA target sequence for Nalp5 (NM_011860.1,877-895).
gagactggaaggatgaaca

SEQ ID NO: 510055 - DNA, 19 bp, Mus musculus
  siRNA target sequence for Nalp5 (NM_011860.1,976-994).
caggcttagaaaaactcaa

SEQ ID NO: 510056 - DNA, 19 bp, Mus musculus
  siRNA target sequence for Nalp5 (NM_011860.1,1002-1020).
gttgtgtcccccctctata

SEQ ID NO: 510057 - DNA, 19 bp, Mus musculus
  siRNA target sequence for Nalp5 (NM_011860.1,1076-1094).
ctccaatgagtctgataga

SEQ ID NO: 510058 - DNA, 19 bp, Mus musculus
  siRNA target sequence for Nalp5 (NM_011860.1,1078-1096).
ccaatgagtctgatagaat

SEQ ID NO: 510059 - DNA, 19 bp, Mus musculus
  siRNA target sequence for Nalp5 (NM_011860.1,1079-1097).
caatgagtctgatagaata

SEQ ID NO: 510060 - DNA, 19 bp, Mus musculus
  siRNA target sequence for Nalp5 (NM_011860.1,1106-1124).
ccattctctgatagaaaat

SEQ ID NO: 510061 - DNA, 19 bp, Mus musculus
  siRNA target sequence for Nalp5 (NM_011860.1,1229-1247).
gactctcaccggtttgtat

SEQ ID NO: 510062 - DNA, 19 bp, Mus musculus
  siRNA target sequence for Nalp5 (NM_011860.1,1297-1315).
ctctcagtcaggaagaaca

SEQ ID NO: 510063 - DNA, 19 bp, Mus musculus
  siRNA target sequence for Nalp5 (NM_011860.1,1363-1381).
ccatgaggtcggtgttcta

SEQ ID NO: 510064 - DNA, 19 bp, Mus musculus
  siRNA target sequence for Nalp5 (NM_011860.1,1364-1382).
catgaggtcggtgttctat

SEQ ID NO: 510065 - DNA, 19 bp, Mus musculus
  siRNA target sequence for Nalp5 (NM_011860.1,1367-1385).
gaggtcggtgttctatgat

SEQ ID NO: 510066 - DNA, 19 bp, Mus musculus
  siRNA target sequence for Nalp5 (NM_011860.1,1369-1387).
ggtcggtgttctatgatga

SEQ ID NO: 510067 - DNA, 19 bp, Mus musculus
  siRNA target sequence for Nalp5 (NM_011860.1,1466-1484).
caacagtgagcagtgttat

SEQ ID NO: 510068 - DNA, 19 bp, Mus musculus
  siRNA target sequence for Nalp5 (NM_011860.1,1519-1537).
ctgccttatattatgtttt

SEQ ID NO: 510069 - DNA, 19 bp, Mus musculus
  siRNA target sequence for Nalp5 (NM_011860.1,1631-1649).
cgggatgaagcgtttctta

SEQ ID NO: 510070 - DNA, 19 bp, Mus musculus
  siRNA target sequence for Nalp5 (NM_011860.1,1634-1652).
gatgaagcgtttcttattt

SEQ ID NO: 510071 - DNA, 19 bp, Mus musculus
  siRNA target sequence for Nalp5 (NM_011860.1,1653-1671).
ggcctcatgaacaaggata

SEQ ID NO: 510072 - DNA, 19 bp, Mus musculus
  siRNA target sequence for Nalp5 (NM_011860.1,1656-1674).
ctcatgaacaaggatatct

SEQ ID NO: 510073 - DNA, 19 bp, Mus musculus
  siRNA target sequence for Nalp5 (NM_011860.1,1698-1716).
gaatatcccgtgattccaa

SEQ ID NO: 510074 - DNA, 19 bp, Mus musculus
  siRNA target sequence for Nalp5 (NM_011860.1,1787-1805).
caccctggatgccttctat

SEQ ID NO: 510075 - DNA, 19 bp, Mus musculus
  siRNA target sequence for Nalp5 (NM_011860.1,1794-1812).
gatgccttctattgtctat

SEQ ID NO: 510076 - DNA, 19 bp, Mus musculus
  siRNA target sequence for Nalp5 (NM_011860.1,1941-1959).
gcaatccgggtggatatca

SEQ ID NO: 510077 - DNA, 19 bp, Mus musculus
  siRNA target sequence for Nalp5 (NM_011860.1,1962-1980).
gacctcctctcggtagata

SEQ ID NO: 510078 - DNA, 19 bp, Mus musculus
  siRNA target sequence for Nalp5 (NM_011860.1,1965-1983).
ctcctctcggtagataata

SEQ ID NO: 510079 - DNA, 19 bp, Mus musculus
  siRNA target sequence for Nalp5 (NM_011860.1,1967-1985).
cctctcggtagataatact

SEQ ID NO: 510080 - DNA, 19 bp, Mus musculus
  siRNA target sequence for Nalp5 (NM_011860.1,1988-2006).
cgagctgtgccctgttgtt

SEQ ID NO: 510081 - DNA, 19 bp, Mus musculus
  siRNA target sequence for Nalp5 (NM_011860.1,1989-2007).
gagctgtgccctgttgtta

SEQ ID NO: 510082 - DNA, 19 bp, Mus musculus
  siRNA target sequence for Nalp5 (NM_011860.1,2178-2196).
cagaagctgacgtttaaga

SEQ ID NO: 510083 - DNA, 19 bp, Mus musculus
  siRNA target sequence for Nalp5 (NM_011860.1,2361-2379).
gattcctgtgagttaacca

SEQ ID NO: 510084 - DNA, 19 bp, Mus musculus
  siRNA target sequence for Nalp5 (NM_011860.1,2366-2384).
ctgtgagttaaccatcatt

SEQ ID NO: 510085 - DNA, 19 bp, Mus musculus
  siRNA target sequence for Nalp5 (NM_011860.1,2372-2390).
gttaaccatcattggttat

SEQ ID NO: 510086 - DNA, 19 bp, Mus musculus
  siRNA target sequence for Nalp5 (NM_011860.1,2434-2452).
gtctcagcctggccaaaaa

SEQ ID NO: 510087 - DNA, 19 bp, Mus musculus
  siRNA target sequence for Nalp5 (NM_011860.1,2503-2521).
caatgtgtctactgcaaaa

SEQ ID NO: 510088 - DNA, 19 bp, Mus musculus
  siRNA target sequence for Nalp5 (NM_011860.1,2840-2858).
ggaacctacttgttacctt

SEQ ID NO: 510089 - DNA, 19 bp, Mus musculus
  siRNA target sequence for Nalp5 (NM_011860.1,3000-3018).
gagggactgaagcaaagta

SEQ ID NO: 510090 - DNA, 19 bp, Mus musculus
  siRNA target sequence for Nalp5 (NM_011860.1,3039-3057).
gggttgggggcatgtaagt

SEQ ID NO: 510091 - DNA, 19 bp, Mus musculus
  siRNA target sequence for Nalp5 (NM_011860.1,3040-3058).
ggttgggggcatgtaagtt

SEQ ID NO: 510092 - DNA, 19 bp, Mus musculus
  siRNA target sequence for Nalp6 (NM_133946.1,492-510).
gggcatcctggatcatcat

SEQ ID NO: 510093 - DNA, 19 bp, Mus musculus
  siRNA target sequence for Nalp6 (NM_133946.1,493-511).
ggcatcctggatcatcata

SEQ ID NO: 510094 - DNA, 19 bp, Mus musculus
  siRNA target sequence for Nalp6 (NM_133946.1,494-512).
gcatcctggatcatcataa

SEQ ID NO: 510095 - DNA, 19 bp, Mus musculus
  siRNA target sequence for Nalp6 (NM_133946.1,557-575).
gttcccaagttcagacaat

SEQ ID NO: 510096 - DNA, 19 bp, Mus musculus
  siRNA target sequence for Nalp6 (NM_133946.1,560-578).
cccaagttcagacaatatt

SEQ ID NO: 510097 - DNA, 19 bp, Mus musculus
  siRNA target sequence for Nalp6 (NM_133946.1,594-612).
gataccaggagtgctaaaa

SEQ ID NO: 510098 - DNA, 19 bp, Mus musculus
  siRNA target sequence for Nalp6 (NM_133946.1,599-617).
caggagtgctaaaaactga

SEQ ID NO: 510099 - DNA, 19 bp, Mus musculus
  siRNA target sequence for Nalp6 (NM_133946.1,618-636).
ggtcacctaccagttcatt

SEQ ID NO: 510100 - DNA, 19 bp, Mus musculus
  siRNA target sequence for Nalp6 (NM_133946.1,660-678).
ggctgcattgtcataccta

SEQ ID NO: 510101 - DNA, 19 bp, Mus musculus
  siRNA target sequence for Nalp6 (NM_133946.1,665-683).
cattgtcatacctactaga

SEQ ID NO: 510102 - DNA, 19 bp, Mus musculus
  siRNA target sequence for Nalp6 (NM_133946.1,780-798).
cctctttggcctgctaaat

SEQ ID NO: 510103 - DNA, 19 bp, Mus musculus
  siRNA target sequence for Nalp6 (NM_133946.1,781-799).
ctctttggcctgctaaata

SEQ ID NO: 510104 - DNA, 19 bp, Mus musculus
  siRNA target sequence for Nalp6 (NM_133946.1,783-801).
ctttggcctgctaaataca

SEQ ID NO: 510105 - DNA, 19 bp, Mus musculus
  siRNA target sequence for Nalp6 (NM_133946.1,805-823).
gggcttcgtgacattggaa

SEQ ID NO: 510106 - DNA, 19 bp, Mus musculus
  siRNA target sequence for Nalp6 (NM_133946.1,806-824).
ggcttcgtgacattggaaa

SEQ ID NO: 510107 - DNA, 19 bp, Mus musculus
  siRNA target sequence for Nalp6 (NM_133946.1,811-829).
cgtgacattggaaaccatt

SEQ ID NO: 510108 - DNA, 19 bp, Mus musculus
  siRNA target sequence for Nalp6 (NM_133946.1,836-854).
gtgtggtgccagatcatgt

SEQ ID NO: 510109 - DNA, 19 bp, Mus musculus
  siRNA target sequence for Nalp6 (NM_133946.1,975-993).
ggaggacctcaattttgga

SEQ ID NO: 510110 - DNA, 19 bp, Mus musculus
  siRNA target sequence for Nalp6 (NM_133946.1,1055-1073).
gcagccttccagagatagt

SEQ ID NO: 510111 - DNA, 19 bp, Mus musculus
  siRNA target sequence for Nalp6 (NM_133946.1,1056-1074).
cagccttccagagatagta

SEQ ID NO: 510112 - DNA, 19 bp, Mus musculus
  siRNA target sequence for Nalp6 (NM_133946.1,1058-1076).
gccttccagagatagtact

SEQ ID NO: 510113 - DNA, 19 bp, Mus musculus
  siRNA target sequence for Nalp6 (NM_133946.1,1094-1112).
cccgcatggaccttgaagt

SEQ ID NO: 510114 - DNA, 19 bp, Mus musculus
  siRNA target sequence for Nalp6 (NM_133946.1,1095-1113).
ccgcatggaccttgaagtt

SEQ ID NO: 510115 - DNA, 19 bp, Mus musculus
  siRNA target sequence for Nalp6 (NM_133946.1,1279-1297).
ctctgtgagacaatgacta

SEQ ID NO: 510116 - DNA, 19 bp, Mus musculus
  siRNA target sequence for Nalp6 (NM_133946.1,1293-1311).
gactaccccgaaatgtcat

SEQ ID NO: 510117 - DNA, 19 bp, Mus musculus
  siRNA target sequence for Nalp6 (NM_133946.1,1307-1325).
gtcatctgagtgttctgat

SEQ ID NO: 510118 - DNA, 19 bp, Mus musculus
  siRNA target sequence for Nalp6 (NM_133946.1,1312-1330).
ctgagtgttctgatcttgt

SEQ ID NO: 510119 - DNA, 19 bp, Mus musculus
  siRNA target sequence for Nalp6 (NM_133946.1,1516-1534).
caagaggtgatcaattact

SEQ ID NO: 510120 - DNA, 19 bp, Mus musculus
  siRNA target sequence for Nalp6 (NM_133946.1,1627-1645).
gccctgaagcaccctaaat

SEQ ID NO: 510121 - DNA, 19 bp, Mus musculus
  siRNA target sequence for Nalp6 (NM_133946.1,1630-1648).
ctgaagcaccctaaatgct

SEQ ID NO: 510122 - DNA, 19 bp, Mus musculus
  siRNA target sequence for Nalp6 (NM_133946.1,1692-1710).
ctcactgagggatcttcaa

SEQ ID NO: 510123 - DNA, 19 bp, Mus musculus
  siRNA target sequence for Nalp6 (NM_133946.1,1737-1755).
gtccatcatatattcaaaa

SEQ ID NO: 510124 - DNA, 19 bp, Mus musculus
  siRNA target sequence for Ncoa5 (NM_144892.1,160-178).
cgaagggatccctatagct

SEQ ID NO: 510125 - DNA, 19 bp, Mus musculus
  siRNA target sequence for Ncoa5 (NM_144892.1,161-179).
gaagggatccctatagctt

SEQ ID NO: 510126 - DNA, 19 bp, Mus musculus
  siRNA target sequence for Ncoa5 (NM_144892.1,181-199).
ggagatagtcgcgatacaa

SEQ ID NO: 510127 - DNA, 19 bp, Mus musculus
  siRNA target sequence for Ncoa5 (NM_144892.1,201-219).
gcgtgatcgctctccaatt

SEQ ID NO: 510128 - DNA, 19 bp, Mus musculus
  siRNA target sequence for Ncoa5 (NM_144892.1,500-518).
gctcatatgaccgttatct

SEQ ID NO: 510129 - DNA, 19 bp, Mus musculus
  siRNA target sequence for Ncoa5 (NM_144892.1,564-582).
ccggtacagagatagcttt

SEQ ID NO: 510130 - DNA, 19 bp, Mus musculus
  siRNA target sequence for Ncoa5 (NM_144892.1,620-638).
gagcaaaagagcgtttgaa

SEQ ID NO: 510131 - DNA, 19 bp, Mus musculus
  siRNA target sequence for Ncoa5 (NM_144892.1,650-668).
gacgtagagaggagcttta

SEQ ID NO: 510132 - DNA, 19 bp, Mus musculus
  siRNA target sequence for Ncoa5 (NM_144892.1,663-681).
gctttatcgtcggtatttt

SEQ ID NO: 510133 - DNA, 19 bp, Mus musculus
  siRNA target sequence for Ncoa5 (NM_144892.1,687-705).
gatccagcgacgctttgat

SEQ ID NO: 510134 - DNA, 19 bp, Mus musculus
  siRNA target sequence for Ncoa5 (NM_144892.1,728-746).
cagttattgtggtcaacaa

SEQ ID NO: 510135 - DNA, 19 bp, Mus musculus
  siRNA target sequence for Ncoa5 (NM_144892.1,923-941).
gcacagtcaacatcatgtt

SEQ ID NO: 510136 - DNA, 19 bp, Mus musculus
  siRNA target sequence for Ncoa5 (NM_144892.1,1196-1214).
ccgaggagacggacaagat

SEQ ID NO: 510137 - DNA, 19 bp, Mus musculus
  siRNA target sequence for Ncoa5 (NM_144892.1,1205-1223).
cggacaagatcatcaacta

SEQ ID NO: 510138 - DNA, 19 bp, Mus musculus
  siRNA target sequence for Ncoa5 (NM_144892.1,1323-1341).
gaagtcacaaccaagttca

SEQ ID NO: 510139 - DNA, 19 bp, Mus musculus
  siRNA target sequence for Ncoa5 (NM_144892.1,1326-1344).
gtcacaaccaagttcacaa

SEQ ID NO: 510140 - DNA, 19 bp, Mus musculus
  siRNA target sequence for Ndufa10 (NM_024197.1,87-105).
ccagcgcgtgggacgaatt

SEQ ID NO: 510141 - DNA, 19 bp, Mus musculus
  siRNA target sequence for Ndufa10 (NM_024197.1,184-202).
gagtacagccgagtgataa

SEQ ID NO: 510142 - DNA, 19 bp, Mus musculus
  siRNA target sequence for Ndufa10 (NM_024197.1,186-204).
gtacagccgagtgataaca

SEQ ID NO: 510143 - DNA, 19 bp, Mus musculus
  siRNA target sequence for Ndufa10 (NM_024197.1,192-210).
ccgagtgataacagtagat

SEQ ID NO: 510144 - DNA, 19 bp, Mus musculus
  siRNA target sequence for Ndufa10 (NM_024197.1,286-304).
gcagggatacagtactcaa

SEQ ID NO: 510145 - DNA, 19 bp, Mus musculus
  siRNA target sequence for Ndufa10 (NM_024197.1,323-341).
gaaggcccctcgacataga

SEQ ID NO: 510146 - DNA, 19 bp, Mus musculus
  siRNA target sequence for Ndufa10 (NM_024197.1,327-345).
gcccctcgacatagagttt

SEQ ID NO: 510147 - DNA, 19 bp, Mus musculus
  siRNA target sequence for Ndufa10 (NM_024197.1,328-346).
cccctcgacatagagttta

SEQ ID NO: 510148 - DNA, 19 bp, Mus musculus
  siRNA target sequence for Ndufa10 (NM_024197.1,330-348).
cctcgacatagagtttagt

SEQ ID NO: 510149 - DNA, 19 bp, Mus musculus
  siRNA target sequence for Ndufa10 (NM_024197.1,351-369).
cagctgtagtttagagaaa

SEQ ID NO: 510150 - DNA, 19 bp, Mus musculus
  siRNA target sequence for Ndufa10 (NM_024197.1,432-450).
cagccgccttcttcagtat

SEQ ID NO: 510151 - DNA, 19 bp, Mus musculus
  siRNA target sequence for Ndufa10 (NM_024197.1,569-587).
gtgtggaccactataatga

SEQ ID NO: 510152 - DNA, 19 bp, Mus musculus
  siRNA target sequence for Ndufa10 (NM_024197.1,571-589).
gtggaccactataatgaaa

SEQ ID NO: 510153 - DNA, 19 bp, Mus musculus
  siRNA target sequence for Ndufa10 (NM_024197.1,573-591).
ggaccactataatgaaatt

SEQ ID NO: 510154 - DNA, 19 bp, Mus musculus
  siRNA target sequence for Ndufa10 (NM_024197.1,574-592).
gaccactataatgaaatta

SEQ ID NO: 510155 - DNA, 19 bp, Mus musculus
  siRNA target sequence for Ndufa10 (NM_024197.1,620-638).
caccacacgcagtcatcta

SEQ ID NO: 510156 - DNA, 19 bp, Mus musculus
  siRNA target sequence for Ndufa10 (NM_024197.1,622-640).
ccacacgcagtcatctata

SEQ ID NO: 510157 - DNA, 19 bp, Mus musculus
  siRNA target sequence for Ndufa10 (NM_024197.1,623-641).
cacacgcagtcatctatat

SEQ ID NO: 510158 - DNA, 19 bp, Mus musculus
  siRNA target sequence for Ndufa10 (NM_024197.1,627-645).
cgcagtcatctatatcgat

SEQ ID NO: 510159 - DNA, 19 bp, Mus musculus
  siRNA target sequence for Ndufa10 (NM_024197.1,732-750).
cgagaatgcgtacaagaaa

SEQ ID NO: 510160 - DNA, 19 bp, Mus musculus
  siRNA target sequence for Ndufa10 (NM_024197.1,781-799).
gaggtgttggtgtacgatt

SEQ ID NO: 510161 - DNA, 19 bp, Mus musculus
  siRNA target sequence for Ndufa10 (NM_024197.1,832-850).
gaggacattgaatacctta

SEQ ID NO: 510162 - DNA, 19 bp, Mus musculus
  siRNA target sequence for Ndufa10 (NM_024197.1,880-898).
gacgactggacctttcact

SEQ ID NO: 510163 - DNA, 19 bp, Mus musculus
  siRNA target sequence for Ndufa10 (NM_024197.1,905-923).
ggatgctggttcaggataa

SEQ ID NO: 510164 - DNA, 19 bp, Mus musculus
  siRNA target sequence for Ndufa10 (NM_024197.1,953-971).
cggtctacctcccagaaat

SEQ ID NO: 510165 - DNA, 19 bp, Mus musculus
  siRNA target sequence for Ndufa10 (NM_024197.1,991-1009).
ggtagccggatctacaaca

SEQ ID NO: 510166 - DNA, 19 bp, Mus musculus
  siRNA target sequence for Ndufa10 (NM_024197.1,1035-1053).
gtatgcccctgggtacaat

SEQ ID NO: 510167 - DNA, 19 bp, Mus musculus
  siRNA target sequence for Nek2 (NM_010892.1,189-207).
gtggaaagagcttgactat

SEQ ID NO: 510168 - DNA, 19 bp, Mus musculus
  siRNA target sequence for Nek2 (NM_010892.1,263-281).
gggagctgaaacatccaaa

SEQ ID NO: 510169 - DNA, 19 bp, Mus musculus
  siRNA target sequence for Nek2 (NM_010892.1,290-308).
gttactatgatcgcattat

SEQ ID NO: 510170 - DNA, 19 bp, Mus musculus
  siRNA target sequence for Nek2 (NM_010892.1,323-341).
caaccctgtacatcgtaat

SEQ ID NO: 510171 - DNA, 19 bp, Mus musculus
  siRNA target sequence for Nek2 (NM_010892.1,326-344).
ccctgtacatcgtaatgga

SEQ ID NO: 510172 - DNA, 19 bp, Mus musculus
  siRNA target sequence for Nek2 (NM_010892.1,327-345).
cctgtacatcgtaatggaa

SEQ ID NO: 510173 - DNA, 19 bp, Mus musculus
  siRNA target sequence for Nek2 (NM_010892.1,361-379).
gacctggctagtgtcattt

SEQ ID NO: 510174 - DNA, 19 bp, Mus musculus
  siRNA target sequence for Nek2 (NM_010892.1,363-381).
cctggctagtgtcatttca

SEQ ID NO: 510175 - DNA, 19 bp, Mus musculus
  siRNA target sequence for Nek2 (NM_010892.1,389-407).
ccaaggatagacagtactt

SEQ ID NO: 510176 - DNA, 19 bp, Mus musculus
  siRNA target sequence for Nek2 (NM_010892.1,586-604).
cacgacacgagttttgcaa

SEQ ID NO: 510177 - DNA, 19 bp, Mus musculus
  siRNA target sequence for Nek2 (NM_010892.1,588-606).
cgacacgagttttgcaaaa

SEQ ID NO: 510178 - DNA, 19 bp, Mus musculus
  siRNA target sequence for Nek2 (NM_010892.1,589-607).
gacacgagttttgcaaaaa

SEQ ID NO: 510179 - DNA, 19 bp, Mus musculus
  siRNA target sequence for Nek2 (NM_010892.1,593-611).
cgagttttgcaaaaacgtt

SEQ ID NO: 510180 - DNA, 19 bp, Mus musculus
  siRNA target sequence for Nek2 (NM_010892.1,1068-1086).
gcagaaggaacgtgaactt

SEQ ID NO: 510181 - DNA, 19 bp, Mus musculus
  siRNA target sequence for Nek2 (NM_010892.1,1263-1281).
cgcaaggagtgagaattct

SEQ ID NO: 510182 - DNA, 19 bp, Mus musculus
  siRNA target sequence for Nek3 (NM_011848.1,93-111).
cacagtcctgagagtgatt

SEQ ID NO: 510183 - DNA, 19 bp, Mus musculus
  siRNA target sequence for Nek3 (NM_011848.1,122-140).
ccttcggcagggctctttt

SEQ ID NO: 510184 - DNA, 19 bp, Mus musculus
  siRNA target sequence for Nek3 (NM_011848.1,126-144).
cggcagggctcttttggtt

SEQ ID NO: 510185 - DNA, 19 bp, Mus musculus
  siRNA target sequence for Nek3 (NM_011848.1,227-245).
ctgttctgctcgccaaaat

SEQ ID NO: 510186 - DNA, 19 bp, Mus musculus
  siRNA target sequence for Nek3 (NM_011848.1,229-247).
gttctgctcgccaaaatga

SEQ ID NO: 510187 - DNA, 19 bp, Mus musculus
  siRNA target sequence for Nek3 (NM_011848.1,254-272).
ccaatattgttgcctttaa

SEQ ID NO: 510188 - DNA, 19 bp, Mus musculus
  siRNA target sequence for Nek3 (NM_011848.1,372-390).
ccctgaagacacgatactt

SEQ ID NO: 510189 - DNA, 19 bp, Mus musculus
  siRNA target sequence for Nek3 (NM_011848.1,376-394).
gaagacacgatacttaatt

SEQ ID NO: 510190 - DNA, 19 bp, Mus musculus
  siRNA target sequence for Nek3 (NM_011848.1,379-397).
gacacgatacttaattggt

SEQ ID NO: 510191 - DNA, 19 bp, Mus musculus
  siRNA target sequence for Nek3 (NM_011848.1,383-401).
cgatacttaattggtttat

SEQ ID NO: 510192 - DNA, 19 bp, Mus musculus
  siRNA target sequence for Nek3 (NM_011848.1,388-406).
cttaattggtttatacaaa

SEQ ID NO: 510193 - DNA, 19 bp, Mus musculus
  siRNA target sequence for Nek3 (NM_011848.1,415-433).
ggagtaaatcacattcata

SEQ ID NO: 510194 - DNA, 19 bp, Mus musculus
  siRNA target sequence for Nek3 (NM_011848.1,440-458).
gtgttttacacagagatat

SEQ ID NO: 510195 - DNA, 19 bp, Mus musculus
  siRNA target sequence for Nek3 (NM_011848.1,483-501).
ccacaatggaaaagtgaaa

SEQ ID NO: 510196 - DNA, 19 bp, Mus musculus
  siRNA target sequence for Nek3 (NM_011848.1,558-576).
gtacgtgggaacaccttat

SEQ ID NO: 510197 - DNA, 19 bp, Mus musculus
  siRNA target sequence for Nek3 (NM_011848.1,561-579).
cgtgggaacaccttattat

SEQ ID NO: 510198 - DNA, 19 bp, Mus musculus
  siRNA target sequence for Nek3 (NM_011848.1,596-614).
gggagaacctgccttacaa

SEQ ID NO: 510199 - DNA, 19 bp, Mus musculus
  siRNA target sequence for Nek3 (NM_011848.1,600-618).
gaacctgccttacaacaat

SEQ ID NO: 510200 - DNA, 19 bp, Mus musculus
  siRNA target sequence for Nek3 (NM_011848.1,641-659).
gatgcattctgtatgaact

SEQ ID NO: 510201 - DNA, 19 bp, Mus musculus
  siRNA target sequence for Nek3 (NM_011848.1,662-680).
gcgctctgaagcatccatt

SEQ ID NO: 510202 - DNA, 19 bp, Mus musculus
  siRNA target sequence for Nek3 (NM_011848.1,896-914).
gagaacagatattagatga

SEQ ID NO: 510203 - DNA, 19 bp, Mus musculus
  siRNA target sequence for Nek3 (NM_011848.1,910-928).
gatgaaatcaaaatatcca

SEQ ID NO: 510204 - DNA, 19 bp, Mus musculus
  siRNA target sequence for Nek3 (NM_011848.1,926-944).
ccacgcctaagaatatgaa

SEQ ID NO: 510205 - DNA, 19 bp, Mus musculus
  siRNA target sequence for Nek3 (NM_011848.1,927-945).
cacgcctaagaatatgaaa

SEQ ID NO: 510206 - DNA, 19 bp, Mus musculus
  siRNA target sequence for Nek3 (NM_011848.1,1022-1040).
gaaagtgtagccatactga

SEQ ID NO: 510207 - DNA, 19 bp, Mus musculus
  siRNA target sequence for Nek3 (NM_011848.1,1061-1079).
ccccagctgggaatgcatt

SEQ ID NO: 510208 - DNA, 19 bp, Mus musculus
  siRNA target sequence for Nek3 (NM_011848.1,1249-1267).
ggtgggtctgtgataaagt

SEQ ID NO: 510209 - DNA, 19 bp, Mus musculus
  siRNA target sequence for Nek3 (NM_011848.1,1346-1364).
gtcaggcatttcagacata

SEQ ID NO: 510210 - DNA, 19 bp, Mus musculus
  siRNA target sequence for Nek3 (NM_011848.1,1398-1416).
gaaaggtcccctttctgaa

SEQ ID NO: 510211 - DNA, 19 bp, Mus musculus
  siRNA target sequence for Nek3 (NM_011848.1,1534-1552).
gattgggtgtcagaactaa

SEQ ID NO: 510212 - DNA, 19 bp, Mus musculus
  siRNA target sequence for Nek6 (NM_021606.2,398-416).
ctgtgtcaaggaaattggt

SEQ ID NO: 510213 - DNA, 19 bp, Mus musculus
  siRNA target sequence for Nek6 (NM_021606.2,435-453).
catccgaatatcatcaagt

SEQ ID NO: 510214 - DNA, 19 bp, Mus musculus
  siRNA target sequence for Nek6 (NM_021606.2,439-457).
cgaatatcatcaagtatct

SEQ ID NO: 510215 - DNA, 19 bp, Mus musculus
  siRNA target sequence for Nek6 (NM_021606.2,516-534).
gacctctcacagatgatca

SEQ ID NO: 510216 - DNA, 19 bp, Mus musculus
  siRNA target sequence for Nek6 (NM_021606.2,673-691).
cagctacgggcattgtgaa

SEQ ID NO: 510217 - DNA, 19 bp, Mus musculus
  siRNA target sequence for Nek6 (NM_021606.2,778-796).
ccgagagaatccatgagaa

SEQ ID NO: 510218 - DNA, 19 bp, Mus musculus
  siRNA target sequence for Nek6 (NM_021606.2,865-883).
gccccttctatggagataa

SEQ ID NO: 510219 - DNA, 19 bp, Mus musculus
  siRNA target sequence for Nek6 (NM_021606.2,868-886).
ccttctatggagataagat

SEQ ID NO: 510220 - DNA, 19 bp, Mus musculus
  siRNA target sequence for Nek6 (NM_021606.2,876-894).
ggagataagatgaatctct

SEQ ID NO: 510221 - DNA, 19 bp, Mus musculus
  siRNA target sequence for Nek6 (NM_021606.2,966-984).
cgggaactggtcagtatgt

SEQ ID NO: 510222 - DNA, 19 bp, Mus musculus
  siRNA target sequence for Nek6 (NM_021606.2,1004-1022).
ccaccgacctgacattgta

SEQ ID NO: 510223 - DNA, 19 bp, Mus musculus
  siRNA target sequence for Nek6 (NM_021606.2,1005-1023).
caccgacctgacattgtat

SEQ ID NO: 510224 - DNA, 19 bp, Mus musculus
  siRNA target sequence for Nek6 (NM_021606.2,1007-1025).
ccgacctgacattgtatat

SEQ ID NO: 510225 - DNA, 19 bp, Mus musculus
  siRNA target sequence for Nek6 (NM_021606.2,1009-1027).
gacctgacattgtatatgt

SEQ ID NO: 510226 - DNA, 19 bp, Mus musculus
  siRNA target sequence for Nek7 (NM_021605.2,238-256).
ggccagatatgggctataa

SEQ ID NO: 510227 - DNA, 19 bp, Mus musculus
  siRNA target sequence for Nek7 (NM_021605.2,239-257).
gccagatatgggctataat

SEQ ID NO: 510228 - DNA, 19 bp, Mus musculus
  siRNA target sequence for Nek7 (NM_021605.2,240-258).
ccagatatgggctataata

SEQ ID NO: 510229 - DNA, 19 bp, Mus musculus
  siRNA target sequence for Nek7 (NM_021605.2,243-261).
gatatgggctataatactt

SEQ ID NO: 510230 - DNA, 19 bp, Mus musculus
  siRNA target sequence for Nek7 (NM_021605.2,264-282).
gccaacttccgaatagaaa

SEQ ID NO: 510231 - DNA, 19 bp, Mus musculus
  siRNA target sequence for Nek7 (NM_021605.2,292-310).
gtcgtggacaatttagtga

SEQ ID NO: 510232 - DNA, 19 bp, Mus musculus
  siRNA target sequence for Nek7 (NM_021605.2,340-358).
gagtgccggtagcgttaaa

SEQ ID NO: 510233 - DNA, 19 bp, Mus musculus
  siRNA target sequence for Nek7 (NM_021605.2,342-360).
gtgccggtagcgttaaaaa

SEQ ID NO: 510234 - DNA, 19 bp, Mus musculus
  siRNA target sequence for Nek7 (NM_021605.2,344-362).
gccggtagcgttaaaaaaa

SEQ ID NO: 510235 - DNA, 19 bp, Mus musculus
  siRNA target sequence for Nek7 (NM_021605.2,346-364).
cggtagcgttaaaaaaagt

SEQ ID NO: 510236 - DNA, 19 bp, Mus musculus
  siRNA target sequence for Nek7 (NM_021605.2,393-411).
gcacgtgctgattgtatca

SEQ ID NO: 510237 - DNA, 19 bp, Mus musculus
  siRNA target sequence for Nek7 (NM_021605.2,394-412).
cacgtgctgattgtatcaa

SEQ ID NO: 510238 - DNA, 19 bp, Mus musculus
  siRNA target sequence for Nek7 (NM_021605.2,397-415).
gtgctgattgtatcaaaga

SEQ ID NO: 510239 - DNA, 19 bp, Mus musculus
  siRNA target sequence for Nek7 (NM_021605.2,399-417).
gctgattgtatcaaagaaa

SEQ ID NO: 510240 - DNA, 19 bp, Mus musculus
  siRNA target sequence for Nek7 (NM_021605.2,441-459).
catccaaatgtaattaaat

SEQ ID NO: 510241 - DNA, 19 bp, Mus musculus
  siRNA target sequence for Nek7 (NM_021605.2,450-468).
gtaattaaatactatgcat

SEQ ID NO: 510242 - DNA, 19 bp, Mus musculus
  siRNA target sequence for Nek7 (NM_021605.2,466-484).
catcattcattgaggataa

SEQ ID NO: 510243 - DNA, 19 bp, Mus musculus
  siRNA target sequence for Nek7 (NM_021605.2,479-497).
ggataatgagctgaacata

SEQ ID NO: 510244 - DNA, 19 bp, Mus musculus
  siRNA target sequence for Nek7 (NM_021605.2,612-630).
gcactggaccacatgcatt

SEQ ID NO: 510245 - DNA, 19 bp, Mus musculus
  siRNA target sequence for Nek7 (NM_021605.2,682-700).
ccactggggtagtaaaact

SEQ ID NO: 510246 - DNA, 19 bp, Mus musculus
  siRNA target sequence for Nek7 (NM_021605.2,711-729).
gggcttggtcggtttttca

SEQ ID NO: 510247 - DNA, 19 bp, Mus musculus
  siRNA target sequence for Nek7 (NM_021605.2,739-757).
ccacagctgcacattcttt

SEQ ID NO: 510248 - DNA, 19 bp, Mus musculus
  siRNA target sequence for Nek7 (NM_021605.2,742-760).
cagctgcacattctttagt

SEQ ID NO: 510249 - DNA, 19 bp, Mus musculus
  siRNA target sequence for Nek7 (NM_021605.2,832-850).
ctcttggctgtctgctata

SEQ ID NO: 510250 - DNA, 19 bp, Mus musculus
  siRNA target sequence for Nek7 (NM_021605.2,874-892).
ctttctacggcgacaagat

SEQ ID NO: 510251 - DNA, 19 bp, Mus musculus
  siRNA target sequence for Nek7 (NM_021605.2,882-900).
ggcgacaagatgaacttgt

SEQ ID NO: 510252 - DNA, 19 bp, Mus musculus
  siRNA target sequence for Nek7 (NM_021605.2,883-901).
gcgacaagatgaacttgta

SEQ ID NO: 510253 - DNA, 19 bp, Mus musculus
  siRNA target sequence for Nek7 (NM_021605.2,887-905).
caagatgaacttgtattct

SEQ ID NO: 510254 - DNA, 19 bp, Mus musculus
  siRNA target sequence for Nek7 (NM_021605.2,940-958).
ctctcccgtcagatcacta

SEQ ID NO: 510255 - DNA, 19 bp, Mus musculus
  siRNA target sequence for Nek7 (NM_021605.2,966-984).
gagctacgacagctagtta

SEQ ID NO: 510256 - DNA, 19 bp, Mus musculus
  siRNA target sequence for Nek7 (NM_021605.2,968-986).
gctacgacagctagttaat

SEQ ID NO: 510257 - DNA, 19 bp, Mus musculus
  siRNA target sequence for Nek7 (NM_021605.2,969-987).
ctacgacagctagttaata

SEQ ID NO: 510258 - DNA, 19 bp, Mus musculus
  siRNA target sequence for Nek7 (NM_021605.2,1017-1035).
cccgacatcgcctatgttt

SEQ ID NO: 510259 - DNA, 19 bp, Mus musculus
  siRNA target sequence for Nek7 (NM_021605.2,1018-1036).
ccgacatcgcctatgttta

SEQ ID NO: 510260 - DNA, 19 bp, Mus musculus
  siRNA target sequence for Nek7 (NM_021605.2,1022-1040).
catcgcctatgtttatgat

SEQ ID NO: 510261 - DNA, 19 bp, Mus musculus
  siRNA target sequence for Nek8 (NM_080849.2,242-260).
ccaacgtcatcgagtacta

SEQ ID NO: 510262 - DNA, 19 bp, Mus musculus
  siRNA target sequence for Nek8 (NM_080849.2,243-261).
caacgtcatcgagtactat

SEQ ID NO: 510263 - DNA, 19 bp, Mus musculus
  siRNA target sequence for Nek8 (NM_080849.2,247-265).
gtcatcgagtactatgaga

SEQ ID NO: 510264 - DNA, 19 bp, Mus musculus
  siRNA target sequence for Nek8 (NM_080849.2,255-273).
gtactatgagaatttccta

SEQ ID NO: 510265 - DNA, 19 bp, Mus musculus
  siRNA target sequence for Nek8 (NM_080849.2,371-389).
cgatccttcacttctttgt

SEQ ID NO: 510266 - DNA, 19 bp, Mus musculus
  siRNA target sequence for Nek8 (NM_080849.2,456-474).
gaacatccttcttgacaaa

SEQ ID NO: 510267 - DNA, 19 bp, Mus musculus
  siRNA target sequence for Nek8 (NM_080849.2,553-571).
ggtacaccctgctacatct

SEQ ID NO: 510268 - DNA, 19 bp, Mus musculus
  siRNA target sequence for Nek8 (NM_080849.2,665-683).
ccttcgaggctgcaaactt

SEQ ID NO: 510269 - DNA, 19 bp, Mus musculus
  siRNA target sequence for Nek8 (NM_080849.2,1298-1316).
cagaccgaggcattatcat

SEQ ID NO: 510270 - DNA, 19 bp, Mus musculus
  siRNA target sequence for Nek8 (NM_080849.2,1300-1318).
gaccgaggcattatcatga

SEQ ID NO: 510271 - DNA, 19 bp, Mus musculus
  siRNA target sequence for Nek8 (NM_080849.2,1373-1391).
gccagcccaccattgtaga

SEQ ID NO: 510272 - DNA, 19 bp, Mus musculus
  siRNA target sequence for Nek8 (NM_080849.2,1374-1392).
ccagcccaccattgtagaa

SEQ ID NO: 510273 - DNA, 19 bp, Mus musculus
  siRNA target sequence for Nek8 (NM_080849.2,1576-1594).
gttgtctgtggtattgact

SEQ ID NO: 510274 - DNA, 19 bp, Mus musculus
  siRNA target sequence for Nek8 (NM_080849.2,1636-1654).
ggaagtaacaggttcaaca

SEQ ID NO: 510275 - DNA, 19 bp, Mus musculus
  siRNA target sequence for Nek8 (NM_080849.2,1969-1987).
gagggggaagtgtattctt

SEQ ID NO: 510276 - DNA, 19 bp, Mus musculus
  siRNA target sequence for Nek9 (NM_145138.1,144-162).
cactgcgattccatcaact

SEQ ID NO: 510277 - DNA, 19 bp, Mus musculus
  siRNA target sequence for Nek9 (NM_145138.1,513-531).
ggagggaacctctatgaca

SEQ ID NO: 510278 - DNA, 19 bp, Mus musculus
  siRNA target sequence for Nek9 (NM_145138.1,514-532).
gagggaacctctatgacaa

SEQ ID NO: 510279 - DNA, 19 bp, Mus musculus
  siRNA target sequence for Nek9 (NM_145138.1,625-643).
ctggaatcctccatagaga

SEQ ID NO: 510280 - DNA, 19 bp, Mus musculus
  siRNA target sequence for Nek9 (NM_145138.1,627-645).
ggaatcctccatagagata

SEQ ID NO: 510281 - DNA, 19 bp, Mus musculus
  siRNA target sequence for Nek9 (NM_145138.1,635-653).
ccatagagatataaagaca

SEQ ID NO: 510282 - DNA, 19 bp, Mus musculus
  siRNA target sequence for Nek9 (NM_145138.1,683-701).
gataaagcttggagactat

SEQ ID NO: 510283 - DNA, 19 bp, Mus musculus
  siRNA target sequence for Nek9 (NM_145138.1,702-720).
ggcctagcaaagaaactta

SEQ ID NO: 510284 - DNA, 19 bp, Mus musculus
  siRNA target sequence for Nek9 (NM_145138.1,704-722).
cctagcaaagaaacttaat

SEQ ID NO: 510285 - DNA, 19 bp, Mus musculus
  siRNA target sequence for Nek9 (NM_145138.1,750-768).
gtgggcactccatattaca

SEQ ID NO: 510286 - DNA, 19 bp, Mus musculus
  siRNA target sequence for Nek9 (NM_145138.1,786-804).
caaggagtaaaatacaatt

SEQ ID NO: 510287 - DNA, 19 bp, Mus musculus
  siRNA target sequence for Nek9 (NM_145138.1,792-810).
gtaaaatacaatttcaagt

SEQ ID NO: 510288 - DNA, 19 bp, Mus musculus
  siRNA target sequence for Nek9 (NM_145138.1,800-818).
caatttcaagtctgatata

SEQ ID NO: 510289 - DNA, 19 bp, Mus musculus
  siRNA target sequence for Nek9 (NM_145138.1,843-861).
gaactgcttactctgaaaa

SEQ ID NO: 510290 - DNA, 19 bp, Mus musculus
  siRNA target sequence for Nek9 (NM_145138.1,930-948).
gttgactcgagtcagtatt

SEQ ID NO: 510291 - DNA, 19 bp, Mus musculus
  siRNA target sequence for Nek9 (NM_145138.1,933-951).
gactcgagtcagtattctt

SEQ ID NO: 510292 - DNA, 19 bp, Mus musculus
  siRNA target sequence for Nek9 (NM_145138.1,938-956).
gagtcagtattctttggaa

SEQ ID NO: 510293 - DNA, 19 bp, Mus musculus
  siRNA target sequence for Nek9 (NM_145138.1,1080-1098).
ctcaatgcacctacaaaga

SEQ ID NO: 510294 - DNA, 19 bp, Mus musculus
  siRNA target sequence for Nek9 (NM_145138.1,1147-1165).
cacgaaccagtgaagtcta

SEQ ID NO: 510295 - DNA, 19 bp, Mus musculus
  siRNA target sequence for Nek9 (NM_145138.1,1150-1168).
gaaccagtgaagtctatgt

SEQ ID NO: 510296 - DNA, 19 bp, Mus musculus
  siRNA target sequence for Nek9 (NM_145138.1,1271-1289).
cgtggagaaggaactatat

SEQ ID NO: 510297 - DNA, 19 bp, Mus musculus
  siRNA target sequence for Nek9 (NM_145138.1,1301-1319).
catgcaagggggcactaaa

SEQ ID NO: 510298 - DNA, 19 bp, Mus musculus
  siRNA target sequence for Nek9 (NM_145138.1,1304-1322).
gcaagggggcactaaactt

SEQ ID NO: 510299 - DNA, 19 bp, Mus musculus
  siRNA target sequence for Nek9 (NM_145138.1,1331-1349).
gctaggacatggagacaaa

SEQ ID NO: 510300 - DNA, 19 bp, Mus musculus
  siRNA target sequence for Nek9 (NM_145138.1,1355-1373).
ctaccgacagccaaagcat

SEQ ID NO: 510301 - DNA, 19 bp, Mus musculus
  siRNA target sequence for Nek9 (NM_145138.1,1360-1378).
gacagccaaagcatgtaga

SEQ ID NO: 510302 - DNA, 19 bp, Mus musculus
  siRNA target sequence for Nek9 (NM_145138.1,1407-1425).
gtgtcgtgtggggatgatt

SEQ ID NO: 510303 - DNA, 19 bp, Mus musculus
  siRNA target sequence for Nek9 (NM_145138.1,1452-1470).
cagctctacgcctttggat

SEQ ID NO: 510304 - DNA, 19 bp, Mus musculus
  siRNA target sequence for Nek9 (NM_145138.1,1457-1475).
ctacgcctttggatcagat

SEQ ID NO: 510305 - DNA, 19 bp, Mus musculus
  siRNA target sequence for Nek9 (NM_145138.1,1463-1481).
ctttggatcagattattat

SEQ ID NO: 510306 - DNA, 19 bp, Mus musculus
  siRNA target sequence for Nek9 (NM_145138.1,1528-1546).
ccatgcagctgaacttctt

SEQ ID NO: 510307 - DNA, 19 bp, Mus musculus
  siRNA target sequence for Nek9 (NM_145138.1,1603-1621).
cacgaaacaaagaagtcta

SEQ ID NO: 510308 - DNA, 19 bp, Mus musculus
  siRNA target sequence for Nek9 (NM_145138.1,1702-1720).
caaaggccttaatcattgt

SEQ ID NO: 510309 - DNA, 19 bp, Mus musculus
  siRNA target sequence for Nek9 (NM_145138.1,1715-1733).
cattgttgcagttcaatgt

SEQ ID NO: 510310 - DNA, 19 bp, Mus musculus
  siRNA target sequence for Nek9 (NM_145138.1,1775-1793).
gctggcctgtggactcaat

SEQ ID NO: 510311 - DNA, 19 bp, Mus musculus
  siRNA target sequence for Nek9 (NM_145138.1,1779-1797).
gcctgtggactcaatgagt

SEQ ID NO: 510312 - DNA, 19 bp, Mus musculus
  siRNA target sequence for Nek9 (NM_145138.1,1785-1803).
ggactcaatgagttcaaca

SEQ ID NO: 510313 - DNA, 19 bp, Mus musculus
  siRNA target sequence for Nek9 (NM_145138.1,1786-1804).
gactcaatgagttcaacaa

SEQ ID NO: 510314 - DNA, 19 bp, Mus musculus
  siRNA target sequence for Nek9 (NM_145138.1,1863-1881).
ccctacacaacctccttta

SEQ ID NO: 510315 - DNA, 19 bp, Mus musculus
  siRNA target sequence for Nek9 (NM_145138.1,2000-2018).
gctgggtgttgggaattat

SEQ ID NO: 510316 - DNA, 19 bp, Mus musculus
  siRNA target sequence for Nek9 (NM_145138.1,2058-2076).
ggcgggaagcaagtgatta

SEQ ID NO: 510317 - DNA, 19 bp, Mus musculus
  siRNA target sequence for Nek9 (NM_145138.1,2107-2125).
ctgccaccgacgataatca

SEQ ID NO: 510318 - DNA, 19 bp, Mus musculus
  siRNA target sequence for Nek9 (NM_145138.1,2109-2127).
gccaccgacgataatcaca

SEQ ID NO: 510319 - DNA, 19 bp, Mus musculus
  siRNA target sequence for Nek9 (NM_145138.1,2110-2128).
ccaccgacgataatcacat

SEQ ID NO: 510320 - DNA, 19 bp, Mus musculus
  siRNA target sequence for Nek9 (NM_145138.1,2113-2131).
ccgacgataatcacatctt

SEQ ID NO: 510321 - DNA, 19 bp, Mus musculus
  siRNA target sequence for Nek9 (NM_145138.1,2114-2132).
cgacgataatcacatcttt

SEQ ID NO: 510322 - DNA, 19 bp, Mus musculus
  siRNA target sequence for Nek9 (NM_145138.1,2275-2293).
ccattcttattgttgagaa

SEQ ID NO: 510323 - DNA, 19 bp, Mus musculus
  siRNA target sequence for Nek9 (NM_145138.1,2306-2324).
caagaccatccgttccaat

SEQ ID NO: 510324 - DNA, 19 bp, Mus musculus
  siRNA target sequence for Nek9 (NM_145138.1,2494-2512).
gtgggatggaaggcttaat

SEQ ID NO: 510325 - DNA, 19 bp, Mus musculus
  siRNA target sequence for Nek9 (NM_145138.1,2585-2603).
ggaaaacgcagagttcatt

SEQ ID NO: 510326 - DNA, 19 bp, Mus musculus
  siRNA target sequence for Nek9 (NM_145138.1,2627-2645).
cttaagtgcggcgttttca

SEQ ID NO: 510327 - DNA, 19 bp, Mus musculus
  siRNA target sequence for Nek9 (NM_145138.1,2657-2675).
ggacacgctgccctatgaa

SEQ ID NO: 510328 - DNA, 19 bp, Mus musculus
  siRNA target sequence for Nek9 (NM_145138.1,2690-2708).
caaggtcgcatctgaagtt

SEQ ID NO: 510329 - DNA, 19 bp, Mus musculus
  siRNA target sequence for Nek9 (NM_145138.1,2838-2856).
caggctctggtgttaaagt

SEQ ID NO: 510330 - DNA, 19 bp, Mus musculus
  siRNA target sequence for Nek9 (NM_145138.1,2910-2928).
ctacaaaagctcaacaaga

SEQ ID NO: 510331 - DNA, 19 bp, Mus musculus
  siRNA target sequence for Nek9 (NM_145138.1,2999-3017).
ggatccaaagcctgactta

SEQ ID NO: 510332 - DNA, 19 bp, Mus musculus
  siRNA target sequence for Nlk (NM_008702.2,1345-1363).
gcagccgcagccatgttaa

SEQ ID NO: 510333 - DNA, 19 bp, Mus musculus
  siRNA target sequence for Nlk (NM_008702.2,1346-1364).
cagccgcagccatgttaaa

SEQ ID NO: 510334 - DNA, 19 bp, Mus musculus
  siRNA target sequence for Nlk (NM_008702.2,1369-1387).
gggcaacaacagccatatt

SEQ ID NO: 510335 - DNA, 19 bp, Mus musculus
  siRNA target sequence for Nlk (NM_008702.2,1454-1472).
ctgcagctgctacagttaa

SEQ ID NO: 510336 - DNA, 19 bp, Mus musculus
  siRNA target sequence for Nlk (NM_008702.2,1524-1542).
gccggatagaccaattgga

SEQ ID NO: 510337 - DNA, 19 bp, Mus musculus
  siRNA target sequence for Nlk (NM_008702.2,1526-1544).
cggatagaccaattggata

SEQ ID NO: 510338 - DNA, 19 bp, Mus musculus
  siRNA target sequence for Nlk (NM_008702.2,1527-1545).
ggatagaccaattggatat

SEQ ID NO: 510339 - DNA, 19 bp, Mus musculus
  siRNA target sequence for Nlk (NM_008702.2,1557-1575).
cgttgtctggtcagtaaca

SEQ ID NO: 510340 - DNA, 19 bp, Mus musculus
  siRNA target sequence for Nlk (NM_008702.2,1595-1613).
gagtagcactcaaaaagat

SEQ ID NO: 510341 - DNA, 19 bp, Mus musculus
  siRNA target sequence for Nlk (NM_008702.2,1649-1667).
gagtcttccgggaattgaa

SEQ ID NO: 510342 - DNA, 19 bp, Mus musculus
  siRNA target sequence for Nlk (NM_008702.2,1651-1669).
gtcttccgggaattgaaga

SEQ ID NO: 510343 - DNA, 19 bp, Mus musculus
  siRNA target sequence for Nlk (NM_008702.2,1657-1675).
cgggaattgaagatgttgt

SEQ ID NO: 510344 - DNA, 19 bp, Mus musculus
  siRNA target sequence for Nlk (NM_008702.2,1731-1749).
cattgactattttgaagaa

SEQ ID NO: 510345 - DNA, 19 bp, Mus musculus
  siRNA target sequence for Nlk (NM_008702.2,1770-1788).
gatgcagagtgatctacat

SEQ ID NO: 510346 - DNA, 19 bp, Mus musculus
  siRNA target sequence for Nlk (NM_008702.2,1773-1791).
gcagagtgatctacataaa

SEQ ID NO: 510347 - DNA, 19 bp, Mus musculus
  siRNA target sequence for Nlk (NM_008702.2,1811-1829).
cactcagctcggatcatgt

SEQ ID NO: 510348 - DNA, 19 bp, Mus musculus
  siRNA target sequence for Nlk (NM_008702.2,1815-1833).
cagctcggatcatgtcaaa

SEQ ID NO: 510349 - DNA, 19 bp, Mus musculus
  siRNA target sequence for Nlk (NM_008702.2,1817-1835).
gctcggatcatgtcaaagt

SEQ ID NO: 510350 - DNA, 19 bp, Mus musculus
  siRNA target sequence for Nlk (NM_008702.2,1818-1836).
ctcggatcatgtcaaagtt

SEQ ID NO: 510351 - DNA, 19 bp, Mus musculus
  siRNA target sequence for Nlk (NM_008702.2,1820-1838).
cggatcatgtcaaagtttt

SEQ ID NO: 510352 - DNA, 19 bp, Mus musculus
  siRNA target sequence for Nlk (NM_008702.2,1884-1902).
cattttgcatcgagacatt

SEQ ID NO: 510353 - DNA, 19 bp, Mus musculus
  siRNA target sequence for Nlk (NM_008702.2,1929-1947).
caattgtgttctaaagatt

SEQ ID NO: 510354 - DNA, 19 bp, Mus musculus
  siRNA target sequence for Nlk (NM_008702.2,1965-1983).
cagagtggaggaattggat

SEQ ID NO: 510355 - DNA, 19 bp, Mus musculus
  siRNA target sequence for Nlk (NM_008702.2,1981-1999).
gatgaatcccgtcatatga

SEQ ID NO: 510356 - DNA, 19 bp, Mus musculus
  siRNA target sequence for Nlk (NM_008702.2,1998-2016).
gactcaggaagtagttact

SEQ ID NO: 510357 - DNA, 19 bp, Mus musculus
  siRNA target sequence for Nlk (NM_008702.2,2053-2071).
cgtcattacagcaatgcta

SEQ ID NO: 510358 - DNA, 19 bp, Mus musculus
  siRNA target sequence for Nlk (NM_008702.2,2054-2072).
gtcattacagcaatgctat

SEQ ID NO: 510359 - DNA, 19 bp, Mus musculus
  siRNA target sequence for Nlk (NM_008702.2,2107-2125).
ctactgggccgaagaatat

SEQ ID NO: 510360 - DNA, 19 bp, Mus musculus
  siRNA target sequence for Nlk (NM_008702.2,2110-2128).
ctgggccgaagaatattgt

SEQ ID NO: 510361 - DNA, 19 bp, Mus musculus
  siRNA target sequence for Nlk (NM_008702.2,2112-2130).
gggccgaagaatattgttt

SEQ ID NO: 510362 - DNA, 19 bp, Mus musculus
  siRNA target sequence for Nlk (NM_008702.2,2114-2132).
gccgaagaatattgtttca

SEQ ID NO: 510363 - DNA, 19 bp, Mus musculus
  siRNA target sequence for Nlk (NM_008702.2,2332-2350).
gtctttgatccatcaaaaa

SEQ ID NO: 510364 - DNA, 19 bp, Mus musculus
  siRNA target sequence for Nlk (NM_008702.2,2522-2540).
gctctgtccgacaggttaa

SEQ ID NO: 510365 - DNA, 19 bp, Mus musculus
  siRNA target sequence for Nlk (NM_008702.2,2525-2543).
ctgtccgacaggttaaaga

SEQ ID NO: 510366 - DNA, 19 bp, Mus musculus
  siRNA target sequence for Nlk (NM_008702.2,2527-2545).
gtccgacaggttaaagaaa

SEQ ID NO: 510367 - DNA, 19 bp, Mus musculus
  siRNA target sequence for Nlk (NM_008702.2,2529-2547).
ccgacaggttaaagaaatt

SEQ ID NO: 510368 - DNA, 19 bp, Mus musculus
  siRNA target sequence for Nlk (NM_008702.2,2530-2548).
cgacaggttaaagaaatta

SEQ ID NO: 510369 - DNA, 19 bp, Mus musculus
  siRNA target sequence for Nlk (NM_008702.2,2606-2624).
cgcagtccgctgcctttaa

SEQ ID NO: 510370 - DNA, 19 bp, Mus musculus
  siRNA target sequence for Nlk (NM_008702.2,2608-2626).
cagtccgctgcctttaaga

SEQ ID NO: 510371 - DNA, 19 bp, Mus musculus
  siRNA target sequence for Nme1 (NM_008704.2,660-678).
ggcagcgattctgtaaaga

SEQ ID NO: 510372 - DNA, 19 bp, Mus musculus
  siRNA target sequence for Nme3 (NM_019730.1,39-57).
gtgctgaccatctttgcta

SEQ ID NO: 510373 - DNA, 19 bp, Mus musculus
  siRNA target sequence for Nme3 (NM_019730.1,215-233).
gctactgcgggagcattat

SEQ ID NO: 510374 - DNA, 19 bp, Mus musculus
  siRNA target sequence for Nme3 (NM_019730.1,243-261).
cgcgagaaacccttctaca

SEQ ID NO: 510375 - DNA, 19 bp, Mus musculus
  siRNA target sequence for Nme3 (NM_019730.1,257-275).
ctacagccgactggttaaa

SEQ ID NO: 510376 - DNA, 19 bp, Mus musculus
  siRNA target sequence for Nme3 (NM_019730.1,404-422).
catggaggttggcaagaat

SEQ ID NO: 510377 - DNA, 19 bp, Mus musculus
  siRNA target sequence for Nme3 (NM_019730.1,514-532).
ccggacattggctatatga

SEQ ID NO: 510378 - DNA, 19 bp, Mus musculus
  siRNA target sequence for Nme3 (NM_019730.1,516-534).
ggacattggctatatgagt

SEQ ID NO: 510379 - DNA, 19 bp, Mus musculus
  siRNA target sequence for Nme4 (NM_019731.1,184-202).
gtgatacaacgctttgaga

SEQ ID NO: 510380 - DNA, 19 bp, Mus musculus
  siRNA target sequence for Nme4 (NM_019731.1,290-308).
cattctacccagctcttat

SEQ ID NO: 510381 - DNA, 19 bp, Mus musculus
  siRNA target sequence for Nme5 (NM_080637.1,60-78).
gccagatgttgttgacaaa

SEQ ID NO: 510382 - DNA, 19 bp, Mus musculus
  siRNA target sequence for Nme5 (NM_080637.1,84-102).
ggagatacaggatattatt

SEQ ID NO: 510383 - DNA, 19 bp, Mus musculus
  siRNA target sequence for Nme5 (NM_080637.1,106-124).
ggatctggattcaccatta

SEQ ID NO: 510384 - DNA, 19 bp, Mus musculus
  siRNA target sequence for Nme5 (NM_080637.1,107-125).
gatctggattcaccattat

SEQ ID NO: 510385 - DNA, 19 bp, Mus musculus
  siRNA target sequence for Nme5 (NM_080637.1,112-130).
ggattcaccattattcaga

SEQ ID NO: 510386 - DNA, 19 bp, Mus musculus
  siRNA target sequence for Nme5 (NM_080637.1,149-167).
gccccgagcactgtagtaa

SEQ ID NO: 510387 - DNA, 19 bp, Mus musculus
  siRNA target sequence for Nme5 (NM_080637.1,151-169).
cccgagcactgtagtaact

SEQ ID NO: 510388 - DNA, 19 bp, Mus musculus
  siRNA target sequence for Nme5 (NM_080637.1,156-174).
gcactgtagtaacttttat

SEQ ID NO: 510389 - DNA, 19 bp, Mus musculus
  siRNA target sequence for Nme5 (NM_080637.1,230-248).
gacctcttgttgctatgat

SEQ ID NO: 510390 - DNA, 19 bp, Mus musculus
  siRNA target sequence for Nme5 (NM_080637.1,293-311).
gaccaagtaacagtttagt

SEQ ID NO: 510391 - DNA, 19 bp, Mus musculus
  siRNA target sequence for Nme5 (NM_080637.1,363-381).
gctcaggaacgcacttcat

SEQ ID NO: 510392 - DNA, 19 bp, Mus musculus
  siRNA target sequence for Nme5 (NM_080637.1,376-394).
cttcatgggagcaatgact

SEQ ID NO: 510393 - DNA, 19 bp, Mus musculus
  siRNA target sequence for Nme5 (NM_080637.1,409-427).
cgagagatcaggttcatgt

SEQ ID NO: 510394 - DNA, 19 bp, Mus musculus
  siRNA target sequence for Nme5 (NM_080637.1,426-444).
gtttccagccgtgattatt

SEQ ID NO: 510395 - DNA, 19 bp, Mus musculus
  siRNA target sequence for Nme5 (NM_080637.1,466-484).
gccgctaaggactacataa

SEQ ID NO: 510396 - DNA, 19 bp, Mus musculus
  siRNA target sequence for Nme5 (NM_080637.1,467-485).
ccgctaaggactacataaa

SEQ ID NO: 510397 - DNA, 19 bp, Mus musculus
  siRNA target sequence for Nme5 (NM_080637.1,470-488).
ctaaggactacataaactt

SEQ ID NO: 510398 - DNA, 19 bp, Mus musculus
  siRNA target sequence for Nme5 (NM_080637.1,515-533).
gactcacagagctttgtaa

SEQ ID NO: 510399 - DNA, 19 bp, Mus musculus
  siRNA target sequence for Nme5 (NM_080637.1,564-582).
cgctgattggctgatgaaa

SEQ ID NO: 510400 - DNA, 19 bp, Mus musculus
  siRNA target sequence for Nme6 (NM_018757.1,224-242).
cagattctgagcaacaagt

SEQ ID NO: 510401 - DNA, 19 bp, Mus musculus
  siRNA target sequence for Nme6 (NM_018757.1,281-299).
gaggactgccggaggtttt

SEQ ID NO: 510402 - DNA, 19 bp, Mus musculus
  siRNA target sequence for Nme6 (NM_018757.1,357-375).
ggccaatccgagcctatat

SEQ ID NO: 510403 - DNA, 19 bp, Mus musculus
  siRNA target sequence for Nme6 (NM_018757.1,360-378).
caatccgagcctatatcct

SEQ ID NO: 510404 - DNA, 19 bp, Mus musculus
  siRNA target sequence for Nme6 (NM_018757.1,418-436).
gggacccaccagagtattt

SEQ ID NO: 510405 - DNA, 19 bp, Mus musculus
  siRNA target sequence for Nme6 (NM_018757.1,445-463).
ctatatagccccagattca

SEQ ID NO: 510406 - DNA, 19 bp, Mus musculus
  siRNA target sequence for Nme6 (NM_018757.1,484-502).
cactgacacccgaaatact

SEQ ID NO: 510407 - DNA, 19 bp, Mus musculus
  siRNA target sequence for Nme6 (NM_018757.1,663-681).
gaggccacaaacaacctaa

SEQ ID NO: 510408 - DNA, 19 bp, Mus musculus
  siRNA target sequence for Nme7 (NM_138314.1,345-363).
cccagtagacggatctgtt

SEQ ID NO: 510409 - DNA, 19 bp, Mus musculus
  siRNA target sequence for Nme7 (NM_138314.1,1057-1075).
ggaatgtcagcgatacaga

SEQ ID NO: 510410 - DNA, 19 bp, Mus musculus
  siRNA target sequence for Nme7 (NM_138314.1,1058-1076).
gaatgtcagcgatacagat

SEQ ID NO: 510411 - DNA, 19 bp, Mus musculus
  siRNA target sequence for Nme7 (NM_138314.1,1066-1084).
gcgatacagatgttcaatt

SEQ ID NO: 510412 - DNA, 19 bp, Mus musculus
  siRNA target sequence for Nme7 (NM_138314.1,1067-1085).
cgatacagatgttcaattt

SEQ ID NO: 510413 - DNA, 19 bp, Mus musculus
  siRNA target sequence for Nme7 (NM_138314.1,1086-1104).
ggatcgggctaatgttgaa

SEQ ID NO: 510414 - DNA, 19 bp, Mus musculus
  siRNA target sequence for Nme7 (NM_138314.1,1094-1112).
ctaatgttgaagaattcta

SEQ ID NO: 510415 - DNA, 19 bp, Mus musculus
  siRNA target sequence for Nme7 (NM_138314.1,1126-1144).
ggtgtagtgtctgagtata

SEQ ID NO: 510416 - DNA, 19 bp, Mus musculus
  siRNA target sequence for Nme7 (NM_138314.1,1127-1145).
gtgtagtgtctgagtataa

SEQ ID NO: 510417 - DNA, 19 bp, Mus musculus
  siRNA target sequence for Nme7 (NM_138314.1,1136-1154).
ctgagtataatgatatggt

SEQ ID NO: 510418 - DNA, 19 bp, Mus musculus
  siRNA target sequence for Nme7 (NM_138314.1,1172-1190).
gcccttgcgtagcaataga

SEQ ID NO: 510419 - DNA, 19 bp, Mus musculus
  siRNA target sequence for Nme7 (NM_138314.1,1175-1193).
cttgcgtagcaatagagat

SEQ ID NO: 510420 - DNA, 19 bp, Mus musculus
  siRNA target sequence for Nme7 (NM_138314.1,1198-1216).
cagagcaaccctacaaaga

SEQ ID NO: 510421 - DNA, 19 bp, Mus musculus
  siRNA target sequence for Nme7 (NM_138314.1,1275-1293).
gaccctcagggcaattttt

SEQ ID NO: 510422 - DNA, 19 bp, Mus musculus
  siRNA target sequence for Nme7 (NM_138314.1,1279-1297).
ctcagggcaatttttggta

SEQ ID NO: 510423 - DNA, 19 bp, Mus musculus
  siRNA target sequence for Nme7 (NM_138314.1,1281-1299).
cagggcaatttttggtaaa

SEQ ID NO: 510424 - DNA, 19 bp, Mus musculus
  siRNA target sequence for Nme7 (NM_138314.1,1284-1302).
ggcaatttttggtaaaact

SEQ ID NO: 510425 - DNA, 19 bp, Mus musculus
  siRNA target sequence for Nme7 (NM_138314.1,1285-1303).
gcaatttttggtaaaacta

SEQ ID NO: 510426 - DNA, 19 bp, Mus musculus
  siRNA target sequence for Nme7 (NM_138314.1,1286-1304).
caatttttggtaaaactaa

SEQ ID NO: 510427 - DNA, 19 bp, Mus musculus
  siRNA target sequence for Nme7 (NM_138314.1,1305-1323).
ggttcaaaatgctgttcat

SEQ ID NO: 510428 - DNA, 19 bp, Mus musculus
  siRNA target sequence for Nme7 (NM_138314.1,1351-1369).
ctggaggtccagtatttct

SEQ ID NO: 510429 - DNA, 19 bp, Mus musculus
  siRNA target sequence for Nme7 (NM_138314.1,1354-1372).
gaggtccagtatttcttca

SEQ ID NO: 510430 - DNA, 19 bp, Mus musculus
  siRNA target sequence for Nme7 (NM_178071.2,389-407).
ccccacagacggatctgtt

SEQ ID NO: 510431 - DNA, 19 bp, Mus musculus
  siRNA target sequence for Nme7 (NM_178071.2,392-410).
cacagacggatctgttgaa

SEQ ID NO: 510432 - DNA, 19 bp, Mus musculus
  siRNA target sequence for Npr1 (NM_008727.4,783-801).
gatgagtacgcgttaacca

SEQ ID NO: 510433 - DNA, 19 bp, Mus musculus
  siRNA target sequence for Npr1 (NM_008727.4,808-826).
caggacccagccatgtcaa

SEQ ID NO: 510434 - DNA, 19 bp, Mus musculus
  siRNA target sequence for Npr1 (NM_008727.4,1044-1062).
cgcaagggcagagttatct

SEQ ID NO: 510435 - DNA, 19 bp, Mus musculus
  siRNA target sequence for Npr1 (NM_008727.4,1045-1063).
gcaagggcagagttatcta

SEQ ID NO: 510436 - DNA, 19 bp, Mus musculus
  siRNA target sequence for Npr1 (NM_008727.4,1050-1068).
ggcagagttatctacatct

SEQ ID NO: 510437 - DNA, 19 bp, Mus musculus
  siRNA target sequence for Npr1 (NM_008727.4,1126-1144).
ctggggaggactatgtttt

SEQ ID NO: 510438 - DNA, 19 bp, Mus musculus
  siRNA target sequence for Npr1 (NM_008727.4,1129-1147).
gggaggactatgttttctt

SEQ ID NO: 510439 - DNA, 19 bp, Mus musculus
  siRNA target sequence for Npr1 (NM_008727.4,1285-1303).
ccgataatcctgagtactt

SEQ ID NO: 510440 - DNA, 19 bp, Mus musculus
  siRNA target sequence for Npr1 (NM_008727.4,1311-1329).
ctgaagcagctaaaactct

SEQ ID NO: 510441 - DNA, 19 bp, Mus musculus
  siRNA target sequence for Npr1 (NM_008727.4,1362-1380).
gatggcctgaaaaatatca

SEQ ID NO: 510442 - DNA, 19 bp, Mus musculus
  siRNA target sequence for Npr1 (NM_008727.4,1509-1527).
gtgacaggatacctgaaaa

SEQ ID NO: 510443 - DNA, 19 bp, Mus musculus
  siRNA target sequence for Npr1 (NM_008727.4,1598-1616).
ggttgtcctgaactttaat

SEQ ID NO: 510444 - DNA, 19 bp, Mus musculus
  siRNA target sequence for Npr1 (NM_008727.4,1680-1698).
cctcctgacatccctaaat

SEQ ID NO: 510445 - DNA, 19 bp, Mus musculus
  siRNA target sequence for Npr1 (NM_008727.4,1796-1814).
gatcgtgtctttcttcata

SEQ ID NO: 510446 - DNA, 19 bp, Mus musculus
  siRNA target sequence for Npr1 (NM_008727.4,1936-1954).
gtgggcgaggctccaatta

SEQ ID NO: 510447 - DNA, 19 bp, Mus musculus
  siRNA target sequence for Npr1 (NM_008727.4,1976-1994).
gggccagttccaagtcttt

SEQ ID NO: 510448 - DNA, 19 bp, Mus musculus
  siRNA target sequence for Npr1 (NM_008727.4,1995-2013).
gccaagacagcatactata

SEQ ID NO: 510449 - DNA, 19 bp, Mus musculus
  siRNA target sequence for Npr1 (NM_008727.4,2054-2072).
cattgagttgacacgaaaa

SEQ ID NO: 510450 - DNA, 19 bp, Mus musculus
  siRNA target sequence for Npr1 (NM_008727.4,2065-2083).
cacgaaaagtcctgtttga

SEQ ID NO: 510451 - DNA, 19 bp, Mus musculus
  siRNA target sequence for Npr1 (NM_008727.4,2191-2209).
gcctacaggacattctaga

SEQ ID NO: 510452 - DNA, 19 bp, Mus musculus
  siRNA target sequence for Npr1 (NM_008727.4,2340-2358).
gatggacgttttgtgttaa

SEQ ID NO: 510453 - DNA, 19 bp, Mus musculus
  siRNA target sequence for Npr1 (NM_008727.4,2343-2361).
ggacgttttgtgttaaaga

SEQ ID NO: 510454 - DNA, 19 bp, Mus musculus
  siRNA target sequence for Npr1 (NM_008727.4,2346-2364).
cgttttgtgttaaagatca

SEQ ID NO: 510455 - DNA, 19 bp, Mus musculus
  siRNA target sequence for Npr1 (NM_008727.4,2416-2434).
ccctctttgccaaaaaact

SEQ ID NO: 510456 - DNA, 19 bp, Mus musculus
  siRNA target sequence for Npr1 (NM_008727.4,2418-2436).
ctctttgccaaaaaactgt

SEQ ID NO: 510457 - DNA, 19 bp, Mus musculus
  siRNA target sequence for Npr1 (NM_008727.4,2495-2513).
ggatgtctacagttttggt

SEQ ID NO: 510458 - DNA, 19 bp, Mus musculus
  siRNA target sequence for Npr1 (NM_008727.4,2573-2591).
cagcccaaaagagatcatt

SEQ ID NO: 510459 - DNA, 19 bp, Mus musculus
  siRNA target sequence for Npr1 (NM_008727.4,2575-2593).
gcccaaaagagatcattga

SEQ ID NO: 510460 - DNA, 19 bp, Mus musculus
  siRNA target sequence for Npr1 (NM_008727.4,2702-2720).
ggagcggccaccctttcaa

SEQ ID NO: 510461 - DNA, 19 bp, Mus musculus
  siRNA target sequence for Npr1 (NM_008727.4,2707-2725).
ggccaccctttcaacagat

SEQ ID NO: 510462 - DNA, 19 bp, Mus musculus
  siRNA target sequence for Npr1 (NM_008727.4,2945-2963).
ggcatttgatagtgttact

SEQ ID NO: 510463 - DNA, 19 bp, Mus musculus
  siRNA target sequence for Npr1 (NM_008727.4,2946-2964).
gcatttgatagtgttacta

SEQ ID NO: 510464 - DNA, 19 bp, Mus musculus
  siRNA target sequence for Npr1 (NM_008727.4,3031-3049).
ccctgctcaatgatctgta

SEQ ID NO: 510465 - DNA, 19 bp, Mus musculus
  siRNA target sequence for Npr1 (NM_008727.4,3064-3082).
ctgtcatagacaactttga

SEQ ID NO: 510466 - DNA, 19 bp, Mus musculus
  siRNA target sequence for Npr1 (NM_008727.4,3240-3258).
ctgcgcttgcgcattggaa

SEQ ID NO: 510467 - DNA, 19 bp, Mus musculus
  siRNA target sequence for Npr1 (NM_008727.4,3244-3262).
gcttgcgcattggaattca

SEQ ID NO: 510468 - DNA, 19 bp, Mus musculus
  siRNA target sequence for Npr2 (NM_173788.2,639-657).
cagctaagaatgagcatta

SEQ ID NO: 510469 - DNA, 19 bp, Mus musculus
  siRNA target sequence for Npr2 (NM_173788.2,714-732).
cattgcacgggcacttcaa

SEQ ID NO: 510470 - DNA, 19 bp, Mus musculus
  siRNA target sequence for Npr2 (NM_173788.2,719-737).
cacgggcacttcaattgga

SEQ ID NO: 510471 - DNA, 19 bp, Mus musculus
  siRNA target sequence for Npr2 (NM_173788.2,744-762).
gggctgctttgctgtatct

SEQ ID NO: 510472 - DNA, 19 bp, Mus musculus
  siRNA target sequence for Npr2 (NM_173788.2,798-816).
ccatcgagggcgtctttga

SEQ ID NO: 510473 - DNA, 19 bp, Mus musculus
  siRNA target sequence for Npr2 (NM_173788.2,987-1005).
ccaatggggactatgtctt

SEQ ID NO: 510474 - DNA, 19 bp, Mus musculus
  siRNA target sequence for Npr2 (NM_173788.2,997-1015).
ctatgtcttcttttacctt

SEQ ID NO: 510475 - DNA, 19 bp, Mus musculus
  siRNA target sequence for Npr2 (NM_173788.2,1067-1085).
ccatggcaggacaatcgaa

SEQ ID NO: 510476 - DNA, 19 bp, Mus musculus
  siRNA target sequence for Npr2 (NM_173788.2,1125-1143).
ctgtattggtgatcacata

SEQ ID NO: 510477 - DNA, 19 bp, Mus musculus
  siRNA target sequence for Npr2 (NM_173788.2,1152-1170).
ccccaaatcctgagtatca

SEQ ID NO: 510478 - DNA, 19 bp, Mus musculus
  siRNA target sequence for Npr2 (NM_173788.2,1161-1179).
ctgagtatcaggagtttca

SEQ ID NO: 510479 - DNA, 19 bp, Mus musculus
  siRNA target sequence for Npr2 (NM_173788.2,1229-1247).
ccatccctgatgaacctta

SEQ ID NO: 510480 - DNA, 19 bp, Mus musculus
  siRNA target sequence for Npr2 (NM_173788.2,1323-1341).
gggaagatggacttcgaat

SEQ ID NO: 510481 - DNA, 19 bp, Mus musculus
  siRNA target sequence for Npr2 (NM_173788.2,1324-1342).
ggaagatggacttcgaatt

SEQ ID NO: 510482 - DNA, 19 bp, Mus musculus
  siRNA target sequence for Npr2 (NM_173788.2,1354-1372).
gcagggacgaagataccat

SEQ ID NO: 510483 - DNA, 19 bp, Mus musculus
  siRNA target sequence for Npr2 (NM_173788.2,1436-1454).
gccatgggagacttggatt

SEQ ID NO: 510484 - DNA, 19 bp, Mus musculus
  siRNA target sequence for Npr2 (NM_173788.2,1468-1486).
gcccgcagcccattactct

SEQ ID NO: 510485 - DNA, 19 bp, Mus musculus
  siRNA target sequence for Npr2 (NM_173788.2,1582-1600).
cgacccatcctgtgataaa

SEQ ID NO: 510486 - DNA, 19 bp, Mus musculus
  siRNA target sequence for Npr2 (NM_173788.2,1585-1603).
cccatcctgtgataaaact

SEQ ID NO: 510487 - DNA, 19 bp, Mus musculus
  siRNA target sequence for Npr2 (NM_173788.2,1728-1746).
gcattcgctgggaagaact

SEQ ID NO: 510488 - DNA, 19 bp, Mus musculus
  siRNA target sequence for Npr2 (NM_173788.2,1872-1890).
gtcacttcaagggaaatgt

SEQ ID NO: 510489 - DNA, 19 bp, Mus musculus
  siRNA target sequence for Npr2 (NM_173788.2,1930-1948).
gacccggcaagttctgttt

SEQ ID NO: 510490 - DNA, 19 bp, Mus musculus
  siRNA target sequence for Npr2 (NM_173788.2,1932-1950).
cccggcaagttctgtttga

SEQ ID NO: 510491 - DNA, 19 bp, Mus musculus
  siRNA target sequence for Npr2 (NM_173788.2,1933-1951).
ccggcaagttctgtttgaa

SEQ ID NO: 510492 - DNA, 19 bp, Mus musculus
  siRNA target sequence for Npr2 (NM_173788.2,1970-1988).
gtccagttcaaccatctta

SEQ ID NO: 510493 - DNA, 19 bp, Mus musculus
  siRNA target sequence for Npr2 (NM_173788.2,2018-2036).
cccaacatctgcattgtca

SEQ ID NO: 510494 - DNA, 19 bp, Mus musculus
  siRNA target sequence for Npr2 (NM_173788.2,2029-2047).
cattgtcaccgagtattgt

SEQ ID NO: 510495 - DNA, 19 bp, Mus musculus
  siRNA target sequence for Npr2 (NM_173788.2,2051-2069).
cgtgggagcttacaagata

SEQ ID NO: 510496 - DNA, 19 bp, Mus musculus
  siRNA target sequence for Npr2 (NM_173788.2,2058-2076).
gcttacaagatattctaga

SEQ ID NO: 510497 - DNA, 19 bp, Mus musculus
  siRNA target sequence for Npr2 (NM_173788.2,2089-2107).
caatttggactggatgttt

SEQ ID NO: 510498 - DNA, 19 bp, Mus musculus
  siRNA target sequence for Npr2 (NM_173788.2,2152-2170).
ccacaacagcattatttca

SEQ ID NO: 510499 - DNA, 19 bp, Mus musculus
  siRNA target sequence for Npr2 (NM_173788.2,2155-2173).
caacagcattatttcatct

SEQ ID NO: 510500 - DNA, 19 bp, Mus musculus
  siRNA target sequence for Npr2 (NM_173788.2,2211-2229).
gtcgatttgtgctcaaaat

SEQ ID NO: 510501 - DNA, 19 bp, Mus musculus
  siRNA target sequence for Npr2 (NM_173788.2,2213-2231).
cgatttgtgctcaaaataa

SEQ ID NO: 510502 - DNA, 19 bp, Mus musculus
  siRNA target sequence for Npr2 (NM_173788.2,2219-2237).
gtgctcaaaataacagatt

SEQ ID NO: 510503 - DNA, 19 bp, Mus musculus
  siRNA target sequence for Npr2 (NM_173788.2,2245-2263).
ggctagtttccgatcaact

SEQ ID NO: 510504 - DNA, 19 bp, Mus musculus
  siRNA target sequence for Npr2 (NM_173788.2,2374-2392).
cagctttgccatcattcta

SEQ ID NO: 510505 - DNA, 19 bp, Mus musculus
  siRNA target sequence for Npr2 (NM_173788.2,2376-2394).
gctttgccatcattctaca

SEQ ID NO: 510506 - DNA, 19 bp, Mus musculus
  siRNA target sequence for Npr2 (NM_173788.2,2382-2400).
ccatcattctacaggaaat

SEQ ID NO: 510507 - DNA, 19 bp, Mus musculus
  siRNA target sequence for Npr2 (NM_173788.2,2408-2426).
cgaagtggtcctttctact

SEQ ID NO: 510508 - DNA, 19 bp, Mus musculus
  siRNA target sequence for Npr2 (NM_173788.2,2488-2506).
gtatttccggccaagcatt

SEQ ID NO: 510509 - DNA, 19 bp, Mus musculus
  siRNA target sequence for Npr2 (NM_173788.2,2509-2527).
ccggacacaactgaatgaa

SEQ ID NO: 510510 - DNA, 19 bp, Mus musculus
  siRNA target sequence for Npr2 (NM_173788.2,2514-2532).
cacaactgaatgaagagtt

SEQ ID NO: 510511 - DNA, 19 bp, Mus musculus
  siRNA target sequence for Npr2 (NM_173788.2,2601-2619).
gcttcattcgccggtttaa

SEQ ID NO: 510512 - DNA, 19 bp, Mus musculus
  siRNA target sequence for Npr2 (NM_173788.2,2624-2642).
gaaggtggtaccagcatat

SEQ ID NO: 510513 - DNA, 19 bp, Mus musculus
  siRNA target sequence for Npr2 (NM_173788.2,2628-2646).
gtggtaccagcatattgga

SEQ ID NO: 510514 - DNA, 19 bp, Mus musculus
  siRNA target sequence for Npr2 (NM_173788.2,2656-2674).
gctgcgcatggaacagtat

SEQ ID NO: 510515 - DNA, 19 bp, Mus musculus
  siRNA target sequence for Npr2 (NM_173788.2,2746-2764).
cctgctgtaccaaattcta

SEQ ID NO: 510516 - DNA, 19 bp, Mus musculus
  siRNA target sequence for Npr2 (NM_173788.2,2890-2908).
gcaggtggtgacacttctt

SEQ ID NO: 510517 - DNA, 19 bp, Mus musculus
  siRNA target sequence for Npr2 (NM_173788.2,2906-2924).
cttaatgacctttatacct

SEQ ID NO: 510518 - DNA, 19 bp, Mus musculus
  siRNA target sequence for Npr2 (NM_173788.2,2914-2932).
cctttatacctgctttgat

SEQ ID NO: 510519 - DNA, 19 bp, Mus musculus
  siRNA target sequence for Npr2 (NM_173788.2,3022-3040).
gcgccatgcaccagaaatt

SEQ ID NO: 510520 - DNA, 19 bp, Mus musculus
  siRNA target sequence for Npr2 (NM_173788.2,3025-3043).
ccatgcaccagaaattgct

SEQ ID NO: 510521 - DNA, 19 bp, Mus musculus
  siRNA target sequence for Nrbp (NM_147201.1,154-172).
ggtagaatcctcatcttta

SEQ ID NO: 510522 - DNA, 19 bp, Mus musculus
  siRNA target sequence for Nrbp (NM_147201.1,313-331).
ggtgaatcagcgtaatgta

SEQ ID NO: 510523 - DNA, 19 bp, Mus musculus
  siRNA target sequence for Nrbp (NM_147201.1,347-365).
gcatacctggccatggata

SEQ ID NO: 510524 - DNA, 19 bp, Mus musculus
  siRNA target sequence for Nrbp (NM_147201.1,443-461).
gtccgtgcagtgtttgata

SEQ ID NO: 510525 - DNA, 19 bp, Mus musculus
  siRNA target sequence for Nrbp (NM_147201.1,445-463).
ccgtgcagtgtttgataat

SEQ ID NO: 510526 - DNA, 19 bp, Mus musculus
  siRNA target sequence for Nrbp (NM_147201.1,449-467).
gcagtgtttgataatctga

SEQ ID NO: 510527 - DNA, 19 bp, Mus musculus
  siRNA target sequence for Nrbp (NM_147201.1,450-468).
cagtgtttgataatctgat

SEQ ID NO: 510528 - DNA, 19 bp, Mus musculus
  siRNA target sequence for Nrbp (NM_147201.1,466-484).
gattcagctggaacatctt

SEQ ID NO: 510529 - DNA, 19 bp, Mus musculus
  siRNA target sequence for Nrbp (NM_147201.1,472-490).
gctggaacatcttaacatt

SEQ ID NO: 510530 - DNA, 19 bp, Mus musculus
  siRNA target sequence for Nrbp (NM_147201.1,487-505).
cattgttaagtttcacaaa

SEQ ID NO: 510531 - DNA, 19 bp, Mus musculus
  siRNA target sequence for Nrbp (NM_147201.1,491-509).
gttaagtttcacaaatatt

SEQ ID NO: 510532 - DNA, 19 bp, Mus musculus
  siRNA target sequence for Nrbp (NM_147201.1,533-551).
gctagggtgattttcatca

SEQ ID NO: 510533 - DNA, 19 bp, Mus musculus
  siRNA target sequence for Nrbp (NM_147201.1,564-582).
cctctgggagtcttaagca

SEQ ID NO: 510534 - DNA, 19 bp, Mus musculus
  siRNA target sequence for Nrbp (NM_147201.1,737-755).
cacaacggactcatcaaga

SEQ ID NO: 510535 - DNA, 19 bp, Mus musculus
  siRNA target sequence for Nrbp (NM_147201.1,739-757).
caacggactcatcaagatt

SEQ ID NO: 510536 - DNA, 19 bp, Mus musculus
  siRNA target sequence for Nrbp (NM_147201.1,764-782).
gtggctcctgacactatca

SEQ ID NO: 510537 - DNA, 19 bp, Mus musculus
  siRNA target sequence for Nrbp (NM_147201.1,767-785).
gctcctgacactatcaaca

SEQ ID NO: 510538 - DNA, 19 bp, Mus musculus
  siRNA target sequence for Nrbp (NM_147201.1,768-786).
ctcctgacactatcaacaa

SEQ ID NO: 510539 - DNA, 19 bp, Mus musculus
  siRNA target sequence for Nrbp (NM_147201.1,817-835).
gaacctacacttttttgca

SEQ ID NO: 510540 - DNA, 19 bp, Mus musculus
  siRNA target sequence for Nrbp (NM_147201.1,931-949).
caatggcgagtcctcatat

SEQ ID NO: 510541 - DNA, 19 bp, Mus musculus
  siRNA target sequence for Nrbp (NM_147201.1,975-993).
ccatccagctactagaaga

SEQ ID NO: 510542 - DNA, 19 bp, Mus musculus
  siRNA target sequence for Nrbp (NM_147201.1,982-1000).
gctactagaagactcatta

SEQ ID NO: 510543 - DNA, 19 bp, Mus musculus
  siRNA target sequence for Nrbp (NM_147201.1,986-1004).
ctagaagactcattacaga

SEQ ID NO: 510544 - DNA, 19 bp, Mus musculus
  siRNA target sequence for Nrbp (NM_147201.1,1183-1201).
ggataccagtgctgtacta

SEQ ID NO: 510545 - DNA, 19 bp, Mus musculus
  siRNA target sequence for Nrbp (NM_147201.1,1229-1247).
gaaccagttcagactttgt

SEQ ID NO: 510546 - DNA, 19 bp, Mus musculus
  siRNA target sequence for Nrbp (NM_147201.1,1232-1250).
ccagttcagactttgtact

SEQ ID NO: 510547 - DNA, 19 bp, Mus musculus
  siRNA target sequence for Nrbp (NM_147201.1,1255-1273).
gtcaccagccctagaatta

SEQ ID NO: 510548 - DNA, 19 bp, Mus musculus
  siRNA target sequence for Nrbp (NM_147201.1,1257-1275).
caccagccctagaattaga

SEQ ID NO: 510549 - DNA, 19 bp, Mus musculus
  siRNA target sequence for Nrbp (NM_147201.1,1259-1277).
ccagccctagaattagaca

SEQ ID NO: 510550 - DNA, 19 bp, Mus musculus
  siRNA target sequence for Nrbp (NM_147201.1,1262-1280).
gccctagaattagacaaat

SEQ ID NO: 510551 - DNA, 19 bp, Mus musculus
  siRNA target sequence for Nrbp (NM_147201.1,1472-1490).
ggagtcaaacaccatctaa

SEQ ID NO: 510552 - DNA, 19 bp, Mus musculus
  siRNA target sequence for Nrbp (NM_147201.1,1538-1556).
gacctgatgccaaatgaga

SEQ ID NO: 510553 - DNA, 19 bp, Mus musculus
  siRNA target sequence for Nrbp (NM_147201.1,1582-1600).
ggtgcagctgggcttcatt

SEQ ID NO: 510554 - DNA, 19 bp, Mus musculus
  siRNA target sequence for Nrbp (NM_147201.1,1637-1655).
gaggagacgctcaacaagt

SEQ ID NO: 510555 - DNA, 19 bp, Mus musculus
  siRNA target sequence for Nsf (NM_008740.2,107-125).
gagatgccctactgatgaa

SEQ ID NO: 510556 - DNA, 19 bp, Mus musculus
  siRNA target sequence for Nsf (NM_008740.2,114-132).
cctactgatgaattatctt

SEQ ID NO: 510557 - DNA, 19 bp, Mus musculus
  siRNA target sequence for Nsf (NM_008740.2,115-133).
ctactgatgaattatcttt

SEQ ID NO: 510558 - DNA, 19 bp, Mus musculus
  siRNA target sequence for Nsf (NM_008740.2,142-160).
gtgcggttgtgaacgaaaa

SEQ ID NO: 510559 - DNA, 19 bp, Mus musculus
  siRNA target sequence for Nsf (NM_008740.2,145-163).
cggttgtgaacgaaaaaga

SEQ ID NO: 510560 - DNA, 19 bp, Mus musculus
  siRNA target sequence for Nsf (NM_008740.2,146-164).
ggttgtgaacgaaaaagat

SEQ ID NO: 510561 - DNA, 19 bp, Mus musculus
  siRNA target sequence for Nsf (NM_008740.2,147-165).
gttgtgaacgaaaaagatt

SEQ ID NO: 510562 - DNA, 19 bp, Mus musculus
  siRNA target sequence for Nsf (NM_008740.2,196-214).
cgtcccccaatcacaagta

SEQ ID NO: 510563 - DNA, 19 bp, Mus musculus
  siRNA target sequence for Nsf (NM_008740.2,202-220).
ccaatcacaagtacatatt

SEQ ID NO: 510564 - DNA, 19 bp, Mus musculus
  siRNA target sequence for Nsf (NM_008740.2,203-221).
caatcacaagtacatattt

SEQ ID NO: 510565 - DNA, 19 bp, Mus musculus
  siRNA target sequence for Nsf (NM_008740.2,315-333).
gaagttgccttgtattcgt

SEQ ID NO: 510566 - DNA, 19 bp, Mus musculus
  siRNA target sequence for Nsf (NM_008740.2,321-339).
gccttgtattcgtttgaca

SEQ ID NO: 510567 - DNA, 19 bp, Mus musculus
  siRNA target sequence for Nsf (NM_008740.2,322-340).
ccttgtattcgtttgacaa

SEQ ID NO: 510568 - DNA, 19 bp, Mus musculus
  siRNA target sequence for Nsf (NM_008740.2,323-341).
cttgtattcgtttgacaaa

SEQ ID NO: 510569 - DNA, 19 bp, Mus musculus
  siRNA target sequence for Nsf (NM_008740.2,348-366).
cagtgcatcggcacaatga

SEQ ID NO: 510570 - DNA, 19 bp, Mus musculus
  siRNA target sequence for Nsf (NM_008740.2,412-430).
cttacgacaccgacaagat

SEQ ID NO: 510571 - DNA, 19 bp, Mus musculus
  siRNA target sequence for Nsf (NM_008740.2,580-598).
gcaaaaggcagaagattga

SEQ ID NO: 510572 - DNA, 19 bp, Mus musculus
  siRNA target sequence for Nsf (NM_008740.2,636-654).
gaaaaagcagaaaattcgt

SEQ ID NO: 510573 - DNA, 19 bp, Mus musculus
  siRNA target sequence for Nsf (NM_008740.2,663-681).
cttatcggcaaagctaaaa

SEQ ID NO: 510574 - DNA, 19 bp, Mus musculus
  siRNA target sequence for Nsf (NM_008740.2,711-729).
cccgactggaactttgaga

SEQ ID NO: 510575 - DNA, 19 bp, Mus musculus
  siRNA target sequence for Nsf (NM_008740.2,736-754).
ggatcggcggtctggataa

SEQ ID NO: 510576 - DNA, 19 bp, Mus musculus
  siRNA target sequence for Nsf (NM_008740.2,767-785).
cattttccgaagagcattt

SEQ ID NO: 510577 - DNA, 19 bp, Mus musculus
  siRNA target sequence for Nsf (NM_008740.2,805-823).
cggagatcgtggaacagat

SEQ ID NO: 510578 - DNA, 19 bp, Mus musculus
  siRNA target sequence for Nsf (NM_008740.2,815-833).
ggaacagatgggttgcaaa

SEQ ID NO: 510579 - DNA, 19 bp, Mus musculus
  siRNA target sequence for Nsf (NM_008740.2,821-839).
gatgggttgcaaacatgtt

SEQ ID NO: 510580 - DNA, 19 bp, Mus musculus
  siRNA target sequence for Nsf (NM_008740.2,935-953).
caatgggccagaaatcctt

SEQ ID NO: 510581 - DNA, 19 bp, Mus musculus
  siRNA target sequence for Nsf (NM_008740.2,940-958).
ggccagaaatccttaacaa

SEQ ID NO: 510582 - DNA, 19 bp, Mus musculus
  siRNA target sequence for Nsf (NM_008740.2,973-991).
cagaggctaacattcgtaa

SEQ ID NO: 510583 - DNA, 19 bp, Mus musculus
  siRNA target sequence for Nsf (NM_008740.2,978-996).
gctaacattcgtaaactct

SEQ ID NO: 510584 - DNA, 19 bp, Mus musculus
  siRNA target sequence for Nsf (NM_008740.2,979-997).
ctaacattcgtaaactctt

SEQ ID NO: 510585 - DNA, 19 bp, Mus musculus
  siRNA target sequence for Nsf (NM_008740.2,1022-1040).
gaggcttggtgctaacagt

SEQ ID NO: 510586 - DNA, 19 bp, Mus musculus
  siRNA target sequence for Nsf (NM_008740.2,1185-1203).
gttatcggaatgaccaata

SEQ ID NO: 510587 - DNA, 19 bp, Mus musculus
  siRNA target sequence for Nsf (NM_008740.2,1199-1217).
caatagaccagatttgata

SEQ ID NO: 510588 - DNA, 19 bp, Mus musculus
  siRNA target sequence for Nsf (NM_008740.2,1287-1305).
cgactccagatccttcata

SEQ ID NO: 510589 - DNA, 19 bp, Mus musculus
  siRNA target sequence for Nsf (NM_008740.2,1367-1385).
ggctgtggagactaagaat

SEQ ID NO: 510590 - DNA, 19 bp, Mus musculus
  siRNA target sequence for Nsf (NM_008740.2,1368-1386).
gctgtggagactaagaatt

SEQ ID NO: 510591 - DNA, 19 bp, Mus musculus
  siRNA target sequence for Nsf (NM_008740.2,1373-1391).
ggagactaagaatttcagt

SEQ ID NO: 510592 - DNA, 19 bp, Mus musculus
  siRNA target sequence for Nsf (NM_008740.2,1451-1469).
caaggccagcaccaaagta

SEQ ID NO: 510593 - DNA, 19 bp, Mus musculus
  siRNA target sequence for Nsf (NM_008740.2,1524-1542).
gcttccctggagaacgata

SEQ ID NO: 510594 - DNA, 19 bp, Mus musculus
  siRNA target sequence for Nsf (NM_008740.2,1525-1543).
cttccctggagaacgatat

SEQ ID NO: 510595 - DNA, 19 bp, Mus musculus
  siRNA target sequence for Nsf (NM_008740.2,1562-1580).
caaccaagaggattatgca

SEQ ID NO: 510596 - DNA, 19 bp, Mus musculus
  siRNA target sequence for Nsf (NM_008740.2,1571-1589).
ggattatgcaagttacatt

SEQ ID NO: 510597 - DNA, 19 bp, Mus musculus
  siRNA target sequence for Nsf (NM_008740.2,1650-1668).
ctggtccagcaaacgaaaa

SEQ ID NO: 510598 - DNA, 19 bp, Mus musculus
  siRNA target sequence for Nsf (NM_008740.2,1653-1671).
gtccagcaaacgaaaaaca

SEQ ID NO: 510599 - DNA, 19 bp, Mus musculus
  siRNA target sequence for Nsf (NM_008740.2,1678-1696).
ggacaccactcgttagtgt

SEQ ID NO: 510600 - DNA, 19 bp, Mus musculus
  siRNA target sequence for Nsf (NM_008740.2,1784-1802).
ctcacctgataagatgatt

SEQ ID NO: 510601 - DNA, 19 bp, Mus musculus
  siRNA target sequence for Nsf (NM_008740.2,1930-1948).
ggttctccaacctggtatt

SEQ ID NO: 510602 - DNA, 19 bp, Mus musculus
  siRNA target sequence for Nsf (NM_008740.2,1943-1961).
ggtattgcaggctcttctt

SEQ ID NO: 510603 - DNA, 19 bp, Mus musculus
  siRNA target sequence for Nsf (NM_008740.2,2147-2165).
ggaacgcaccacaattgct

SEQ ID NO: 510604 - DNA, 19 bp, Mus musculus
  siRNA target sequence for Nsf (NM_008740.2,2158-2176).
caattgctcagcaagtcaa

SEQ ID NO: 510605 - DNA, 19 bp, Mus musculus
  siRNA target sequence for Nsf (NM_008740.2,2187-2205).
gtctggataggaatcaaga

SEQ ID NO: 510606 - DNA, 19 bp, Mus musculus
  siRNA target sequence for Nsf (NM_008740.2,2191-2209).
ggataggaatcaagaagtt

SEQ ID NO: 510607 - DNA, 19 bp, Mus musculus
  siRNA target sequence for Nsf (NM_008740.2,2196-2214).
ggaatcaagaagttactaa

SEQ ID NO: 510608 - DNA, 19 bp, Mus musculus
  siRNA target sequence for Nsf (NM_008740.2,2247-2265).
gagtaccgtgtgaggaaat

SEQ ID NO: 510609 - DNA, 19 bp, Mus musculus
  siRNA target sequence for Ntrk2 (NM_008745.1,97-115).
ccgacgtcctgcaaatgca

SEQ ID NO: 510610 - DNA, 19 bp, Mus musculus
  siRNA target sequence for Ntrk2 (NM_008745.1,185-203).
gcgttgacccggagaacat

SEQ ID NO: 510611 - DNA, 19 bp, Mus musculus
  siRNA target sequence for Ntrk2 (NM_008745.1,206-224).
cggaaattctcattgcaaa

SEQ ID NO: 510612 - DNA, 19 bp, Mus musculus
  siRNA target sequence for Ntrk2 (NM_008745.1,214-232).
ctcattgcaaaccagaaaa

SEQ ID NO: 510613 - DNA, 19 bp, Mus musculus
  siRNA target sequence for Ntrk2 (NM_008745.1,270-288).
cgtggggctgagaaacctt

SEQ ID NO: 510614 - DNA, 19 bp, Mus musculus
  siRNA target sequence for Ntrk2 (NM_008745.1,297-315).
ggattccggcttaaagttt

SEQ ID NO: 510615 - DNA, 19 bp, Mus musculus
  siRNA target sequence for Ntrk2 (NM_008745.1,319-337).
gcttacaaagcgtttctga

SEQ ID NO: 510616 - DNA, 19 bp, Mus musculus
  siRNA target sequence for Ntrk2 (NM_008745.1,320-338).
cttacaaagcgtttctgaa

SEQ ID NO: 510617 - DNA, 19 bp, Mus musculus
  siRNA target sequence for Ntrk2 (NM_008745.1,344-362).
gcaacctgcggcacataaa

SEQ ID NO: 510618 - DNA, 19 bp, Mus musculus
  siRNA target sequence for Ntrk2 (NM_008745.1,345-363).
caacctgcggcacataaat

SEQ ID NO: 510619 - DNA, 19 bp, Mus musculus
  siRNA target sequence for Ntrk2 (NM_008745.1,349-367).
ctgcggcacataaatttca

SEQ ID NO: 510620 - DNA, 19 bp, Mus musculus
  siRNA target sequence for Ntrk2 (NM_008745.1,386-404).
gtttgtccaggagacattt

SEQ ID NO: 510621 - DNA, 19 bp, Mus musculus
  siRNA target sequence for Ntrk2 (NM_008745.1,452-470).
cgtgctcctgcgacatcat

SEQ ID NO: 510622 - DNA, 19 bp, Mus musculus
  siRNA target sequence for Ntrk2 (NM_008745.1,503-521).
gccccgacactcaggattt

SEQ ID NO: 510623 - DNA, 19 bp, Mus musculus
  siRNA target sequence for Ntrk2 (NM_008745.1,505-523).
cccgacactcaggatttgt

SEQ ID NO: 510624 - DNA, 19 bp, Mus musculus
  siRNA target sequence for Ntrk2 (NM_008745.1,506-524).
ccgacactcaggatttgta

SEQ ID NO: 510625 - DNA, 19 bp, Mus musculus
  siRNA target sequence for Ntrk2 (NM_008745.1,564-582).
cctgcagatacccaattgt

SEQ ID NO: 510626 - DNA, 19 bp, Mus musculus
  siRNA target sequence for Ntrk2 (NM_008745.1,689-707).
gggacgttgggaatttggt

SEQ ID NO: 510627 - DNA, 19 bp, Mus musculus
  siRNA target sequence for Ntrk2 (NM_008745.1,690-708).
ggacgttgggaatttggtt

SEQ ID NO: 510628 - DNA, 19 bp, Mus musculus
  siRNA target sequence for Ntrk2 (NM_008745.1,705-723).
ggtttccaagcacatgaat

SEQ ID NO: 510629 - DNA, 19 bp, Mus musculus
  siRNA target sequence for Ntrk2 (NM_008745.1,742-760).
ggctccttaaggataacga

SEQ ID NO: 510630 - DNA, 19 bp, Mus musculus
  siRNA target sequence for Ntrk2 (NM_008745.1,743-761).
gctccttaaggataacgaa

SEQ ID NO: 510631 - DNA, 19 bp, Mus musculus
  siRNA target sequence for Ntrk2 (NM_008745.1,747-765).
cttaaggataacgaacatt

SEQ ID NO: 510632 - DNA, 19 bp, Mus musculus
  siRNA target sequence for Ntrk2 (NM_008745.1,753-771).
gataacgaacatttcatct

SEQ ID NO: 510633 - DNA, 19 bp, Mus musculus
  siRNA target sequence for Ntrk2 (NM_008745.1,895-913).
caccactggtgcattccat

SEQ ID NO: 510634 - DNA, 19 bp, Mus musculus
  siRNA target sequence for Ntrk2 (NM_008745.1,900-918).
ctggtgcattccattcact

SEQ ID NO: 510635 - DNA, 19 bp, Mus musculus
  siRNA target sequence for Ntrk2 (NM_008745.1,940-958).
gcgcttcagtggttctaca

SEQ ID NO: 510636 - DNA, 19 bp, Mus musculus
  siRNA target sequence for Ntrk2 (NM_008745.1,941-959).
cgcttcagtggttctacaa

SEQ ID NO: 510637 - DNA, 19 bp, Mus musculus
  siRNA target sequence for Ntrk2 (NM_008745.1,942-960).
gcttcagtggttctacaat

SEQ ID NO: 510638 - DNA, 19 bp, Mus musculus
  siRNA target sequence for Ntrk2 (NM_008745.1,961-979).
ggggccatactgaatgagt

SEQ ID NO: 510639 - DNA, 19 bp, Mus musculus
  siRNA target sequence for Ntrk2 (NM_008745.1,980-998).
ccaagtacatctgtactaa

SEQ ID NO: 510640 - DNA, 19 bp, Mus musculus
  siRNA target sequence for Ntrk2 (NM_008745.1,1042-1060).
ctggataaccccactcata

SEQ ID NO: 510641 - DNA, 19 bp, Mus musculus
  siRNA target sequence for Ntrk2 (NM_008745.1,1045-1063).
gataaccccactcatatga

SEQ ID NO: 510642 - DNA, 19 bp, Mus musculus
  siRNA target sequence for Ntrk2 (NM_008745.1,1148-1166).
gagtcgactacgagacaaa

SEQ ID NO: 510643 - DNA, 19 bp, Mus musculus
  siRNA target sequence for Ntrk2 (NM_008745.1,1176-1194).
ccctgaagtcctctatgaa

SEQ ID NO: 510644 - DNA, 19 bp, Mus musculus
  siRNA target sequence for Ntrk2 (NM_008745.1,1200-1218).
gaccacgccaactgacatt

SEQ ID NO: 510645 - DNA, 19 bp, Mus musculus
  siRNA target sequence for Ntrk2 (NM_008745.1,1219-1237).
ggggatactacgaacaaaa

SEQ ID NO: 510646 - DNA, 19 bp, Mus musculus
  siRNA target sequence for Ntrk2 (NM_008745.1,1222-1240).
gatactacgaacaaaagta

SEQ ID NO: 510647 - DNA, 19 bp, Mus musculus
  siRNA target sequence for Ntrk2 (NM_008745.1,1226-1244).
ctacgaacaaaagtaatga

SEQ ID NO: 510648 - DNA, 19 bp, Mus musculus
  siRNA target sequence for Ntrk2 (NM_008745.1,1300-1318).
gccgtggtggtgattgcat

SEQ ID NO: 510649 - DNA, 19 bp, Mus musculus
  siRNA target sequence for Ntrk2 (NM_008745.1,1357-1375).
ctcaagttggcgagacatt

SEQ ID NO: 510650 - DNA, 19 bp, Mus musculus
  siRNA target sequence for Ntrk2 (NM_008745.1,1365-1383).
ggcgagacattccaagttt

SEQ ID NO: 510651 - DNA, 19 bp, Mus musculus
  siRNA target sequence for Nubp1 (NM_011955.1,278-296).
gctcttctggacatcgata

SEQ ID NO: 510652 - DNA, 19 bp, Mus musculus
  siRNA target sequence for Nubp1 (NM_011955.1,279-297).
ctcttctggacatcgatat

SEQ ID NO: 510653 - DNA, 19 bp, Mus musculus
  siRNA target sequence for Nubp1 (NM_011955.1,305-323).
ccatcgattcccaagatca

SEQ ID NO: 510654 - DNA, 19 bp, Mus musculus
  siRNA target sequence for Nubp1 (NM_011955.1,372-390).
cagtgtacgtggatgacaa

SEQ ID NO: 510655 - DNA, 19 bp, Mus musculus
  siRNA target sequence for Nubp1 (NM_011955.1,451-469).
gggaccaaagaaaaatggt

SEQ ID NO: 510656 - DNA, 19 bp, Mus musculus
  siRNA target sequence for Nubp1 (NM_011955.1,452-470).
ggaccaaagaaaaatggta

SEQ ID NO: 510657 - DNA, 19 bp, Mus musculus
  siRNA target sequence for Nubp1 (NM_011955.1,456-474).
caaagaaaaatggtatgat

SEQ ID NO: 510658 - DNA, 19 bp, Mus musculus
  siRNA target sequence for Nubp1 (NM_011955.1,577-595).
ggctgcggcacacattgat

SEQ ID NO: 510659 - DNA, 19 bp, Mus musculus
  siRNA target sequence for Nubp1 (NM_011955.1,670-688).
ggtgaagctgcccatcatt

SEQ ID NO: 510660 - DNA, 19 bp, Mus musculus
  siRNA target sequence for Nubp1 (NM_011955.1,817-835).
gccgctggatccacacata

SEQ ID NO: 510661 - DNA, 19 bp, Mus musculus
  siRNA target sequence for Nubp1 (NM_011955.1,896-914).
gcagcctacagaagtataa

SEQ ID NO: 510662 - DNA, 19 bp, Mus musculus
  siRNA target sequence for Nubp1 (NM_011955.1,900-918).
cctacagaagtataattca

SEQ ID NO: 510663 - DNA, 19 bp, Mus musculus
  siRNA target sequence for Nubp1 (NM_011955.1,921-939).
ggatccgagacttttgtaa

SEQ ID NO: 510664 - DNA, 19 bp, Mus musculus
  siRNA target sequence for Nubp1 (NM_011955.1,922-940).
gatccgagacttttgtaat

SEQ ID NO: 510665 - DNA, 19 bp, Mus musculus
  siRNA target sequence for Nubp1 (NM_011955.1,925-943).
ccgagacttttgtaattct

SEQ ID NO: 510666 - DNA, 19 bp, Mus musculus
  siRNA target sequence for Nubp2 (NM_011956.2,98-116).
gacacatcatccttgttct

SEQ ID NO: 510667 - DNA, 19 bp, Mus musculus
  siRNA target sequence for Nubp2 (NM_011956.2,186-204).
caagaaggtgggaatccta

SEQ ID NO: 510668 - DNA, 19 bp, Mus musculus
  siRNA target sequence for Nubp2 (NM_011956.2,261-279).
cgtgcaccagtgtgacaat

SEQ ID NO: 510669 - DNA, 19 bp, Mus musculus
  siRNA target sequence for Nubp2 (NM_011956.2,310-328).
cagagcatctcccttatgt

SEQ ID NO: 510670 - DNA, 19 bp, Mus musculus
  siRNA target sequence for Nubp2 (NM_011956.2,312-330).
gagcatctcccttatgtct

SEQ ID NO: 510671 - DNA, 19 bp, Mus musculus
  siRNA target sequence for Nubp2 (NM_011956.2,372-390).
gagaggtcccaagaaacat

SEQ ID NO: 510672 - DNA, 19 bp, Mus musculus
  siRNA target sequence for Nubp2 (NM_011956.2,513-531).
gccccttggggctcttgta

SEQ ID NO: 510673 - DNA, 19 bp, Mus musculus
  siRNA target sequence for Nubp2 (NM_011956.2,539-557).
caccacaggcggtgtctat

SEQ ID NO: 510674 - DNA, 19 bp, Mus musculus
  siRNA target sequence for Nubp2 (NM_011956.2,613-631).
ggggtcatagagaacatga

SEQ ID NO: 510675 - DNA, 19 bp, Mus musculus
  siRNA target sequence for Nubp2 (NM_011956.2,655-673).
gctgagtgcaccaatgtct

SEQ ID NO: 510676 - DNA, 19 bp, Mus musculus
  siRNA target sequence for Nubp2 (NM_011956.2,656-674).
ctgagtgcaccaatgtctt

SEQ ID NO: 510677 - DNA, 19 bp, Mus musculus
  siRNA target sequence for Nup153 (NM_175749.1,219-237).
ccaacaccagggcattctt

SEQ ID NO: 510678 - DNA, 19 bp, Mus musculus
  siRNA target sequence for Nup153 (NM_175749.1,220-238).
caacaccagggcattctta

SEQ ID NO: 510679 - DNA, 19 bp, Mus musculus
  siRNA target sequence for Nup153 (NM_175749.1,242-260).
gggttacagaatctgttaa

SEQ ID NO: 510680 - DNA, 19 bp, Mus musculus
  siRNA target sequence for Nup153 (NM_175749.1,271-289).
ccagggtggctacaaagat

SEQ ID NO: 510681 - DNA, 19 bp, Mus musculus
  siRNA target sequence for Nup153 (NM_175749.1,272-290).
cagggtggctacaaagata

SEQ ID NO: 510682 - DNA, 19 bp, Mus musculus
  siRNA target sequence for Nup153 (NM_175749.1,343-361).
ccaccctggccagaaaata

SEQ ID NO: 510683 - DNA, 19 bp, Mus musculus
  siRNA target sequence for Nup153 (NM_175749.1,427-445).
gaccctgcaggcagtaaca

SEQ ID NO: 510684 - DNA, 19 bp, Mus musculus
  siRNA target sequence for Nup153 (NM_175749.1,465-483).
cagtactgcttcaaattat

SEQ ID NO: 510685 - DNA, 19 bp, Mus musculus
  siRNA target sequence for Nup153 (NM_175749.1,511-529).
catcggagtcatctgaatt

SEQ ID NO: 510686 - DNA, 19 bp, Mus musculus
  siRNA target sequence for Nup153 (NM_175749.1,514-532).
cggagtcatctgaatttct

SEQ ID NO: 510687 - DNA, 19 bp, Mus musculus
  siRNA target sequence for Nup153 (NM_175749.1,516-534).
gagtcatctgaatttctct

SEQ ID NO: 510688 - DNA, 19 bp, Mus musculus
  siRNA target sequence for Nup153 (NM_175749.1,646-664).
gatgatgataacatctcaa

SEQ ID NO: 510689 - DNA, 19 bp, Mus musculus
  siRNA target sequence for Nup153 (NM_175749.1,748-766).
gaagcagaacgttctcatt

SEQ ID NO: 510690 - DNA, 19 bp, Mus musculus
  siRNA target sequence for Nup153 (NM_175749.1,942-960).
gaataaagtacgaagtaca

SEQ ID NO: 510691 - DNA, 19 bp, Mus musculus
  siRNA target sequence for Nup153 (NM_175749.1,1043-1061).
ggcggatactgcagtcatt

SEQ ID NO: 510692 - DNA, 19 bp, Mus musculus
  siRNA target sequence for Nup153 (NM_175749.1,1044-1062).
gcggatactgcagtcatta

SEQ ID NO: 510693 - DNA, 19 bp, Mus musculus
  siRNA target sequence for Nup153 (NM_175749.1,1078-1096).
cctcttgcggatgcaaaaa

SEQ ID NO: 510694 - DNA, 19 bp, Mus musculus
  siRNA target sequence for Nup153 (NM_175749.1,1086-1104).
ggatgcaaaaagaattcca

SEQ ID NO: 510695 - DNA, 19 bp, Mus musculus
  siRNA target sequence for Nup153 (NM_175749.1,1087-1105).
gatgcaaaaagaattccat

SEQ ID NO: 510696 - DNA, 19 bp, Mus musculus
  siRNA target sequence for Nup153 (NM_175749.1,1138-1156).
gataggagtgggatagata

SEQ ID NO: 510697 - DNA, 19 bp, Mus musculus
  siRNA target sequence for Nup153 (NM_175749.1,1143-1161).
gagtgggatagataacaca

SEQ ID NO: 510698 - DNA, 19 bp, Mus musculus
  siRNA target sequence for Nup153 (NM_175749.1,1239-1257).
catagcaacaaatagaact

SEQ ID NO: 510699 - DNA, 19 bp, Mus musculus
  siRNA target sequence for Nup153 (NM_175749.1,1288-1306).
ggtgacttaaggaagacta

SEQ ID NO: 510700 - DNA, 19 bp, Mus musculus
  siRNA target sequence for Nup153 (NM_175749.1,1289-1307).
gtgacttaaggaagactaa

SEQ ID NO: 510701 - DNA, 19 bp, Mus musculus
  siRNA target sequence for Nup153 (NM_175749.1,1293-1311).
cttaaggaagactaatcaa

SEQ ID NO: 510702 - DNA, 19 bp, Mus musculus
  siRNA target sequence for Nup153 (NM_175749.1,1388-1406).
cataccccaatttcagtat

SEQ ID NO: 510703 - DNA, 19 bp, Mus musculus
  siRNA target sequence for Nup153 (NM_175749.1,1392-1410).
ccccaatttcagtattcct

SEQ ID NO: 510704 - DNA, 19 bp, Mus musculus
  siRNA target sequence for Nup153 (NM_175749.1,1487-1505).
ctaaacctccagagaatga

SEQ ID NO: 510705 - DNA, 19 bp, Mus musculus
  siRNA target sequence for Nup153 (NM_175749.1,1519-1537).
ccattgttaccgcaaatct

SEQ ID NO: 510706 - DNA, 19 bp, Mus musculus
  siRNA target sequence for Nup153 (NM_175749.1,1529-1547).
cgcaaatctctctaccaat

SEQ ID NO: 510707 - DNA, 19 bp, Mus musculus
  siRNA target sequence for Nup153 (NM_175749.1,1540-1558).
ctaccaatcagcagttctt

SEQ ID NO: 510708 - DNA, 19 bp, Mus musculus
  siRNA target sequence for Nup153 (NM_175749.1,1669-1687).
ggcagtcctgtgttcacat

SEQ ID NO: 510709 - DNA, 19 bp, Mus musculus
  siRNA target sequence for Nup153 (NM_175749.1,1689-1707).
ctcatctcccattgtaaaa

SEQ ID NO: 510710 - DNA, 19 bp, Mus musculus
  siRNA target sequence for Nup153 (NM_175749.1,1725-1743).
gctccctccagcatctatt

SEQ ID NO: 510711 - DNA, 19 bp, Mus musculus
  siRNA target sequence for Nup153 (NM_175749.1,1728-1746).
ccctccagcatctattgga

SEQ ID NO: 510712 - DNA, 19 bp, Mus musculus
  siRNA target sequence for Nup153 (NM_175749.1,1732-1750).
ccagcatctattggattta

SEQ ID NO: 510713 - DNA, 19 bp, Mus musculus
  siRNA target sequence for Nup153 (NM_175749.1,1777-1795).
gaattttctggctctaata

SEQ ID NO: 510714 - DNA, 19 bp, Mus musculus
  siRNA target sequence for Nup153 (NM_175749.1,1788-1806).
ctctaatagttcttcagaa

SEQ ID NO: 510715 - DNA, 19 bp, Mus musculus
  siRNA target sequence for Nup153 (NM_175749.1,1817-1835).
gtagttcagcccaagatat

SEQ ID NO: 510716 - DNA, 19 bp, Mus musculus
  siRNA target sequence for Nup153 (NM_175749.1,1831-1849).
gatatcactgcagtgaata

SEQ ID NO: 510717 - DNA, 19 bp, Mus musculus
  siRNA target sequence for Nup153 (NM_175749.1,1836-1854).
cactgcagtgaatagttca

SEQ ID NO: 510718 - DNA, 19 bp, Mus musculus
  siRNA target sequence for Nup153 (NM_175749.1,1843-1861).
gtgaatagttcaagctata

SEQ ID NO: 510719 - DNA, 19 bp, Mus musculus
  siRNA target sequence for Nup153 (NM_175749.1,1919-1937).
gaagtgttctagacattct

SEQ ID NO: 510720 - DNA, 19 bp, Mus musculus
  siRNA target sequence for Nup153 (NM_175749.1,1989-2007).
cactaccacaagctcaata

SEQ ID NO: 510721 - DNA, 19 bp, Mus musculus
  siRNA target sequence for Nup153 (NM_175749.1,1994-2012).
ccacaagctcaatagttta

SEQ ID NO: 510722 - DNA, 19 bp, Mus musculus
  siRNA target sequence for Nup153 (NM_175749.1,1995-2013).
cacaagctcaatagtttat

SEQ ID NO: 510723 - DNA, 19 bp, Mus musculus
  siRNA target sequence for Nup153 (NM_175749.1,2001-2019).
ctcaatagtttatacaaga

SEQ ID NO: 510724 - DNA, 19 bp, Mus musculus
  siRNA target sequence for Nup153 (NM_175749.1,2020-2038).
ccagcaataagtacttttt

SEQ ID NO: 510725 - DNA, 19 bp, Mus musculus
  siRNA target sequence for Nup153 (NM_175749.1,2039-2057).
cttctagtggaattgagta

SEQ ID NO: 510726 - DNA, 19 bp, Mus musculus
  siRNA target sequence for Nup153 (NM_175749.1,2053-2071).
gagtatggagaaagtttaa

SEQ ID NO: 510727 - DNA, 19 bp, Mus musculus
  siRNA target sequence for Nup153 (NM_175749.1,2212-2230).
gacaaaccagcctctacat

SEQ ID NO: 510728 - DNA, 19 bp, Mus musculus
  siRNA target sequence for Nup153 (NM_175749.1,2214-2232).
caaaccagcctctacatca

SEQ ID NO: 510729 - DNA, 19 bp, Mus musculus
  siRNA target sequence for Nup153 (NM_175749.1,2269-2287).
ggaacttgggattgtgata

SEQ ID NO: 510730 - DNA, 19 bp, Mus musculus
  siRNA target sequence for Nup153 (NM_175749.1,2277-2295).
ggattgtgatacctgttta

SEQ ID NO: 510731 - DNA, 19 bp, Mus musculus
  siRNA target sequence for Nup153 (NM_175749.1,2307-2325).
gcccgaagcagtaaaatgt

SEQ ID NO: 510732 - DNA, 19 bp, Mus musculus
  siRNA target sequence for Nup153 (NM_175749.1,2309-2327).
ccgaagcagtaaaatgtgt

SEQ ID NO: 510733 - DNA, 19 bp, Mus musculus
  siRNA target sequence for Nup153 (NM_175749.1,2310-2328).
cgaagcagtaaaatgtgta

SEQ ID NO: 510734 - DNA, 19 bp, Mus musculus
  siRNA target sequence for Nup153 (NM_175749.1,2359-2377).
gtgaagcgagcccttacat

SEQ ID NO: 510735 - DNA, 19 bp, Mus musculus
  siRNA target sequence for Nup153 (NM_175749.1,2364-2382).
gcgagcccttacattgaca

SEQ ID NO: 510736 - DNA, 19 bp, Mus musculus
  siRNA target sequence for Nup153 (NM_175749.1,2438-2456).
cactaggatttggagataa

SEQ ID NO: 510737 - DNA, 19 bp, Mus musculus
  siRNA target sequence for Nup153 (NM_175749.1,2603-2621).
ctggaggctgtttaggatt

SEQ ID NO: 510738 - DNA, 19 bp, Mus musculus
  siRNA target sequence for Nup153 (NM_175749.1,2612-2630).
gtttaggattggacaagtt

SEQ ID NO: 510739 - DNA, 19 bp, Mus musculus
  siRNA target sequence for Nup153 (NM_175749.1,2667-2685).
cctagtgcaaaataaagca

SEQ ID NO: 510740 - DNA, 19 bp, Mus musculus
  siRNA target sequence for Nup153 (NM_175749.1,2726-2744).
gcacaaagtctgagtttaa

SEQ ID NO: 510741 - DNA, 19 bp, Mus musculus
  siRNA target sequence for Nup153 (NM_175749.1,2751-2769).
cgggacatcttcatcttta

SEQ ID NO: 510742 - DNA, 19 bp, Mus musculus
  siRNA target sequence for Nup153 (NM_175749.1,2753-2771).
ggacatcttcatctttaaa

SEQ ID NO: 510743 - DNA, 19 bp, Mus musculus
  siRNA target sequence for Nup153 (NM_175749.1,2776-2794).
gcaccctcagccttcaaat

SEQ ID NO: 510744 - DNA, 19 bp, Mus musculus
  siRNA target sequence for Nup153 (NM_175749.1,2818-2836).
gggctttctcaaactttga

SEQ ID NO: 510745 - DNA, 19 bp, Mus musculus
  siRNA target sequence for Nup153 (NM_175749.1,2863-2881).
gatcagggaggattcaaat

SEQ ID NO: 510746 - DNA, 19 bp, Mus musculus
  siRNA target sequence for Nup153 (NM_175749.1,2877-2895).
caaattaggcacttcatct

SEQ ID NO: 510747 - DNA, 19 bp, Mus musculus
  siRNA target sequence for Nup153 (NM_175749.1,2913-2931).
caccatgaatacaaacttt

SEQ ID NO: 510748 - DNA, 19 bp, Mus musculus
  siRNA target sequence for Nup153 (NM_175749.1,2915-2933).
ccatgaatacaaactttaa

SEQ ID NO: 510749 - DNA, 19 bp, Mus musculus
  siRNA target sequence for Nup153 (NM_175749.1,2919-2937).
gaatacaaactttaaattt

SEQ ID NO: 510750 - DNA, 19 bp, Mus musculus
  siRNA target sequence for Nup153 (NM_175749.1,2944-2962).
ccaactggagactttaaat

SEQ ID NO: 510751 - DNA, 19 bp, Mus musculus
  siRNA target sequence for Nup153 (NM_175749.1,2955-2973).
ctttaaatttggagtgtta

SEQ ID NO: 510752 - DNA, 19 bp, Mus musculus
  siRNA target sequence for Nup153 (NM_175749.1,2970-2988).
gttatctgattctaaacct

SEQ ID NO: 510753 - DNA, 19 bp, Mus musculus
  siRNA target sequence for Nup153 (NM_175749.1,3004-3022).
gacaacaagaatgataatt

SEQ ID NO: 510754 - DNA, 19 bp, Mus musculus
  siRNA target sequence for Nup153 (NM_175749.1,3016-3034).
gataattttcagtttggat

SEQ ID NO: 510755 - DNA, 19 bp, Mus musculus
  siRNA target sequence for Nup153 (NM_175749.1,3062-3080).
cttcagctccgtttcagtt

SEQ ID NO: 510756 - DNA, 19 bp, Mus musculus
  siRNA target sequence for Nup153 (NM_175749.1,3078-3096).
gtttggggtatctactctt

SEQ ID NO: 510757 - DNA, 19 bp, Mus musculus
  siRNA target sequence for Nup153 (NM_175749.1,3117-3135).
ggagctgcctaaatcttca

SEQ ID NO: 510758 - DNA, 19 bp, Mus musculus
  siRNA target sequence for Nup153 (NM_175749.1,3150-3168).
ctttggtgcaggtgttaat

SEQ ID NO: 510759 - DNA, 19 bp, Mus musculus
  siRNA target sequence for Nup153 (NM_175749.1,3270-3288).
cacatacaagacaacagaa

SEQ ID NO: 510760 - DNA, 19 bp, Mus musculus
  siRNA target sequence for Nup153 (NM_175749.1,3315-3333).
caagggtgggttcacattt

SEQ ID NO: 510761 - DNA, 19 bp, Mus musculus
  siRNA target sequence for Nup153 (NM_175749.1,3318-3336).
gggtgggttcacatttggt

SEQ ID NO: 510762 - DNA, 19 bp, Mus musculus
  siRNA target sequence for Nup153 (NM_175749.1,3406-3424).
gaacctgttacttctactt

SEQ ID NO: 510763 - DNA, 19 bp, Mus musculus
  siRNA target sequence for Nup153 (NM_175749.1,3573-3591).
gctagccaaggctactttt

SEQ ID NO: 510764 - DNA, 19 bp, Mus musculus
  siRNA target sequence for Nup153 (NM_175749.1,3582-3600).
ggctacttttgcatttgga

SEQ ID NO: 510765 - DNA, 19 bp, Mus musculus
  siRNA target sequence for Nup153 (NM_175749.1,3609-3627).
caatacaacaactgatcaa

SEQ ID NO: 510766 - DNA, 19 bp, Mus musculus
  siRNA target sequence for Nup153 (NM_175749.1,3660-3678).
cagcagttcctctagttca

SEQ ID NO: 510767 - DNA, 19 bp, Mus musculus
  siRNA target sequence for Nup153 (NM_175749.1,3805-3823).
gctgctgaatccagtacat

SEQ ID NO: 510768 - DNA, 19 bp, Mus musculus
  siRNA target sequence for Nup153 (NM_175749.1,3821-3839).
catctcagtctttgctatt

SEQ ID NO: 510769 - DNA, 19 bp, Mus musculus
  siRNA target sequence for Nup153 (NM_175749.1,3906-3924).
gacaggagccagcagtaat

SEQ ID NO: 510770 - DNA, 19 bp, Mus musculus
  siRNA target sequence for Nup153 (NM_175749.1,4037-4055).
ctaaccagactccaacatt

SEQ ID NO: 510771 - DNA, 19 bp, Mus musculus
  siRNA target sequence for Nup153 (NM_175749.1,4041-4059).
ccagactccaacatttgga

SEQ ID NO: 510772 - DNA, 19 bp, Mus musculus
  siRNA target sequence for Nup153 (NM_175749.1,4080-4098).
gcctaacccgccaagcttt

SEQ ID NO: 510773 - DNA, 19 bp, Mus musculus
  siRNA target sequence for Nup153 (NM_175749.1,4099-4117).
ggctctatctcgtcttcaa

SEQ ID NO: 510774 - DNA, 19 bp, Mus musculus
  siRNA target sequence for Nup153 (NM_175749.1,4101-4119).
ctctatctcgtcttcaaca

SEQ ID NO: 510775 - DNA, 19 bp, Mus musculus
  siRNA target sequence for Nup153 (NM_175749.1,4209-4227).
gcctagtcagtctgcattt

SEQ ID NO: 510776 - DNA, 19 bp, Mus musculus
  siRNA target sequence for Nup153 (NM_175749.1,4246-4264).
gccagttcggttttccaat

SEQ ID NO: 510777 - DNA, 19 bp, Mus musculus
  siRNA target sequence for Nup153 (NM_175749.1,4247-4265).
ccagttcggttttccaatt

SEQ ID NO: 510778 - DNA, 19 bp, Mus musculus
  siRNA target sequence for Nup153 (NM_175749.1,4248-4266).
cagttcggttttccaattt

SEQ ID NO: 510779 - DNA, 19 bp, Mus musculus
  siRNA target sequence for Nup153 (NM_175749.1,4267-4285).
ggtagcagcactacgaatt

SEQ ID NO: 510780 - DNA, 19 bp, Mus musculus
  siRNA target sequence for Nup153 (NM_175749.1,4268-4286).
gtagcagcactacgaattt

SEQ ID NO: 510781 - DNA, 19 bp, Mus musculus
  siRNA target sequence for Nup153 (NM_175749.1,4271-4289).
gcagcactacgaatttcaa

SEQ ID NO: 510782 - DNA, 19 bp, Mus musculus
  siRNA target sequence for Nup153 (NM_175749.1,4274-4292).
gcactacgaatttcaactt

SEQ ID NO: 510783 - DNA, 19 bp, Mus musculus
  siRNA target sequence for Nup153 (NM_175749.1,4280-4298).
cgaatttcaacttcacaaa

SEQ ID NO: 510784 - DNA, 19 bp, Mus musculus
  siRNA target sequence for Nup153 (NM_175749.1,4290-4308).
cttcacaaacaataatcca

SEQ ID NO: 510785 - DNA, 19 bp, Mus musculus
  siRNA target sequence for Nup153 (NM_175749.1,4306-4324).
ccatcaggagtgttcacat

SEQ ID NO: 510786 - DNA, 19 bp, Mus musculus
  siRNA target sequence for Nup153 (NM_175749.1,4459-4477).
gtttctggtcgcaagataa

SEQ ID NO: 510787 - DNA, 19 bp, Mus musculus
  siRNA target sequence for Nup153 (NM_175749.1,4483-4501).
gctgttagacgcaagaaat

SEQ ID NO: 510788 - DNA, 19 bp, Mus musculus
  siRNA target sequence for Orc5l (NM_011959.1,128-146).
gtttggagagagacatcat

SEQ ID NO: 510789 - DNA, 19 bp, Mus musculus
  siRNA target sequence for Orc5l (NM_011959.1,190-208).
ggaagacctatgtaacaca

SEQ ID NO: 510790 - DNA, 19 bp, Mus musculus
  siRNA target sequence for Orc5l (NM_011959.1,191-209).
gaagacctatgtaacacaa

SEQ ID NO: 510791 - DNA, 19 bp, Mus musculus
  siRNA target sequence for Orc5l (NM_011959.1,196-214).
cctatgtaacacaaacatt

SEQ ID NO: 510792 - DNA, 19 bp, Mus musculus
  siRNA target sequence for Orc5l (NM_011959.1,231-249).
ctgccgcatgcctttgtga

SEQ ID NO: 510793 - DNA, 19 bp, Mus musculus
  siRNA target sequence for Orc5l (NM_011959.1,233-251).
gccgcatgcctttgtgaat

SEQ ID NO: 510794 - DNA, 19 bp, Mus musculus
  siRNA target sequence for Orc5l (NM_011959.1,234-252).
ccgcatgcctttgtgaatt

SEQ ID NO: 510795 - DNA, 19 bp, Mus musculus
  siRNA target sequence for Orc5l (NM_011959.1,248-266).
gaattgtgttgaatgtttt

SEQ ID NO: 510796 - DNA, 19 bp, Mus musculus
  siRNA target sequence for Orc5l (NM_011959.1,268-286).
cttcgaggctacttttgga

SEQ ID NO: 510797 - DNA, 19 bp, Mus musculus
  siRNA target sequence for Orc5l (NM_011959.1,274-292).
ggctacttttggaacaaat

SEQ ID NO: 510798 - DNA, 19 bp, Mus musculus
  siRNA target sequence for Orc5l (NM_011959.1,299-317).
caagctgagtcatcttaat

SEQ ID NO: 510799 - DNA, 19 bp, Mus musculus
  siRNA target sequence for Orc5l (NM_011959.1,302-320).
gctgagtcatcttaattct

SEQ ID NO: 510800 - DNA, 19 bp, Mus musculus
  siRNA target sequence for Orc5l (NM_011959.1,303-321).
ctgagtcatcttaattctt

SEQ ID NO: 510801 - DNA, 19 bp, Mus musculus
  siRNA target sequence for Orc5l (NM_011959.1,327-345).
gcagggtgttctacagaaa

SEQ ID NO: 510802 - DNA, 19 bp, Mus musculus
  siRNA target sequence for Orc5l (NM_011959.1,342-360).
gaaatgacctgtgaaacat

SEQ ID NO: 510803 - DNA, 19 bp, Mus musculus
  siRNA target sequence for Orc5l (NM_011959.1,413-431).
ggaccagactgtgtatatt

SEQ ID NO: 510804 - DNA, 19 bp, Mus musculus
  siRNA target sequence for Orc5l (NM_011959.1,416-434).
ccagactgtgtatattgtt

SEQ ID NO: 510805 - DNA, 19 bp, Mus musculus
  siRNA target sequence for Orc5l (NM_011959.1,425-443).
gtatattgttctggataaa

SEQ ID NO: 510806 - DNA, 19 bp, Mus musculus
  siRNA target sequence for Orc5l (NM_011959.1,437-455).
ggataaagctgagtatcta

SEQ ID NO: 510807 - DNA, 19 bp, Mus musculus
  siRNA target sequence for Orc5l (NM_011959.1,438-456).
gataaagctgagtatctaa

SEQ ID NO: 510808 - DNA, 19 bp, Mus musculus
  siRNA target sequence for Orc5l (NM_011959.1,489-507).
cttaggctgcaagaattga

SEQ ID NO: 510809 - DNA, 19 bp, Mus musculus
  siRNA target sequence for Orc5l (NM_011959.1,603-621).
cctgactatagcataggaa

SEQ ID NO: 510810 - DNA, 19 bp, Mus musculus
  siRNA target sequence for Orc5l (NM_011959.1,604-622).
ctgactatagcataggaaa

SEQ ID NO: 510811 - DNA, 19 bp, Mus musculus
  siRNA target sequence for Orc5l (NM_011959.1,645-663).
gatcatcctccagagtatt

SEQ ID NO: 510812 - DNA, 19 bp, Mus musculus
  siRNA target sequence for Orc5l (NM_011959.1,677-695).
cgctgcctacattaacatt

SEQ ID NO: 510813 - DNA, 19 bp, Mus musculus
  siRNA target sequence for Orc5l (NM_011959.1,715-733).
ctgtctgtcgggatctgaa

SEQ ID NO: 510814 - DNA, 19 bp, Mus musculus
  siRNA target sequence for Orc5l (NM_011959.1,721-739).
gtcgggatctgaaagaact

SEQ ID NO: 510815 - DNA, 19 bp, Mus musculus
  siRNA target sequence for Orc5l (NM_011959.1,773-791).
ctgtgaacctgtagttaaa

SEQ ID NO: 510816 - DNA, 19 bp, Mus musculus
  siRNA target sequence for Orc5l (NM_011959.1,807-825).
cgtgatactcgcaaactgt

SEQ ID NO: 510817 - DNA, 19 bp, Mus musculus
  siRNA target sequence for Orc5l (NM_011959.1,816-834).
cgcaaactgtggagaaata

SEQ ID NO: 510818 - DNA, 19 bp, Mus musculus
  siRNA target sequence for Orc5l (NM_011959.1,873-891).
ctcagggagatctcaagtt

SEQ ID NO: 510819 - DNA, 19 bp, Mus musculus
  siRNA target sequence for Orc5l (NM_011959.1,892-910).
cccagtgggaaaagttaca

SEQ ID NO: 510820 - DNA, 19 bp, Mus musculus
  siRNA target sequence for Orc5l (NM_011959.1,1002-1020).
gcataccttgcctcttata

SEQ ID NO: 510821 - DNA, 19 bp, Mus musculus
  siRNA target sequence for Orc5l (NM_011959.1,1003-1021).
cataccttgcctcttataa

SEQ ID NO: 510822 - DNA, 19 bp, Mus musculus
  siRNA target sequence for Orc5l (NM_011959.1,1023-1041).
ccagcgagaactgataaga

SEQ ID NO: 510823 - DNA, 19 bp, Mus musculus
  siRNA target sequence for Orc5l (NM_011959.1,1035-1053).
gataagaggttcttcctta

SEQ ID NO: 510824 - DNA, 19 bp, Mus musculus
  siRNA target sequence for Orc5l (NM_011959.1,1140-1158).
ctggacagattattagcaa

SEQ ID NO: 510825 - DNA, 19 bp, Mus musculus
  siRNA target sequence for Orc5l (NM_011959.1,1227-1245).
gtgactctacagctgttaa

SEQ ID NO: 510826 - DNA, 19 bp, Mus musculus
  siRNA target sequence for Orc5l (NM_011959.1,1246-1264).
ccatagttggtcatgaaga

SEQ ID NO: 510827 - DNA, 19 bp, Mus musculus
  siRNA target sequence for Orc5l (NM_011959.1,1255-1273).
gtcatgaagatcaacttaa

SEQ ID NO: 510828 - DNA, 19 bp, Mus musculus
  siRNA target sequence for Orc5l (NM_011959.1,1269-1287).
cttaatgggccaaaataca

SEQ ID NO: 510829 - DNA, 19 bp, Mus musculus
  siRNA target sequence for Orc5l (NM_011959.1,1286-1304).
caaatgcacagtttctcta

SEQ ID NO: 510830 - DNA, 19 bp, Mus musculus
  siRNA target sequence for Orc5l (NM_011959.1,1291-1309).
gcacagtttctctagattt

SEQ ID NO: 510831 - DNA, 19 bp, Mus musculus
  siRNA target sequence for Orc5l (NM_011959.1,1294-1312).
cagtttctctagatttcat

SEQ ID NO: 510832 - DNA, 19 bp, Mus musculus
  siRNA target sequence for Orc5l (NM_011959.1,1296-1314).
gtttctctagatttcatca

SEQ ID NO: 510833 - DNA, 19 bp, Mus musculus
  siRNA target sequence for Orc5l (NM_011959.1,1324-1342).
cacggatggtgaactttga

SEQ ID NO: 510834 - DNA, 19 bp, Mus musculus
  siRNA target sequence for Osp94 (NM_011020.3,196-214).
gaactcgagccattggaaa

SEQ ID NO: 510835 - DNA, 19 bp, Mus musculus
  siRNA target sequence for Osp94 (NM_011020.3,236-254).
cacaaatgtaagaaataca

SEQ ID NO: 510836 - DNA, 19 bp, Mus musculus
  siRNA target sequence for Osp94 (NM_011020.3,272-290).
gcttcatgggcgatcattt

SEQ ID NO: 510837 - DNA, 19 bp, Mus musculus
  siRNA target sequence for Osp94 (NM_011020.3,344-362).
gatgcctaatggaagtaca

SEQ ID NO: 510838 - DNA, 19 bp, Mus musculus
  siRNA target sequence for Osp94 (NM_011020.3,425-443).
gttgctggctaagcttaaa

SEQ ID NO: 510839 - DNA, 19 bp, Mus musculus
  siRNA target sequence for Osp94 (NM_011020.3,546-564).
caggttgcaggcctaaact

SEQ ID NO: 510840 - DNA, 19 bp, Mus musculus
  siRNA target sequence for Osp94 (NM_011020.3,565-583).
gtctgaggctgatgaatga

SEQ ID NO: 510841 - DNA, 19 bp, Mus musculus
  siRNA target sequence for Osp94 (NM_011020.3,600-618).
ctggcatatggaatttata

SEQ ID NO: 510842 - DNA, 19 bp, Mus musculus
  siRNA target sequence for Osp94 (NM_011020.3,648-666).
ccaaggaatgttgtgttta

SEQ ID NO: 510843 - DNA, 19 bp, Mus musculus
  siRNA target sequence for Osp94 (NM_011020.3,780-798).
gctttagtagactacttct

SEQ ID NO: 510844 - DNA, 19 bp, Mus musculus
  siRNA target sequence for Osp94 (NM_011020.3,789-807).
gactacttctgcgatgaat

SEQ ID NO: 510845 - DNA, 19 bp, Mus musculus
  siRNA target sequence for Osp94 (NM_011020.3,850-868).
ccttgttgcggctgtatca

SEQ ID NO: 510846 - DNA, 19 bp, Mus musculus
  siRNA target sequence for Osp94 (NM_011020.3,867-885).
caggagtgtgaaaaactaa

SEQ ID NO: 510847 - DNA, 19 bp, Mus musculus
  siRNA target sequence for Osp94 (NM_011020.3,910-928).
cagaccttcccctgaacat

SEQ ID NO: 510848 - DNA, 19 bp, Mus musculus
  siRNA target sequence for Osp94 (NM_011020.3,941-959).
gaatgaccttgatgtttct

SEQ ID NO: 510849 - DNA, 19 bp, Mus musculus
  siRNA target sequence for Osp94 (NM_011020.3,945-963).
gaccttgatgtttctagta

SEQ ID NO: 510850 - DNA, 19 bp, Mus musculus
  siRNA target sequence for Osp94 (NM_011020.3,951-969).
gatgtttctagtaagatga

SEQ ID NO: 510851 - DNA, 19 bp, Mus musculus
  siRNA target sequence for Osp94 (NM_011020.3,1012-1030).
gggttgaaccacctttaaa

SEQ ID NO: 510852 - DNA, 19 bp, Mus musculus
  siRNA target sequence for Osp94 (NM_011020.3,1013-1031).
ggttgaaccacctttaaaa

SEQ ID NO: 510853 - DNA, 19 bp, Mus musculus
  siRNA target sequence for Osp94 (NM_011020.3,1014-1032).
gttgaaccacctttaaaat

SEQ ID NO: 510854 - DNA, 19 bp, Mus musculus
  siRNA target sequence for Osp94 (NM_011020.3,1033-1051).
cagtaatggatcaagctaa

SEQ ID NO: 510855 - DNA, 19 bp, Mus musculus
  siRNA target sequence for Osp94 (NM_011020.3,1121-1139).
gcaggtgactaggttcttt

SEQ ID NO: 510856 - DNA, 19 bp, Mus musculus
  siRNA target sequence for Osp94 (NM_011020.3,1127-1145).
gactaggttctttctgaaa

SEQ ID NO: 510857 - DNA, 19 bp, Mus musculus
  siRNA target sequence for Osp94 (NM_011020.3,1222-1240).
catttaaagtacgtgaatt

SEQ ID NO: 510858 - DNA, 19 bp, Mus musculus
  siRNA target sequence for Osp94 (NM_011020.3,1230-1248).
gtacgtgaattttccataa

SEQ ID NO: 510859 - DNA, 19 bp, Mus musculus
  siRNA target sequence for Osp94 (NM_011020.3,1373-1391).
gaaggaaccatttgaacta

SEQ ID NO: 510860 - DNA, 19 bp, Mus musculus
  siRNA target sequence for Osp94 (NM_011020.3,1376-1394).
ggaaccatttgaactagaa

SEQ ID NO: 510861 - DNA, 19 bp, Mus musculus
  siRNA target sequence for Osp94 (NM_011020.3,1392-1410).
gaagcattttatactaatt

SEQ ID NO: 510862 - DNA, 19 bp, Mus musculus
  siRNA target sequence for Osp94 (NM_011020.3,1412-1430).
gcatgaagtgccttatcct

SEQ ID NO: 510863 - DNA, 19 bp, Mus musculus
  siRNA target sequence for Osp94 (NM_011020.3,1429-1447).
ctgatccaagaattggaaa

SEQ ID NO: 510864 - DNA, 19 bp, Mus musculus
  siRNA target sequence for Osp94 (NM_011020.3,1438-1456).
gaattggaaacttcactat

SEQ ID NO: 510865 - DNA, 19 bp, Mus musculus
  siRNA target sequence for Osp94 (NM_011020.3,1489-1507).
gttctaaagtaaaagttaa

SEQ ID NO: 510866 - DNA, 19 bp, Mus musculus
  siRNA target sequence for Osp94 (NM_011020.3,1492-1510).
ctaaagtaaaagttaaagt

SEQ ID NO: 510867 - DNA, 19 bp, Mus musculus
  siRNA target sequence for Osp94 (NM_011020.3,1513-1531).
gtattaatatccatggaat

SEQ ID NO: 510868 - DNA, 19 bp, Mus musculus
  siRNA target sequence for Osp94 (NM_011020.3,1541-1559).
ggccagtgcgtcagtaatt

SEQ ID NO: 510869 - DNA, 19 bp, Mus musculus
  siRNA target sequence for Osp94 (NM_011020.3,1543-1561).
ccagtgcgtcagtaattga

SEQ ID NO: 510870 - DNA, 19 bp, Mus musculus
  siRNA target sequence for Osp94 (NM_011020.3,1546-1564).
gtgcgtcagtaattgagaa

SEQ ID NO: 510871 - DNA, 19 bp, Mus musculus
  siRNA target sequence for Osp94 (NM_011020.3,1568-1586).
gaatctggaaggtgatcat

SEQ ID NO: 510872 - DNA, 19 bp, Mus musculus
  siRNA target sequence for Osp94 (NM_011020.3,1574-1592).
ggaaggtgatcataacgat

SEQ ID NO: 510873 - DNA, 19 bp, Mus musculus
  siRNA target sequence for Osp94 (NM_011020.3,1669-1687).
gaggtcatcagaaatgtca

SEQ ID NO: 510874 - DNA, 19 bp, Mus musculus
  siRNA target sequence for Osp94 (NM_011020.3,1757-1775).
gcaagatcgcataaatcaa

SEQ ID NO: 510875 - DNA, 19 bp, Mus musculus
  siRNA target sequence for Osp94 (NM_011020.3,1758-1776).
caagatcgcataaatcaaa

SEQ ID NO: 510876 - DNA, 19 bp, Mus musculus
  siRNA target sequence for Osp94 (NM_011020.3,1761-1779).
gatcgcataaatcaaacta

SEQ ID NO: 510877 - DNA, 19 bp, Mus musculus
  siRNA target sequence for Osp94 (NM_011020.3,1764-1782).
cgcataaatcaaactatta

SEQ ID NO: 510878 - DNA, 19 bp, Mus musculus
  siRNA target sequence for Osp94 (NM_011020.3,1765-1783).
gcataaatcaaactattaa

SEQ ID NO: 510879 - DNA, 19 bp, Mus musculus
  siRNA target sequence for Osp94 (NM_011020.3,1766-1784).
cataaatcaaactattaaa

SEQ ID NO: 510880 - DNA, 19 bp, Mus musculus
  siRNA target sequence for Osp94 (NM_011020.3,1892-1910).
gcaggataaattagagaaa

SEQ ID NO: 510881 - DNA, 19 bp, Mus musculus
  siRNA target sequence for Osp94 (NM_011020.3,1938-1956).
gaagaatacgtctatgatt

SEQ ID NO: 510882 - DNA, 19 bp, Mus musculus
  siRNA target sequence for Osp94 (NM_011020.3,1941-1959).
gaatacgtctatgatttca

SEQ ID NO: 510883 - DNA, 19 bp, Mus musculus
  siRNA target sequence for Osp94 (NM_011020.3,1971-1989).
ggcactgtctacgaaaagt

SEQ ID NO: 510884 - DNA, 19 bp, Mus musculus
  siRNA target sequence for Osp94 (NM_011020.3,1972-1990).
gcactgtctacgaaaagtt

SEQ ID NO: 510885 - DNA, 19 bp, Mus musculus
  siRNA target sequence for Osp94 (NM_011020.3,1977-1995).
gtctacgaaaagttcatca

SEQ ID NO: 510886 - DNA, 19 bp, Mus musculus
  siRNA target sequence for Osp94 (NM_011020.3,1994-2012).
cactccagaagacatgaat

SEQ ID NO: 510887 - DNA, 19 bp, Mus musculus
  siRNA target sequence for Osp94 (NM_011020.3,1996-2014).
ctccagaagacatgaataa

SEQ ID NO: 510888 - DNA, 19 bp, Mus musculus
  siRNA target sequence for Osp94 (NM_011020.3,2067-2085).
gaccagcctaaacaagttt

SEQ ID NO: 510889 - DNA, 19 bp, Mus musculus
  siRNA target sequence for Osp94 (NM_011020.3,2069-2087).
ccagcctaaacaagtttat

SEQ ID NO: 510890 - DNA, 19 bp, Mus musculus
  siRNA target sequence for Osp94 (NM_011020.3,2090-2108).
ggataggctgcaggaatta

SEQ ID NO: 510891 - DNA, 19 bp, Mus musculus
  siRNA target sequence for Osp94 (NM_011020.3,2091-2109).
gataggctgcaggaattaa

SEQ ID NO: 510892 - DNA, 19 bp, Mus musculus
  siRNA target sequence for Osp94 (NM_011020.3,2156-2174).
gagaccaaaagctttaaat

SEQ ID NO: 510893 - DNA, 19 bp, Mus musculus
  siRNA target sequence for Osp94 (NM_011020.3,2158-2176).
gaccaaaagctttaaatga

SEQ ID NO: 510894 - DNA, 19 bp, Mus musculus
  siRNA target sequence for Osp94 (NM_011020.3,2160-2178).
ccaaaagctttaaatgact

SEQ ID NO: 510895 - DNA, 19 bp, Mus musculus
  siRNA target sequence for Osp94 (NM_011020.3,2231-2249).
ggatgaaagatatgatcat

SEQ ID NO: 510896 - DNA, 19 bp, Mus musculus
  siRNA target sequence for Osp94 (NM_011020.3,2306-2324).
gctaaacagtaagatgaat

SEQ ID NO: 510897 - DNA, 19 bp, Mus musculus
  siRNA target sequence for Osp94 (NM_011020.3,2326-2344).
cacagaataaattaagtct

SEQ ID NO: 510898 - DNA, 19 bp, Mus musculus
  siRNA target sequence for Osp94 (NM_011020.3,2347-2365).
ctcaagatcccgtggtaaa

SEQ ID NO: 510899 - DNA, 19 bp, Mus musculus
  siRNA target sequence for Osp94 (NM_011020.3,2358-2376).
gtggtaaaagtgtcagaaa

SEQ ID NO: 510900 - DNA, 19 bp, Mus musculus
  siRNA target sequence for Osp94 (NM_011020.3,2360-2378).
ggtaaaagtgtcagaaata

SEQ ID NO: 510901 - DNA, 19 bp, Mus musculus
  siRNA target sequence for Osp94 (NM_011020.3,2394-2412).
gaactggataatttctgta

SEQ ID NO: 510902 - DNA, 19 bp, Mus musculus
  siRNA target sequence for Osp94 (NM_011020.3,2408-2426).
ctgtaaccccatcgtttat

SEQ ID NO: 510903 - DNA, 19 bp, Mus musculus
  siRNA target sequence for Osp94 (NM_011020.3,2410-2428).
gtaaccccatcgtttataa

SEQ ID NO: 510904 - DNA, 19 bp, Mus musculus
  siRNA target sequence for P2rx1 (NM_008771.2,324-342).
gggtgtttgtctatgaaaa

SEQ ID NO: 510905 - DNA, 19 bp, Mus musculus
  siRNA target sequence for P2rx1 (NM_008771.2,440-458).
gacgtggctgactatgtct

SEQ ID NO: 510906 - DNA, 19 bp, Mus musculus
  siRNA target sequence for P2rx1 (NM_008771.2,473-491).
gacagctcctttgtagtta

SEQ ID NO: 510907 - DNA, 19 bp, Mus musculus
  siRNA target sequence for P2rx1 (NM_008771.2,625-643).
caactgtgtgcccttcaat

SEQ ID NO: 510908 - DNA, 19 bp, Mus musculus
  siRNA target sequence for P2rx1 (NM_008771.2,652-670).
gaagacgtgtgagatcttt

SEQ ID NO: 510909 - DNA, 19 bp, Mus musculus
  siRNA target sequence for P2rx1 (NM_008771.2,834-852).
gcctctaccacaagattct

SEQ ID NO: 510910 - DNA, 19 bp, Mus musculus
  siRNA target sequence for P2rx1 (NM_008771.2,1114-1132).
gtttgggattcgctttgat

SEQ ID NO: 510911 - DNA, 19 bp, Mus musculus
  siRNA target sequence for P2rx1 (NM_008771.2,1119-1137).
ggattcgctttgatatcct

SEQ ID NO: 510912 - DNA, 19 bp, Mus musculus
  siRNA target sequence for P2rx1 (NM_008771.2,1120-1138).
gattcgctttgatatcctt

SEQ ID NO: 510913 - DNA, 19 bp, Mus musculus
  siRNA target sequence for P2rx1 (NM_008771.2,1165-1183).
catcatccctactatgact

SEQ ID NO: 510914 - DNA, 19 bp, Mus musculus
  siRNA target sequence for P2rx1 (NM_008771.2,1192-1210).
ctctgggattggcatcttt

SEQ ID NO: 510915 - DNA, 19 bp, Mus musculus
  siRNA target sequence for P2rx1 (NM_008771.2,1256-1274).
cctaagaggcactactaca

SEQ ID NO: 510916 - DNA, 19 bp, Mus musculus
  siRNA target sequence for P2rx2 (NM_153400.2,437-455).
gtcttcatcgtgcagaaaa

SEQ ID NO: 510917 - DNA, 19 bp, Mus musculus
  siRNA target sequence for P2rx2 (NM_153400.2,514-532).
caccatgtcggaacacaaa

SEQ ID NO: 510918 - DNA, 19 bp, Mus musculus
  siRNA target sequence for P2rx2 (NM_153400.2,538-556).
ggacgtggaggaatacgta

SEQ ID NO: 510919 - DNA, 19 bp, Mus musculus
  siRNA target sequence for P2rx2 (NM_153400.2,660-678).
ctacctgccatttagatga

SEQ ID NO: 510920 - DNA, 19 bp, Mus musculus
  siRNA target sequence for P2rx2 (NM_153400.2,729-747).
gacgctgtgtaccctatta

SEQ ID NO: 510921 - DNA, 19 bp, Mus musculus
  siRNA target sequence for P2rx2 (NM_153400.2,800-818).
gggacttctgaaaaccatt

SEQ ID NO: 510922 - DNA, 19 bp, Mus musculus
  siRNA target sequence for P2rx2 (NM_153400.2,801-819).
ggacttctgaaaaccattt

SEQ ID NO: 510923 - DNA, 19 bp, Mus musculus
  siRNA target sequence for P2rx2 (NM_153400.2,825-843).
gtaaaatggccccaaattt

SEQ ID NO: 510924 - DNA, 19 bp, Mus musculus
  siRNA target sequence for P2rx2 (NM_153400.2,886-904).
gttctccaagggcaacatt

SEQ ID NO: 510925 - DNA, 19 bp, Mus musculus
  siRNA target sequence for P2rx2 (NM_153400.2,949-967).
ggactctgatccatactgt

SEQ ID NO: 510926 - DNA, 19 bp, Mus musculus
  siRNA target sequence for P2rx2 (NM_153400.2,959-977).
ccatactgtcccatcttca

SEQ ID NO: 510927 - DNA, 19 bp, Mus musculus
  siRNA target sequence for P2rx2 (NM_153400.2,978-996).
ggctgggcttcattgtaga

SEQ ID NO: 510928 - DNA, 19 bp, Mus musculus
  siRNA target sequence for P2rx2 (NM_153400.2,1070-1088).
gacctggacttgtctgaat

SEQ ID NO: 510929 - DNA, 19 bp, Mus musculus
  siRNA target sequence for P2rx2 (NM_153400.2,1093-1111).
gtgcaaccccaaatattct

SEQ ID NO: 510930 - DNA, 19 bp, Mus musculus
  siRNA target sequence for P2rx2 (NM_153400.2,1119-1137).
ggctcgaccccaagtatga

SEQ ID NO: 510931 - DNA, 19 bp, Mus musculus
  siRNA target sequence for P2rx2 (NM_153400.2,1142-1160).
gcctcttcaggctacaact

SEQ ID NO: 510932 - DNA, 19 bp, Mus musculus
  siRNA target sequence for P2rx2 (NM_153400.2,1201-1219).
cactcgaactctcatcaaa

SEQ ID NO: 510933 - DNA, 19 bp, Mus musculus
  siRNA target sequence for P2rx2 (NM_153400.2,1221-1239).
cctatgggattcgaattga

SEQ ID NO: 510934 - DNA, 19 bp, Mus musculus
  siRNA target sequence for P2rx2 (NM_153400.2,1227-1245).
ggattcgaattgacgttat

SEQ ID NO: 510935 - DNA, 19 bp, Mus musculus
  siRNA target sequence for P2rx2 (NM_153400.2,1228-1246).
gattcgaattgacgttatt

SEQ ID NO: 510936 - DNA, 19 bp, Mus musculus
  siRNA target sequence for P2rx2 (NM_153400.2,1351-1369).
gttaacgttcatgaacaaa

SEQ ID NO: 510937 - DNA, 19 bp, Mus musculus
  siRNA target sequence for P2rx2 (NM_153400.2,1412-1430).
ccaaggcacccctcaagta

SEQ ID NO: 510938 - DNA, 19 bp, Mus musculus
  siRNA target sequence for P2rx2 (NM_153400.2,1683-1701).
ccacggaccccaaaggttt

SEQ ID NO: 510939 - DNA, 19 bp, Mus musculus
  siRNA target sequence for P2rx3 (NM_145526.1,250-268).
ggaccattgggatcatcaa

SEQ ID NO: 510940 - DNA, 19 bp, Mus musculus
  siRNA target sequence for P2rx3 (NM_145526.1,273-291).
gccgttcagctgctgatta

SEQ ID NO: 510941 - DNA, 19 bp, Mus musculus
  siRNA target sequence for P2rx3 (NM_145526.1,342-360).
cgggacacggccattgagt

SEQ ID NO: 510942 - DNA, 19 bp, Mus musculus
  siRNA target sequence for P2rx3 (NM_145526.1,357-375).
gagtcctcagtagtaacaa

SEQ ID NO: 510943 - DNA, 19 bp, Mus musculus
  siRNA target sequence for P2rx3 (NM_145526.1,414-432).
gatgtgtcggattatgtga

SEQ ID NO: 510944 - DNA, 19 bp, Mus musculus
  siRNA target sequence for P2rx3 (NM_145526.1,469-487).
ccaaaatgatcgttactga

SEQ ID NO: 510945 - DNA, 19 bp, Mus musculus
  siRNA target sequence for P2rx3 (NM_145526.1,476-494).
gatcgttactgaaaatcaa

SEQ ID NO: 510946 - DNA, 19 bp, Mus musculus
  siRNA target sequence for P2rx3 (NM_145526.1,691-709).
ccgagaacttcaccatttt

SEQ ID NO: 510947 - DNA, 19 bp, Mus musculus
  siRNA target sequence for P2rx3 (NM_145526.1,727-745).
gtttccctctcttcaactt

SEQ ID NO: 510948 - DNA, 19 bp, Mus musculus
  siRNA target sequence for P2rx3 (NM_145526.1,771-789).
ctcaccgacaaggacataa

SEQ ID NO: 510949 - DNA, 19 bp, Mus musculus
  siRNA target sequence for P2rx3 (NM_145526.1,838-856).
gggtaggggacgtggttaa

SEQ ID NO: 510950 - DNA, 19 bp, Mus musculus
  siRNA target sequence for P2rx3 (NM_145526.1,840-858).
gtaggggacgtggttaagt

SEQ ID NO: 510951 - DNA, 19 bp, Mus musculus
  siRNA target sequence for P2rx3 (NM_145526.1,898-916).
gagttctgggcattaagat

SEQ ID NO: 510952 - DNA, 19 bp, Mus musculus
  siRNA target sequence for P2rx3 (NM_145526.1,950-968).
ccagtgcattcccaaatat

SEQ ID NO: 510953 - DNA, 19 bp, Mus musculus
  siRNA target sequence for P2rx3 (NM_145526.1,951-969).
cagtgcattcccaaatatt

SEQ ID NO: 510954 - DNA, 19 bp, Mus musculus
  siRNA target sequence for P2rx3 (NM_145526.1,955-973).
gcattcccaaatattcctt

SEQ ID NO: 510955 - DNA, 19 bp, Mus musculus
  siRNA target sequence for P2rx3 (NM_145526.1,1008-1026).
gtttcccctggctacaact

SEQ ID NO: 510956 - DNA, 19 bp, Mus musculus
  siRNA target sequence for P2rx4 (NM_011026.1,108-126).
gtaaagtggggctcatgaa

SEQ ID NO: 510957 - DNA, 19 bp, Mus musculus
  siRNA target sequence for P2rx4 (NM_011026.1,317-335).
gaaaactccctcttcatca

SEQ ID NO: 510958 - DNA, 19 bp, Mus musculus
  siRNA target sequence for P2rx4 (NM_011026.1,370-388).
gggtacctgtccagagatt

SEQ ID NO: 510959 - DNA, 19 bp, Mus musculus
  siRNA target sequence for P2rx4 (NM_011026.1,378-396).
gtccagagattcctgataa

SEQ ID NO: 510960 - DNA, 19 bp, Mus musculus
  siRNA target sequence for P2rx4 (NM_011026.1,380-398).
ccagagattcctgataaga

SEQ ID NO: 510961 - DNA, 19 bp, Mus musculus
  siRNA target sequence for P2rx4 (NM_011026.1,545-563).
ggtgtgccaacgaggaata

SEQ ID NO: 510962 - DNA, 19 bp, Mus musculus
  siRNA target sequence for P2rx4 (NM_011026.1,546-564).
gtgtgccaacgaggaatat

SEQ ID NO: 510963 - DNA, 19 bp, Mus musculus
  siRNA target sequence for P2rx4 (NM_011026.1,559-577).
gaatatcctccccaacatt

SEQ ID NO: 510964 - DNA, 19 bp, Mus musculus
  siRNA target sequence for P2rx4 (NM_011026.1,589-607).
cctcaagtcgtgcatttat

SEQ ID NO: 510965 - DNA, 19 bp, Mus musculus
  siRNA target sequence for P2rx4 (NM_011026.1,592-610).
caagtcgtgcatttataat

SEQ ID NO: 510966 - DNA, 19 bp, Mus musculus
  siRNA target sequence for P2rx4 (NM_011026.1,811-829).
cgtgtctcctggctacaat

SEQ ID NO: 510967 - DNA, 19 bp, Mus musculus
  siRNA target sequence for P2rx4 (NM_011026.1,1013-1031).
gtcatagtcctctactgta

SEQ ID NO: 510968 - DNA, 19 bp, Mus musculus
  siRNA target sequence for P2rx4 (NM_011026.1,1029-1047).
gtatgaagaagagatacta

SEQ ID NO: 510969 - DNA, 19 bp, Mus musculus
  siRNA target sequence for P2rx4 (NM_011026.1,1048-1066).
ctaccgggacaagaaatat

SEQ ID NO: 510970 - DNA, 19 bp, Mus musculus
  siRNA target sequence for P2rx4 (NM_011026.1,1053-1071).
gggacaagaaatataagta

SEQ ID NO: 510971 - DNA, 19 bp, Mus musculus
  siRNA target sequence for P2rx5 (NM_033321.1,189-207).
ccatcctgttgtacttact

SEQ ID NO: 510972 - DNA, 19 bp, Mus musculus
  siRNA target sequence for P2rx5 (NM_033321.1,193-211).
cctgttgtacttactcata

SEQ ID NO: 510973 - DNA, 19 bp, Mus musculus
  siRNA target sequence for P2rx5 (NM_033321.1,194-212).
ctgttgtacttactcatat

SEQ ID NO: 510974 - DNA, 19 bp, Mus musculus
  siRNA target sequence for P2rx5 (NM_033321.1,208-226).
catatgggtgtttctgata

SEQ ID NO: 510975 - DNA, 19 bp, Mus musculus
  siRNA target sequence for P2rx5 (NM_033321.1,357-375).
ctcagggggagaacgtttt

SEQ ID NO: 510976 - DNA, 19 bp, Mus musculus
  siRNA target sequence for P2rx5 (NM_033321.1,481-499).
cgctggggagtctgttgta

SEQ ID NO: 510977 - DNA, 19 bp, Mus musculus
  siRNA target sequence for P2rx5 (NM_033321.1,500-518).
gcgggacacggactgaaaa

SEQ ID NO: 510978 - DNA, 19 bp, Mus musculus
  siRNA target sequence for P2rx5 (NM_033321.1,502-520).
gggacacggactgaaaact

SEQ ID NO: 510979 - DNA, 19 bp, Mus musculus
  siRNA target sequence for P2rx5 (NM_033321.1,626-644).
gcagaaggcttcaccattt

SEQ ID NO: 510980 - DNA, 19 bp, Mus musculus
  siRNA target sequence for P2rx5 (NM_033321.1,629-647).
gaaggcttcaccattttca

SEQ ID NO: 510981 - DNA, 19 bp, Mus musculus
  siRNA target sequence for P2rx5 (NM_033321.1,632-650).
ggcttcaccattttcataa

SEQ ID NO: 510982 - DNA, 19 bp, Mus musculus
  siRNA target sequence for P2rx5 (NM_033321.1,697-715).
gctagaaacaggcaacaaa

SEQ ID NO: 510983 - DNA, 19 bp, Mus musculus
  siRNA target sequence for P2rx5 (NM_033321.1,701-719).
gaaacaggcaacaaacatt

SEQ ID NO: 510984 - DNA, 19 bp, Mus musculus
  siRNA target sequence for P2rx5 (NM_033321.1,820-838).
cctgaagggcggtgtgata

SEQ ID NO: 510985 - DNA, 19 bp, Mus musculus
  siRNA target sequence for P2rx5 (NM_033321.1,835-853).
gataggaatccacattgaa

SEQ ID NO: 510986 - DNA, 19 bp, Mus musculus
  siRNA target sequence for P2rx5 (NM_033321.1,859-877).
ctgtgaccttgataaagct

SEQ ID NO: 510987 - DNA, 19 bp, Mus musculus
  siRNA target sequence for P2rx5 (NM_033321.1,886-904).
ctgcaacccacactattat

SEQ ID NO: 510988 - DNA, 19 bp, Mus musculus
  siRNA target sequence for P2rx5 (NM_033321.1,911-929).
cgtctggacaacaaacaca

SEQ ID NO: 510989 - DNA, 19 bp, Mus musculus
  siRNA target sequence for P2rx5 (NM_033321.1,997-1015).
gttccgtgacctgatgaaa

SEQ ID NO: 510990 - DNA, 19 bp, Mus musculus
  siRNA target sequence for P2rx5 (NM_033321.1,1001-1019).
cgtgacctgatgaaagcat

SEQ ID NO: 510991 - DNA, 19 bp, Mus musculus
  siRNA target sequence for P2rx5 (NM_033321.1,1027-1045).
ccgctttgatgtgatagtt

SEQ ID NO: 510992 - DNA, 19 bp, Mus musculus
  siRNA target sequence for P2rx5 (NM_033321.1,1028-1046).
cgctttgatgtgatagtta

SEQ ID NO: 510993 - DNA, 19 bp, Mus musculus
  siRNA target sequence for P2rx5 (NM_033321.1,1029-1047).
gctttgatgtgatagttaa

SEQ ID NO: 510994 - DNA, 19 bp, Mus musculus
  siRNA target sequence for P2rx5 (NM_033321.1,1049-1067).
ggcaaggcgggaaaattca

SEQ ID NO: 510995 - DNA, 19 bp, Mus musculus
  siRNA target sequence for P2rx5 (NM_033321.1,1134-1152).
gtgacctggtacttatcta

SEQ ID NO: 510996 - DNA, 19 bp, Mus musculus
  siRNA target sequence for P2rx5 (NM_033321.1,1275-1293).
cactggagagggttcatca

SEQ ID NO: 510997 - DNA, 19 bp, Mus musculus
  siRNA target sequence for P2rx7 (NM_011027.1,25-43).
gcagctggaacgatgtctt

SEQ ID NO: 510998 - DNA, 19 bp, Mus musculus
  siRNA target sequence for P2rx7 (NM_011027.1,69-87).
cggatccagagcacgaatt

SEQ ID NO: 510999 - DNA, 19 bp, Mus musculus
  siRNA target sequence for P2rx7 (NM_011027.1,70-88).
ggatccagagcacgaatta

SEQ ID NO: 511000 - DNA, 19 bp, Mus musculus
  siRNA target sequence for P2rx7 (NM_011027.1,71-89).
gatccagagcacgaattat

SEQ ID NO: 511001 - DNA, 19 bp, Mus musculus
  siRNA target sequence for P2rx7 (NM_011027.1,111-129).
cacatgatcgtcttttcct

SEQ ID NO: 511002 - DNA, 19 bp, Mus musculus
  siRNA target sequence for P2rx7 (NM_011027.1,122-140).
cttttcctacattagcttt

SEQ ID NO: 511003 - DNA, 19 bp, Mus musculus
  siRNA target sequence for P2rx7 (NM_011027.1,127-145).
cctacattagctttgcttt

SEQ ID NO: 511004 - DNA, 19 bp, Mus musculus
  siRNA target sequence for P2rx7 (NM_011027.1,242-260).
gggtggggtgacgaagtta

SEQ ID NO: 511005 - DNA, 19 bp, Mus musculus
  siRNA target sequence for P2rx7 (NM_011027.1,298-316).
ctttgcaggggaactcatt

SEQ ID NO: 511006 - DNA, 19 bp, Mus musculus
  siRNA target sequence for P2rx7 (NM_011027.1,307-325).
ggaactcattctttgtcat

SEQ ID NO: 511007 - DNA, 19 bp, Mus musculus
  siRNA target sequence for P2rx7 (NM_011027.1,313-331).
cattctttgtcatgacaaa

SEQ ID NO: 511008 - DNA, 19 bp, Mus musculus
  siRNA target sequence for P2rx7 (NM_011027.1,321-339).
gtcatgacaaactatgtca

SEQ ID NO: 511009 - DNA, 19 bp, Mus musculus
  siRNA target sequence for P2rx7 (NM_011027.1,359-377).
gacgctgtgtcctgagtat

SEQ ID NO: 511010 - DNA, 19 bp, Mus musculus
  siRNA target sequence for P2rx7 (NM_011027.1,400-418).
cttctgaccggcgttgtaa

SEQ ID NO: 511011 - DNA, 19 bp, Mus musculus
  siRNA target sequence for P2rx7 (NM_011027.1,460-478).
gcaggtgtgttccatatga

SEQ ID NO: 511012 - DNA, 19 bp, Mus musculus
  siRNA target sequence for P2rx7 (NM_011027.1,463-481).
ggtgtgttccatatgacaa

SEQ ID NO: 511013 - DNA, 19 bp, Mus musculus
  siRNA target sequence for P2rx7 (NM_011027.1,575-593).
caccgtactcatcaagaat

SEQ ID NO: 511014 - DNA, 19 bp, Mus musculus
  siRNA target sequence for P2rx7 (NM_011027.1,647-665).
gaacggctcttgtaccttt

SEQ ID NO: 511015 - DNA, 19 bp, Mus musculus
  siRNA target sequence for P2rx7 (NM_011027.1,878-896).
cggctacaacttcagatat

SEQ ID NO: 511016 - DNA, 19 bp, Mus musculus
  siRNA target sequence for P2rx7 (NM_011027.1,892-910).
gatatgccaagtactataa

SEQ ID NO: 511017 - DNA, 19 bp, Mus musculus
  siRNA target sequence for P2rx7 (NM_011027.1,902-920).
gtactataaggagaacaat

SEQ ID NO: 511018 - DNA, 19 bp, Mus musculus
  siRNA target sequence for P2rx7 (NM_011027.1,924-942).
gaaaagcggacgttgatca

SEQ ID NO: 511019 - DNA, 19 bp, Mus musculus
  siRNA target sequence for P2rx7 (NM_011027.1,1008-1026).
ctggttgtatacattggat

SEQ ID NO: 511020 - DNA, 19 bp, Mus musculus
  siRNA target sequence for P2rx7 (NM_011027.1,1065-1083).
gacttgctcatcaacacat

SEQ ID NO: 511021 - DNA, 19 bp, Mus musculus
  siRNA target sequence for P2rx7 (NM_011027.1,1107-1125).
ggggtttacccctactgta

SEQ ID NO: 511022 - DNA, 19 bp, Mus musculus
  siRNA target sequence for P2rx7 (NM_011027.1,1108-1126).
gggtttacccctactgtaa

SEQ ID NO: 511023 - DNA, 19 bp, Mus musculus
  siRNA target sequence for P2rx7 (NM_011027.1,1110-1128).
gtttacccctactgtaagt

SEQ ID NO: 511024 - DNA, 19 bp, Mus musculus
  siRNA target sequence for P2rx7 (NM_011027.1,1144-1162).
cagtgaacgagtattacta

SEQ ID NO: 511025 - DNA, 19 bp, Mus musculus
  siRNA target sequence for P2rx7 (NM_011027.1,1146-1164).
gtgaacgagtattactaca

SEQ ID NO: 511026 - DNA, 19 bp, Mus musculus
  siRNA target sequence for P2rx7 (NM_011027.1,1192-1210).
ccaagccgacgttgaagta

SEQ ID NO: 511027 - DNA, 19 bp, Mus musculus
  siRNA target sequence for P2rx7 (NM_011027.1,1193-1211).
caagccgacgttgaagtat

SEQ ID NO: 511028 - DNA, 19 bp, Mus musculus
  siRNA target sequence for P2rx7 (NM_011027.1,1197-1215).
ccgacgttgaagtatgtgt

SEQ ID NO: 511029 - DNA, 19 bp, Mus musculus
  siRNA target sequence for P2rx7 (NM_011027.1,1264-1282).
ggaaaagtctgcaagttgt

SEQ ID NO: 511030 - DNA, 19 bp, Mus musculus
  siRNA target sequence for P2rx7 (NM_011027.1,1369-1387).
ctggacaatctgaggaaat

SEQ ID NO: 511031 - DNA, 19 bp, Mus musculus
  siRNA target sequence for P2rx7 (NM_011027.1,1372-1390).
gacaatctgaggaaattca

SEQ ID NO: 511032 - DNA, 19 bp, Mus musculus
  siRNA target sequence for P2rxl1 (NM_011028.1,79-97).
gggggtttctggattacaa

SEQ ID NO: 511033 - DNA, 19 bp, Mus musculus
  siRNA target sequence for P2rxl1 (NM_011028.1,90-108).
gattacaagacggagaaat

SEQ ID NO: 511034 - DNA, 19 bp, Mus musculus
  siRNA target sequence for P2rxl1 (NM_011028.1,241-259).
ctgtcatcaccaaactcaa

SEQ ID NO: 511035 - DNA, 19 bp, Mus musculus
  siRNA target sequence for P2rxl1 (NM_011028.1,472-490).
catacagccatggcataaa

SEQ ID NO: 511036 - DNA, 19 bp, Mus musculus
  siRNA target sequence for P2rxl1 (NM_011028.1,688-706).
catatttcaagcattgtct

SEQ ID NO: 511037 - DNA, 19 bp, Mus musculus
  siRNA target sequence for P2rxl1 (NM_011028.1,1124-1142).
ctactggagaaccaaatat

SEQ ID NO: 511038 - DNA, 19 bp, Mus musculus
  siRNA target sequence for Pak1 (NM_011035.1,194-212).
caaataacggcgtagacat

SEQ ID NO: 511039 - DNA, 19 bp, Mus musculus
  siRNA target sequence for Pak1 (NM_011035.1,226-244).
ccagcccctccgatgagaa

SEQ ID NO: 511040 - DNA, 19 bp, Mus musculus
  siRNA target sequence for Pak1 (NM_011035.1,227-245).
cagcccctccgatgagaaa

SEQ ID NO: 511041 - DNA, 19 bp, Mus musculus
  siRNA target sequence for Pak1 (NM_011035.1,339-357).
gaaggaccggttttatcga

SEQ ID NO: 511042 - DNA, 19 bp, Mus musculus
  siRNA target sequence for Pak1 (NM_011035.1,348-366).
gttttatcgatccatctta

SEQ ID NO: 511043 - DNA, 19 bp, Mus musculus
  siRNA target sequence for Pak1 (NM_011035.1,360-378).
catcttacctggagataaa

SEQ ID NO: 511044 - DNA, 19 bp, Mus musculus
  siRNA target sequence for Pak1 (NM_011035.1,363-381).
cttacctggagataaaaca

SEQ ID NO: 511045 - DNA, 19 bp, Mus musculus
  siRNA target sequence for Pak1 (NM_011035.1,399-417).
ggagcgaccagagatttct

SEQ ID NO: 511046 - DNA, 19 bp, Mus musculus
  siRNA target sequence for Pak1 (NM_011035.1,508-526).
cttcaaacatcaaatatca

SEQ ID NO: 511047 - DNA, 19 bp, Mus musculus
  siRNA target sequence for Pak1 (NM_011035.1,633-651).
gtcagctgaagattataat

SEQ ID NO: 511048 - DNA, 19 bp, Mus musculus
  siRNA target sequence for Pak1 (NM_011035.1,637-655).
gctgaagattataattctt

SEQ ID NO: 511049 - DNA, 19 bp, Mus musculus
  siRNA target sequence for Pak1 (NM_011035.1,643-661).
gattataattcttctaaca

SEQ ID NO: 511050 - DNA, 19 bp, Mus musculus
  siRNA target sequence for Pak1 (NM_011035.1,653-671).
cttctaacactttgaatgt

SEQ ID NO: 511051 - DNA, 19 bp, Mus musculus
  siRNA target sequence for Pak1 (NM_011035.1,766-784).
cgcccagaacacacaaaat

SEQ ID NO: 511052 - DNA, 19 bp, Mus musculus
  siRNA target sequence for Pak1 (NM_011035.1,772-790).
gaacacacaaaatctgtat

SEQ ID NO: 511053 - DNA, 19 bp, Mus musculus
  siRNA target sequence for Pak1 (NM_011035.1,894-912).
gacccggaacacggaaaaa

SEQ ID NO: 511054 - DNA, 19 bp, Mus musculus
  siRNA target sequence for Pak1 (NM_011035.1,898-916).
cggaacacggaaaaacaga

SEQ ID NO: 511055 - DNA, 19 bp, Mus musculus
  siRNA target sequence for Pak1 (NM_011035.1,933-951).
gtctgatgaggagatctta

SEQ ID NO: 511056 - DNA, 19 bp, Mus musculus
  siRNA target sequence for Pak1 (NM_011035.1,1068-1086).
gcaggaggtggccattaaa

SEQ ID NO: 511057 - DNA, 19 bp, Mus musculus
  siRNA target sequence for Pak1 (NM_011035.1,1077-1095).
ggccattaaacagatgaat

SEQ ID NO: 511058 - DNA, 19 bp, Mus musculus
  siRNA target sequence for Pak1 (NM_011035.1,1108-1126).
ccgaagaaagagctgatta

SEQ ID NO: 511059 - DNA, 19 bp, Mus musculus
  siRNA target sequence for Pak1 (NM_011035.1,1113-1131).
gaaagagctgattattaat

SEQ ID NO: 511060 - DNA, 19 bp, Mus musculus
  siRNA target sequence for Pak1 (NM_011035.1,1387-1405).
gatggctctgtcaagttaa

SEQ ID NO: 511061 - DNA, 19 bp, Mus musculus
  siRNA target sequence for Pak1 (NM_011035.1,1539-1557).
gggcattatggcaattgaa

SEQ ID NO: 511062 - DNA, 19 bp, Mus musculus
  siRNA target sequence for Pak1 (NM_011035.1,1540-1558).
ggcattatggcaattgaaa

SEQ ID NO: 511063 - DNA, 19 bp, Mus musculus
  siRNA target sequence for Pak1 (NM_011035.1,1541-1559).
gcattatggcaattgaaat

SEQ ID NO: 511064 - DNA, 19 bp, Mus musculus
  siRNA target sequence for Pak1 (NM_011035.1,1608-1626).
gtacctcattgctaccaat

SEQ ID NO: 511065 - DNA, 19 bp, Mus musculus
  siRNA target sequence for Pak3 (NM_008778.1,527-545).
gcttggataacgaagaaaa

SEQ ID NO: 511066 - DNA, 19 bp, Mus musculus
  siRNA target sequence for Pak3 (NM_008778.1,528-546).
cttggataacgaagaaaaa

SEQ ID NO: 511067 - DNA, 19 bp, Mus musculus
  siRNA target sequence for Pak3 (NM_008778.1,652-670).
gccaggcttcgctctatct

SEQ ID NO: 511068 - DNA, 19 bp, Mus musculus
  siRNA target sequence for Pak3 (NM_008778.1,653-671).
ccaggcttcgctctatctt

SEQ ID NO: 511069 - DNA, 19 bp, Mus musculus
  siRNA target sequence for Pak3 (NM_008778.1,676-694).
ggaggaggggataaaacca

SEQ ID NO: 511070 - DNA, 19 bp, Mus musculus
  siRNA target sequence for Pak3 (NM_008778.1,679-697).
ggaggggataaaaccaata

SEQ ID NO: 511071 - DNA, 19 bp, Mus musculus
  siRNA target sequence for Pak3 (NM_008778.1,682-700).
ggggataaaaccaataaga

SEQ ID NO: 511072 - DNA, 19 bp, Mus musculus
  siRNA target sequence for Pak3 (NM_008778.1,772-790).
gcagtcaccggggaattca

SEQ ID NO: 511073 - DNA, 19 bp, Mus musculus
  siRNA target sequence for Pak3 (NM_008778.1,780-798).
cggggaattcactggaatt

SEQ ID NO: 511074 - DNA, 19 bp, Mus musculus
  siRNA target sequence for Pak3 (NM_008778.1,783-801).
ggaattcactggaattcct

SEQ ID NO: 511075 - DNA, 19 bp, Mus musculus
  siRNA target sequence for Pak3 (NM_008778.1,820-838).
ctccaaacctccaacataa

SEQ ID NO: 511076 - DNA, 19 bp, Mus musculus
  siRNA target sequence for Pak3 (NM_008778.1,822-840).
ccaaacctccaacataaca

SEQ ID NO: 511077 - DNA, 19 bp, Mus musculus
  siRNA target sequence for Pak3 (NM_008778.1,858-876).
gaacccacaagctgttctt

SEQ ID NO: 511078 - DNA, 19 bp, Mus musculus
  siRNA target sequence for Pak3 (NM_008778.1,899-917).
ccaaagaaacggtcaacaa

SEQ ID NO: 511079 - DNA, 19 bp, Mus musculus
  siRNA target sequence for Pak3 (NM_008778.1,908-926).
cggtcaacaaccagaaata

SEQ ID NO: 511080 - DNA, 19 bp, Mus musculus
  siRNA target sequence for Pak3 (NM_008778.1,909-927).
ggtcaacaaccagaaatat

SEQ ID NO: 511081 - DNA, 19 bp, Mus musculus
  siRNA target sequence for Pak3 (NM_008778.1,910-928).
gtcaacaaccagaaatata

SEQ ID NO: 511082 - DNA, 19 bp, Mus musculus
  siRNA target sequence for Pak3 (NM_008778.1,932-950).
gctttacgtcaggagataa

SEQ ID NO: 511083 - DNA, 19 bp, Mus musculus
  siRNA target sequence for Pak3 (NM_008778.1,970-988).
gcagcacatcagtcgaata

SEQ ID NO: 511084 - DNA, 19 bp, Mus musculus
  siRNA target sequence for Pak3 (NM_008778.1,973-991).
gcacatcagtcgaatacca

SEQ ID NO: 511085 - DNA, 19 bp, Mus musculus
  siRNA target sequence for Pak3 (NM_008778.1,974-992).
cacatcagtcgaataccaa

SEQ ID NO: 511086 - DNA, 19 bp, Mus musculus
  siRNA target sequence for Pak3 (NM_008778.1,1093-1111).
ccaagaccagagcatacaa

SEQ ID NO: 511087 - DNA, 19 bp, Mus musculus
  siRNA target sequence for Pak3 (NM_008778.1,1127-1145).
gctccgtggttgagtcaat

SEQ ID NO: 511088 - DNA, 19 bp, Mus musculus
  siRNA target sequence for Pak3 (NM_008778.1,1128-1146).
ctccgtggttgagtcaatt

SEQ ID NO: 511089 - DNA, 19 bp, Mus musculus
  siRNA target sequence for Pak3 (NM_008778.1,1131-1149).
cgtggttgagtcaattgct

SEQ ID NO: 511090 - DNA, 19 bp, Mus musculus
  siRNA target sequence for Pak3 (NM_008778.1,1132-1150).
gtggttgagtcaattgctt

SEQ ID NO: 511091 - DNA, 19 bp, Mus musculus
  siRNA target sequence for Pak3 (NM_008778.1,1151-1169).
caccagctgcaccaaataa

SEQ ID NO: 511092 - DNA, 19 bp, Mus musculus
  siRNA target sequence for Pak3 (NM_008778.1,1198-1216).
gccaattccaccactttgt

SEQ ID NO: 511093 - DNA, 19 bp, Mus musculus
  siRNA target sequence for Pak3 (NM_008778.1,1199-1217).
ccaattccaccactttgta

SEQ ID NO: 511094 - DNA, 19 bp, Mus musculus
  siRNA target sequence for Pak3 (NM_008778.1,1306-1324).
ccaaagaagaaatatacga

SEQ ID NO: 511095 - DNA, 19 bp, Mus musculus
  siRNA target sequence for Pak3 (NM_008778.1,1348-1366).
gcatcaggaactgtttaca

SEQ ID NO: 511096 - DNA, 19 bp, Mus musculus
  siRNA target sequence for Pak3 (NM_008778.1,1388-1406).
gacaagaggtggccataaa

SEQ ID NO: 511097 - DNA, 19 bp, Mus musculus
  siRNA target sequence for Pak3 (NM_008778.1,1393-1411).
gaggtggccataaagcaaa

SEQ ID NO: 511098 - DNA, 19 bp, Mus musculus
  siRNA target sequence for Pak3 (NM_008778.1,1425-1443).
gcagcccaaaaaggaatta

SEQ ID NO: 511099 - DNA, 19 bp, Mus musculus
  siRNA target sequence for Pak3 (NM_008778.1,1426-1444).
cagcccaaaaaggaattaa

SEQ ID NO: 511100 - DNA, 19 bp, Mus musculus
  siRNA target sequence for Pak3 (NM_008778.1,1428-1446).
gcccaaaaaggaattaatt

SEQ ID NO: 511101 - DNA, 19 bp, Mus musculus
  siRNA target sequence for Pak3 (NM_008778.1,1483-1501).
cccaatattgtcaattatt

SEQ ID NO: 511102 - DNA, 19 bp, Mus musculus
  siRNA target sequence for Pak3 (NM_008778.1,1677-1695).
cataaagagcgacaacatt

SEQ ID NO: 511103 - DNA, 19 bp, Mus musculus
  siRNA target sequence for Pak3 (NM_008778.1,1702-1720).
gggatggatggttctgtta

SEQ ID NO: 511104 - DNA, 19 bp, Mus musculus
  siRNA target sequence for Pak3 (NM_008778.1,1703-1721).
ggatggatggttctgttaa

SEQ ID NO: 511105 - DNA, 19 bp, Mus musculus
  siRNA target sequence for Pak3 (NM_008778.1,1708-1726).
gatggttctgttaaactga

SEQ ID NO: 511106 - DNA, 19 bp, Mus musculus
  siRNA target sequence for Pak3 (NM_008778.1,1756-1774).
cctgagcaaagtaaacgaa

SEQ ID NO: 511107 - DNA, 19 bp, Mus musculus
  siRNA target sequence for Pak3 (NM_008778.1,1813-1831).
gtggtaactcgaaaagctt

SEQ ID NO: 511108 - DNA, 19 bp, Mus musculus
  siRNA target sequence for Pak3 (NM_008778.1,1815-1833).
ggtaactcgaaaagcttat

SEQ ID NO: 511109 - DNA, 19 bp, Mus musculus
  siRNA target sequence for Pak3 (NM_008778.1,1834-1852).
ggtccaaaagttgatatct

SEQ ID NO: 511110 - DNA, 19 bp, Mus musculus
  siRNA target sequence for Pak3 (NM_008778.1,1888-1906).
ggtgaacccccttacctta

SEQ ID NO: 511111 - DNA, 19 bp, Mus musculus
  siRNA target sequence for Pak3 (NM_008778.1,1889-1907).
gtgaacccccttaccttaa

SEQ ID NO: 511112 - DNA, 19 bp, Mus musculus
  siRNA target sequence for Pak3 (NM_008778.1,1896-1914).
cccttaccttaatgaaaat

SEQ ID NO: 511113 - DNA, 19 bp, Mus musculus
  siRNA target sequence for Pak3 (NM_008778.1,1916-1934).
cactcagggccttatatct

SEQ ID NO: 511114 - DNA, 19 bp, Mus musculus
  siRNA target sequence for Pak3 (NM_008778.1,2039-2057).
gatctgctaaggagctttt

SEQ ID NO: 511115 - DNA, 19 bp, Mus musculus
  siRNA target sequence for Pak3 (NM_008778.1,2042-2060).
ctgctaaggagcttttgca

SEQ ID NO: 511116 - DNA, 19 bp, Mus musculus
  siRNA target sequence for Pak3 (NM_008778.1,2096-2114).
gtctcactcctctgattat

SEQ ID NO: 511117 - DNA, 19 bp, Mus musculus
  siRNA target sequence for Pak3 (NM_008778.1,2115-2133).
cgccgcaaaggaagcaatt

SEQ ID NO: 511118 - DNA, 19 bp, Mus musculus
  siRNA target sequence for Pak3 (NM_008778.1,2116-2134).
gccgcaaaggaagcaatta

SEQ ID NO: 511119 - DNA, 19 bp, Mus musculus
  siRNA target sequence for Pak3 (NM_008778.1,2117-2135).
ccgcaaaggaagcaattaa

SEQ ID NO: 511120 - DNA, 19 bp, Mus musculus
  siRNA target sequence for Pak3 (NM_008778.1,2125-2143).
gaagcaattaagaacagta

SEQ ID NO: 511121 - DNA, 19 bp, Mus musculus
  siRNA target sequence for Pak4 (NM_027470.2,495-513).
ctctgctgcttgacgaatt

SEQ ID NO: 511122 - DNA, 19 bp, Mus musculus
  siRNA target sequence for Pak4 (NM_027470.2,506-524).
gacgaatttgagaacatgt

SEQ ID NO: 511123 - DNA, 19 bp, Mus musculus
  siRNA target sequence for Pak4 (NM_027470.2,578-596).
gcccaccaggagaatggaa

SEQ ID NO: 511124 - DNA, 19 bp, Mus musculus
  siRNA target sequence for Pak4 (NM_027470.2,622-640).
cagaatggcccctgacaaa

SEQ ID NO: 511125 - DNA, 19 bp, Mus musculus
  siRNA target sequence for Pak4 (NM_027470.2,704-722).
cgggtggggccagagaaaa

SEQ ID NO: 511126 - DNA, 19 bp, Mus musculus
  siRNA target sequence for Pak4 (NM_027470.2,826-844).
gaccagcgggacaaaacta

SEQ ID NO: 511127 - DNA, 19 bp, Mus musculus
  siRNA target sequence for Pak4 (NM_027470.2,846-864).
cagctggcaggccctttaa

SEQ ID NO: 511128 - DNA, 19 bp, Mus musculus
  siRNA target sequence for Pak4 (NM_027470.2,848-866).
gctggcaggccctttaaca

SEQ ID NO: 511129 - DNA, 19 bp, Mus musculus
  siRNA target sequence for Pak4 (NM_027470.2,851-869).
ggcaggccctttaacacat

SEQ ID NO: 511130 - DNA, 19 bp, Mus musculus
  siRNA target sequence for Pak4 (NM_027470.2,852-870).
gcaggccctttaacacata

SEQ ID NO: 511131 - DNA, 19 bp, Mus musculus
  siRNA target sequence for Pak4 (NM_027470.2,1203-1221).
ctcgttcctatctagacaa

SEQ ID NO: 511132 - DNA, 19 bp, Mus musculus
  siRNA target sequence for Pak4 (NM_027470.2,1206-1224).
gttcctatctagacaactt

SEQ ID NO: 511133 - DNA, 19 bp, Mus musculus
  siRNA target sequence for Pak4 (NM_027470.2,1209-1227).
cctatctagacaacttcat

SEQ ID NO: 511134 - DNA, 19 bp, Mus musculus
  siRNA target sequence for Pak4 (NM_027470.2,1329-1347).
gacgtgaactgctcttcaa

SEQ ID NO: 511135 - DNA, 19 bp, Mus musculus
  siRNA target sequence for Pak4 (NM_027470.2,1457-1475).
gccctcacggatattgtca

SEQ ID NO: 511136 - DNA, 19 bp, Mus musculus
  siRNA target sequence for Pak4 (NM_027470.2,1621-1639).
gtccgacttcgggttttgt

SEQ ID NO: 511137 - DNA, 19 bp, Mus musculus
  siRNA target sequence for Pak4 (NM_027470.2,1805-1823).
gagccacccctcaaagcta

SEQ ID NO: 511138 - DNA, 19 bp, Mus musculus
  siRNA target sequence for Pak4 (NM_027470.2,1809-1827).
cacccctcaaagctatgaa

SEQ ID NO: 511139 - DNA, 19 bp, Mus musculus
  siRNA target sequence for Pak4 (NM_027470.2,1812-1830).
ccctcaaagctatgaagat

SEQ ID NO: 511140 - DNA, 19 bp, Mus musculus
  siRNA target sequence for Pak4 (NM_027470.2,1873-1891).
ggcgtcaccgtctctgaaa

SEQ ID NO: 511141 - DNA, 19 bp, Mus musculus
  siRNA target sequence for Pak7 (NM_172858.1,591-609).
gaaaaagatcgaaatatct

SEQ ID NO: 511142 - DNA, 19 bp, Mus musculus
  siRNA target sequence for Pak7 (NM_172858.1,608-626).
ctggcccatccaactttga

SEQ ID NO: 511143 - DNA, 19 bp, Mus musculus
  siRNA target sequence for Pak7 (NM_172858.1,611-629).
gcccatccaactttgaaca

SEQ ID NO: 511144 - DNA, 19 bp, Mus musculus
  siRNA target sequence for Pak7 (NM_172858.1,633-651).
ggttcatactggatttgat

SEQ ID NO: 511145 - DNA, 19 bp, Mus musculus
  siRNA target sequence for Pak7 (NM_172858.1,777-795).
gacaatcgtcagaggaaat

SEQ ID NO: 511146 - DNA, 19 bp, Mus musculus
  siRNA target sequence for Pak7 (NM_172858.1,779-797).
caatcgtcagaggaaataa

SEQ ID NO: 511147 - DNA, 19 bp, Mus musculus
  siRNA target sequence for Pak7 (NM_172858.1,803-821).
gcaaggaaacctctatcaa

SEQ ID NO: 511148 - DNA, 19 bp, Mus musculus
  siRNA target sequence for Pak7 (NM_172858.1,804-822).
caaggaaacctctatcaat

SEQ ID NO: 511149 - DNA, 19 bp, Mus musculus
  siRNA target sequence for Pak7 (NM_172858.1,824-842).
gtctgctagaggattttga

SEQ ID NO: 511150 - DNA, 19 bp, Mus musculus
  siRNA target sequence for Pak7 (NM_172858.1,860-878).
gctccaactctctaaggaa

SEQ ID NO: 511151 - DNA, 19 bp, Mus musculus
  siRNA target sequence for Pak7 (NM_172858.1,937-955).
gagaacggcttcatcactt

SEQ ID NO: 511152 - DNA, 19 bp, Mus musculus
  siRNA target sequence for Pak7 (NM_172858.1,988-1006).
gcggactacacaactgaaa

SEQ ID NO: 511153 - DNA, 19 bp, Mus musculus
  siRNA target sequence for Pak7 (NM_172858.1,989-1007).
cggactacacaactgaaaa

SEQ ID NO: 511154 - DNA, 19 bp, Mus musculus
  siRNA target sequence for Pak7 (NM_172858.1,1154-1172).
gattccctgtcgactatca

SEQ ID NO: 511155 - DNA, 19 bp, Mus musculus
  siRNA target sequence for Pak7 (NM_172858.1,1250-1268).
cccctctggactactcatt

SEQ ID NO: 511156 - DNA, 19 bp, Mus musculus
  siRNA target sequence for Pak7 (NM_172858.1,1270-1288).
cagctcacgccttctagaa

SEQ ID NO: 511157 - DNA, 19 bp, Mus musculus
  siRNA target sequence for Pak7 (NM_172858.1,1314-1332).
ggagagtctggcatacagt

SEQ ID NO: 511158 - DNA, 19 bp, Mus musculus
  siRNA target sequence for Pak7 (NM_172858.1,1324-1342).
gcatacagtgaaagtgatt

SEQ ID NO: 511159 - DNA, 19 bp, Mus musculus
  siRNA target sequence for Pak7 (NM_172858.1,1370-1388).
ggaggccaaaatcatcata

SEQ ID NO: 511160 - DNA, 19 bp, Mus musculus
  siRNA target sequence for Pak7 (NM_172858.1,1498-1516).
caaggacactcgtacaact

SEQ ID NO: 511161 - DNA, 19 bp, Mus musculus
  siRNA target sequence for Pak7 (NM_172858.1,1543-1561).
cccacaatgtgcattccaa

SEQ ID NO: 511162 - DNA, 19 bp, Mus musculus
  siRNA target sequence for Pak7 (NM_172858.1,1544-1562).
ccacaatgtgcattccaaa

SEQ ID NO: 511163 - DNA, 19 bp, Mus musculus
  siRNA target sequence for Pak7 (NM_172858.1,1553-1571).
gcattccaaaggtggatta

SEQ ID NO: 511164 - DNA, 19 bp, Mus musculus
  siRNA target sequence for Pak7 (NM_172858.1,1847-1865).
caagggtatcccatgaaca

SEQ ID NO: 511165 - DNA, 19 bp, Mus musculus
  siRNA target sequence for Pak7 (NM_172858.1,1850-1868).
gggtatcccatgaacaatt

SEQ ID NO: 511166 - DNA, 19 bp, Mus musculus
  siRNA target sequence for Pak7 (NM_172858.1,1907-1925).
ccagggaatatttggataa

SEQ ID NO: 511167 - DNA, 19 bp, Mus musculus
  siRNA target sequence for Pak7 (NM_172858.1,1910-1928).
gggaatatttggataactt

SEQ ID NO: 511168 - DNA, 19 bp, Mus musculus
  siRNA target sequence for Pak7 (NM_172858.1,1911-1929).
ggaatatttggataacttt

SEQ ID NO: 511169 - DNA, 19 bp, Mus musculus
  siRNA target sequence for Pak7 (NM_172858.1,2089-2107).
gtagttgacatgtacaaca

SEQ ID NO: 511170 - DNA, 19 bp, Mus musculus
  siRNA target sequence for Pak7 (NM_172858.1,2237-2255).
ctctgtcctaccttcataa

SEQ ID NO: 511171 - DNA, 19 bp, Mus musculus
  siRNA target sequence for Pak7 (NM_172858.1,2303-2321).
caagcgatggccggataaa

SEQ ID NO: 511172 - DNA, 19 bp, Mus musculus
  siRNA target sequence for Pak7 (NM_172858.1,2306-2324).
gcgatggccggataaagtt

SEQ ID NO: 511173 - DNA, 19 bp, Mus musculus
  siRNA target sequence for Pak7 (NM_172858.1,2307-2325).
cgatggccggataaagtta

SEQ ID NO: 511174 - DNA, 19 bp, Mus musculus
  siRNA target sequence for Pak7 (NM_172858.1,2308-2326).
gatggccggataaagttat

SEQ ID NO: 511175 - DNA, 19 bp, Mus musculus
  siRNA target sequence for Pak7 (NM_172858.1,2312-2330).
gccggataaagttatctga

SEQ ID NO: 511176 - DNA, 19 bp, Mus musculus
  siRNA target sequence for Pak7 (NM_172858.1,2335-2353).
ggtttctgtgctcaagttt

SEQ ID NO: 511177 - DNA, 19 bp, Mus musculus
  siRNA target sequence for Pak7 (NM_172858.1,2531-2549).
ggaggatccgggacagttt

SEQ ID NO: 511178 - DNA, 19 bp, Mus musculus
  siRNA target sequence for Pak7 (NM_172858.1,2532-2550).
gaggatccgggacagttta

SEQ ID NO: 511179 - DNA, 19 bp, Mus musculus
  siRNA target sequence for Pak7 (NM_172858.1,2535-2553).
gatccgggacagtttacct

SEQ ID NO: 511180 - DNA, 19 bp, Mus musculus
  siRNA target sequence for Pak7 (NM_172858.1,2558-2576).
gagtgaaggacctacacaa

SEQ ID NO: 511181 - DNA, 19 bp, Mus musculus
  siRNA target sequence for Pak7 (NM_172858.1,2566-2584).
gacctacacaaggtttctt

SEQ ID NO: 511182 - DNA, 19 bp, Mus musculus
  siRNA target sequence for Pak7 (NM_172858.1,2617-2635).
gtgagggagccctctcaaa

SEQ ID NO: 511183 - DNA, 19 bp, Mus musculus
  siRNA target sequence for Pak7 (NM_172858.1,2636-2654).
gagccacagctcaagaact

SEQ ID NO: 511184 - DNA, 19 bp, Mus musculus
  siRNA target sequence for Pak7 (NM_172858.1,2659-2677).
ggacatccattcttaaaat

SEQ ID NO: 511185 - DNA, 19 bp, Mus musculus
  siRNA target sequence for Pak7 (NM_172858.1,2701-2719).
gttcctctcatgagacaat

SEQ ID NO: 511186 - DNA, 19 bp, Mus musculus
  siRNA target sequence for Pank1 (NM_023792.1,233-251).
cattcccgtggtttggtat

SEQ ID NO: 511187 - DNA, 19 bp, Mus musculus
  siRNA target sequence for Pank1 (NM_023792.1,237-255).
cccgtggtttggtatggat

SEQ ID NO: 511188 - DNA, 19 bp, Mus musculus
  siRNA target sequence for Pank1 (NM_023792.1,238-256).
ccgtggtttggtatggata

SEQ ID NO: 511189 - DNA, 19 bp, Mus musculus
  siRNA target sequence for Pank1 (NM_023792.1,239-257).
cgtggtttggtatggatat

SEQ ID NO: 511190 - DNA, 19 bp, Mus musculus
  siRNA target sequence for Pank1 (NM_023792.1,268-286).
ctggttaagctggtttact

SEQ ID NO: 511191 - DNA, 19 bp, Mus musculus
  siRNA target sequence for Pank1 (NM_023792.1,348-366).
ccggaagtatttaacttct

SEQ ID NO: 511192 - DNA, 19 bp, Mus musculus
  siRNA target sequence for Pank1 (NM_023792.1,354-372).
gtatttaacttctaacact

SEQ ID NO: 511193 - DNA, 19 bp, Mus musculus
  siRNA target sequence for Pank1 (NM_023792.1,369-387).
cactgcctacggcaaaact

SEQ ID NO: 511194 - DNA, 19 bp, Mus musculus
  siRNA target sequence for Pank1 (NM_023792.1,570-588).
ggaggacttccgaatgatt

SEQ ID NO: 511195 - DNA, 19 bp, Mus musculus
  siRNA target sequence for Pank1 (NM_023792.1,590-608).
cggacctgcagctgcataa

SEQ ID NO: 511196 - DNA, 19 bp, Mus musculus
  siRNA target sequence for Pank1 (NM_023792.1,677-695).
cagaatgttactatttcga

SEQ ID NO: 511197 - DNA, 19 bp, Mus musculus
  siRNA target sequence for Pank1 (NM_023792.1,679-697).
gaatgttactatttcgaaa

SEQ ID NO: 511198 - DNA, 19 bp, Mus musculus
  siRNA target sequence for Pank1 (NM_023792.1,709-727).
cccgagttgtgtcaaaaaa

SEQ ID NO: 511199 - DNA, 19 bp, Mus musculus
  siRNA target sequence for Pank1 (NM_023792.1,721-739).
caaaaaaagccatactgtt

SEQ ID NO: 511200 - DNA, 19 bp, Mus musculus
  siRNA target sequence for Pank1 (NM_023792.1,754-772).
cctatgttgctggttaaca

SEQ ID NO: 511201 - DNA, 19 bp, Mus musculus
  siRNA target sequence for Pank1 (NM_023792.1,755-773).
ctatgttgctggttaacat

SEQ ID NO: 511202 - DNA, 19 bp, Mus musculus
  siRNA target sequence for Pank1 (NM_023792.1,884-902).
gttgtgagacctttgaaga

SEQ ID NO: 511203 - DNA, 19 bp, Mus musculus
  siRNA target sequence for Pank1 (NM_023792.1,932-950).
gcaccaatgtggataagct

SEQ ID NO: 511204 - DNA, 19 bp, Mus musculus
  siRNA target sequence for Pank1 (NM_023792.1,1125-1143).
gtgtgcactgaatgagaat

SEQ ID NO: 511205 - DNA, 19 bp, Mus musculus
  siRNA target sequence for Pank1 (NM_023792.1,1178-1196).
gaatcaatatggtctcaat

SEQ ID NO: 511206 - DNA, 19 bp, Mus musculus
  siRNA target sequence for Pank1 (NM_023792.1,1207-1225).
gcatatgccatggactttt

SEQ ID NO: 511207 - DNA, 19 bp, Mus musculus
  siRNA target sequence for Pank1 (NM_023792.1,1218-1236).
ggacttttggtctaaagga

SEQ ID NO: 511208 - DNA, 19 bp, Mus musculus
  siRNA target sequence for Pank3 (NM_145962.1,527-545).
gaggaacgctagtaaagct

SEQ ID NO: 511209 - DNA, 19 bp, Mus musculus
  siRNA target sequence for Pank3 (NM_145962.1,546-564).
ctcatactttgaacctatt

SEQ ID NO: 511210 - DNA, 19 bp, Mus musculus
  siRNA target sequence for Pank3 (NM_145962.1,548-566).
catactttgaacctattga

SEQ ID NO: 511211 - DNA, 19 bp, Mus musculus
  siRNA target sequence for Pank3 (NM_145962.1,618-636).
gaaatacttgacttctaat

SEQ ID NO: 511212 - DNA, 19 bp, Mus musculus
  siRNA target sequence for Pank3 (NM_145962.1,627-645).
gacttctaatgtagcatat

SEQ ID NO: 511213 - DNA, 19 bp, Mus musculus
  siRNA target sequence for Pank3 (NM_145962.1,653-671).
ctggcattcgggatgtaca

SEQ ID NO: 511214 - DNA, 19 bp, Mus musculus
  siRNA target sequence for Pank3 (NM_145962.1,656-674).
gcattcgggatgtacatct

SEQ ID NO: 511215 - DNA, 19 bp, Mus musculus
  siRNA target sequence for Pank3 (NM_145962.1,657-675).
cattcgggatgtacatctt

SEQ ID NO: 511216 - DNA, 19 bp, Mus musculus
  siRNA target sequence for Pank3 (NM_145962.1,673-691).
cttgagctgaaggatttaa

SEQ ID NO: 511217 - DNA, 19 bp, Mus musculus
  siRNA target sequence for Pank3 (NM_145962.1,707-725).
gaggaaacttgcactttat

SEQ ID NO: 511218 - DNA, 19 bp, Mus musculus
  siRNA target sequence for Pank3 (NM_145962.1,714-732).
cttgcactttatcagattt

SEQ ID NO: 511219 - DNA, 19 bp, Mus musculus
  siRNA target sequence for Pank3 (NM_145962.1,718-736).
cactttatcagatttccaa

SEQ ID NO: 511220 - DNA, 19 bp, Mus musculus
  siRNA target sequence for Pank3 (NM_145962.1,738-756).
ccaggacctgcctactttt

SEQ ID NO: 511221 - DNA, 19 bp, Mus musculus
  siRNA target sequence for Pank3 (NM_145962.1,739-757).
caggacctgcctactttta

SEQ ID NO: 511222 - DNA, 19 bp, Mus musculus
  siRNA target sequence for Pank3 (NM_145962.1,744-762).
cctgcctacttttatccaa

SEQ ID NO: 511223 - DNA, 19 bp, Mus musculus
  siRNA target sequence for Pank3 (NM_145962.1,745-763).
ctgcctacttttatccaaa

SEQ ID NO: 511224 - DNA, 19 bp, Mus musculus
  siRNA target sequence for Pank3 (NM_145962.1,820-838).
ggtgcttacaagtttgaga

SEQ ID NO: 511225 - DNA, 19 bp, Mus musculus
  siRNA target sequence for Pank3 (NM_145962.1,841-859).
gattttcgcacaattggaa

SEQ ID NO: 511226 - DNA, 19 bp, Mus musculus
  siRNA target sequence for Pank3 (NM_145962.1,870-888).
gcacaaactggatgaactt

SEQ ID NO: 511227 - DNA, 19 bp, Mus musculus
  siRNA target sequence for Pank3 (NM_145962.1,976-994).
cccgagcgatgccaaaaga

SEQ ID NO: 511228 - DNA, 19 bp, Mus musculus
  siRNA target sequence for Pank3 (NM_145962.1,977-995).
ccgagcgatgccaaaagat

SEQ ID NO: 511229 - DNA, 19 bp, Mus musculus
  siRNA target sequence for Pank3 (NM_145962.1,1021-1039).
ccactgctggtagtgaata

SEQ ID NO: 511230 - DNA, 19 bp, Mus musculus
  siRNA target sequence for Pank3 (NM_145962.1,1068-1086).
ccattccaaagacaactat

SEQ ID NO: 511231 - DNA, 19 bp, Mus musculus
  siRNA target sequence for Pank3 (NM_145962.1,1115-1133).
ggggcacctttcttggttt

SEQ ID NO: 511232 - DNA, 19 bp, Mus musculus
  siRNA target sequence for Pank3 (NM_145962.1,1116-1134).
gggcacctttcttggttta

SEQ ID NO: 511233 - DNA, 19 bp, Mus musculus
  siRNA target sequence for Pank3 (NM_145962.1,1117-1135).
ggcacctttcttggtttat

SEQ ID NO: 511234 - DNA, 19 bp, Mus musculus
  siRNA target sequence for Pank3 (NM_145962.1,1126-1144).
cttggtttatgcagtttgt

SEQ ID NO: 511235 - DNA, 19 bp, Mus musculus
  siRNA target sequence for Pank3 (NM_145962.1,1199-1217).
gcacccaagctgataggtt

SEQ ID NO: 511236 - DNA, 19 bp, Mus musculus
  siRNA target sequence for Pank3 (NM_145962.1,1215-1233).
gttggtccgagatatttat

SEQ ID NO: 511237 - DNA, 19 bp, Mus musculus
  siRNA target sequence for Pank3 (NM_145962.1,1234-1252).
ggaggagattatgaaagat

SEQ ID NO: 511238 - DNA, 19 bp, Mus musculus
  siRNA target sequence for Pank3 (NM_145962.1,1268-1286).
gggcggtggcatctagttt

SEQ ID NO: 511239 - DNA, 19 bp, Mus musculus
  siRNA target sequence for Pank3 (NM_145962.1,1269-1287).
ggcggtggcatctagtttt

SEQ ID NO: 511240 - DNA, 19 bp, Mus musculus
  siRNA target sequence for Pank3 (NM_145962.1,1275-1293).
ggcatctagttttggtaat

SEQ ID NO: 511241 - DNA, 19 bp, Mus musculus
  siRNA target sequence for Pank3 (NM_145962.1,1276-1294).
gcatctagttttggtaata

SEQ ID NO: 511242 - DNA, 19 bp, Mus musculus
  siRNA target sequence for Pank3 (NM_145962.1,1277-1295).
catctagttttggtaatat

SEQ ID NO: 511243 - DNA, 19 bp, Mus musculus
  siRNA target sequence for Pank3 (NM_145962.1,1289-1307).
gtaatatgatttataagga

SEQ ID NO: 511244 - DNA, 19 bp, Mus musculus
  siRNA target sequence for Pank3 (NM_145962.1,1306-1324).
gagaaacgagaaactgtta

SEQ ID NO: 511245 - DNA, 19 bp, Mus musculus
  siRNA target sequence for Pank3 (NM_145962.1,1338-1356).
ggcaagagctactttagtt

SEQ ID NO: 511246 - DNA, 19 bp, Mus musculus
  siRNA target sequence for Pank3 (NM_145962.1,1339-1357).
gcaagagctactttagtta

SEQ ID NO: 511247 - DNA, 19 bp, Mus musculus
  siRNA target sequence for Pank3 (NM_145962.1,1343-1361).
gagctactttagttactat

SEQ ID NO: 511248 - DNA, 19 bp, Mus musculus
  siRNA target sequence for Pank3 (NM_145962.1,1425-1443).
cttcgttgggaacttttta

SEQ ID NO: 511249 - DNA, 19 bp, Mus musculus
  siRNA target sequence for Pank3 (NM_145962.1,1428-1446).
cgttgggaactttttacgt

SEQ ID NO: 511250 - DNA, 19 bp, Mus musculus
  siRNA target sequence for Pank3 (NM_145962.1,1437-1455).
ctttttacgtgtcaatact

SEQ ID NO: 511251 - DNA, 19 bp, Mus musculus
  siRNA target sequence for Pank3 (NM_145962.1,1449-1467).
caatactctctcgatgaaa

SEQ ID NO: 511252 - DNA, 19 bp, Mus musculus
  siRNA target sequence for Pank3 (NM_145962.1,1454-1472).
ctctctcgatgaaactgtt

SEQ ID NO: 511253 - DNA, 19 bp, Mus musculus
  siRNA target sequence for Pank3 (NM_145962.1,1493-1511).
ggtcaaagggtcaactgaa

SEQ ID NO: 511254 - DNA, 19 bp, Mus musculus
  siRNA target sequence for Pank3 (NM_145962.1,1494-1512).
gtcaaagggtcaactgaaa

SEQ ID NO: 511255 - DNA, 19 bp, Mus musculus
  siRNA target sequence for Pank3 (NM_145962.1,1561-1579).
cttggactgccgaatttca

SEQ ID NO: 511256 - DNA, 19 bp, Mus musculus
  siRNA target sequence for Papss1 (NM_011863.1,271-289).
ggcattccgtgctacactt

SEQ ID NO: 511257 - DNA, 19 bp, Mus musculus
  siRNA target sequence for Papss1 (NM_011863.1,272-290).
gcattccgtgctacacttt

SEQ ID NO: 511258 - DNA, 19 bp, Mus musculus
  siRNA target sequence for Papss1 (NM_011863.1,303-321).
catccgccaaggactcaat

SEQ ID NO: 511259 - DNA, 19 bp, Mus musculus
  siRNA target sequence for Papss1 (NM_011863.1,307-325).
cgccaaggactcaataaga

SEQ ID NO: 511260 - DNA, 19 bp, Mus musculus
  siRNA target sequence for Papss1 (NM_011863.1,400-418).
gctggcttagtgtgtatca

SEQ ID NO: 511261 - DNA, 19 bp, Mus musculus
  siRNA target sequence for Papss1 (NM_011863.1,411-429).
gtgtatcaccagctttata

SEQ ID NO: 511262 - DNA, 19 bp, Mus musculus
  siRNA target sequence for Papss1 (NM_011863.1,453-471).
caacgcaaggcagattcat

SEQ ID NO: 511263 - DNA, 19 bp, Mus musculus
  siRNA target sequence for Papss1 (NM_011863.1,583-601).
ggcttcactggcatcgatt

SEQ ID NO: 511264 - DNA, 19 bp, Mus musculus
  siRNA target sequence for Papss1 (NM_011863.1,722-740).
cttcctatgaagtgaaaga

SEQ ID NO: 511265 - DNA, 19 bp, Mus musculus
  siRNA target sequence for Papss1 (NM_011863.1,742-760).
ctatatgtgccagagaata

SEQ ID NO: 511266 - DNA, 19 bp, Mus musculus
  siRNA target sequence for Papss1 (NM_011863.1,752-770).
cagagaataaacttcactt

SEQ ID NO: 511267 - DNA, 19 bp, Mus musculus
  siRNA target sequence for Papss1 (NM_011863.1,790-808).
gccttaccagccctgaaaa

SEQ ID NO: 511268 - DNA, 19 bp, Mus musculus
  siRNA target sequence for Papss1 (NM_011863.1,791-809).
ccttaccagccctgaaaat

SEQ ID NO: 511269 - DNA, 19 bp, Mus musculus
  siRNA target sequence for Papss1 (NM_011863.1,797-815).
cagccctgaaaatcaataa

SEQ ID NO: 511270 - DNA, 19 bp, Mus musculus
  siRNA target sequence for Papss1 (NM_011863.1,862-880).
cctctgaacggcttcatga

SEQ ID NO: 511271 - DNA, 19 bp, Mus musculus
  siRNA target sequence for Papss1 (NM_011863.1,897-915).
gcagtgcctccatttcgat

SEQ ID NO: 511272 - DNA, 19 bp, Mus musculus
  siRNA target sequence for Papss1 (NM_011863.1,898-916).
cagtgcctccatttcgatt

SEQ ID NO: 511273 - DNA, 19 bp, Mus musculus
  siRNA target sequence for Papss1 (NM_011863.1,925-943).
gatggaggcgtcatcaact

SEQ ID NO: 511274 - DNA, 19 bp, Mus musculus
  siRNA target sequence for Papss1 (NM_011863.1,928-946).
ggaggcgtcatcaacttat

SEQ ID NO: 511275 - DNA, 19 bp, Mus musculus
  siRNA target sequence for Papss1 (NM_011863.1,942-960).
cttatcggtgcctatagtt

SEQ ID NO: 511276 - DNA, 19 bp, Mus musculus
  siRNA target sequence for Papss1 (NM_011863.1,965-983).
cagctacgcacgaggataa

SEQ ID NO: 511277 - DNA, 19 bp, Mus musculus
  siRNA target sequence for Papss1 (NM_011863.1,968-986).
ctacgcacgaggataagga

SEQ ID NO: 511278 - DNA, 19 bp, Mus musculus
  siRNA target sequence for Papss1 (NM_011863.1,1007-1025).
cgttcgctctggtgtatga

SEQ ID NO: 511279 - DNA, 19 bp, Mus musculus
  siRNA target sequence for Papss1 (NM_011863.1,1092-1110).
cagacagtggggaacaaca

SEQ ID NO: 511280 - DNA, 19 bp, Mus musculus
  siRNA target sequence for Papss1 (NM_011863.1,1158-1176).
gctgattggaggagatctt

SEQ ID NO: 511281 - DNA, 19 bp, Mus musculus
  siRNA target sequence for Papss1 (NM_011863.1,1161-1179).
gattggaggagatcttcaa

SEQ ID NO: 511282 - DNA, 19 bp, Mus musculus
  siRNA target sequence for Papss1 (NM_011863.1,1263-1281).
gaacgctgatgctgtcttt

SEQ ID NO: 511283 - DNA, 19 bp, Mus musculus
  siRNA target sequence for Papss1 (NM_011863.1,1308-1326).
caacgggcacgctctgtta

SEQ ID NO: 511284 - DNA, 19 bp, Mus musculus
  siRNA target sequence for Papss1 (NM_011863.1,1506-1524).
cccgtctcctatgatgtat

SEQ ID NO: 511285 - DNA, 19 bp, Mus musculus
  siRNA target sequence for Papss1 (NM_011863.1,1569-1587).
ggccggagccaatttttat

SEQ ID NO: 511286 - DNA, 19 bp, Mus musculus
  siRNA target sequence for Papss1 (NM_011863.1,1571-1589).
ccggagccaatttttatat

SEQ ID NO: 511287 - DNA, 19 bp, Mus musculus
  siRNA target sequence for Papss1 (NM_011863.1,1572-1590).
cggagccaatttttatatt

SEQ ID NO: 511288 - DNA, 19 bp, Mus musculus
  siRNA target sequence for Papss1 (NM_011863.1,1679-1697).
ccccaggcctgattacctt

SEQ ID NO: 511289 - DNA, 19 bp, Mus musculus
  siRNA target sequence for Papss1 (NM_011863.1,1684-1702).
ggcctgattaccttggaaa

SEQ ID NO: 511290 - DNA, 19 bp, Mus musculus
  siRNA target sequence for Papss1 (NM_011863.1,1685-1703).
gcctgattaccttggaaat

SEQ ID NO: 511291 - DNA, 19 bp, Mus musculus
  siRNA target sequence for Papss1 (NM_011863.1,1714-1732).
cgagttgcagcttacaaca

SEQ ID NO: 511292 - DNA, 19 bp, Mus musculus
  siRNA target sequence for Papss1 (NM_011863.1,1717-1735).
gttgcagcttacaacaaga

SEQ ID NO: 511293 - DNA, 19 bp, Mus musculus
  siRNA target sequence for Papss1 (NM_011863.1,1744-1762).
cggatggactactatgact

SEQ ID NO: 511294 - DNA, 19 bp, Mus musculus
  siRNA target sequence for Papss1 (NM_011863.1,1763-1781).
ctgagcaccacgaagactt

SEQ ID NO: 511295 - DNA, 19 bp, Mus musculus
  siRNA target sequence for Papss1 (NM_011863.1,1868-1886).
ctgtgctggtagagtacta

SEQ ID NO: 511296 - DNA, 19 bp, Mus musculus
  siRNA target sequence for Papss2 (NM_011864.1,1384-1402).
cataagctttgctttggaa

SEQ ID NO: 511297 - DNA, 19 bp, Mus musculus
  siRNA target sequence for Papss2 (NM_011864.1,1416-1434).
ctcacgccatcccatgtta

SEQ ID NO: 511298 - DNA, 19 bp, Mus musculus
  siRNA target sequence for Papss2 (NM_011864.1,1418-1436).
cacgccatcccatgttact

SEQ ID NO: 511299 - DNA, 19 bp, Mus musculus
  siRNA target sequence for Papss2 (NM_011864.1,1420-1438).
cgccatcccatgttactct

SEQ ID NO: 511300 - DNA, 19 bp, Mus musculus
  siRNA target sequence for Papss2 (NM_011864.1,1454-1472).
gtccgtcatggccttaata

SEQ ID NO: 511301 - DNA, 19 bp, Mus musculus
  siRNA target sequence for Papss2 (NM_011864.1,1457-1475).
cgtcatggccttaataaga

SEQ ID NO: 511302 - DNA, 19 bp, Mus musculus
  siRNA target sequence for Papss2 (NM_011864.1,1598-1616).
cgtgagaatgcccgaaaaa

SEQ ID NO: 511303 - DNA, 19 bp, Mus musculus
  siRNA target sequence for Papss2 (NM_011864.1,1599-1617).
gtgagaatgcccgaaaaat

SEQ ID NO: 511304 - DNA, 19 bp, Mus musculus
  siRNA target sequence for Papss2 (NM_011864.1,1655-1673).
gtagatgcgcctttaaata

SEQ ID NO: 511305 - DNA, 19 bp, Mus musculus
  siRNA target sequence for Papss2 (NM_011864.1,1658-1676).
gatgcgcctttaaatatct

SEQ ID NO: 511306 - DNA, 19 bp, Mus musculus
  siRNA target sequence for Papss2 (NM_011864.1,1677-1695).
gtgaaagccgagacgtaaa

SEQ ID NO: 511307 - DNA, 19 bp, Mus musculus
  siRNA target sequence for Papss2 (NM_011864.1,1792-1810).
gaccaacctgtcttcagta

SEQ ID NO: 511308 - DNA, 19 bp, Mus musculus
  siRNA target sequence for Papss2 (NM_011864.1,1881-1899).
gcatccacgaactctttgt

SEQ ID NO: 511309 - DNA, 19 bp, Mus musculus
  siRNA target sequence for Papss2 (NM_011864.1,2010-2028).
ctcccctcaaaggctttat

SEQ ID NO: 511310 - DNA, 19 bp, Mus musculus
  siRNA target sequence for Papss2 (NM_011864.1,2038-2056).
ggagtacttgcaaactcta

SEQ ID NO: 511311 - DNA, 19 bp, Mus musculus
  siRNA target sequence for Papss2 (NM_011864.1,2090-2108).
cgtgatggagtcatcaaca

SEQ ID NO: 511312 - DNA, 19 bp, Mus musculus
  siRNA target sequence for Papss2 (NM_011864.1,2130-2148).
ccgtttctgcggatgacaa

SEQ ID NO: 511313 - DNA, 19 bp, Mus musculus
  siRNA target sequence for Papss2 (NM_011864.1,2156-2174).
ctcgaagggtgcagcaaat

SEQ ID NO: 511314 - DNA, 19 bp, Mus musculus
  siRNA target sequence for Papss2 (NM_011864.1,2158-2176).
cgaagggtgcagcaaattt

SEQ ID NO: 511315 - DNA, 19 bp, Mus musculus
  siRNA target sequence for Papss2 (NM_011864.1,2193-2211).
gtcggagggtcgctctatt

SEQ ID NO: 511316 - DNA, 19 bp, Mus musculus
  siRNA target sequence for Papss2 (NM_011864.1,2279-2297).
gcaaagcacccccatatca

SEQ ID NO: 511317 - DNA, 19 bp, Mus musculus
  siRNA target sequence for Papss2 (NM_011864.1,2432-2450).
gctgatgccgtgtatgcat

SEQ ID NO: 511318 - DNA, 19 bp, Mus musculus
  siRNA target sequence for Papss2 (NM_011864.1,2433-2451).
ctgatgccgtgtatgcatt

SEQ ID NO: 511319 - DNA, 19 bp, Mus musculus
  siRNA target sequence for Papss2 (NM_011864.1,2636-2654).
gtcctggatcccaagtcaa

SEQ ID NO: 511320 - DNA, 19 bp, Mus musculus
  siRNA target sequence for Papss2 (NM_011864.1,2641-2659).
ggatcccaagtcaactatt

SEQ ID NO: 511321 - DNA, 19 bp, Mus musculus
  siRNA target sequence for Papss2 (NM_011864.1,2791-2809).
gacaaagaaagacctatat

SEQ ID NO: 511322 - DNA, 19 bp, Mus musculus
  siRNA target sequence for Papss2 (NM_011864.1,2882-2900).
gtggctgcctacaataaaa

SEQ ID NO: 511323 - DNA, 19 bp, Mus musculus
  siRNA target sequence for Papss2 (NM_011864.1,2931-2949).
caaggcacgaggagtttga

SEQ ID NO: 511324 - DNA, 19 bp, Mus musculus
  siRNA target sequence for Papss2 (NM_011864.1,3020-3038).
ccgaaagcgtggaaagtgt

SEQ ID NO: 511325 - DNA, 19 bp, Mus musculus
  siRNA target sequence for Papss2 (NM_011864.1,3035-3053).
gtgttgacagattactaca

SEQ ID NO: 511326 - DNA, 19 bp, Mus musculus
  siRNA target sequence for Pcca (NM_144844.1,95-113).
ggtcctcgcagcagcaatt

SEQ ID NO: 511327 - DNA, 19 bp, Mus musculus
  siRNA target sequence for Pcca (NM_144844.1,129-147).
gcatgctccagtctattca

SEQ ID NO: 511328 - DNA, 19 bp, Mus musculus
  siRNA target sequence for Pcca (NM_144844.1,214-232).
gataaaattctcattgcta

SEQ ID NO: 511329 - DNA, 19 bp, Mus musculus
  siRNA target sequence for Pcca (NM_144844.1,249-267).
ctgtagggttattaaaact

SEQ ID NO: 511330 - DNA, 19 bp, Mus musculus
  siRNA target sequence for Pcca (NM_144844.1,296-314).
ccattcacagtgatgttga

SEQ ID NO: 511331 - DNA, 19 bp, Mus musculus
  siRNA target sequence for Pcca (NM_144844.1,320-338).
gttctgttcacgtgaaaat

SEQ ID NO: 511332 - DNA, 19 bp, Mus musculus
  siRNA target sequence for Pcca (NM_144844.1,368-386).
ctcccaccagtaaaagcta

SEQ ID NO: 511333 - DNA, 19 bp, Mus musculus
  siRNA target sequence for Pcca (NM_144844.1,439-457).
gtacacccagggtatggat

SEQ ID NO: 511334 - DNA, 19 bp, Mus musculus
  siRNA target sequence for Pcca (NM_144844.1,513-531).
cattggacctgatactcat

SEQ ID NO: 511335 - DNA, 19 bp, Mus musculus
  siRNA target sequence for Pcca (NM_144844.1,518-536).
gacctgatactcatgctat

SEQ ID NO: 511336 - DNA, 19 bp, Mus musculus
  siRNA target sequence for Pcca (NM_144844.1,542-560).
ccatgggtgacaagataga

SEQ ID NO: 511337 - DNA, 19 bp, Mus musculus
  siRNA target sequence for Pcca (NM_144844.1,594-612).
cacaatccctggttttgat

SEQ ID NO: 511338 - DNA, 19 bp, Mus musculus
  siRNA target sequence for Pcca (NM_144844.1,604-622).
ggttttgatggggtagtaa

SEQ ID NO: 511339 - DNA, 19 bp, Mus musculus
  siRNA target sequence for Pcca (NM_144844.1,642-660).
cagaattgcaagggaaatt

SEQ ID NO: 511340 - DNA, 19 bp, Mus musculus
  siRNA target sequence for Pcca (NM_144844.1,763-781).
caggaagctgcttctagtt

SEQ ID NO: 511341 - DNA, 19 bp, Mus musculus
  siRNA target sequence for Pcca (NM_144844.1,779-797).
gttttggtgatgatagact

SEQ ID NO: 511342 - DNA, 19 bp, Mus musculus
  siRNA target sequence for Pcca (NM_144844.1,784-802).
ggtgatgatagactactaa

SEQ ID NO: 511343 - DNA, 19 bp, Mus musculus
  siRNA target sequence for Pcca (NM_144844.1,785-803).
gtgatgatagactactaat

SEQ ID NO: 511344 - DNA, 19 bp, Mus musculus
  siRNA target sequence for Pcca (NM_144844.1,790-808).
gatagactactaatagaaa

SEQ ID NO: 511345 - DNA, 19 bp, Mus musculus
  siRNA target sequence for Pcca (NM_144844.1,816-834).
cgataaccctcgtcatata

SEQ ID NO: 511346 - DNA, 19 bp, Mus musculus
  siRNA target sequence for Pcca (NM_144844.1,824-842).
ctcgtcatatagaaatcca

SEQ ID NO: 511347 - DNA, 19 bp, Mus musculus
  siRNA target sequence for Pcca (NM_144844.1,953-971).
ctgaaactcgccaagcaat

SEQ ID NO: 511348 - DNA, 19 bp, Mus musculus
  siRNA target sequence for Pcca (NM_144844.1,993-1011).
ggctaaagccgtgaagtat

SEQ ID NO: 511349 - DNA, 19 bp, Mus musculus
  siRNA target sequence for Pcca (NM_144844.1,994-1012).
gctaaagccgtgaagtatt

SEQ ID NO: 511350 - DNA, 19 bp, Mus musculus
  siRNA target sequence for Pcca (NM_144844.1,1123-1141).
ctggacttagtccaagaaa

SEQ ID NO: 511351 - DNA, 19 bp, Mus musculus
  siRNA target sequence for Pcca (NM_144844.1,1126-1144).
gacttagtccaagaaatga

SEQ ID NO: 511352 - DNA, 19 bp, Mus musculus
  siRNA target sequence for Pcca (NM_144844.1,1173-1191).
gcacaagcaagaggatatt

SEQ ID NO: 511353 - DNA, 19 bp, Mus musculus
  siRNA target sequence for Pcca (NM_144844.1,1284-1302).
ccaagagccgatacatcta

SEQ ID NO: 511354 - DNA, 19 bp, Mus musculus
  siRNA target sequence for Pcca (NM_144844.1,1349-1367).
gcatctattatgatcctat

SEQ ID NO: 511355 - DNA, 19 bp, Mus musculus
  siRNA target sequence for Pcca (NM_144844.1,1353-1371).
ctattatgatcctatgatt

SEQ ID NO: 511356 - DNA, 19 bp, Mus musculus
  siRNA target sequence for Pcca (NM_144844.1,1429-1447).
gcactggacaattatgtga

SEQ ID NO: 511357 - DNA, 19 bp, Mus musculus
  siRNA target sequence for Pcca (NM_144844.1,1430-1448).
cactggacaattatgtgat

SEQ ID NO: 511358 - DNA, 19 bp, Mus musculus
  siRNA target sequence for Pcca (NM_144844.1,1451-1469).
ggggtgttacacacaacat

SEQ ID NO: 511359 - DNA, 19 bp, Mus musculus
  siRNA target sequence for Pcca (NM_144844.1,1477-1495).
ctccgggaggtgataatca

SEQ ID NO: 511360 - DNA, 19 bp, Mus musculus
  siRNA target sequence for Pcca (NM_144844.1,1488-1506).
gataatcaacacacgtttt

SEQ ID NO: 511361 - DNA, 19 bp, Mus musculus
  siRNA target sequence for Pcca (NM_144844.1,1513-1531).
ggagacatcagcactaagt

SEQ ID NO: 511362 - DNA, 19 bp, Mus musculus
  siRNA target sequence for Pcca (NM_144844.1,1514-1532).
gagacatcagcactaagtt

SEQ ID NO: 511363 - DNA, 19 bp, Mus musculus
  siRNA target sequence for Pcca (NM_144844.1,1560-1578).
caaagggcacacgttaaca

SEQ ID NO: 511364 - DNA, 19 bp, Mus musculus
  siRNA target sequence for Pcca (NM_144844.1,1583-1601).
gtgagagaaaccagttatt

SEQ ID NO: 511365 - DNA, 19 bp, Mus musculus
  siRNA target sequence for Pcca (NM_144844.1,1700-1718).
gggagctctcggtaaagtt

SEQ ID NO: 511366 - DNA, 19 bp, Mus musculus
  siRNA target sequence for Pcca (NM_144844.1,1701-1719).
ggagctctcggtaaagtta

SEQ ID NO: 511367 - DNA, 19 bp, Mus musculus
  siRNA target sequence for Pcca (NM_144844.1,1707-1725).
ctcggtaaagttacatgat

SEQ ID NO: 511368 - DNA, 19 bp, Mus musculus
  siRNA target sequence for Pcca (NM_144844.1,1709-1727).
cggtaaagttacatgatga

SEQ ID NO: 511369 - DNA, 19 bp, Mus musculus
  siRNA target sequence for Pcca (NM_144844.1,1710-1728).
ggtaaagttacatgatgaa

SEQ ID NO: 511370 - DNA, 19 bp, Mus musculus
  siRNA target sequence for Pcca (NM_144844.1,1763-1781).
catttaccgtggaagttga

SEQ ID NO: 511371 - DNA, 19 bp, Mus musculus
  siRNA target sequence for Pcca (NM_144844.1,1777-1795).
gttgatggctcgaaactaa

SEQ ID NO: 511372 - DNA, 19 bp, Mus musculus
  siRNA target sequence for Pcca (NM_144844.1,1783-1801).
ggctcgaaactaaatgtga

SEQ ID NO: 511373 - DNA, 19 bp, Mus musculus
  siRNA target sequence for Pcca (NM_144844.1,1816-1834).
ctggcgtcacccttattgt

SEQ ID NO: 511374 - DNA, 19 bp, Mus musculus
  siRNA target sequence for Pcca (NM_144844.1,1818-1836).
ggcgtcacccttattgtct

SEQ ID NO: 511375 - DNA, 19 bp, Mus musculus
  siRNA target sequence for Pcca (NM_144844.1,1952-1970).
ctgcagagctgaacaaatt

SEQ ID NO: 511376 - DNA, 19 bp, Mus musculus
  siRNA target sequence for Pcca (NM_144844.1,1955-1973).
cagagctgaacaaattcat

SEQ ID NO: 511377 - DNA, 19 bp, Mus musculus
  siRNA target sequence for Pctk1 (NM_011049.2,631-649).
caccccccacgcaagatct

SEQ ID NO: 511378 - DNA, 19 bp, Mus musculus
  siRNA target sequence for Pctk1 (NM_011049.2,764-782).
gcctccgccgagtcagttt

SEQ ID NO: 511379 - DNA, 19 bp, Mus musculus
  siRNA target sequence for Pctk1 (NM_011049.2,766-784).
ctccgccgagtcagtttgt

SEQ ID NO: 511380 - DNA, 19 bp, Mus musculus
  siRNA target sequence for Pctk1 (NM_011049.2,768-786).
ccgccgagtcagtttgtct

SEQ ID NO: 511381 - DNA, 19 bp, Mus musculus
  siRNA target sequence for Pctk1 (NM_011049.2,950-968).
gggaagtatccctgcttaa

SEQ ID NO: 511382 - DNA, 19 bp, Mus musculus
  siRNA target sequence for Pctk1 (NM_011049.2,984-1002).
caacatcgtcacactacat

SEQ ID NO: 511383 - DNA, 19 bp, Mus musculus
  siRNA target sequence for Pctk1 (NM_011049.2,990-1008).
cgtcacactacatgacatt

SEQ ID NO: 511384 - DNA, 19 bp, Mus musculus
  siRNA target sequence for Pctk1 (NM_011049.2,991-1009).
gtcacactacatgacatta

SEQ ID NO: 511385 - DNA, 19 bp, Mus musculus
  siRNA target sequence for Pctk1 (NM_011049.2,995-1013).
cactacatgacattatcca

SEQ ID NO: 511386 - DNA, 19 bp, Mus musculus
  siRNA target sequence for Pctk1 (NM_011049.2,1240-1258).
ctggctcgtgccaagtcaa

SEQ ID NO: 511387 - DNA, 19 bp, Mus musculus
  siRNA target sequence for Pctk1 (NM_011049.2,1242-1260).
ggctcgtgccaagtcaatt

SEQ ID NO: 511388 - DNA, 19 bp, Mus musculus
  siRNA target sequence for Pctk1 (NM_011049.2,1250-1268).
ccaagtcaattcctactaa

SEQ ID NO: 511389 - DNA, 19 bp, Mus musculus
  siRNA target sequence for Pctk1 (NM_011049.2,1251-1269).
caagtcaattcctactaaa

SEQ ID NO: 511390 - DNA, 19 bp, Mus musculus
  siRNA target sequence for Pctk1 (NM_011049.2,1254-1272).
gtcaattcctactaaaaca

SEQ ID NO: 511391 - DNA, 19 bp, Mus musculus
  siRNA target sequence for Pctk1 (NM_011049.2,1360-1378).
ggtgtaggctgcatcttct

SEQ ID NO: 511392 - DNA, 19 bp, Mus musculus
  siRNA target sequence for Pctk1 (NM_011049.2,1361-1379).
gtgtaggctgcatcttcta

SEQ ID NO: 511393 - DNA, 19 bp, Mus musculus
  siRNA target sequence for Pctk1 (NM_011049.2,1489-1507).
ctgtccaatgaggagttta

SEQ ID NO: 511394 - DNA, 19 bp, Mus musculus
  siRNA target sequence for Pctk1 (NM_011049.2,1491-1509).
gtccaatgaggagtttaga

SEQ ID NO: 511395 - DNA, 19 bp, Mus musculus
  siRNA target sequence for Pctk1 (NM_011049.2,1494-1512).
caatgaggagtttagaaca

SEQ ID NO: 511396 - DNA, 19 bp, Mus musculus
  siRNA target sequence for Pctk1 (NM_011049.2,1498-1516).
gaggagtttagaacataca

SEQ ID NO: 511397 - DNA, 19 bp, Mus musculus
  siRNA target sequence for Pctk1 (NM_011049.2,1501-1519).
gagtttagaacatacaact

SEQ ID NO: 511398 - DNA, 19 bp, Mus musculus
  siRNA target sequence for Pctk1 (NM_011049.2,1551-1569).
ccatgcaccccgacttgat

SEQ ID NO: 511399 - DNA, 19 bp, Mus musculus
  siRNA target sequence for Pctk1 (NM_011049.2,1552-1570).
catgcaccccgacttgata

SEQ ID NO: 511400 - DNA, 19 bp, Mus musculus
  siRNA target sequence for Pctk1 (NM_011049.2,1670-1688).
gggagcggatccacaaact

SEQ ID NO: 511401 - DNA, 19 bp, Mus musculus
  siRNA target sequence for Pctk1 (NM_011049.2,1671-1689).
ggagcggatccacaaactt

SEQ ID NO: 511402 - DNA, 19 bp, Mus musculus
  siRNA target sequence for Pctk2 (NM_146239.1,168-186).
gaatggaagcagactagat

SEQ ID NO: 511403 - DNA, 19 bp, Mus musculus
  siRNA target sequence for Pctk2 (NM_146239.1,176-194).
gcagactagatattgttca

SEQ ID NO: 511404 - DNA, 19 bp, Mus musculus
  siRNA target sequence for Pctk2 (NM_146239.1,177-195).
cagactagatattgttcat

SEQ ID NO: 511405 - DNA, 19 bp, Mus musculus
  siRNA target sequence for Pctk2 (NM_146239.1,179-197).
gactagatattgttcatga

SEQ ID NO: 511406 - DNA, 19 bp, Mus musculus
  siRNA target sequence for Pctk2 (NM_146239.1,281-299).
gcctcagaaatcgtataca

SEQ ID NO: 511407 - DNA, 19 bp, Mus musculus
  siRNA target sequence for Pctk2 (NM_146239.1,282-300).
cctcagaaatcgtatacat

SEQ ID NO: 511408 - DNA, 19 bp, Mus musculus
  siRNA target sequence for Pctk2 (NM_146239.1,283-301).
ctcagaaatcgtatacata

SEQ ID NO: 511409 - DNA, 19 bp, Mus musculus
  siRNA target sequence for Pctk2 (NM_146239.1,429-447).
ccgcagagcttccttatca

SEQ ID NO: 511410 - DNA, 19 bp, Mus musculus
  siRNA target sequence for Pctk2 (NM_146239.1,492-510).
gctcggagagggtacatat

SEQ ID NO: 511411 - DNA, 19 bp, Mus musculus
  siRNA target sequence for Pctk2 (NM_146239.1,495-513).
cggagagggtacatatgca

SEQ ID NO: 511412 - DNA, 19 bp, Mus musculus
  siRNA target sequence for Pctk2 (NM_146239.1,496-514).
ggagagggtacatatgcaa

SEQ ID NO: 511413 - DNA, 19 bp, Mus musculus
  siRNA target sequence for Pctk2 (NM_146239.1,501-519).
gggtacatatgcaacagta

SEQ ID NO: 511414 - DNA, 19 bp, Mus musculus
  siRNA target sequence for Pctk2 (NM_146239.1,502-520).
ggtacatatgcaacagtat

SEQ ID NO: 511415 - DNA, 19 bp, Mus musculus
  siRNA target sequence for Pctk2 (NM_146239.1,533-551).
gtaaactgacagaaaattt

SEQ ID NO: 511416 - DNA, 19 bp, Mus musculus
  siRNA target sequence for Pctk2 (NM_146239.1,597-615).
ctgtacagctataagagaa

SEQ ID NO: 511417 - DNA, 19 bp, Mus musculus
  siRNA target sequence for Pctk2 (NM_146239.1,605-623).
ctataagagaagtttcact

SEQ ID NO: 511418 - DNA, 19 bp, Mus musculus
  siRNA target sequence for Pctk2 (NM_146239.1,669-687).
cgttcacacagacaaatct

SEQ ID NO: 511419 - DNA, 19 bp, Mus musculus
  siRNA target sequence for Pctk2 (NM_146239.1,922-940).
cccacaaagacctactcaa

SEQ ID NO: 511420 - DNA, 19 bp, Mus musculus
  siRNA target sequence for Pctk2 (NM_146239.1,923-941).
ccacaaagacctactcaaa

SEQ ID NO: 511421 - DNA, 19 bp, Mus musculus
  siRNA target sequence for Pctk2 (NM_146239.1,930-948).
gacctactcaaatgaagtt

SEQ ID NO: 511422 - DNA, 19 bp, Mus musculus
  siRNA target sequence for Pctk2 (NM_146239.1,932-950).
cctactcaaatgaagttgt

SEQ ID NO: 511423 - DNA, 19 bp, Mus musculus
  siRNA target sequence for Pctk2 (NM_146239.1,985-1003).
ggttcctcagaatactcaa

SEQ ID NO: 511424 - DNA, 19 bp, Mus musculus
  siRNA target sequence for Pctk2 (NM_146239.1,1196-1214).
cacaacctctaattaatca

SEQ ID NO: 511425 - DNA, 19 bp, Mus musculus
  siRNA target sequence for Pctk2 (NM_146239.1,1213-1231).
catgcacccaggttagatt

SEQ ID NO: 511426 - DNA, 19 bp, Mus musculus
  siRNA target sequence for Pctk2 (NM_146239.1,1217-1235).
cacccaggttagattctga

SEQ ID NO: 511427 - DNA, 19 bp, Mus musculus
  siRNA target sequence for Pctk2 (NM_146239.1,1223-1241).
ggttagattctgaaggaat

SEQ ID NO: 511428 - DNA, 19 bp, Mus musculus
  siRNA target sequence for Pctk2 (NM_146239.1,1224-1242).
gttagattctgaaggaatt

SEQ ID NO: 511429 - DNA, 19 bp, Mus musculus
  siRNA target sequence for Pctk2 (NM_146239.1,1228-1246).
gattctgaaggaattgaat

SEQ ID NO: 511430 - DNA, 19 bp, Mus musculus
  siRNA target sequence for Pctk2 (NM_146239.1,1264-1282).
cagtatgaatctaagaaga

SEQ ID NO: 511431 - DNA, 19 bp, Mus musculus
  siRNA target sequence for Pctk2 (NM_146239.1,1350-1368).
gcccgagagcgtatcaata

SEQ ID NO: 511432 - DNA, 19 bp, Mus musculus
  siRNA target sequence for Pctk2 (NM_146239.1,1351-1369).
cccgagagcgtatcaatat

SEQ ID NO: 511433 - DNA, 19 bp, Mus musculus
  siRNA target sequence for Pctk2 (NM_146239.1,1352-1370).
ccgagagcgtatcaatatt

SEQ ID NO: 511434 - DNA, 19 bp, Mus musculus
  siRNA target sequence for Pctk2 (NM_146239.1,1360-1378).
gtatcaatattcagtttga

SEQ ID NO: 511435 - DNA, 19 bp, Mus musculus
  siRNA target sequence for Pctk2 (NM_146239.1,1401-1419).
cccgggttttcgaaactct

SEQ ID NO: 511436 - DNA, 19 bp, Mus musculus
  siRNA target sequence for Pctk2 (NM_146239.1,1402-1420).
ccgggttttcgaaactctt

SEQ ID NO: 511437 - DNA, 19 bp, Mus musculus
  siRNA target sequence for Pctk2 (NM_146239.1,1405-1423).
ggttttcgaaactcttctt

SEQ ID NO: 511438 - DNA, 19 bp, Mus musculus
  siRNA target sequence for Pctk2 (NM_146239.1,1406-1424).
gttttcgaaactcttctta

SEQ ID NO: 511439 - DNA, 19 bp, Mus musculus
  siRNA target sequence for Pctk3 (NM_008795.1,473-491).
ctggcatgcagtatcaaca

SEQ ID NO: 511440 - DNA, 19 bp, Mus musculus
  siRNA target sequence for Pctk3 (NM_008795.1,560-578).
gcctaccccaggaattcct

SEQ ID NO: 511441 - DNA, 19 bp, Mus musculus
  siRNA target sequence for Pctk3 (NM_008795.1,665-683).
ggaaactggaaacatatgt

SEQ ID NO: 511442 - DNA, 19 bp, Mus musculus
  siRNA target sequence for Pctk3 (NM_008795.1,798-816).
gccctgcactgctattcga

SEQ ID NO: 511443 - DNA, 19 bp, Mus musculus
  siRNA target sequence for Pctk3 (NM_008795.1,862-880).
ctgcatgacctcattcaca

SEQ ID NO: 511444 - DNA, 19 bp, Mus musculus
  siRNA target sequence for Pctk3 (NM_008795.1,890-908).
ccctcaccctggtgtttga

SEQ ID NO: 511445 - DNA, 19 bp, Mus musculus
  siRNA target sequence for Pctk3 (NM_008795.1,1115-1133).
ccaaatcagtgcctacaaa

SEQ ID NO: 511446 - DNA, 19 bp, Mus musculus
  siRNA target sequence for Pctk3 (NM_008795.1,1127-1145).
ctacaaagacctattccaa

SEQ ID NO: 511447 - DNA, 19 bp, Mus musculus
  siRNA target sequence for Pctk3 (NM_008795.1,1353-1371).
gacgtccatctctgagttt

SEQ ID NO: 511448 - DNA, 19 bp, Mus musculus
  siRNA target sequence for Pctk3 (NM_008795.1,1366-1384).
gagtttcgagcctacaact

SEQ ID NO: 511449 - DNA, 19 bp, Mus musculus
  siRNA target sequence for Pctk3 (NM_008795.1,1380-1398).
caacttcccccgataccta

SEQ ID NO: 511450 - DNA, 19 bp, Mus musculus
  siRNA target sequence for Pctk3 (NM_008795.1,1558-1576).
gacactgcctccatcttct

SEQ ID NO: 511451 - DNA, 19 bp, Mus musculus
  siRNA target sequence for Pcx (NM_008797.1,185-203).
gtccggcgtctggagtata

SEQ ID NO: 511452 - DNA, 19 bp, Mus musculus
  siRNA target sequence for Pcx (NM_008797.1,207-225).
ctatcaagaaagtaatggt

SEQ ID NO: 511453 - DNA, 19 bp, Mus musculus
  siRNA target sequence for Pcx (NM_008797.1,241-259).
gattgccatccgagtgttt

SEQ ID NO: 511454 - DNA, 19 bp, Mus musculus
  siRNA target sequence for Pcx (NM_008797.1,338-356).
gctgatgaagcctacctta

SEQ ID NO: 511455 - DNA, 19 bp, Mus musculus
  siRNA target sequence for Pcx (NM_008797.1,339-357).
ctgatgaagcctaccttat

SEQ ID NO: 511456 - DNA, 19 bp, Mus musculus
  siRNA target sequence for Pcx (NM_008797.1,463-481).
ctcagagcgagcagacttt

SEQ ID NO: 511457 - DNA, 19 bp, Mus musculus
  siRNA target sequence for Pcx (NM_008797.1,663-681).
gcttccctattatcttcaa

SEQ ID NO: 511458 - DNA, 19 bp, Mus musculus
  siRNA target sequence for Pcx (NM_008797.1,712-730).
gcgggtcgtgcatagctat

SEQ ID NO: 511459 - DNA, 19 bp, Mus musculus
  siRNA target sequence for Pcx (NM_008797.1,786-804).
ggaatggagcgttgtttgt

SEQ ID NO: 511460 - DNA, 19 bp, Mus musculus
  siRNA target sequence for Pcx (NM_008797.1,795-813).
cgttgtttgtggagaagtt

SEQ ID NO: 511461 - DNA, 19 bp, Mus musculus
  siRNA target sequence for Pcx (NM_008797.1,799-817).
gtttgtggagaagttcatt

SEQ ID NO: 511462 - DNA, 19 bp, Mus musculus
  siRNA target sequence for Pcx (NM_008797.1,1049-1067).
cacggcaagcactacttca

SEQ ID NO: 511463 - DNA, 19 bp, Mus musculus
  siRNA target sequence for Pcx (NM_008797.1,1182-1200).
gcctgcggcaggagaacat

SEQ ID NO: 511464 - DNA, 19 bp, Mus musculus
  siRNA target sequence for Pcx (NM_008797.1,1451-1469).
cgtgtccgaggtgtaaaga

SEQ ID NO: 511465 - DNA, 19 bp, Mus musculus
  siRNA target sequence for Pcx (NM_008797.1,1477-1495).
ccccttcctgcagaatgtt

SEQ ID NO: 511466 - DNA, 19 bp, Mus musculus
  siRNA target sequence for Pcx (NM_008797.1,1589-1607).
gcccagaagttgctacatt

SEQ ID NO: 511467 - DNA, 19 bp, Mus musculus
  siRNA target sequence for Pcx (NM_008797.1,1590-1608).
cccagaagttgctacatta

SEQ ID NO: 511468 - DNA, 19 bp, Mus musculus
  siRNA target sequence for Pcx (NM_008797.1,1842-1860).
gagtgcgcacacatgatct

SEQ ID NO: 511469 - DNA, 19 bp, Mus musculus
  siRNA target sequence for Pcx (NM_008797.1,1847-1865).
cgcacacatgatctcaaaa

SEQ ID NO: 511470 - DNA, 19 bp, Mus musculus
  siRNA target sequence for Pcx (NM_008797.1,1848-1866).
gcacacatgatctcaaaaa

SEQ ID NO: 511471 - DNA, 19 bp, Mus musculus
  siRNA target sequence for Pcx (NM_008797.1,1880-1898).
gttgcccacaacttcaaca

SEQ ID NO: 511472 - DNA, 19 bp, Mus musculus
  siRNA target sequence for Pcx (NM_008797.1,2066-2084).
gacaacgtggtcttcaagt

SEQ ID NO: 511473 - DNA, 19 bp, Mus musculus
  siRNA target sequence for Pcx (NM_008797.1,2113-2131).
ggacgtcttccgagtcttt

SEQ ID NO: 511474 - DNA, 19 bp, Mus musculus
  siRNA target sequence for Pcx (NM_008797.1,2198-2216).
gtggaggctgccatctcat

SEQ ID NO: 511475 - DNA, 19 bp, Mus musculus
  siRNA target sequence for Pcx (NM_008797.1,2201-2219).
gaggctgccatctcataca

SEQ ID NO: 511476 - DNA, 19 bp, Mus musculus
  siRNA target sequence for Pcx (NM_008797.1,2234-2252).
gaccctagtcgcactaaat

SEQ ID NO: 511477 - DNA, 19 bp, Mus musculus
  siRNA target sequence for Pcx (NM_008797.1,2237-2255).
cctagtcgcactaaatact

SEQ ID NO: 511478 - DNA, 19 bp, Mus musculus
  siRNA target sequence for Pcx (NM_008797.1,2410-2428).
ccatacccatgatacatca

SEQ ID NO: 511479 - DNA, 19 bp, Mus musculus
  siRNA target sequence for Pcx (NM_008797.1,2630-2648).
ctgtacgcagccttcgatt

SEQ ID NO: 511480 - DNA, 19 bp, Mus musculus
  siRNA target sequence for Pcx (NM_008797.1,2670-2688).
gcaactccgacgtgtatga

SEQ ID NO: 511481 - DNA, 19 bp, Mus musculus
  siRNA target sequence for Pcx (NM_008797.1,2674-2692).
ctccgacgtgtatgagaat

SEQ ID NO: 511482 - DNA, 19 bp, Mus musculus
  siRNA target sequence for Pcx (NM_008797.1,2676-2694).
ccgacgtgtatgagaatga

SEQ ID NO: 511483 - DNA, 19 bp, Mus musculus
  siRNA target sequence for Pcx (NM_008797.1,2938-2956).
gttcctgcagggctacatt

SEQ ID NO: 511484 - DNA, 19 bp, Mus musculus
  siRNA target sequence for Pcx (NM_008797.1,3185-3203).
cccctggatagccttaata

SEQ ID NO: 511485 - DNA, 19 bp, Mus musculus
  siRNA target sequence for Pcx (NM_008797.1,3196-3214).
ccttaatactcgtctcttt

SEQ ID NO: 511486 - DNA, 19 bp, Mus musculus
  siRNA target sequence for Pcx (NM_008797.1,3613-3631).
cgacctcatcctagagatt

SEQ ID NO: 511487 - DNA, 19 bp, Mus musculus
  siRNA target sequence for Pcx (NM_008797.1,3617-3635).
ctcatcctagagattgagt

SEQ ID NO: 511488 - DNA, 19 bp, Mus musculus
  siRNA target sequence for Pdgfra (NM_011058.1,252-270).
ctcctgccagctcttatta

SEQ ID NO: 511489 - DNA, 19 bp, Mus musculus
  siRNA target sequence for Pdgfra (NM_011058.1,307-325).
cagctgaattcgtcctttt

SEQ ID NO: 511490 - DNA, 19 bp, Mus musculus
  siRNA target sequence for Pdgfra (NM_011058.1,385-403).
gaccccaacgtggaaatca

SEQ ID NO: 511491 - DNA, 19 bp, Mus musculus
  siRNA target sequence for Pdgfra (NM_011058.1,387-405).
ccccaacgtggaaatcaga

SEQ ID NO: 511492 - DNA, 19 bp, Mus musculus
  siRNA target sequence for Pdgfra (NM_011058.1,469-487).
cacaccggatggtacactt

SEQ ID NO: 511493 - DNA, 19 bp, Mus musculus
  siRNA target sequence for Pdgfra (NM_011058.1,582-600).
cgggatgaccgattcctta

SEQ ID NO: 511494 - DNA, 19 bp, Mus musculus
  siRNA target sequence for Pdgfra (NM_011058.1,615-633).
ggatgactctgccatcata

SEQ ID NO: 511495 - DNA, 19 bp, Mus musculus
  siRNA target sequence for Pdgfra (NM_011058.1,649-667).
gatccggagactcaagtaa

SEQ ID NO: 511496 - DNA, 19 bp, Mus musculus
  siRNA target sequence for Pdgfra (NM_011058.1,653-671).
cggagactcaagtaacctt

SEQ ID NO: 511497 - DNA, 19 bp, Mus musculus
  siRNA target sequence for Pdgfra (NM_011058.1,783-801).
caagaccagcgagtttaat

SEQ ID NO: 511498 - DNA, 19 bp, Mus musculus
  siRNA target sequence for Pdgfra (NM_011058.1,786-804).
gaccagcgagtttaatgtt

SEQ ID NO: 511499 - DNA, 19 bp, Mus musculus
  siRNA target sequence for Pdgfra (NM_011058.1,846-864).
cgcacgccagactgtgtat

SEQ ID NO: 511500 - DNA, 19 bp, Mus musculus
  siRNA target sequence for Pdgfra (NM_011058.1,847-865).
gcacgccagactgtgtata

SEQ ID NO: 511501 - DNA, 19 bp, Mus musculus
  siRNA target sequence for Pdgfra (NM_011058.1,886-904).
gtgacctgtgccgtcttta

SEQ ID NO: 511502 - DNA, 19 bp, Mus musculus
  siRNA target sequence for Pdgfra (NM_011058.1,890-908).
cctgtgccgtctttaacaa

SEQ ID NO: 511503 - DNA, 19 bp, Mus musculus
  siRNA target sequence for Pdgfra (NM_011058.1,981-999).
caaactcccatccatcaaa

SEQ ID NO: 511504 - DNA, 19 bp, Mus musculus
  siRNA target sequence for Pdgfra (NM_011058.1,1216-1234).
ccgacgcccaggatatcgt

SEQ ID NO: 511505 - DNA, 19 bp, Mus musculus
  siRNA target sequence for Pdgfra (NM_011058.1,1296-1314).
gagtcaggaaacaaggtat

SEQ ID NO: 511506 - DNA, 19 bp, Mus musculus
  siRNA target sequence for Pdgfra (NM_011058.1,1310-1328).
ggtatcagagcaaattaaa

SEQ ID NO: 511507 - DNA, 19 bp, Mus musculus
  siRNA target sequence for Pdgfra (NM_011058.1,1367-1385).
ccattatagttcaaaatga

SEQ ID NO: 511508 - DNA, 19 bp, Mus musculus
  siRNA target sequence for Pdgfra (NM_011058.1,1387-1405).
gatgacgtgaagagttaca

SEQ ID NO: 511509 - DNA, 19 bp, Mus musculus
  siRNA target sequence for Pdgfra (NM_011058.1,1505-1523).
gcacccctcttccagaaat

SEQ ID NO: 511510 - DNA, 19 bp, Mus musculus
  siRNA target sequence for Pdgfra (NM_011058.1,1508-1526).
cccctcttccagaaatcga

SEQ ID NO: 511511 - DNA, 19 bp, Mus musculus
  siRNA target sequence for Pdgfra (NM_011058.1,1519-1537).
gaaatcgactggatgatct

SEQ ID NO: 511512 - DNA, 19 bp, Mus musculus
  siRNA target sequence for Pdgfra (NM_011058.1,1530-1548).
gatgatctgcaagcatatt

SEQ ID NO: 511513 - DNA, 19 bp, Mus musculus
  siRNA target sequence for Pdgfra (NM_011058.1,1536-1554).
ctgcaagcatattaagaaa

SEQ ID NO: 511514 - DNA, 19 bp, Mus musculus
  siRNA target sequence for Pdgfra (NM_011058.1,1579-1597).
gttttggccagcaatgtct

SEQ ID NO: 511515 - DNA, 19 bp, Mus musculus
  siRNA target sequence for Pdgfra (NM_011058.1,1584-1602).
ggccagcaatgtctcaaat

SEQ ID NO: 511516 - DNA, 19 bp, Mus musculus
  siRNA target sequence for Pdgfra (NM_011058.1,1585-1603).
gccagcaatgtctcaaata

SEQ ID NO: 511517 - DNA, 19 bp, Mus musculus
  siRNA target sequence for Pdgfra (NM_011058.1,1586-1604).
ccagcaatgtctcaaatat

SEQ ID NO: 511518 - DNA, 19 bp, Mus musculus
  siRNA target sequence for Pdgfra (NM_011058.1,1589-1607).
gcaatgtctcaaatattat

SEQ ID NO: 511519 - DNA, 19 bp, Mus musculus
  siRNA target sequence for Pdgfra (NM_011058.1,1687-1705).
cgatgcctggcaaagaaca

SEQ ID NO: 511520 - DNA, 19 bp, Mus musculus
  siRNA target sequence for Pdgfra (NM_011058.1,1839-1857).
gcagaaaccacggtatgaa

SEQ ID NO: 511521 - DNA, 19 bp, Mus musculus
  siRNA target sequence for Pdgfra (NM_011058.1,1840-1858).
cagaaaccacggtatgaaa

SEQ ID NO: 511522 - DNA, 19 bp, Mus musculus
  siRNA target sequence for Pdgfra (NM_011058.1,1865-1883).
ggagggttatcgagtcaat

SEQ ID NO: 511523 - DNA, 19 bp, Mus musculus
  siRNA target sequence for Pdgfra (NM_011058.1,2010-2028).
ggtcgaaggtacagcttat

SEQ ID NO: 511524 - DNA, 19 bp, Mus musculus
  siRNA target sequence for Pdgfra (NM_011058.1,2013-2031).
cgaaggtacagcttatgga

SEQ ID NO: 511525 - DNA, 19 bp, Mus musculus
  siRNA target sequence for Pdgfra (NM_011058.1,2017-2035).
ggtacagcttatggattaa

SEQ ID NO: 511526 - DNA, 19 bp, Mus musculus
  siRNA target sequence for Pdgfra (NM_011058.1,2036-2054).
gccggtcccaacctgtaat

SEQ ID NO: 511527 - DNA, 19 bp, Mus musculus
  siRNA target sequence for Pdgfra (NM_011058.1,2038-2056).
cggtcccaacctgtaatga

SEQ ID NO: 511528 - DNA, 19 bp, Mus musculus
  siRNA target sequence for Pdgfra (NM_011058.1,2082-2100).
cacagccaggtctagtgaa

SEQ ID NO: 511529 - DNA, 19 bp, Mus musculus
  siRNA target sequence for Pdgfra (NM_011058.1,2087-2105).
ccaggtctagtgaaaagca

SEQ ID NO: 511530 - DNA, 19 bp, Mus musculus
  siRNA target sequence for Pdgfra (NM_011058.1,2144-2162).
ggccacatttgaacattgt

SEQ ID NO: 511531 - DNA, 19 bp, Mus musculus
  siRNA target sequence for Pdgfra (NM_011058.1,2183-2201).
ccaagtcaggtcccattta

SEQ ID NO: 511532 - DNA, 19 bp, Mus musculus
  siRNA target sequence for Pdgfra (NM_011058.1,2189-2207).
caggtcccatttacatcat

SEQ ID NO: 511533 - DNA, 19 bp, Mus musculus
  siRNA target sequence for Pdgfra (NM_011058.1,2219-2237).
gcttctatggggatttggt

SEQ ID NO: 511534 - DNA, 19 bp, Mus musculus
  siRNA target sequence for Pdgfra (NM_011058.1,2236-2254).
gtcaactacttgcataaga

SEQ ID NO: 511535 - DNA, 19 bp, Mus musculus
  siRNA target sequence for Pdgfra (NM_011058.1,2329-2347).
gacgagagcacaagaagtt

SEQ ID NO: 511536 - DNA, 19 bp, Mus musculus
  siRNA target sequence for Pdgfra (NM_011058.1,2331-2349).
cgagagcacaagaagttat

SEQ ID NO: 511537 - DNA, 19 bp, Mus musculus
  siRNA target sequence for Pdgfra (NM_011058.1,2375-2393).
gcgactacatggacatgaa

SEQ ID NO: 511538 - DNA, 19 bp, Mus musculus
  siRNA target sequence for Pdgfra (NM_011058.1,2432-2450).
ggaaagaggtttctaaata

SEQ ID NO: 511539 - DNA, 19 bp, Mus musculus
  siRNA target sequence for Pdgfra (NM_011058.1,2482-2500).
ccagcctcctacaagaaga

SEQ ID NO: 511540 - DNA, 19 bp, Mus musculus
  siRNA target sequence for Pdgfra (NM_011058.1,2485-2503).
gcctcctacaagaagaaat

SEQ ID NO: 511541 - DNA, 19 bp, Mus musculus
  siRNA target sequence for Pdgfra (NM_011058.1,2577-2595).
gagcttcacctatcaagtt

SEQ ID NO: 511542 - DNA, 19 bp, Mus musculus
  siRNA target sequence for Pdgfra (NM_011058.1,2593-2611).
gttgctcgaggaatggaat

SEQ ID NO: 511543 - DNA, 19 bp, Mus musculus
  siRNA target sequence for Pdgfra (NM_011058.1,2597-2615).
ctcgaggaatggaattttt

SEQ ID NO: 511544 - DNA, 19 bp, Mus musculus
  siRNA target sequence for Pdgfra (NM_011058.1,2664-2682).
cctggcgcaaggaaaaatt

SEQ ID NO: 511545 - DNA, 19 bp, Mus musculus
  siRNA target sequence for Pdgfra (NM_011058.1,2669-2687).
cgcaaggaaaaattgtgaa

SEQ ID NO: 511546 - DNA, 19 bp, Mus musculus
  siRNA target sequence for Pdgfra (NM_011058.1,2737-2755).
gtgtcaaaaggcagtactt

SEQ ID NO: 511547 - DNA, 19 bp, Mus musculus
  siRNA target sequence for Pdgfra (NM_011058.1,2881-2899).
ggcatgatggtcgattcta

SEQ ID NO: 511548 - DNA, 19 bp, Mus musculus
  siRNA target sequence for Pdgfra (NM_011058.1,2883-2901).
catgatggtcgattctact

SEQ ID NO: 511549 - DNA, 19 bp, Mus musculus
  siRNA target sequence for Pdgfra (NM_011058.1,2890-2908).
gtcgattctactttctaca

SEQ ID NO: 511550 - DNA, 19 bp, Mus musculus
  siRNA target sequence for Pdgfra (NM_011058.1,2951-2969).
ccaccagtgaagtctatga

SEQ ID NO: 511551 - DNA, 19 bp, Mus musculus
  siRNA target sequence for Pdgfra (NM_011058.1,2957-2975).
gtgaagtctatgagatcat

SEQ ID NO: 511552 - DNA, 19 bp, Mus musculus
  siRNA target sequence for Pdgfra (NM_011058.1,3046-3064).
ctgttgccgggacaataca

SEQ ID NO: 511553 - DNA, 19 bp, Mus musculus
  siRNA target sequence for Pdgfra (NM_011058.1,3055-3073).
ggacaatacaagaagagtt

SEQ ID NO: 511554 - DNA, 19 bp, Mus musculus
  siRNA target sequence for Pdgfra (NM_011058.1,3056-3074).
gacaatacaagaagagtta

SEQ ID NO: 511555 - DNA, 19 bp, Mus musculus
  siRNA target sequence for Pdgfra (NM_011058.1,3085-3103).
cacctggacttcctaaaga

SEQ ID NO: 511556 - DNA, 19 bp, Mus musculus
  siRNA target sequence for Pdgfra (NM_011058.1,3129-3147).
gcgggtggactctgataat

SEQ ID NO: 511557 - DNA, 19 bp, Mus musculus
  siRNA target sequence for Pdgfra (NM_011058.1,3149-3167).
cgtacatcggtgtcactta

SEQ ID NO: 511558 - DNA, 19 bp, Mus musculus
  siRNA target sequence for Pdgfra (NM_011058.1,3156-3174).
cggtgtcacttacaaaaat

SEQ ID NO: 511559 - DNA, 19 bp, Mus musculus
  siRNA target sequence for Pdgfra (NM_011058.1,3340-3358).
gagacaggttccagtagtt

SEQ ID NO: 511560 - DNA, 19 bp, Mus musculus
  siRNA target sequence for Pdgfra (NM_011058.1,3353-3371).
gtagttccaccttcatcaa

SEQ ID NO: 511561 - DNA, 19 bp, Mus musculus
  siRNA target sequence for Pdgfra (NM_011058.1,3405-3423).
gatggatgacattggtata

SEQ ID NO: 511562 - DNA, 19 bp, Mus musculus
  siRNA target sequence for Pdgfra (NM_011058.1,3408-3426).
ggatgacattggtatagat

SEQ ID NO: 511563 - DNA, 19 bp, Mus musculus
  siRNA target sequence for Pdgfrb (NM_008809.1,412-430).
ggagacactggggaatact

SEQ ID NO: 511564 - DNA, 19 bp, Mus musculus
  siRNA target sequence for Pdgfrb (NM_008809.1,413-431).
gagacactggggaatactt

SEQ ID NO: 511565 - DNA, 19 bp, Mus musculus
  siRNA target sequence for Pdgfrb (NM_008809.1,415-433).
gacactggggaatactttt

SEQ ID NO: 511566 - DNA, 19 bp, Mus musculus
  siRNA target sequence for Pdgfrb (NM_008809.1,469-487).
gagaggaagcgtatctata

SEQ ID NO: 511567 - DNA, 19 bp, Mus musculus
  siRNA target sequence for Pdgfrb (NM_008809.1,528-546).
ctccgaggacctgttcatt

SEQ ID NO: 511568 - DNA, 19 bp, Mus musculus
  siRNA target sequence for Pdgfrb (NM_008809.1,530-548).
ccgaggacctgttcatttt

SEQ ID NO: 511569 - DNA, 19 bp, Mus musculus
  siRNA target sequence for Pdgfrb (NM_008809.1,531-549).
cgaggacctgttcattttt

SEQ ID NO: 511570 - DNA, 19 bp, Mus musculus
  siRNA target sequence for Pdgfrb (NM_008809.1,609-627).
gacgctacatgagaagaaa

SEQ ID NO: 511571 - DNA, 19 bp, Mus musculus
  siRNA target sequence for Pdgfrb (NM_008809.1,611-629).
cgctacatgagaagaaagt

SEQ ID NO: 511572 - DNA, 19 bp, Mus musculus
  siRNA target sequence for Pdgfrb (NM_008809.1,657-675).
ccaccagcgaggtttcact

SEQ ID NO: 511573 - DNA, 19 bp, Mus musculus
  siRNA target sequence for Pdgfrb (NM_008809.1,680-698).
cttttgaggacaagactta

SEQ ID NO: 511574 - DNA, 19 bp, Mus musculus
  siRNA target sequence for Pdgfrb (NM_008809.1,727-745).
gaagtggactccgatactt

SEQ ID NO: 511575 - DNA, 19 bp, Mus musculus
  siRNA target sequence for Pdgfrb (NM_008809.1,730-748).
gtggactccgatacttact

SEQ ID NO: 511576 - DNA, 19 bp, Mus musculus
  siRNA target sequence for Pdgfrb (NM_008809.1,830-848).
ccatccggtgcattgtgat

SEQ ID NO: 511577 - DNA, 19 bp, Mus musculus
  siRNA target sequence for Pdgfrb (NM_008809.1,856-874).
gatgtggtgaacttccaat

SEQ ID NO: 511578 - DNA, 19 bp, Mus musculus
  siRNA target sequence for Pdgfrb (NM_008809.1,1217-1235).
gcgctggcgagttagtttt

SEQ ID NO: 511579 - DNA, 19 bp, Mus musculus
  siRNA target sequence for Pdgfrb (NM_008809.1,1219-1237).
gctggcgagttagttttgt

SEQ ID NO: 511580 - DNA, 19 bp, Mus musculus
  siRNA target sequence for Pdgfrb (NM_008809.1,1222-1240).
ggcgagttagttttgtcta

SEQ ID NO: 511581 - DNA, 19 bp, Mus musculus
  siRNA target sequence for Pdgfrb (NM_008809.1,1262-1280).
ggtacgtgtcagaactgat

SEQ ID NO: 511582 - DNA, 19 bp, Mus musculus
  siRNA target sequence for Pdgfrb (NM_008809.1,1299-1317).
gtcagaagcgggctactat

SEQ ID NO: 511583 - DNA, 19 bp, Mus musculus
  siRNA target sequence for Pdgfrb (NM_008809.1,1454-1472).
gcatgcctcagccaaatgt

SEQ ID NO: 511584 - DNA, 19 bp, Mus musculus
  siRNA target sequence for Pdgfrb (NM_008809.1,1497-1515).
caaaaggtgtccacgaaaa

SEQ ID NO: 511585 - DNA, 19 bp, Mus musculus
  siRNA target sequence for Pdgfrb (NM_008809.1,1524-1542).
cacacccttggggaatagt

SEQ ID NO: 511586 - DNA, 19 bp, Mus musculus
  siRNA target sequence for Pdgfrb (NM_008809.1,1853-1871).
gctctgacggtcatgagta

SEQ ID NO: 511587 - DNA, 19 bp, Mus musculus
  siRNA target sequence for Pdgfrb (NM_008809.1,1856-1874).
ctgacggtcatgagtacat

SEQ ID NO: 511588 - DNA, 19 bp, Mus musculus
  siRNA target sequence for Pdgfrb (NM_008809.1,1858-1876).
gacggtcatgagtacatct

SEQ ID NO: 511589 - DNA, 19 bp, Mus musculus
  siRNA target sequence for Pdgfrb (NM_008809.1,1922-1940).
cacgggaccagcttgttct

SEQ ID NO: 511590 - DNA, 19 bp, Mus musculus
  siRNA target sequence for Pdgfrb (NM_008809.1,2009-2027).
cgcaggccaccatgaaagt

SEQ ID NO: 511591 - DNA, 19 bp, Mus musculus
  siRNA target sequence for Pdgfrb (NM_008809.1,2063-2081).
gcgagaagcaagccttaat

SEQ ID NO: 511592 - DNA, 19 bp, Mus musculus
  siRNA target sequence for Pdgfrb (NM_008809.1,2155-2173).
ggagggcccatctacatca

SEQ ID NO: 511593 - DNA, 19 bp, Mus musculus
  siRNA target sequence for Pdgfrb (NM_008809.1,2242-2260).
cgacactccaacaagcatt

SEQ ID NO: 511594 - DNA, 19 bp, Mus musculus
  siRNA target sequence for Pdgfrb (NM_008809.1,2344-2362).
gacggtggctacatggata

SEQ ID NO: 511595 - DNA, 19 bp, Mus musculus
  siRNA target sequence for Pdgfrb (NM_008809.1,2444-2462).
gctacatggccccttatga

SEQ ID NO: 511596 - DNA, 19 bp, Mus musculus
  siRNA target sequence for Pdgfrb (NM_008809.1,2445-2463).
ctacatggccccttatgat

SEQ ID NO: 511597 - DNA, 19 bp, Mus musculus
  siRNA target sequence for Pdgfrb (NM_008809.1,2451-2469).
ggccccttatgataactat

SEQ ID NO: 511598 - DNA, 19 bp, Mus musculus
  siRNA target sequence for Pdgfrb (NM_008809.1,2453-2471).
ccccttatgataactatgt

SEQ ID NO: 511599 - DNA, 19 bp, Mus musculus
  siRNA target sequence for Pdgfrb (NM_008809.1,2492-2510).
cctatcgcgccaccttaat

SEQ ID NO: 511600 - DNA, 19 bp, Mus musculus
  siRNA target sequence for Pdgfrb (NM_008809.1,2568-2586).
caacggcatggacttctta

SEQ ID NO: 511601 - DNA, 19 bp, Mus musculus
  siRNA target sequence for Pdgfrb (NM_008809.1,2858-2876).
ccatgaacgaccagttcta

SEQ ID NO: 511602 - DNA, 19 bp, Mus musculus
  siRNA target sequence for Pdgfrb (NM_008809.1,2862-2880).
gaacgaccagttctacaat

SEQ ID NO: 511603 - DNA, 19 bp, Mus musculus
  siRNA target sequence for Pdgfrb (NM_008809.1,2921-2939).
cctccgacgagatctatga

SEQ ID NO: 511604 - DNA, 19 bp, Mus musculus
  siRNA target sequence for Pdgfrb (NM_008809.1,3019-3037).
ctgggtgaaggctataaaa

SEQ ID NO: 511605 - DNA, 19 bp, Mus musculus
  siRNA target sequence for Pdgfrb (NM_008809.1,3023-3041).
gtgaaggctataaaaagaa

SEQ ID NO: 511606 - DNA, 19 bp, Mus musculus
  siRNA target sequence for Pdgfrb (NM_008809.1,3166-3184).
gccgtgcagcccaatgaga

SEQ ID NO: 511607 - DNA, 19 bp, Mus musculus
  siRNA target sequence for Pdgfrb (NM_008809.1,3174-3192).
gcccaatgagagtgacaat

SEQ ID NO: 511608 - DNA, 19 bp, Mus musculus
  siRNA target sequence for Pdk2 (NM_133667.1,211-229).
cgagaagacgtcattcact

SEQ ID NO: 511609 - DNA, 19 bp, Mus musculus
  siRNA target sequence for Pdk2 (NM_133667.1,212-230).
gagaagacgtcattcactt

SEQ ID NO: 511610 - DNA, 19 bp, Mus musculus
  siRNA target sequence for Pdk2 (NM_133667.1,386-404).
gaggaccaccggactctaa

SEQ ID NO: 511611 - DNA, 19 bp, Mus musculus
  siRNA target sequence for Pdk2 (NM_133667.1,567-585).
ccatccgaatgctaatcaa

SEQ ID NO: 511612 - DNA, 19 bp, Mus musculus
  siRNA target sequence for Pdk2 (NM_133667.1,571-589).
ccgaatgctaatcaatcaa

SEQ ID NO: 511613 - DNA, 19 bp, Mus musculus
  siRNA target sequence for Pdk2 (NM_133667.1,704-722).
ctcctgtgtgacaagtatt

SEQ ID NO: 511614 - DNA, 19 bp, Mus musculus
  siRNA target sequence for Pdk2 (NM_133667.1,811-829).
gtaccacatgctctttgaa

SEQ ID NO: 511615 - DNA, 19 bp, Mus musculus
  siRNA target sequence for Pdk3 (NM_145630.1,214-232).
cgtcgccactgtctatcaa

SEQ ID NO: 511616 - DNA, 19 bp, Mus musculus
  siRNA target sequence for Pdk3 (NM_145630.1,215-233).
gtcgccactgtctatcaaa

SEQ ID NO: 511617 - DNA, 19 bp, Mus musculus
  siRNA target sequence for Pdk3 (NM_145630.1,217-235).
cgccactgtctatcaaaca

SEQ ID NO: 511618 - DNA, 19 bp, Mus musculus
  siRNA target sequence for Pdk3 (NM_145630.1,219-237).
ccactgtctatcaaacagt

SEQ ID NO: 511619 - DNA, 19 bp, Mus musculus
  siRNA target sequence for Pdk3 (NM_145630.1,242-260).
ggacttcggaagggataat

SEQ ID NO: 511620 - DNA, 19 bp, Mus musculus
  siRNA target sequence for Pdk3 (NM_145630.1,245-263).
cttcggaagggataatgca

SEQ ID NO: 511621 - DNA, 19 bp, Mus musculus
  siRNA target sequence for Pdk3 (NM_145630.1,320-338).
caccatgagagaggttaat

SEQ ID NO: 511622 - DNA, 19 bp, Mus musculus
  siRNA target sequence for Pdk3 (NM_145630.1,322-340).
ccatgagagaggttaatct

SEQ ID NO: 511623 - DNA, 19 bp, Mus musculus
  siRNA target sequence for Pdk3 (NM_145630.1,339-357).
ctcttgccggataacttgt

SEQ ID NO: 511624 - DNA, 19 bp, Mus musculus
  siRNA target sequence for Pdk3 (NM_145630.1,367-385).
cttccgtgggattagttca

SEQ ID NO: 511625 - DNA, 19 bp, Mus musculus
  siRNA target sequence for Pdk3 (NM_145630.1,447-465).
ccacgagttttggataact

SEQ ID NO: 511626 - DNA, 19 bp, Mus musculus
  siRNA target sequence for Pdk3 (NM_145630.1,448-466).
cacgagttttggataactt

SEQ ID NO: 511627 - DNA, 19 bp, Mus musculus
  siRNA target sequence for Pdk3 (NM_145630.1,468-486).
ctcaacgttctgataaata

SEQ ID NO: 511628 - DNA, 19 bp, Mus musculus
  siRNA target sequence for Pdk3 (NM_145630.1,473-491).
cgttctgataaatatcaga

SEQ ID NO: 511629 - DNA, 19 bp, Mus musculus
  siRNA target sequence for Pdk3 (NM_145630.1,474-492).
gttctgataaatatcagaa

SEQ ID NO: 511630 - DNA, 19 bp, Mus musculus
  siRNA target sequence for Pdk3 (NM_145630.1,523-541).
cccaaggcgtgattgagta

SEQ ID NO: 511631 - DNA, 19 bp, Mus musculus
  siRNA target sequence for Pdk3 (NM_145630.1,531-549).
gtgattgagtacaaggaaa

SEQ ID NO: 511632 - DNA, 19 bp, Mus musculus
  siRNA target sequence for Pdk3 (NM_145630.1,554-572).
cgggtttgatccgttcatt

SEQ ID NO: 511633 - DNA, 19 bp, Mus musculus
  siRNA target sequence for Pdk3 (NM_145630.1,555-573).
gggtttgatccgttcatta

SEQ ID NO: 511634 - DNA, 19 bp, Mus musculus
  siRNA target sequence for Pdk3 (NM_145630.1,564-582).
ccgttcattagcagtaaca

SEQ ID NO: 511635 - DNA, 19 bp, Mus musculus
  siRNA target sequence for Pdk3 (NM_145630.1,565-583).
cgttcattagcagtaacat

SEQ ID NO: 511636 - DNA, 19 bp, Mus musculus
  siRNA target sequence for Pdk3 (NM_145630.1,566-584).
gttcattagcagtaacatt

SEQ ID NO: 511637 - DNA, 19 bp, Mus musculus
  siRNA target sequence for Pdk3 (NM_145630.1,577-595).
gtaacattcaatatttcct

SEQ ID NO: 511638 - DNA, 19 bp, Mus musculus
  siRNA target sequence for Pdk3 (NM_145630.1,594-612).
ctggatcggttttatacca

SEQ ID NO: 511639 - DNA, 19 bp, Mus musculus
  siRNA target sequence for Pdk3 (NM_145630.1,622-640).
ctttccgcatgcttattaa

SEQ ID NO: 511640 - DNA, 19 bp, Mus musculus
  siRNA target sequence for Pdk3 (NM_145630.1,641-659).
ccagcacacacttctgttt

SEQ ID NO: 511641 - DNA, 19 bp, Mus musculus
  siRNA target sequence for Pdk3 (NM_145630.1,675-693).
cctgcacatccgaaacata

SEQ ID NO: 511642 - DNA, 19 bp, Mus musculus
  siRNA target sequence for Pdk3 (NM_145630.1,676-694).
ctgcacatccgaaacatat

SEQ ID NO: 511643 - DNA, 19 bp, Mus musculus
  siRNA target sequence for Pdk3 (NM_145630.1,704-722).
cgaccccacctgtaatgta

SEQ ID NO: 511644 - DNA, 19 bp, Mus musculus
  siRNA target sequence for Pdk3 (NM_145630.1,787-805).
ctccagagctagaagttga

SEQ ID NO: 511645 - DNA, 19 bp, Mus musculus
  siRNA target sequence for Pdk3 (NM_145630.1,855-873).
ccgtcacatctgtttcaca

SEQ ID NO: 511646 - DNA, 19 bp, Mus musculus
  siRNA target sequence for Pdk3 (NM_145630.1,856-874).
cgtcacatctgtttcacat

SEQ ID NO: 511647 - DNA, 19 bp, Mus musculus
  siRNA target sequence for Pdk3 (NM_145630.1,902-920).
gagggcaacagttgaacta

SEQ ID NO: 511648 - DNA, 19 bp, Mus musculus
  siRNA target sequence for Pdk3 (NM_145630.1,905-923).
ggcaacagttgaactacat

SEQ ID NO: 511649 - DNA, 19 bp, Mus musculus
  siRNA target sequence for Pdk3 (NM_145630.1,907-925).
caacagttgaactacatga

SEQ ID NO: 511650 - DNA, 19 bp, Mus musculus
  siRNA target sequence for Pdk3 (NM_145630.1,981-999).
gacttgtccattaagataa

SEQ ID NO: 511651 - DNA, 19 bp, Mus musculus
  siRNA target sequence for Pdk3 (NM_145630.1,983-1001).
cttgtccattaagataagt

SEQ ID NO: 511652 - DNA, 19 bp, Mus musculus
  siRNA target sequence for Pdk3 (NM_145630.1,1012-1030).
gtggagtcccacttcgaaa

SEQ ID NO: 511653 - DNA, 19 bp, Mus musculus
  siRNA target sequence for Pdk3 (NM_145630.1,1015-1033).
gagtcccacttcgaaaaat

SEQ ID NO: 511654 - DNA, 19 bp, Mus musculus
  siRNA target sequence for Pdk3 (NM_145630.1,1027-1045).
gaaaaatagaccgtctttt

SEQ ID NO: 511655 - DNA, 19 bp, Mus musculus
  siRNA target sequence for Pdk3 (NM_145630.1,1035-1053).
gaccgtctttttaactaca

SEQ ID NO: 511656 - DNA, 19 bp, Mus musculus
  siRNA target sequence for Pdk3 (NM_145630.1,1038-1056).
cgtctttttaactacatgt

SEQ ID NO: 511657 - DNA, 19 bp, Mus musculus
  siRNA target sequence for Pdk3 (NM_145630.1,1164-1182).
gatctaaaactgtattcca

SEQ ID NO: 511658 - DNA, 19 bp, Mus musculus
  siRNA target sequence for Pdk3 (NM_145630.1,1198-1216).
ccgatgcagtcatttattt

SEQ ID NO: 511659 - DNA, 19 bp, Mus musculus
  siRNA target sequence for Pdk3 (NM_145630.1,1200-1218).
gatgcagtcatttatttga

SEQ ID NO: 511660 - DNA, 19 bp, Mus musculus
  siRNA target sequence for Pdk3 (NM_145630.1,1244-1262).
gaggctgccagttttcaat

SEQ ID NO: 511661 - DNA, 19 bp, Mus musculus
  siRNA target sequence for Pdk3 (NM_145630.1,1250-1268).
gccagttttcaataagtct

SEQ ID NO: 511662 - DNA, 19 bp, Mus musculus
  siRNA target sequence for Pdk3 (NM_145630.1,1267-1285).
ctgcatggcgccattacaa

SEQ ID NO: 511663 - DNA, 19 bp, Mus musculus
  siRNA target sequence for Pdk3 (NM_145630.1,1269-1287).
gcatggcgccattacaaga

SEQ ID NO: 511664 - DNA, 19 bp, Mus musculus
  siRNA target sequence for Pdk3 (NM_145630.1,1330-1348).
caagggatgcatcaaaata

SEQ ID NO: 511665 - DNA, 19 bp, Mus musculus
  siRNA target sequence for Pdk3 (NM_145630.1,1333-1351).
gggatgcatcaaaatacaa

SEQ ID NO: 511666 - DNA, 19 bp, Mus musculus
  siRNA target sequence for Pdk3 (NM_145630.1,1361-1379).
ggacaagatcaagagtaat

SEQ ID NO: 511667 - DNA, 19 bp, Mus musculus
  siRNA target sequence for Pdk3 (NM_145630.1,1362-1380).
gacaagatcaagagtaata

SEQ ID NO: 511668 - DNA, 19 bp, Mus musculus
  siRNA target sequence for Pdk4 (NM_013743.1,339-357).
ctgcctgaccgcttagtga

SEQ ID NO: 511669 - DNA, 19 bp, Mus musculus
  siRNA target sequence for Pdk4 (NM_013743.1,472-490).
cgctggtcaaagttcgaaa

SEQ ID NO: 511670 - DNA, 19 bp, Mus musculus
  siRNA target sequence for Pdk4 (NM_013743.1,553-571).
cagtggaccccgttaccaa

SEQ ID NO: 511671 - DNA, 19 bp, Mus musculus
  siRNA target sequence for Pdk4 (NM_013743.1,557-575).
ggaccccgttaccaatcaa

SEQ ID NO: 511672 - DNA, 19 bp, Mus musculus
  siRNA target sequence for Pdk4 (NM_013743.1,558-576).
gaccccgttaccaatcaaa

SEQ ID NO: 511673 - DNA, 19 bp, Mus musculus
  siRNA target sequence for Pdk4 (NM_013743.1,560-578).
ccccgttaccaatcaaaat

SEQ ID NO: 511674 - DNA, 19 bp, Mus musculus
  siRNA target sequence for Pdk4 (NM_013743.1,562-580).
ccgttaccaatcaaaatct

SEQ ID NO: 511675 - DNA, 19 bp, Mus musculus
  siRNA target sequence for Pdk4 (NM_013743.1,563-581).
cgttaccaatcaaaatctt

SEQ ID NO: 511676 - DNA, 19 bp, Mus musculus
  siRNA target sequence for Pdk4 (NM_013743.1,569-587).
caatcaaaatcttcagtat

SEQ ID NO: 511677 - DNA, 19 bp, Mus musculus
  siRNA target sequence for Pdk4 (NM_013743.1,605-623).
catgaaccgcatttctact

SEQ ID NO: 511678 - DNA, 19 bp, Mus musculus
  siRNA target sequence for Pdk4 (NM_013743.1,622-640).
ctcggatgctcatgaatca

SEQ ID NO: 511679 - DNA, 19 bp, Mus musculus
  siRNA target sequence for Pdk4 (NM_013743.1,639-657).
cagcacatcctcatattca

SEQ ID NO: 511680 - DNA, 19 bp, Mus musculus
  siRNA target sequence for Pdk4 (NM_013743.1,641-659).
gcacatcctcatattcagt

SEQ ID NO: 511681 - DNA, 19 bp, Mus musculus
  siRNA target sequence for Pdk4 (NM_013743.1,679-697).
caagccacattggaagtat

SEQ ID NO: 511682 - DNA, 19 bp, Mus musculus
  siRNA target sequence for Pdk4 (NM_013743.1,736-754).
cctttgagtgtgcaaagat

SEQ ID NO: 511683 - DNA, 19 bp, Mus musculus
  siRNA target sequence for Pdk4 (NM_013743.1,755-773).
gctctgcgaccagtattat

SEQ ID NO: 511684 - DNA, 19 bp, Mus musculus
  siRNA target sequence for Pdk4 (NM_013743.1,761-779).
cgaccagtattatctaaca

SEQ ID NO: 511685 - DNA, 19 bp, Mus musculus
  siRNA target sequence for Pdk4 (NM_013743.1,774-792).
ctaacatcgccagaattaa

SEQ ID NO: 511686 - DNA, 19 bp, Mus musculus
  siRNA target sequence for Pdk4 (NM_013743.1,778-796).
catcgccagaattaaacct

SEQ ID NO: 511687 - DNA, 19 bp, Mus musculus
  siRNA target sequence for Pdk4 (NM_013743.1,823-841).
gccaaccaatccacattgt

SEQ ID NO: 511688 - DNA, 19 bp, Mus musculus
  siRNA target sequence for Pdk4 (NM_013743.1,901-919).
ccacggtcgagcatcaaga

SEQ ID NO: 511689 - DNA, 19 bp, Mus musculus
  siRNA target sequence for Pdk4 (NM_013743.1,902-920).
cacggtcgagcatcaagaa

SEQ ID NO: 511690 - DNA, 19 bp, Mus musculus
  siRNA target sequence for Pdk4 (NM_013743.1,904-922).
cggtcgagcatcaagaaaa

SEQ ID NO: 511691 - DNA, 19 bp, Mus musculus
  siRNA target sequence for Pdk4 (NM_013743.1,952-970).
ctgtcgtcttgggaaaaga

SEQ ID NO: 511692 - DNA, 19 bp, Mus musculus
  siRNA target sequence for Pdk4 (NM_013743.1,972-990).
gaccttacaatcaagattt

SEQ ID NO: 511693 - DNA, 19 bp, Mus musculus
  siRNA target sequence for Pdk4 (NM_013743.1,974-992).
ccttacaatcaagatttct

SEQ ID NO: 511694 - DNA, 19 bp, Mus musculus
  siRNA target sequence for Pdk4 (NM_013743.1,1005-1023).
ggtgttcctctgaggatta

SEQ ID NO: 511695 - DNA, 19 bp, Mus musculus
  siRNA target sequence for Pdk4 (NM_013743.1,1026-1044).
gaccgcctctttagttaca

SEQ ID NO: 511696 - DNA, 19 bp, Mus musculus
  siRNA target sequence for Pdk4 (NM_013743.1,1133-1151).
ctacgccaagtattttcaa

SEQ ID NO: 511697 - DNA, 19 bp, Mus musculus
  siRNA target sequence for Pdk4 (NM_013743.1,1155-1173).
gatctgaatctctactcta

SEQ ID NO: 511698 - DNA, 19 bp, Mus musculus
  siRNA target sequence for Pdk4 (NM_013743.1,1166-1184).
ctactctatgtcaggttat

SEQ ID NO: 511699 - DNA, 19 bp, Mus musculus
  siRNA target sequence for Pdk4 (NM_013743.1,1189-1207).
cagacgctatcatctactt

SEQ ID NO: 511700 - DNA, 19 bp, Mus musculus
  siRNA target sequence for Pdk4 (NM_013743.1,1191-1209).
gacgctatcatctacttaa

SEQ ID NO: 511701 - DNA, 19 bp, Mus musculus
  siRNA target sequence for Pdk4 (NM_013743.1,1233-1251).
gaaaagctcccagtcttta

SEQ ID NO: 511702 - DNA, 19 bp, Mus musculus
  siRNA target sequence for Pdk4 (NM_013743.1,1239-1257).
ctcccagtctttaacaagt

SEQ ID NO: 511703 - DNA, 19 bp, Mus musculus
  siRNA target sequence for Pdpk1 (NM_011062.1,128-146).
gacgctgtgcccattcagt

SEQ ID NO: 511704 - DNA, 19 bp, Mus musculus
  siRNA target sequence for Pdpk1 (NM_011062.1,446-464).
ctggagaaacgtcatatta

SEQ ID NO: 511705 - DNA, 19 bp, Mus musculus
  siRNA target sequence for Pdpk1 (NM_011062.1,448-466).
ggagaaacgtcatattata

SEQ ID NO: 511706 - DNA, 19 bp, Mus musculus
  siRNA target sequence for Pdpk1 (NM_011062.1,449-467).
gagaaacgtcatattataa

SEQ ID NO: 511707 - DNA, 19 bp, Mus musculus
  siRNA target sequence for Pdpk1 (NM_011062.1,552-570).
catttcaggacgacgaaaa

SEQ ID NO: 511708 - DNA, 19 bp, Mus musculus
  siRNA target sequence for Pdpk1 (NM_011062.1,560-578).
gacgacgaaaagctgtatt

SEQ ID NO: 511709 - DNA, 19 bp, Mus musculus
  siRNA target sequence for Pdpk1 (NM_011062.1,562-580).
cgacgaaaagctgtatttt

SEQ ID NO: 511710 - DNA, 19 bp, Mus musculus
  siRNA target sequence for Pdpk1 (NM_011062.1,582-600).
gccttagttatgccaaaaa

SEQ ID NO: 511711 - DNA, 19 bp, Mus musculus
  siRNA target sequence for Pdpk1 (NM_011062.1,583-601).
ccttagttatgccaaaaat

SEQ ID NO: 511712 - DNA, 19 bp, Mus musculus
  siRNA target sequence for Pdpk1 (NM_011062.1,622-640).
ccgcaaaattggctcattt

SEQ ID NO: 511713 - DNA, 19 bp, Mus musculus
  siRNA target sequence for Pdpk1 (NM_011062.1,658-676).
gttttacacggctgagatt

SEQ ID NO: 511714 - DNA, 19 bp, Mus musculus
  siRNA target sequence for Pdpk1 (NM_011062.1,875-893).
gagaagtcggcgtgtaaaa

SEQ ID NO: 511715 - DNA, 19 bp, Mus musculus
  siRNA target sequence for Pdpk1 (NM_011062.1,877-895).
gaagtcggcgtgtaaaagt

SEQ ID NO: 511716 - DNA, 19 bp, Mus musculus
  siRNA target sequence for Pdpk1 (NM_011062.1,880-898).
gtcggcgtgtaaaagttca

SEQ ID NO: 511717 - DNA, 19 bp, Mus musculus
  siRNA target sequence for Pdpk1 (NM_011062.1,910-928).
ccttggatgtataatctat

SEQ ID NO: 511718 - DNA, 19 bp, Mus musculus
  siRNA target sequence for Pdpk1 (NM_011062.1,955-973).
cagagccgggaatgaatat

SEQ ID NO: 511719 - DNA, 19 bp, Mus musculus
  siRNA target sequence for Pdpk1 (NM_011062.1,957-975).
gagccgggaatgaatatct

SEQ ID NO: 511720 - DNA, 19 bp, Mus musculus
  siRNA target sequence for Pdpk1 (NM_011062.1,959-977).
gccgggaatgaatatctta

SEQ ID NO: 511721 - DNA, 19 bp, Mus musculus
  siRNA target sequence for Pdpk1 (NM_011062.1,960-978).
ccgggaatgaatatcttat

SEQ ID NO: 511722 - DNA, 19 bp, Mus musculus
  siRNA target sequence for Pdpk1 (NM_011062.1,961-979).
cgggaatgaatatcttata

SEQ ID NO: 511723 - DNA, 19 bp, Mus musculus
  siRNA target sequence for Pdpk1 (NM_011062.1,968-986).
gaatatcttatatttcaga

SEQ ID NO: 511724 - DNA, 19 bp, Mus musculus
  siRNA target sequence for Pdpk1 (NM_011062.1,1024-1042).
cttccctaaggctagagat

SEQ ID NO: 511725 - DNA, 19 bp, Mus musculus
  siRNA target sequence for Pdpk1 (NM_011062.1,1040-1058).
gatcttgtggaaaaactct

SEQ ID NO: 511726 - DNA, 19 bp, Mus musculus
  siRNA target sequence for Pdpk1 (NM_011062.1,1177-1195).
gaagctcacagcttaccta

SEQ ID NO: 511727 - DNA, 19 bp, Mus musculus
  siRNA target sequence for Pdpk1 (NM_011062.1,1327-1345).
gaggtcgggcagcaacata

SEQ ID NO: 511728 - DNA, 19 bp, Mus musculus
  siRNA target sequence for Pdpk1 (NM_011062.1,1358-1376).
catgatttggacactaact

SEQ ID NO: 511729 - DNA, 19 bp, Mus musculus
  siRNA target sequence for Pdpk1 (NM_011062.1,1361-1379).
gatttggacactaactctt

SEQ ID NO: 511730 - DNA, 19 bp, Mus musculus
  siRNA target sequence for Pdpk1 (NM_011062.1,1449-1467).
cttggcaccagtttgtaga

SEQ ID NO: 511731 - DNA, 19 bp, Mus musculus
  siRNA target sequence for Pdpk1 (NM_011062.1,1453-1471).
gcaccagtttgtagaaaat

SEQ ID NO: 511732 - DNA, 19 bp, Mus musculus
  siRNA target sequence for Pdpk1 (NM_011062.1,1499-1517).
gataagcgaaagggtttat

SEQ ID NO: 511733 - DNA, 19 bp, Mus musculus
  siRNA target sequence for Pdpk1 (NM_011062.1,1504-1522).
gcgaaagggtttatttgca

SEQ ID NO: 511734 - DNA, 19 bp, Mus musculus
  siRNA target sequence for Pdpk1 (NM_011062.1,1505-1523).
cgaaagggtttatttgcaa

SEQ ID NO: 511735 - DNA, 19 bp, Mus musculus
  siRNA target sequence for Pdpk1 (NM_011062.1,1520-1538).
gcaagacgacgacagttat

SEQ ID NO: 511736 - DNA, 19 bp, Mus musculus
  siRNA target sequence for Pdpk1 (NM_011062.1,1521-1539).
caagacgacgacagttatt

SEQ ID NO: 511737 - DNA, 19 bp, Mus musculus
  siRNA target sequence for Pdpk1 (NM_011062.1,1524-1542).
gacgacgacagttattact

SEQ ID NO: 511738 - DNA, 19 bp, Mus musculus
  siRNA target sequence for Pdpk1 (NM_011062.1,1526-1544).
cgacgacagttattactca

SEQ ID NO: 511739 - DNA, 19 bp, Mus musculus
  siRNA target sequence for Pdpk1 (NM_011062.1,1551-1569).
ggccacatttatattatgt

SEQ ID NO: 511740 - DNA, 19 bp, Mus musculus
  siRNA target sequence for Pdpk1 (NM_011062.1,1554-1572).
cacatttatattatgttga

SEQ ID NO: 511741 - DNA, 19 bp, Mus musculus
  siRNA target sequence for Pdpk1 (NM_011062.1,1622-1640).
cgaccagaagccaagaatt

SEQ ID NO: 511742 - DNA, 19 bp, Mus musculus
  siRNA target sequence for Pex6 (NM_145488.1,939-957).
ccatcgccccagagaacaa

SEQ ID NO: 511743 - DNA, 19 bp, Mus musculus
  siRNA target sequence for Pex6 (NM_145488.1,940-958).
catcgccccagagaacaaa

SEQ ID NO: 511744 - DNA, 19 bp, Mus musculus
  siRNA target sequence for Pex6 (NM_145488.1,987-1005).
cgtttgctcgagagttaca

SEQ ID NO: 511745 - DNA, 19 bp, Mus musculus
  siRNA target sequence for Pex6 (NM_145488.1,995-1013).
cgagagttacacattgaga

SEQ ID NO: 511746 - DNA, 19 bp, Mus musculus
  siRNA target sequence for Pex6 (NM_145488.1,1024-1042).
gcctcactacagtgctaat

SEQ ID NO: 511747 - DNA, 19 bp, Mus musculus
  siRNA target sequence for Pex6 (NM_145488.1,1061-1079).
ctgtaccggcactttcaga

SEQ ID NO: 511748 - DNA, 19 bp, Mus musculus
  siRNA target sequence for Pex6 (NM_145488.1,1167-1185).
ccaggtggcgggagatgtt

SEQ ID NO: 511749 - DNA, 19 bp, Mus musculus
  siRNA target sequence for Pex6 (NM_145488.1,1174-1192).
gcgggagatgtttttcaaa

SEQ ID NO: 511750 - DNA, 19 bp, Mus musculus
  siRNA target sequence for Pex6 (NM_145488.1,2002-2020).
ctcggcaggtggtttgagt

SEQ ID NO: 511751 - DNA, 19 bp, Mus musculus
  siRNA target sequence for Pex6 (NM_145488.1,2074-2092).
cttcgggcaggcattagat

SEQ ID NO: 511752 - DNA, 19 bp, Mus musculus
  siRNA target sequence for Pex6 (NM_145488.1,2077-2095).
cgggcaggcattagatcaa

SEQ ID NO: 511753 - DNA, 19 bp, Mus musculus
  siRNA target sequence for Pex6 (NM_145488.1,2079-2097).
ggcaggcattagatcaact

SEQ ID NO: 511754 - DNA, 19 bp, Mus musculus
  siRNA target sequence for Pex6 (NM_145488.1,2348-2366).
ggaccggagctcatcaaca

SEQ ID NO: 511755 - DNA, 19 bp, Mus musculus
  siRNA target sequence for Pex6 (NM_145488.1,2349-2367).
gaccggagctcatcaacat

SEQ ID NO: 511756 - DNA, 19 bp, Mus musculus
  siRNA target sequence for Pex6 (NM_145488.1,2420-2438).
gctgctgctccctgtatca

SEQ ID NO: 511757 - DNA, 19 bp, Mus musculus
  siRNA target sequence for Pex6 (NM_145488.1,2423-2441).
gctgctccctgtatcatct

SEQ ID NO: 511758 - DNA, 19 bp, Mus musculus
  siRNA target sequence for Pfkfb2 (NM_008825.2,145-163).
caactccccaacactcatt

SEQ ID NO: 511759 - DNA, 19 bp, Mus musculus
  siRNA target sequence for Pfkfb2 (NM_008825.2,148-166).
ctccccaacactcattgtt

SEQ ID NO: 511760 - DNA, 19 bp, Mus musculus
  siRNA target sequence for Pfkfb2 (NM_008825.2,150-168).
ccccaacactcattgttat

SEQ ID NO: 511761 - DNA, 19 bp, Mus musculus
  siRNA target sequence for Pfkfb2 (NM_008825.2,152-170).
ccaacactcattgttatga

SEQ ID NO: 511762 - DNA, 19 bp, Mus musculus
  siRNA target sequence for Pfkfb2 (NM_008825.2,195-213).
cttatgtgtctaagaaact

SEQ ID NO: 511763 - DNA, 19 bp, Mus musculus
  siRNA target sequence for Pfkfb2 (NM_008825.2,236-254).
ggagtacccaccaaagtgt

SEQ ID NO: 511764 - DNA, 19 bp, Mus musculus
  siRNA target sequence for Pfkfb2 (NM_008825.2,237-255).
gagtacccaccaaagtgtt

SEQ ID NO: 511765 - DNA, 19 bp, Mus musculus
  siRNA target sequence for Pfkfb2 (NM_008825.2,239-257).
gtacccaccaaagtgttta

SEQ ID NO: 511766 - DNA, 19 bp, Mus musculus
  siRNA target sequence for Pfkfb2 (NM_008825.2,291-309).
cctatcagtcttatgattt

SEQ ID NO: 511767 - DNA, 19 bp, Mus musculus
  siRNA target sequence for Pfkfb2 (NM_008825.2,406-424).
gcagattgcggtgtttgat

SEQ ID NO: 511768 - DNA, 19 bp, Mus musculus
  siRNA target sequence for Pfkfb2 (NM_008825.2,447-465).
ggagggacatgattttgaa

SEQ ID NO: 511769 - DNA, 19 bp, Mus musculus
  siRNA target sequence for Pfkfb2 (NM_008825.2,476-494).
cagaatgccttcaaggtat

SEQ ID NO: 511770 - DNA, 19 bp, Mus musculus
  siRNA target sequence for Pfkfb2 (NM_008825.2,537-555).
ccaatattctggaggtaaa

SEQ ID NO: 511771 - DNA, 19 bp, Mus musculus
  siRNA target sequence for Pfkfb2 (NM_008825.2,567-585).
ctgactaccccgaaaggaa

SEQ ID NO: 511772 - DNA, 19 bp, Mus musculus
  siRNA target sequence for Pfkfb2 (NM_008825.2,569-587).
gactaccccgaaaggaata

SEQ ID NO: 511773 - DNA, 19 bp, Mus musculus
  siRNA target sequence for Pfkfb2 (NM_008825.2,668-686).
gataaggatctttctttca

SEQ ID NO: 511774 - DNA, 19 bp, Mus musculus
  siRNA target sequence for Pfkfb2 (NM_008825.2,1006-1024).
gatcctcaatgagattgat

SEQ ID NO: 511775 - DNA, 19 bp, Mus musculus
  siRNA target sequence for Pfkfb2 (NM_008825.2,1086-1104).
cactccgagatcaagagaa

SEQ ID NO: 511776 - DNA, 19 bp, Mus musculus
  siRNA target sequence for Pfkfb2 (NM_008825.2,1192-1210).
caacatcctcgttatctct

SEQ ID NO: 511777 - DNA, 19 bp, Mus musculus
  siRNA target sequence for Pfkfb2 (NM_008825.2,1237-1255).
ggcctacttcttggataaa

SEQ ID NO: 511778 - DNA, 19 bp, Mus musculus
  siRNA target sequence for Pfkfb2 (NM_008825.2,1256-1274).
ggcgcagatgagttaccat

SEQ ID NO: 511779 - DNA, 19 bp, Mus musculus
  siRNA target sequence for Pfkfb2 (NM_008825.2,1257-1275).
gcgcagatgagttaccata

SEQ ID NO: 511780 - DNA, 19 bp, Mus musculus
  siRNA target sequence for Pfkfb2 (NM_008825.2,1262-1280).
gatgagttaccatacttga

SEQ ID NO: 511781 - DNA, 19 bp, Mus musculus
  siRNA target sequence for Pfkfb2 (NM_008825.2,1288-1306).
cctgcacatcatcttcaaa

SEQ ID NO: 511782 - DNA, 19 bp, Mus musculus
  siRNA target sequence for Pfkfb2 (NM_008825.2,1291-1309).
gcacatcatcttcaaactt

SEQ ID NO: 511783 - DNA, 19 bp, Mus musculus
  siRNA target sequence for Pfkfb2 (NM_008825.2,1330-1348).
caaagtggaaacaattact

SEQ ID NO: 511784 - DNA, 19 bp, Mus musculus
  siRNA target sequence for Pfkfb2 (NM_008825.2,1336-1354).
ggaaacaattactctgaat

SEQ ID NO: 511785 - DNA, 19 bp, Mus musculus
  siRNA target sequence for Pfkfb2 (NM_008825.2,1450-1468).
gtccagttcgaacacaata

SEQ ID NO: 511786 - DNA, 19 bp, Mus musculus
  siRNA target sequence for Pfkfb2 (NM_008825.2,1471-1489).
gcgtccaagaaattacagt

SEQ ID NO: 511787 - DNA, 19 bp, Mus musculus
  siRNA target sequence for Pfkfb3 (NM_133232.1,426-444).
ccccaaccgtgattgtgat

SEQ ID NO: 511788 - DNA, 19 bp, Mus musculus
  siRNA target sequence for Pfkfb3 (NM_133232.1,508-526).
gataggtgttccaacgaaa

SEQ ID NO: 511789 - DNA, 19 bp, Mus musculus
  siRNA target sequence for Pfkfb3 (NM_133232.1,512-530).
ggtgttccaacgaaagtgt

SEQ ID NO: 511790 - DNA, 19 bp, Mus musculus
  siRNA target sequence for Pfkfb3 (NM_133232.1,513-531).
gtgttccaacgaaagtgtt

SEQ ID NO: 511791 - DNA, 19 bp, Mus musculus
  siRNA target sequence for Pfkfb3 (NM_133232.1,519-537).
caacgaaagtgttcaatgt

SEQ ID NO: 511792 - DNA, 19 bp, Mus musculus
  siRNA target sequence for Pfkfb3 (NM_133232.1,529-547).
gttcaatgtgggagagtat

SEQ ID NO: 511793 - DNA, 19 bp, Mus musculus
  siRNA target sequence for Pfkfb3 (NM_133232.1,566-584).
cagtacagctcttacaact

SEQ ID NO: 511794 - DNA, 19 bp, Mus musculus
  siRNA target sequence for Pfkfb3 (NM_133232.1,609-627).
ccatgagagtccgaaaaca

SEQ ID NO: 511795 - DNA, 19 bp, Mus musculus
  siRNA target sequence for Pfkfb3 (NM_133232.1,678-696).
gtggacagattgcagtttt

SEQ ID NO: 511796 - DNA, 19 bp, Mus musculus
  siRNA target sequence for Pfkfb3 (NM_133232.1,681-699).
gacagattgcagtttttga

SEQ ID NO: 511797 - DNA, 19 bp, Mus musculus
  siRNA target sequence for Pfkfb3 (NM_133232.1,747-765).
ccaaagaaaatgacttcaa

SEQ ID NO: 511798 - DNA, 19 bp, Mus musculus
  siRNA target sequence for Pfkfb3 (NM_133232.1,787-805).
ctgtgacgaccctactgtt

SEQ ID NO: 511799 - DNA, 19 bp, Mus musculus
  siRNA target sequence for Pfkfb3 (NM_133232.1,803-821).
gttgtggcctccaacatca

SEQ ID NO: 511800 - DNA, 19 bp, Mus musculus
  siRNA target sequence for Pfkfb3 (NM_133232.1,948-966).
gggacttgtcactcatcaa

SEQ ID NO: 511801 - DNA, 19 bp, Mus musculus
  siRNA target sequence for Pfkfb3 (NM_133232.1,955-973).
gtcactcatcaaagtgatt

SEQ ID NO: 511802 - DNA, 19 bp, Mus musculus
  siRNA target sequence for Pfkfb3 (NM_133232.1,1015-1033).
catccagagccgaattgta

SEQ ID NO: 511803 - DNA, 19 bp, Mus musculus
  siRNA target sequence for Pfkfb3 (NM_133232.1,1019-1037).
cagagccgaattgtatact

SEQ ID NO: 511804 - DNA, 19 bp, Mus musculus
  siRNA target sequence for Pfkfb3 (NM_133232.1,1082-1100).
cggcatggcgagaatgagt

SEQ ID NO: 511805 - DNA, 19 bp, Mus musculus
  siRNA target sequence for Pfkfb3 (NM_133232.1,1083-1101).
ggcatggcgagaatgagta

SEQ ID NO: 511806 - DNA, 19 bp, Mus musculus
  siRNA target sequence for Pfkfb3 (NM_133232.1,1088-1106).
ggcgagaatgagtacaact

SEQ ID NO: 511807 - DNA, 19 bp, Mus musculus
  siRNA target sequence for Pfkfb3 (NM_133232.1,1089-1107).
gcgagaatgagtacaactt

SEQ ID NO: 511808 - DNA, 19 bp, Mus musculus
  siRNA target sequence for Pfkfb3 (NM_133232.1,1173-1191).
gcaagttcgtagaagaaca

SEQ ID NO: 511809 - DNA, 19 bp, Mus musculus
  siRNA target sequence for Pfkfb3 (NM_133232.1,1226-1244).
ctgaaaagtaccattcaga

SEQ ID NO: 511810 - DNA, 19 bp, Mus musculus
  siRNA target sequence for Pfkfb3 (NM_133232.1,1304-1322).
ggtgtgtgtgaggaactaa

SEQ ID NO: 511811 - DNA, 19 bp, Mus musculus
  siRNA target sequence for Pfkfb3 (NM_133232.1,1367-1385).
cgtgaacaggacaagtact

SEQ ID NO: 511812 - DNA, 19 bp, Mus musculus
  siRNA target sequence for Pfkfb3 (NM_133232.1,1368-1386).
gtgaacaggacaagtacta

SEQ ID NO: 511813 - DNA, 19 bp, Mus musculus
  siRNA target sequence for Pfkfb3 (NM_133232.1,1370-1388).
gaacaggacaagtactact

SEQ ID NO: 511814 - DNA, 19 bp, Mus musculus
  siRNA target sequence for Pfkfb3 (NM_133232.1,1438-1456).
gcctgtgatcatggaatta

SEQ ID NO: 511815 - DNA, 19 bp, Mus musculus
  siRNA target sequence for Pfkfb3 (NM_133232.1,1457-1475).
gagcgccaagagaatgtat

SEQ ID NO: 511816 - DNA, 19 bp, Mus musculus
  siRNA target sequence for Pfkfb3 (NM_133232.1,1461-1479).
gccaagagaatgtattggt

SEQ ID NO: 511817 - DNA, 19 bp, Mus musculus
  siRNA target sequence for Pfkfb3 (NM_133232.1,1605-1623).
gccgggtggagtccattta

SEQ ID NO: 511818 - DNA, 19 bp, Mus musculus
  siRNA target sequence for Pfkfb3 (NM_133232.1,1607-1625).
cgggtggagtccatttact

SEQ ID NO: 511819 - DNA, 19 bp, Mus musculus
  siRNA target sequence for Pfkfb3 (NM_133232.1,1617-1635).
ccatttacttgaatgtaga

SEQ ID NO: 511820 - DNA, 19 bp, Mus musculus
  siRNA target sequence for Pfkfb3 (NM_133232.1,1725-1743).
gtcccgagcccaccaaaaa

SEQ ID NO: 511821 - DNA, 19 bp, Mus musculus
  siRNA target sequence for Pfkfb3 (NM_133232.1,1824-1842).
cgcagctgcccggacaaaa

SEQ ID NO: 511822 - DNA, 19 bp, Mus musculus
  siRNA target sequence for Pfkfb3 (NM_133232.1,1829-1847).
ctgcccggacaaaacatga

SEQ ID NO: 511823 - DNA, 19 bp, Mus musculus
  siRNA target sequence for Pfkfb3 (NM_133232.1,1832-1850).
cccggacaaaacatgaaga

SEQ ID NO: 511824 - DNA, 19 bp, Mus musculus
  siRNA target sequence for Pftk1 (NM_011074.1,721-739).
cgtgcacactgatttatgt

SEQ ID NO: 511825 - DNA, 19 bp, Mus musculus
  siRNA target sequence for Pftk1 (NM_011074.1,729-747).
ctgatttatgtcagtacat

SEQ ID NO: 511826 - DNA, 19 bp, Mus musculus
  siRNA target sequence for Pftk1 (NM_011074.1,762-780).
gaggactccatccagataa

SEQ ID NO: 511827 - DNA, 19 bp, Mus musculus
  siRNA target sequence for Pftk1 (NM_011074.1,765-783).
gactccatccagataatgt

SEQ ID NO: 511828 - DNA, 19 bp, Mus musculus
  siRNA target sequence for Pftk1 (NM_011074.1,773-791).
ccagataatgtgaagttgt

SEQ ID NO: 511829 - DNA, 19 bp, Mus musculus
  siRNA target sequence for Pftk1 (NM_011074.1,806-824).
ctgcgaggactgtcttaca

SEQ ID NO: 511830 - DNA, 19 bp, Mus musculus
  siRNA target sequence for Pftk1 (NM_011074.1,823-841).
catccaccagcgttatatt

SEQ ID NO: 511831 - DNA, 19 bp, Mus musculus
  siRNA target sequence for Pftk1 (NM_011074.1,879-897).
gcgatacgggggagttgaa

SEQ ID NO: 511832 - DNA, 19 bp, Mus musculus
  siRNA target sequence for Pftk1 (NM_011074.1,1041-1059).
gctgtatcttcgttgagat

SEQ ID NO: 511833 - DNA, 19 bp, Mus musculus
  siRNA target sequence for Pftk1 (NM_011074.1,1044-1062).
gtatcttcgttgagatgat

SEQ ID NO: 511834 - DNA, 19 bp, Mus musculus
  siRNA target sequence for Pftk1 (NM_011074.1,1096-1114).
cattcaggatcaacttgaa

SEQ ID NO: 511835 - DNA, 19 bp, Mus musculus
  siRNA target sequence for Pftk1 (NM_011074.1,1220-1238).
cttagacaagcatggaata

SEQ ID NO: 511836 - DNA, 19 bp, Mus musculus
  siRNA target sequence for Pftk1 (NM_011074.1,1224-1242).
gacaagcatggaataagct

SEQ ID NO: 511837 - DNA, 19 bp, Mus musculus
  siRNA target sequence for Pftk1 (NM_011074.1,1234-1252).
gaataagctcagctatgta

SEQ ID NO: 511838 - DNA, 19 bp, Mus musculus
  siRNA target sequence for Pftk1 (NM_011074.1,1240-1258).
gctcagctatgtaaatcat

SEQ ID NO: 511839 - DNA, 19 bp, Mus musculus
  siRNA target sequence for Pftk1 (NM_011074.1,1395-1413).
ccgtcccaaatgtgagatt

SEQ ID NO: 511840 - DNA, 19 bp, Mus musculus
  siRNA target sequence for Pftk1 (NM_011074.1,1399-1417).
cccaaatgtgagattgcaa

SEQ ID NO: 511841 - DNA, 19 bp, Mus musculus
  siRNA target sequence for Pftk1 (NM_011074.1,1475-1493).
ctatcgaacagcaaacact

SEQ ID NO: 511842 - DNA, 19 bp, Mus musculus
  siRNA target sequence for Phkg (NM_011079.1,224-242).
cattctgcacagactttct

SEQ ID NO: 511843 - DNA, 19 bp, Mus musculus
  siRNA target sequence for Phkg (NM_011079.1,237-255).
ctttctacgagaactatga

SEQ ID NO: 511844 - DNA, 19 bp, Mus musculus
  siRNA target sequence for Phkg (NM_011079.1,326-344).
gaatacgcagtgaaaatca

SEQ ID NO: 511845 - DNA, 19 bp, Mus musculus
  siRNA target sequence for Phkg (NM_011079.1,438-456).
cgggacaccccaacatcat

SEQ ID NO: 511846 - DNA, 19 bp, Mus musculus
  siRNA target sequence for Phkg (NM_011079.1,439-457).
gggacaccccaacatcata

SEQ ID NO: 511847 - DNA, 19 bp, Mus musculus
  siRNA target sequence for Phkg (NM_011079.1,471-489).
cttacgagaccaacacttt

SEQ ID NO: 511848 - DNA, 19 bp, Mus musculus
  siRNA target sequence for Phkg (NM_011079.1,522-540).
gggaactctttgactatct

SEQ ID NO: 511849 - DNA, 19 bp, Mus musculus
  siRNA target sequence for Phkg (NM_011079.1,747-765).
gtgggactcccagttatct

SEQ ID NO: 511850 - DNA, 19 bp, Mus musculus
  siRNA target sequence for Phkg (NM_011079.1,834-852).
ggagcacaggcgtcatcat

SEQ ID NO: 511851 - DNA, 19 bp, Mus musculus
  siRNA target sequence for Phkg (NM_011079.1,837-855).
gcacaggcgtcatcatgta

SEQ ID NO: 511852 - DNA, 19 bp, Mus musculus
  siRNA target sequence for Phkg (NM_011079.1,842-860).
ggcgtcatcatgtacactt

SEQ ID NO: 511853 - DNA, 19 bp, Mus musculus
  siRNA target sequence for Phkg (NM_011079.1,843-861).
gcgtcatcatgtacacttt

SEQ ID NO: 511854 - DNA, 19 bp, Mus musculus
  siRNA target sequence for Phkg (NM_011079.1,885-903).
ggcaccggaagcaaatgct

SEQ ID NO: 511855 - DNA, 19 bp, Mus musculus
  siRNA target sequence for Phkg (NM_011079.1,902-920).
ctgatgttgcggatgatca

SEQ ID NO: 511856 - DNA, 19 bp, Mus musculus
  siRNA target sequence for Phkg (NM_011079.1,1060-1078).
ggagtacgtagtagaagaa

SEQ ID NO: 511857 - DNA, 19 bp, Mus musculus
  siRNA target sequence for Phkg (NM_011079.1,1063-1081).
gtacgtagtagaagaagta

SEQ ID NO: 511858 - DNA, 19 bp, Mus musculus
  siRNA target sequence for Phkg (NM_011079.1,1133-1151).
gcatcagtaaagatctact

SEQ ID NO: 511859 - DNA, 19 bp, Mus musculus
  siRNA target sequence for Phkg (NM_011079.1,1134-1152).
catcagtaaagatctacta

SEQ ID NO: 511860 - DNA, 19 bp, Mus musculus
  siRNA target sequence for Phkg (NM_011079.1,1218-1236).
cgctgcggaggctcattga

SEQ ID NO: 511861 - DNA, 19 bp, Mus musculus
  siRNA target sequence for Phkg (NM_011079.1,1239-1257).
cctacgctttccgtatcta

SEQ ID NO: 511862 - DNA, 19 bp, Mus musculus
  siRNA target sequence for Pim1 (NM_008842.2,597-615).
gaagtggtcctgttgaaga

SEQ ID NO: 511863 - DNA, 19 bp, Mus musculus
  siRNA target sequence for Pim1 (NM_008842.2,627-645).
gacttctcgggcgtcatta

SEQ ID NO: 511864 - DNA, 19 bp, Mus musculus
  siRNA target sequence for Pim1 (NM_008842.2,629-647).
cttctcgggcgtcattaga

SEQ ID NO: 511865 - DNA, 19 bp, Mus musculus
  siRNA target sequence for Pim1 (NM_008842.2,632-650).
ctcgggcgtcattagactt

SEQ ID NO: 511866 - DNA, 19 bp, Mus musculus
  siRNA target sequence for Pim1 (NM_008842.2,836-854).
caaggacgagaacatctta

SEQ ID NO: 511867 - DNA, 19 bp, Mus musculus
  siRNA target sequence for Pim1 (NM_008842.2,1034-1052).
catggtctgcggagatatt

SEQ ID NO: 511868 - DNA, 19 bp, Mus musculus
  siRNA target sequence for Pim1 (NM_008842.2,1118-1136).
gtgtcagcaccttattaaa

SEQ ID NO: 511869 - DNA, 19 bp, Mus musculus
  siRNA target sequence for Pim1 (NM_008842.2,1122-1140).
cagcaccttattaaatggt

SEQ ID NO: 511870 - DNA, 19 bp, Mus musculus
  siRNA target sequence for Pim2 (NM_138606.1,155-173).
ggattcagcgggctcaata

SEQ ID NO: 511871 - DNA, 19 bp, Mus musculus
  siRNA target sequence for Pim2 (NM_138606.1,156-174).
gattcagcgggctcaatat

SEQ ID NO: 511872 - DNA, 19 bp, Mus musculus
  siRNA target sequence for Pim3 (NM_145478.1,948-966).
gcggcactgccacaattgt

SEQ ID NO: 511873 - DNA, 19 bp, Mus musculus
  siRNA target sequence for Pim3 (NM_145478.1,1112-1130).
cagagtggatccgatatca

SEQ ID NO: 511874 - DNA, 19 bp, Mus musculus
  siRNA target sequence for Pim3 (NM_145478.1,1317-1335).
gccctccctggaccaaatt

SEQ ID NO: 511875 - DNA, 19 bp, Mus musculus
  siRNA target sequence for Pink1 (NM_026880.1,431-449).
caggagatccaggcaattt

SEQ ID NO: 511876 - DNA, 19 bp, Mus musculus
  siRNA target sequence for Pink1 (NM_026880.1,442-460).
ggcaatttttacacagaaa

SEQ ID NO: 511877 - DNA, 19 bp, Mus musculus
  siRNA target sequence for Pink1 (NM_026880.1,504-522).
gcttccgtctggaggatta

SEQ ID NO: 511878 - DNA, 19 bp, Mus musculus
  siRNA target sequence for Pink1 (NM_026880.1,509-527).
cgtctggaggattatctga

SEQ ID NO: 511879 - DNA, 19 bp, Mus musculus
  siRNA target sequence for Pink1 (NM_026880.1,510-528).
gtctggaggattatctgat

SEQ ID NO: 511880 - DNA, 19 bp, Mus musculus
  siRNA target sequence for Pink1 (NM_026880.1,538-556).
cattggcaagggttgcaat

SEQ ID NO: 511881 - DNA, 19 bp, Mus musculus
  siRNA target sequence for Pink1 (NM_026880.1,552-570).
gcaatgccgctgtgtatga

SEQ ID NO: 511882 - DNA, 19 bp, Mus musculus
  siRNA target sequence for Pink1 (NM_026880.1,553-571).
caatgccgctgtgtatgaa

SEQ ID NO: 511883 - DNA, 19 bp, Mus musculus
  siRNA target sequence for Pink1 (NM_026880.1,614-632).
caccttggccttataggaa

SEQ ID NO: 511884 - DNA, 19 bp, Mus musculus
  siRNA target sequence for Pink1 (NM_026880.1,696-714).
cctttgccatcaagatgat

SEQ ID NO: 511885 - DNA, 19 bp, Mus musculus
  siRNA target sequence for Pink1 (NM_026880.1,741-759).
gcgaagccatcttaagcaa

SEQ ID NO: 511886 - DNA, 19 bp, Mus musculus
  siRNA target sequence for Pink1 (NM_026880.1,743-761).
gaagccatcttaagcaaaa

SEQ ID NO: 511887 - DNA, 19 bp, Mus musculus
  siRNA target sequence for Pink1 (NM_026880.1,990-1008).
cactgttcctcgttatgaa

SEQ ID NO: 511888 - DNA, 19 bp, Mus musculus
  siRNA target sequence for Pink1 (NM_026880.1,1061-1079).
cgcctggctaccatgatga

SEQ ID NO: 511889 - DNA, 19 bp, Mus musculus
  siRNA target sequence for Pink1 (NM_026880.1,1238-1256).
ctgcggctgcctttcaaca

SEQ ID NO: 511890 - DNA, 19 bp, Mus musculus
  siRNA target sequence for Pink1 (NM_026880.1,1323-1341).
gccccagtgcggtaattga

SEQ ID NO: 511891 - DNA, 19 bp, Mus musculus
  siRNA target sequence for Pink1 (NM_026880.1,1325-1343).
cccagtgcggtaattgact

SEQ ID NO: 511892 - DNA, 19 bp, Mus musculus
  siRNA target sequence for Pink1 (NM_026880.1,1326-1344).
ccagtgcggtaattgacta

SEQ ID NO: 511893 - DNA, 19 bp, Mus musculus
  siRNA target sequence for Pink1 (NM_026880.1,1551-1569).
cacgcttagctgcaaatgt

SEQ ID NO: 511894 - DNA, 19 bp, Mus musculus
  siRNA target sequence for Pink1 (NM_026880.1,1585-1603).
ctggggcgagcatcttcta

SEQ ID NO: 511895 - DNA, 19 bp, Mus musculus
  siRNA target sequence for Pkek (NM_021302.1,511-529).
gatgaggtccggaatgtct

SEQ ID NO: 511896 - DNA, 19 bp, Mus musculus
  siRNA target sequence for Pkek (NM_021302.1,805-823).
caccttactgacttcaaca

SEQ ID NO: 511897 - DNA, 19 bp, Mus musculus
  siRNA target sequence for Pkek (NM_021302.1,985-1003).
ggatggagaccctacgata

SEQ ID NO: 511898 - DNA, 19 bp, Mus musculus
  siRNA target sequence for Pkek (NM_021302.1,986-1004).
gatggagaccctacgatat

SEQ ID NO: 511899 - DNA, 19 bp, Mus musculus
  siRNA target sequence for Pkek (NM_021302.1,989-1007).
ggagaccctacgatatcca

SEQ ID NO: 511900 - DNA, 19 bp, Mus musculus
  siRNA target sequence for Pkek (NM_021302.1,1289-1307).
cgaggcctctgcacaagaa

SEQ ID NO: 511901 - DNA, 19 bp, Mus musculus
  siRNA target sequence for Pkek (NM_021302.1,1355-1373).
gttcccagtcggagaatga

SEQ ID NO: 511902 - DNA, 19 bp, Mus musculus
  siRNA target sequence for Pkek (NM_021302.1,1358-1376).
cccagtcggagaatgacta

SEQ ID NO: 511903 - DNA, 19 bp, Mus musculus
  siRNA target sequence for Pkek (NM_021302.1,1402-1420).
cagcaagacttcgtgattt

SEQ ID NO: 511904 - DNA, 19 bp, Mus musculus
  siRNA target sequence for Pkek (NM_021302.1,1410-1428).
cttcgtgatttttaacaga

SEQ ID NO: 511905 - DNA, 19 bp, Mus musculus
  siRNA target sequence for Pkek (NM_021302.1,1475-1493).
gcccagagacgtcagatat

SEQ ID NO: 511906 - DNA, 19 bp, Mus musculus
  siRNA target sequence for Pkek (NM_021302.1,1477-1495).
ccagagacgtcagatatga

SEQ ID NO: 511907 - DNA, 19 bp, Mus musculus
  siRNA target sequence for Pms2 (NM_008886.1,197-215).
cgaaggcgtgagtacagaa

SEQ ID NO: 511908 - DNA, 19 bp, Mus musculus
  siRNA target sequence for Pms2 (NM_008886.1,198-216).
gaaggcgtgagtacagaat

SEQ ID NO: 511909 - DNA, 19 bp, Mus musculus
  siRNA target sequence for Pms2 (NM_008886.1,243-261).
gggaagtcagtccatcaaa

SEQ ID NO: 511910 - DNA, 19 bp, Mus musculus
  siRNA target sequence for Pms2 (NM_008886.1,244-262).
ggaagtcagtccatcaaat

SEQ ID NO: 511911 - DNA, 19 bp, Mus musculus
  siRNA target sequence for Pms2 (NM_008886.1,245-263).
gaagtcagtccatcaaatt

SEQ ID NO: 511912 - DNA, 19 bp, Mus musculus
  siRNA target sequence for Pms2 (NM_008886.1,296-314).
cgctgtgaaggagttgata

SEQ ID NO: 511913 - DNA, 19 bp, Mus musculus
  siRNA target sequence for Pms2 (NM_008886.1,305-323).
ggagttgatagaaaatagt

SEQ ID NO: 511914 - DNA, 19 bp, Mus musculus
  siRNA target sequence for Pms2 (NM_008886.1,331-349).
ctggtgctactactattga

SEQ ID NO: 511915 - DNA, 19 bp, Mus musculus
  siRNA target sequence for Pms2 (NM_008886.1,334-352).
gtgctactactattgatct

SEQ ID NO: 511916 - DNA, 19 bp, Mus musculus
  siRNA target sequence for Pms2 (NM_008886.1,336-354).
gctactactattgatctaa

SEQ ID NO: 511917 - DNA, 19 bp, Mus musculus
  siRNA target sequence for Pms2 (NM_008886.1,348-366).
gatctaaggcttaaagact

SEQ ID NO: 511918 - DNA, 19 bp, Mus musculus
  siRNA target sequence for Pms2 (NM_008886.1,371-389).
ggtggacctcattgaagtt

SEQ ID NO: 511919 - DNA, 19 bp, Mus musculus
  siRNA target sequence for Pms2 (NM_008886.1,374-392).
ggacctcattgaagtttca

SEQ ID NO: 511920 - DNA, 19 bp, Mus musculus
  siRNA target sequence for Pms2 (NM_008886.1,430-448).
gtctagctctgaaacatca

SEQ ID NO: 511921 - DNA, 19 bp, Mus musculus
  siRNA target sequence for Pms2 (NM_008886.1,451-469).
catctaagattcaagagtt

SEQ ID NO: 511922 - DNA, 19 bp, Mus musculus
  siRNA target sequence for Pms2 (NM_008886.1,476-494).
cctcacgcaggttgaaact

SEQ ID NO: 511923 - DNA, 19 bp, Mus musculus
  siRNA target sequence for Pms2 (NM_008886.1,477-495).
ctcacgcaggttgaaactt

SEQ ID NO: 511924 - DNA, 19 bp, Mus musculus
  siRNA target sequence for Pms2 (NM_008886.1,534-552).
ctaagtgatgtcactatat

SEQ ID NO: 511925 - DNA, 19 bp, Mus musculus
  siRNA target sequence for Pms2 (NM_008886.1,580-598).
ggactcgactggtgtttga

SEQ ID NO: 511926 - DNA, 19 bp, Mus musculus
  siRNA target sequence for Pms2 (NM_008886.1,629-647).
ctacccccgacctaaagga

SEQ ID NO: 511927 - DNA, 19 bp, Mus musculus
  siRNA target sequence for Pms2 (NM_008886.1,658-676).
gtgtgcagcacttatttta

SEQ ID NO: 511928 - DNA, 19 bp, Mus musculus
  siRNA target sequence for Pms2 (NM_008886.1,662-680).
gcagcacttattttataca

SEQ ID NO: 511929 - DNA, 19 bp, Mus musculus
  siRNA target sequence for Pms2 (NM_008886.1,665-683).
gcacttattttatacacta

SEQ ID NO: 511930 - DNA, 19 bp, Mus musculus
  siRNA target sequence for Pms2 (NM_008886.1,679-697).
cactacccgtgcgttacaa

SEQ ID NO: 511931 - DNA, 19 bp, Mus musculus
  siRNA target sequence for Pms2 (NM_008886.1,684-702).
cccgtgcgttacaaagagt

SEQ ID NO: 511932 - DNA, 19 bp, Mus musculus
  siRNA target sequence for Pms2 (NM_008886.1,685-703).
ccgtgcgttacaaagagtt

SEQ ID NO: 511933 - DNA, 19 bp, Mus musculus
  siRNA target sequence for Pms2 (NM_008886.1,686-704).
cgtgcgttacaaagagttt

SEQ ID NO: 511934 - DNA, 19 bp, Mus musculus
  siRNA target sequence for Pms2 (NM_008886.1,744-762).
gtcttacaggcgtactgta

SEQ ID NO: 511935 - DNA, 19 bp, Mus musculus
  siRNA target sequence for Pms2 (NM_008886.1,779-797).
ccgtgtaagctgcactaat

SEQ ID NO: 511936 - DNA, 19 bp, Mus musculus
  siRNA target sequence for Pms2 (NM_008886.1,781-799).
gtgtaagctgcactaatca

SEQ ID NO: 511937 - DNA, 19 bp, Mus musculus
  siRNA target sequence for Pms2 (NM_008886.1,985-1003).
ctacgtttcgggcttcatt

SEQ ID NO: 511938 - DNA, 19 bp, Mus musculus
  siRNA target sequence for Pms2 (NM_008886.1,988-1006).
cgtttcgggcttcatttca

SEQ ID NO: 511939 - DNA, 19 bp, Mus musculus
  siRNA target sequence for Pms2 (NM_008886.1,1045-1063).
gcagtttttcttcatcaat

SEQ ID NO: 511940 - DNA, 19 bp, Mus musculus
  siRNA target sequence for Pms2 (NM_008886.1,1129-1147).
ggcatcagtacccatttgt

SEQ ID NO: 511941 - DNA, 19 bp, Mus musculus
  siRNA target sequence for Pms2 (NM_008886.1,1141-1159).
catttgtcgtccttaacgt

SEQ ID NO: 511942 - DNA, 19 bp, Mus musculus
  siRNA target sequence for Pms2 (NM_008886.1,1162-1180).
ccgttgactcagaatgtgt

SEQ ID NO: 511943 - DNA, 19 bp, Mus musculus
  siRNA target sequence for Pms2 (NM_008886.1,1232-1250).
gctattgctggccgtttta

SEQ ID NO: 511944 - DNA, 19 bp, Mus musculus
  siRNA target sequence for Pms2 (NM_008886.1,1233-1251).
ctattgctggccgttttaa

SEQ ID NO: 511945 - DNA, 19 bp, Mus musculus
  siRNA target sequence for Pms2 (NM_008886.1,1284-1302).
gcaaacaagcttaatgtca

SEQ ID NO: 511946 - DNA, 19 bp, Mus musculus
  siRNA target sequence for Pms2 (NM_008886.1,1285-1303).
caaacaagcttaatgtcaa

SEQ ID NO: 511947 - DNA, 19 bp, Mus musculus
  siRNA target sequence for Pms2 (NM_008886.1,1346-1364).
gcatactgcagaactagaa

SEQ ID NO: 511948 - DNA, 19 bp, Mus musculus
  siRNA target sequence for Pms2 (NM_008886.1,1470-1488).
cctactaaagagatcaagt

SEQ ID NO: 511949 - DNA, 19 bp, Mus musculus
  siRNA target sequence for Pms2 (NM_008886.1,1512-1530).
ctgacacggagttttccaa

SEQ ID NO: 511950 - DNA, 19 bp, Mus musculus
  siRNA target sequence for Pms2 (NM_008886.1,1520-1538).
gagttttccaagtgagaaa

SEQ ID NO: 511951 - DNA, 19 bp, Mus musculus
  siRNA target sequence for Pms2 (NM_008886.1,1541-1559).
gggcgtgttatcctcttat

SEQ ID NO: 511952 - DNA, 19 bp, Mus musculus
  siRNA target sequence for Pms2 (NM_008886.1,1590-1608).
cgtggctcgcaggacaaat

SEQ ID NO: 511953 - DNA, 19 bp, Mus musculus
  siRNA target sequence for Pms2 (NM_008886.1,1591-1609).
gtggctcgcaggacaaatt

SEQ ID NO: 511954 - DNA, 19 bp, Mus musculus
  siRNA target sequence for Pms2 (NM_008886.1,1594-1612).
gctcgcaggacaaattggt

SEQ ID NO: 511955 - DNA, 19 bp, Mus musculus
  siRNA target sequence for Pms2 (NM_008886.1,1719-1737).
gaagtggccagtagcttta

SEQ ID NO: 511956 - DNA, 19 bp, Mus musculus
  siRNA target sequence for Pms2 (NM_008886.1,1732-1750).
gctttagcagtgactataa

SEQ ID NO: 511957 - DNA, 19 bp, Mus musculus
  siRNA target sequence for Pms2 (NM_008886.1,1841-1859).
gccagaagaccatggatat

SEQ ID NO: 511958 - DNA, 19 bp, Mus musculus
  siRNA target sequence for Pms2 (NM_008886.1,1923-1941).
gaaagaccctcaaatgtca

SEQ ID NO: 511959 - DNA, 19 bp, Mus musculus
  siRNA target sequence for Pms2 (NM_008886.1,1933-1951).
caaatgtcaacatttctca

SEQ ID NO: 511960 - DNA, 19 bp, Mus musculus
  siRNA target sequence for Pms2 (NM_008886.1,1988-2006).
ggtcgatgtagccataaaa

SEQ ID NO: 511961 - DNA, 19 bp, Mus musculus
  siRNA target sequence for Pms2 (NM_008886.1,1992-2010).
gatgtagccataaaaatga

SEQ ID NO: 511962 - DNA, 19 bp, Mus musculus
  siRNA target sequence for Pms2 (NM_008886.1,2078-2096).
cctaaaggcgcagaacaaa

SEQ ID NO: 511963 - DNA, 19 bp, Mus musculus
  siRNA target sequence for Pms2 (NM_008886.1,2168-2186).
cagaaaagagattagtaaa

SEQ ID NO: 511964 - DNA, 19 bp, Mus musculus
  siRNA target sequence for Pms2 (NM_008886.1,2204-2222).
ggagatcttgggtcagttt

SEQ ID NO: 511965 - DNA, 19 bp, Mus musculus
  siRNA target sequence for Pms2 (NM_008886.1,2219-2237).
gtttaacctgggatttata

SEQ ID NO: 511966 - DNA, 19 bp, Mus musculus
  siRNA target sequence for Pms2 (NM_008886.1,2285-2303).
ggatgagaagtacaacttt

SEQ ID NO: 511967 - DNA, 19 bp, Mus musculus
  siRNA target sequence for Pms2 (NM_008886.1,2363-2381).
gaacttaactgctgtcaat

SEQ ID NO: 511968 - DNA, 19 bp, Mus musculus
  siRNA target sequence for Pms2 (NM_008886.1,2366-2384).
cttaactgctgtcaatgaa

SEQ ID NO: 511969 - DNA, 19 bp, Mus musculus
  siRNA target sequence for Pms2 (NM_008886.1,2386-2404).
ctgtactgatagaaaatct

SEQ ID NO: 511970 - DNA, 19 bp, Mus musculus
  siRNA target sequence for Pms2 (NM_008886.1,2457-2475).
gtcactgaaagggctaaat

SEQ ID NO: 511971 - DNA, 19 bp, Mus musculus
  siRNA target sequence for Pms2 (NM_008886.1,2461-2479).
ctgaaagggctaaattgat

SEQ ID NO: 511972 - DNA, 19 bp, Mus musculus
  siRNA target sequence for Pms2 (NM_008886.1,2467-2485).
gggctaaattgatttcctt

SEQ ID NO: 511973 - DNA, 19 bp, Mus musculus
  siRNA target sequence for Pms2 (NM_008886.1,2468-2486).
ggctaaattgatttcctta

SEQ ID NO: 511974 - DNA, 19 bp, Mus musculus
  siRNA target sequence for Pms2 (NM_008886.1,2477-2495).
gatttccttaccaactagt

SEQ ID NO: 511975 - DNA, 19 bp, Mus musculus
  siRNA target sequence for Pms2 (NM_008886.1,2506-2524).
cctttggaccccaagatat

SEQ ID NO: 511976 - DNA, 19 bp, Mus musculus
  siRNA target sequence for Pms2 (NM_008886.1,2507-2525).
ctttggaccccaagatata

SEQ ID NO: 511977 - DNA, 19 bp, Mus musculus
  siRNA target sequence for Pms2 (NM_008886.1,2526-2544).
gatgaactgatctttatgt

SEQ ID NO: 511978 - DNA, 19 bp, Mus musculus
  siRNA target sequence for Pms2 (NM_008886.1,2578-2596).
cacgagtcagacagatgtt

SEQ ID NO: 511979 - DNA, 19 bp, Mus musculus
  siRNA target sequence for Pms2 (NM_008886.1,2583-2601).
gtcagacagatgtttgctt

SEQ ID NO: 511980 - DNA, 19 bp, Mus musculus
  siRNA target sequence for Pms2 (NM_008886.1,2611-2629).
gtcggaagtcagtgatgat

SEQ ID NO: 511981 - DNA, 19 bp, Mus musculus
  siRNA target sequence for Pnck (NM_012040.2,208-226).
ggggctctgctcatcttgt

SEQ ID NO: 511982 - DNA, 19 bp, Mus musculus
  siRNA target sequence for Pnck (NM_012040.2,291-309).
gcggtacttcgcagaatca

SEQ ID NO: 511983 - DNA, 19 bp, Mus musculus
  siRNA target sequence for Pnck (NM_012040.2,530-548).
cctctatgccacacctttt

SEQ ID NO: 511984 - DNA, 19 bp, Mus musculus
  siRNA target sequence for Pnck (NM_012040.2,777-795).
ctgagggccagctatgagt

SEQ ID NO: 511985 - DNA, 19 bp, Mus musculus
  siRNA target sequence for Pnck (NM_012040.2,918-936).
ggggatgcagccttcgata

SEQ ID NO: 511986 - DNA, 19 bp, Mus musculus
  siRNA target sequence for Pnck (NM_012040.2,992-1010).
ctggaagcgtgcattcaat

SEQ ID NO: 511987 - DNA, 19 bp, Mus musculus
  siRNA target sequence for Pnck (NM_012040.2,1003-1021).
cattcaatgccacatcatt

SEQ ID NO: 511988 - DNA, 19 bp, Mus musculus
  siRNA target sequence for Pnck (NM_012040.2,1007-1025).
caatgccacatcattccta

SEQ ID NO: 511989 - DNA, 19 bp, Mus musculus
  siRNA target sequence for Pnck (NM_012040.2,1068-1086).
gcctccaggcagtgtatga

SEQ ID NO: 511990 - DNA, 19 bp, Mus musculus
  siRNA target sequence for Prkaca (NM_008854.3,312-330).
cagcccagttggatcagtt

SEQ ID NO: 511991 - DNA, 19 bp, Mus musculus
  siRNA target sequence for Prkaca (NM_008854.3,315-333).
cccagttggatcagtttga

SEQ ID NO: 511992 - DNA, 19 bp, Mus musculus
  siRNA target sequence for Prkaca (NM_008854.3,317-335).
cagttggatcagtttgata

SEQ ID NO: 511993 - DNA, 19 bp, Mus musculus
  siRNA target sequence for Prkaca (NM_008854.3,593-611).
cacctacggcggattggaa

SEQ ID NO: 511994 - DNA, 19 bp, Mus musculus
  siRNA target sequence for Prkaca (NM_008854.3,724-742).
cgaccagcagggctatatt

SEQ ID NO: 511995 - DNA, 19 bp, Mus musculus
  siRNA target sequence for Prkaca (NM_008854.3,1129-1147).
ggtggaagctcccttcata

SEQ ID NO: 511996 - DNA, 19 bp, Mus musculus
  siRNA target sequence for Prkaca (NM_008854.3,1234-1252).
caaggagtttactgagttt

SEQ ID NO: 511997 - DNA, 19 bp, Mus musculus
  siRNA target sequence for Prkacb (NM_011100.3,256-274).
cactgcgatcgccaagaaa

SEQ ID NO: 511998 - DNA, 19 bp, Mus musculus
  siRNA target sequence for Prkacb (NM_011100.3,346-364).
ccctcccccgagtaatgct

SEQ ID NO: 511999 - DNA, 19 bp, Mus musculus
  siRNA target sequence for Prkacb (NM_011100.3,365-383).
gggcttgaggattttgaga

SEQ ID NO: 512000 - DNA, 19 bp, Mus musculus
  siRNA target sequence for Prkacb (NM_011100.3,449-467).
cagtactacgccatgaaga

SEQ ID NO: 512001 - DNA, 19 bp, Mus musculus
  siRNA target sequence for Prkacb (NM_011100.3,560-578).
gtgcggctggagtactctt

SEQ ID NO: 512002 - DNA, 19 bp, Mus musculus
  siRNA target sequence for Prkacb (NM_011100.3,562-580).
gcggctggagtactctttt

SEQ ID NO: 512003 - DNA, 19 bp, Mus musculus
  siRNA target sequence for Prkacb (NM_011100.3,563-581).
cggctggagtactctttta

SEQ ID NO: 512004 - DNA, 19 bp, Mus musculus
  siRNA target sequence for Prkacb (NM_011100.3,564-582).
ggctggagtactcttttaa

SEQ ID NO: 512005 - DNA, 19 bp, Mus musculus
  siRNA target sequence for Prkacb (NM_011100.3,568-586).
ggagtactcttttaaggat

SEQ ID NO: 512006 - DNA, 19 bp, Mus musculus
  siRNA target sequence for Prkacb (NM_011100.3,637-655).
ctcacatctgagaagaatt

SEQ ID NO: 512007 - DNA, 19 bp, Mus musculus
  siRNA target sequence for Prkacb (NM_011100.3,692-710).
gcccagattgtgctaacat

SEQ ID NO: 512008 - DNA, 19 bp, Mus musculus
  siRNA target sequence for Prkacb (NM_011100.3,754-772).
gccggaaaacctcttaatt

SEQ ID NO: 512009 - DNA, 19 bp, Mus musculus
  siRNA target sequence for Prkacb (NM_011100.3,756-774).
cggaaaacctcttaattga

SEQ ID NO: 512010 - DNA, 19 bp, Mus musculus
  siRNA target sequence for Prkacb (NM_011100.3,880-898).
cctcagcaagggttacaat

SEQ ID NO: 512011 - DNA, 19 bp, Mus musculus
  siRNA target sequence for Prkacb (NM_011100.3,881-899).
ctcagcaagggttacaata

SEQ ID NO: 512012 - DNA, 19 bp, Mus musculus
  siRNA target sequence for Prkacb (NM_011100.3,1089-1107).
gattcgggaacctgaagaa

SEQ ID NO: 512013 - DNA, 19 bp, Mus musculus
  siRNA target sequence for Prkacb (NM_011100.3,1105-1123).
gaacggcgtgagtgacata

SEQ ID NO: 512014 - DNA, 19 bp, Mus musculus
  siRNA target sequence for Prkacb (NM_011100.3,1109-1127).
ggcgtgagtgacataaaga

SEQ ID NO: 512015 - DNA, 19 bp, Mus musculus
  siRNA target sequence for Prkacb (NM_011100.3,1177-1195).
ggttgaggctccattcata

SEQ ID NO: 512016 - DNA, 19 bp, Mus musculus
  siRNA target sequence for Prkacb (NM_011100.3,1221-1239).
ccagcaacttcgatgacta

SEQ ID NO: 512017 - DNA, 19 bp, Mus musculus
  siRNA target sequence for Prkacb (NM_011100.3,1222-1240).
cagcaacttcgatgactat

SEQ ID NO: 512018 - DNA, 19 bp, Mus musculus
  siRNA target sequence for Prkacb (NM_011100.3,1224-1242).
gcaacttcgatgactatga

SEQ ID NO: 512019 - DNA, 19 bp, Mus musculus
  siRNA target sequence for Prkacb (NM_011100.3,1225-1243).
caacttcgatgactatgaa

SEQ ID NO: 512020 - DNA, 19 bp, Mus musculus
  siRNA target sequence for Prkacb (NM_011100.3,1250-1268).
gaaatccgtgtgtctataa

SEQ ID NO: 512021 - DNA, 19 bp, Mus musculus
  siRNA target sequence for Prkacb (NM_011100.3,1255-1273).
ccgtgtgtctataacagaa

SEQ ID NO: 512022 - DNA, 19 bp, Mus musculus
  siRNA target sequence for Prkacb (NM_011100.3,1256-1274).
cgtgtgtctataacagaaa

SEQ ID NO: 512023 - DNA, 19 bp, Mus musculus
  siRNA target sequence for Prkca (NM_011101.1,445-463).
ggcttccagtgccaagttt

SEQ ID NO: 512024 - DNA, 19 bp, Mus musculus
  siRNA target sequence for Prkca (NM_011101.1,464-482).
gctgttttgtggttcataa

SEQ ID NO: 512025 - DNA, 19 bp, Mus musculus
  siRNA target sequence for Prkca (NM_011101.1,633-651).
ccaccaagggatgaaatgt

SEQ ID NO: 512026 - DNA, 19 bp, Mus musculus
  siRNA target sequence for Prkca (NM_011101.1,650-668).
gtgacacctgcgacatgaa

SEQ ID NO: 512027 - DNA, 19 bp, Mus musculus
  siRNA target sequence for Prkca (NM_011101.1,654-672).
cacctgcgacatgaatgtt

SEQ ID NO: 512028 - DNA, 19 bp, Mus musculus
  siRNA target sequence for Prkca (NM_011101.1,656-674).
cctgcgacatgaatgttca

SEQ ID NO: 512029 - DNA, 19 bp, Mus musculus
  siRNA target sequence for Prkca (NM_011101.1,659-677).
gcgacatgaatgttcacaa

SEQ ID NO: 512030 - DNA, 19 bp, Mus musculus
  siRNA target sequence for Prkca (NM_011101.1,780-798).
cacggtacgagatgcaaaa

SEQ ID NO: 512031 - DNA, 19 bp, Mus musculus
  siRNA target sequence for Prkca (NM_011101.1,782-800).
cggtacgagatgcaaaaaa

SEQ ID NO: 512032 - DNA, 19 bp, Mus musculus
  siRNA target sequence for Prkca (NM_011101.1,783-801).
ggtacgagatgcaaaaaat

SEQ ID NO: 512033 - DNA, 19 bp, Mus musculus
  siRNA target sequence for Prkca (NM_011101.1,826-844).
ctttcggatccttatgtga

SEQ ID NO: 512034 - DNA, 19 bp, Mus musculus
  siRNA target sequence for Prkca (NM_011101.1,859-877).
cctgaccccaagaatgaga

SEQ ID NO: 512035 - DNA, 19 bp, Mus musculus
  siRNA target sequence for Prkca (NM_011101.1,928-946).
gagtccttcacgttcaaat

SEQ ID NO: 512036 - DNA, 19 bp, Mus musculus
  siRNA target sequence for Prkca (NM_011101.1,966-984).
ccggcgactgtctgtagaa

SEQ ID NO: 512037 - DNA, 19 bp, Mus musculus
  siRNA target sequence for Prkca (NM_011101.1,967-985).
cggcgactgtctgtagaaa

SEQ ID NO: 512038 - DNA, 19 bp, Mus musculus
  siRNA target sequence for Prkca (NM_011101.1,968-986).
ggcgactgtctgtagaaat

SEQ ID NO: 512039 - DNA, 19 bp, Mus musculus
  siRNA target sequence for Prkca (NM_011101.1,1000-1018).
cggacgactcggaatgact

SEQ ID NO: 512040 - DNA, 19 bp, Mus musculus
  siRNA target sequence for Prkca (NM_011101.1,1001-1019).
ggacgactcggaatgactt

SEQ ID NO: 512041 - DNA, 19 bp, Mus musculus
  siRNA target sequence for Prkca (NM_011101.1,1004-1022).
cgactcggaatgacttcat

SEQ ID NO: 512042 - DNA, 19 bp, Mus musculus
  siRNA target sequence for Prkca (NM_011101.1,1020-1038).
catgggatccctttccttt

SEQ ID NO: 512043 - DNA, 19 bp, Mus musculus
  siRNA target sequence for Prkca (NM_011101.1,1246-1264).
ctggacagagtgaaactca

SEQ ID NO: 512044 - DNA, 19 bp, Mus musculus
  siRNA target sequence for Prkca (NM_011101.1,1543-1561).
cagcaagtcgggaaattta

SEQ ID NO: 512045 - DNA, 19 bp, Mus musculus
  siRNA target sequence for Prkca (NM_011101.1,1564-1582).
gagccacaagcagtattct

SEQ ID NO: 512046 - DNA, 19 bp, Mus musculus
  siRNA target sequence for Prkca (NM_011101.1,1671-1689).
ctcagaagggcacatcaaa

SEQ ID NO: 512047 - DNA, 19 bp, Mus musculus
  siRNA target sequence for Prkca (NM_011101.1,1703-1721).
ggatgtgcaaggaacacat

SEQ ID NO: 512048 - DNA, 19 bp, Mus musculus
  siRNA target sequence for Prkca (NM_011101.1,1918-1936).
gtgtcctaccccaaatcct

SEQ ID NO: 512049 - DNA, 19 bp, Mus musculus
  siRNA target sequence for Prkca (NM_011101.1,2176-2194).
gatcagctggtcattgcta

SEQ ID NO: 512050 - DNA, 19 bp, Mus musculus
  siRNA target sequence for Prkca (NM_011101.1,2181-2199).
gctggtcattgctaacata

SEQ ID NO: 512051 - DNA, 19 bp, Mus musculus
  siRNA target sequence for Prkca (NM_011101.1,2196-2214).
catagaccaatctgatttt

SEQ ID NO: 512052 - DNA, 19 bp, Mus musculus
  siRNA target sequence for Prkcb (NM_008855.1,557-575).
gagaggttctcattgttgt

SEQ ID NO: 512053 - DNA, 19 bp, Mus musculus
  siRNA target sequence for Prkcb (NM_008855.1,587-605).
ctaaaaatctggtacctat

SEQ ID NO: 512054 - DNA, 19 bp, Mus musculus
  siRNA target sequence for Prkcb (NM_008855.1,648-666).
gatccctgatcccaaaagt

SEQ ID NO: 512055 - DNA, 19 bp, Mus musculus
  siRNA target sequence for Prkcb (NM_008855.1,825-843).
gtcatttgggatttcagaa

SEQ ID NO: 512056 - DNA, 19 bp, Mus musculus
  siRNA target sequence for Prkcb (NM_008855.1,833-851).
ggatttcagaactacagaa

SEQ ID NO: 512057 - DNA, 19 bp, Mus musculus
  siRNA target sequence for Prkcb (NM_008855.1,865-883).
ggctggttcaagttactaa

SEQ ID NO: 512058 - DNA, 19 bp, Mus musculus
  siRNA target sequence for Prkcb (NM_008855.1,884-902).
gccaggaagagggtgaata

SEQ ID NO: 512059 - DNA, 19 bp, Mus musculus
  siRNA target sequence for Prkcb (NM_008855.1,1012-1030).
gctaacactatctccaaat

SEQ ID NO: 512060 - DNA, 19 bp, Mus musculus
  siRNA target sequence for Prkcb (NM_008855.1,1013-1031).
ctaacactatctccaaatt

SEQ ID NO: 512061 - DNA, 19 bp, Mus musculus
  siRNA target sequence for Prkcb (NM_008855.1,1056-1074).
gatgaaactgaccgatttt

SEQ ID NO: 512062 - DNA, 19 bp, Mus musculus
  siRNA target sequence for Prkcb (NM_008855.1,1283-1301).
ccatggaccgcctgtactt

SEQ ID NO: 512063 - DNA, 19 bp, Mus musculus
  siRNA target sequence for Prkcb (NM_008855.1,1365-1383).
ggagccccatgctgtattt

SEQ ID NO: 512064 - DNA, 19 bp, Mus musculus
  siRNA target sequence for Prkcb (NM_008855.1,1419-1437).
gcagagcaagggcattatt

SEQ ID NO: 512065 - DNA, 19 bp, Mus musculus
  siRNA target sequence for Prkcb (NM_008855.1,1532-1550).
gggtgacaaccaagacatt

SEQ ID NO: 512066 - DNA, 19 bp, Mus musculus
  siRNA target sequence for Prkcb (NM_008855.1,1534-1552).
gtgacaaccaagacattct

SEQ ID NO: 512067 - DNA, 19 bp, Mus musculus
  siRNA target sequence for Prkcb (NM_008855.1,1574-1592).
ctccagagatcattgctta

SEQ ID NO: 512068 - DNA, 19 bp, Mus musculus
  siRNA target sequence for Prkcb (NM_008855.1,1813-1831).
gaaggggaacgagacatta

SEQ ID NO: 512069 - DNA, 19 bp, Mus musculus
  siRNA target sequence for Prkcb (NM_008855.1,1841-1859).
cgtttttccggtatattga

SEQ ID NO: 512070 - DNA, 19 bp, Mus musculus
  siRNA target sequence for Prkcb (NM_008855.1,1881-1899).
ggagattcagccaccttat

SEQ ID NO: 512071 - DNA, 19 bp, Mus musculus
  siRNA target sequence for Prkcb (NM_008855.1,1884-1902).
gattcagccaccttataaa

SEQ ID NO: 512072 - DNA, 19 bp, Mus musculus
  siRNA target sequence for Prkcb (NM_008855.1,1890-1908).
gccaccttataaaccaaaa

SEQ ID NO: 512073 - DNA, 19 bp, Mus musculus
  siRNA target sequence for Prkcb (NM_008855.1,1916-1934).
ggcgaaacgctgaaaactt

SEQ ID NO: 512074 - DNA, 19 bp, Mus musculus
  siRNA target sequence for Prkcb (NM_008855.1,2011-2029).
gaattcgaaggattttcct

SEQ ID NO: 512075 - DNA, 19 bp, Mus musculus
  siRNA target sequence for Prkcc (NM_011102.2,376-394).
ggaccccgacccctgtttt

SEQ ID NO: 512076 - DNA, 19 bp, Mus musculus
  siRNA target sequence for Prkcc (NM_011102.2,379-397).
ccccgacccctgttttgca

SEQ ID NO: 512077 - DNA, 19 bp, Mus musculus
  siRNA target sequence for Prkcc (NM_011102.2,558-576).
ccgccgatgccacgaattt

SEQ ID NO: 512078 - DNA, 19 bp, Mus musculus
  siRNA target sequence for Prkcc (NM_011102.2,562-580).
cgatgccacgaatttgtga

SEQ ID NO: 512079 - DNA, 19 bp, Mus musculus
  siRNA target sequence for Prkcc (NM_011102.2,711-729).
gcaccagggcatgaaatgt

SEQ ID NO: 512080 - DNA, 19 bp, Mus musculus
  siRNA target sequence for Prkcc (NM_011102.2,728-746).
gttcctgttgcgagatgaa

SEQ ID NO: 512081 - DNA, 19 bp, Mus musculus
  siRNA target sequence for Prkcc (NM_011102.2,731-749).
cctgttgcgagatgaatgt

SEQ ID NO: 512082 - DNA, 19 bp, Mus musculus
  siRNA target sequence for Prkcc (NM_011102.2,836-854).
ctcctacgtcggatgagat

SEQ ID NO: 512083 - DNA, 19 bp, Mus musculus
  siRNA target sequence for Prkcc (NM_011102.2,842-860).
cgtcggatgagatccatat

SEQ ID NO: 512084 - DNA, 19 bp, Mus musculus
  siRNA target sequence for Prkcc (NM_011102.2,843-861).
gtcggatgagatccatatt

SEQ ID NO: 512085 - DNA, 19 bp, Mus musculus
  siRNA target sequence for Prkcc (NM_011102.2,945-963).
ccctcggaacctgacaaaa

SEQ ID NO: 512086 - DNA, 19 bp, Mus musculus
  siRNA target sequence for Prkcc (NM_011102.2,949-967).
cggaacctgacaaaacaga

SEQ ID NO: 512087 - DNA, 19 bp, Mus musculus
  siRNA target sequence for Prkcc (NM_011102.2,978-996).
cgtgaaagccacactgaat

SEQ ID NO: 512088 - DNA, 19 bp, Mus musculus
  siRNA target sequence for Prkcc (NM_011102.2,1154-1172).
gatggtacaagttactgaa

SEQ ID NO: 512089 - DNA, 19 bp, Mus musculus
  siRNA target sequence for Prkcc (NM_011102.2,1174-1192).
caggaggagggcgaatatt

SEQ ID NO: 512090 - DNA, 19 bp, Mus musculus
  siRNA target sequence for Prkcc (NM_011102.2,1335-1353).
ctccaagcgatgcttcttt

SEQ ID NO: 512091 - DNA, 19 bp, Mus musculus
  siRNA target sequence for Prkcc (NM_011102.2,1448-1466).
gaggctccgacgaactcta

SEQ ID NO: 512092 - DNA, 19 bp, Mus musculus
  siRNA target sequence for Prkcc (NM_011102.2,1613-1631).
ctccggaccgcctgtattt

SEQ ID NO: 512093 - DNA, 19 bp, Mus musculus
  siRNA target sequence for Prkcc (NM_011102.2,1674-1692).
ccagcaactgggcaagttt

SEQ ID NO: 512094 - DNA, 19 bp, Mus musculus
  siRNA target sequence for Prkcc (NM_011102.2,2199-2217).
gttggagagactggaaatt

SEQ ID NO: 512095 - DNA, 19 bp, Mus musculus
  siRNA target sequence for Prkcc (NM_011102.2,2246-2264).
gccgcagtggcgaaaactt

SEQ ID NO: 512096 - DNA, 19 bp, Mus musculus
  siRNA target sequence for Prkcc (NM_011102.2,2341-2359).
gatttccagggctttactt

SEQ ID NO: 512097 - DNA, 19 bp, Mus musculus
  siRNA target sequence for Prkcd (NM_011103.1,25-43).
cctgcgcatctccttcaat

SEQ ID NO: 512098 - DNA, 19 bp, Mus musculus
  siRNA target sequence for Prkcd (NM_011103.1,26-44).
ctgcgcatctccttcaatt

SEQ ID NO: 512099 - DNA, 19 bp, Mus musculus
  siRNA target sequence for Prkcd (NM_011103.1,29-47).
cgcatctccttcaattcct

SEQ ID NO: 512100 - DNA, 19 bp, Mus musculus
  siRNA target sequence for Prkcd (NM_011103.1,30-48).
gcatctccttcaattccta

SEQ ID NO: 512101 - DNA, 19 bp, Mus musculus
  siRNA target sequence for Prkcd (NM_011103.1,31-49).
catctccttcaattcctat

SEQ ID NO: 512102 - DNA, 19 bp, Mus musculus
  siRNA target sequence for Prkcd (NM_011103.1,186-204).
cgttcgacgcccacatcta

SEQ ID NO: 512103 - DNA, 19 bp, Mus musculus
  siRNA target sequence for Prkcd (NM_011103.1,187-205).
gttcgacgcccacatctat

SEQ ID NO: 512104 - DNA, 19 bp, Mus musculus
  siRNA target sequence for Prkcd (NM_011103.1,190-208).
cgacgcccacatctatgaa

SEQ ID NO: 512105 - DNA, 19 bp, Mus musculus
  siRNA target sequence for Prkcd (NM_011103.1,287-305).
gctgagcgctgcaagaaga

SEQ ID NO: 512106 - DNA, 19 bp, Mus musculus
  siRNA target sequence for Prkcd (NM_011103.1,288-306).
ctgagcgctgcaagaagaa

SEQ ID NO: 512107 - DNA, 19 bp, Mus musculus
  siRNA target sequence for Prkcd (NM_011103.1,383-401).
gatggggattgcaaacagt

SEQ ID NO: 512108 - DNA, 19 bp, Mus musculus
  siRNA target sequence for Prkcd (NM_011103.1,387-405).
gggattgcaaacagtctat

SEQ ID NO: 512109 - DNA, 19 bp, Mus musculus
  siRNA target sequence for Prkcd (NM_011103.1,444-462).
gtcgtggagccattaaaca

SEQ ID NO: 512110 - DNA, 19 bp, Mus musculus
  siRNA target sequence for Prkcd (NM_011103.1,512-530).
gggcagcccaccttctgtt

SEQ ID NO: 512111 - DNA, 19 bp, Mus musculus
  siRNA target sequence for Prkcd (NM_011103.1,528-546).
gttctgtgtgcaaagagtt

SEQ ID NO: 512112 - DNA, 19 bp, Mus musculus
  siRNA target sequence for Prkcd (NM_011103.1,531-549).
ctgtgtgcaaagagtttgt

SEQ ID NO: 512113 - DNA, 19 bp, Mus musculus
  siRNA target sequence for Prkcd (NM_011103.1,701-719).
cctcaccgattcaaggttt

SEQ ID NO: 512114 - DNA, 19 bp, Mus musculus
  siRNA target sequence for Prkcd (NM_011103.1,702-720).
ctcaccgattcaaggttta

SEQ ID NO: 512115 - DNA, 19 bp, Mus musculus
  siRNA target sequence for Prkcd (NM_011103.1,704-722).
caccgattcaaggtttata

SEQ ID NO: 512116 - DNA, 19 bp, Mus musculus
  siRNA target sequence for Prkcd (NM_011103.1,707-725).
cgattcaaggtttataact

SEQ ID NO: 512117 - DNA, 19 bp, Mus musculus
  siRNA target sequence for Prkcd (NM_011103.1,773-791).
ctggtgaagcagggattaa

SEQ ID NO: 512118 - DNA, 19 bp, Mus musculus
  siRNA target sequence for Prkcd (NM_011103.1,927-945).
cagagtctgtcggaatata

SEQ ID NO: 512119 - DNA, 19 bp, Mus musculus
  siRNA target sequence for Prkcd (NM_011103.1,978-996).
ggagtgacatcctagacaa

SEQ ID NO: 512120 - DNA, 19 bp, Mus musculus
  siRNA target sequence for Prkcd (NM_011103.1,1001-1019).
gggacctatggcaagatct

SEQ ID NO: 512121 - DNA, 19 bp, Mus musculus
  siRNA target sequence for Prkcd (NM_011103.1,1032-1050).
cccggtgcacccttgagaa

SEQ ID NO: 512122 - DNA, 19 bp, Mus musculus
  siRNA target sequence for Prkcd (NM_011103.1,1035-1053).
ggtgcacccttgagaactt

SEQ ID NO: 512123 - DNA, 19 bp, Mus musculus
  siRNA target sequence for Prkcd (NM_011103.1,1346-1364).
ctctaccgggctacgtttt

SEQ ID NO: 512124 - DNA, 19 bp, Mus musculus
  siRNA target sequence for Prkcd (NM_011103.1,1348-1366).
ctaccgggctacgttttat

SEQ ID NO: 512125 - DNA, 19 bp, Mus musculus
  siRNA target sequence for Prkcd (NM_011103.1,1351-1369).
ccgggctacgttttatgca

SEQ ID NO: 512126 - DNA, 19 bp, Mus musculus
  siRNA target sequence for Prkcd (NM_011103.1,1383-1401).
gcggactgcagtttctaca

SEQ ID NO: 512127 - DNA, 19 bp, Mus musculus
  siRNA target sequence for Prkcd (NM_011103.1,1610-1628).
ggggtcctcctgtacgaaa

SEQ ID NO: 512128 - DNA, 19 bp, Mus musculus
  siRNA target sequence for Prkcd (NM_011103.1,1690-1708).
ggtggacacaccacactat

SEQ ID NO: 512129 - DNA, 19 bp, Mus musculus
  siRNA target sequence for Prkcd (NM_011103.1,1712-1730).
cgttggatcaccaaggaat

SEQ ID NO: 512130 - DNA, 19 bp, Mus musculus
  siRNA target sequence for Prkcd (NM_011103.1,1771-1789).
caagaggctgggagtaaca

SEQ ID NO: 512131 - DNA, 19 bp, Mus musculus
  siRNA target sequence for Prkcd (NM_011103.1,1781-1799).
ggagtaacaggaaacatca

SEQ ID NO: 512132 - DNA, 19 bp, Mus musculus
  siRNA target sequence for Prkcd (NM_011103.1,1809-1827).
cctttttcaagactatcaa

SEQ ID NO: 512133 - DNA, 19 bp, Mus musculus
  siRNA target sequence for Prkcd (NM_011103.1,1862-1880).
ccctttaagcccaaagtga

SEQ ID NO: 512134 - DNA, 19 bp, Mus musculus
  siRNA target sequence for Prkcd (NM_011103.1,1863-1881).
cctttaagcccaaagtgaa

SEQ ID NO: 512135 - DNA, 19 bp, Mus musculus
  siRNA target sequence for Prkcd (NM_011103.1,1890-1908).
cagactacagcaactttga

SEQ ID NO: 512136 - DNA, 19 bp, Mus musculus
  siRNA target sequence for Prkce (NM_011104.1,128-146).
cctacattgcccttaacgt

SEQ ID NO: 512137 - DNA, 19 bp, Mus musculus
  siRNA target sequence for Prkce (NM_011104.1,377-395).
gaaaagtgtacgtgatcat

SEQ ID NO: 512138 - DNA, 19 bp, Mus musculus
  siRNA target sequence for Prkce (NM_011104.1,560-578).
cccactgcagagatttcat

SEQ ID NO: 512139 - DNA, 19 bp, Mus musculus
  siRNA target sequence for Prkce (NM_011104.1,600-618).
gggatatcaatgtcaagtt

SEQ ID NO: 512140 - DNA, 19 bp, Mus musculus
  siRNA target sequence for Prkce (NM_011104.1,601-619).
ggatatcaatgtcaagttt

SEQ ID NO: 512141 - DNA, 19 bp, Mus musculus
  siRNA target sequence for Prkce (NM_011104.1,640-658).
cgatgtcatgagctcatta

SEQ ID NO: 512142 - DNA, 19 bp, Mus musculus
  siRNA target sequence for Prkce (NM_011104.1,641-659).
gatgtcatgagctcattat

SEQ ID NO: 512143 - DNA, 19 bp, Mus musculus
  siRNA target sequence for Prkce (NM_011104.1,646-664).
catgagctcattattacaa

SEQ ID NO: 512144 - DNA, 19 bp, Mus musculus
  siRNA target sequence for Prkce (NM_011104.1,649-667).
gagctcattattacaaagt

SEQ ID NO: 512145 - DNA, 19 bp, Mus musculus
  siRNA target sequence for Prkce (NM_011104.1,666-684).
gtgcgctgggctgaagaaa

SEQ ID NO: 512146 - DNA, 19 bp, Mus musculus
  siRNA target sequence for Prkce (NM_011104.1,918-936).
ggctgaccttggtgttact

SEQ ID NO: 512147 - DNA, 19 bp, Mus musculus
  siRNA target sequence for Prkce (NM_011104.1,928-946).
ggtgttactccagacaaaa

SEQ ID NO: 512148 - DNA, 19 bp, Mus musculus
  siRNA target sequence for Prkce (NM_011104.1,1275-1293).
catgttggcggaactcaaa

SEQ ID NO: 512149 - DNA, 19 bp, Mus musculus
  siRNA target sequence for Prkce (NM_011104.1,1354-1372).
gatgtggactgcacaatga

SEQ ID NO: 512150 - DNA, 19 bp, Mus musculus
  siRNA target sequence for Prkce (NM_011104.1,1399-1417).
cggaaacacccttatctaa

SEQ ID NO: 512151 - DNA, 19 bp, Mus musculus
  siRNA target sequence for Prkce (NM_011104.1,1409-1427).
cttatctaacccaactcta

SEQ ID NO: 512152 - DNA, 19 bp, Mus musculus
  siRNA target sequence for Prkce (NM_011104.1,1414-1432).
ctaacccaactctattgct

SEQ ID NO: 512153 - DNA, 19 bp, Mus musculus
  siRNA target sequence for Prkce (NM_011104.1,1455-1473).
cttcttcgtcatggaatat

SEQ ID NO: 512154 - DNA, 19 bp, Mus musculus
  siRNA target sequence for Prkce (NM_011104.1,1508-1526).
ggtcccgaaaatttgatga

SEQ ID NO: 512155 - DNA, 19 bp, Mus musculus
  siRNA target sequence for Prkce (NM_011104.1,1527-1545).
gcctcgttctcggttctat

SEQ ID NO: 512156 - DNA, 19 bp, Mus musculus
  siRNA target sequence for Prkce (NM_011104.1,1582-1600).
cagcacggagtgatctaca

SEQ ID NO: 512157 - DNA, 19 bp, Mus musculus
  siRNA target sequence for Prkce (NM_011104.1,1591-1609).
gtgatctacagggatttga

SEQ ID NO: 512158 - DNA, 19 bp, Mus musculus
  siRNA target sequence for Prkce (NM_011104.1,1784-1802).
ccctgggggtgctgatgta

SEQ ID NO: 512159 - DNA, 19 bp, Mus musculus
  siRNA target sequence for Prkce (NM_011104.1,1843-1861).
gaggacgacttgttcgaat

SEQ ID NO: 512160 - DNA, 19 bp, Mus musculus
  siRNA target sequence for Prkce (NM_011104.1,1991-2009).
ccatcaagcaacatccatt

SEQ ID NO: 512161 - DNA, 19 bp, Mus musculus
  siRNA target sequence for Prkce (NM_011104.1,2058-2076).
ccccttcaagccgagaatt

SEQ ID NO: 512162 - DNA, 19 bp, Mus musculus
  siRNA target sequence for Prkce (NM_011104.1,2059-2077).
cccttcaagccgagaatta

SEQ ID NO: 512163 - DNA, 19 bp, Mus musculus
  siRNA target sequence for Prkce (NM_011104.1,2060-2078).
ccttcaagccgagaattaa

SEQ ID NO: 512164 - DNA, 19 bp, Mus musculus
  siRNA target sequence for Prkce (NM_011104.1,2061-2079).
cttcaagccgagaattaaa

SEQ ID NO: 512165 - DNA, 19 bp, Mus musculus
  siRNA target sequence for Prkce (NM_011104.1,2081-2099).
ccaaaagagatgtcaataa

SEQ ID NO: 512166 - DNA, 19 bp, Mus musculus
  siRNA target sequence for Prkce (NM_011104.1,2087-2105).
gagatgtcaataactttga

SEQ ID NO: 512167 - DNA, 19 bp, Mus musculus
  siRNA target sequence for Prkce (NM_011104.1,2117-2135).
cgcgggaagagccaatact

SEQ ID NO: 512168 - DNA, 19 bp, Mus musculus
  siRNA target sequence for Prkce (NM_011104.1,2118-2136).
gcgggaagagccaatactt

SEQ ID NO: 512169 - DNA, 19 bp, Mus musculus
  siRNA target sequence for Prkce (NM_011104.1,2119-2137).
cgggaagagccaatactta

SEQ ID NO: 512170 - DNA, 19 bp, Mus musculus
  siRNA target sequence for Prkce (NM_011104.1,2121-2139).
ggaagagccaatacttaca

SEQ ID NO: 512171 - DNA, 19 bp, Mus musculus
  siRNA target sequence for Prkce (NM_011104.1,2153-2171).
caatcattaagcagatcaa

SEQ ID NO: 512172 - DNA, 19 bp, Mus musculus
  siRNA target sequence for Prkch (NM_008856.2,127-145).
cgtccggcacgatgaagtt

SEQ ID NO: 512173 - DNA, 19 bp, Mus musculus
  siRNA target sequence for Prkch (NM_008856.2,527-545).
cctaacagggagtttcact

SEQ ID NO: 512174 - DNA, 19 bp, Mus musculus
  siRNA target sequence for Prkch (NM_008856.2,564-582).
gaccgcatcttcaagcatt

SEQ ID NO: 512175 - DNA, 19 bp, Mus musculus
  siRNA target sequence for Prkch (NM_008856.2,613-631).
gacgagtccatcaagtgaa

SEQ ID NO: 512176 - DNA, 19 bp, Mus musculus
  siRNA target sequence for Prkch (NM_008856.2,624-642).
caagtgaacggacataagt

SEQ ID NO: 512177 - DNA, 19 bp, Mus musculus
  siRNA target sequence for Prkch (NM_008856.2,627-645).
gtgaacggacataagttca

SEQ ID NO: 512178 - DNA, 19 bp, Mus musculus
  siRNA target sequence for Prkch (NM_008856.2,679-697).
ctcattgccgagagttcat

SEQ ID NO: 512179 - DNA, 19 bp, Mus musculus
  siRNA target sequence for Prkch (NM_008856.2,692-710).
gttcatctggggagtattt

SEQ ID NO: 512180 - DNA, 19 bp, Mus musculus
  siRNA target sequence for Prkch (NM_008856.2,739-757).
gcacctgcgtcgtccataa

SEQ ID NO: 512181 - DNA, 19 bp, Mus musculus
  siRNA target sequence for Prkch (NM_008856.2,740-758).
cacctgcgtcgtccataaa

SEQ ID NO: 512182 - DNA, 19 bp, Mus musculus
  siRNA target sequence for Prkch (NM_008856.2,760-778).
gctgccatcatctaattgt

SEQ ID NO: 512183 - DNA, 19 bp, Mus musculus
  siRNA target sequence for Prkch (NM_008856.2,761-779).
ctgccatcatctaattgtt

SEQ ID NO: 512184 - DNA, 19 bp, Mus musculus
  siRNA target sequence for Prkch (NM_008856.2,764-782).
ccatcatctaattgttaca

SEQ ID NO: 512185 - DNA, 19 bp, Mus musculus
  siRNA target sequence for Prkch (NM_008856.2,785-803).
ctgcacttgccaaaacaat

SEQ ID NO: 512186 - DNA, 19 bp, Mus musculus
  siRNA target sequence for Prkch (NM_008856.2,790-808).
cttgccaaaacaatattaa

SEQ ID NO: 512187 - DNA, 19 bp, Mus musculus
  siRNA target sequence for Prkch (NM_008856.2,860-878).
caagttcaacgttcacaat

SEQ ID NO: 512188 - DNA, 19 bp, Mus musculus
  siRNA target sequence for Prkch (NM_008856.2,934-952).
gacaaggacttcagtgtaa

SEQ ID NO: 512189 - DNA, 19 bp, Mus musculus
  siRNA target sequence for Prkch (NM_008856.2,939-957).
ggacttcagtgtaaaatat

SEQ ID NO: 512190 - DNA, 19 bp, Mus musculus
  siRNA target sequence for Prkch (NM_008856.2,958-976).
gtaagatgaatgtacatat

SEQ ID NO: 512191 - DNA, 19 bp, Mus musculus
  siRNA target sequence for Prkch (NM_008856.2,1168-1186).
gattcggcatcgacaactt

SEQ ID NO: 512192 - DNA, 19 bp, Mus musculus
  siRNA target sequence for Prkch (NM_008856.2,1174-1192).
gcatcgacaactttgagtt

SEQ ID NO: 512193 - DNA, 19 bp, Mus musculus
  siRNA target sequence for Prkch (NM_008856.2,1227-1245).
gtgatgcttgccaggataa

SEQ ID NO: 512194 - DNA, 19 bp, Mus musculus
  siRNA target sequence for Prkch (NM_008856.2,1523-1541).
catgttcctacatgagaaa

SEQ ID NO: 512195 - DNA, 19 bp, Mus musculus
  siRNA target sequence for Prkch (NM_008856.2,1586-1604).
ccacgaaggtcactgtaaa

SEQ ID NO: 512196 - DNA, 19 bp, Mus musculus
  siRNA target sequence for Prkch (NM_008856.2,1625-1643).
caaggaggggatttgtaat

SEQ ID NO: 512197 - DNA, 19 bp, Mus musculus
  siRNA target sequence for Prkch (NM_008856.2,1814-1832).
ggccatactgaatgatgaa

SEQ ID NO: 512198 - DNA, 19 bp, Mus musculus
  siRNA target sequence for Prkch (NM_008856.2,1869-1887).
gggatcctcaagtctttca

SEQ ID NO: 512199 - DNA, 19 bp, Mus musculus
  siRNA target sequence for Prkch (NM_008856.2,2008-2026).
cgcctttccgacctagaat

SEQ ID NO: 512200 - DNA, 19 bp, Mus musculus
  siRNA target sequence for Prkch (NM_008856.2,2010-2028).
cctttccgacctagaatca

SEQ ID NO: 512201 - DNA, 19 bp, Mus musculus
  siRNA target sequence for Prkch (NM_008856.2,2011-2029).
ctttccgacctagaatcaa

SEQ ID NO: 512202 - DNA, 19 bp, Mus musculus
  siRNA target sequence for Prkch (NM_008856.2,2034-2052).
cgagaagatgtcagcaatt

SEQ ID NO: 512203 - DNA, 19 bp, Mus musculus
  siRNA target sequence for Prkch (NM_008856.2,2081-2099).
cgtcttaactccgattgat

SEQ ID NO: 512204 - DNA, 19 bp, Mus musculus
  siRNA target sequence for Prkch (NM_008856.2,2103-2121).
ggacatcttcctatgatta

SEQ ID NO: 512205 - DNA, 19 bp, Mus musculus
  siRNA target sequence for Prkcl (NM_008857.2,237-255).
gcagtgaggttcgagatat

SEQ ID NO: 512206 - DNA, 19 bp, Mus musculus
  siRNA target sequence for Prkcl (NM_008857.2,242-260).
gaggttcgagatatgtgtt

SEQ ID NO: 512207 - DNA, 19 bp, Mus musculus
  siRNA target sequence for Prkcl (NM_008857.2,274-292).
gcagccgttcaccatgaaa

SEQ ID NO: 512208 - DNA, 19 bp, Mus musculus
  siRNA target sequence for Prkcl (NM_008857.2,275-293).
cagccgttcaccatgaaat

SEQ ID NO: 512209 - DNA, 19 bp, Mus musculus
  siRNA target sequence for Prkcl (NM_008857.2,279-297).
cgttcaccatgaaatggat

SEQ ID NO: 512210 - DNA, 19 bp, Mus musculus
  siRNA target sequence for Prkcl (NM_008857.2,304-322).
ggaaggagacccatgtaca

SEQ ID NO: 512211 - DNA, 19 bp, Mus musculus
  siRNA target sequence for Prkcl (NM_008857.2,327-345).
cttctcagttggagttaga

SEQ ID NO: 512212 - DNA, 19 bp, Mus musculus
  siRNA target sequence for Prkcl (NM_008857.2,381-399).
ctgaactcttgattcatgt

SEQ ID NO: 512213 - DNA, 19 bp, Mus musculus
  siRNA target sequence for Prkcl (NM_008857.2,383-401).
gaactcttgattcatgtat

SEQ ID NO: 512214 - DNA, 19 bp, Mus musculus
  siRNA target sequence for Prkcl (NM_008857.2,498-516).
caaatggccacacttttca

SEQ ID NO: 512215 - DNA, 19 bp, Mus musculus
  siRNA target sequence for Prkcl (NM_008857.2,515-533).
caagccaaacgtttcaata

SEQ ID NO: 512216 - DNA, 19 bp, Mus musculus
  siRNA target sequence for Prkcl (NM_008857.2,578-596).
ggacgacaaggatacaagt

SEQ ID NO: 512217 - DNA, 19 bp, Mus musculus
  siRNA target sequence for Prkcl (NM_008857.2,630-648).
gccacaagctggtcacaat

SEQ ID NO: 512218 - DNA, 19 bp, Mus musculus
  siRNA target sequence for Prkcl (NM_008857.2,722-740).
cagacagtaattccatata

SEQ ID NO: 512219 - DNA, 19 bp, Mus musculus
  siRNA target sequence for Prkcl (NM_008857.2,728-746).
gtaattccatataatcctt

SEQ ID NO: 512220 - DNA, 19 bp, Mus musculus
  siRNA target sequence for Prkcl (NM_008857.2,744-762).
cttcaagtcatgagagttt

SEQ ID NO: 512221 - DNA, 19 bp, Mus musculus
  siRNA target sequence for Prkcl (NM_008857.2,825-843).
gtctaggtctgcaggattt

SEQ ID NO: 512222 - DNA, 19 bp, Mus musculus
  siRNA target sequence for Prkcl (NM_008857.2,830-848).
ggtctgcaggatttcgatt

SEQ ID NO: 512223 - DNA, 19 bp, Mus musculus
  siRNA target sequence for Prkcl (NM_008857.2,831-849).
gtctgcaggatttcgattt

SEQ ID NO: 512224 - DNA, 19 bp, Mus musculus
  siRNA target sequence for Prkcl (NM_008857.2,844-862).
cgatttgcttcgagttata

SEQ ID NO: 512225 - DNA, 19 bp, Mus musculus
  siRNA target sequence for Prkcl (NM_008857.2,870-888).
gaagttacgccaaagtact

SEQ ID NO: 512226 - DNA, 19 bp, Mus musculus
  siRNA target sequence for Prkcl (NM_008857.2,873-891).
gttacgccaaagtactgtt

SEQ ID NO: 512227 - DNA, 19 bp, Mus musculus
  siRNA target sequence for Prkcl (NM_008857.2,887-905).
ctgttggttcggttaaaga

SEQ ID NO: 512228 - DNA, 19 bp, Mus musculus
  siRNA target sequence for Prkcl (NM_008857.2,889-907).
gttggttcggttaaagaaa

SEQ ID NO: 512229 - DNA, 19 bp, Mus musculus
  siRNA target sequence for Prkcl (NM_008857.2,909-927).
cagatcgcatttatgcaat

SEQ ID NO: 512230 - DNA, 19 bp, Mus musculus
  siRNA target sequence for Prkcl (NM_008857.2,1008-1026).
cgtccaatcacccttttct

SEQ ID NO: 512231 - DNA, 19 bp, Mus musculus
  siRNA target sequence for Prkcl (NM_008857.2,1009-1027).
gtccaatcacccttttctt

SEQ ID NO: 512232 - DNA, 19 bp, Mus musculus
  siRNA target sequence for Prkcl (NM_008857.2,1051-1069).
gacagaaagcaggttgttt

SEQ ID NO: 512233 - DNA, 19 bp, Mus musculus
  siRNA target sequence for Prkcl (NM_008857.2,1062-1080).
ggttgttttttgtcataga

SEQ ID NO: 512234 - DNA, 19 bp, Mus musculus
  siRNA target sequence for Prkcl (NM_008857.2,1149-1167).
ggttttactctgcagaaat

SEQ ID NO: 512235 - DNA, 19 bp, Mus musculus
  siRNA target sequence for Prkcl (NM_008857.2,1190-1208).
catgagcgagggataattt

SEQ ID NO: 512236 - DNA, 19 bp, Mus musculus
  siRNA target sequence for Prkcl (NM_008857.2,1193-1211).
gagcgagggataatttata

SEQ ID NO: 512237 - DNA, 19 bp, Mus musculus
  siRNA target sequence for Prkcl (NM_008857.2,1195-1213).
gcgagggataatttataga

SEQ ID NO: 512238 - DNA, 19 bp, Mus musculus
  siRNA target sequence for Prkcl (NM_008857.2,1199-1217).
gggataatttatagagatt

SEQ ID NO: 512239 - DNA, 19 bp, Mus musculus
  siRNA target sequence for Prkcl (NM_008857.2,1241-1259).
gactctgaaggacacatta

SEQ ID NO: 512240 - DNA, 19 bp, Mus musculus
  siRNA target sequence for Prkcl (NM_008857.2,1392-1410).
gggctcttggagtgcttat

SEQ ID NO: 512241 - DNA, 19 bp, Mus musculus
  siRNA target sequence for Prkcl (NM_008857.2,1394-1412).
gctcttggagtgcttatgt

SEQ ID NO: 512242 - DNA, 19 bp, Mus musculus
  siRNA target sequence for Prkcl (NM_008857.2,1395-1413).
ctcttggagtgcttatgtt

SEQ ID NO: 512243 - DNA, 19 bp, Mus musculus
  siRNA target sequence for Prkcl (NM_008857.2,1426-1444).
gggaaggtctccgtttgat

SEQ ID NO: 512244 - DNA, 19 bp, Mus musculus
  siRNA target sequence for Prkcl (NM_008857.2,1427-1445).
ggaaggtctccgtttgata

SEQ ID NO: 512245 - DNA, 19 bp, Mus musculus
  siRNA target sequence for Prkcl (NM_008857.2,1428-1446).
gaaggtctccgtttgatat

SEQ ID NO: 512246 - DNA, 19 bp, Mus musculus
  siRNA target sequence for Prkcl (NM_008857.2,1431-1449).
ggtctccgtttgatatcgt

SEQ ID NO: 512247 - DNA, 19 bp, Mus musculus
  siRNA target sequence for Prkcl (NM_008857.2,1432-1450).
gtctccgtttgatatcgtt

SEQ ID NO: 512248 - DNA, 19 bp, Mus musculus
  siRNA target sequence for Prkcl (NM_008857.2,1447-1465).
cgttgggagctctgacaat

SEQ ID NO: 512249 - DNA, 19 bp, Mus musculus
  siRNA target sequence for Prkcl (NM_008857.2,1458-1476).
ctgacaatcctgaccaaaa

SEQ ID NO: 512250 - DNA, 19 bp, Mus musculus
  siRNA target sequence for Prkcl (NM_008857.2,1460-1478).
gacaatcctgaccaaaaca

SEQ ID NO: 512251 - DNA, 19 bp, Mus musculus
  siRNA target sequence for Prkcl (NM_008857.2,1462-1480).
caatcctgaccaaaacaca

SEQ ID NO: 512252 - DNA, 19 bp, Mus musculus
  siRNA target sequence for Prkcl (NM_008857.2,1526-1544).
ccgcgttctctgtctgtaa

SEQ ID NO: 512253 - DNA, 19 bp, Mus musculus
  siRNA target sequence for Prkcl (NM_008857.2,1527-1545).
cgcgttctctgtctgtaaa

SEQ ID NO: 512254 - DNA, 19 bp, Mus musculus
  siRNA target sequence for Prkcl (NM_008857.2,1528-1546).
gcgttctctgtctgtaaaa

SEQ ID NO: 512255 - DNA, 19 bp, Mus musculus
  siRNA target sequence for Prkcl (NM_008857.2,1684-1702).
ggtggttccaccctttaaa

SEQ ID NO: 512256 - DNA, 19 bp, Mus musculus
  siRNA target sequence for Prkcl (NM_008857.2,1724-1742).
ggtttggataatttcgatt

SEQ ID NO: 512257 - DNA, 19 bp, Mus musculus
  siRNA target sequence for Prkcm (NM_008858.1,386-404).
ccccgaatgtggtttctat

SEQ ID NO: 512258 - DNA, 19 bp, Mus musculus
  siRNA target sequence for Prkcm (NM_008858.1,397-415).
gtttctatggactctatga

SEQ ID NO: 512259 - DNA, 19 bp, Mus musculus
  siRNA target sequence for Prkcm (NM_008858.1,468-486).
gtgaaaatcgcaagtgata

SEQ ID NO: 512260 - DNA, 19 bp, Mus musculus
  siRNA target sequence for Prkcm (NM_008858.1,491-509).
ggagggtgatctcattgaa

SEQ ID NO: 512261 - DNA, 19 bp, Mus musculus
  siRNA target sequence for Prkcm (NM_008858.1,564-582).
ctcttcgttcattcataca

SEQ ID NO: 512262 - DNA, 19 bp, Mus musculus
  siRNA target sequence for Prkcm (NM_008858.1,632-650).
gcgtcaaggccttaaatgt

SEQ ID NO: 512263 - DNA, 19 bp, Mus musculus
  siRNA target sequence for Prkcm (NM_008858.1,655-673).
gatgtggtctgaattacca

SEQ ID NO: 512264 - DNA, 19 bp, Mus musculus
  siRNA target sequence for Prkcm (NM_008858.1,658-676).
gtggtctgaattaccataa

SEQ ID NO: 512265 - DNA, 19 bp, Mus musculus
  siRNA target sequence for Prkcm (NM_008858.1,663-681).
ctgaattaccataagagat

SEQ ID NO: 512266 - DNA, 19 bp, Mus musculus
  siRNA target sequence for Prkcm (NM_008858.1,671-689).
ccataagagatgtgcattt

SEQ ID NO: 512267 - DNA, 19 bp, Mus musculus
  siRNA target sequence for Prkcm (NM_008858.1,672-690).
cataagagatgtgcattta

SEQ ID NO: 512268 - DNA, 19 bp, Mus musculus
  siRNA target sequence for Prkcm (NM_008858.1,845-863).
gtctccatctgagtcattt

SEQ ID NO: 512269 - DNA, 19 bp, Mus musculus
  siRNA target sequence for Prkcm (NM_008858.1,847-865).
ctccatctgagtcatttat

SEQ ID NO: 512270 - DNA, 19 bp, Mus musculus
  siRNA target sequence for Prkcm (NM_008858.1,870-888).
cgtgagaagaggtcaaatt

SEQ ID NO: 512271 - DNA, 19 bp, Mus musculus
  siRNA target sequence for Prkcm (NM_008858.1,883-901).
caaattcgcagtcatacat

SEQ ID NO: 512272 - DNA, 19 bp, Mus musculus
  siRNA target sequence for Prkcm (NM_008858.1,988-1006).
cggtctgccagttctgtaa

SEQ ID NO: 512273 - DNA, 19 bp, Mus musculus
  siRNA target sequence for Prkcm (NM_008858.1,1118-1136).
catcaatggagaattactt

SEQ ID NO: 512274 - DNA, 19 bp, Mus musculus
  siRNA target sequence for Prkcm (NM_008858.1,1147-1165).
cagaatctgatgttgttat

SEQ ID NO: 512275 - DNA, 19 bp, Mus musculus
  siRNA target sequence for Prkcm (NM_008858.1,1336-1354).
cttcaacgagcaacaacat

SEQ ID NO: 512276 - DNA, 19 bp, Mus musculus
  siRNA target sequence for Prkcm (NM_008858.1,1516-1534).
cagggagccggtactacaa

SEQ ID NO: 512277 - DNA, 19 bp, Mus musculus
  siRNA target sequence for Prkcm (NM_008858.1,1526-1544).
gtactacaaggaaattcct

SEQ ID NO: 512278 - DNA, 19 bp, Mus musculus
  siRNA target sequence for Prkcm (NM_008858.1,1599-1617).
ggagcgactcctcattgtt

SEQ ID NO: 512279 - DNA, 19 bp, Mus musculus
  siRNA target sequence for Prkcm (NM_008858.1,1600-1618).
gagcgactcctcattgttt

SEQ ID NO: 512280 - DNA, 19 bp, Mus musculus
  siRNA target sequence for Prkcm (NM_008858.1,1606-1624).
ctcctcattgttttgaaat

SEQ ID NO: 512281 - DNA, 19 bp, Mus musculus
  siRNA target sequence for Prkcm (NM_008858.1,1627-1645).
ctacagcgaatgtagtgta

SEQ ID NO: 512282 - DNA, 19 bp, Mus musculus
  siRNA target sequence for Prkcm (NM_008858.1,1630-1648).
cagcgaatgtagtgtatta

SEQ ID NO: 512283 - DNA, 19 bp, Mus musculus
  siRNA target sequence for Prkcm (NM_008858.1,1661-1679).
cgtggttaacccatcaagt

SEQ ID NO: 512284 - DNA, 19 bp, Mus musculus
  siRNA target sequence for Prkcm (NM_008858.1,1662-1680).
gtggttaacccatcaagtt

SEQ ID NO: 512285 - DNA, 19 bp, Mus musculus
  siRNA target sequence for Prkcm (NM_008858.1,1799-1817).
cggatccaactcacacaaa

SEQ ID NO: 512286 - DNA, 19 bp, Mus musculus
  siRNA target sequence for Prkcm (NM_008858.1,1801-1819).
gatccaactcacacaaaga

SEQ ID NO: 512287 - DNA, 19 bp, Mus musculus
  siRNA target sequence for Prkcm (NM_008858.1,1827-1845).
gtgagcatttccgtttcaa

SEQ ID NO: 512288 - DNA, 19 bp, Mus musculus
  siRNA target sequence for Prkcm (NM_008858.1,1868-1886).
ggatatcagcacagtctat

SEQ ID NO: 512289 - DNA, 19 bp, Mus musculus
  siRNA target sequence for Prkcm (NM_008858.1,1912-1930).
gttccggacagtttggaat

SEQ ID NO: 512290 - DNA, 19 bp, Mus musculus
  siRNA target sequence for Prkcm (NM_008858.1,1916-1934).
cggacagtttggaattgtt

SEQ ID NO: 512291 - DNA, 19 bp, Mus musculus
  siRNA target sequence for Prkcm (NM_008858.1,1963-1981).
gagatgtagctattaagat

SEQ ID NO: 512292 - DNA, 19 bp, Mus musculus
  siRNA target sequence for Prkcm (NM_008858.1,2025-2043).
cgtaatgaggttgcaattt

SEQ ID NO: 512293 - DNA, 19 bp, Mus musculus
  siRNA target sequence for Prkcm (NM_008858.1,2026-2044).
gtaatgaggttgcaatttt

SEQ ID NO: 512294 - DNA, 19 bp, Mus musculus
  siRNA target sequence for Prkcm (NM_008858.1,2031-2049).
gaggttgcaattttacaga

SEQ ID NO: 512295 - DNA, 19 bp, Mus musculus
  siRNA target sequence for Prkcm (NM_008858.1,2055-2073).
catcaccctggtgttgtaa

SEQ ID NO: 512296 - DNA, 19 bp, Mus musculus
  siRNA target sequence for Prkcm (NM_008858.1,2062-2080).
ctggtgttgtaaatttgga

SEQ ID NO: 512297 - DNA, 19 bp, Mus musculus
  siRNA target sequence for Prkcm (NM_008858.1,2095-2113).
cgcctgaaagagtgtttgt

SEQ ID NO: 512298 - DNA, 19 bp, Mus musculus
  siRNA target sequence for Prkcm (NM_008858.1,2096-2114).
gcctgaaagagtgtttgtt

SEQ ID NO: 512299 - DNA, 19 bp, Mus musculus
  siRNA target sequence for Prkcm (NM_008858.1,2104-2122).
gagtgtttgttgttatgga

SEQ ID NO: 512300 - DNA, 19 bp, Mus musculus
  siRNA target sequence for Prkcm (NM_008858.1,2147-2165).
gatgatcttgtcaagtgaa

SEQ ID NO: 512301 - DNA, 19 bp, Mus musculus
  siRNA target sequence for Prkcm (NM_008858.1,2181-2199).
gaacacataacgaagtttt

SEQ ID NO: 512302 - DNA, 19 bp, Mus musculus
  siRNA target sequence for Prkcm (NM_008858.1,2191-2209).
cgaagtttttaattactca

SEQ ID NO: 512303 - DNA, 19 bp, Mus musculus
  siRNA target sequence for Prkcm (NM_008858.1,2220-2238).
gctttgcgacatcttcatt

SEQ ID NO: 512304 - DNA, 19 bp, Mus musculus
  siRNA target sequence for Prkcm (NM_008858.1,2221-2239).
ctttgcgacatcttcattt

SEQ ID NO: 512305 - DNA, 19 bp, Mus musculus
  siRNA target sequence for Prkcm (NM_008858.1,2446-2464).
ctgttggggtcatcatcta

SEQ ID NO: 512306 - DNA, 19 bp, Mus musculus
  siRNA target sequence for Prkcm (NM_008858.1,2476-2494).
gtggtaccttcccttttaa

SEQ ID NO: 512307 - DNA, 19 bp, Mus musculus
  siRNA target sequence for Prkcm (NM_008858.1,2479-2497).
gtaccttcccttttaatga

SEQ ID NO: 512308 - DNA, 19 bp, Mus musculus
  siRNA target sequence for Prkcm (NM_008858.1,2552-2570).
cccgtggaaggagatttct

SEQ ID NO: 512309 - DNA, 19 bp, Mus musculus
  siRNA target sequence for Prkcm (NM_008858.1,2622-2640).
cgctacagtgtggataaaa

SEQ ID NO: 512310 - DNA, 19 bp, Mus musculus
  siRNA target sequence for Prkcm (NM_008858.1,2666-2684).
ctatcagacctggttagat

SEQ ID NO: 512311 - DNA, 19 bp, Mus musculus
  siRNA target sequence for Prkcm (NM_008858.1,2672-2690).
gacctggttagatttacga

SEQ ID NO: 512312 - DNA, 19 bp, Mus musculus
  siRNA target sequence for Prkcn (NM_029239.2,490-508).
gtgttcaagtcccaaaaca

SEQ ID NO: 512313 - DNA, 19 bp, Mus musculus
  siRNA target sequence for Prkcn (NM_029239.2,514-532).
ctcagctcggctctctaat

SEQ ID NO: 512314 - DNA, 19 bp, Mus musculus
  siRNA target sequence for Prkcn (NM_029239.2,569-587).
ggctcagtgcacacagttt

SEQ ID NO: 512315 - DNA, 19 bp, Mus musculus
  siRNA target sequence for Prkcn (NM_029239.2,573-591).
cagtgcacacagtttcatt

SEQ ID NO: 512316 - DNA, 19 bp, Mus musculus
  siRNA target sequence for Prkcn (NM_029239.2,608-626).
ctcacacgagagagtgtta

SEQ ID NO: 512317 - DNA, 19 bp, Mus musculus
  siRNA target sequence for Prkcn (NM_029239.2,612-630).
cacgagagagtgttaccat

SEQ ID NO: 512318 - DNA, 19 bp, Mus musculus
  siRNA target sequence for Prkcn (NM_029239.2,667-685).
cctcgtgtgctccattgtt

SEQ ID NO: 512319 - DNA, 19 bp, Mus musculus
  siRNA target sequence for Prkcn (NM_029239.2,668-686).
ctcgtgtgctccattgttt

SEQ ID NO: 512320 - DNA, 19 bp, Mus musculus
  siRNA target sequence for Prkcn (NM_029239.2,670-688).
cgtgtgctccattgtttat

SEQ ID NO: 512321 - DNA, 19 bp, Mus musculus
  siRNA target sequence for Prkcn (NM_029239.2,708-726).
gattctttggcatgtatga

SEQ ID NO: 512322 - DNA, 19 bp, Mus musculus
  siRNA target sequence for Prkcn (NM_029239.2,746-764).
cacgacatgaactcagaaa

SEQ ID NO: 512323 - DNA, 19 bp, Mus musculus
  siRNA target sequence for Prkcn (NM_029239.2,783-801).
cctcagcagatgaaataca

SEQ ID NO: 512324 - DNA, 19 bp, Mus musculus
  siRNA target sequence for Prkcn (NM_029239.2,784-802).
ctcagcagatgaaatacat

SEQ ID NO: 512325 - DNA, 19 bp, Mus musculus
  siRNA target sequence for Prkcn (NM_029239.2,786-804).
cagcagatgaaatacatga

SEQ ID NO: 512326 - DNA, 19 bp, Mus musculus
  siRNA target sequence for Prkcn (NM_029239.2,807-825).
gggacctggtagaagttgt

SEQ ID NO: 512327 - DNA, 19 bp, Mus musculus
  siRNA target sequence for Prkcn (NM_029239.2,864-882).
gccctcacgctctctatgt

SEQ ID NO: 512328 - DNA, 19 bp, Mus musculus
  siRNA target sequence for Prkcn (NM_029239.2,865-883).
ccctcacgctctctatgta

SEQ ID NO: 512329 - DNA, 19 bp, Mus musculus
  siRNA target sequence for Prkcn (NM_029239.2,869-887).
cacgctctctatgtacatt

SEQ ID NO: 512330 - DNA, 19 bp, Mus musculus
  siRNA target sequence for Prkcn (NM_029239.2,871-889).
cgctctctatgtacattct

SEQ ID NO: 512331 - DNA, 19 bp, Mus musculus
  siRNA target sequence for Prkcn (NM_029239.2,872-890).
gctctctatgtacattctt

SEQ ID NO: 512332 - DNA, 19 bp, Mus musculus
  siRNA target sequence for Prkcn (NM_029239.2,875-893).
ctctatgtacattcttaca

SEQ ID NO: 512333 - DNA, 19 bp, Mus musculus
  siRNA target sequence for Prkcn (NM_029239.2,877-895).
ctatgtacattcttacaaa

SEQ ID NO: 512334 - DNA, 19 bp, Mus musculus
  siRNA target sequence for Prkcn (NM_029239.2,892-910).
caaagcacctactttttgt

SEQ ID NO: 512335 - DNA, 19 bp, Mus musculus
  siRNA target sequence for Prkcn (NM_029239.2,896-914).
gcacctactttttgtgatt

SEQ ID NO: 512336 - DNA, 19 bp, Mus musculus
  siRNA target sequence for Prkcn (NM_029239.2,936-954).
gactggtacgtcaaggatt

SEQ ID NO: 512337 - DNA, 19 bp, Mus musculus
  siRNA target sequence for Prkcn (NM_029239.2,938-956).
ctggtacgtcaaggattaa

SEQ ID NO: 512338 - DNA, 19 bp, Mus musculus
  siRNA target sequence for Prkcn (NM_029239.2,940-958).
ggtacgtcaaggattaaaa

SEQ ID NO: 512339 - DNA, 19 bp, Mus musculus
  siRNA target sequence for Prkcn (NM_029239.2,941-959).
gtacgtcaaggattaaaat

SEQ ID NO: 512340 - DNA, 19 bp, Mus musculus
  siRNA target sequence for Prkcn (NM_029239.2,966-984).
gctgtggattaaattatca

SEQ ID NO: 512341 - DNA, 19 bp, Mus musculus
  siRNA target sequence for Prkcn (NM_029239.2,993-1011).
gtgccttcaagattccaaa

SEQ ID NO: 512342 - DNA, 19 bp, Mus musculus
  siRNA target sequence for Prkcn (NM_029239.2,995-1013).
gccttcaagattccaaata

SEQ ID NO: 512343 - DNA, 19 bp, Mus musculus
  siRNA target sequence for Prkcn (NM_029239.2,1033-1051).
gagacgtctgtcaaatgta

SEQ ID NO: 512344 - DNA, 19 bp, Mus musculus
  siRNA target sequence for Prkcn (NM_029239.2,1112-1130).
ctcagtgaagagtcacata

SEQ ID NO: 512345 - DNA, 19 bp, Mus musculus
  siRNA target sequence for Prkcn (NM_029239.2,1172-1190).
cgtccgatctggatggaaa

SEQ ID NO: 512346 - DNA, 19 bp, Mus musculus
  siRNA target sequence for Prkcn (NM_029239.2,1176-1194).
cgatctggatggaaaagat

SEQ ID NO: 512347 - DNA, 19 bp, Mus musculus
  siRNA target sequence for Prkcn (NM_029239.2,1364-1382).
gactgccttggcgaagtta

SEQ ID NO: 512348 - DNA, 19 bp, Mus musculus
  siRNA target sequence for Prkcn (NM_029239.2,1366-1384).
ctgccttggcgaagttact

SEQ ID NO: 512349 - DNA, 19 bp, Mus musculus
  siRNA target sequence for Prkcn (NM_029239.2,1418-1436).
gcagacatgcccatggata

SEQ ID NO: 512350 - DNA, 19 bp, Mus musculus
  siRNA target sequence for Prkcn (NM_029239.2,1502-1520).
cccgaagacaagatgttct

SEQ ID NO: 512351 - DNA, 19 bp, Mus musculus
  siRNA target sequence for Prkcn (NM_029239.2,1550-1568).
cgagatgaggagactgtta

SEQ ID NO: 512352 - DNA, 19 bp, Mus musculus
  siRNA target sequence for Prkcn (NM_029239.2,1551-1569).
gagatgaggagactgttaa

SEQ ID NO: 512353 - DNA, 19 bp, Mus musculus
  siRNA target sequence for Prkcn (NM_029239.2,1580-1598).
ccatccaccagcaataata

SEQ ID NO: 512354 - DNA, 19 bp, Mus musculus
  siRNA target sequence for Prkcn (NM_029239.2,1699-1717).
cctgagaaagagacattat

SEQ ID NO: 512355 - DNA, 19 bp, Mus musculus
  siRNA target sequence for Prkcn (NM_029239.2,1700-1718).
ctgagaaagagacattatt

SEQ ID NO: 512356 - DNA, 19 bp, Mus musculus
  siRNA target sequence for Prkcn (NM_029239.2,1720-1738).
gagacttgacagtaaatgt

SEQ ID NO: 512357 - DNA, 19 bp, Mus musculus
  siRNA target sequence for Prkcn (NM_029239.2,1722-1740).
gacttgacagtaaatgtct

SEQ ID NO: 512358 - DNA, 19 bp, Mus musculus
  siRNA target sequence for Prkcn (NM_029239.2,1737-1755).
gtctaacattgtttcaaaa

SEQ ID NO: 512359 - DNA, 19 bp, Mus musculus
  siRNA target sequence for Prkcn (NM_029239.2,1771-1789).
gtattataaggaaattcca

SEQ ID NO: 512360 - DNA, 19 bp, Mus musculus
  siRNA target sequence for Prkcn (NM_029239.2,1845-1863).
gcagtaacccacactgttt

SEQ ID NO: 512361 - DNA, 19 bp, Mus musculus
  siRNA target sequence for Prkcn (NM_029239.2,1875-1893).
ccgataccgtggtatactt

SEQ ID NO: 512362 - DNA, 19 bp, Mus musculus
  siRNA target sequence for Prkcn (NM_029239.2,1876-1894).
cgataccgtggtatacttt

SEQ ID NO: 512363 - DNA, 19 bp, Mus musculus
  siRNA target sequence for Prkcn (NM_029239.2,1912-1930).
gagcagctctcataatcct

SEQ ID NO: 512364 - DNA, 19 bp, Mus musculus
  siRNA target sequence for Prkcn (NM_029239.2,2116-2134).
cagcgtttaccagatcttt

SEQ ID NO: 512365 - DNA, 19 bp, Mus musculus
  siRNA target sequence for Prkcn (NM_029239.2,2202-2220).
gggatgtggctattaaagt

SEQ ID NO: 512366 - DNA, 19 bp, Mus musculus
  siRNA target sequence for Prkcn (NM_029239.2,2266-2284).
gaacgaagtggccatttta

SEQ ID NO: 512367 - DNA, 19 bp, Mus musculus
  siRNA target sequence for Prkcn (NM_029239.2,2294-2312).
caccatcctgggattgtaa

SEQ ID NO: 512368 - DNA, 19 bp, Mus musculus
  siRNA target sequence for Prkcn (NM_029239.2,2417-2435).
ccagaacggattaccaaat

SEQ ID NO: 512369 - DNA, 19 bp, Mus musculus
  siRNA target sequence for Prkcn (NM_029239.2,2418-2436).
cagaacggattaccaaatt

SEQ ID NO: 512370 - DNA, 19 bp, Mus musculus
  siRNA target sequence for Prkcn (NM_029239.2,2440-2458).
ggtcacacagatacttgtt

SEQ ID NO: 512371 - DNA, 19 bp, Mus musculus
  siRNA target sequence for Prkcn (NM_029239.2,2453-2471).
cttgttgccttgaggaatt

SEQ ID NO: 512372 - DNA, 19 bp, Mus musculus
  siRNA target sequence for Prkcn (NM_029239.2,2685-2703).
cggtgggcgtcatcgttta

SEQ ID NO: 512373 - DNA, 19 bp, Mus musculus
  siRNA target sequence for Prkcn (NM_029239.2,2916-2934).
ggcttgacctcagagaatt

SEQ ID NO: 512374 - DNA, 19 bp, Mus musculus
  siRNA target sequence for Prkcn (NM_029239.2,2940-2958).
ctcgcattggagaacgtta

SEQ ID NO: 512375 - DNA, 19 bp, Mus musculus
  siRNA target sequence for Prkcn (NM_029239.2,2944-2962).
cattggagaacgttacatt

SEQ ID NO: 512376 - DNA, 19 bp, Mus musculus
  siRNA target sequence for Prkcn (NM_029239.2,2949-2967).
gagaacgttacattacaca

SEQ ID NO: 512377 - DNA, 19 bp, Mus musculus
  siRNA target sequence for Prkcn (NM_029239.2,3014-3032).
ctggaatacccaaagcatt

SEQ ID NO: 512378 - DNA, 19 bp, Mus musculus
  siRNA target sequence for Prkcn (NM_029239.2,3017-3035).
gaatacccaaagcatttca

SEQ ID NO: 512379 - DNA, 19 bp, Mus musculus
  siRNA target sequence for Prkcq (NM_008859.1,101-119).
cttcgaatcggtttatcca

SEQ ID NO: 512380 - DNA, 19 bp, Mus musculus
  siRNA target sequence for Prkcq (NM_008859.1,172-190).
ctgcgctgtgcttgtcaaa

SEQ ID NO: 512381 - DNA, 19 bp, Mus musculus
  siRNA target sequence for Prkcq (NM_008859.1,177-195).
ctgtgcttgtcaaagagta

SEQ ID NO: 512382 - DNA, 19 bp, Mus musculus
  siRNA target sequence for Prkcq (NM_008859.1,264-282).
cctttgacgcccacattaa

SEQ ID NO: 512383 - DNA, 19 bp, Mus musculus
  siRNA target sequence for Prkcq (NM_008859.1,389-407).
gggcggacagaaatatggt

SEQ ID NO: 512384 - DNA, 19 bp, Mus musculus
  siRNA target sequence for Prkcq (NM_008859.1,419-437).
cctcaaggccgaatgctaa

SEQ ID NO: 512385 - DNA, 19 bp, Mus musculus
  siRNA target sequence for Prkcq (NM_008859.1,428-446).
cgaatgctaatgaatgcaa

SEQ ID NO: 512386 - DNA, 19 bp, Mus musculus
  siRNA target sequence for Prkcq (NM_008859.1,520-538).
gcgccgaggagccatcaaa

SEQ ID NO: 512387 - DNA, 19 bp, Mus musculus
  siRNA target sequence for Prkcq (NM_008859.1,522-540).
gccgaggagccatcaaaca

SEQ ID NO: 512388 - DNA, 19 bp, Mus musculus
  siRNA target sequence for Prkcq (NM_008859.1,590-608).
cctcaacccacattttgct

SEQ ID NO: 512389 - DNA, 19 bp, Mus musculus
  siRNA target sequence for Prkcq (NM_008859.1,652-670).
ccagtgccgacagtgtaat

SEQ ID NO: 512390 - DNA, 19 bp, Mus musculus
  siRNA target sequence for Prkcq (NM_008859.1,655-673).
gtgccgacagtgtaatgca

SEQ ID NO: 512391 - DNA, 19 bp, Mus musculus
  siRNA target sequence for Prkcq (NM_008859.1,666-684).
gtaatgcagcgattcacaa

SEQ ID NO: 512392 - DNA, 19 bp, Mus musculus
  siRNA target sequence for Prkcq (NM_008859.1,671-689).
gcagcgattcacaagaagt

SEQ ID NO: 512393 - DNA, 19 bp, Mus musculus
  siRNA target sequence for Prkcq (NM_008859.1,752-770).
cataaggagagattcaaga

SEQ ID NO: 512394 - DNA, 19 bp, Mus musculus
  siRNA target sequence for Prkcq (NM_008859.1,775-793).
catgccacacagattcaaa

SEQ ID NO: 512395 - DNA, 19 bp, Mus musculus
  siRNA target sequence for Prkcq (NM_008859.1,780-798).
cacacagattcaaagtcta

SEQ ID NO: 512396 - DNA, 19 bp, Mus musculus
  siRNA target sequence for Prkcq (NM_008859.1,786-804).
gattcaaagtctacaacta

SEQ ID NO: 512397 - DNA, 19 bp, Mus musculus
  siRNA target sequence for Prkcq (NM_008859.1,859-877).
gcaaggactcaaatgtgat

SEQ ID NO: 512398 - DNA, 19 bp, Mus musculus
  siRNA target sequence for Prkcq (NM_008859.1,901-919).
ccgatgccagacaaaggtt

SEQ ID NO: 512399 - DNA, 19 bp, Mus musculus
  siRNA target sequence for Prkcq (NM_008859.1,910-928).
gacaaaggttgccaatctt

SEQ ID NO: 512400 - DNA, 19 bp, Mus musculus
  siRNA target sequence for Prkcq (NM_008859.1,959-977).
gcactagcgatgattgaaa

SEQ ID NO: 512401 - DNA, 19 bp, Mus musculus
  siRNA target sequence for Prkcq (NM_008859.1,993-1011).
gctccttacgagattcaga

SEQ ID NO: 512402 - DNA, 19 bp, Mus musculus
  siRNA target sequence for Prkcq (NM_008859.1,994-1012).
ctccttacgagattcagaa

SEQ ID NO: 512403 - DNA, 19 bp, Mus musculus
  siRNA target sequence for Prkcq (NM_008859.1,1002-1020).
gagattcagaacacatctt

SEQ ID NO: 512404 - DNA, 19 bp, Mus musculus
  siRNA target sequence for Prkcq (NM_008859.1,1046-1064).
ctcccatgctccaccaaaa

SEQ ID NO: 512405 - DNA, 19 bp, Mus musculus
  siRNA target sequence for Prkcq (NM_008859.1,1050-1068).
catgctccaccaaaaacga

SEQ ID NO: 512406 - DNA, 19 bp, Mus musculus
  siRNA target sequence for Prkcq (NM_008859.1,1123-1141).
ctgggattcccctttggat

SEQ ID NO: 512407 - DNA, 19 bp, Mus musculus
  siRNA target sequence for Prkcq (NM_008859.1,1132-1150).
ccctttggatgggtcaaat

SEQ ID NO: 512408 - DNA, 19 bp, Mus musculus
  siRNA target sequence for Prkcq (NM_008859.1,1346-1364).
gatgacgtcgagtgtacaa

SEQ ID NO: 512409 - DNA, 19 bp, Mus musculus
  siRNA target sequence for Prkcq (NM_008859.1,1437-1455).
ccaaggaaaatctcttttt

SEQ ID NO: 512410 - DNA, 19 bp, Mus musculus
  siRNA target sequence for Prkcq (NM_008859.1,1469-1487).
ctcaatggaggcgacttaa

SEQ ID NO: 512411 - DNA, 19 bp, Mus musculus
  siRNA target sequence for Prkcq (NM_008859.1,1498-1516).
ccaaagttgccacaaattt

SEQ ID NO: 512412 - DNA, 19 bp, Mus musculus
  siRNA target sequence for Prkcq (NM_008859.1,1503-1521).
gttgccacaaatttgatct

SEQ ID NO: 512413 - DNA, 19 bp, Mus musculus
  siRNA target sequence for Prkcq (NM_008859.1,1525-1543).
cagagccacgttttatgct

SEQ ID NO: 512414 - DNA, 19 bp, Mus musculus
  siRNA target sequence for Prkcq (NM_008859.1,1610-1628).
gataatatcctgttagaca

SEQ ID NO: 512415 - DNA, 19 bp, Mus musculus
  siRNA target sequence for Prkcq (NM_008859.1,1629-1647).
gagatggacatatcaaaat

SEQ ID NO: 512416 - DNA, 19 bp, Mus musculus
  siRNA target sequence for Prkcq (NM_008859.1,1682-1700).
ggagatgcgaagacaaata

SEQ ID NO: 512417 - DNA, 19 bp, Mus musculus
  siRNA target sequence for Prkcq (NM_008859.1,1685-1703).
gatgcgaagacaaatactt

SEQ ID NO: 512418 - DNA, 19 bp, Mus musculus
  siRNA target sequence for Prkcq (NM_008859.1,1688-1706).
gcgaagacaaatactttct

SEQ ID NO: 512419 - DNA, 19 bp, Mus musculus
  siRNA target sequence for Prkcq (NM_008859.1,1745-1763).
ggtcagaagtacaaccatt

SEQ ID NO: 512420 - DNA, 19 bp, Mus musculus
  siRNA target sequence for Prkcq (NM_008859.1,1780-1798).
cttcggggtgctcgtttat

SEQ ID NO: 512421 - DNA, 19 bp, Mus musculus
  siRNA target sequence for Prkcq (NM_008859.1,1784-1802).
ggggtgctcgtttatgaga

SEQ ID NO: 512422 - DNA, 19 bp, Mus musculus
  siRNA target sequence for Prkcq (NM_008859.1,1785-1803).
gggtgctcgtttatgagat

SEQ ID NO: 512423 - DNA, 19 bp, Mus musculus
  siRNA target sequence for Prkcq (NM_008859.1,1910-1928).
gaccttctagtgaagcttt

SEQ ID NO: 512424 - DNA, 19 bp, Mus musculus
  siRNA target sequence for Prkcq (NM_008859.1,1916-1934).
ctagtgaagctttttgtga

SEQ ID NO: 512425 - DNA, 19 bp, Mus musculus
  siRNA target sequence for Prkcq (NM_008859.1,1972-1990).
ccgccagcatcctttgttt

SEQ ID NO: 512426 - DNA, 19 bp, Mus musculus
  siRNA target sequence for Prkcq (NM_008859.1,2034-2052).
cacccttcagaccaaaagt

SEQ ID NO: 512427 - DNA, 19 bp, Mus musculus
  siRNA target sequence for Prkcq (NM_008859.1,2037-2055).
ccttcagaccaaaagtgaa

SEQ ID NO: 512428 - DNA, 19 bp, Mus musculus
  siRNA target sequence for Prkcq (NM_008859.1,2041-2059).
cagaccaaaagtgaaatca

SEQ ID NO: 512429 - DNA, 19 bp, Mus musculus
  siRNA target sequence for Prkcq (NM_008859.1,2051-2069).
gtgaaatcaccatatgact

SEQ ID NO: 512430 - DNA, 19 bp, Mus musculus
  siRNA target sequence for Prkcq (NM_008859.1,2060-2078).
ccatatgactgtagcaatt

SEQ ID NO: 512431 - DNA, 19 bp, Mus musculus
  siRNA target sequence for Prkcq (NM_008859.1,2061-2079).
catatgactgtagcaattt

SEQ ID NO: 512432 - DNA, 19 bp, Mus musculus
  siRNA target sequence for Prkcq (NM_008859.1,2073-2091).
gcaatttcgacaaggaatt

SEQ ID NO: 512433 - DNA, 19 bp, Mus musculus
  siRNA target sequence for Prkcq (NM_008859.1,2121-2139).
ccgacagagcactcatcaa

SEQ ID NO: 512434 - DNA, 19 bp, Mus musculus
  siRNA target sequence for Prkcq (NM_178075.2,1707-1725).
ccaaggtatgcgtttgtta

SEQ ID NO: 512435 - DNA, 19 bp, Mus musculus
  siRNA target sequence for Prkcq (NM_178075.2,1711-1729).
ggtatgcgtttgttactct

SEQ ID NO: 512436 - DNA, 19 bp, Mus musculus
  siRNA target sequence for Prkcq (NM_178075.2,1717-1735).
cgtttgttactctctaagt

SEQ ID NO: 512437 - DNA, 19 bp, Mus musculus
  siRNA target sequence for Prkg1 (NM_011160.1,97-115).
ccctgcgggatttacagta

SEQ ID NO: 512438 - DNA, 19 bp, Mus musculus
  siRNA target sequence for Prkg1 (NM_011160.1,98-116).
cctgcgggatttacagtat

SEQ ID NO: 512439 - DNA, 19 bp, Mus musculus
  siRNA target sequence for Prkg1 (NM_011160.1,218-236).
gaacgaactggacaagtat

SEQ ID NO: 512440 - DNA, 19 bp, Mus musculus
  siRNA target sequence for Prkg1 (NM_011160.1,397-415).
cacagtcgaaggatctcat

SEQ ID NO: 512441 - DNA, 19 bp, Mus musculus
  siRNA target sequence for Prkg1 (NM_011160.1,671-689).
gaccgtcaagactcttgta

SEQ ID NO: 512442 - DNA, 19 bp, Mus musculus
  siRNA target sequence for Prkg1 (NM_011160.1,673-691).
ccgtcaagactcttgtaaa

SEQ ID NO: 512443 - DNA, 19 bp, Mus musculus
  siRNA target sequence for Prkg1 (NM_011160.1,704-722).
ggccatcgatcgacaatgt

SEQ ID NO: 512444 - DNA, 19 bp, Mus musculus
  siRNA target sequence for Prkg1 (NM_011160.1,705-723).
gccatcgatcgacaatgtt

SEQ ID NO: 512445 - DNA, 19 bp, Mus musculus
  siRNA target sequence for Prkg1 (NM_011160.1,707-725).
catcgatcgacaatgtttt

SEQ ID NO: 512446 - DNA, 19 bp, Mus musculus
  siRNA target sequence for Prkg1 (NM_011160.1,710-728).
cgatcgacaatgttttcaa

SEQ ID NO: 512447 - DNA, 19 bp, Mus musculus
  siRNA target sequence for Prkg1 (NM_011160.1,711-729).
gatcgacaatgttttcaaa

SEQ ID NO: 512448 - DNA, 19 bp, Mus musculus
  siRNA target sequence for Prkg1 (NM_011160.1,714-732).
cgacaatgttttcaaacaa

SEQ ID NO: 512449 - DNA, 19 bp, Mus musculus
  siRNA target sequence for Prkg1 (NM_011160.1,759-777).
cataccgagtacatggaat

SEQ ID NO: 512450 - DNA, 19 bp, Mus musculus
  siRNA target sequence for Prkg1 (NM_011160.1,763-781).
ccgagtacatggaattttt

SEQ ID NO: 512451 - DNA, 19 bp, Mus musculus
  siRNA target sequence for Prkg1 (NM_011160.1,919-937).
gtaaagggcaggtgaatgt

SEQ ID NO: 512452 - DNA, 19 bp, Mus musculus
  siRNA target sequence for Prkg1 (NM_011160.1,1110-1128).
ggaggactggacgatgttt

SEQ ID NO: 512453 - DNA, 19 bp, Mus musculus
  siRNA target sequence for Prkg1 (NM_011160.1,1116-1134).
ctggacgatgtttctaaca

SEQ ID NO: 512454 - DNA, 19 bp, Mus musculus
  siRNA target sequence for Prkg1 (NM_011160.1,1118-1136).
ggacgatgtttctaacaaa

SEQ ID NO: 512455 - DNA, 19 bp, Mus musculus
  siRNA target sequence for Prkg1 (NM_011160.1,1122-1140).
gatgtttctaacaaagcat

SEQ ID NO: 512456 - DNA, 19 bp, Mus musculus
  siRNA target sequence for Prkg1 (NM_011160.1,1370-1388).
catgcagggggctcattct

SEQ ID NO: 512457 - DNA, 19 bp, Mus musculus
  siRNA target sequence for Prkg1 (NM_011160.1,1383-1401).
cattctgacttcattgtga

SEQ ID NO: 512458 - DNA, 19 bp, Mus musculus
  siRNA target sequence for Prkg1 (NM_011160.1,1403-1421).
gctgtacaggacatttaaa

SEQ ID NO: 512459 - DNA, 19 bp, Mus musculus
  siRNA target sequence for Prkg1 (NM_011160.1,1467-1485).
gagctctggactattctca

SEQ ID NO: 512460 - DNA, 19 bp, Mus musculus
  siRNA target sequence for Prkg1 (NM_011160.1,1484-1502).
cagggataggggttcgttt

SEQ ID NO: 512461 - DNA, 19 bp, Mus musculus
  siRNA target sequence for Prkg1 (NM_011160.1,1487-1505).
ggataggggttcgtttgaa

SEQ ID NO: 512462 - DNA, 19 bp, Mus musculus
  siRNA target sequence for Prkg1 (NM_011160.1,1531-1549).
catgtgtggtagaagcatt

SEQ ID NO: 512463 - DNA, 19 bp, Mus musculus
  siRNA target sequence for Prkg1 (NM_011160.1,1550-1568).
cgcctatctgcattccaaa

SEQ ID NO: 512464 - DNA, 19 bp, Mus musculus
  siRNA target sequence for Prkg1 (NM_011160.1,1559-1577).
gcattccaaaggaatcatt

SEQ ID NO: 512465 - DNA, 19 bp, Mus musculus
  siRNA target sequence for Prkg1 (NM_011160.1,1727-1745).
gaacaaaggccatgacatt

SEQ ID NO: 512466 - DNA, 19 bp, Mus musculus
  siRNA target sequence for Prkg1 (NM_011160.1,1730-1748).
caaaggccatgacatttca

SEQ ID NO: 512467 - DNA, 19 bp, Mus musculus
  siRNA target sequence for Prkg1 (NM_011160.1,1754-1772).
ctactggtcactaggaatt

SEQ ID NO: 512468 - DNA, 19 bp, Mus musculus
  siRNA target sequence for Prkg1 (NM_011160.1,1759-1777).
ggtcactaggaattctgat

SEQ ID NO: 512469 - DNA, 19 bp, Mus musculus
  siRNA target sequence for Prkg1 (NM_011160.1,1762-1780).
cactaggaattctgatgta

SEQ ID NO: 512470 - DNA, 19 bp, Mus musculus
  siRNA target sequence for Prkg1 (NM_011160.1,1812-1830).
ggcccagatccaatgaaaa

SEQ ID NO: 512471 - DNA, 19 bp, Mus musculus
  siRNA target sequence for Prkg1 (NM_011160.1,1821-1839).
ccaatgaaaacctacaata

SEQ ID NO: 512472 - DNA, 19 bp, Mus musculus
  siRNA target sequence for Prkg1 (NM_011160.1,1822-1840).
caatgaaaacctacaatat

SEQ ID NO: 512473 - DNA, 19 bp, Mus musculus
  siRNA target sequence for Prkg1 (NM_011160.1,1847-1865).
gagggggattgacatgata

SEQ ID NO: 512474 - DNA, 19 bp, Mus musculus
  siRNA target sequence for Prkg1 (NM_011160.1,1849-1867).
gggggattgacatgataga

SEQ ID NO: 512475 - DNA, 19 bp, Mus musculus
  siRNA target sequence for Prkg1 (NM_011160.1,1850-1868).
ggggattgacatgatagaa

SEQ ID NO: 512476 - DNA, 19 bp, Mus musculus
  siRNA target sequence for Prkg1 (NM_011160.1,1877-1895).
gaagattgcaaaaaatgct

SEQ ID NO: 512477 - DNA, 19 bp, Mus musculus
  siRNA target sequence for Prkg1 (NM_011160.1,1935-1953).
gagaggttaggaaatttga

SEQ ID NO: 512478 - DNA, 19 bp, Mus musculus
  siRNA target sequence for Prkg1 (NM_011160.1,2027-2045).
cttgacacctcccataatt

SEQ ID NO: 512479 - DNA, 19 bp, Mus musculus
  siRNA target sequence for Prkg1 (NM_011160.1,2030-2048).
gacacctcccataattcca

SEQ ID NO: 512480 - DNA, 19 bp, Mus musculus
  siRNA target sequence for Prkg2 (NM_008926.2,610-628).
gcgagagtcaggaaggatt

SEQ ID NO: 512481 - DNA, 19 bp, Mus musculus
  siRNA target sequence for Prkg2 (NM_008926.2,720-738).
catgtacgggagaaactat

SEQ ID NO: 512482 - DNA, 19 bp, Mus musculus
  siRNA target sequence for Prkg2 (NM_008926.2,723-741).
gtacgggagaaactatcaa

SEQ ID NO: 512483 - DNA, 19 bp, Mus musculus
  siRNA target sequence for Prkg2 (NM_008926.2,746-764).
gcagctacgtcattaagca

SEQ ID NO: 512484 - DNA, 19 bp, Mus musculus
  siRNA target sequence for Prkg2 (NM_008926.2,766-784).
ggggaaccaggcaaccata

SEQ ID NO: 512485 - DNA, 19 bp, Mus musculus
  siRNA target sequence for Prkg2 (NM_008926.2,767-785).
gggaaccaggcaaccatat

SEQ ID NO: 512486 - DNA, 19 bp, Mus musculus
  siRNA target sequence for Prkg2 (NM_008926.2,823-841).
ggagagaagttgctatcat

SEQ ID NO: 512487 - DNA, 19 bp, Mus musculus
  siRNA target sequence for Prkg2 (NM_008926.2,868-886).
gaactggctattttgtaca

SEQ ID NO: 512488 - DNA, 19 bp, Mus musculus
  siRNA target sequence for Prkg2 (NM_008926.2,905-923).
cagtgaaagcgattaccaa

SEQ ID NO: 512489 - DNA, 19 bp, Mus musculus
  siRNA target sequence for Prkg2 (NM_008926.2,909-927).
gaaagcgattaccaatgtt

SEQ ID NO: 512490 - DNA, 19 bp, Mus musculus
  siRNA target sequence for Prkg2 (NM_008926.2,913-931).
gcgattaccaatgttaaaa

SEQ ID NO: 512491 - DNA, 19 bp, Mus musculus
  siRNA target sequence for Prkg2 (NM_008926.2,938-956).
ccctcgatagagaggtttt

SEQ ID NO: 512492 - DNA, 19 bp, Mus musculus
  siRNA target sequence for Prkg2 (NM_008926.2,988-1006).
cgggatgaggagtacagaa

SEQ ID NO: 512493 - DNA, 19 bp, Mus musculus
  siRNA target sequence for Prkg2 (NM_008926.2,1021-1039).
gtctccttgttgaagaatt

SEQ ID NO: 512494 - DNA, 19 bp, Mus musculus
  siRNA target sequence for Prkg2 (NM_008926.2,1048-1066).
gacaaactaaccaagatca

SEQ ID NO: 512495 - DNA, 19 bp, Mus musculus
  siRNA target sequence for Prkg2 (NM_008926.2,1093-1111).
gacaaaggagattacatca

SEQ ID NO: 512496 - DNA, 19 bp, Mus musculus
  siRNA target sequence for Prkg2 (NM_008926.2,1123-1141).
gaagaagggagcacctttt

SEQ ID NO: 512497 - DNA, 19 bp, Mus musculus
  siRNA target sequence for Prkg2 (NM_008926.2,1126-1144).
gaagggagcacctttttca

SEQ ID NO: 512498 - DNA, 19 bp, Mus musculus
  siRNA target sequence for Prkg2 (NM_008926.2,1178-1196).
gcacagagggccatgatca

SEQ ID NO: 512499 - DNA, 19 bp, Mus musculus
  siRNA target sequence for Prkg2 (NM_008926.2,1263-1281).
cgtcagatcagccaatata

SEQ ID NO: 512500 - DNA, 19 bp, Mus musculus
  siRNA target sequence for Prkg2 (NM_008926.2,1264-1282).
gtcagatcagccaatataa

SEQ ID NO: 512501 - DNA, 19 bp, Mus musculus
  siRNA target sequence for Prkg2 (NM_008926.2,1266-1284).
cagatcagccaatataatt

SEQ ID NO: 512502 - DNA, 19 bp, Mus musculus
  siRNA target sequence for Prkg2 (NM_008926.2,1302-1320).
cgcatgcctcgtgatagat

SEQ ID NO: 512503 - DNA, 19 bp, Mus musculus
  siRNA target sequence for Prkg2 (NM_008926.2,1311-1329).
cgtgatagatcgagaaaca

SEQ ID NO: 512504 - DNA, 19 bp, Mus musculus
  siRNA target sequence for Prkg2 (NM_008926.2,1312-1330).
gtgatagatcgagaaacat

SEQ ID NO: 512505 - DNA, 19 bp, Mus musculus
  siRNA target sequence for Prkg2 (NM_008926.2,1335-1353).
ccaaactgtcgggacattt

SEQ ID NO: 512506 - DNA, 19 bp, Mus musculus
  siRNA target sequence for Prkg2 (NM_008926.2,1340-1358).
ctgtcgggacatttgatga

SEQ ID NO: 512507 - DNA, 19 bp, Mus musculus
  siRNA target sequence for Prkg2 (NM_008926.2,1395-1413).
gaaccgtgacgatgaaaaa

SEQ ID NO: 512508 - DNA, 19 bp, Mus musculus
  siRNA target sequence for Prkg2 (NM_008926.2,1398-1416).
ccgtgacgatgaaaaaaga

SEQ ID NO: 512509 - DNA, 19 bp, Mus musculus
  siRNA target sequence for Prkg2 (NM_008926.2,1400-1418).
gtgacgatgaaaaaagaca

SEQ ID NO: 512510 - DNA, 19 bp, Mus musculus
  siRNA target sequence for Prkg2 (NM_008926.2,1420-1438).
gcaaagcgctccatgtcta

SEQ ID NO: 512511 - DNA, 19 bp, Mus musculus
  siRNA target sequence for Prkg2 (NM_008926.2,1457-1475).
ccctttctctggagatgat

SEQ ID NO: 512512 - DNA, 19 bp, Mus musculus
  siRNA target sequence for Prkg2 (NM_008926.2,1458-1476).
cctttctctggagatgatt

SEQ ID NO: 512513 - DNA, 19 bp, Mus musculus
  siRNA target sequence for Prkg2 (NM_008926.2,1572-1590).
ggagcttgttaaagtgaaa

SEQ ID NO: 512514 - DNA, 19 bp, Mus musculus
  siRNA target sequence for Prkg2 (NM_008926.2,1626-1644).
gaagaagcacattgttgat

SEQ ID NO: 512515 - DNA, 19 bp, Mus musculus
  siRNA target sequence for Prkg2 (NM_008926.2,1629-1647).
gaagcacattgttgataca

SEQ ID NO: 512516 - DNA, 19 bp, Mus musculus
  siRNA target sequence for Prkg2 (NM_008926.2,1646-1664).
caaagcagcaagaacatgt

SEQ ID NO: 512517 - DNA, 19 bp, Mus musculus
  siRNA target sequence for Prkg2 (NM_008926.2,1700-1718).
ctcccttcatcgtgaagtt

SEQ ID NO: 512518 - DNA, 19 bp, Mus musculus
  siRNA target sequence for Prkg2 (NM_008926.2,1702-1720).
cccttcatcgtgaagttgt

SEQ ID NO: 512519 - DNA, 19 bp, Mus musculus
  siRNA target sequence for Prkg2 (NM_008926.2,1703-1721).
ccttcatcgtgaagttgta

SEQ ID NO: 512520 - DNA, 19 bp, Mus musculus
  siRNA target sequence for Prkg2 (NM_008926.2,1704-1722).
cttcatcgtgaagttgtat

SEQ ID NO: 512521 - DNA, 19 bp, Mus musculus
  siRNA target sequence for Prkg2 (NM_008926.2,1723-1741).
cgtactttcaaggacaata

SEQ ID NO: 512522 - DNA, 19 bp, Mus musculus
  siRNA target sequence for Prkg2 (NM_008926.2,1724-1742).
gtactttcaaggacaataa

SEQ ID NO: 512523 - DNA, 19 bp, Mus musculus
  siRNA target sequence for Prkg2 (NM_008926.2,1778-1796).
gggagctgtggagtatact

SEQ ID NO: 512524 - DNA, 19 bp, Mus musculus
  siRNA target sequence for Prkg2 (NM_008926.2,1876-1894).
cgactaggcatcatctaca

SEQ ID NO: 512525 - DNA, 19 bp, Mus musculus
  siRNA target sequence for Prkg2 (NM_008926.2,1924-1942).
gatgccgatggctacctta

SEQ ID NO: 512526 - DNA, 19 bp, Mus musculus
  siRNA target sequence for Prkg2 (NM_008926.2,1927-1945).
gccgatggctaccttaagt

SEQ ID NO: 512527 - DNA, 19 bp, Mus musculus
  siRNA target sequence for Prkg2 (NM_008926.2,2026-2044).
cccgaggtcattcttaaca

SEQ ID NO: 512528 - DNA, 19 bp, Mus musculus
  siRNA target sequence for Prkg2 (NM_008926.2,2028-2046).
cgaggtcattcttaacaaa

SEQ ID NO: 512529 - DNA, 19 bp, Mus musculus
  siRNA target sequence for Prkg2 (NM_008926.2,2123-2141).
ctgggatagaccaaatgat

SEQ ID NO: 512530 - DNA, 19 bp, Mus musculus
  siRNA target sequence for Prkg2 (NM_008926.2,2125-2143).
gggatagaccaaatgatga

SEQ ID NO: 512531 - DNA, 19 bp, Mus musculus
  siRNA target sequence for Prkg2 (NM_008926.2,2134-2152).
caaatgatgacctacaatt

SEQ ID NO: 512532 - DNA, 19 bp, Mus musculus
  siRNA target sequence for Prkg2 (NM_008926.2,2139-2157).
gatgacctacaatttgatt

SEQ ID NO: 512533 - DNA, 19 bp, Mus musculus
  siRNA target sequence for Prkg2 (NM_008926.2,2158-2176).
ctcaagggaatcgagaaaa

SEQ ID NO: 512534 - DNA, 19 bp, Mus musculus
  siRNA target sequence for Prkg2 (NM_008926.2,2163-2181).
gggaatcgagaaaatggat

SEQ ID NO: 512535 - DNA, 19 bp, Mus musculus
  siRNA target sequence for Prkg2 (NM_008926.2,2164-2182).
ggaatcgagaaaatggatt

SEQ ID NO: 512536 - DNA, 19 bp, Mus musculus
  siRNA target sequence for Prkg2 (NM_008926.2,2178-2196).
ggatttccccagaaagata

SEQ ID NO: 512537 - DNA, 19 bp, Mus musculus
  siRNA target sequence for Prkg2 (NM_008926.2,2272-2290).
gggatcaacgacattaaga

SEQ ID NO: 512538 - DNA, 19 bp, Mus musculus
  siRNA target sequence for Prkg2 (NM_008926.2,2293-2311).
cacaggtggttaaatggtt

SEQ ID NO: 512539 - DNA, 19 bp, Mus musculus
  siRNA target sequence for Prkg2 (NM_008926.2,2337-2355).
gagccttccgtcaccttta

SEQ ID NO: 512540 - DNA, 19 bp, Mus musculus
  siRNA target sequence for Prkg2 (NM_008926.2,2364-2382).
gctcagtggccccatagat

SEQ ID NO: 512541 - DNA, 19 bp, Mus musculus
  siRNA target sequence for Prkg2 (NM_008926.2,2385-2403).
cagctactttgacaagtat

SEQ ID NO: 512542 - DNA, 19 bp, Mus musculus
  siRNA target sequence for Prkg2 (NM_008926.2,2416-2434).
ggggtgcctccggatgaaa

SEQ ID NO: 512543 - DNA, 19 bp, Mus musculus
  siRNA target sequence for Prkg2 (NM_008926.2,2417-2435).
gggtgcctccggatgaaat

SEQ ID NO: 512544 - DNA, 19 bp, Mus musculus
  siRNA target sequence for Prkwnk4 (NM_175638.1,315-333).
cccaccttcaagctctaaa

SEQ ID NO: 512545 - DNA, 19 bp, Mus musculus
  siRNA target sequence for Prkwnk4 (NM_175638.1,531-549).
cggccgatacctcaagttt

SEQ ID NO: 512546 - DNA, 19 bp, Mus musculus
  siRNA target sequence for Prkwnk4 (NM_175638.1,533-551).
gccgatacctcaagtttga

SEQ ID NO: 512547 - DNA, 19 bp, Mus musculus
  siRNA target sequence for Prkwnk4 (NM_175638.1,535-553).
cgatacctcaagtttgaca

SEQ ID NO: 512548 - DNA, 19 bp, Mus musculus
  siRNA target sequence for Prkwnk4 (NM_175638.1,536-554).
gatacctcaagtttgacat

SEQ ID NO: 512549 - DNA, 19 bp, Mus musculus
  siRNA target sequence for Prkwnk4 (NM_175638.1,671-689).
gtttctccgaggaagttga

SEQ ID NO: 512550 - DNA, 19 bp, Mus musculus
  siRNA target sequence for Prkwnk4 (NM_175638.1,821-839).
ggcggttccgcgaaatgaa

SEQ ID NO: 512551 - DNA, 19 bp, Mus musculus
  siRNA target sequence for Prkwnk4 (NM_175638.1,857-875).
gctggagtcgccagattct

SEQ ID NO: 512552 - DNA, 19 bp, Mus musculus
  siRNA target sequence for Prkwnk4 (NM_175638.1,858-876).
ctggagtcgccagattcta

SEQ ID NO: 512553 - DNA, 19 bp, Mus musculus
  siRNA target sequence for Prkwnk4 (NM_175638.1,1143-1161).
ctactccgagtgtcagaat

SEQ ID NO: 512554 - DNA, 19 bp, Mus musculus
  siRNA target sequence for Prkwnk4 (NM_175638.1,1256-1274).
gcatccgcacggataagaa

SEQ ID NO: 512555 - DNA, 19 bp, Mus musculus
  siRNA target sequence for Prkwnk4 (NM_175638.1,1498-1516).
gtagccttgggcttagtct

SEQ ID NO: 512556 - DNA, 19 bp, Mus musculus
  siRNA target sequence for Prkwnk4 (NM_175638.1,1585-1603).
gagaagcttcgaaaagcta

SEQ ID NO: 512557 - DNA, 19 bp, Mus musculus
  siRNA target sequence for Prkwnk4 (NM_175638.1,1595-1613).
gaaaagctagggaattgga

SEQ ID NO: 512558 - DNA, 19 bp, Mus musculus
  siRNA target sequence for Prkwnk4 (NM_175638.1,1735-1753).
cgccatgccagctactcat

SEQ ID NO: 512559 - DNA, 19 bp, Mus musculus
  siRNA target sequence for Prkwnk4 (NM_175638.1,1738-1756).
catgccagctactcatcaa

SEQ ID NO: 512560 - DNA, 19 bp, Mus musculus
  siRNA target sequence for Prkwnk4 (NM_175638.1,1743-1761).
cagctactcatcaactaca

SEQ ID NO: 512561 - DNA, 19 bp, Mus musculus
  siRNA target sequence for Prkwnk4 (NM_175638.1,1749-1767).
ctcatcaactacatctgat

SEQ ID NO: 512562 - DNA, 19 bp, Mus musculus
  siRNA target sequence for Prkwnk4 (NM_175638.1,1883-1901).
cgggttttgccttgtctat

SEQ ID NO: 512563 - DNA, 19 bp, Mus musculus
  siRNA target sequence for Prkwnk4 (NM_175638.1,1958-1976).
cggcatcaggccttagtga

SEQ ID NO: 512564 - DNA, 19 bp, Mus musculus
  siRNA target sequence for Prkwnk4 (NM_175638.1,2118-2136).
ggtgacgttccgatttgat

SEQ ID NO: 512565 - DNA, 19 bp, Mus musculus
  siRNA target sequence for Prkwnk4 (NM_175638.1,2165-2183).
cagctgccatggtatacaa

SEQ ID NO: 512566 - DNA, 19 bp, Mus musculus
  siRNA target sequence for Prkwnk4 (NM_175638.1,2198-2216).
cctcggagcgagatggatt

SEQ ID NO: 512567 - DNA, 19 bp, Mus musculus
  siRNA target sequence for Prkwnk4 (NM_175638.1,2222-2240).
gccggatccgggagattat

SEQ ID NO: 512568 - DNA, 19 bp, Mus musculus
  siRNA target sequence for Prkwnk4 (NM_175638.1,2225-2243).
ggatccgggagattatcca

SEQ ID NO: 512569 - DNA, 19 bp, Mus musculus
  siRNA target sequence for Prkwnk4 (NM_175638.1,2646-2664).
cccattctctcctagttat

SEQ ID NO: 512570 - DNA, 19 bp, Mus musculus
  siRNA target sequence for Prkwnk4 (NM_175638.1,2806-2824).
ccatcccctggacttcttt

SEQ ID NO: 512571 - DNA, 19 bp, Mus musculus
  siRNA target sequence for Prkwnk4 (NM_175638.1,2972-2990).
gactggcacctatatctga

SEQ ID NO: 512572 - DNA, 19 bp, Mus musculus
  siRNA target sequence for Prkwnk4 (NM_175638.1,3006-3024).
gcttgttggccgtttccaa

SEQ ID NO: 512573 - DNA, 19 bp, Mus musculus
  siRNA target sequence for Prkwnk4 (NM_175638.1,3016-3034).
cgtttccaagtgacttcat

SEQ ID NO: 512574 - DNA, 19 bp, Mus musculus
  siRNA target sequence for Prkwnk4 (NM_175638.1,3209-3227).
gggttgcggtcgatgatga

SEQ ID NO: 512575 - DNA, 19 bp, Mus musculus
  siRNA target sequence for Prkwnk4 (NM_175638.1,3210-3228).
ggttgcggtcgatgatgaa

SEQ ID NO: 512576 - DNA, 19 bp, Mus musculus
  siRNA target sequence for Prkwnk4 (NM_175638.1,3211-3229).
gttgcggtcgatgatgaaa

SEQ ID NO: 512577 - DNA, 19 bp, Mus musculus
  siRNA target sequence for Prkwnk4 (NM_175638.1,3350-3368).
gcggggaagacgaggaatt

SEQ ID NO: 512578 - DNA, 19 bp, Mus musculus
  siRNA target sequence for Prkwnk4 (NM_175638.1,3442-3460).
gaaatcgaggacttataca

SEQ ID NO: 512579 - DNA, 19 bp, Mus musculus
  siRNA target sequence for Prkwnk4 (NM_175638.1,3477-3495).
gcccccacctggtattgta

SEQ ID NO: 512580 - DNA, 19 bp, Mus musculus
  siRNA target sequence for Prkx (NM_016979.1,374-392).
gggcactcgttacaagatt

SEQ ID NO: 512581 - DNA, 19 bp, Mus musculus
  siRNA target sequence for Prkx (NM_016979.1,420-438).
ggacctttggccgtgtaaa

SEQ ID NO: 512582 - DNA, 19 bp, Mus musculus
  siRNA target sequence for Prkx (NM_016979.1,423-441).
cctttggccgtgtaaacct

SEQ ID NO: 512583 - DNA, 19 bp, Mus musculus
  siRNA target sequence for Prkx (NM_016979.1,464-482).
caatactgtgccttgaaga

SEQ ID NO: 512584 - DNA, 19 bp, Mus musculus
  siRNA target sequence for Prkx (NM_016979.1,542-560).
gcagtcctgaaggaaataa

SEQ ID NO: 512585 - DNA, 19 bp, Mus musculus
  siRNA target sequence for Prkx (NM_016979.1,543-561).
cagtcctgaaggaaataaa

SEQ ID NO: 512586 - DNA, 19 bp, Mus musculus
  siRNA target sequence for Prkx (NM_016979.1,596-614).
catgacaaccgcttcctat

SEQ ID NO: 512587 - DNA, 19 bp, Mus musculus
  siRNA target sequence for Prkx (NM_016979.1,599-617).
gacaaccgcttcctataca

SEQ ID NO: 512588 - DNA, 19 bp, Mus musculus
  siRNA target sequence for Prkx (NM_016979.1,605-623).
cgcttcctatacatgttga

SEQ ID NO: 512589 - DNA, 19 bp, Mus musculus
  siRNA target sequence for Prkx (NM_016979.1,652-670).
cacctacctgcgtaatcgt

SEQ ID NO: 512590 - DNA, 19 bp, Mus musculus
  siRNA target sequence for Prkx (NM_016979.1,697-715).
cttctacgccacagagatt

SEQ ID NO: 512591 - DNA, 19 bp, Mus musculus
  siRNA target sequence for Prkx (NM_016979.1,737-755).
cactcaaaggaaatcgtat

SEQ ID NO: 512592 - DNA, 19 bp, Mus musculus
  siRNA target sequence for Prkx (NM_016979.1,792-810).
gggaaggacatattaaact

SEQ ID NO: 512593 - DNA, 19 bp, Mus musculus
  siRNA target sequence for Prkx (NM_016979.1,817-835).
cttcggcttcgccaagaaa

SEQ ID NO: 512594 - DNA, 19 bp, Mus musculus
  siRNA target sequence for Prkx (NM_016979.1,931-949).
ggcactgggcattcttata

SEQ ID NO: 512595 - DNA, 19 bp, Mus musculus
  siRNA target sequence for Prkx (NM_016979.1,932-950).
gcactgggcattcttatat

SEQ ID NO: 512596 - DNA, 19 bp, Mus musculus
  siRNA target sequence for Prkx (NM_016979.1,933-951).
cactgggcattcttatatt

SEQ ID NO: 512597 - DNA, 19 bp, Mus musculus
  siRNA target sequence for Prkx (NM_016979.1,972-990).
ccccatttttcgatgacaa

SEQ ID NO: 512598 - DNA, 19 bp, Mus musculus
  siRNA target sequence for Prkx (NM_016979.1,1056-1074).
cctctaaggacctcatcaa

SEQ ID NO: 512599 - DNA, 19 bp, Mus musculus
  siRNA target sequence for Prkx (NM_016979.1,1100-1118).
cgacgcctaggcaacatga

SEQ ID NO: 512600 - DNA, 19 bp, Mus musculus
  siRNA target sequence for Prkx (NM_016979.1,1103-1121).
cgcctaggcaacatgaaga

SEQ ID NO: 512601 - DNA, 19 bp, Mus musculus
  siRNA target sequence for Prkx (NM_016979.1,1105-1123).
cctaggcaacatgaagaat

SEQ ID NO: 512602 - DNA, 19 bp, Mus musculus
  siRNA target sequence for Prkx (NM_016979.1,1161-1179).
gtgtggagtgggaatctgt

SEQ ID NO: 512603 - DNA, 19 bp, Mus musculus
  siRNA target sequence for Prkx (NM_016979.1,1202-1220).
cccattgtgcccaagttat

SEQ ID NO: 512604 - DNA, 19 bp, Mus musculus
  siRNA target sequence for Prkx (NM_016979.1,1237-1255).
ctccaactttgagacttat

SEQ ID NO: 512605 - DNA, 19 bp, Mus musculus
  siRNA target sequence for Prkx (NM_016979.1,1240-1258).
caactttgagacttatcca

SEQ ID NO: 512606 - DNA, 19 bp, Mus musculus
  siRNA target sequence for Prkx (NM_016979.1,1270-1288).
ggacaagacaccttctgta

SEQ ID NO: 512607 - DNA, 19 bp, Mus musculus
  siRNA target sequence for Prkx (NM_016979.1,1271-1289).
gacaagacaccttctgtat

SEQ ID NO: 512608 - DNA, 19 bp, Mus musculus
  siRNA target sequence for Prkx (NM_016979.1,1273-1291).
caagacaccttctgtatct

SEQ ID NO: 512609 - DNA, 19 bp, Mus musculus
  siRNA target sequence for Prpf4b (NM_013830.1,279-297).
cacagtcgtcacaaaaaaa

SEQ ID NO: 512610 - DNA, 19 bp, Mus musculus
  siRNA target sequence for Prpf4b (NM_013830.1,413-431).
cgaggcttccgacaaagaa

SEQ ID NO: 512611 - DNA, 19 bp, Mus musculus
  siRNA target sequence for Prpf4b (NM_013830.1,497-515).
gagagccttgattaaagct

SEQ ID NO: 512612 - DNA, 19 bp, Mus musculus
  siRNA target sequence for Prpf4b (NM_013830.1,556-574).
gaatggggctcattttgca

SEQ ID NO: 512613 - DNA, 19 bp, Mus musculus
  siRNA target sequence for Prpf4b (NM_013830.1,655-673).
ccagtactcggggaaaact

SEQ ID NO: 512614 - DNA, 19 bp, Mus musculus
  siRNA target sequence for Prpf4b (NM_013830.1,663-681).
cggggaaaacttgaaatta

SEQ ID NO: 512615 - DNA, 19 bp, Mus musculus
  siRNA target sequence for Prpf4b (NM_013830.1,675-693).
gaaattacggacaacaaaa

SEQ ID NO: 512616 - DNA, 19 bp, Mus musculus
  siRNA target sequence for Prpf4b (NM_013830.1,697-715).
gtgcaaagaaacgaagtaa

SEQ ID NO: 512617 - DNA, 19 bp, Mus musculus
  siRNA target sequence for Prpf4b (NM_013830.1,861-879).
gaccaagctagaaagtcaa

SEQ ID NO: 512618 - DNA, 19 bp, Mus musculus
  siRNA target sequence for Prpf4b (NM_013830.1,898-916).
ggcggtcccaagagaaagt

SEQ ID NO: 512619 - DNA, 19 bp, Mus musculus
  siRNA target sequence for Prpf4b (NM_013830.1,983-1001).
gaaaaaatcaccaattgta

SEQ ID NO: 512620 - DNA, 19 bp, Mus musculus
  siRNA target sequence for Prpf4b (NM_013830.1,1005-1023).
gaaaggagtcgagatagat

SEQ ID NO: 512621 - DNA, 19 bp, Mus musculus
  siRNA target sequence for Prpf4b (NM_013830.1,1009-1027).
ggagtcgagatagatctaa

SEQ ID NO: 512622 - DNA, 19 bp, Mus musculus
  siRNA target sequence for Prpf4b (NM_013830.1,1010-1028).
gagtcgagatagatctaaa

SEQ ID NO: 512623 - DNA, 19 bp, Mus musculus
  siRNA target sequence for Prpf4b (NM_013830.1,1034-1052).
caagtccccagttgactta

SEQ ID NO: 512624 - DNA, 19 bp, Mus musculus
  siRNA target sequence for Prpf4b (NM_013830.1,1037-1055).
gtccccagttgacttaaga

SEQ ID NO: 512625 - DNA, 19 bp, Mus musculus
  siRNA target sequence for Prpf4b (NM_013830.1,1089-1107).
gagcggaagtcaaaacgat

SEQ ID NO: 512626 - DNA, 19 bp, Mus musculus
  siRNA target sequence for Prpf4b (NM_013830.1,1097-1115).
gtcaaaacgatctgaaatt

SEQ ID NO: 512627 - DNA, 19 bp, Mus musculus
  siRNA target sequence for Prpf4b (NM_013830.1,1099-1117).
caaaacgatctgaaattga

SEQ ID NO: 512628 - DNA, 19 bp, Mus musculus
  siRNA target sequence for Prpf4b (NM_013830.1,1194-1212).
cctggccgtagtcctaaaa

SEQ ID NO: 512629 - DNA, 19 bp, Mus musculus
  siRNA target sequence for Prpf4b (NM_013830.1,1255-1273).
gtaggtctccgcttctcaa

SEQ ID NO: 512630 - DNA, 19 bp, Mus musculus
  siRNA target sequence for Prpf4b (NM_013830.1,1258-1276).
ggtctccgcttctcaatga

SEQ ID NO: 512631 - DNA, 19 bp, Mus musculus
  siRNA target sequence for Prpf4b (NM_013830.1,1269-1287).
ctcaatgacagaagatcta

SEQ ID NO: 512632 - DNA, 19 bp, Mus musculus
  siRNA target sequence for Prpf4b (NM_013830.1,1331-1349).
ggccaagagccgatcctta

SEQ ID NO: 512633 - DNA, 19 bp, Mus musculus
  siRNA target sequence for Prpf4b (NM_013830.1,1334-1352).
caagagccgatccttagaa

SEQ ID NO: 512634 - DNA, 19 bp, Mus musculus
  siRNA target sequence for Prpf4b (NM_013830.1,1340-1358).
ccgatccttagaaagaaaa

SEQ ID NO: 512635 - DNA, 19 bp, Mus musculus
  siRNA target sequence for Prpf4b (NM_013830.1,1402-1420).
gacctcgagatgatatcct

SEQ ID NO: 512636 - DNA, 19 bp, Mus musculus
  siRNA target sequence for Prpf4b (NM_013830.1,1426-1444).
gatgtgaacggtcaaaaga

SEQ ID NO: 512637 - DNA, 19 bp, Mus musculus
  siRNA target sequence for Prpf4b (NM_013830.1,1466-1484).
gtctccaacccgaagaaga

SEQ ID NO: 512638 - DNA, 19 bp, Mus musculus
  siRNA target sequence for Prpf4b (NM_013830.1,1556-1574).
gtctcctcggagaagagat

SEQ ID NO: 512639 - DNA, 19 bp, Mus musculus
  siRNA target sequence for Prpf4b (NM_013830.1,1684-1702).
cagaaggaatgaaagttga

SEQ ID NO: 512640 - DNA, 19 bp, Mus musculus
  siRNA target sequence for Prpf4b (NM_013830.1,1703-1721).
gcaagagtcttcatctgat

SEQ ID NO: 512641 - DNA, 19 bp, Mus musculus
  siRNA target sequence for Prpf4b (NM_013830.1,1767-1785).
ctaatagaacagagaagaa

SEQ ID NO: 512642 - DNA, 19 bp, Mus musculus
  siRNA target sequence for Prpf4b (NM_013830.1,1797-1815).
gcaattgtgcagaaatata

SEQ ID NO: 512643 - DNA, 19 bp, Mus musculus
  siRNA target sequence for Prpf4b (NM_013830.1,1821-1839).
cttgctgaagatagcaata

SEQ ID NO: 512644 - DNA, 19 bp, Mus musculus
  siRNA target sequence for Prpf4b (NM_013830.1,1824-1842).
gctgaagatagcaatatat

SEQ ID NO: 512645 - DNA, 19 bp, Mus musculus
  siRNA target sequence for Prpf4b (NM_013830.1,1894-1912).
cttcgccagacgacatctt

SEQ ID NO: 512646 - DNA, 19 bp, Mus musculus
  siRNA target sequence for Prpf4b (NM_013830.1,1983-2001).
gccaagcataatctaatga

SEQ ID NO: 512647 - DNA, 19 bp, Mus musculus
  siRNA target sequence for Prpf4b (NM_013830.1,2000-2018).
gacagttgaacagaataat

SEQ ID NO: 512648 - DNA, 19 bp, Mus musculus
  siRNA target sequence for Prpf4b (NM_013830.1,2042-2060).
ggcacctgacatgtttaca

SEQ ID NO: 512649 - DNA, 19 bp, Mus musculus
  siRNA target sequence for Prpf4b (NM_013830.1,2113-2131).
ctggcattgggaaagattt

SEQ ID NO: 512650 - DNA, 19 bp, Mus musculus
  siRNA target sequence for Prpf4b (NM_013830.1,2176-2194).
gctattaccgtgtgaacat

SEQ ID NO: 512651 - DNA, 19 bp, Mus musculus
  siRNA target sequence for Prpf4b (NM_013830.1,2198-2216).
ggaagtcctagataaacgt

SEQ ID NO: 512652 - DNA, 19 bp, Mus musculus
  siRNA target sequence for Prpf4b (NM_013830.1,2199-2217).
gaagtcctagataaacgtt

SEQ ID NO: 512653 - DNA, 19 bp, Mus musculus
  siRNA target sequence for Prpf4b (NM_013830.1,2202-2220).
gtcctagataaacgttata

SEQ ID NO: 512654 - DNA, 19 bp, Mus musculus
  siRNA target sequence for Prpf4b (NM_013830.1,2204-2222).
cctagataaacgttataat

SEQ ID NO: 512655 - DNA, 19 bp, Mus musculus
  siRNA target sequence for Prpf4b (NM_013830.1,2208-2226).
gataaacgttataatgtgt

SEQ ID NO: 512656 - DNA, 19 bp, Mus musculus
  siRNA target sequence for Prpf4b (NM_013830.1,2243-2261).
gggtgtgttcagcaatgtt

SEQ ID NO: 512657 - DNA, 19 bp, Mus musculus
  siRNA target sequence for Prpf4b (NM_013830.1,2333-2351).
gcaaaagactggtttaaaa

SEQ ID NO: 512658 - DNA, 19 bp, Mus musculus
  siRNA target sequence for Prpf4b (NM_013830.1,2388-2406).
cctgatgacaagttccatt

SEQ ID NO: 512659 - DNA, 19 bp, Mus musculus
  siRNA target sequence for Prpf4b (NM_013830.1,2411-2429).
gcgcctcttcagacacttt

SEQ ID NO: 512660 - DNA, 19 bp, Mus musculus
  siRNA target sequence for Prpf4b (NM_013830.1,2474-2492).
gaatttgcgagaggtatta

SEQ ID NO: 512661 - DNA, 19 bp, Mus musculus
  siRNA target sequence for Prpf4b (NM_013830.1,2480-2498).
gcgagaggtattaaaaaaa

SEQ ID NO: 512662 - DNA, 19 bp, Mus musculus
  siRNA target sequence for Prpf4b (NM_013830.1,2507-2525).
ggatgtcggtctccatatt

SEQ ID NO: 512663 - DNA, 19 bp, Mus musculus
  siRNA target sequence for Prpf4b (NM_013830.1,2552-2570).
gttgttcctggcattgaaa

SEQ ID NO: 512664 - DNA, 19 bp, Mus musculus
  siRNA target sequence for Prpf4b (NM_013830.1,2561-2579).
ggcattgaaactccttaaa

SEQ ID NO: 512665 - DNA, 19 bp, Mus musculus
  siRNA target sequence for Prpf4b (NM_013830.1,2591-2609).
cttacatgcagatatcaaa

SEQ ID NO: 512666 - DNA, 19 bp, Mus musculus
  siRNA target sequence for Prpf4b (NM_013830.1,2611-2629).
cggataatattctggttaa

SEQ ID NO: 512667 - DNA, 19 bp, Mus musculus
  siRNA target sequence for Prpf4b (NM_013830.1,2671-2689).
cctcacatgttgcagataa

SEQ ID NO: 512668 - DNA, 19 bp, Mus musculus
  siRNA target sequence for Prpf4b (NM_013830.1,2724-2742).
cgtgctccggagatcatta

SEQ ID NO: 512669 - DNA, 19 bp, Mus musculus
  siRNA target sequence for Prpf4b (NM_013830.1,2725-2743).
gtgctccggagatcattat

SEQ ID NO: 512670 - DNA, 19 bp, Mus musculus
  siRNA target sequence for Prpf4b (NM_013830.1,2730-2748).
ccggagatcattataggta

SEQ ID NO: 512671 - DNA, 19 bp, Mus musculus
  siRNA target sequence for Prpf4b (NM_013830.1,2731-2749).
cggagatcattataggtaa

SEQ ID NO: 512672 - DNA, 19 bp, Mus musculus
  siRNA target sequence for Prpf4b (NM_013830.1,2732-2750).
ggagatcattataggtaaa

SEQ ID NO: 512673 - DNA, 19 bp, Mus musculus
  siRNA target sequence for Prpf4b (NM_013830.1,2753-2771).
ctatgactacggtatcgat

SEQ ID NO: 512674 - DNA, 19 bp, Mus musculus
  siRNA target sequence for Prpf4b (NM_013830.1,2757-2775).
gactacggtatcgatatgt

SEQ ID NO: 512675 - DNA, 19 bp, Mus musculus
  siRNA target sequence for Prpf4b (NM_013830.1,2777-2795).
gtctgtaggttgtacctta

SEQ ID NO: 512676 - DNA, 19 bp, Mus musculus
  siRNA target sequence for Prpf4b (NM_013830.1,2779-2797).
ctgtaggttgtaccttata

SEQ ID NO: 512677 - DNA, 19 bp, Mus musculus
  siRNA target sequence for Prpf4b (NM_013830.1,2785-2803).
gttgtaccttatatgaact

SEQ ID NO: 512678 - DNA, 19 bp, Mus musculus
  siRNA target sequence for Prpf4b (NM_013830.1,2788-2806).
gtaccttatatgaactcta

SEQ ID NO: 512679 - DNA, 19 bp, Mus musculus
  siRNA target sequence for Prpf4b (NM_013830.1,2804-2822).
ctacactggaaaaatctta

SEQ ID NO: 512680 - DNA, 19 bp, Mus musculus
  siRNA target sequence for Prpf4b (NM_013830.1,2819-2837).
cttattccctggcaaaact

SEQ ID NO: 512681 - DNA, 19 bp, Mus musculus
  siRNA target sequence for Prpf4b (NM_013830.1,2829-2847).
ggcaaaactaataaccata

SEQ ID NO: 512682 - DNA, 19 bp, Mus musculus
  siRNA target sequence for Prpf4b (NM_013830.1,2830-2848).
gcaaaactaataaccatat

SEQ ID NO: 512683 - DNA, 19 bp, Mus musculus
  siRNA target sequence for Prpf4b (NM_013830.1,2836-2854).
ctaataaccatatgttgaa

SEQ ID NO: 512684 - DNA, 19 bp, Mus musculus
  siRNA target sequence for Prpf4b (NM_013830.1,2855-2873).
gctcgccatggaccttaaa

SEQ ID NO: 512685 - DNA, 19 bp, Mus musculus
  siRNA target sequence for Prpf4b (NM_013830.1,2858-2876).
cgccatggaccttaaagga

SEQ ID NO: 512686 - DNA, 19 bp, Mus musculus
  siRNA target sequence for Prpf4b (NM_013830.1,2897-2915).
ccggaaaggtgtattcaaa

SEQ ID NO: 512687 - DNA, 19 bp, Mus musculus
  siRNA target sequence for Prpf4b (NM_013830.1,2922-2940).
cattttgaccaaaatctga

SEQ ID NO: 512688 - DNA, 19 bp, Mus musculus
  siRNA target sequence for Prpf4b (NM_013830.1,2993-3011).
catgagcaccattaatcca

SEQ ID NO: 512689 - DNA, 19 bp, Mus musculus
  siRNA target sequence for Prpf4b (NM_013830.1,2998-3016).
gcaccattaatccaactaa

SEQ ID NO: 512690 - DNA, 19 bp, Mus musculus
  siRNA target sequence for Prpf4b (NM_013830.1,3055-3073).
ctgaagatcaacgtaaaaa

SEQ ID NO: 512691 - DNA, 19 bp, Mus musculus
  siRNA target sequence for Prpf4b (NM_013830.1,3117-3135).
gacccagctaagcgaatta

SEQ ID NO: 512692 - DNA, 19 bp, Mus musculus
  siRNA target sequence for Prpf4b (NM_013830.1,3120-3138).
ccagctaagcgaattagca

SEQ ID NO: 512693 - DNA, 19 bp, Mus musculus
  siRNA target sequence for Psmc2 (NM_011188.1,350-368).
cgggaaaggtgctgtgtaa

SEQ ID NO: 512694 - DNA, 19 bp, Mus musculus
  siRNA target sequence for Psmc2 (NM_011188.1,353-371).
gaaaggtgctgtgtaatca

SEQ ID NO: 512695 - DNA, 19 bp, Mus musculus
  siRNA target sequence for Psmc2 (NM_011188.1,384-402).
ggcacttgcggcttctaaa

SEQ ID NO: 512696 - DNA, 19 bp, Mus musculus
  siRNA target sequence for Psmc2 (NM_011188.1,385-403).
gcacttgcggcttctaaaa

SEQ ID NO: 512697 - DNA, 19 bp, Mus musculus
  siRNA target sequence for Psmc2 (NM_011188.1,386-404).
cacttgcggcttctaaaat

SEQ ID NO: 512698 - DNA, 19 bp, Mus musculus
  siRNA target sequence for Psmc2 (NM_011188.1,398-416).
ctaaaatgccggattacct

SEQ ID NO: 512699 - DNA, 19 bp, Mus musculus
  siRNA target sequence for Psmc2 (NM_011188.1,421-439).
gcggaccagcggaaaacca

SEQ ID NO: 512700 - DNA, 19 bp, Mus musculus
  siRNA target sequence for Psmc2 (NM_011188.1,506-524).
cttacggccaaagtactta

SEQ ID NO: 512701 - DNA, 19 bp, Mus musculus
  siRNA target sequence for Psmc2 (NM_011188.1,510-528).
cggccaaagtacttattca

SEQ ID NO: 512702 - DNA, 19 bp, Mus musculus
  siRNA target sequence for Psmc2 (NM_011188.1,692-710).
gatgtacgaagataatcaa

SEQ ID NO: 512703 - DNA, 19 bp, Mus musculus
  siRNA target sequence for Psmc2 (NM_011188.1,715-733).
gattcggaggacccaaaat

SEQ ID NO: 512704 - DNA, 19 bp, Mus musculus
  siRNA target sequence for Psmc2 (NM_011188.1,719-737).
cggaggacccaaaatacat

SEQ ID NO: 512705 - DNA, 19 bp, Mus musculus
  siRNA target sequence for Psmc2 (NM_011188.1,721-739).
gaggacccaaaatacatca

SEQ ID NO: 512706 - DNA, 19 bp, Mus musculus
  siRNA target sequence for Psmc2 (NM_011188.1,724-742).
gacccaaaatacatcatca

SEQ ID NO: 512707 - DNA, 19 bp, Mus musculus
  siRNA target sequence for Psmc2 (NM_011188.1,726-744).
cccaaaatacatcatcaat

SEQ ID NO: 512708 - DNA, 19 bp, Mus musculus
  siRNA target sequence for Psmc2 (NM_011188.1,820-838).
gtcggtgtggacagaaata

SEQ ID NO: 512709 - DNA, 19 bp, Mus musculus
  siRNA target sequence for Psmc2 (NM_011188.1,891-909).
gatgcaggtggaggaaaaa

SEQ ID NO: 512710 - DNA, 19 bp, Mus musculus
  siRNA target sequence for Psmc2 (NM_011188.1,915-933).
cgtcacatacagtgatgtt

SEQ ID NO: 512711 - DNA, 19 bp, Mus musculus
  siRNA target sequence for Psmc2 (NM_011188.1,941-959).
gtaaggaacagattgagaa

SEQ ID NO: 512712 - DNA, 19 bp, Mus musculus
  siRNA target sequence for Psmc2 (NM_011188.1,1001-1019).
ggtttgttaaccttggaat

SEQ ID NO: 512713 - DNA, 19 bp, Mus musculus
  siRNA target sequence for Psmc2 (NM_011188.1,1106-1124).
cttgcttcattcgagttat

SEQ ID NO: 512714 - DNA, 19 bp, Mus musculus
  siRNA target sequence for Psmc2 (NM_011188.1,1128-1146).
gtctgagctcgtacagaaa

SEQ ID NO: 512715 - DNA, 19 bp, Mus musculus
  siRNA target sequence for Psmc2 (NM_011188.1,1130-1148).
ctgagctcgtacagaaata

SEQ ID NO: 512716 - DNA, 19 bp, Mus musculus
  siRNA target sequence for Psmc2 (NM_011188.1,1155-1173).
cgagggagctcgaatggtt

SEQ ID NO: 512717 - DNA, 19 bp, Mus musculus
  siRNA target sequence for Psmc2 (NM_011188.1,1449-1467).
gggtcgaacgcacatcttt

SEQ ID NO: 512718 - DNA, 19 bp, Mus musculus
  siRNA target sequence for Psmc2 (NM_011188.1,1450-1468).
ggtcgaacgcacatcttta

SEQ ID NO: 512719 - DNA, 19 bp, Mus musculus
  siRNA target sequence for Psmc2 (NM_011188.1,1451-1469).
gtcgaacgcacatctttaa

SEQ ID NO: 512720 - DNA, 19 bp, Mus musculus
  siRNA target sequence for Psmc2 (NM_011188.1,1453-1471).
cgaacgcacatctttaaga

SEQ ID NO: 512721 - DNA, 19 bp, Mus musculus
  siRNA target sequence for Psmc2 (NM_011188.1,1454-1472).
gaacgcacatctttaagat

SEQ ID NO: 512722 - DNA, 19 bp, Mus musculus
  siRNA target sequence for Psmc2 (NM_011188.1,1525-1543).
cgcctgtgtccaaacagta

SEQ ID NO: 512723 - DNA, 19 bp, Mus musculus
  siRNA target sequence for Psmc2 (NM_011188.1,1569-1587).
cacagaagctggtatgttt

SEQ ID NO: 512724 - DNA, 19 bp, Mus musculus
  siRNA target sequence for Psmc2 (NM_011188.1,1593-1611).
ccgagcacggagaaaaatt

SEQ ID NO: 512725 - DNA, 19 bp, Mus musculus
  siRNA target sequence for Psmc2 (NM_011188.1,1597-1615).
gcacggagaaaaattgcta

SEQ ID NO: 512726 - DNA, 19 bp, Mus musculus
  siRNA target sequence for Psmc2 (NM_011188.1,1675-1693).
gctactccccgctacatga

SEQ ID NO: 512727 - DNA, 19 bp, Mus musculus
  siRNA target sequence for Psmc2 (NM_011188.1,1679-1697).
ctccccgctacatgacata

SEQ ID NO: 512728 - DNA, 19 bp, Mus musculus
  siRNA target sequence for Psmc2 (NM_011188.1,1682-1700).
cccgctacatgacatacaa

SEQ ID NO: 512729 - DNA, 19 bp, Mus musculus
  siRNA target sequence for Psmc2 (NM_011188.1,1683-1701).
ccgctacatgacatacaat

SEQ ID NO: 512730 - DNA, 19 bp, Mus musculus
  siRNA target sequence for Psmc2 (NM_011188.1,1684-1702).
cgctacatgacatacaatt

SEQ ID NO: 512731 - DNA, 19 bp, Mus musculus
  siRNA target sequence for Psmc3 (NM_008948.1,290-308).
gatgtccacggaagagatt

SEQ ID NO: 512732 - DNA, 19 bp, Mus musculus
  siRNA target sequence for Psmc3 (NM_008948.1,330-348).
gacagcgagatcaagatca

SEQ ID NO: 512733 - DNA, 19 bp, Mus musculus
  siRNA target sequence for Psmc3 (NM_008948.1,334-352).
gcgagatcaagatcatgaa

SEQ ID NO: 512734 - DNA, 19 bp, Mus musculus
  siRNA target sequence for Psmc3 (NM_008948.1,542-560).
caagtgtgcggtgatcaaa

SEQ ID NO: 512735 - DNA, 19 bp, Mus musculus
  siRNA target sequence for Psmc3 (NM_008948.1,545-563).
gtgtgcggtgatcaaaact

SEQ ID NO: 512736 - DNA, 19 bp, Mus musculus
  siRNA target sequence for Psmc3 (NM_008948.1,549-567).
gcggtgatcaaaacttcta

SEQ ID NO: 512737 - DNA, 19 bp, Mus musculus
  siRNA target sequence for Psmc3 (NM_008948.1,562-580).
cttctacccgacagacata

SEQ ID NO: 512738 - DNA, 19 bp, Mus musculus
  siRNA target sequence for Psmc3 (NM_008948.1,565-583).
ctacccgacagacatactt

SEQ ID NO: 512739 - DNA, 19 bp, Mus musculus
  siRNA target sequence for Psmc3 (NM_008948.1,725-743).
gcccacggagcaatacagt

SEQ ID NO: 512740 - DNA, 19 bp, Mus musculus
  siRNA target sequence for Psmc3 (NM_008948.1,844-862).
caaaaggagtgctgatgta

SEQ ID NO: 512741 - DNA, 19 bp, Mus musculus
  siRNA target sequence for Psmc3 (NM_008948.1,943-961).
gccctcagctggtacagat

SEQ ID NO: 512742 - DNA, 19 bp, Mus musculus
  siRNA target sequence for Psmc3 (NM_008948.1,983-1001).
gctggtccgtgatgctttt

SEQ ID NO: 512743 - DNA, 19 bp, Mus musculus
  siRNA target sequence for Psmc3 (NM_008948.1,1154-1172).
cactcaagtgaaggtaatt

SEQ ID NO: 512744 - DNA, 19 bp, Mus musculus
  siRNA target sequence for Psmc3 (NM_008948.1,1225-1243).
gcctagaccgcaagattga

SEQ ID NO: 512745 - DNA, 19 bp, Mus musculus
  siRNA target sequence for Psmc3 (NM_008948.1,1289-1307).
ccactcacggaagatgaat

SEQ ID NO: 512746 - DNA, 19 bp, Mus musculus
  siRNA target sequence for Psmc3 (NM_008948.1,1312-1330).
gtcctgatgtgaactatga

SEQ ID NO: 512747 - DNA, 19 bp, Mus musculus
  siRNA target sequence for Psmc3 (NM_008948.1,1339-1357).
ctcggtgcactgatgactt

SEQ ID NO: 512748 - DNA, 19 bp, Mus musculus
  siRNA target sequence for Psmc3 (NM_008948.1,1343-1361).
gtgcactgatgacttcaat

SEQ ID NO: 512749 - DNA, 19 bp, Mus musculus
  siRNA target sequence for Psmc3 (NM_008948.1,1384-1402).
gtgtggaggcgggtatgat

SEQ ID NO: 512750 - DNA, 19 bp, Mus musculus
  siRNA target sequence for Psmc4 (NM_011874.1,621-639).
cccgaggtgtcctcatgta

SEQ ID NO: 512751 - DNA, 19 bp, Mus musculus
  siRNA target sequence for Psmc4 (NM_011874.1,622-640).
ccgaggtgtcctcatgtat

SEQ ID NO: 512752 - DNA, 19 bp, Mus musculus
  siRNA target sequence for Psmc4 (NM_011874.1,656-674).
ggaaagacaatgttagcaa

SEQ ID NO: 512753 - DNA, 19 bp, Mus musculus
  siRNA target sequence for Psmc4 (NM_011874.1,689-707).
cacacgacagctgcattta

SEQ ID NO: 512754 - DNA, 19 bp, Mus musculus
  siRNA target sequence for Psmc4 (NM_011874.1,923-941).
gaccagaacgtcaatgtga

SEQ ID NO: 512755 - DNA, 19 bp, Mus musculus
  siRNA target sequence for Psmc4 (NM_011874.1,932-950).
gtcaatgtgaaggtaatca

SEQ ID NO: 512756 - DNA, 19 bp, Mus musculus
  siRNA target sequence for Psmc4 (NM_011874.1,998-1016).
ggacgcctggaccgaaaaa

SEQ ID NO: 512757 - DNA, 19 bp, Mus musculus
  siRNA target sequence for Psmc4 (NM_011874.1,999-1017).
gacgcctggaccgaaaaat

SEQ ID NO: 512758 - DNA, 19 bp, Mus musculus
  siRNA target sequence for Psmc4 (NM_011874.1,1040-1058).
cgccagaagaggttgattt

SEQ ID NO: 512759 - DNA, 19 bp, Mus musculus
  siRNA target sequence for Psmc4 (NM_011874.1,1043-1061).
cagaagaggttgattttct

SEQ ID NO: 512760 - DNA, 19 bp, Mus musculus
  siRNA target sequence for Psmc4 (NM_011874.1,1065-1083).
ccatcaccagcaaaatgaa

SEQ ID NO: 512761 - DNA, 19 bp, Mus musculus
  siRNA target sequence for Psmc4 (NM_011874.1,1115-1133).
gtggcccgtccagataaga

SEQ ID NO: 512762 - DNA, 19 bp, Mus musculus
  siRNA target sequence for Psmc4 (NM_011874.1,1117-1135).
ggcccgtccagataagatt

SEQ ID NO: 512763 - DNA, 19 bp, Mus musculus
  siRNA target sequence for Psmc4 (NM_011874.1,1118-1136).
gcccgtccagataagattt

SEQ ID NO: 512764 - DNA, 19 bp, Mus musculus
  siRNA target sequence for Psmc4 (NM_011874.1,1120-1138).
ccgtccagataagatttca

SEQ ID NO: 512765 - DNA, 19 bp, Mus musculus
  siRNA target sequence for Psmc4 (NM_011874.1,1161-1179).
gtcaggcgcgtggaatgtt

SEQ ID NO: 512766 - DNA, 19 bp, Mus musculus
  siRNA target sequence for Psmc4 (NM_011874.1,1186-1204).
ccgtgagaccgcttacatt

SEQ ID NO: 512767 - DNA, 19 bp, Mus musculus
  siRNA target sequence for Psmc4 (NM_011874.1,1188-1206).
gtgagaccgcttacattgt

SEQ ID NO: 512768 - DNA, 19 bp, Mus musculus
  siRNA target sequence for Psmc4 (NM_011874.1,1230-1248).
catacaagaccgtgatcaa

SEQ ID NO: 512769 - DNA, 19 bp, Mus musculus
  siRNA target sequence for Psmc4 (NM_011874.1,1256-1274).
gaacaggaacatgaatttt

SEQ ID NO: 512770 - DNA, 19 bp, Mus musculus
  siRNA target sequence for Psmc5 (NM_008950.1,56-74).
gcagtggactccgtcaata

SEQ ID NO: 512771 - DNA, 19 bp, Mus musculus
  siRNA target sequence for Psmc5 (NM_008950.1,59-77).
gtggactccgtcaatatta

SEQ ID NO: 512772 - DNA, 19 bp, Mus musculus
  siRNA target sequence for Psmc5 (NM_008950.1,62-80).
gactccgtcaatattatct

SEQ ID NO: 512773 - DNA, 19 bp, Mus musculus
  siRNA target sequence for Psmc5 (NM_008950.1,64-82).
ctccgtcaatattatctgt

SEQ ID NO: 512774 - DNA, 19 bp, Mus musculus
  siRNA target sequence for Psmc5 (NM_008950.1,232-250).
gtcgtgagggccatggata

SEQ ID NO: 512775 - DNA, 19 bp, Mus musculus
  siRNA target sequence for Psmc5 (NM_008950.1,239-257).
gggccatggataagaaaaa

SEQ ID NO: 512776 - DNA, 19 bp, Mus musculus
  siRNA target sequence for Psmc5 (NM_008950.1,240-258).
ggccatggataagaaaaaa

SEQ ID NO: 512777 - DNA, 19 bp, Mus musculus
  siRNA target sequence for Psmc5 (NM_008950.1,278-296).
ctgagggcaaatttgttgt

SEQ ID NO: 512778 - DNA, 19 bp, Mus musculus
  siRNA target sequence for Psmc5 (NM_008950.1,282-300).
gggcaaatttgttgttgat

SEQ ID NO: 512779 - DNA, 19 bp, Mus musculus
  siRNA target sequence for Psmc5 (NM_008950.1,301-319).
gtggacaagaacattgata

SEQ ID NO: 512780 - DNA, 19 bp, Mus musculus
  siRNA target sequence for Psmc5 (NM_008950.1,324-342).
cgatgtgacgcccaattgt

SEQ ID NO: 512781 - DNA, 19 bp, Mus musculus
  siRNA target sequence for Psmc5 (NM_008950.1,341-359).
gtcgggtcgctctaagaaa

SEQ ID NO: 512782 - DNA, 19 bp, Mus musculus
  siRNA target sequence for Psmc5 (NM_008950.1,346-364).
gtcgctctaagaaatgaca

SEQ ID NO: 512783 - DNA, 19 bp, Mus musculus
  siRNA target sequence for Psmc5 (NM_008950.1,369-387).
cactctgcataagatctta

SEQ ID NO: 512784 - DNA, 19 bp, Mus musculus
  siRNA target sequence for Psmc5 (NM_008950.1,373-391).
ctgcataagatcttaccta

SEQ ID NO: 512785 - DNA, 19 bp, Mus musculus
  siRNA target sequence for Psmc5 (NM_008950.1,403-421).
cctttggtgtcactaatga

SEQ ID NO: 512786 - DNA, 19 bp, Mus musculus
  siRNA target sequence for Psmc5 (NM_008950.1,441-459).
ctcaacctacgagatgatt

SEQ ID NO: 512787 - DNA, 19 bp, Mus musculus
  siRNA target sequence for Psmc5 (NM_008950.1,730-748).
gctccatccatcatcttca

SEQ ID NO: 512788 - DNA, 19 bp, Mus musculus
  siRNA target sequence for Psmc5 (NM_008950.1,876-894).
ggttatcatggctactaat

SEQ ID NO: 512789 - DNA, 19 bp, Mus musculus
  siRNA target sequence for Psmc5 (NM_008950.1,877-895).
gttatcatggctactaata

SEQ ID NO: 512790 - DNA, 19 bp, Mus musculus
  siRNA target sequence for Psmc5 (NM_008950.1,886-904).
gctactaataggattgata

SEQ ID NO: 512791 - DNA, 19 bp, Mus musculus
  siRNA target sequence for Psmc5 (NM_008950.1,925-943).
cgtcctgggaggattgaca

SEQ ID NO: 512792 - DNA, 19 bp, Mus musculus
  siRNA target sequence for Psmc5 (NM_008950.1,933-951).
gaggattgacagaaaaatt

SEQ ID NO: 512793 - DNA, 19 bp, Mus musculus
  siRNA target sequence for Psmc5 (NM_008950.1,935-953).
ggattgacagaaaaattga

SEQ ID NO: 512794 - DNA, 19 bp, Mus musculus
  siRNA target sequence for Psmc5 (NM_008950.1,1027-1045).
gggatcaacctgaggaaaa

SEQ ID NO: 512795 - DNA, 19 bp, Mus musculus
  siRNA target sequence for Psmc5 (NM_008950.1,1032-1050).
caacctgaggaaaattgct

SEQ ID NO: 512796 - DNA, 19 bp, Mus musculus
  siRNA target sequence for Psmc5 (NM_008950.1,1067-1085).
cttcaggggctgaagtgaa

SEQ ID NO: 512797 - DNA, 19 bp, Mus musculus
  siRNA target sequence for Psmc6 (NM_025959.2,106-124).
ggagctaagggaacaatta

SEQ ID NO: 512798 - DNA, 19 bp, Mus musculus
  siRNA target sequence for Psmc6 (NM_025959.2,131-149).
cttaccaagcagtatgaaa

SEQ ID NO: 512799 - DNA, 19 bp, Mus musculus
  siRNA target sequence for Psmc6 (NM_025959.2,200-218).
gaagtgctaaaacagttaa

SEQ ID NO: 512800 - DNA, 19 bp, Mus musculus
  siRNA target sequence for Psmc6 (NM_025959.2,221-239).
gaagaaaaattcatcgtta

SEQ ID NO: 512801 - DNA, 19 bp, Mus musculus
  siRNA target sequence for Psmc6 (NM_025959.2,232-250).
catcgttaaagcaacaaat

SEQ ID NO: 512802 - DNA, 19 bp, Mus musculus
  siRNA target sequence for Psmc6 (NM_025959.2,273-291).
gtcgtcgtcagcttgacaa

SEQ ID NO: 512803 - DNA, 19 bp, Mus musculus
  siRNA target sequence for Psmc6 (NM_025959.2,275-293).
cgtcgtcagcttgacaaaa

SEQ ID NO: 512804 - DNA, 19 bp, Mus musculus
  siRNA target sequence for Psmc6 (NM_025959.2,278-296).
cgtcagcttgacaaaagta

SEQ ID NO: 512805 - DNA, 19 bp, Mus musculus
  siRNA target sequence for Psmc6 (NM_025959.2,360-378).
caagagaggtggatccatt

SEQ ID NO: 512806 - DNA, 19 bp, Mus musculus
  siRNA target sequence for Psmc6 (NM_025959.2,367-385).
ggtggatccattggtttat

SEQ ID NO: 512807 - DNA, 19 bp, Mus musculus
  siRNA target sequence for Psmc6 (NM_025959.2,368-386).
gtggatccattggtttata

SEQ ID NO: 512808 - DNA, 19 bp, Mus musculus
  siRNA target sequence for Psmc6 (NM_025959.2,371-389).
gatccattggtttataaca

SEQ ID NO: 512809 - DNA, 19 bp, Mus musculus
  siRNA target sequence for Psmc6 (NM_025959.2,432-450).
gaggcctgtcagaacagat

SEQ ID NO: 512810 - DNA, 19 bp, Mus musculus
  siRNA target sequence for Psmc6 (NM_025959.2,443-461).
gaacagattcgggagttaa

SEQ ID NO: 512811 - DNA, 19 bp, Mus musculus
  siRNA target sequence for Psmc6 (NM_025959.2,453-471).
gggagttaagagaggtaat

SEQ ID NO: 512812 - DNA, 19 bp, Mus musculus
  siRNA target sequence for Psmc6 (NM_025959.2,454-472).
ggagttaagagaggtaata

SEQ ID NO: 512813 - DNA, 19 bp, Mus musculus
  siRNA target sequence for Psmc6 (NM_025959.2,480-498).
ctcttacaaatccagaatt

SEQ ID NO: 512814 - DNA, 19 bp, Mus musculus
  siRNA target sequence for Psmc6 (NM_025959.2,482-500).
cttacaaatccagaattat

SEQ ID NO: 512815 - DNA, 19 bp, Mus musculus
  siRNA target sequence for Psmc6 (NM_025959.2,502-520).
ccagcgtgtaggaataata

SEQ ID NO: 512816 - DNA, 19 bp, Mus musculus
  siRNA target sequence for Psmc6 (NM_025959.2,505-523).
gcgtgtaggaataatacct

SEQ ID NO: 512817 - DNA, 19 bp, Mus musculus
  siRNA target sequence for Psmc6 (NM_025959.2,610-628).
cctaaaggttgtatctagt

SEQ ID NO: 512818 - DNA, 19 bp, Mus musculus
  siRNA target sequence for Psmc6 (NM_025959.2,624-642).
ctagttctattgtagacaa

SEQ ID NO: 512819 - DNA, 19 bp, Mus musculus
  siRNA target sequence for Psmc6 (NM_025959.2,640-658).
caagtacattggtgaaagt

SEQ ID NO: 512820 - DNA, 19 bp, Mus musculus
  siRNA target sequence for Psmc6 (NM_025959.2,651-669).
gtgaaagtgctcgtttgat

SEQ ID NO: 512821 - DNA, 19 bp, Mus musculus
  siRNA target sequence for Psmc6 (NM_025959.2,653-671).
gaaagtgctcgtttgatta

SEQ ID NO: 512822 - DNA, 19 bp, Mus musculus
  siRNA target sequence for Psmc6 (NM_025959.2,657-675).
gtgctcgtttgattagaga

SEQ ID NO: 512823 - DNA, 19 bp, Mus musculus
  siRNA target sequence for Psmc6 (NM_025959.2,741-759).
gtggccgtcggttttctga

SEQ ID NO: 512824 - DNA, 19 bp, Mus musculus
  siRNA target sequence for Psmc6 (NM_025959.2,751-769).
gttttctgagggaacatca

SEQ ID NO: 512825 - DNA, 19 bp, Mus musculus
  siRNA target sequence for Psmc6 (NM_025959.2,892-910).
gctgcgcccaggaagatta

SEQ ID NO: 512826 - DNA, 19 bp, Mus musculus
  siRNA target sequence for Psmc6 (NM_025959.2,895-913).
gcgcccaggaagattagat

SEQ ID NO: 512827 - DNA, 19 bp, Mus musculus
  siRNA target sequence for Psmc6 (NM_025959.2,896-914).
cgcccaggaagattagata

SEQ ID NO: 512828 - DNA, 19 bp, Mus musculus
  siRNA target sequence for Psmc6 (NM_025959.2,898-916).
cccaggaagattagataga

SEQ ID NO: 512829 - DNA, 19 bp, Mus musculus
  siRNA target sequence for Psmc6 (NM_025959.2,928-946).
cgatttaccaaatgaacaa

SEQ ID NO: 512830 - DNA, 19 bp, Mus musculus
  siRNA target sequence for Psmc6 (NM_025959.2,941-959).
gaacaagcaagattagata

SEQ ID NO: 512831 - DNA, 19 bp, Mus musculus
  siRNA target sequence for Psmc6 (NM_025959.2,971-989).
cacgcaggacctattacaa

SEQ ID NO: 512832 - DNA, 19 bp, Mus musculus
  siRNA target sequence for Psmc6 (NM_025959.2,1049-1067).
gacctgagaaatgtttgta

SEQ ID NO: 512833 - DNA, 19 bp, Mus musculus
  siRNA target sequence for Psmc6 (NM_025959.2,1065-1083).
gtactgaagcaggtatgtt

SEQ ID NO: 512834 - DNA, 19 bp, Mus musculus
  siRNA target sequence for Psmc6 (NM_025959.2,1086-1104).
caattcgtgccgatcatga

SEQ ID NO: 512835 - DNA, 19 bp, Mus musculus
  siRNA target sequence for Psmc6 (NM_025959.2,1095-1113).
ccgatcatgattttgtagt

SEQ ID NO: 512836 - DNA, 19 bp, Mus musculus
  siRNA target sequence for Psmc6 (NM_025959.2,1096-1114).
cgatcatgattttgtagtt

SEQ ID NO: 512837 - DNA, 19 bp, Mus musculus
  siRNA target sequence for Ptk2 (NM_007982.1,128-146).
gacccaaacttgaatcaca

SEQ ID NO: 512838 - DNA, 19 bp, Mus musculus
  siRNA target sequence for Ptk2 (NM_007982.1,147-165).
caccaagttcgagtactaa

SEQ ID NO: 512839 - DNA, 19 bp, Mus musculus
  siRNA target sequence for Ptk2 (NM_007982.1,149-167).
ccaagttcgagtactaaga

SEQ ID NO: 512840 - DNA, 19 bp, Mus musculus
  siRNA target sequence for Ptk2 (NM_007982.1,201-219).
gtgcaatggaacgagtatt

SEQ ID NO: 512841 - DNA, 19 bp, Mus musculus
  siRNA target sequence for Ptk2 (NM_007982.1,203-221).
gcaatggaacgagtattaa

SEQ ID NO: 512842 - DNA, 19 bp, Mus musculus
  siRNA target sequence for Ptk2 (NM_007982.1,204-222).
caatggaacgagtattaaa

SEQ ID NO: 512843 - DNA, 19 bp, Mus musculus
  siRNA target sequence for Ptk2 (NM_007982.1,213-231).
gagtattaaaggtctttca

SEQ ID NO: 512844 - DNA, 19 bp, Mus musculus
  siRNA target sequence for Ptk2 (NM_007982.1,319-337).
gatagtggacagtcacaaa

SEQ ID NO: 512845 - DNA, 19 bp, Mus musculus
  siRNA target sequence for Ptk2 (NM_007982.1,323-341).
gtggacagtcacaaagtaa

SEQ ID NO: 512846 - DNA, 19 bp, Mus musculus
  siRNA target sequence for Ptk2 (NM_007982.1,346-364).
cgtggcctgctatggattt

SEQ ID NO: 512847 - DNA, 19 bp, Mus musculus
  siRNA target sequence for Ptk2 (NM_007982.1,423-441).
ccagtgtgagggagaaata

SEQ ID NO: 512848 - DNA, 19 bp, Mus musculus
  siRNA target sequence for Ptk2 (NM_007982.1,468-486).
ggaaatatgagttgagaat

SEQ ID NO: 512849 - DNA, 19 bp, Mus musculus
  siRNA target sequence for Ptk2 (NM_007982.1,488-506).
cgttacttgccaaaaggat

SEQ ID NO: 512850 - DNA, 19 bp, Mus musculus
  siRNA target sequence for Ptk2 (NM_007982.1,527-545).
gataagccaacattgaatt

SEQ ID NO: 512851 - DNA, 19 bp, Mus musculus
  siRNA target sequence for Ptk2 (NM_007982.1,537-555).
cattgaatttcttctatca

SEQ ID NO: 512852 - DNA, 19 bp, Mus musculus
  siRNA target sequence for Ptk2 (NM_007982.1,577-595).
gcaagaaatagctgatcaa

SEQ ID NO: 512853 - DNA, 19 bp, Mus musculus
  siRNA target sequence for Ptk2 (NM_007982.1,631-649).
ggaaattaggcgatcctat

SEQ ID NO: 512854 - DNA, 19 bp, Mus musculus
  siRNA target sequence for Ptk2 (NM_007982.1,632-650).
gaaattaggcgatcctatt

SEQ ID NO: 512855 - DNA, 19 bp, Mus musculus
  siRNA target sequence for Ptk2 (NM_007982.1,660-678).
ggggtaatgccctagagaa

SEQ ID NO: 512856 - DNA, 19 bp, Mus musculus
  siRNA target sequence for Ptk2 (NM_007982.1,663-681).
gtaatgccctagagaagaa

SEQ ID NO: 512857 - DNA, 19 bp, Mus musculus
  siRNA target sequence for Ptk2 (NM_007982.1,676-694).
gaagaagtccaactatgaa

SEQ ID NO: 512858 - DNA, 19 bp, Mus musculus
  siRNA target sequence for Ptk2 (NM_007982.1,679-697).
gaagtccaactatgaagta

SEQ ID NO: 512859 - DNA, 19 bp, Mus musculus
  siRNA target sequence for Ptk2 (NM_007982.1,682-700).
gtccaactatgaagtatta

SEQ ID NO: 512860 - DNA, 19 bp, Mus musculus
  siRNA target sequence for Ptk2 (NM_007982.1,684-702).
ccaactatgaagtattaga

SEQ ID NO: 512861 - DNA, 19 bp, Mus musculus
  siRNA target sequence for Ptk2 (NM_007982.1,721-739).
gcgattttttcctaagagt

SEQ ID NO: 512862 - DNA, 19 bp, Mus musculus
  siRNA target sequence for Ptk2 (NM_007982.1,752-770).
gtcaaggccaaaacactaa

SEQ ID NO: 512863 - DNA, 19 bp, Mus musculus
  siRNA target sequence for Ptk2 (NM_007982.1,799-817).
gtttgccaaccttaataga

SEQ ID NO: 512864 - DNA, 19 bp, Mus musculus
  siRNA target sequence for Ptk2 (NM_007982.1,852-870).
ctcctgtgtacagatttga

SEQ ID NO: 512865 - DNA, 19 bp, Mus musculus
  siRNA target sequence for Ptk2 (NM_007982.1,925-943).
ggcaatcggcccagaagaa

SEQ ID NO: 512866 - DNA, 19 bp, Mus musculus
  siRNA target sequence for Ptk2 (NM_007982.1,1170-1188).
ccacacaatctttcatcat

SEQ ID NO: 512867 - DNA, 19 bp, Mus musculus
  siRNA target sequence for Ptk2 (NM_007982.1,1464-1482).
caatcaaaacatgtaaaaa

SEQ ID NO: 512868 - DNA, 19 bp, Mus musculus
  siRNA target sequence for Ptk2 (NM_007982.1,1503-1521).
gagagaagttccttcaaga

SEQ ID NO: 512869 - DNA, 19 bp, Mus musculus
  siRNA target sequence for Ptk2 (NM_007982.1,1514-1532).
cttcaagaagccttaacaa

SEQ ID NO: 512870 - DNA, 19 bp, Mus musculus
  siRNA target sequence for Ptk2 (NM_007982.1,1525-1543).
cttaacaatgcgtcagttt

SEQ ID NO: 512871 - DNA, 19 bp, Mus musculus
  siRNA target sequence for Ptk2 (NM_007982.1,1564-1582).
gctgattggagtcattaca

SEQ ID NO: 512872 - DNA, 19 bp, Mus musculus
  siRNA target sequence for Ptk2 (NM_007982.1,1627-1645).
gctgaggtcatttttgcaa

SEQ ID NO: 512873 - DNA, 19 bp, Mus musculus
  siRNA target sequence for Ptk2 (NM_007982.1,1663-1681).
ggacctggcatctttgata

SEQ ID NO: 512874 - DNA, 19 bp, Mus musculus
  siRNA target sequence for Ptk2 (NM_007982.1,1669-1687).
ggcatctttgatattatat

SEQ ID NO: 512875 - DNA, 19 bp, Mus musculus
  siRNA target sequence for Ptk2 (NM_007982.1,1712-1730).
gcgtatctggagagcaaaa

SEQ ID NO: 512876 - DNA, 19 bp, Mus musculus
  siRNA target sequence for Ptk2 (NM_007982.1,1720-1738).
ggagagcaaaagatttgtt

SEQ ID NO: 512877 - DNA, 19 bp, Mus musculus
  siRNA target sequence for Ptk2 (NM_007982.1,2644-2662).
cagggaagacgggagtttt

SEQ ID NO: 512878 - DNA, 19 bp, Mus musculus
  siRNA target sequence for Ptk2 (NM_007982.1,2665-2683).
gggtccgactggaaaccaa

SEQ ID NO: 512879 - DNA, 19 bp, Mus musculus
  siRNA target sequence for Ptk2 (NM_007982.1,2673-2691).
ctggaaaccaacacatcta

SEQ ID NO: 512880 - DNA, 19 bp, Mus musculus
  siRNA target sequence for Ptk2 (NM_007982.1,2864-2882).
cggtccaatgacaaggtat

SEQ ID NO: 512881 - DNA, 19 bp, Mus musculus
  siRNA target sequence for Ptk2 (NM_007982.1,2865-2883).
ggtccaatgacaaggtata

SEQ ID NO: 512882 - DNA, 19 bp, Mus musculus
  siRNA target sequence for Ptk2 (NM_007982.1,2866-2884).
gtccaatgacaaggtatat

SEQ ID NO: 512883 - DNA, 19 bp, Mus musculus
  siRNA target sequence for Ptk2 (NM_007982.1,2986-3004).
ggccctgcggaccttacta

SEQ ID NO: 512884 - DNA, 19 bp, Mus musculus
  siRNA target sequence for Ptk2b (NM_172498.1,543-561).
gcgaagtgcaggacaagta

SEQ ID NO: 512885 - DNA, 19 bp, Mus musculus
  siRNA target sequence for Ptk2b (NM_172498.1,544-562).
cgaagtgcaggacaagtat

SEQ ID NO: 512886 - DNA, 19 bp, Mus musculus
  siRNA target sequence for Ptk2b (NM_172498.1,548-566).
gtgcaggacaagtatgaat

SEQ ID NO: 512887 - DNA, 19 bp, Mus musculus
  siRNA target sequence for Ptk2b (NM_172498.1,588-606).
ggaggtatgaccttcaaat

SEQ ID NO: 512888 - DNA, 19 bp, Mus musculus
  siRNA target sequence for Ptk2b (NM_172498.1,651-669).
ggaccacattgctgtactt

SEQ ID NO: 512889 - DNA, 19 bp, Mus musculus
  siRNA target sequence for Ptk2b (NM_172498.1,652-670).
gaccacattgctgtacttt

SEQ ID NO: 512890 - DNA, 19 bp, Mus musculus
  siRNA target sequence for Ptk2b (NM_172498.1,674-692).
caacagctccggaatgact

SEQ ID NO: 512891 - DNA, 19 bp, Mus musculus
  siRNA target sequence for Ptk2b (NM_172498.1,830-848).
gtcggtctggacctgtttt

SEQ ID NO: 512892 - DNA, 19 bp, Mus musculus
  siRNA target sequence for Ptk2b (NM_172498.1,857-875).
cagatgcaggaaaacttaa

SEQ ID NO: 512893 - DNA, 19 bp, Mus musculus
  siRNA target sequence for Ptk2b (NM_172498.1,938-956).
gaagagtgtgtcatgaaat

SEQ ID NO: 512894 - DNA, 19 bp, Mus musculus
  siRNA target sequence for Ptk2b (NM_172498.1,941-959).
gagtgtgtcatgaaattct

SEQ ID NO: 512895 - DNA, 19 bp, Mus musculus
  siRNA target sequence for Ptk2b (NM_172498.1,945-963).
gtgtcatgaaattcttcaa

SEQ ID NO: 512896 - DNA, 19 bp, Mus musculus
  siRNA target sequence for Ptk2b (NM_172498.1,1070-1088).
cagctgacaagtcaagata

SEQ ID NO: 512897 - DNA, 19 bp, Mus musculus
  siRNA target sequence for Ptk2b (NM_172498.1,1073-1091).
ctgacaagtcaagatacaa

SEQ ID NO: 512898 - DNA, 19 bp, Mus musculus
  siRNA target sequence for Ptk2b (NM_172498.1,1109-1127).
gagtttaagcagatcagat

SEQ ID NO: 512899 - DNA, 19 bp, Mus musculus
  siRNA target sequence for Ptk2b (NM_172498.1,1191-1209).
cccagtccttgtctatcaa

SEQ ID NO: 512900 - DNA, 19 bp, Mus musculus
  siRNA target sequence for Ptk2b (NM_172498.1,1234-1252).
gaacatggctgatctcata

SEQ ID NO: 512901 - DNA, 19 bp, Mus musculus
  siRNA target sequence for Ptk2b (NM_172498.1,1237-1255).
catggctgatctcatagat

SEQ ID NO: 512902 - DNA, 19 bp, Mus musculus
  siRNA target sequence for Ptk2b (NM_172498.1,1338-1356).
ctcagatccccacactaaa

SEQ ID NO: 512903 - DNA, 19 bp, Mus musculus
  siRNA target sequence for Ptk2b (NM_172498.1,1370-1388).
cggtcgcacctctcagaaa

SEQ ID NO: 512904 - DNA, 19 bp, Mus musculus
  siRNA target sequence for Ptk2b (NM_172498.1,1396-1414).
catagagtcagacatctat

SEQ ID NO: 512905 - DNA, 19 bp, Mus musculus
  siRNA target sequence for Ptk2b (NM_172498.1,1472-1490).
cgtgaagaagtagttctta

SEQ ID NO: 512906 - DNA, 19 bp, Mus musculus
  siRNA target sequence for Ptk2b (NM_172498.1,1626-1644).
gtgaggcagtgatcatgaa

SEQ ID NO: 512907 - DNA, 19 bp, Mus musculus
  siRNA target sequence for Ptk2b (NM_172498.1,1691-1709).
gaggaacccacctggatta

SEQ ID NO: 512908 - DNA, 19 bp, Mus musculus
  siRNA target sequence for Ptk2b (NM_172498.1,1694-1712).
gaacccacctggattatca

SEQ ID NO: 512909 - DNA, 19 bp, Mus musculus
  siRNA target sequence for Ptk2b (NM_172498.1,1711-1729).
catggaactgtatccttat

SEQ ID NO: 512910 - DNA, 19 bp, Mus musculus
  siRNA target sequence for Ptk2b (NM_172498.1,1742-1760).
cactacctggaacgaaata

SEQ ID NO: 512911 - DNA, 19 bp, Mus musculus
  siRNA target sequence for Ptk2b (NM_172498.1,1744-1762).
ctacctggaacgaaataaa

SEQ ID NO: 512912 - DNA, 19 bp, Mus musculus
  siRNA target sequence for Ptk2b (NM_172498.1,1790-1808).
ctgtacaccctacagatat

SEQ ID NO: 512913 - DNA, 19 bp, Mus musculus
  siRNA target sequence for Ptk2b (NM_172498.1,1914-1932).
ggctctcccggtacattga

SEQ ID NO: 512914 - DNA, 19 bp, Mus musculus
  siRNA target sequence for Ptk2b (NM_172498.1,1931-1949).
gaggacgaagactattaca

SEQ ID NO: 512915 - DNA, 19 bp, Mus musculus
  siRNA target sequence for Ptk2b (NM_172498.1,1933-1951).
ggacgaagactattacaaa

SEQ ID NO: 512916 - DNA, 19 bp, Mus musculus
  siRNA target sequence for Ptk2b (NM_172498.1,1960-1978).
gacacgtctacccatcaaa

SEQ ID NO: 512917 - DNA, 19 bp, Mus musculus
  siRNA target sequence for Ptk2b (NM_172498.1,1986-2004).
cccccgagtccatcaactt

SEQ ID NO: 512918 - DNA, 19 bp, Mus musculus
  siRNA target sequence for Ptk2b (NM_172498.1,2082-2100).
ctttcttctggctcgaaaa

SEQ ID NO: 512919 - DNA, 19 bp, Mus musculus
  siRNA target sequence for Ptk2b (NM_172498.1,2241-2259).
gcctcagtgacatttatca

SEQ ID NO: 512920 - DNA, 19 bp, Mus musculus
  siRNA target sequence for Ptk2b (NM_172498.1,2300-2318).
cgctaccgaccccctaaaa

SEQ ID NO: 512921 - DNA, 19 bp, Mus musculus
  siRNA target sequence for Ptk2b (NM_172498.1,2301-2319).
gctaccgaccccctaaaat

SEQ ID NO: 512922 - DNA, 19 bp, Mus musculus
  siRNA target sequence for Ptk2b (NM_172498.1,2302-2320).
ctaccgaccccctaaaata

SEQ ID NO: 512923 - DNA, 19 bp, Mus musculus
  siRNA target sequence for Ptk2b (NM_172498.1,2307-2325).
gaccccctaaaatattgga

SEQ ID NO: 512924 - DNA, 19 bp, Mus musculus
  siRNA target sequence for Ptk2b (NM_172498.1,2566-2584).
cttggaccctatggtttat

SEQ ID NO: 512925 - DNA, 19 bp, Mus musculus
  siRNA target sequence for Ptk2b (NM_172498.1,2570-2588).
gaccctatggtttatatga

SEQ ID NO: 512926 - DNA, 19 bp, Mus musculus
  siRNA target sequence for Ptk2b (NM_172498.1,2572-2590).
ccctatggtttatatgaat

SEQ ID NO: 512927 - DNA, 19 bp, Mus musculus
  siRNA target sequence for Ptk2b (NM_172498.1,2717-2735).
ctcgtgtaccacaatgtca

SEQ ID NO: 512928 - DNA, 19 bp, Mus musculus
  siRNA target sequence for Ptk2b (NM_172498.1,2847-2865).
gcagtgtggacgatctctt

SEQ ID NO: 512929 - DNA, 19 bp, Mus musculus
  siRNA target sequence for Ptk2b (NM_172498.1,2883-2901).
cttcgaggacagagattga

SEQ ID NO: 512930 - DNA, 19 bp, Mus musculus
  siRNA target sequence for Ptk2b (NM_172498.1,3072-3090).
ccaaggttgtggctaatct

SEQ ID NO: 512931 - DNA, 19 bp, Mus musculus
  siRNA target sequence for Ptk6 (NM_009184.1,305-323).
ctcacctgggtcctaagta

SEQ ID NO: 512932 - DNA, 19 bp, Mus musculus
  siRNA target sequence for Ptk6 (NM_009184.1,511-529).
gaaccgtggttctttggtt

SEQ ID NO: 512933 - DNA, 19 bp, Mus musculus
  siRNA target sequence for Ptk6 (NM_009184.1,647-665).
ctcaggccgtgcgacatta

SEQ ID NO: 512934 - DNA, 19 bp, Mus musculus
  siRNA target sequence for Ptk6 (NM_009184.1,649-667).
caggccgtgcgacattaca

SEQ ID NO: 512935 - DNA, 19 bp, Mus musculus
  siRNA target sequence for Ptk6 (NM_009184.1,792-810).
ctgctggaagcacaaaact

SEQ ID NO: 512936 - DNA, 19 bp, Mus musculus
  siRNA target sequence for Ptk6 (NM_009184.1,1054-1072).
ggggacccggtctacatca

SEQ ID NO: 512937 - DNA, 19 bp, Mus musculus
  siRNA target sequence for Ptk6 (NM_009184.1,1055-1073).
gggacccggtctacatcat

SEQ ID NO: 512938 - DNA, 19 bp, Mus musculus
  siRNA target sequence for Ptk6 (NM_009184.1,1113-1131).
gcgtgactctgatgagaaa

SEQ ID NO: 512939 - DNA, 19 bp, Mus musculus
  siRNA target sequence for Ptk6 (NM_009184.1,1226-1244).
ctgcaaggaacgttcttgt

SEQ ID NO: 512940 - DNA, 19 bp, Mus musculus
  siRNA target sequence for Ptk6 (NM_009184.1,1232-1250).
ggaacgttcttgttacaga

SEQ ID NO: 512941 - DNA, 19 bp, Mus musculus
  siRNA target sequence for Ptk6 (NM_009184.1,1243-1261).
gttacagagaacaatctct

SEQ ID NO: 512942 - DNA, 19 bp, Mus musculus
  siRNA target sequence for Ptk6 (NM_009184.1,1323-1341).
gcacaatgtcccctacaaa

SEQ ID NO: 512943 - DNA, 19 bp, Mus musculus
  siRNA target sequence for Ptk6 (NM_009184.1,1324-1342).
cacaatgtcccctacaaat

SEQ ID NO: 512944 - DNA, 19 bp, Mus musculus
  siRNA target sequence for Ptk6 (NM_009184.1,1369-1387).
gggcattactccatcaagt

SEQ ID NO: 512945 - DNA, 19 bp, Mus musculus
  siRNA target sequence for Ptk6 (NM_009184.1,1397-1415).
ggtcttttggagttcttct

SEQ ID NO: 512946 - DNA, 19 bp, Mus musculus
  siRNA target sequence for Ptk6 (NM_009184.1,1398-1416).
gtcttttggagttcttctt

SEQ ID NO: 512947 - DNA, 19 bp, Mus musculus
  siRNA target sequence for Ptk6 (NM_009184.1,1400-1418).
cttttggagttcttcttca

SEQ ID NO: 512948 - DNA, 19 bp, Mus musculus
  siRNA target sequence for Ptk6 (NM_009184.1,1449-1467).
cccaggcatgtccaatcat

SEQ ID NO: 512949 - DNA, 19 bp, Mus musculus
  siRNA target sequence for Ptk6 (NM_009184.1,1451-1469).
caggcatgtccaatcatga

SEQ ID NO: 512950 - DNA, 19 bp, Mus musculus
  siRNA target sequence for Ptk6 (NM_009184.1,1453-1471).
ggcatgtccaatcatgaaa

SEQ ID NO: 512951 - DNA, 19 bp, Mus musculus
  siRNA target sequence for Ptk6 (NM_009184.1,1515-1533).
ggagtgcccacccaacata

SEQ ID NO: 512952 - DNA, 19 bp, Mus musculus
  siRNA target sequence for Ptk6 (NM_009184.1,1612-1630).
ggtatcaccaggtatgaga

SEQ ID NO: 512953 - DNA, 19 bp, Mus musculus
  siRNA target sequence for Ptk6 (NM_009184.1,1613-1631).
gtatcaccaggtatgagaa

SEQ ID NO: 512954 - DNA, 19 bp, Mus musculus
  siRNA target sequence for Ptk7 (NM_175168.2,176-194).
caagccgctatcgtcttta

SEQ ID NO: 512955 - DNA, 19 bp, Mus musculus
  siRNA target sequence for Ptk7 (NM_175168.2,179-197).
gccgctatcgtctttatca

SEQ ID NO: 512956 - DNA, 19 bp, Mus musculus
  siRNA target sequence for Ptk7 (NM_175168.2,180-198).
ccgctatcgtctttatcaa

SEQ ID NO: 512957 - DNA, 19 bp, Mus musculus
  siRNA target sequence for Ptk7 (NM_175168.2,393-411).
gtgtggctcgggataacgt

SEQ ID NO: 512958 - DNA, 19 bp, Mus musculus
  siRNA target sequence for Ptk7 (NM_175168.2,419-437).
gaggaagtccgcagtacta

SEQ ID NO: 512959 - DNA, 19 bp, Mus musculus
  siRNA target sequence for Ptk7 (NM_175168.2,421-439).
ggaagtccgcagtactaat

SEQ ID NO: 512960 - DNA, 19 bp, Mus musculus
  siRNA target sequence for Ptk7 (NM_175168.2,529-547).
cacactgcgatgtcacatt

SEQ ID NO: 512961 - DNA, 19 bp, Mus musculus
  siRNA target sequence for Ptk7 (NM_175168.2,589-607).
gacccccctctctgatgat

SEQ ID NO: 512962 - DNA, 19 bp, Mus musculus
  siRNA target sequence for Ptk7 (NM_175168.2,591-609).
cccccctctctgatgatca

SEQ ID NO: 512963 - DNA, 19 bp, Mus musculus
  siRNA target sequence for Ptk7 (NM_175168.2,739-757).
cttgagtgttgcagatgaa

SEQ ID NO: 512964 - DNA, 19 bp, Mus musculus
  siRNA target sequence for Ptk7 (NM_175168.2,744-762).
gtgttgcagatgaaagctt

SEQ ID NO: 512965 - DNA, 19 bp, Mus musculus
  siRNA target sequence for Ptk7 (NM_175168.2,875-893).
gacgagactcccatcacta

SEQ ID NO: 512966 - DNA, 19 bp, Mus musculus
  siRNA target sequence for Ptk7 (NM_175168.2,1231-1249).
catcgctgagagtgatact

SEQ ID NO: 512967 - DNA, 19 bp, Mus musculus
  siRNA target sequence for Ptk7 (NM_175168.2,1288-1306).
gcggcgacaggatgtcaat

SEQ ID NO: 512968 - DNA, 19 bp, Mus musculus
  siRNA target sequence for Ptk7 (NM_175168.2,1289-1307).
cggcgacaggatgtcaata

SEQ ID NO: 512969 - DNA, 19 bp, Mus musculus
  siRNA target sequence for Ptk7 (NM_175168.2,1290-1308).
ggcgacaggatgtcaatat

SEQ ID NO: 512970 - DNA, 19 bp, Mus musculus
  siRNA target sequence for Ptk7 (NM_175168.2,1454-1472).
gactcgaggttcgaagttt

SEQ ID NO: 512971 - DNA, 19 bp, Mus musculus
  siRNA target sequence for Ptk7 (NM_175168.2,1458-1476).
cgaggttcgaagtttcgaa

SEQ ID NO: 512972 - DNA, 19 bp, Mus musculus
  siRNA target sequence for Ptk7 (NM_175168.2,1462-1480).
gttcgaagtttcgaagaat

SEQ ID NO: 512973 - DNA, 19 bp, Mus musculus
  siRNA target sequence for Ptk7 (NM_175168.2,1485-1503).
ccttgcgcatcaatagtgt

SEQ ID NO: 512974 - DNA, 19 bp, Mus musculus
  siRNA target sequence for Ptk7 (NM_175168.2,1508-1526).
gtgtatgacgggacattgt

SEQ ID NO: 512975 - DNA, 19 bp, Mus musculus
  siRNA target sequence for Ptk7 (NM_175168.2,1625-1643).
cagtgcatggagtttgata

SEQ ID NO: 512976 - DNA, 19 bp, Mus musculus
  siRNA target sequence for Ptk7 (NM_175168.2,1679-1697).
gagaagcccacggttaagt

SEQ ID NO: 512977 - DNA, 19 bp, Mus musculus
  siRNA target sequence for Ptk7 (NM_175168.2,1765-1783).
ccgagtgacccgagatgat

SEQ ID NO: 512978 - DNA, 19 bp, Mus musculus
  siRNA target sequence for Ptk7 (NM_175168.2,1847-1865).
ctgacggtggcagttttca

SEQ ID NO: 512979 - DNA, 19 bp, Mus musculus
  siRNA target sequence for Ptk7 (NM_175168.2,1942-1960).
cgaccccaagcctctcatt

SEQ ID NO: 512980 - DNA, 19 bp, Mus musculus
  siRNA target sequence for Ptk7 (NM_175168.2,2004-2022).
gacccaggatgcacatctt

SEQ ID NO: 512981 - DNA, 19 bp, Mus musculus
  siRNA target sequence for Ptk7 (NM_175168.2,2087-2105).
gctggcaacagctgtaaca

SEQ ID NO: 512982 - DNA, 19 bp, Mus musculus
  siRNA target sequence for Ptk7 (NM_175168.2,2178-2196).
ctcccccatacaagatgat

SEQ ID NO: 512983 - DNA, 19 bp, Mus musculus
  siRNA target sequence for Ptk7 (NM_175168.2,2244-2262).
cggtcctgggcctcatgtt

SEQ ID NO: 512984 - DNA, 19 bp, Mus musculus
  siRNA target sequence for Ptk7 (NM_175168.2,2266-2284).
ctgcaagaagcggtgtaaa

SEQ ID NO: 512985 - DNA, 19 bp, Mus musculus
  siRNA target sequence for Ptk7 (NM_175168.2,2445-2463).
ccggtgataggatgcattt

SEQ ID NO: 512986 - DNA, 19 bp, Mus musculus
  siRNA target sequence for Ptk7 (NM_175168.2,2633-2651).
gagatgttcgggaagttga

SEQ ID NO: 512987 - DNA, 19 bp, Mus musculus
  siRNA target sequence for Ptk7 (NM_175168.2,2725-2743).
ggacctgggagatctcaaa

SEQ ID NO: 512988 - DNA, 19 bp, Mus musculus
  siRNA target sequence for Ptk7 (NM_175168.2,2939-2957).
ggcctgagcaaggatgtat

SEQ ID NO: 512989 - DNA, 19 bp, Mus musculus
  siRNA target sequence for Ptk7 (NM_175168.2,2940-2958).
gcctgagcaaggatgtata

SEQ ID NO: 512990 - DNA, 19 bp, Mus musculus
  siRNA target sequence for Ptk7 (NM_175168.2,3032-3050).
ggtgacttctccactaagt

SEQ ID NO: 512991 - DNA, 19 bp, Mus musculus
  siRNA target sequence for Ptov1 (NM_133949.1,438-456).
ggagggtgctcgagtcttt

SEQ ID NO: 512992 - DNA, 19 bp, Mus musculus
  siRNA target sequence for Ptov1 (NM_133949.1,522-540).
gcaccggctcagcaacaaa

SEQ ID NO: 512993 - DNA, 19 bp, Mus musculus
  siRNA target sequence for Ptov1 (NM_133949.1,1018-1036).
cagattgtcaacaacaaat

SEQ ID NO: 512994 - DNA, 19 bp, Mus musculus
  siRNA target sequence for Rab32 (NM_026405.2,223-241).
ggtaagacgagcatcatca

SEQ ID NO: 512995 - DNA, 19 bp, Mus musculus
  siRNA target sequence for Rab32 (NM_026405.2,224-242).
gtaagacgagcatcatcaa

SEQ ID NO: 512996 - DNA, 19 bp, Mus musculus
  siRNA target sequence for Rab32 (NM_026405.2,294-312).
ggacttcgccctcaaagtt

SEQ ID NO: 512997 - DNA, 19 bp, Mus musculus
  siRNA target sequence for Rab32 (NM_026405.2,370-388).
gaacggtttggcaacatga

SEQ ID NO: 512998 - DNA, 19 bp, Mus musculus
  siRNA target sequence for Rab32 (NM_026405.2,380-398).
gcaacatgactcgagtata

SEQ ID NO: 512999 - DNA, 19 bp, Mus musculus
  siRNA target sequence for Rab32 (NM_026405.2,384-402).
catgactcgagtatactat

SEQ ID NO: 513000 - DNA, 19 bp, Mus musculus
  siRNA target sequence for Rab32 (NM_026405.2,389-407).
ctcgagtatactataagga

SEQ ID NO: 513001 - DNA, 19 bp, Mus musculus
  siRNA target sequence for Rab32 (NM_026405.2,410-428).
ctcttggagcatttgtagt

SEQ ID NO: 513002 - DNA, 19 bp, Mus musculus
  siRNA target sequence for Rab32 (NM_026405.2,424-442).
gtagtctttgatatatcga

SEQ ID NO: 513003 - DNA, 19 bp, Mus musculus
  siRNA target sequence for Rab32 (NM_026405.2,433-451).
gatatatcgagaagttcta

SEQ ID NO: 513004 - DNA, 19 bp, Mus musculus
  siRNA target sequence for Rab32 (NM_026405.2,440-458).
cgagaagttctacatttga

SEQ ID NO: 513005 - DNA, 19 bp, Mus musculus
  siRNA target sequence for Rab32 (NM_026405.2,452-470).
catttgatgcagtcctaaa

SEQ ID NO: 513006 - DNA, 19 bp, Mus musculus
  siRNA target sequence for Rab32 (NM_026405.2,460-478).
gcagtcctaaaatggaaaa

SEQ ID NO: 513007 - DNA, 19 bp, Mus musculus
  siRNA target sequence for Rab32 (NM_026405.2,486-504).
ggatagtaaagttcatctt

SEQ ID NO: 513008 - DNA, 19 bp, Mus musculus
  siRNA target sequence for Rab32 (NM_026405.2,527-545).
ctgtcctcctagctaacaa

SEQ ID NO: 513009 - DNA, 19 bp, Mus musculus
  siRNA target sequence for Rab32 (NM_026405.2,529-547).
gtcctcctagctaacaaat

SEQ ID NO: 513010 - DNA, 19 bp, Mus musculus
  siRNA target sequence for Rab32 (NM_026405.2,633-651).
ctctgccaaggataatata

SEQ ID NO: 513011 - DNA, 19 bp, Mus musculus
  siRNA target sequence for Rab32 (NM_026405.2,635-653).
ctgccaaggataatataaa

SEQ ID NO: 513012 - DNA, 19 bp, Mus musculus
  siRNA target sequence for Rab32 (NM_026405.2,668-686).
cccgcttcctagtggaaaa

SEQ ID NO: 513013 - DNA, 19 bp, Mus musculus
  siRNA target sequence for Rab32 (NM_026405.2,707-725).
gttttcctagtgaagaaat

SEQ ID NO: 513014 - DNA, 19 bp, Mus musculus
  siRNA target sequence for Rab38 (NM_028238.5,191-209).
ggcaagaccagcattatca

SEQ ID NO: 513015 - DNA, 19 bp, Mus musculus
  siRNA target sequence for Rab38 (NM_028238.5,192-210).
gcaagaccagcattatcaa

SEQ ID NO: 513016 - DNA, 19 bp, Mus musculus
  siRNA target sequence for Rab38 (NM_028238.5,212-230).
cgctatgtgcaccaaaact

SEQ ID NO: 513017 - DNA, 19 bp, Mus musculus
  siRNA target sequence for Rab38 (NM_028238.5,374-392).
gaagctatgggggcattta

SEQ ID NO: 513018 - DNA, 19 bp, Mus musculus
  siRNA target sequence for Rab38 (NM_028238.5,378-396).
ctatgggggcatttattgt

SEQ ID NO: 513019 - DNA, 19 bp, Mus musculus
  siRNA target sequence for Rab38 (NM_028238.5,409-427).
cagaccagccacatttgaa

SEQ ID NO: 513020 - DNA, 19 bp, Mus musculus
  siRNA target sequence for Rab38 (NM_028238.5,428-446).
gccgtggcaaagtggaaaa

SEQ ID NO: 513021 - DNA, 19 bp, Mus musculus
  siRNA target sequence for Rab38 (NM_028238.5,429-447).
ccgtggcaaagtggaaaaa

SEQ ID NO: 513022 - DNA, 19 bp, Mus musculus
  siRNA target sequence for Rab38 (NM_028238.5,430-448).
cgtggcaaagtggaaaaat

SEQ ID NO: 513023 - DNA, 19 bp, Mus musculus
  siRNA target sequence for Rab38 (NM_028238.5,433-451).
ggcaaagtggaaaaatgat

SEQ ID NO: 513024 - DNA, 19 bp, Mus musculus
  siRNA target sequence for Rab38 (NM_028238.5,434-452).
gcaaagtggaaaaatgatt

SEQ ID NO: 513025 - DNA, 19 bp, Mus musculus
  siRNA target sequence for Rab38 (NM_028238.5,463-481).
gttaacgctccctaatggt

SEQ ID NO: 513026 - DNA, 19 bp, Mus musculus
  siRNA target sequence for Rab38 (NM_028238.5,586-604).
cgtaggatggtttgaaaca

SEQ ID NO: 513027 - DNA, 19 bp, Mus musculus
  siRNA target sequence for Rab38 (NM_028238.5,675-693).
gtgacctcctagagtctat

SEQ ID NO: 513028 - DNA, 19 bp, Mus musculus
  siRNA target sequence for Rab38 (NM_028238.5,679-697).
cctcctagagtctatagaa

SEQ ID NO: 513029 - DNA, 19 bp, Mus musculus
  siRNA target sequence for Rab38 (NM_028238.5,690-708).
ctatagaaccggacattgt

SEQ ID NO: 513030 - DNA, 19 bp, Mus musculus
  siRNA target sequence for Rad50 (NM_009012.1,329-347).
ccccctcacaattttggtt

SEQ ID NO: 513031 - DNA, 19 bp, Mus musculus
  siRNA target sequence for Rad50 (NM_009012.1,365-383).
gaagacgaccatcattgaa

SEQ ID NO: 513032 - DNA, 19 bp, Mus musculus
  siRNA target sequence for Rad50 (NM_009012.1,368-386).
gacgaccatcattgaatgt

SEQ ID NO: 513033 - DNA, 19 bp, Mus musculus
  siRNA target sequence for Rad50 (NM_009012.1,370-388).
cgaccatcattgaatgtct

SEQ ID NO: 513034 - DNA, 19 bp, Mus musculus
  siRNA target sequence for Rad50 (NM_009012.1,377-395).
cattgaatgtctaaagtat

SEQ ID NO: 513035 - DNA, 19 bp, Mus musculus
  siRNA target sequence for Rad50 (NM_009012.1,494-512).
gcagtttcgagatgtgaat

SEQ ID NO: 513036 - DNA, 19 bp, Mus musculus
  siRNA target sequence for Rad50 (NM_009012.1,528-546).
gtgcacaggtctatgcttt

SEQ ID NO: 513037 - DNA, 19 bp, Mus musculus
  siRNA target sequence for Rad50 (NM_009012.1,585-603).
gaaggagtcattactagaa

SEQ ID NO: 513038 - DNA, 19 bp, Mus musculus
  siRNA target sequence for Rad50 (NM_009012.1,588-606).
ggagtcattactagaatga

SEQ ID NO: 513039 - DNA, 19 bp, Mus musculus
  siRNA target sequence for Rad50 (NM_009012.1,589-607).
gagtcattactagaatgaa

SEQ ID NO: 513040 - DNA, 19 bp, Mus musculus
  siRNA target sequence for Rad50 (NM_009012.1,723-741).
gactccaactggcctttaa

SEQ ID NO: 513041 - DNA, 19 bp, Mus musculus
  siRNA target sequence for Rad50 (NM_009012.1,855-873).
gagtgtcaaacggaattga

SEQ ID NO: 513042 - DNA, 19 bp, Mus musculus
  siRNA target sequence for Rad50 (NM_009012.1,865-883).
cggaattgaaatatctgaa

SEQ ID NO: 513043 - DNA, 19 bp, Mus musculus
  siRNA target sequence for Rad50 (NM_009012.1,981-999).
gagcttgagccattgaaga

SEQ ID NO: 513044 - DNA, 19 bp, Mus musculus
  siRNA target sequence for Rad50 (NM_009012.1,983-1001).
gcttgagccattgaagaat

SEQ ID NO: 513045 - DNA, 19 bp, Mus musculus
  siRNA target sequence for Rad50 (NM_009012.1,998-1016).
gaatcgcctgaaagagatt

SEQ ID NO: 513046 - DNA, 19 bp, Mus musculus
  siRNA target sequence for Rad50 (NM_009012.1,1063-1081).
ccttggagagccgaaagaa

SEQ ID NO: 513047 - DNA, 19 bp, Mus musculus
  siRNA target sequence for Rad50 (NM_009012.1,1064-1082).
cttggagagccgaaagaaa

SEQ ID NO: 513048 - DNA, 19 bp, Mus musculus
  siRNA target sequence for Rad50 (NM_009012.1,1072-1090).
gccgaaagaaacaaatgga

SEQ ID NO: 513049 - DNA, 19 bp, Mus musculus
  siRNA target sequence for Rad50 (NM_009012.1,1138-1156).
ggactgatgagcagctaaa

SEQ ID NO: 513050 - DNA, 19 bp, Mus musculus
  siRNA target sequence for Rad50 (NM_009012.1,1252-1270).
ggctcctcaaccaggaaaa

SEQ ID NO: 513051 - DNA, 19 bp, Mus musculus
  siRNA target sequence for Rad50 (NM_009012.1,1366-1384).
caacacatcttgaattgga

SEQ ID NO: 513052 - DNA, 19 bp, Mus musculus
  siRNA target sequence for Rad50 (NM_009012.1,1487-1505).
gagcgacctgacagacaaa

SEQ ID NO: 513053 - DNA, 19 bp, Mus musculus
  siRNA target sequence for Rad50 (NM_009012.1,1489-1507).
gcgacctgacagacaaaga

SEQ ID NO: 513054 - DNA, 19 bp, Mus musculus
  siRNA target sequence for Rad50 (NM_009012.1,1490-1508).
cgacctgacagacaaagaa

SEQ ID NO: 513055 - DNA, 19 bp, Mus musculus
  siRNA target sequence for Rad50 (NM_009012.1,1687-1705).
cgaaagctgaacgtgaatt

SEQ ID NO: 513056 - DNA, 19 bp, Mus musculus
  siRNA target sequence for Rad50 (NM_009012.1,1692-1710).
gctgaacgtgaattaagca

SEQ ID NO: 513057 - DNA, 19 bp, Mus musculus
  siRNA target sequence for Rad50 (NM_009012.1,1693-1711).
ctgaacgtgaattaagcaa

SEQ ID NO: 513058 - DNA, 19 bp, Mus musculus
  siRNA target sequence for Rad50 (NM_009012.1,1738-1756).
ccctaaaagcagaggtaat

SEQ ID NO: 513059 - DNA, 19 bp, Mus musculus
  siRNA target sequence for Rad50 (NM_009012.1,1751-1769).
ggtaatgagcctccaaaat

SEQ ID NO: 513060 - DNA, 19 bp, Mus musculus
  siRNA target sequence for Rad50 (NM_009012.1,1757-1775).
gagcctccaaaatgagaaa

SEQ ID NO: 513061 - DNA, 19 bp, Mus musculus
  siRNA target sequence for Rad50 (NM_009012.1,1818-1836).
gagcagttaaaccatcata

SEQ ID NO: 513062 - DNA, 19 bp, Mus musculus
  siRNA target sequence for Rad50 (NM_009012.1,1823-1841).
gttaaaccatcatacaaca

SEQ ID NO: 513063 - DNA, 19 bp, Mus musculus
  siRNA target sequence for Rad50 (NM_009012.1,1887-1905).
gatgaacagatcagaaaaa

SEQ ID NO: 513064 - DNA, 19 bp, Mus musculus
  siRNA target sequence for Rad50 (NM_009012.1,1916-1934).
gcacagtgatgaactaact

SEQ ID NO: 513065 - DNA, 19 bp, Mus musculus
  siRNA target sequence for Rad50 (NM_009012.1,1938-1956).
ctgttggggtactttccta

SEQ ID NO: 513066 - DNA, 19 bp, Mus musculus
  siRNA target sequence for Rad50 (NM_009012.1,1943-1961).
ggggtactttcctaacaaa

SEQ ID NO: 513067 - DNA, 19 bp, Mus musculus
  siRNA target sequence for Rad50 (NM_009012.1,1944-1962).
gggtactttcctaacaaaa

SEQ ID NO: 513068 - DNA, 19 bp, Mus musculus
  siRNA target sequence for Rad50 (NM_009012.1,1945-1963).
ggtactttcctaacaaaaa

SEQ ID NO: 513069 - DNA, 19 bp, Mus musculus
  siRNA target sequence for Rad50 (NM_009012.1,1971-1989).
gaagactggcttcattcta

SEQ ID NO: 513070 - DNA, 19 bp, Mus musculus
  siRNA target sequence for Rad50 (NM_009012.1,2020-2038).
gacttgccaaactgaacaa

SEQ ID NO: 513071 - DNA, 19 bp, Mus musculus
  siRNA target sequence for Rad50 (NM_009012.1,2113-2131).
gttatgaagataagctatt

SEQ ID NO: 513072 - DNA, 19 bp, Mus musculus
  siRNA target sequence for Rad50 (NM_009012.1,2140-2158).
gtggtagccaagatttgga

SEQ ID NO: 513073 - DNA, 19 bp, Mus musculus
  siRNA target sequence for Rad50 (NM_009012.1,2142-2160).
ggtagccaagatttggaaa

SEQ ID NO: 513074 - DNA, 19 bp, Mus musculus
  siRNA target sequence for Rad50 (NM_009012.1,2146-2164).
gccaagatttggaaagtga

SEQ ID NO: 513075 - DNA, 19 bp, Mus musculus
  siRNA target sequence for Rad50 (NM_009012.1,2161-2179).
gtgatttgggcagacttaa

SEQ ID NO: 513076 - DNA, 19 bp, Mus musculus
  siRNA target sequence for Rad50 (NM_009012.1,2361-2379).
cttgctccagataaactca

SEQ ID NO: 513077 - DNA, 19 bp, Mus musculus
  siRNA target sequence for Rad50 (NM_009012.1,2383-2401).
caacagaatcggaactgaa

SEQ ID NO: 513078 - DNA, 19 bp, Mus musculus
  siRNA target sequence for Rad50 (NM_009012.1,2388-2406).
gaatcggaactgaagaaaa

SEQ ID NO: 513079 - DNA, 19 bp, Mus musculus
  siRNA target sequence for Rad50 (NM_009012.1,2441-2459).
gcccgtgaggcaaagcata

SEQ ID NO: 513080 - DNA, 19 bp, Mus musculus
  siRNA target sequence for Rad50 (NM_009012.1,2442-2460).
cccgtgaggcaaagcataa

SEQ ID NO: 513081 - DNA, 19 bp, Mus musculus
  siRNA target sequence for Rad50 (NM_009012.1,2443-2461).
ccgtgaggcaaagcataat

SEQ ID NO: 513082 - DNA, 19 bp, Mus musculus
  siRNA target sequence for Rad50 (NM_009012.1,2444-2462).
cgtgaggcaaagcataatt

SEQ ID NO: 513083 - DNA, 19 bp, Mus musculus
  siRNA target sequence for Rad50 (NM_009012.1,2498-2516).
ccgactacagagtgtcaat

SEQ ID NO: 513084 - DNA, 19 bp, Mus musculus
  siRNA target sequence for Rad50 (NM_009012.1,2499-2517).
cgactacagagtgtcaata

SEQ ID NO: 513085 - DNA, 19 bp, Mus musculus
  siRNA target sequence for Rad50 (NM_009012.1,2507-2525).
gagtgtcaatagagacata

SEQ ID NO: 513086 - DNA, 19 bp, Mus musculus
  siRNA target sequence for Rad50 (NM_009012.1,2509-2527).
gtgtcaatagagacataca

SEQ ID NO: 513087 - DNA, 19 bp, Mus musculus
  siRNA target sequence for Rad50 (NM_009012.1,2522-2540).
catacagcgcctaaagaat

SEQ ID NO: 513088 - DNA, 19 bp, Mus musculus
  siRNA target sequence for Rad50 (NM_009012.1,2526-2544).
cagcgcctaaagaatgaca

SEQ ID NO: 513089 - DNA, 19 bp, Mus musculus
  siRNA target sequence for Rad50 (NM_009012.1,2528-2546).
gcgcctaaagaatgacata

SEQ ID NO: 513090 - DNA, 19 bp, Mus musculus
  siRNA target sequence for Rad50 (NM_009012.1,2560-2578).
cactcttgggtacaataat

SEQ ID NO: 513091 - DNA, 19 bp, Mus musculus
  siRNA target sequence for Rad50 (NM_009012.1,2572-2590).
caataatgcctgaagaaga

SEQ ID NO: 513092 - DNA, 19 bp, Mus musculus
  siRNA target sequence for Rad50 (NM_009012.1,2605-2623).
gcctgacagatgttacaat

SEQ ID NO: 513093 - DNA, 19 bp, Mus musculus
  siRNA target sequence for Rad50 (NM_009012.1,2710-2728).
ggactgtccagcaggttaa

SEQ ID NO: 513094 - DNA, 19 bp, Mus musculus
  siRNA target sequence for Rad50 (NM_009012.1,2760-2778).
gatacagttaccagtaaga

SEQ ID NO: 513095 - DNA, 19 bp, Mus musculus
  siRNA target sequence for Rad50 (NM_009012.1,2764-2782).
cagttaccagtaagattga

SEQ ID NO: 513096 - DNA, 19 bp, Mus musculus
  siRNA target sequence for Rad50 (NM_009012.1,2822-2840).
ccaacacctgaaaagtaaa

SEQ ID NO: 513097 - DNA, 19 bp, Mus musculus
  siRNA target sequence for Rad50 (NM_009012.1,2823-2841).
caacacctgaaaagtaaaa

SEQ ID NO: 513098 - DNA, 19 bp, Mus musculus
  siRNA target sequence for Rad50 (NM_009012.1,2907-2925).
gagcagagtgtggaattat

SEQ ID NO: 513099 - DNA, 19 bp, Mus musculus
  siRNA target sequence for Rad50 (NM_009012.1,2926-2944).
ccactgaagtccagtcttt

SEQ ID NO: 513100 - DNA, 19 bp, Mus musculus
  siRNA target sequence for Rad50 (NM_009012.1,2960-2978).
ggatgctaaagaacaaata

SEQ ID NO: 513101 - DNA, 19 bp, Mus musculus
  siRNA target sequence for Rad50 (NM_009012.1,3105-3123).
catggttacatgaaagaca

SEQ ID NO: 513102 - DNA, 19 bp, Mus musculus
  siRNA target sequence for Rad50 (NM_009012.1,3109-3127).
gttacatgaaagacataga

SEQ ID NO: 513103 - DNA, 19 bp, Mus musculus
  siRNA target sequence for Rad50 (NM_009012.1,3247-3265).
gaaccatgaggcaagacat

SEQ ID NO: 513104 - DNA, 19 bp, Mus musculus
  siRNA target sequence for Rad50 (NM_009012.1,3263-3281).
catcgacacacagaagata

SEQ ID NO: 513105 - DNA, 19 bp, Mus musculus
  siRNA target sequence for Rad50 (NM_009012.1,3297-3315).
caggataaccttacactaa

SEQ ID NO: 513106 - DNA, 19 bp, Mus musculus
  siRNA target sequence for Rad50 (NM_009012.1,3322-3340).
ggagagatgaactaaaaga

SEQ ID NO: 513107 - DNA, 19 bp, Mus musculus
  siRNA target sequence for Rad50 (NM_009012.1,3325-3343).
gagatgaactaaaagaagt

SEQ ID NO: 513108 - DNA, 19 bp, Mus musculus
  siRNA target sequence for Rad50 (NM_009012.1,3461-3479).
ggcattggggcgtcagaaa

SEQ ID NO: 513109 - DNA, 19 bp, Mus musculus
  siRNA target sequence for Rad50 (NM_009012.1,3489-3507).
gacgaaattcttcacttta

SEQ ID NO: 513110 - DNA, 19 bp, Mus musculus
  siRNA target sequence for Rad50 (NM_009012.1,3491-3509).
cgaaattcttcactttaaa

SEQ ID NO: 513111 - DNA, 19 bp, Mus musculus
  siRNA target sequence for Rad50 (NM_009012.1,3534-3552).
cgggatgccgaggaaaagt

SEQ ID NO: 513112 - DNA, 19 bp, Mus musculus
  siRNA target sequence for Rad50 (NM_009012.1,3535-3553).
gggatgccgaggaaaagta

SEQ ID NO: 513113 - DNA, 19 bp, Mus musculus
  siRNA target sequence for Rad50 (NM_009012.1,3537-3555).
gatgccgaggaaaagtaca

SEQ ID NO: 513114 - DNA, 19 bp, Mus musculus
  siRNA target sequence for Rad50 (NM_009012.1,3603-3621).
ctcgacatctactacaaga

SEQ ID NO: 513115 - DNA, 19 bp, Mus musculus
  siRNA target sequence for Rad50 (NM_009012.1,3627-3645).
gaccaagcaattatgaaat

SEQ ID NO: 513116 - DNA, 19 bp, Mus musculus
  siRNA target sequence for Rad50 (NM_009012.1,3633-3651).
gcaattatgaaatttcaca

SEQ ID NO: 513117 - DNA, 19 bp, Mus musculus
  siRNA target sequence for Rad50 (NM_009012.1,3708-3726).
cgtgggcaagatattgaat

SEQ ID NO: 513118 - DNA, 19 bp, Mus musculus
  siRNA target sequence for Rad50 (NM_009012.1,3713-3731).
gcaagatattgaatacata

SEQ ID NO: 513119 - DNA, 19 bp, Mus musculus
  siRNA target sequence for Rad50 (NM_009012.1,3723-3741).
gaatacatagaaattcgat

SEQ ID NO: 513120 - DNA, 19 bp, Mus musculus
  siRNA target sequence for Rad50 (NM_009012.1,3728-3746).
catagaaattcgatctgat

SEQ ID NO: 513121 - DNA, 19 bp, Mus musculus
  siRNA target sequence for Rad50 (NM_009012.1,3738-3756).
cgatctgatgctgatgaaa

SEQ ID NO: 513122 - DNA, 19 bp, Mus musculus
  siRNA target sequence for Rad50 (NM_009012.1,3932-3950).
ggatgagccgacaacaaat

SEQ ID NO: 513123 - DNA, 19 bp, Mus musculus
  siRNA target sequence for Rad50 (NM_009012.1,3989-4007).
ggttgagatcataaaaagt

SEQ ID NO: 513124 - DNA, 19 bp, Mus musculus
  siRNA target sequence for Rad50 (NM_009012.1,4028-4046).
ccaacttctggtaatcact

SEQ ID NO: 513125 - DNA, 19 bp, Mus musculus
  siRNA target sequence for Rad50 (NM_009012.1,4070-4088).
cttagggcgatctgagtat

SEQ ID NO: 513126 - DNA, 19 bp, Mus musculus
  siRNA target sequence for Raf1 (NM_029780.1,386-404).
catctcccctaccattgtt

SEQ ID NO: 513127 - DNA, 19 bp, Mus musculus
  siRNA target sequence for Raf1 (NM_029780.1,441-459).
ggcaagctcacggattctt

SEQ ID NO: 513128 - DNA, 19 bp, Mus musculus
  siRNA target sequence for Raf1 (NM_029780.1,443-461).
caagctcacggattcttct

SEQ ID NO: 513129 - DNA, 19 bp, Mus musculus
  siRNA target sequence for Raf1 (NM_029780.1,447-465).
ctcacggattcttctaaga

SEQ ID NO: 513130 - DNA, 19 bp, Mus musculus
  siRNA target sequence for Raf1 (NM_029780.1,449-467).
cacggattcttctaagaca

SEQ ID NO: 513131 - DNA, 19 bp, Mus musculus
  siRNA target sequence for Raf1 (NM_029780.1,460-478).
ctaagacaagcaatactat

SEQ ID NO: 513132 - DNA, 19 bp, Mus musculus
  siRNA target sequence for Raf1 (NM_029780.1,513-531).
gtcaatgtgcggaatggaa

SEQ ID NO: 513133 - DNA, 19 bp, Mus musculus
  siRNA target sequence for Raf1 (NM_029780.1,609-627).
ctccaggaacacaaaggta

SEQ ID NO: 513134 - DNA, 19 bp, Mus musculus
  siRNA target sequence for Raf1 (NM_029780.1,653-671).
cgatgccgcctctctgatt

SEQ ID NO: 513135 - DNA, 19 bp, Mus musculus
  siRNA target sequence for Raf1 (NM_029780.1,683-701).
gcaagtggattttttggat

SEQ ID NO: 513136 - DNA, 19 bp, Mus musculus
  siRNA target sequence for Raf1 (NM_029780.1,760-778).
gtgacatctgtcagaagtt

SEQ ID NO: 513137 - DNA, 19 bp, Mus musculus
  siRNA target sequence for Raf1 (NM_029780.1,776-794).
gttcctgctaaatggattt

SEQ ID NO: 513138 - DNA, 19 bp, Mus musculus
  siRNA target sequence for Raf1 (NM_029780.1,779-797).
cctgctaaatggatttcga

SEQ ID NO: 513139 - DNA, 19 bp, Mus musculus
  siRNA target sequence for Raf1 (NM_029780.1,780-798).
ctgctaaatggatttcgat

SEQ ID NO: 513140 - DNA, 19 bp, Mus musculus
  siRNA target sequence for Raf1 (NM_029780.1,835-853).
gcaccaaagtacctactat

SEQ ID NO: 513141 - DNA, 19 bp, Mus musculus
  siRNA target sequence for Raf1 (NM_029780.1,854-872).
gtgtgtggactggagtaat

SEQ ID NO: 513142 - DNA, 19 bp, Mus musculus
  siRNA target sequence for Raf1 (NM_029780.1,879-897).
cagctcttgctgtttccaa

SEQ ID NO: 513143 - DNA, 19 bp, Mus musculus
  siRNA target sequence for Raf1 (NM_029780.1,882-900).
ctcttgctgtttccaaatt

SEQ ID NO: 513144 - DNA, 19 bp, Mus musculus
  siRNA target sequence for Raf1 (NM_029780.1,947-965).
gcgtcggatgcgagaatct

SEQ ID NO: 513145 - DNA, 19 bp, Mus musculus
  siRNA target sequence for Raf1 (NM_029780.1,949-967).
gtcggatgcgagaatctgt

SEQ ID NO: 513146 - DNA, 19 bp, Mus musculus
  siRNA target sequence for Raf1 (NM_029780.1,951-969).
cggatgcgagaatctgttt

SEQ ID NO: 513147 - DNA, 19 bp, Mus musculus
  siRNA target sequence for Raf1 (NM_029780.1,982-1000).
ctagttcccagcacagata

SEQ ID NO: 513148 - DNA, 19 bp, Mus musculus
  siRNA target sequence for Raf1 (NM_029780.1,1009-1027).
cccatgccttcactttcaa

SEQ ID NO: 513149 - DNA, 19 bp, Mus musculus
  siRNA target sequence for Raf1 (NM_029780.1,1130-1148).
gatgattgaggatgcaatt

SEQ ID NO: 513150 - DNA, 19 bp, Mus musculus
  siRNA target sequence for Raf1 (NM_029780.1,1133-1151).
gattgaggatgcaattcga

SEQ ID NO: 513151 - DNA, 19 bp, Mus musculus
  siRNA target sequence for Raf1 (NM_029780.1,1267-1285).
gatctgggacccaggaaaa

SEQ ID NO: 513152 - DNA, 19 bp, Mus musculus
  siRNA target sequence for Raf1 (NM_029780.1,1319-1337).
gagttattactgggaaata

SEQ ID NO: 513153 - DNA, 19 bp, Mus musculus
  siRNA target sequence for Raf1 (NM_029780.1,1413-1431).
ggagatgttgcagtaaaga

SEQ ID NO: 513154 - DNA, 19 bp, Mus musculus
  siRNA target sequence for Raf1 (NM_029780.1,1477-1495).
ggaacgaggtggctgtttt

SEQ ID NO: 513155 - DNA, 19 bp, Mus musculus
  siRNA target sequence for Raf1 (NM_029780.1,1497-1515).
cgcaaaacacggcatgtta

SEQ ID NO: 513156 - DNA, 19 bp, Mus musculus
  siRNA target sequence for Raf1 (NM_029780.1,1498-1516).
gcaaaacacggcatgttaa

SEQ ID NO: 513157 - DNA, 19 bp, Mus musculus
  siRNA target sequence for Raf1 (NM_029780.1,1625-1643).
ccagatgttccagctaatt

SEQ ID NO: 513158 - DNA, 19 bp, Mus musculus
  siRNA target sequence for Raf1 (NM_029780.1,1663-1681).
ctcagggaatggactattt

SEQ ID NO: 513159 - DNA, 19 bp, Mus musculus
  siRNA target sequence for Raf1 (NM_029780.1,1667-1685).
gggaatggactatttgcat

SEQ ID NO: 513160 - DNA, 19 bp, Mus musculus
  siRNA target sequence for Raf1 (NM_029780.1,1709-1727).
catgaaatccaacaatata

SEQ ID NO: 513161 - DNA, 19 bp, Mus musculus
  siRNA target sequence for Raf1 (NM_029780.1,1742-1760).
cctcacggtgaaaattgga

SEQ ID NO: 513162 - DNA, 19 bp, Mus musculus
  siRNA target sequence for Raf1 (NM_029780.1,1798-1816).
gttctcagcaggttgaaca

SEQ ID NO: 513163 - DNA, 19 bp, Mus musculus
  siRNA target sequence for Raf1 (NM_029780.1,1944-1962).
ccctacgcccacatcaaca

SEQ ID NO: 513164 - DNA, 19 bp, Mus musculus
  siRNA target sequence for Raf1 (NM_029780.1,1986-2004).
gtaggccgtgggtatgcat

SEQ ID NO: 513165 - DNA, 19 bp, Mus musculus
  siRNA target sequence for Raf1 (NM_029780.1,2136-2154).
cactctctgccgaaaatca

SEQ ID NO: 513166 - DNA, 19 bp, Mus musculus
  siRNA target sequence for Raf1 (NM_029780.1,2211-2229).
gcttgcacgctgactacat

SEQ ID NO: 513167 - DNA, 19 bp, Mus musculus
  siRNA target sequence for Rage (NM_011973.1,223-241).
ggggacgttttctgaagtt

SEQ ID NO: 513168 - DNA, 19 bp, Mus musculus
  siRNA target sequence for Rage (NM_011973.1,224-242).
gggacgttttctgaagtta

SEQ ID NO: 513169 - DNA, 19 bp, Mus musculus
  siRNA target sequence for Rage (NM_011973.1,259-277).
gagagatgggaattactat

SEQ ID NO: 513170 - DNA, 19 bp, Mus musculus
  siRNA target sequence for Rage (NM_011973.1,380-398).
gcactgcacgaagtagttt

SEQ ID NO: 513171 - DNA, 19 bp, Mus musculus
  siRNA target sequence for Rage (NM_011973.1,381-399).
cactgcacgaagtagtttt

SEQ ID NO: 513172 - DNA, 19 bp, Mus musculus
  siRNA target sequence for Rage (NM_011973.1,392-410).
gtagtttttgacagaaaat

SEQ ID NO: 513173 - DNA, 19 bp, Mus musculus
  siRNA target sequence for Rage (NM_011973.1,413-431).
ggttctcttgcactaatat

SEQ ID NO: 513174 - DNA, 19 bp, Mus musculus
  siRNA target sequence for Rage (NM_011973.1,417-435).
ctcttgcactaatatgtga

SEQ ID NO: 513175 - DNA, 19 bp, Mus musculus
  siRNA target sequence for Rage (NM_011973.1,422-440).
gcactaatatgtgaactta

SEQ ID NO: 513176 - DNA, 19 bp, Mus musculus
  siRNA target sequence for Rage (NM_011973.1,423-441).
cactaatatgtgaacttat

SEQ ID NO: 513177 - DNA, 19 bp, Mus musculus
  siRNA target sequence for Rage (NM_011973.1,432-450).
gtgaacttatggacatgaa

SEQ ID NO: 513178 - DNA, 19 bp, Mus musculus
  siRNA target sequence for Rage (NM_011973.1,434-452).
gaacttatggacatgaata

SEQ ID NO: 513179 - DNA, 19 bp, Mus musculus
  siRNA target sequence for Rage (NM_011973.1,470-488).
gggagaagacacccattat

SEQ ID NO: 513180 - DNA, 19 bp, Mus musculus
  siRNA target sequence for Rage (NM_011973.1,483-501).
cattatcagagaaaaagat

SEQ ID NO: 513181 - DNA, 19 bp, Mus musculus
  siRNA target sequence for Rage (NM_011973.1,578-596).
ccggagaatatcctagtaa

SEQ ID NO: 513182 - DNA, 19 bp, Mus musculus
  siRNA target sequence for Rage (NM_011973.1,579-597).
cggagaatatcctagtaaa

SEQ ID NO: 513183 - DNA, 19 bp, Mus musculus
  siRNA target sequence for Rage (NM_011973.1,628-646).
gtcatgccggagtgtctat

SEQ ID NO: 513184 - DNA, 19 bp, Mus musculus
  siRNA target sequence for Rage (NM_011973.1,633-651).
gccggagtgtctattccaa

SEQ ID NO: 513185 - DNA, 19 bp, Mus musculus
  siRNA target sequence for Rage (NM_011973.1,707-725).
ctcaccgacgggttctaca

SEQ ID NO: 513186 - DNA, 19 bp, Mus musculus
  siRNA target sequence for Rage (NM_011973.1,711-729).
ccgacgggttctacacata

SEQ ID NO: 513187 - DNA, 19 bp, Mus musculus
  siRNA target sequence for Rage (NM_011973.1,713-731).
gacgggttctacacataca

SEQ ID NO: 513188 - DNA, 19 bp, Mus musculus
  siRNA target sequence for Rage (NM_011973.1,747-765).
gcgctggctgcgtgttcta

SEQ ID NO: 513189 - DNA, 19 bp, Mus musculus
  siRNA target sequence for Rage (NM_011973.1,814-832).
ccagatctcaaaaatccat

SEQ ID NO: 513190 - DNA, 19 bp, Mus musculus
  siRNA target sequence for Rage (NM_011973.1,854-872).
cagaagaccctcactaagt

SEQ ID NO: 513191 - DNA, 19 bp, Mus musculus
  siRNA target sequence for Rage (NM_011973.1,859-877).
gaccctcactaagttcaaa

SEQ ID NO: 513192 - DNA, 19 bp, Mus musculus
  siRNA target sequence for Rage (NM_011973.1,861-879).
ccctcactaagttcaaaca

SEQ ID NO: 513193 - DNA, 19 bp, Mus musculus
  siRNA target sequence for Rage (NM_011973.1,878-896).
cagtcgagagctatgagtt

SEQ ID NO: 513194 - DNA, 19 bp, Mus musculus
  siRNA target sequence for Rage (NM_011973.1,880-898).
gtcgagagctatgagtttt

SEQ ID NO: 513195 - DNA, 19 bp, Mus musculus
  siRNA target sequence for Rage (NM_011973.1,882-900).
cgagagctatgagttttga

SEQ ID NO: 513196 - DNA, 19 bp, Mus musculus
  siRNA target sequence for Rage (NM_011973.1,930-948).
ctctactgacagccaattt

SEQ ID NO: 513197 - DNA, 19 bp, Mus musculus
  siRNA target sequence for Rage (NM_011973.1,1023-1041).
cccttcagcacccctattt

SEQ ID NO: 513198 - DNA, 19 bp, Mus musculus
  siRNA target sequence for Rage (NM_011973.1,1258-1276).
gaccaaactgtcatcatgt

SEQ ID NO: 513199 - DNA, 19 bp, Mus musculus
  siRNA target sequence for Rage (NM_011973.1,1303-1321).
gggcactggagcaaatgga

SEQ ID NO: 513200 - DNA, 19 bp, Mus musculus
  siRNA target sequence for Rars (NM_025936.1,152-170).
cagttacgagaagaaaatt

SEQ ID NO: 513201 - DNA, 19 bp, Mus musculus
  siRNA target sequence for Rars (NM_025936.1,258-276).
gccgcctgcaggaagtctt

SEQ ID NO: 513202 - DNA, 19 bp, Mus musculus
  siRNA target sequence for Rars (NM_025936.1,259-277).
ccgcctgcaggaagtcttt

SEQ ID NO: 513203 - DNA, 19 bp, Mus musculus
  siRNA target sequence for Rars (NM_025936.1,286-304).
cattagggctgcatatcca

SEQ ID NO: 513204 - DNA, 19 bp, Mus musculus
  siRNA target sequence for Rars (NM_025936.1,348-366).
ccaagtttggagactatca

SEQ ID NO: 513205 - DNA, 19 bp, Mus musculus
  siRNA target sequence for Rars (NM_025936.1,356-374).
ggagactatcagtgtaata

SEQ ID NO: 513206 - DNA, 19 bp, Mus musculus
  siRNA target sequence for Rars (NM_025936.1,375-393).
gtgccatgggtatttctca

SEQ ID NO: 513207 - DNA, 19 bp, Mus musculus
  siRNA target sequence for Rars (NM_025936.1,431-449).
gaaatcgcagaaaacatta

SEQ ID NO: 513208 - DNA, 19 bp, Mus musculus
  siRNA target sequence for Rars (NM_025936.1,436-454).
cgcagaaaacattaccaaa

SEQ ID NO: 513209 - DNA, 19 bp, Mus musculus
  siRNA target sequence for Rars (NM_025936.1,451-469).
caaacacctgccgaacaat

SEQ ID NO: 513210 - DNA, 19 bp, Mus musculus
  siRNA target sequence for Rars (NM_025936.1,457-475).
cctgccgaacaataaatat

SEQ ID NO: 513211 - DNA, 19 bp, Mus musculus
  siRNA target sequence for Rars (NM_025936.1,458-476).
ctgccgaacaataaatata

SEQ ID NO: 513212 - DNA, 19 bp, Mus musculus
  siRNA target sequence for Rars (NM_025936.1,460-478).
gccgaacaataaatatatt

SEQ ID NO: 513213 - DNA, 19 bp, Mus musculus
  siRNA target sequence for Rars (NM_025936.1,601-619).
gaaggttatagttgacttt

SEQ ID NO: 513214 - DNA, 19 bp, Mus musculus
  siRNA target sequence for Rars (NM_025936.1,658-676).
cctcaggtcaaccatcata

SEQ ID NO: 513215 - DNA, 19 bp, Mus musculus
  siRNA target sequence for Rars (NM_025936.1,691-709).
ccgcctctttgaatttgca

SEQ ID NO: 513216 - DNA, 19 bp, Mus musculus
  siRNA target sequence for Rars (NM_025936.1,711-729).
gatacgatgtgctaaggtt

SEQ ID NO: 513217 - DNA, 19 bp, Mus musculus
  siRNA target sequence for Rars (NM_025936.1,772-790).
cgctcacctgcaagataaa

SEQ ID NO: 513218 - DNA, 19 bp, Mus musculus
  siRNA target sequence for Rars (NM_025936.1,773-791).
gctcacctgcaagataaat

SEQ ID NO: 513219 - DNA, 19 bp, Mus musculus
  siRNA target sequence for Rars (NM_025936.1,774-792).
ctcacctgcaagataaatt

SEQ ID NO: 513220 - DNA, 19 bp, Mus musculus
  siRNA target sequence for Rars (NM_025936.1,794-812).
ccggattatctgacagttt

SEQ ID NO: 513221 - DNA, 19 bp, Mus musculus
  siRNA target sequence for Rars (NM_025936.1,796-814).
ggattatctgacagtttca

SEQ ID NO: 513222 - DNA, 19 bp, Mus musculus
  siRNA target sequence for Rars (NM_025936.1,805-823).
gacagtttcacctcctatt

SEQ ID NO: 513223 - DNA, 19 bp, Mus musculus
  siRNA target sequence for Rars (NM_025936.1,907-925).
cgttttgctgcagagtaaa

SEQ ID NO: 513224 - DNA, 19 bp, Mus musculus
  siRNA target sequence for Rars (NM_025936.1,964-982).
cgtgtcccgggaagagttt

SEQ ID NO: 513225 - DNA, 19 bp, Mus musculus
  siRNA target sequence for Rars (NM_025936.1,965-983).
gtgtcccgggaagagttta

SEQ ID NO: 513226 - DNA, 19 bp, Mus musculus
  siRNA target sequence for Rars (NM_025936.1,995-1013).
gatgcattggacatcactt

SEQ ID NO: 513227 - DNA, 19 bp, Mus musculus
  siRNA target sequence for Rars (NM_025936.1,998-1016).
gcattggacatcactttaa

SEQ ID NO: 513228 - DNA, 19 bp, Mus musculus
  siRNA target sequence for Rars (NM_025936.1,1004-1022).
gacatcactttaatagaga

SEQ ID NO: 513229 - DNA, 19 bp, Mus musculus
  siRNA target sequence for Rars (NM_025936.1,1023-1041).
gaggagaatccttctatca

SEQ ID NO: 513230 - DNA, 19 bp, Mus musculus
  siRNA target sequence for Rars (NM_025936.1,1047-1065).
ggatgaaggacattgtaaa

SEQ ID NO: 513231 - DNA, 19 bp, Mus musculus
  siRNA target sequence for Rars (NM_025936.1,1127-1145).
gggtgttctgtgccattaa

SEQ ID NO: 513232 - DNA, 19 bp, Mus musculus
  siRNA target sequence for Rars (NM_025936.1,1131-1149).
gttctgtgccattaacgat

SEQ ID NO: 513233 - DNA, 19 bp, Mus musculus
  siRNA target sequence for Rars (NM_025936.1,1136-1154).
gtgccattaacgatagtga

SEQ ID NO: 513234 - DNA, 19 bp, Mus musculus
  siRNA target sequence for Rars (NM_025936.1,1138-1156).
gccattaacgatagtgaaa

SEQ ID NO: 513235 - DNA, 19 bp, Mus musculus
  siRNA target sequence for Rars (NM_025936.1,1139-1157).
ccattaacgatagtgaaat

SEQ ID NO: 513236 - DNA, 19 bp, Mus musculus
  siRNA target sequence for Rars (NM_025936.1,1163-1181).
gggggctatacctatgaca

SEQ ID NO: 513237 - DNA, 19 bp, Mus musculus
  siRNA target sequence for Rars (NM_025936.1,1249-1267).
ggacaatggacaagctata

SEQ ID NO: 513238 - DNA, 19 bp, Mus musculus
  siRNA target sequence for Rars (NM_025936.1,1306-1324).
ctggtatgacccgaaagta

SEQ ID NO: 513239 - DNA, 19 bp, Mus musculus
  siRNA target sequence for Rars (NM_025936.1,1309-1327).
gtatgacccgaaagtaact

SEQ ID NO: 513240 - DNA, 19 bp, Mus musculus
  siRNA target sequence for Rars (NM_025936.1,1333-1351).
gacccacgtgggatttggt

SEQ ID NO: 513241 - DNA, 19 bp, Mus musculus
  siRNA target sequence for Rars (NM_025936.1,1540-1558).
cgccgacctttctcataat

SEQ ID NO: 513242 - DNA, 19 bp, Mus musculus
  siRNA target sequence for Rars (NM_025936.1,1551-1569).
ctcataatcgcctcaatga

SEQ ID NO: 513243 - DNA, 19 bp, Mus musculus
  siRNA target sequence for Rars (NM_025936.1,1553-1571).
cataatcgcctcaatgact

SEQ ID NO: 513244 - DNA, 19 bp, Mus musculus
  siRNA target sequence for Rars (NM_025936.1,1560-1578).
gcctcaatgactacatctt

SEQ ID NO: 513245 - DNA, 19 bp, Mus musculus
  siRNA target sequence for Rars (NM_025936.1,1614-1632).
cagctgcttacctactgta

SEQ ID NO: 513246 - DNA, 19 bp, Mus musculus
  siRNA target sequence for Rars (NM_025936.1,1639-1657).
caccagaatcaggtctatt

SEQ ID NO: 513247 - DNA, 19 bp, Mus musculus
  siRNA target sequence for Rars (NM_025936.1,1662-1680).
gcctcgccaacattgatga

SEQ ID NO: 513248 - DNA, 19 bp, Mus musculus
  siRNA target sequence for Rars (NM_025936.1,1695-1713).
gagccgctcgggaaaccaa

SEQ ID NO: 513249 - DNA, 19 bp, Mus musculus
  siRNA target sequence for Rars (NM_025936.1,1700-1718).
gctcgggaaaccaagatca

SEQ ID NO: 513250 - DNA, 19 bp, Mus musculus
  siRNA target sequence for Rars (NM_025936.1,1701-1719).
ctcgggaaaccaagatcat

SEQ ID NO: 513251 - DNA, 19 bp, Mus musculus
  siRNA target sequence for Rars (NM_025936.1,1770-1788).
ccgagatcctccagaagat

SEQ ID NO: 513252 - DNA, 19 bp, Mus musculus
  siRNA target sequence for Rars (NM_025936.1,1774-1792).
gatcctccagaagatctta

SEQ ID NO: 513253 - DNA, 19 bp, Mus musculus
  siRNA target sequence for Rars (NM_025936.1,1960-1978).
ggccaaggggttcgatata

SEQ ID NO: 513254 - DNA, 19 bp, Mus musculus
  siRNA target sequence for Rars (NM_025936.1,1962-1980).
ccaaggggttcgatatact

SEQ ID NO: 513255 - DNA, 19 bp, Mus musculus
  siRNA target sequence for Rarsl (NM_181406.2,157-175).
cttactagaagacaacaat

SEQ ID NO: 513256 - DNA, 19 bp, Mus musculus
  siRNA target sequence for Rarsl (NM_181406.2,223-241).
gaagcttaagtgtgataca

SEQ ID NO: 513257 - DNA, 19 bp, Mus musculus
  siRNA target sequence for Rarsl (NM_181406.2,260-278).
gctggcccaaggactctaa

SEQ ID NO: 513258 - DNA, 19 bp, Mus musculus
  siRNA target sequence for Rarsl (NM_181406.2,263-281).
ggcccaaggactctaaatt

SEQ ID NO: 513259 - DNA, 19 bp, Mus musculus
  siRNA target sequence for Rarsl (NM_181406.2,264-282).
gcccaaggactctaaattt

SEQ ID NO: 513260 - DNA, 19 bp, Mus musculus
  siRNA target sequence for Rarsl (NM_181406.2,266-284).
ccaaggactctaaatttca

SEQ ID NO: 513261 - DNA, 19 bp, Mus musculus
  siRNA target sequence for Rarsl (NM_181406.2,267-285).
caaggactctaaatttcaa

SEQ ID NO: 513262 - DNA, 19 bp, Mus musculus
  siRNA target sequence for Rarsl (NM_181406.2,311-329).
gcagtattgcaacaagtta

SEQ ID NO: 513263 - DNA, 19 bp, Mus musculus
  siRNA target sequence for Rarsl (NM_181406.2,330-348).
ctgaagatggctgtaaata

SEQ ID NO: 513264 - DNA, 19 bp, Mus musculus
  siRNA target sequence for Rarsl (NM_181406.2,350-368).
gggttaaaaagtgaacttt

SEQ ID NO: 513265 - DNA, 19 bp, Mus musculus
  siRNA target sequence for Rarsl (NM_181406.2,401-419).
gaattcagttcacctaata

SEQ ID NO: 513266 - DNA, 19 bp, Mus musculus
  siRNA target sequence for Rarsl (NM_181406.2,413-431).
cctaatattgccaaaaaat

SEQ ID NO: 513267 - DNA, 19 bp, Mus musculus
  siRNA target sequence for Rarsl (NM_181406.2,449-467).
cgctccaccatcataggaa

SEQ ID NO: 513268 - DNA, 19 bp, Mus musculus
  siRNA target sequence for Rarsl (NM_181406.2,450-468).
gctccaccatcataggaaa

SEQ ID NO: 513269 - DNA, 19 bp, Mus musculus
  siRNA target sequence for Rarsl (NM_181406.2,498-516).
gacatcaagtaacaagaat

SEQ ID NO: 513270 - DNA, 19 bp, Mus musculus
  siRNA target sequence for Rarsl (NM_181406.2,688-706).
gttcttccaccgactagaa

SEQ ID NO: 513271 - DNA, 19 bp, Mus musculus
  siRNA target sequence for Rarsl (NM_181406.2,745-763).
ccgggacttgagcattgaa

SEQ ID NO: 513272 - DNA, 19 bp, Mus musculus
  siRNA target sequence for Rarsl (NM_181406.2,784-802).
gcgtcttggaatatacttt

SEQ ID NO: 513273 - DNA, 19 bp, Mus musculus
  siRNA target sequence for Rarsl (NM_181406.2,806-824).
gaatattcaggagaatcat

SEQ ID NO: 513274 - DNA, 19 bp, Mus musculus
  siRNA target sequence for Rarsl (NM_181406.2,897-915).
gaaatgttgtagtagatct

SEQ ID NO: 513275 - DNA, 19 bp, Mus musculus
  siRNA target sequence for Rarsl (NM_181406.2,946-964).
cactgtgatgcgaagtgat

SEQ ID NO: 513276 - DNA, 19 bp, Mus musculus
  siRNA target sequence for Rarsl (NM_181406.2,1007-1025).
catcgcatggacaagtaca

SEQ ID NO: 513277 - DNA, 19 bp, Mus musculus
  siRNA target sequence for Rarsl (NM_181406.2,1010-1028).
cgcatggacaagtacaatt

SEQ ID NO: 513278 - DNA, 19 bp, Mus musculus
  siRNA target sequence for Rarsl (NM_181406.2,1011-1029).
gcatggacaagtacaattt

SEQ ID NO: 513279 - DNA, 19 bp, Mus musculus
  siRNA target sequence for Rarsl (NM_181406.2,1201-1219).
cttaaatgaggttcaatca

SEQ ID NO: 513280 - DNA, 19 bp, Mus musculus
  siRNA target sequence for Rarsl (NM_181406.2,1446-1464).
gatgtgggtatctcaatga

SEQ ID NO: 513281 - DNA, 19 bp, Mus musculus
  siRNA target sequence for Rarsl (NM_181406.2,1487-1505).
gagccgcagtctgtttcaa

SEQ ID NO: 513282 - DNA, 19 bp, Mus musculus
  siRNA target sequence for Rarsl (NM_181406.2,1489-1507).
gccgcagtctgtttcaatt

SEQ ID NO: 513283 - DNA, 19 bp, Mus musculus
  siRNA target sequence for Rarsl (NM_181406.2,1582-1600).
ctacctcctaactctaagt

SEQ ID NO: 513284 - DNA, 19 bp, Mus musculus
  siRNA target sequence for Rarsl (NM_181406.2,1607-1625).
gcagctgtggcacataaaa

SEQ ID NO: 513285 - DNA, 19 bp, Mus musculus
  siRNA target sequence for Rarsl (NM_181406.2,1699-1717).
cttagccaatggaatgaaa

SEQ ID NO: 513286 - DNA, 19 bp, Mus musculus
  siRNA target sequence for Rarsl (NM_181406.2,1704-1722).
ccaatggaatgaaacttct

SEQ ID NO: 513287 - DNA, 19 bp, Mus musculus
  siRNA target sequence for Rarsl (NM_181406.2,1705-1723).
caatggaatgaaacttctt

SEQ ID NO: 513288 - DNA, 19 bp, Mus musculus
  siRNA target sequence for Rbt1 (NM_133210.2,196-214).
gcaggcacgtccttatcca

SEQ ID NO: 513289 - DNA, 19 bp, Mus musculus
  siRNA target sequence for Rbt1 (NM_133210.2,284-302).
cttcctaggtgaagaagat

SEQ ID NO: 513290 - DNA, 19 bp, Mus musculus
  siRNA target sequence for Rbt1 (NM_133210.2,288-306).
ctaggtgaagaagatttct

SEQ ID NO: 513291 - DNA, 19 bp, Mus musculus
  siRNA target sequence for Rbt1 (NM_133210.2,297-315).
gaagatttctccctatcta

SEQ ID NO: 513292 - DNA, 19 bp, Mus musculus
  siRNA target sequence for Rbt1 (NM_133210.2,394-412).
cgagtccccagaatgagat

SEQ ID NO: 513293 - DNA, 19 bp, Mus musculus
  siRNA target sequence for Rbt1 (NM_133210.2,424-442).
ctgatcctgtattcttaga

SEQ ID NO: 513294 - DNA, 19 bp, Mus musculus
  siRNA target sequence for Rbt1 (NM_133210.2,505-523).
catctgcggtggaaaagga

SEQ ID NO: 513295 - DNA, 19 bp, Mus musculus
  siRNA target sequence for Rent1 (NM_030680.1,354-372).
cagggctccgagttcgaat

SEQ ID NO: 513296 - DNA, 19 bp, Mus musculus
  siRNA target sequence for Rent1 (NM_030680.1,357-375).
ggctccgagttcgaattca

SEQ ID NO: 513297 - DNA, 19 bp, Mus musculus
  siRNA target sequence for Rent1 (NM_030680.1,470-488).
ccagctcgacgcacaagtt

SEQ ID NO: 513298 - DNA, 19 bp, Mus musculus
  siRNA target sequence for Rent1 (NM_030680.1,579-597).
gaagaggacacatactaca

SEQ ID NO: 513299 - DNA, 19 bp, Mus musculus
  siRNA target sequence for Rent1 (NM_030680.1,612-630).
gtccacgcctgcagttact

SEQ ID NO: 513300 - DNA, 19 bp, Mus musculus
  siRNA target sequence for Rent1 (NM_030680.1,648-666).
gcctgcgtggtttactgta

SEQ ID NO: 513301 - DNA, 19 bp, Mus musculus
  siRNA target sequence for Rent1 (NM_030680.1,650-668).
ctgcgtggtttactgtaat

SEQ ID NO: 513302 - DNA, 19 bp, Mus musculus
  siRNA target sequence for Rent1 (NM_030680.1,654-672).
gtggtttactgtaatacca

SEQ ID NO: 513303 - DNA, 19 bp, Mus musculus
  siRNA target sequence for Rent1 (NM_030680.1,686-704).
ctgcaatggccgaggaaat

SEQ ID NO: 513304 - DNA, 19 bp, Mus musculus
  siRNA target sequence for Rent1 (NM_030680.1,729-747).
cacctcgtgagggcaaaat

SEQ ID NO: 513305 - DNA, 19 bp, Mus musculus
  siRNA target sequence for Rent1 (NM_030680.1,732-750).
ctcgtgagggcaaaatgca

SEQ ID NO: 513306 - DNA, 19 bp, Mus musculus
  siRNA target sequence for Rent1 (NM_030680.1,1150-1168).
cttaccagtaccagaacat

SEQ ID NO: 513307 - DNA, 19 bp, Mus musculus
  siRNA target sequence for Rent1 (NM_030680.1,1252-1270).
gggacctgggccttaacaa

SEQ ID NO: 513308 - DNA, 19 bp, Mus musculus
  siRNA target sequence for Rent1 (NM_030680.1,1254-1272).
gacctgggccttaacaaga

SEQ ID NO: 513309 - DNA, 19 bp, Mus musculus
  siRNA target sequence for Rent1 (NM_030680.1,1337-1355).
gatctgtctgcggtacaaa

SEQ ID NO: 513310 - DNA, 19 bp, Mus musculus
  siRNA target sequence for Rent1 (NM_030680.1,1381-1399).
ggattggccacgtcatcaa

SEQ ID NO: 513311 - DNA, 19 bp, Mus musculus
  siRNA target sequence for Rent1 (NM_030680.1,1397-1415).
caaggttcctgataattat

SEQ ID NO: 513312 - DNA, 19 bp, Mus musculus
  siRNA target sequence for Rent1 (NM_030680.1,1400-1418).
ggttcctgataattatggt

SEQ ID NO: 513313 - DNA, 19 bp, Mus musculus
  siRNA target sequence for Rent1 (NM_030680.1,1488-1506).
gattttgtgtggaagtcaa

SEQ ID NO: 513314 - DNA, 19 bp, Mus musculus
  siRNA target sequence for Rent1 (NM_030680.1,1496-1514).
gtggaagtcaacctctttt

SEQ ID NO: 513315 - DNA, 19 bp, Mus musculus
  siRNA target sequence for Rent1 (NM_030680.1,1756-1774).
catcagccactattgtcta

SEQ ID NO: 513316 - DNA, 19 bp, Mus musculus
  siRNA target sequence for Rent1 (NM_030680.1,2063-2081).
gagagaacttctcatgaat

SEQ ID NO: 513317 - DNA, 19 bp, Mus musculus
  siRNA target sequence for Rent1 (NM_030680.1,2382-2400).
gcctttccgtccaacatct

SEQ ID NO: 513318 - DNA, 19 bp, Mus musculus
  siRNA target sequence for Rent1 (NM_030680.1,2383-2401).
cctttccgtccaacatctt

SEQ ID NO: 513319 - DNA, 19 bp, Mus musculus
  siRNA target sequence for Rent1 (NM_030680.1,2433-2451).
gcagcggatcgtgtcaaaa

SEQ ID NO: 513320 - DNA, 19 bp, Mus musculus
  siRNA target sequence for Rent1 (NM_030680.1,2434-2452).
cagcggatcgtgtcaaaaa

SEQ ID NO: 513321 - DNA, 19 bp, Mus musculus
  siRNA target sequence for Rent1 (NM_030680.1,2478-2496).
cctgacaagcctatgttct

SEQ ID NO: 513322 - DNA, 19 bp, Mus musculus
  siRNA target sequence for Rent1 (NM_030680.1,2479-2497).
ctgacaagcctatgttctt

SEQ ID NO: 513323 - DNA, 19 bp, Mus musculus
  siRNA target sequence for Rent1 (NM_030680.1,2656-2674).
cttacttggtgcagtacat

SEQ ID NO: 513324 - DNA, 19 bp, Mus musculus
  siRNA target sequence for Rent1 (NM_030680.1,2796-2814).
cagggcattgggttcctaa

SEQ ID NO: 513325 - DNA, 19 bp, Mus musculus
  siRNA target sequence for Rent1 (NM_030680.1,2800-2818).
gcattgggttcctaaacga

SEQ ID NO: 513326 - DNA, 19 bp, Mus musculus
  siRNA target sequence for Rent1 (NM_030680.1,2851-2869).
caagatatggcgtgatcat

SEQ ID NO: 513327 - DNA, 19 bp, Mus musculus
  siRNA target sequence for Rent1 (NM_030680.1,2854-2872).
gatatggcgtgatcattgt

SEQ ID NO: 513328 - DNA, 19 bp, Mus musculus
  siRNA target sequence for Rent1 (NM_030680.1,2923-2941).
gctactacaaggaacagaa

SEQ ID NO: 513329 - DNA, 19 bp, Mus musculus
  siRNA target sequence for Rent1 (NM_030680.1,2993-3011).
cagcaagcctcgcaaactt

SEQ ID NO: 513330 - DNA, 19 bp, Mus musculus
  siRNA target sequence for Rent1 (NM_030680.1,2995-3013).
gcaagcctcgcaaacttgt

SEQ ID NO: 513331 - DNA, 19 bp, Mus musculus
  siRNA target sequence for Rent1 (NM_030680.1,3027-3045).
ccgggtgcccgcttcatga

SEQ ID NO: 513332 - DNA, 19 bp, Mus musculus
  siRNA target sequence for Rent1 (NM_030680.1,3030-3048).
ggtgcccgcttcatgacta

SEQ ID NO: 513333 - DNA, 19 bp, Mus musculus
  siRNA target sequence for Rent1 (NM_030680.1,3276-3294).
cggggcaccccaaaaacca

SEQ ID NO: 513334 - DNA, 19 bp, Mus musculus
  siRNA target sequence for Rent1 (NM_030680.1,3496-3514).
gctacctcggtgatgagtt

SEQ ID NO: 513335 - DNA, 19 bp, Mus musculus
  siRNA target sequence for Rent1 (NM_030680.1,3497-3515).
ctacctcggtgatgagttt

SEQ ID NO: 513336 - DNA, 19 bp, Mus musculus
  siRNA target sequence for Rent1 (NM_030680.1,3500-3518).
cctcggtgatgagtttaaa

SEQ ID NO: 513337 - DNA, 19 bp, Mus musculus
  siRNA target sequence for Rent1 (NM_030680.1,3501-3519).
ctcggtgatgagtttaaat

SEQ ID NO: 513338 - DNA, 19 bp, Mus musculus
  siRNA target sequence for Ret (NM_009050.1,73-91).
gccccactgggcctctatt

SEQ ID NO: 513339 - DNA, 19 bp, Mus musculus
  siRNA target sequence for Ret (NM_009050.1,110-128).
gggagaggctgtatgtaga

SEQ ID NO: 513340 - DNA, 19 bp, Mus musculus
  siRNA target sequence for Ret (NM_009050.1,233-251).
cacggctgcatgagaatga

SEQ ID NO: 513341 - DNA, 19 bp, Mus musculus
  siRNA target sequence for Ret (NM_009050.1,280-298).
cttctctacctcaatcaga

SEQ ID NO: 513342 - DNA, 19 bp, Mus musculus
  siRNA target sequence for Ret (NM_009050.1,422-440).
gctgtacccgtgtgtactt

SEQ ID NO: 513343 - DNA, 19 bp, Mus musculus
  siRNA target sequence for Ret (NM_009050.1,453-471).
cgacaccttcccaaattgt

SEQ ID NO: 513344 - DNA, 19 bp, Mus musculus
  siRNA target sequence for Ret (NM_009050.1,454-472).
gacaccttcccaaattgta

SEQ ID NO: 513345 - DNA, 19 bp, Mus musculus
  siRNA target sequence for Ret (NM_009050.1,555-573).
ctaccacttccacatgtta

SEQ ID NO: 513346 - DNA, 19 bp, Mus musculus
  siRNA target sequence for Ret (NM_009050.1,740-758).
gccctggtgccaacaaaga

SEQ ID NO: 513347 - DNA, 19 bp, Mus musculus
  siRNA target sequence for Ret (NM_009050.1,842-860).
gcgcggtggtggagtttaa

SEQ ID NO: 513348 - DNA, 19 bp, Mus musculus
  siRNA target sequence for Ret (NM_009050.1,931-949).
ctggtgagacggtacacaa

SEQ ID NO: 513349 - DNA, 19 bp, Mus musculus
  siRNA target sequence for Ret (NM_009050.1,934-952).
gtgagacggtacacaaaca

SEQ ID NO: 513350 - DNA, 19 bp, Mus musculus
  siRNA target sequence for Ret (NM_009050.1,1016-1034).
ccttggtccaggtcaacaa

SEQ ID NO: 513351 - DNA, 19 bp, Mus musculus
  siRNA target sequence for Ret (NM_009050.1,1045-1063).
cgggcaaccatgcacaatt

SEQ ID NO: 513352 - DNA, 19 bp, Mus musculus
  siRNA target sequence for Ret (NM_009050.1,1046-1064).
gggcaaccatgcacaatta

SEQ ID NO: 513353 - DNA, 19 bp, Mus musculus
  siRNA target sequence for Ret (NM_009050.1,1388-1406).
cctcggggaccctatttgt

SEQ ID NO: 513354 - DNA, 19 bp, Mus musculus
  siRNA target sequence for Ret (NM_009050.1,1389-1407).
ctcggggaccctatttgta

SEQ ID NO: 513355 - DNA, 19 bp, Mus musculus
  siRNA target sequence for Ret (NM_009050.1,1394-1412).
ggaccctatttgtaaatga

SEQ ID NO: 513356 - DNA, 19 bp, Mus musculus
  siRNA target sequence for Ret (NM_009050.1,1518-1536).
ggaggggacatccattact

SEQ ID NO: 513357 - DNA, 19 bp, Mus musculus
  siRNA target sequence for Ret (NM_009050.1,1521-1539).
ggggacatccattactgaa

SEQ ID NO: 513358 - DNA, 19 bp, Mus musculus
  siRNA target sequence for Ret (NM_009050.1,1634-1652).
ggcgccagggagatggtaa

SEQ ID NO: 513359 - DNA, 19 bp, Mus musculus
  siRNA target sequence for Ret (NM_009050.1,1635-1653).
gcgccagggagatggtaaa

SEQ ID NO: 513360 - DNA, 19 bp, Mus musculus
  siRNA target sequence for Ret (NM_009050.1,1728-1746).
gagccgggatgccaacatt

SEQ ID NO: 513361 - DNA, 19 bp, Mus musculus
  siRNA target sequence for Ret (NM_009050.1,1760-1778).
gtctccgtgccgacattgt

SEQ ID NO: 513362 - DNA, 19 bp, Mus musculus
  siRNA target sequence for Ret (NM_009050.1,1796-1814).
gggagcgccagggcattaa

SEQ ID NO: 513363 - DNA, 19 bp, Mus musculus
  siRNA target sequence for Ret (NM_009050.1,1800-1818).
gcgccagggcattaaagca

SEQ ID NO: 513364 - DNA, 19 bp, Mus musculus
  siRNA target sequence for Ret (NM_009050.1,2046-2064).
gggcttcccaatcagttat

SEQ ID NO: 513365 - DNA, 19 bp, Mus musculus
  siRNA target sequence for Ret (NM_009050.1,2047-2065).
ggcttcccaatcagttatt

SEQ ID NO: 513366 - DNA, 19 bp, Mus musculus
  siRNA target sequence for Ret (NM_009050.1,2155-2173).
gaatttcctcggaagaact

SEQ ID NO: 513367 - DNA, 19 bp, Mus musculus
  siRNA target sequence for Ret (NM_009050.1,2194-2212).
ggagaaggcgagtttggaa

SEQ ID NO: 513368 - DNA, 19 bp, Mus musculus
  siRNA target sequence for Ret (NM_009050.1,2226-2244).
cacagccttccgtctgaaa

SEQ ID NO: 513369 - DNA, 19 bp, Mus musculus
  siRNA target sequence for Ret (NM_009050.1,2292-2310).
cgcctcccagagtgagtta

SEQ ID NO: 513370 - DNA, 19 bp, Mus musculus
  siRNA target sequence for Ret (NM_009050.1,2357-2375).
cacatgtcatcaagttgta

SEQ ID NO: 513371 - DNA, 19 bp, Mus musculus
  siRNA target sequence for Ret (NM_009050.1,2515-2533).
ctggaccacccagatgaaa

SEQ ID NO: 513372 - DNA, 19 bp, Mus musculus
  siRNA target sequence for Ret (NM_009050.1,2579-2597).
cgaggggtatgcagtactt

SEQ ID NO: 513373 - DNA, 19 bp, Mus musculus
  siRNA target sequence for Ret (NM_009050.1,2684-2702).
ggctgtcccgagatgttta

SEQ ID NO: 513374 - DNA, 19 bp, Mus musculus
  siRNA target sequence for Ret (NM_009050.1,2685-2703).
gctgtcccgagatgtttat

SEQ ID NO: 513375 - DNA, 19 bp, Mus musculus
  siRNA target sequence for Ret (NM_009050.1,2759-2777).
caattgagtcccttttcga

SEQ ID NO: 513376 - DNA, 19 bp, Mus musculus
  siRNA target sequence for Ret (NM_009050.1,2768-2786).
cccttttcgatcacatcta

SEQ ID NO: 513377 - DNA, 19 bp, Mus musculus
  siRNA target sequence for Ret (NM_009050.1,2769-2787).
ccttttcgatcacatctat

SEQ ID NO: 513378 - DNA, 19 bp, Mus musculus
  siRNA target sequence for Ret (NM_009050.1,2770-2788).
cttttcgatcacatctata

SEQ ID NO: 513379 - DNA, 19 bp, Mus musculus
  siRNA target sequence for Ret (NM_009050.1,2779-2797).
cacatctatactactcaaa

SEQ ID NO: 513380 - DNA, 19 bp, Mus musculus
  siRNA target sequence for Ret (NM_009050.1,2850-2868).
caacccctaccctggaatt

SEQ ID NO: 513381 - DNA, 19 bp, Mus musculus
  siRNA target sequence for Ret (NM_009050.1,2870-2888).
ctcctgaacgactcttcaa

SEQ ID NO: 513382 - DNA, 19 bp, Mus musculus
  siRNA target sequence for Ret (NM_009050.1,3118-3136).
cccctggtggactgtaaca

SEQ ID NO: 513383 - DNA, 19 bp, Mus musculus
  siRNA target sequence for Ret (NM_009050.1,3120-3138).
cctggtggactgtaacaat

SEQ ID NO: 513384 - DNA, 19 bp, Mus musculus
  siRNA target sequence for Ret (NM_009050.1,3156-3174).
cctcccttccacatggatt

SEQ ID NO: 513385 - DNA, 19 bp, Mus musculus
  siRNA target sequence for Ret (NM_009050.1,3159-3177).
cccttccacatggattgaa

SEQ ID NO: 513386 - DNA, 19 bp, Mus musculus
  siRNA target sequence for Ret (NM_009050.1,3167-3185).
catggattgaaaacaaact

SEQ ID NO: 513387 - DNA, 19 bp, Mus musculus
  siRNA target sequence for Ret (NM_009050.1,3259-3277).
gggttcccaagatatgcaa

SEQ ID NO: 513388 - DNA, 19 bp, Mus musculus
  siRNA target sequence for Ret (NM_009050.1,3260-3278).
ggttcccaagatatgcaaa

SEQ ID NO: 513389 - DNA, 19 bp, Mus musculus
  siRNA target sequence for Ret (NM_009050.1,3308-3326).
caccctcagcggcaaaatt

SEQ ID NO: 513390 - DNA, 19 bp, Mus musculus
  siRNA target sequence for Ret (NM_009050.1,3314-3332).
cagcggcaaaattaatgga

SEQ ID NO: 513391 - DNA, 19 bp, Mus musculus
  siRNA target sequence for Rhok (NM_011881.1,291-309).
cttcccgagacaagaaata

SEQ ID NO: 513392 - DNA, 19 bp, Mus musculus
  siRNA target sequence for Rhok (NM_011881.1,414-432).
ggctcttccaacagttctt

SEQ ID NO: 513393 - DNA, 19 bp, Mus musculus
  siRNA target sequence for Rhok (NM_011881.1,922-940).
gaggattctgactaaagta

SEQ ID NO: 513394 - DNA, 19 bp, Mus musculus
  siRNA target sequence for Rhok (NM_011881.1,1130-1148).
catcagagacgcattgtct

SEQ ID NO: 513395 - DNA, 19 bp, Mus musculus
  siRNA target sequence for Rhok (NM_011881.1,1191-1209).
gcaatatccgaatttctga

SEQ ID NO: 513396 - DNA, 19 bp, Mus musculus
  siRNA target sequence for Rhok (NM_011881.1,1315-1333).
cttctctgtggactacttt

SEQ ID NO: 513397 - DNA, 19 bp, Mus musculus
  siRNA target sequence for Rhok (NM_011881.1,1334-1352).
gccctgggggtcacattgt

SEQ ID NO: 513398 - DNA, 19 bp, Mus musculus
  siRNA target sequence for Rhok (NM_011881.1,1335-1353).
ccctgggggtcacattgta

SEQ ID NO: 513399 - DNA, 19 bp, Mus musculus
  siRNA target sequence for Rhok (NM_011881.1,1405-1423).
gaacaaggagcttaagcaa

SEQ ID NO: 513400 - DNA, 19 bp, Mus musculus
  siRNA target sequence for Rhok (NM_011881.1,1415-1433).
cttaagcaacgtatcatct

SEQ ID NO: 513401 - DNA, 19 bp, Mus musculus
  siRNA target sequence for Rhok (NM_011881.1,1687-1705).
gggtgtggtttttgacaaa

SEQ ID NO: 513402 - DNA, 19 bp, Mus musculus
  siRNA target sequence for Rhok (NM_011881.1,1783-1801).
gctctttggggacctaaat

SEQ ID NO: 513403 - DNA, 19 bp, Mus musculus
  siRNA target sequence for Rhok (NM_011881.1,1818-1836).
gtcagatgccggatgacat

SEQ ID NO: 513404 - DNA, 19 bp, Mus musculus
  siRNA target sequence for Ripk1 (NM_009068.3,146-164).
gacatgtccttggacaata

SEQ ID NO: 513405 - DNA, 19 bp, Mus musculus
  siRNA target sequence for Ripk1 (NM_009068.3,289-307).
caaccgcgctgagtacaat

SEQ ID NO: 513406 - DNA, 19 bp, Mus musculus
  siRNA target sequence for Ripk1 (NM_009068.3,367-385).
gctactgggcatcatcata

SEQ ID NO: 513407 - DNA, 19 bp, Mus musculus
  siRNA target sequence for Ripk1 (NM_009068.3,373-391).
gggcatcatcatagaagaa

SEQ ID NO: 513408 - DNA, 19 bp, Mus musculus
  siRNA target sequence for Ripk1 (NM_009068.3,402-420).
cgctggtgatggagtacat

SEQ ID NO: 513409 - DNA, 19 bp, Mus musculus
  siRNA target sequence for Ripk1 (NM_009068.3,434-452).
ctgatgcacgtgctaaaga

SEQ ID NO: 513410 - DNA, 19 bp, Mus musculus
  siRNA target sequence for Ripk1 (NM_009068.3,474-492).
cattgaaaggaaggataat

SEQ ID NO: 513411 - DNA, 19 bp, Mus musculus
  siRNA target sequence for Ripk1 (NM_009068.3,510-528).
gcatgtgctacttacatga

SEQ ID NO: 513412 - DNA, 19 bp, Mus musculus
  siRNA target sequence for Ripk1 (NM_009068.3,568-586).
cctcgttgatcgtgacttt

SEQ ID NO: 513413 - DNA, 19 bp, Mus musculus
  siRNA target sequence for Ripk1 (NM_009068.3,572-590).
gttgatcgtgactttcaca

SEQ ID NO: 513414 - DNA, 19 bp, Mus musculus
  siRNA target sequence for Ripk1 (NM_009068.3,578-596).
cgtgactttcacattaaga

SEQ ID NO: 513415 - DNA, 19 bp, Mus musculus
  siRNA target sequence for Ripk1 (NM_009068.3,605-623).
cttggtgtggcttccttta

SEQ ID NO: 513416 - DNA, 19 bp, Mus musculus
  siRNA target sequence for Ripk1 (NM_009068.3,698-716).
ggtggtaccctttactaca

SEQ ID NO: 513417 - DNA, 19 bp, Mus musculus
  siRNA target sequence for Ripk1 (NM_009068.3,722-740).
cccgaacacctgaatgaca

SEQ ID NO: 513418 - DNA, 19 bp, Mus musculus
  siRNA target sequence for Ripk1 (NM_009068.3,723-741).
ccgaacacctgaatgacat

SEQ ID NO: 513419 - DNA, 19 bp, Mus musculus
  siRNA target sequence for Ripk1 (NM_009068.3,731-749).
ctgaatgacatcaatgcaa

SEQ ID NO: 513420 - DNA, 19 bp, Mus musculus
  siRNA target sequence for Ripk1 (NM_009068.3,845-863).
cagttcgtgatctgcataa

SEQ ID NO: 513421 - DNA, 19 bp, Mus musculus
  siRNA target sequence for Ripk1 (NM_009068.3,847-865).
gttcgtgatctgcataaaa

SEQ ID NO: 513422 - DNA, 19 bp, Mus musculus
  siRNA target sequence for Ripk1 (NM_009068.3,850-868).
cgtgatctgcataaaatct

SEQ ID NO: 513423 - DNA, 19 bp, Mus musculus
  siRNA target sequence for Ripk1 (NM_009068.3,867-885).
ctgggaacaggccaaatgt

SEQ ID NO: 513424 - DNA, 19 bp, Mus musculus
  siRNA target sequence for Ripk1 (NM_009068.3,879-897).
caaatgtagaggaaatcct

SEQ ID NO: 513425 - DNA, 19 bp, Mus musculus
  siRNA target sequence for Ripk1 (NM_009068.3,996-1014).
ggcctttttacttaagtca

SEQ ID NO: 513426 - DNA, 19 bp, Mus musculus
  siRNA target sequence for Ripk1 (NM_009068.3,1054-1072).
gaaagagtatccagatcaa

SEQ ID NO: 513427 - DNA, 19 bp, Mus musculus
  siRNA target sequence for Ripk1 (NM_009068.3,1076-1094).
ccagtgctgcagagaatgt

SEQ ID NO: 513428 - DNA, 19 bp, Mus musculus
  siRNA target sequence for Ripk1 (NM_009068.3,1124-1142).
cctccgagcaggtcaaatt

SEQ ID NO: 513429 - DNA, 19 bp, Mus musculus
  siRNA target sequence for Ripk1 (NM_009068.3,1128-1146).
cgagcaggtcaaattcaga

SEQ ID NO: 513430 - DNA, 19 bp, Mus musculus
  siRNA target sequence for Ripk1 (NM_009068.3,1228-1246).
cccacaggacgagaatgat

SEQ ID NO: 513431 - DNA, 19 bp, Mus musculus
  siRNA target sequence for Ripk1 (NM_009068.3,1282-1300).
ctatcatgcttttggaata

SEQ ID NO: 513432 - DNA, 19 bp, Mus musculus
  siRNA target sequence for Ripk1 (NM_009068.3,1296-1314).
gaatatttgcagagaaaca

SEQ ID NO: 513433 - DNA, 19 bp, Mus musculus
  siRNA target sequence for Ripk1 (NM_009068.3,1399-1417).
gcagagagctcgtgagaat

SEQ ID NO: 513434 - DNA, 19 bp, Mus musculus
  siRNA target sequence for Ripk1 (NM_009068.3,1400-1418).
cagagagctcgtgagaata

SEQ ID NO: 513435 - DNA, 19 bp, Mus musculus
  siRNA target sequence for Ripk1 (NM_009068.3,1402-1420).
gagagctcgtgagaatatt

SEQ ID NO: 513436 - DNA, 19 bp, Mus musculus
  siRNA target sequence for Ripk1 (NM_009068.3,1406-1424).
gctcgtgagaatattaaga

SEQ ID NO: 513437 - DNA, 19 bp, Mus musculus
  siRNA target sequence for Ripk1 (NM_009068.3,1456-1474).
cacaacgagtcgtggaatt

SEQ ID NO: 513438 - DNA, 19 bp, Mus musculus
  siRNA target sequence for Ripk1 (NM_009068.3,1495-1513).
gccagccacccaaacagtt

SEQ ID NO: 513439 - DNA, 19 bp, Mus musculus
  siRNA target sequence for Ripk1 (NM_009068.3,1496-1514).
ccagccacccaaacagttt

SEQ ID NO: 513440 - DNA, 19 bp, Mus musculus
  siRNA target sequence for Ripk1 (NM_009068.3,1554-1572).
caggtacaggagtttggta

SEQ ID NO: 513441 - DNA, 19 bp, Mus musculus
  siRNA target sequence for Ripk1 (NM_009068.3,1583-1601).
ctaagccaaatgtatagta

SEQ ID NO: 513442 - DNA, 19 bp, Mus musculus
  siRNA target sequence for Ripk1 (NM_009068.3,1587-1605).
gccaaatgtatagtactta

SEQ ID NO: 513443 - DNA, 19 bp, Mus musculus
  siRNA target sequence for Ripk1 (NM_009068.3,1713-1731).
ctggtattcagattggaaa

SEQ ID NO: 513444 - DNA, 19 bp, Mus musculus
  siRNA target sequence for Ripk1 (NM_009068.3,1721-1739).
cagattggaaaccacaatt

SEQ ID NO: 513445 - DNA, 19 bp, Mus musculus
  siRNA target sequence for Ripk1 (NM_009068.3,1723-1741).
gattggaaaccacaattat

SEQ ID NO: 513446 - DNA, 19 bp, Mus musculus
  siRNA target sequence for Ripk1 (NM_009068.3,1744-1762).
ggatgttggactgaattca

SEQ ID NO: 513447 - DNA, 19 bp, Mus musculus
  siRNA target sequence for Ripk1 (NM_009068.3,1763-1781).
caaccaccaaacaatactt

SEQ ID NO: 513448 - DNA, 19 bp, Mus musculus
  siRNA target sequence for Ripk1 (NM_009068.3,1803-1821).
gacaccaagccatctttga

SEQ ID NO: 513449 - DNA, 19 bp, Mus musculus
  siRNA target sequence for Ripk1 (NM_009068.3,1830-1848).
ctagtctgactgatgaaca

SEQ ID NO: 513450 - DNA, 19 bp, Mus musculus
  siRNA target sequence for Ripk1 (NM_009068.3,1920-1938).
ctcagatcgatgaaatcga

SEQ ID NO: 513451 - DNA, 19 bp, Mus musculus
  siRNA target sequence for Ripk2 (NM_138952.1,160-178).
ccgctgctcgacagtgaaa

SEQ ID NO: 513452 - DNA, 19 bp, Mus musculus
  siRNA target sequence for Ripk2 (NM_138952.1,162-180).
gctgctcgacagtgaaaga

SEQ ID NO: 513453 - DNA, 19 bp, Mus musculus
  siRNA target sequence for Ripk2 (NM_138952.1,165-183).
gctcgacagtgaaagaaat

SEQ ID NO: 513454 - DNA, 19 bp, Mus musculus
  siRNA target sequence for Ripk2 (NM_138952.1,189-207).
cttacgagaagccgaaata

SEQ ID NO: 513455 - DNA, 19 bp, Mus musculus
  siRNA target sequence for Ripk2 (NM_138952.1,194-212).
gagaagccgaaatattaca

SEQ ID NO: 513456 - DNA, 19 bp, Mus musculus
  siRNA target sequence for Ripk2 (NM_138952.1,201-219).
cgaaatattacataaagca

SEQ ID NO: 513457 - DNA, 19 bp, Mus musculus
  siRNA target sequence for Ripk2 (NM_138952.1,211-229).
cataaagcaagatttagtt

SEQ ID NO: 513458 - DNA, 19 bp, Mus musculus
  siRNA target sequence for Ripk2 (NM_138952.1,254-272).
gcaatgagcctgaattttt

SEQ ID NO: 513459 - DNA, 19 bp, Mus musculus
  siRNA target sequence for Ripk2 (NM_138952.1,265-283).
gaatttttgggcatagtta

SEQ ID NO: 513460 - DNA, 19 bp, Mus musculus
  siRNA target sequence for Ripk2 (NM_138952.1,275-293).
gcatagttactgaatacat

SEQ ID NO: 513461 - DNA, 19 bp, Mus musculus
  siRNA target sequence for Ripk2 (NM_138952.1,291-309).
catgccaaatggatcatta

SEQ ID NO: 513462 - DNA, 19 bp, Mus musculus
  siRNA target sequence for Ripk2 (NM_138952.1,294-312).
gccaaatggatcattaaat

SEQ ID NO: 513463 - DNA, 19 bp, Mus musculus
  siRNA target sequence for Ripk2 (NM_138952.1,296-314).
caaatggatcattaaatga

SEQ ID NO: 513464 - DNA, 19 bp, Mus musculus
  siRNA target sequence for Ripk2 (NM_138952.1,334-352).
gaatatcctgatattgcat

SEQ ID NO: 513465 - DNA, 19 bp, Mus musculus
  siRNA target sequence for Ripk2 (NM_138952.1,366-384).
ccgcatcctgcatgaaatt

SEQ ID NO: 513466 - DNA, 19 bp, Mus musculus
  siRNA target sequence for Ripk2 (NM_138952.1,386-404).
ctcttggtgtaaattatct

SEQ ID NO: 513467 - DNA, 19 bp, Mus musculus
  siRNA target sequence for Ripk2 (NM_138952.1,439-457).
ctaaagactcagaatatct

SEQ ID NO: 513468 - DNA, 19 bp, Mus musculus
  siRNA target sequence for Ripk2 (NM_138952.1,527-545).
ctcaatcacgaagttacaa

SEQ ID NO: 513469 - DNA, 19 bp, Mus musculus
  siRNA target sequence for Ripk2 (NM_138952.1,529-547).
caatcacgaagttacaaat

SEQ ID NO: 513470 - DNA, 19 bp, Mus musculus
  siRNA target sequence for Ripk2 (NM_138952.1,551-569).
cacccgaaggaggaacaat

SEQ ID NO: 513471 - DNA, 19 bp, Mus musculus
  siRNA target sequence for Ripk2 (NM_138952.1,553-571).
cccgaaggaggaacaatca

SEQ ID NO: 513472 - DNA, 19 bp, Mus musculus
  siRNA target sequence for Ripk2 (NM_138952.1,560-578).
gaggaacaatcatctatat

SEQ ID NO: 513473 - DNA, 19 bp, Mus musculus
  siRNA target sequence for Ripk2 (NM_138952.1,591-609).
ctatgagccaggacagaaa

SEQ ID NO: 513474 - DNA, 19 bp, Mus musculus
  siRNA target sequence for Ripk2 (NM_138952.1,617-635).
ccagtgtgaagcatgatat

SEQ ID NO: 513475 - DNA, 19 bp, Mus musculus
  siRNA target sequence for Ripk2 (NM_138952.1,618-636).
cagtgtgaagcatgatata

SEQ ID NO: 513476 - DNA, 19 bp, Mus musculus
  siRNA target sequence for Ripk2 (NM_138952.1,622-640).
gtgaagcatgatatataca

SEQ ID NO: 513477 - DNA, 19 bp, Mus musculus
  siRNA target sequence for Ripk2 (NM_138952.1,698-716).
ccaatcctttgcagatcat

SEQ ID NO: 513478 - DNA, 19 bp, Mus musculus
  siRNA target sequence for Ripk2 (NM_138952.1,779-797).
ctcatcgaggtctcatgat

SEQ ID NO: 513479 - DNA, 19 bp, Mus musculus
  siRNA target sequence for Ripk2 (NM_138952.1,781-799).
catcgaggtctcatgatct

SEQ ID NO: 513480 - DNA, 19 bp, Mus musculus
  siRNA target sequence for Ripk2 (NM_138952.1,787-805).
ggtctcatgatctctctaa

SEQ ID NO: 513481 - DNA, 19 bp, Mus musculus
  siRNA target sequence for Ripk2 (NM_138952.1,788-806).
gtctcatgatctctctaat

SEQ ID NO: 513482 - DNA, 19 bp, Mus musculus
  siRNA target sequence for Ripk2 (NM_138952.1,835-853).
gaaagaccatcctttttga

SEQ ID NO: 513483 - DNA, 19 bp, Mus musculus
  siRNA target sequence for Ripk2 (NM_138952.1,945-963).
gagttcctcaagtactatt

SEQ ID NO: 513484 - DNA, 19 bp, Mus musculus
  siRNA target sequence for Ripk2 (NM_138952.1,950-968).
cctcaagtactattcactt

SEQ ID NO: 513485 - DNA, 19 bp, Mus musculus
  siRNA target sequence for Ripk2 (NM_138952.1,951-969).
ctcaagtactattcactta

SEQ ID NO: 513486 - DNA, 19 bp, Mus musculus
  siRNA target sequence for Ripk2 (NM_138952.1,984-1002).
ggatttatcgctaaacata

SEQ ID NO: 513487 - DNA, 19 bp, Mus musculus
  siRNA target sequence for Ripk2 (NM_138952.1,993-1011).
gctaaacatacctgcaaat

SEQ ID NO: 513488 - DNA, 19 bp, Mus musculus
  siRNA target sequence for Ripk2 (NM_138952.1,1173-1191).
cagctgggatggtatcgtt

SEQ ID NO: 513489 - DNA, 19 bp, Mus musculus
  siRNA target sequence for Ripk2 (NM_138952.1,1178-1196).
gggatggtatcgtttctgt

SEQ ID NO: 513490 - DNA, 19 bp, Mus musculus
  siRNA target sequence for Ripk2 (NM_138952.1,1282-1300).
gagcgcccaccaattggta

SEQ ID NO: 513491 - DNA, 19 bp, Mus musculus
  siRNA target sequence for Ripk2 (NM_138952.1,1284-1302).
gcgcccaccaattggtata

SEQ ID NO: 513492 - DNA, 19 bp, Mus musculus
  siRNA target sequence for Ripk2 (NM_138952.1,1352-1370).
ctgaagcctgccttaacca

SEQ ID NO: 513493 - DNA, 19 bp, Mus musculus
  siRNA target sequence for Ripk2 (NM_138952.1,1354-1372).
gaagcctgccttaaccaat

SEQ ID NO: 513494 - DNA, 19 bp, Mus musculus
  siRNA target sequence for Ripk2 (NM_138952.1,1414-1432).
gactatgaactcattagca

SEQ ID NO: 513495 - DNA, 19 bp, Mus musculus
  siRNA target sequence for Ripk2 (NM_138952.1,1423-1441).
ctcattagcaccaaaccta

SEQ ID NO: 513496 - DNA, 19 bp, Mus musculus
  siRNA target sequence for Ripk3 (NM_019955.1,262-280).
cgggcacaccacagaacat

SEQ ID NO: 513497 - DNA, 19 bp, Mus musculus
  siRNA target sequence for Ripk3 (NM_019955.1,275-293).
gaacatggaaccatgatgt

SEQ ID NO: 513498 - DNA, 19 bp, Mus musculus
  siRNA target sequence for Ripk3 (NM_019955.1,306-324).
cgtgaactcgaagaagata

SEQ ID NO: 513499 - DNA, 19 bp, Mus musculus
  siRNA target sequence for Ripk3 (NM_019955.1,307-325).
gtgaactcgaagaagatat

SEQ ID NO: 513500 - DNA, 19 bp, Mus musculus
  siRNA target sequence for Ripk3 (NM_019955.1,330-348).
ggaggtgaaggctatggtt

SEQ ID NO: 513501 - DNA, 19 bp, Mus musculus
  siRNA target sequence for Ripk3 (NM_019955.1,346-364).
gttaatcttcgtaatgaga

SEQ ID NO: 513502 - DNA, 19 bp, Mus musculus
  siRNA target sequence for Ripk3 (NM_019955.1,618-636).
cgccaagctagcagatttt

SEQ ID NO: 513503 - DNA, 19 bp, Mus musculus
  siRNA target sequence for Ripk3 (NM_019955.1,761-779).
ctaaagcgagtgatgtcta

SEQ ID NO: 513504 - DNA, 19 bp, Mus musculus
  siRNA target sequence for Ripk3 (NM_019955.1,832-850).
gtagacaagacttcactaa

SEQ ID NO: 513505 - DNA, 19 bp, Mus musculus
  siRNA target sequence for Ripk3 (NM_019955.1,916-934).
gagactcccggcttggaaa

SEQ ID NO: 513506 - DNA, 19 bp, Mus musculus
  siRNA target sequence for Ripk3 (NM_019955.1,922-940).
cccggcttggaaaaactga

SEQ ID NO: 513507 - DNA, 19 bp, Mus musculus
  siRNA target sequence for Ripk3 (NM_019955.1,923-941).
ccggcttggaaaaactgaa

SEQ ID NO: 513508 - DNA, 19 bp, Mus musculus
  siRNA target sequence for Ripk3 (NM_019955.1,993-1011).
ccaggactgcgaaccaaaa

SEQ ID NO: 513509 - DNA, 19 bp, Mus musculus
  siRNA target sequence for Ripk3 (NM_019955.1,994-1012).
caggactgcgaaccaaaaa

SEQ ID NO: 513510 - DNA, 19 bp, Mus musculus
  siRNA target sequence for Ripk3 (NM_019955.1,999-1017).
ctgcgaaccaaaaaccaat

SEQ ID NO: 513511 - DNA, 19 bp, Mus musculus
  siRNA target sequence for Ripk3 (NM_019955.1,1013-1031).
ccaatgaagtttacaatct

SEQ ID NO: 513512 - DNA, 19 bp, Mus musculus
  siRNA target sequence for Ripk3 (NM_019955.1,1052-1070).
ctgctgtctccgaggtaaa

SEQ ID NO: 513513 - DNA, 19 bp, Mus musculus
  siRNA target sequence for Ripk3 (NM_019955.1,1055-1073).
ctgtctccgaggtaaagca

SEQ ID NO: 513514 - DNA, 19 bp, Mus musculus
  siRNA target sequence for Ripk3 (NM_019955.1,1057-1075).
gtctccgaggtaaagcatt

SEQ ID NO: 513515 - DNA, 19 bp, Mus musculus
  siRNA target sequence for Ripk3 (NM_019955.1,1061-1079).
ccgaggtaaagcattatct

SEQ ID NO: 513516 - DNA, 19 bp, Mus musculus
  siRNA target sequence for Ripk3 (NM_019955.1,1153-1171).
ccgagggaaaccatggttt

SEQ ID NO: 513517 - DNA, 19 bp, Mus musculus
  siRNA target sequence for Ripk3 (NM_019955.1,1157-1175).
gggaaaccatggtttctaa

SEQ ID NO: 513518 - DNA, 19 bp, Mus musculus
  siRNA target sequence for Ripk3 (NM_019955.1,1433-1451).
ggaccccaccgaatccaat

SEQ ID NO: 513519 - DNA, 19 bp, Mus musculus
  siRNA target sequence for Ripk3 (NM_019955.1,1437-1455).
cccaccgaatccaatgaca

SEQ ID NO: 513520 - DNA, 19 bp, Mus musculus
  siRNA target sequence for Ripk3 (NM_019955.1,1462-1480).
ccggctctcgtcttcaaca

SEQ ID NO: 513521 - DNA, 19 bp, Mus musculus
  siRNA target sequence for Ripk3 (NM_019955.1,1463-1481).
cggctctcgtcttcaacaa

SEQ ID NO: 513522 - DNA, 19 bp, Mus musculus
  siRNA target sequence for Ripk3 (NM_019955.1,1495-1513).
cagattgggaactacaact

SEQ ID NO: 513523 - DNA, 19 bp, Mus musculus
  siRNA target sequence for Ripk3 (NM_019955.1,1542-1560).
ctcaagttcggccaagtat

SEQ ID NO: 513524 - DNA, 19 bp, Mus musculus
  siRNA target sequence for Ripk3 (NM_019955.1,1544-1562).
caagttcggccaagtatga

SEQ ID NO: 513525 - DNA, 19 bp, Mus musculus
  siRNA target sequence for Rock1 (NM_009071.1,5-23).
cgactggggacagttttga

SEQ ID NO: 513526 - DNA, 19 bp, Mus musculus
  siRNA target sequence for Rock1 (NM_009071.1,26-44).
ctcggtttgaaaaaatcga

SEQ ID NO: 513527 - DNA, 19 bp, Mus musculus
  siRNA target sequence for Rock1 (NM_009071.1,103-121).
gatgccctggtttatgatt

SEQ ID NO: 513528 - DNA, 19 bp, Mus musculus
  siRNA target sequence for Rock1 (NM_009071.1,107-125).
ccctggtttatgatttgga

SEQ ID NO: 513529 - DNA, 19 bp, Mus musculus
  siRNA target sequence for Rock1 (NM_009071.1,108-126).
cctggtttatgatttggat

SEQ ID NO: 513530 - DNA, 19 bp, Mus musculus
  siRNA target sequence for Rock1 (NM_009071.1,109-127).
ctggtttatgatttggatt

SEQ ID NO: 513531 - DNA, 19 bp, Mus musculus
  siRNA target sequence for Rock1 (NM_009071.1,246-264).
cggcagaggtgcatttgga

SEQ ID NO: 513532 - DNA, 19 bp, Mus musculus
  siRNA target sequence for Rock1 (NM_009071.1,293-311).
ctaggaaggtttatgctat

SEQ ID NO: 513533 - DNA, 19 bp, Mus musculus
  siRNA target sequence for Rock1 (NM_009071.1,381-399).
catggcgtttgccaatagt

SEQ ID NO: 513534 - DNA, 19 bp, Mus musculus
  siRNA target sequence for Rock1 (NM_009071.1,501-519).
ctatgacgtgcctgaaaaa

SEQ ID NO: 513535 - DNA, 19 bp, Mus musculus
  siRNA target sequence for Rock1 (NM_009071.1,512-530).
ctgaaaaatgggcaagatt

SEQ ID NO: 513536 - DNA, 19 bp, Mus musculus
  siRNA target sequence for Rock1 (NM_009071.1,514-532).
gaaaaatgggcaagattct

SEQ ID NO: 513537 - DNA, 19 bp, Mus musculus
  siRNA target sequence for Rock1 (NM_009071.1,531-549).
ctatactgcagaagtagtt

SEQ ID NO: 513538 - DNA, 19 bp, Mus musculus
  siRNA target sequence for Rock1 (NM_009071.1,553-571).
gcattggatgcaatccatt

SEQ ID NO: 513539 - DNA, 19 bp, Mus musculus
  siRNA target sequence for Rock1 (NM_009071.1,1436-1454).
ctgcagtgtctcaaattga

SEQ ID NO: 513540 - DNA, 19 bp, Mus musculus
  siRNA target sequence for Rock1 (NM_009071.1,1438-1456).
gcagtgtctcaaattgaga

SEQ ID NO: 513541 - DNA, 19 bp, Mus musculus
  siRNA target sequence for Rock1 (NM_009071.1,1464-1482).
gatgttgctacaacataga

SEQ ID NO: 513542 - DNA, 19 bp, Mus musculus
  siRNA target sequence for Rock1 (NM_009071.1,1467-1485).
gttgctacaacatagaatt

SEQ ID NO: 513543 - DNA, 19 bp, Mus musculus
  siRNA target sequence for Rock1 (NM_009071.1,1560-1578).
ggaccagttagaagactta

SEQ ID NO: 513544 - DNA, 19 bp, Mus musculus
  siRNA target sequence for Rock1 (NM_009071.1,1570-1588).
gaagacttacggaaagcaa

SEQ ID NO: 513545 - DNA, 19 bp, Mus musculus
  siRNA target sequence for Rock1 (NM_009071.1,1654-1672).
gacttacttaggacagaat

SEQ ID NO: 513546 - DNA, 19 bp, Mus musculus
  siRNA target sequence for Rock1 (NM_009071.1,1675-1693).
gacacagctgtaagattaa

SEQ ID NO: 513547 - DNA, 19 bp, Mus musculus
  siRNA target sequence for Rock1 (NM_009071.1,1679-1697).
cagctgtaagattaaggaa

SEQ ID NO: 513548 - DNA, 19 bp, Mus musculus
  siRNA target sequence for Rock1 (NM_009071.1,1708-1726).
gagatgagcaagtcaatta

SEQ ID NO: 513549 - DNA, 19 bp, Mus musculus
  siRNA target sequence for Rock1 (NM_009071.1,1790-1808).
cacaagcagacaaggatta

SEQ ID NO: 513550 - DNA, 19 bp, Mus musculus
  siRNA target sequence for Rock1 (NM_009071.1,1853-1871).
ggcatgattctgagatgat

SEQ ID NO: 513551 - DNA, 19 bp, Mus musculus
  siRNA target sequence for Rock1 (NM_009071.1,1854-1872).
gcatgattctgagatgatt

SEQ ID NO: 513552 - DNA, 19 bp, Mus musculus
  siRNA target sequence for Rock1 (NM_009071.1,1876-1894).
gaccttcaagcacgaatta

SEQ ID NO: 513553 - DNA, 19 bp, Mus musculus
  siRNA target sequence for Rock1 (NM_009071.1,1878-1896).
ccttcaagcacgaattaca

SEQ ID NO: 513554 - DNA, 19 bp, Mus musculus
  siRNA target sequence for Rock1 (NM_009071.1,1879-1897).
cttcaagcacgaattacat

SEQ ID NO: 513555 - DNA, 19 bp, Mus musculus
  siRNA target sequence for Rock1 (NM_009071.1,1960-1978).
gaggctcaagacatgctta

SEQ ID NO: 513556 - DNA, 19 bp, Mus musculus
  siRNA target sequence for Rock1 (NM_009071.1,1964-1982).
ctcaagacatgcttaatca

SEQ ID NO: 513557 - DNA, 19 bp, Mus musculus
  siRNA target sequence for Rock1 (NM_009071.1,2008-2026).
gagatagatttgaattaca

SEQ ID NO: 513558 - DNA, 19 bp, Mus musculus
  siRNA target sequence for Rock1 (NM_009071.1,2081-2099).
ccaaagcacgcctaactga

SEQ ID NO: 513559 - DNA, 19 bp, Mus musculus
  siRNA target sequence for Rock1 (NM_009071.1,2100-2118).
caagcaccaatctatcgaa

SEQ ID NO: 513560 - DNA, 19 bp, Mus musculus
  siRNA target sequence for Rock1 (NM_009071.1,2222-2240).
gttccatgctagatgttga

SEQ ID NO: 513561 - DNA, 19 bp, Mus musculus
  siRNA target sequence for Rock1 (NM_009071.1,2233-2251).
gatgttgacctgaaacagt

SEQ ID NO: 513562 - DNA, 19 bp, Mus musculus
  siRNA target sequence for Rock1 (NM_009071.1,2394-2412).
caatttaaaaggtttagaa

SEQ ID NO: 513563 - DNA, 19 bp, Mus musculus
  siRNA target sequence for Rock1 (NM_009071.1,2449-2467).
gcaaagagattgttagaat

SEQ ID NO: 513564 - DNA, 19 bp, Mus musculus
  siRNA target sequence for Rock1 (NM_009071.1,2470-2488).
gagttagctcagcttacaa

SEQ ID NO: 513565 - DNA, 19 bp, Mus musculus
  siRNA target sequence for Rock1 (NM_009071.1,2510-2528).
ggcaaatgcgggagttaca

SEQ ID NO: 513566 - DNA, 19 bp, Mus musculus
  siRNA target sequence for Rock1 (NM_009071.1,2517-2535).
gcgggagttacaagatcaa

SEQ ID NO: 513567 - DNA, 19 bp, Mus musculus
  siRNA target sequence for Rock1 (NM_009071.1,2547-2565).
gcagtatttctctacactt

SEQ ID NO: 513568 - DNA, 19 bp, Mus musculus
  siRNA target sequence for Rock1 (NM_009071.1,2662-2680).
ctctctactcagttggatt

SEQ ID NO: 513569 - DNA, 19 bp, Mus musculus
  siRNA target sequence for Rock1 (NM_009071.1,2664-2682).
ctctactcagttggattta

SEQ ID NO: 513570 - DNA, 19 bp, Mus musculus
  siRNA target sequence for Rock1 (NM_009071.1,2774-2792).
caagaaatagacaagagat

SEQ ID NO: 513571 - DNA, 19 bp, Mus musculus
  siRNA target sequence for Rock1 (NM_009071.1,2790-2808).
gattacagataaagatcat

SEQ ID NO: 513572 - DNA, 19 bp, Mus musculus
  siRNA target sequence for Rock1 (NM_009071.1,2797-2815).
gataaagatcatactgtta

SEQ ID NO: 513573 - DNA, 19 bp, Mus musculus
  siRNA target sequence for Rock1 (NM_009071.1,2810-2828).
ctgttagtcggcttgaaga

SEQ ID NO: 513574 - DNA, 19 bp, Mus musculus
  siRNA target sequence for Rock1 (NM_009071.1,2841-2859).
gctaaccaaagatattgaa

SEQ ID NO: 513575 - DNA, 19 bp, Mus musculus
  siRNA target sequence for Rock1 (NM_009071.1,2959-2977).
gcttttgaaaagaatatca

SEQ ID NO: 513576 - DNA, 19 bp, Mus musculus
  siRNA target sequence for Rock1 (NM_009071.1,2982-3000).
cgaacggacccttaaaaca

SEQ ID NO: 513577 - DNA, 19 bp, Mus musculus
  siRNA target sequence for Rock1 (NM_009071.1,3015-3033).
gttggcagaaataatgaat

SEQ ID NO: 513578 - DNA, 19 bp, Mus musculus
  siRNA target sequence for Rock1 (NM_009071.1,3030-3048).
gaatcgcaaagattttaaa

SEQ ID NO: 513579 - DNA, 19 bp, Mus musculus
  siRNA target sequence for Rock1 (NM_009071.1,3064-3082).
gctaatacacaagatttaa

SEQ ID NO: 513580 - DNA, 19 bp, Mus musculus
  siRNA target sequence for Rock1 (NM_009071.1,3183-3201).
catgcaagcgcaattggta

SEQ ID NO: 513581 - DNA, 19 bp, Mus musculus
  siRNA target sequence for Rock1 (NM_009071.1,3190-3208).
gcgcaattggtagaagaat

SEQ ID NO: 513582 - DNA, 19 bp, Mus musculus
  siRNA target sequence for Rock1 (NM_009071.1,3198-3216).
ggtagaagaatgtacacat

SEQ ID NO: 513583 - DNA, 19 bp, Mus musculus
  siRNA target sequence for Rock1 (NM_009071.1,3235-3253).
cagttggctagcaaagaga

SEQ ID NO: 513584 - DNA, 19 bp, Mus musculus
  siRNA target sequence for Rock1 (NM_009071.1,3242-3260).
ctagcaaagagagtgatat

SEQ ID NO: 513585 - DNA, 19 bp, Mus musculus
  siRNA target sequence for Rock1 (NM_009071.1,3265-3283).
cagttgcgggcaaaacttt

SEQ ID NO: 513586 - DNA, 19 bp, Mus musculus
  siRNA target sequence for Rock1 (NM_009071.1,3288-3306).
cctttcggattcaactagt

SEQ ID NO: 513587 - DNA, 19 bp, Mus musculus
  siRNA target sequence for Rock1 (NM_009071.1,3379-3397).
gtaccaaatagaggaaata

SEQ ID NO: 513588 - DNA, 19 bp, Mus musculus
  siRNA target sequence for Rock1 (NM_009071.1,3404-3422).
gatatggctggaagaaaca

SEQ ID NO: 513589 - DNA, 19 bp, Mus musculus
  siRNA target sequence for Rock1 (NM_009071.1,3427-3445).
gttgtggtaagcagcaaaa

SEQ ID NO: 513590 - DNA, 19 bp, Mus musculus
  siRNA target sequence for Rock1 (NM_009071.1,3433-3451).
gtaagcagcaaaaagatct

SEQ ID NO: 513591 - DNA, 19 bp, Mus musculus
  siRNA target sequence for Rock1 (NM_009071.1,3437-3455).
gcagcaaaaagatcttgtt

SEQ ID NO: 513592 - DNA, 19 bp, Mus musculus
  siRNA target sequence for Rock1 (NM_009071.1,3440-3458).
gcaaaaagatcttgttcta

SEQ ID NO: 513593 - DNA, 19 bp, Mus musculus
  siRNA target sequence for Rock1 (NM_009071.1,3447-3465).
gatcttgttctataatgat

SEQ ID NO: 513594 - DNA, 19 bp, Mus musculus
  siRNA target sequence for Rock1 (NM_009071.1,3453-3471).
gttctataatgatgaacaa

SEQ ID NO: 513595 - DNA, 19 bp, Mus musculus
  siRNA target sequence for Rock1 (NM_009071.1,3488-3506).
gtccatctatggtgttaga

SEQ ID NO: 513596 - DNA, 19 bp, Mus musculus
  siRNA target sequence for Rock1 (NM_009071.1,3490-3508).
ccatctatggtgttagaca

SEQ ID NO: 513597 - DNA, 19 bp, Mus musculus
  siRNA target sequence for Rock1 (NM_009071.1,3588-3606).
ccagatactatatgcaaat

SEQ ID NO: 513598 - DNA, 19 bp, Mus musculus
  siRNA target sequence for Rock1 (NM_009071.1,3601-3619).
gcaaatgaaggtgaatgta

SEQ ID NO: 513599 - DNA, 19 bp, Mus musculus
  siRNA target sequence for Rock1 (NM_009071.1,3742-3760).
cctttgtggcatgtcttta

SEQ ID NO: 513600 - DNA, 19 bp, Mus musculus
  siRNA target sequence for Rock1 (NM_009071.1,3743-3761).
ctttgtggcatgtctttaa

SEQ ID NO: 513601 - DNA, 19 bp, Mus musculus
  siRNA target sequence for Rock1 (NM_009071.1,3782-3800).
gtcgaagatgccatgttaa

SEQ ID NO: 513602 - DNA, 19 bp, Mus musculus
  siRNA target sequence for Rock1 (NM_009071.1,3784-3802).
cgaagatgccatgttaagt

SEQ ID NO: 513603 - DNA, 19 bp, Mus musculus
  siRNA target sequence for Rock1 (NM_009071.1,3842-3860).
ccccgtgcaaagtaagtta

SEQ ID NO: 513604 - DNA, 19 bp, Mus musculus
  siRNA target sequence for Rock1 (NM_009071.1,3846-3864).
gtgcaaagtaagttacgat

SEQ ID NO: 513605 - DNA, 19 bp, Mus musculus
  siRNA target sequence for Rock1 (NM_009071.1,3853-3871).
gtaagttacgatgtaacat

SEQ ID NO: 513606 - DNA, 19 bp, Mus musculus
  siRNA target sequence for Rock1 (NM_009071.1,3896-3914).
catgttctcaggatgaaca

SEQ ID NO: 513607 - DNA, 19 bp, Mus musculus
  siRNA target sequence for Rock1 (NM_009071.1,3921-3939).
gtgggttactcatctagta

SEQ ID NO: 513608 - DNA, 19 bp, Mus musculus
  siRNA target sequence for Rock1 (NM_009071.1,3923-3941).
gggttactcatctagtaaa

SEQ ID NO: 513609 - DNA, 19 bp, Mus musculus
  siRNA target sequence for Rock1 (NM_009071.1,3929-3947).
ctcatctagtaaagaagat

SEQ ID NO: 513610 - DNA, 19 bp, Mus musculus
  siRNA target sequence for Rock1 (NM_009071.1,3934-3952).
ctagtaaagaagattccta

SEQ ID NO: 513611 - DNA, 19 bp, Mus musculus
  siRNA target sequence for Rock1 (NM_009071.1,3985-4003).
cctcgaacgctgtcaacaa

SEQ ID NO: 513612 - DNA, 19 bp, Mus musculus
  siRNA target sequence for Rock1 (NM_009071.1,3988-4006).
cgaacgctgtcaacaagat

SEQ ID NO: 513613 - DNA, 19 bp, Mus musculus
  siRNA target sequence for Rock1 (NM_009071.1,4001-4019).
caagatccactgcaaatca

SEQ ID NO: 513614 - DNA, 19 bp, Mus musculus
  siRNA target sequence for Rock1 (NM_009071.1,4026-4044).
ccgcaaagtagtcaaaaat

SEQ ID NO: 513615 - DNA, 19 bp, Mus musculus
  siRNA target sequence for Rock1 (NM_009071.1,4027-4045).
cgcaaagtagtcaaaaata

SEQ ID NO: 513616 - DNA, 19 bp, Mus musculus
  siRNA target sequence for Rock2 (NM_009072.1,139-157).
ctggatggcttaaattcct

SEQ ID NO: 513617 - DNA, 19 bp, Mus musculus
  siRNA target sequence for Rock2 (NM_009072.1,205-223).
gataacttcttaaatagat

SEQ ID NO: 513618 - DNA, 19 bp, Mus musculus
  siRNA target sequence for Rock2 (NM_009072.1,268-286).
gaagactatgatgttgtaa

SEQ ID NO: 513619 - DNA, 19 bp, Mus musculus
  siRNA target sequence for Rock2 (NM_009072.1,336-354).
ggcatcacagaaggtttat

SEQ ID NO: 513620 - DNA, 19 bp, Mus musculus
  siRNA target sequence for Rock2 (NM_009072.1,341-359).
cacagaaggtttatgcaat

SEQ ID NO: 513621 - DNA, 19 bp, Mus musculus
  siRNA target sequence for Rock2 (NM_009072.1,355-373).
gcaatgaagcttcttagta

SEQ ID NO: 513622 - DNA, 19 bp, Mus musculus
  siRNA target sequence for Rock2 (NM_009072.1,529-547).
ctcgtcaaccttatgagta

SEQ ID NO: 513623 - DNA, 19 bp, Mus musculus
  siRNA target sequence for Rock2 (NM_009072.1,537-555).
ccttatgagtaattatgat

SEQ ID NO: 513624 - DNA, 19 bp, Mus musculus
  siRNA target sequence for Rock2 (NM_009072.1,597-615).
gcttgcactggatgcaata

SEQ ID NO: 513625 - DNA, 19 bp, Mus musculus
  siRNA target sequence for Rock2 (NM_009072.1,657-675).
catgctattggataaacat

SEQ ID NO: 513626 - DNA, 19 bp, Mus musculus
  siRNA target sequence for Rock2 (NM_009072.1,666-684).
ggataaacatggacatcta

SEQ ID NO: 513627 - DNA, 19 bp, Mus musculus
  siRNA target sequence for Rock2 (NM_009072.1,667-685).
gataaacatggacatctaa

SEQ ID NO: 513628 - DNA, 19 bp, Mus musculus
  siRNA target sequence for Rock2 (NM_009072.1,754-772).
ggaactcccgactacatat

SEQ ID NO: 513629 - DNA, 19 bp, Mus musculus
  siRNA target sequence for Rock2 (NM_009072.1,774-792).
gcccgaggttctgaaatca

SEQ ID NO: 513630 - DNA, 19 bp, Mus musculus
  siRNA target sequence for Rock2 (NM_009072.1,776-794).
ccgaggttctgaaatcaca

SEQ ID NO: 513631 - DNA, 19 bp, Mus musculus
  siRNA target sequence for Rock2 (NM_009072.1,810-828).
ctatgggcgagaatgtgat

SEQ ID NO: 513632 - DNA, 19 bp, Mus musculus
  siRNA target sequence for Rock2 (NM_009072.1,849-867).
cctttttgagatgttagta

SEQ ID NO: 513633 - DNA, 19 bp, Mus musculus
  siRNA target sequence for Rock2 (NM_009072.1,878-896).
cattttacgcagattcact

SEQ ID NO: 513634 - DNA, 19 bp, Mus musculus
  siRNA target sequence for Rock2 (NM_009072.1,911-929).
gcaaaattatggatcataa

SEQ ID NO: 513635 - DNA, 19 bp, Mus musculus
  siRNA target sequence for Rock2 (NM_009072.1,912-930).
caaaattatggatcataaa

SEQ ID NO: 513636 - DNA, 19 bp, Mus musculus
  siRNA target sequence for Rock2 (NM_009072.1,970-988).
catgcgaagaatctcatat

SEQ ID NO: 513637 - DNA, 19 bp, Mus musculus
  siRNA target sequence for Rock2 (NM_009072.1,1011-1029).
ggtacgacttggaagaaat

SEQ ID NO: 513638 - DNA, 19 bp, Mus musculus
  siRNA target sequence for Rock2 (NM_009072.1,1048-1066).
cagcatcctttctttaaga

SEQ ID NO: 513639 - DNA, 19 bp, Mus musculus
  siRNA target sequence for Rock2 (NM_009072.1,1123-1141).
ctcagcagtgacatagaca

SEQ ID NO: 513640 - DNA, 19 bp, Mus musculus
  siRNA target sequence for Rock2 (NM_009072.1,1145-1163).
gcaactttgacgacattga

SEQ ID NO: 513641 - DNA, 19 bp, Mus musculus
  siRNA target sequence for Rock2 (NM_009072.1,1155-1173).
cgacattgaggatgacaaa

SEQ ID NO: 513642 - DNA, 19 bp, Mus musculus
  siRNA target sequence for Rock2 (NM_009072.1,1183-1201).
gagaccttcccgattccta

SEQ ID NO: 513643 - DNA, 19 bp, Mus musculus
  siRNA target sequence for Rock2 (NM_009072.1,1185-1203).
gaccttcccgattcctaaa

SEQ ID NO: 513644 - DNA, 19 bp, Mus musculus
  siRNA target sequence for Rock2 (NM_009072.1,1191-1209).
cccgattcctaaagctttt

SEQ ID NO: 513645 - DNA, 19 bp, Mus musculus
  siRNA target sequence for Rock2 (NM_009072.1,1213-1231).
ggaaatcagctgcctttta

SEQ ID NO: 513646 - DNA, 19 bp, Mus musculus
  siRNA target sequence for Rock2 (NM_009072.1,1272-1290).
ctctccaccttgtagagaa

SEQ ID NO: 513647 - DNA, 19 bp, Mus musculus
  siRNA target sequence for Rock2 (NM_009072.1,1404-1422).
gaagtgcaaatctattaat

SEQ ID NO: 513648 - DNA, 19 bp, Mus musculus
  siRNA target sequence for Rock2 (NM_009072.1,1407-1425).
gtgcaaatctattaatact

SEQ ID NO: 513649 - DNA, 19 bp, Mus musculus
  siRNA target sequence for Rock2 (NM_009072.1,1450-1468).
ctagaagaagagattacct

SEQ ID NO: 513650 - DNA, 19 bp, Mus musculus
  siRNA target sequence for Rock2 (NM_009072.1,1461-1479).
gattaccttacggaaaagt

SEQ ID NO: 513651 - DNA, 19 bp, Mus musculus
  siRNA target sequence for Rock2 (NM_009072.1,1471-1489).
cggaaaagtgtggaatcaa

SEQ ID NO: 513652 - DNA, 19 bp, Mus musculus
  siRNA target sequence for Rock2 (NM_009072.1,1516-1534).
gcccttcttcagcacaaaa

SEQ ID NO: 513653 - DNA, 19 bp, Mus musculus
  siRNA target sequence for Rock2 (NM_009072.1,1517-1535).
cccttcttcagcacaaaaa

SEQ ID NO: 513654 - DNA, 19 bp, Mus musculus
  siRNA target sequence for Rock2 (NM_009072.1,1548-1566).
gcggaaagctgatcatgaa

SEQ ID NO: 513655 - DNA, 19 bp, Mus musculus
  siRNA target sequence for Rock2 (NM_009072.1,1602-1620).
cagcttaaaagatcaactt

SEQ ID NO: 513656 - DNA, 19 bp, Mus musculus
  siRNA target sequence for Rock2 (NM_009072.1,1690-1708).
ctggatgaagctaatgctt

SEQ ID NO: 513657 - DNA, 19 bp, Mus musculus
  siRNA target sequence for Rock2 (NM_009072.1,1730-1748).
ctgcagcacggttaagaaa

SEQ ID NO: 513658 - DNA, 19 bp, Mus musculus
  siRNA target sequence for Rock2 (NM_009072.1,1732-1750).
gcagcacggttaagaaaaa

SEQ ID NO: 513659 - DNA, 19 bp, Mus musculus
  siRNA target sequence for Rock2 (NM_009072.1,1752-1770).
ccaggcagaaagttccaaa

SEQ ID NO: 513660 - DNA, 19 bp, Mus musculus
  siRNA target sequence for Rock2 (NM_009072.1,1779-1797).
gcagctggaatctaacaat

SEQ ID NO: 513661 - DNA, 19 bp, Mus musculus
  siRNA target sequence for Rock2 (NM_009072.1,1794-1812).
caatagagatctacaagat

SEQ ID NO: 513662 - DNA, 19 bp, Mus musculus
  siRNA target sequence for Rock2 (NM_009072.1,1824-1842).
gcttgagactgccaagtta

SEQ ID NO: 513663 - DNA, 19 bp, Mus musculus
  siRNA target sequence for Rock2 (NM_009072.1,1825-1843).
cttgagactgccaagttaa

SEQ ID NO: 513664 - DNA, 19 bp, Mus musculus
  siRNA target sequence for Rock2 (NM_009072.1,1830-1848).
gactgccaagttaaaactt

SEQ ID NO: 513665 - DNA, 19 bp, Mus musculus
  siRNA target sequence for Rock2 (NM_009072.1,1832-1850).
ctgccaagttaaaacttga

SEQ ID NO: 513666 - DNA, 19 bp, Mus musculus
  siRNA target sequence for Rock2 (NM_009072.1,1902-1920).
gacccatggatcagagata

SEQ ID NO: 513667 - DNA, 19 bp, Mus musculus
  siRNA target sequence for Rock2 (NM_009072.1,1968-1986).
gactggcaaagccttacta

SEQ ID NO: 513668 - DNA, 19 bp, Mus musculus
  siRNA target sequence for Rock2 (NM_009072.1,2019-2037).
ggagaagctcactgactta

SEQ ID NO: 513669 - DNA, 19 bp, Mus musculus
  siRNA target sequence for Rock2 (NM_009072.1,2055-2073).
catggaaatagatatgaca

SEQ ID NO: 513670 - DNA, 19 bp, Mus musculus
  siRNA target sequence for Rock2 (NM_009072.1,2137-2155).
gcacggctagcggataaaa

SEQ ID NO: 513671 - DNA, 19 bp, Mus musculus
  siRNA target sequence for Rock2 (NM_009072.1,2138-2156).
cacggctagcggataaaaa

SEQ ID NO: 513672 - DNA, 19 bp, Mus musculus
  siRNA target sequence for Rock2 (NM_009072.1,2140-2158).
cggctagcggataaaaata

SEQ ID NO: 513673 - DNA, 19 bp, Mus musculus
  siRNA target sequence for Rock2 (NM_009072.1,2141-2159).
ggctagcggataaaaataa

SEQ ID NO: 513674 - DNA, 19 bp, Mus musculus
  siRNA target sequence for Rock2 (NM_009072.1,2143-2161).
ctagcggataaaaataaga

SEQ ID NO: 513675 - DNA, 19 bp, Mus musculus
  siRNA target sequence for Rock2 (NM_009072.1,2146-2164).
gcggataaaaataagatct

SEQ ID NO: 513676 - DNA, 19 bp, Mus musculus
  siRNA target sequence for Rock2 (NM_009072.1,2160-2178).
gatctatgaatccattgaa

SEQ ID NO: 513677 - DNA, 19 bp, Mus musculus
  siRNA target sequence for Rock2 (NM_009072.1,2172-2190).
cattgaagaagctaaatca

SEQ ID NO: 513678 - DNA, 19 bp, Mus musculus
  siRNA target sequence for Rock2 (NM_009072.1,2260-2278).
ctcctggaagccgagaaaa

SEQ ID NO: 513679 - DNA, 19 bp, Mus musculus
  siRNA target sequence for Rock2 (NM_009072.1,2350-2368).
gtgctgaacgaggatgtta

SEQ ID NO: 513680 - DNA, 19 bp, Mus musculus
  siRNA target sequence for Rock2 (NM_009072.1,2352-2370).
gctgaacgaggatgttaga

SEQ ID NO: 513681 - DNA, 19 bp, Mus musculus
  siRNA target sequence for Rock2 (NM_009072.1,2355-2373).
gaacgaggatgttagaaat

SEQ ID NO: 513682 - DNA, 19 bp, Mus musculus
  siRNA target sequence for Rock2 (NM_009072.1,2403-2421).
gaagcgttgtcttatgcaa

SEQ ID NO: 513683 - DNA, 19 bp, Mus musculus
  siRNA target sequence for Rock2 (NM_009072.1,2406-2424).
gcgttgtcttatgcaaaat

SEQ ID NO: 513684 - DNA, 19 bp, Mus musculus
  siRNA target sequence for Rock2 (NM_009072.1,2775-2793).
gcagctggctcgttccatt

SEQ ID NO: 513685 - DNA, 19 bp, Mus musculus
  siRNA target sequence for Rock2 (NM_009072.1,2786-2804).
gttccattgctgaagaaca

SEQ ID NO: 513686 - DNA, 19 bp, Mus musculus
  siRNA target sequence for Rock2 (NM_009072.1,2789-2807).
ccattgctgaagaacaata

SEQ ID NO: 513687 - DNA, 19 bp, Mus musculus
  siRNA target sequence for Rock2 (NM_009072.1,2856-2874).
gatgatggctagacacaaa

SEQ ID NO: 513688 - DNA, 19 bp, Mus musculus
  siRNA target sequence for Rock2 (NM_009072.1,2885-2903).
ctgaaaaggatactacaat

SEQ ID NO: 513689 - DNA, 19 bp, Mus musculus
  siRNA target sequence for Rock2 (NM_009072.1,2917-2935).
gaaacaaataggacactaa

SEQ ID NO: 513690 - DNA, 19 bp, Mus musculus
  siRNA target sequence for Rock2 (NM_009072.1,2936-2954).
ctagcgatgttgcaaatct

SEQ ID NO: 513691 - DNA, 19 bp, Mus musculus
  siRNA target sequence for Rock2 (NM_009072.1,3011-3029).
ccaagttgaaagatgaaga

SEQ ID NO: 513692 - DNA, 19 bp, Mus musculus
  siRNA target sequence for Rock2 (NM_009072.1,3095-3113).
ctcaagctgtgaataagtt

SEQ ID NO: 513693 - DNA, 19 bp, Mus musculus
  siRNA target sequence for Rock2 (NM_009072.1,3111-3129).
gttggcggagatcatgaat

SEQ ID NO: 513694 - DNA, 19 bp, Mus musculus
  siRNA target sequence for Rock2 (NM_009072.1,3115-3133).
gcggagatcatgaatcgaa

SEQ ID NO: 513695 - DNA, 19 bp, Mus musculus
  siRNA target sequence for Rock2 (NM_009072.1,3231-3249).
gacacaacagatgatcaaa

SEQ ID NO: 513696 - DNA, 19 bp, Mus musculus
  siRNA target sequence for Rock2 (NM_009072.1,3289-3307).
gaagagagccaaattcgaa

SEQ ID NO: 513697 - DNA, 19 bp, Mus musculus
  siRNA target sequence for Rock2 (NM_009072.1,3296-3314).
gccaaattcgaatagaact

SEQ ID NO: 513698 - DNA, 19 bp, Mus musculus
  siRNA target sequence for Rock2 (NM_009072.1,3318-3336).
gatgaccctggacagtaaa

SEQ ID NO: 513699 - DNA, 19 bp, Mus musculus
  siRNA target sequence for Rock2 (NM_009072.1,3440-3458).
gatttccagaatcaagatt

SEQ ID NO: 513700 - DNA, 19 bp, Mus musculus
  siRNA target sequence for Rock2 (NM_009072.1,3478-3496).
cctgtgcgcaacaacacta

SEQ ID NO: 513701 - DNA, 19 bp, Mus musculus
  siRNA target sequence for Rock2 (NM_009072.1,3510-3528).
ggttaaaaagtatgtgatt

SEQ ID NO: 513702 - DNA, 19 bp, Mus musculus
  siRNA target sequence for Rock2 (NM_009072.1,3586-3604).
ccttacatggtgttagaca

SEQ ID NO: 513703 - DNA, 19 bp, Mus musculus
  siRNA target sequence for Rock2 (NM_009072.1,3631-3649).
gttacccagacagatgtat

SEQ ID NO: 513704 - DNA, 19 bp, Mus musculus
  siRNA target sequence for Rock2 (NM_009072.1,3698-3716).
ccaatgaaggagaaagtaa

SEQ ID NO: 513705 - DNA, 19 bp, Mus musculus
  siRNA target sequence for Rock2 (NM_009072.1,3745-3763).
gtgggagaaaaatctaatt

SEQ ID NO: 513706 - DNA, 19 bp, Mus musculus
  siRNA target sequence for Rock2 (NM_009072.1,3772-3790).
cacaaaggacatgagttta

SEQ ID NO: 513707 - DNA, 19 bp, Mus musculus
  siRNA target sequence for Rock2 (NM_009072.1,3778-3796).
ggacatgagtttattccta

SEQ ID NO: 513708 - DNA, 19 bp, Mus musculus
  siRNA target sequence for Rock2 (NM_009072.1,3839-3857).
cgctgtggcacatgtttaa

SEQ ID NO: 513709 - DNA, 19 bp, Mus musculus
  siRNA target sequence for Rock2 (NM_009072.1,3878-3896).
gccgtaggtgccacattaa

SEQ ID NO: 513710 - DNA, 19 bp, Mus musculus
  siRNA target sequence for Rock2 (NM_009072.1,3879-3897).
ccgtaggtgccacattaaa

SEQ ID NO: 513711 - DNA, 19 bp, Mus musculus
  siRNA target sequence for Rock2 (NM_009072.1,3880-3898).
cgtaggtgccacattaaat

SEQ ID NO: 513712 - DNA, 19 bp, Mus musculus
  siRNA target sequence for Rock2 (NM_009072.1,3937-3955).
gcgccctgcaaagtttatt

SEQ ID NO: 513713 - DNA, 19 bp, Mus musculus
  siRNA target sequence for Rock2 (NM_009072.1,3938-3956).
cgccctgcaaagtttatta

SEQ ID NO: 513714 - DNA, 19 bp, Mus musculus
  siRNA target sequence for Rock2 (NM_009072.1,3939-3957).
gccctgcaaagtttattat

SEQ ID NO: 513715 - DNA, 19 bp, Mus musculus
  siRNA target sequence for Rock2 (NM_009072.1,3941-3959).
cctgcaaagtttattatga

SEQ ID NO: 513716 - DNA, 19 bp, Mus musculus
  siRNA target sequence for Rock2 (NM_009072.1,3942-3960).
ctgcaaagtttattatgat

SEQ ID NO: 513717 - DNA, 19 bp, Mus musculus
  siRNA target sequence for Rock2 (NM_009072.1,3944-3962).
gcaaagtttattatgatat

SEQ ID NO: 513718 - DNA, 19 bp, Mus musculus
  siRNA target sequence for Rock2 (NM_009072.1,4021-4039).
gttagtcggttggtgaaaa

SEQ ID NO: 513719 - DNA, 19 bp, Mus musculus
  siRNA target sequence for Rock2 (NM_009072.1,4025-4043).
gtcggttggtgaaaaagat

SEQ ID NO: 513720 - DNA, 19 bp, Mus musculus
  siRNA target sequence for Rock2 (NM_009072.1,4077-4095).
ccgatcatcccctagaact

SEQ ID NO: 513721 - DNA, 19 bp, Mus musculus
  siRNA target sequence for Rock2 (NM_009072.1,4078-4096).
cgatcatcccctagaactt

SEQ ID NO: 513722 - DNA, 19 bp, Mus musculus
  siRNA target sequence for Rock2 (NM_009072.1,4094-4112).
cttcaatgaaaatacaaca

SEQ ID NO: 513723 - DNA, 19 bp, Mus musculus
  siRNA target sequence for Ror1 (NM_013845.2,566-584).
ggaacacttcaagtgaaat

SEQ ID NO: 513724 - DNA, 19 bp, Mus musculus
  siRNA target sequence for Ror1 (NM_013845.2,585-603).
cgacaaaggttcttactta

SEQ ID NO: 513725 - DNA, 19 bp, Mus musculus
  siRNA target sequence for Ror1 (NM_013845.2,610-628).
gatgagccgatgaataaca

SEQ ID NO: 513726 - DNA, 19 bp, Mus musculus
  siRNA target sequence for Ror1 (NM_013845.2,613-631).
gagccgatgaataacatca

SEQ ID NO: 513727 - DNA, 19 bp, Mus musculus
  siRNA target sequence for Ror1 (NM_013845.2,616-634).
ccgatgaataacatcacaa

SEQ ID NO: 513728 - DNA, 19 bp, Mus musculus
  siRNA target sequence for Ror1 (NM_013845.2,692-710).
gtatccgctggttcaagaa

SEQ ID NO: 513729 - DNA, 19 bp, Mus musculus
  siRNA target sequence for Ror1 (NM_013845.2,696-714).
ccgctggttcaagaatgat

SEQ ID NO: 513730 - DNA, 19 bp, Mus musculus
  siRNA target sequence for Ror1 (NM_013845.2,768-786).
ctctcggctgcggattaga

SEQ ID NO: 513731 - DNA, 19 bp, Mus musculus
  siRNA target sequence for Ror1 (NM_013845.2,770-788).
ctcggctgcggattagaaa

SEQ ID NO: 513732 - DNA, 19 bp, Mus musculus
  siRNA target sequence for Ror1 (NM_013845.2,774-792).
gctgcggattagaaacctt

SEQ ID NO: 513733 - DNA, 19 bp, Mus musculus
  siRNA target sequence for Ror1 (NM_013845.2,797-815).
ccacagacactggttactt

SEQ ID NO: 513734 - DNA, 19 bp, Mus musculus
  siRNA target sequence for Ror1 (NM_013845.2,943-961).
ccgtaccgaggcattgcat

SEQ ID NO: 513735 - DNA, 19 bp, Mus musculus
  siRNA target sequence for Ror1 (NM_013845.2,976-994).
ggcaaccgcactgtgtata

SEQ ID NO: 513736 - DNA, 19 bp, Mus musculus
  siRNA target sequence for Ror1 (NM_013845.2,977-995).
gcaaccgcactgtgtatat

SEQ ID NO: 513737 - DNA, 19 bp, Mus musculus
  siRNA target sequence for Ror1 (NM_013845.2,1005-1023).
gcatatgcagggggaaata

SEQ ID NO: 513738 - DNA, 19 bp, Mus musculus
  siRNA target sequence for Ror1 (NM_013845.2,1061-1079).
cctccagccatttatctga

SEQ ID NO: 513739 - DNA, 19 bp, Mus musculus
  siRNA target sequence for Ror1 (NM_013845.2,1165-1183).
gacttgtgtcgtgatgaat

SEQ ID NO: 513740 - DNA, 19 bp, Mus musculus
  siRNA target sequence for Ror1 (NM_013845.2,1167-1185).
cttgtgtcgtgatgaatgt

SEQ ID NO: 513741 - DNA, 19 bp, Mus musculus
  siRNA target sequence for Ror1 (NM_013845.2,1206-1224).
gtgtcagacagagtacatt

SEQ ID NO: 513742 - DNA, 19 bp, Mus musculus
  siRNA target sequence for Ror1 (NM_013845.2,1232-1250).
gatcaaatcccatgatttt

SEQ ID NO: 513743 - DNA, 19 bp, Mus musculus
  siRNA target sequence for Ror1 (NM_013845.2,1235-1253).
caaatcccatgattttgat

SEQ ID NO: 513744 - DNA, 19 bp, Mus musculus
  siRNA target sequence for Ror1 (NM_013845.2,1333-1351).
cccatggcggatcctataa

SEQ ID NO: 513745 - DNA, 19 bp, Mus musculus
  siRNA target sequence for Ror1 (NM_013845.2,1334-1352).
ccatggcggatcctataaa

SEQ ID NO: 513746 - DNA, 19 bp, Mus musculus
  siRNA target sequence for Ror1 (NM_013845.2,1335-1353).
catggcggatcctataaat

SEQ ID NO: 513747 - DNA, 19 bp, Mus musculus
  siRNA target sequence for Ror1 (NM_013845.2,1338-1356).
ggcggatcctataaataaa

SEQ ID NO: 513748 - DNA, 19 bp, Mus musculus
  siRNA target sequence for Ror1 (NM_013845.2,1339-1357).
gcggatcctataaataaaa

SEQ ID NO: 513749 - DNA, 19 bp, Mus musculus
  siRNA target sequence for Ror1 (NM_013845.2,1597-1615).
gcatgtgattccaaagatt

SEQ ID NO: 513750 - DNA, 19 bp, Mus musculus
  siRNA target sequence for Ror1 (NM_013845.2,1706-1724).
gtgtgtgccgcaataacca

SEQ ID NO: 513751 - DNA, 19 bp, Mus musculus
  siRNA target sequence for Ror1 (NM_013845.2,1714-1732).
cgcaataaccagaagtctt

SEQ ID NO: 513752 - DNA, 19 bp, Mus musculus
  siRNA target sequence for Ror1 (NM_013845.2,1846-1864).
gtgcgtttcatggaagaat

SEQ ID NO: 513753 - DNA, 19 bp, Mus musculus
  siRNA target sequence for Ror1 (NM_013845.2,1858-1876).
gaagaattgggtgaatgta

SEQ ID NO: 513754 - DNA, 19 bp, Mus musculus
  siRNA target sequence for Ror1 (NM_013845.2,1867-1885).
ggtgaatgtacctttggaa

SEQ ID NO: 513755 - DNA, 19 bp, Mus musculus
  siRNA target sequence for Ror1 (NM_013845.2,1868-1886).
gtgaatgtacctttggaaa

SEQ ID NO: 513756 - DNA, 19 bp, Mus musculus
  siRNA target sequence for Ror1 (NM_013845.2,1874-1892).
gtacctttggaaaaatcta

SEQ ID NO: 513757 - DNA, 19 bp, Mus musculus
  siRNA target sequence for Ror1 (NM_013845.2,1877-1895).
cctttggaaaaatctataa

SEQ ID NO: 513758 - DNA, 19 bp, Mus musculus
  siRNA target sequence for Ror1 (NM_013845.2,1974-1992).
gcagtggacagaatttcaa

SEQ ID NO: 513759 - DNA, 19 bp, Mus musculus
  siRNA target sequence for Ror1 (NM_013845.2,2003-2021).
ctctcatggctgaactaca

SEQ ID NO: 513760 - DNA, 19 bp, Mus musculus
  siRNA target sequence for Ror1 (NM_013845.2,2020-2038).
caccaccccaatattgtat

SEQ ID NO: 513761 - DNA, 19 bp, Mus musculus
  siRNA target sequence for Ror1 (NM_013845.2,2167-2185).
gatgggacggtcaaatcca

SEQ ID NO: 513762 - DNA, 19 bp, Mus musculus
  siRNA target sequence for Ror1 (NM_013845.2,2200-2218).
gatttcttacacatagcaa

SEQ ID NO: 513763 - DNA, 19 bp, Mus musculus
  siRNA target sequence for Ror1 (NM_013845.2,2278-2296).
gcagctcgcaacattttaa

SEQ ID NO: 513764 - DNA, 19 bp, Mus musculus
  siRNA target sequence for Ror1 (NM_013845.2,2279-2297).
cagctcgcaacattttaat

SEQ ID NO: 513765 - DNA, 19 bp, Mus musculus
  siRNA target sequence for Ror1 (NM_013845.2,2302-2320).
gagcaactgcatgtaaaaa

SEQ ID NO: 513766 - DNA, 19 bp, Mus musculus
  siRNA target sequence for Ror1 (NM_013845.2,2304-2322).
gcaactgcatgtaaaaatt

SEQ ID NO: 513767 - DNA, 19 bp, Mus musculus
  siRNA target sequence for Ror1 (NM_013845.2,2417-2435).
ccatcatgtacggcaaatt

SEQ ID NO: 513768 - DNA, 19 bp, Mus musculus
  siRNA target sequence for Ror1 (NM_013845.2,2502-2520).
gccatattatgggtttagt

SEQ ID NO: 513769 - DNA, 19 bp, Mus musculus
  siRNA target sequence for Ror1 (NM_013845.2,2503-2521).
ccatattatgggtttagta

SEQ ID NO: 513770 - DNA, 19 bp, Mus musculus
  siRNA target sequence for Ror1 (NM_013845.2,2504-2522).
catattatgggtttagtaa

SEQ ID NO: 513771 - DNA, 19 bp, Mus musculus
  siRNA target sequence for Ror1 (NM_013845.2,2779-2797).
ccccgatttcccaattaca

SEQ ID NO: 513772 - DNA, 19 bp, Mus musculus
  siRNA target sequence for Ror1 (NM_013845.2,2780-2798).
cccgatttcccaattacat

SEQ ID NO: 513773 - DNA, 19 bp, Mus musculus
  siRNA target sequence for Ror1 (NM_013845.2,2782-2800).
cgatttcccaattacatgt

SEQ ID NO: 513774 - DNA, 19 bp, Mus musculus
  siRNA target sequence for Ror1 (NM_013845.2,2783-2801).
gatttcccaattacatgtt

SEQ ID NO: 513775 - DNA, 19 bp, Mus musculus
  siRNA target sequence for Ror1 (NM_013845.2,2802-2820).
cccgagccaagggattaca

SEQ ID NO: 513776 - DNA, 19 bp, Mus musculus
  siRNA target sequence for Ror1 (NM_013845.2,2828-2846).
gtcagatcgctggtttcat

SEQ ID NO: 513777 - DNA, 19 bp, Mus musculus
  siRNA target sequence for Ror1 (NM_013845.2,2886-2904).
caatggatacccaatacct

SEQ ID NO: 513778 - DNA, 19 bp, Mus musculus
  siRNA target sequence for Ror1 (NM_013845.2,2948-2966).
ggcctcccagggtgattca

SEQ ID NO: 513779 - DNA, 19 bp, Mus musculus
  siRNA target sequence for Ror1 (NM_013845.2,3085-3103).
ccccacatgtcaattccaa

SEQ ID NO: 513780 - DNA, 19 bp, Mus musculus
  siRNA target sequence for Ror1 (NM_013845.2,3086-3104).
cccacatgtcaattccaaa

SEQ ID NO: 513781 - DNA, 19 bp, Mus musculus
  siRNA target sequence for Ror1 (NM_013845.2,3087-3105).
ccacatgtcaattccaaat

SEQ ID NO: 513782 - DNA, 19 bp, Mus musculus
  siRNA target sequence for Ror1 (NM_013845.2,3116-3134).
gaatgggtatcactgtttt

SEQ ID NO: 513783 - DNA, 19 bp, Mus musculus
  siRNA target sequence for Ror1 (NM_013845.2,3205-3223).
catgggcacaccgaatcta

SEQ ID NO: 513784 - DNA, 19 bp, Mus musculus
  siRNA target sequence for Ror1 (NM_013845.2,3208-3226).
gggcacaccgaatctatga

SEQ ID NO: 513785 - DNA, 19 bp, Mus musculus
  siRNA target sequence for Ror1 (NM_013845.2,3209-3227).
ggcacaccgaatctatgat

SEQ ID NO: 513786 - DNA, 19 bp, Mus musculus
  siRNA target sequence for Ror1 (NM_013845.2,3211-3229).
cacaccgaatctatgattt

SEQ ID NO: 513787 - DNA, 19 bp, Mus musculus
  siRNA target sequence for Ror1 (NM_013845.2,3213-3231).
caccgaatctatgatttct

SEQ ID NO: 513788 - DNA, 19 bp, Mus musculus
  siRNA target sequence for Ror2 (NM_013846.2,395-413).
ctggagccagtcaacaata

SEQ ID NO: 513789 - DNA, 19 bp, Mus musculus
  siRNA target sequence for Ror2 (NM_013846.2,674-692).
cacagcccgaaccacaatt

SEQ ID NO: 513790 - DNA, 19 bp, Mus musculus
  siRNA target sequence for Ror2 (NM_013846.2,676-694).
cagcccgaaccacaatttt

SEQ ID NO: 513791 - DNA, 19 bp, Mus musculus
  siRNA target sequence for Ror2 (NM_013846.2,678-696).
gcccgaaccacaattttca

SEQ ID NO: 513792 - DNA, 19 bp, Mus musculus
  siRNA target sequence for Ror2 (NM_013846.2,742-760).
cgcttgtgcgcgcttcatt

SEQ ID NO: 513793 - DNA, 19 bp, Mus musculus
  siRNA target sequence for Ror2 (NM_013846.2,805-823).
gattgaaaaccgaatcaca

SEQ ID NO: 513794 - DNA, 19 bp, Mus musculus
  siRNA target sequence for Ror2 (NM_013846.2,950-968).
gaactgtgccgggatgaat

SEQ ID NO: 513795 - DNA, 19 bp, Mus musculus
  siRNA target sequence for Ror2 (NM_013846.2,1319-1337).
gaaggcccgtggtgcttta

SEQ ID NO: 513796 - DNA, 19 bp, Mus musculus
  siRNA target sequence for Ror2 (NM_013846.2,1477-1495).
ctgcatgtgccgcaacaaa

SEQ ID NO: 513797 - DNA, 19 bp, Mus musculus
  siRNA target sequence for Ror2 (NM_013846.2,1582-1600).
caaacaggccaaactcaaa

SEQ ID NO: 513798 - DNA, 19 bp, Mus musculus
  siRNA target sequence for Ror2 (NM_013846.2,1650-1668).
ggtttggcaaggtctacaa

SEQ ID NO: 513799 - DNA, 19 bp, Mus musculus
  siRNA target sequence for Ror2 (NM_013846.2,1651-1669).
gtttggcaaggtctacaaa

SEQ ID NO: 513800 - DNA, 19 bp, Mus musculus
  siRNA target sequence for Ror2 (NM_013846.2,1844-1862).
cccttgagcatgatcttca

SEQ ID NO: 513801 - DNA, 19 bp, Mus musculus
  siRNA target sequence for Ror2 (NM_013846.2,2106-2124).
gcctcttccgtgaggtata

SEQ ID NO: 513802 - DNA, 19 bp, Mus musculus
  siRNA target sequence for Ror2 (NM_013846.2,2120-2138).
gtatactccgcagattact

SEQ ID NO: 513803 - DNA, 19 bp, Mus musculus
  siRNA target sequence for Ros1 (NM_011282.1,301-319).
gctggctcaccctgaaact

SEQ ID NO: 513804 - DNA, 19 bp, Mus musculus
  siRNA target sequence for Ros1 (NM_011282.1,304-322).
ggctcaccctgaaacttgt

SEQ ID NO: 513805 - DNA, 19 bp, Mus musculus
  siRNA target sequence for Ros1 (NM_011282.1,332-350).
ggtccttgggtgcatcata

SEQ ID NO: 513806 - DNA, 19 bp, Mus musculus
  siRNA target sequence for Ros1 (NM_011282.1,333-351).
gtccttgggtgcatcatat

SEQ ID NO: 513807 - DNA, 19 bp, Mus musculus
  siRNA target sequence for Ros1 (NM_011282.1,336-354).
cttgggtgcatcatatgga

SEQ ID NO: 513808 - DNA, 19 bp, Mus musculus
  siRNA target sequence for Ros1 (NM_011282.1,341-359).
gtgcatcatatggatttct

SEQ ID NO: 513809 - DNA, 19 bp, Mus musculus
  siRNA target sequence for Ros1 (NM_011282.1,428-446).
cagtggcacacggtacaat

SEQ ID NO: 513810 - DNA, 19 bp, Mus musculus
  siRNA target sequence for Ros1 (NM_011282.1,430-448).
gtggcacacggtacaatct

SEQ ID NO: 513811 - DNA, 19 bp, Mus musculus
  siRNA target sequence for Ros1 (NM_011282.1,432-450).
ggcacacggtacaatctga

SEQ ID NO: 513812 - DNA, 19 bp, Mus musculus
  siRNA target sequence for Ros1 (NM_011282.1,502-520).
cgtgtgctttaaagtgtaa

SEQ ID NO: 513813 - DNA, 19 bp, Mus musculus
  siRNA target sequence for Ros1 (NM_011282.1,522-540).
gacacctacgccaccattt

SEQ ID NO: 513814 - DNA, 19 bp, Mus musculus
  siRNA target sequence for Ros1 (NM_011282.1,524-542).
cacctacgccaccatttgt

SEQ ID NO: 513815 - DNA, 19 bp, Mus musculus
  siRNA target sequence for Ros1 (NM_011282.1,526-544).
cctacgccaccatttgtga

SEQ ID NO: 513816 - DNA, 19 bp, Mus musculus
  siRNA target sequence for Ros1 (NM_011282.1,696-714).
gtcaaatacataattcaat

SEQ ID NO: 513817 - DNA, 19 bp, Mus musculus
  siRNA target sequence for Ros1 (NM_011282.1,757-775).
ccgtgtccaagctctcata

SEQ ID NO: 513818 - DNA, 19 bp, Mus musculus
  siRNA target sequence for Ros1 (NM_011282.1,759-777).
gtgtccaagctctcataca

SEQ ID NO: 513819 - DNA, 19 bp, Mus musculus
  siRNA target sequence for Ros1 (NM_011282.1,791-809).
gcatccattcacagaatat

SEQ ID NO: 513820 - DNA, 19 bp, Mus musculus
  siRNA target sequence for Ros1 (NM_011282.1,837-855).
gcccaactgcatctttatt

SEQ ID NO: 513821 - DNA, 19 bp, Mus musculus
  siRNA target sequence for Ros1 (NM_011282.1,858-876).
ccaccaagtcccagttaca

SEQ ID NO: 513822 - DNA, 19 bp, Mus musculus
  siRNA target sequence for Ros1 (NM_011282.1,985-1003).
gacctattttgggttataa

SEQ ID NO: 513823 - DNA, 19 bp, Mus musculus
  siRNA target sequence for Ros1 (NM_011282.1,1010-1028).
gctcatcagtaaaaatcaa

SEQ ID NO: 513824 - DNA, 19 bp, Mus musculus
  siRNA target sequence for Ros1 (NM_011282.1,1102-1120).
ctatcgcagcagtcaatga

SEQ ID NO: 513825 - DNA, 19 bp, Mus musculus
  siRNA target sequence for Ros1 (NM_011282.1,1106-1124).
cgcagcagtcaatgaagtt

SEQ ID NO: 513826 - DNA, 19 bp, Mus musculus
  siRNA target sequence for Ros1 (NM_011282.1,1130-1148).
ggggccagaagcagaatct

SEQ ID NO: 513827 - DNA, 19 bp, Mus musculus
  siRNA target sequence for Ros1 (NM_011282.1,1131-1149).
gggccagaagcagaatcta

SEQ ID NO: 513828 - DNA, 19 bp, Mus musculus
  siRNA target sequence for Ros1 (NM_011282.1,1231-1249).
ctttgaagtacttagtaga

SEQ ID NO: 513829 - DNA, 19 bp, Mus musculus
  siRNA target sequence for Ros1 (NM_011282.1,1275-1293).
gctatacaccataatatta

SEQ ID NO: 513830 - DNA, 19 bp, Mus musculus
  siRNA target sequence for Ros1 (NM_011282.1,1284-1302).
cataatattacaggaatat

SEQ ID NO: 513831 - DNA, 19 bp, Mus musculus
  siRNA target sequence for Ros1 (NM_011282.1,1391-1409).
cctgagaattttttaccaa

SEQ ID NO: 513832 - DNA, 19 bp, Mus musculus
  siRNA target sequence for Ros1 (NM_011282.1,1446-1464).
ctgtaccaaaggatgtatt

SEQ ID NO: 513833 - DNA, 19 bp, Mus musculus
  siRNA target sequence for Ros1 (NM_011282.1,1452-1470).
caaaggatgtatttcatca

SEQ ID NO: 513834 - DNA, 19 bp, Mus musculus
  siRNA target sequence for Ros1 (NM_011282.1,1469-1487).
catggataaactggtatat

SEQ ID NO: 513835 - DNA, 19 bp, Mus musculus
  siRNA target sequence for Ros1 (NM_011282.1,1473-1491).
gataaactggtatatgtct

SEQ ID NO: 513836 - DNA, 19 bp, Mus musculus
  siRNA target sequence for Ros1 (NM_011282.1,1606-1624).
gcatctacagagtcaatct

SEQ ID NO: 513837 - DNA, 19 bp, Mus musculus
  siRNA target sequence for Ros1 (NM_011282.1,1648-1666).
ccaaagctgtgcgtattgt

SEQ ID NO: 513838 - DNA, 19 bp, Mus musculus
  siRNA target sequence for Ros1 (NM_011282.1,1702-1720).
cccaatccaagcgaatcat

SEQ ID NO: 513839 - DNA, 19 bp, Mus musculus
  siRNA target sequence for Ros1 (NM_011282.1,1703-1721).
ccaatccaagcgaatcatt

SEQ ID NO: 513840 - DNA, 19 bp, Mus musculus
  siRNA target sequence for Ros1 (NM_011282.1,1708-1726).
ccaagcgaatcatttactt

SEQ ID NO: 513841 - DNA, 19 bp, Mus musculus
  siRNA target sequence for Ros1 (NM_011282.1,1712-1730).
gcgaatcatttacttcaat

SEQ ID NO: 513842 - DNA, 19 bp, Mus musculus
  siRNA target sequence for Ros1 (NM_011282.1,2028-2046).
cgagaggcccttattcagt

SEQ ID NO: 513843 - DNA, 19 bp, Mus musculus
  siRNA target sequence for Ros1 (NM_011282.1,2087-2105).
ctggcagaactggacttat

SEQ ID NO: 513844 - DNA, 19 bp, Mus musculus
  siRNA target sequence for Ros1 (NM_011282.1,2098-2116).
ggacttatgaagtcaaagt

SEQ ID NO: 513845 - DNA, 19 bp, Mus musculus
  siRNA target sequence for Ros1 (NM_011282.1,2099-2117).
gacttatgaagtcaaagtt

SEQ ID NO: 513846 - DNA, 19 bp, Mus musculus
  siRNA target sequence for Ros1 (NM_011282.1,2132-2150).
ccttgaaatcactcaagtt

SEQ ID NO: 513847 - DNA, 19 bp, Mus musculus
  siRNA target sequence for Ros1 (NM_011282.1,2136-2154).
gaaatcactcaagttttct

SEQ ID NO: 513848 - DNA, 19 bp, Mus musculus
  siRNA target sequence for Ros1 (NM_011282.1,2145-2163).
caagttttctcgaacataa

SEQ ID NO: 513849 - DNA, 19 bp, Mus musculus
  siRNA target sequence for Ros1 (NM_011282.1,2279-2297).
cttggtaccagctactgaa

SEQ ID NO: 513850 - DNA, 19 bp, Mus musculus
  siRNA target sequence for Ros1 (NM_011282.1,2339-2357).
caaaccactctgtagtttt

SEQ ID NO: 513851 - DNA, 19 bp, Mus musculus
  siRNA target sequence for Ros1 (NM_011282.1,2353-2371).
gttttggtccaggagaatt

SEQ ID NO: 513852 - DNA, 19 bp, Mus musculus
  siRNA target sequence for Ros1 (NM_011282.1,2389-2407).
gaaacgtgtcagatatgga

SEQ ID NO: 513853 - DNA, 19 bp, Mus musculus
  siRNA target sequence for Ros1 (NM_011282.1,2400-2418).
gatatggattggtacaaca

SEQ ID NO: 513854 - DNA, 19 bp, Mus musculus
  siRNA target sequence for Ros1 (NM_011282.1,2426-2444).
ctactacagtgacacaaaa

SEQ ID NO: 513855 - DNA, 19 bp, Mus musculus
  siRNA target sequence for Ros1 (NM_011282.1,2436-2454).
gacacaaaaggcaacgttt

SEQ ID NO: 513856 - DNA, 19 bp, Mus musculus
  siRNA target sequence for Ros1 (NM_011282.1,2438-2456).
cacaaaaggcaacgtttat

SEQ ID NO: 513857 - DNA, 19 bp, Mus musculus
  siRNA target sequence for Ros1 (NM_011282.1,2440-2458).
caaaaggcaacgtttatgt

SEQ ID NO: 513858 - DNA, 19 bp, Mus musculus
  siRNA target sequence for Ros1 (NM_011282.1,2474-2492).
gatggatatctcagagaat

SEQ ID NO: 513859 - DNA, 19 bp, Mus musculus
  siRNA target sequence for Ros1 (NM_011282.1,2477-2495).
ggatatctcagagaattat

SEQ ID NO: 513860 - DNA, 19 bp, Mus musculus
  siRNA target sequence for Ros1 (NM_011282.1,2483-2501).
ctcagagaattatcacata

SEQ ID NO: 513861 - DNA, 19 bp, Mus musculus
  siRNA target sequence for Ros1 (NM_011282.1,2539-2557).
ggctgggtcactttctcta

SEQ ID NO: 513862 - DNA, 19 bp, Mus musculus
  siRNA target sequence for Ros1 (NM_011282.1,2602-2620).
cgggacacacggacattgt

SEQ ID NO: 513863 - DNA, 19 bp, Mus musculus
  siRNA target sequence for Ros1 (NM_011282.1,2662-2680).
cagttggtggctatctcta

SEQ ID NO: 513864 - DNA, 19 bp, Mus musculus
  siRNA target sequence for Ros1 (NM_011282.1,2711-2729).
cagactcaatggagaaagt

SEQ ID NO: 513865 - DNA, 19 bp, Mus musculus
  siRNA target sequence for Ros1 (NM_011282.1,2815-2833).
ggctggtgcaggacaatca

SEQ ID NO: 513866 - DNA, 19 bp, Mus musculus
  siRNA target sequence for Ros1 (NM_011282.1,2817-2835).
ctggtgcaggacaatcagt

SEQ ID NO: 513867 - DNA, 19 bp, Mus musculus
  siRNA target sequence for Ros1 (NM_011282.1,2822-2840).
gcaggacaatcagtgtatt

SEQ ID NO: 513868 - DNA, 19 bp, Mus musculus
  siRNA target sequence for Ros1 (NM_011282.1,2825-2843).
ggacaatcagtgtattcat

SEQ ID NO: 513869 - DNA, 19 bp, Mus musculus
  siRNA target sequence for Ros1 (NM_011282.1,3028-3046).
cggagccagcgaaattcaa

SEQ ID NO: 513870 - DNA, 19 bp, Mus musculus
  siRNA target sequence for Ros1 (NM_011282.1,3033-3051).
ccagcgaaattcaatcagt

SEQ ID NO: 513871 - DNA, 19 bp, Mus musculus
  siRNA target sequence for Ros1 (NM_011282.1,3048-3066).
cagttcacaattatacaga

SEQ ID NO: 513872 - DNA, 19 bp, Mus musculus
  siRNA target sequence for Ros1 (NM_011282.1,3131-3149).
ggagtcttcatttcgaatt

SEQ ID NO: 513873 - DNA, 19 bp, Mus musculus
  siRNA target sequence for Ros1 (NM_011282.1,3134-3152).
gtcttcatttcgaattgaa

SEQ ID NO: 513874 - DNA, 19 bp, Mus musculus
  siRNA target sequence for Ros1 (NM_011282.1,3198-3216).
gtggactggggcatcgttt

SEQ ID NO: 513875 - DNA, 19 bp, Mus musculus
  siRNA target sequence for Ros1 (NM_011282.1,3225-3243).
gtggaatttagcactcatt

SEQ ID NO: 513876 - DNA, 19 bp, Mus musculus
  siRNA target sequence for Ros1 (NM_011282.1,3244-3262).
ccaagttcctgattattga

SEQ ID NO: 513877 - DNA, 19 bp, Mus musculus
  siRNA target sequence for Ros1 (NM_011282.1,3261-3279).
gaacaacagtctttaccta

SEQ ID NO: 513878 - DNA, 19 bp, Mus musculus
  siRNA target sequence for Ros1 (NM_011282.1,3294-3312).
ggactggagccctatacct

SEQ ID NO: 513879 - DNA, 19 bp, Mus musculus
  siRNA target sequence for Ros1 (NM_011282.1,3295-3313).
gactggagccctatacctt

SEQ ID NO: 513880 - DNA, 19 bp, Mus musculus
  siRNA target sequence for Ros1 (NM_011282.1,3300-3318).
gagccctataccttattta

SEQ ID NO: 513881 - DNA, 19 bp, Mus musculus
  siRNA target sequence for Ros1 (NM_011282.1,3302-3320).
gccctataccttatttaat

SEQ ID NO: 513882 - DNA, 19 bp, Mus musculus
  siRNA target sequence for Ros1 (NM_011282.1,3304-3322).
cctataccttatttaatct

SEQ ID NO: 513883 - DNA, 19 bp, Mus musculus
  siRNA target sequence for Ros1 (NM_011282.1,3344-3362).
ctggggaaagggccaaaaa

SEQ ID NO: 513884 - DNA, 19 bp, Mus musculus
  siRNA target sequence for Ros1 (NM_011282.1,3348-3366).
ggaaagggccaaaaaacat

SEQ ID NO: 513885 - DNA, 19 bp, Mus musculus
  siRNA target sequence for Ros1 (NM_011282.1,3414-3432).
cccagaatatttatattgt

SEQ ID NO: 513886 - DNA, 19 bp, Mus musculus
  siRNA target sequence for Ros1 (NM_011282.1,3507-3525).
gtgctaaccaaatttgaaa

SEQ ID NO: 513887 - DNA, 19 bp, Mus musculus
  siRNA target sequence for Ros1 (NM_011282.1,3687-3705).
ccattttctgatatagtga

SEQ ID NO: 513888 - DNA, 19 bp, Mus musculus
  siRNA target sequence for Ros1 (NM_011282.1,3696-3714).
gatatagtgatgtctaaaa

SEQ ID NO: 513889 - DNA, 19 bp, Mus musculus
  siRNA target sequence for Ros1 (NM_011282.1,3704-3722).
gatgtctaaaacatcagaa

SEQ ID NO: 513890 - DNA, 19 bp, Mus musculus
  siRNA target sequence for Ros1 (NM_011282.1,3728-3746).
gccatgtccgtatctcata

SEQ ID NO: 513891 - DNA, 19 bp, Mus musculus
  siRNA target sequence for Ros1 (NM_011282.1,3733-3751).
gtccgtatctcatatctct

SEQ ID NO: 513892 - DNA, 19 bp, Mus musculus
  siRNA target sequence for Ros1 (NM_011282.1,3757-3775).
gcaataagatcgtgtttct

SEQ ID NO: 513893 - DNA, 19 bp, Mus musculus
  siRNA target sequence for Ros1 (NM_011282.1,3783-3801).
gatcaaaatcaagttttgt

SEQ ID NO: 513894 - DNA, 19 bp, Mus musculus
  siRNA target sequence for Ros1 (NM_011282.1,3909-3927).
cattccagttccaagcttt

SEQ ID NO: 513895 - DNA, 19 bp, Mus musculus
  siRNA target sequence for Ros1 (NM_011282.1,3941-3959).
ggtttctgacattagagtt

SEQ ID NO: 513896 - DNA, 19 bp, Mus musculus
  siRNA target sequence for Ros1 (NM_011282.1,3942-3960).
gtttctgacattagagtta

SEQ ID NO: 513897 - DNA, 19 bp, Mus musculus
  siRNA target sequence for Ros1 (NM_011282.1,4016-4034).
cggaacacagatattcaat

SEQ ID NO: 513898 - DNA, 19 bp, Mus musculus
  siRNA target sequence for Ros1 (NM_011282.1,4121-4139).
cctcttgagtcgcttgtat

SEQ ID NO: 513899 - DNA, 19 bp, Mus musculus
  siRNA target sequence for Ros1 (NM_011282.1,4122-4140).
ctcttgagtcgcttgtatt

SEQ ID NO: 513900 - DNA, 19 bp, Mus musculus
  siRNA target sequence for Ros1 (NM_011282.1,4136-4154).
gtattggacagaagtttca

SEQ ID NO: 513901 - DNA, 19 bp, Mus musculus
  siRNA target sequence for Ros1 (NM_011282.1,4167-4185).
cagatgttctactgcaata

SEQ ID NO: 513902 - DNA, 19 bp, Mus musculus
  siRNA target sequence for Ros1 (NM_011282.1,4196-4214).
cacctcgcaacatgttcta

SEQ ID NO: 513903 - DNA, 19 bp, Mus musculus
  siRNA target sequence for Ros1 (NM_011282.1,4199-4217).
ctcgcaacatgttctacaa

SEQ ID NO: 513904 - DNA, 19 bp, Mus musculus
  siRNA target sequence for Ros1 (NM_011282.1,4246-4264).
gtcaatgttcttgtaatgt

SEQ ID NO: 513905 - DNA, 19 bp, Mus musculus
  siRNA target sequence for Ros1 (NM_011282.1,4248-4266).
caatgttcttgtaatgtga

SEQ ID NO: 513906 - DNA, 19 bp, Mus musculus
  siRNA target sequence for Ros1 (NM_011282.1,4263-4281).
gtgacagaatctgagttaa

SEQ ID NO: 513907 - DNA, 19 bp, Mus musculus
  siRNA target sequence for Ros1 (NM_011282.1,4277-4295).
gttaagtggggcaatgact

SEQ ID NO: 513908 - DNA, 19 bp, Mus musculus
  siRNA target sequence for Ros1 (NM_011282.1,4314-4332).
gacagaccatggatatact

SEQ ID NO: 513909 - DNA, 19 bp, Mus musculus
  siRNA target sequence for Ros1 (NM_011282.1,4321-4339).
catggatatactttaccaa

SEQ ID NO: 513910 - DNA, 19 bp, Mus musculus
  siRNA target sequence for Ros1 (NM_011282.1,4375-4393).
gtcagtgttggaaagtcat

SEQ ID NO: 513911 - DNA, 19 bp, Mus musculus
  siRNA target sequence for Ros1 (NM_011282.1,4401-4419).
cctactatccctggaaaaa

SEQ ID NO: 513912 - DNA, 19 bp, Mus musculus
  siRNA target sequence for Ros1 (NM_011282.1,4409-4427).
ccctggaaaaagaatcatt

SEQ ID NO: 513913 - DNA, 19 bp, Mus musculus
  siRNA target sequence for Ros1 (NM_011282.1,4420-4438).
gaatcattagcttaacagt

SEQ ID NO: 513914 - DNA, 19 bp, Mus musculus
  siRNA target sequence for Ros1 (NM_011282.1,4440-4458).
gatggggagtttatatatt

SEQ ID NO: 513915 - DNA, 19 bp, Mus musculus
  siRNA target sequence for Ros1 (NM_011282.1,4443-4461).
ggggagtttatatattgga

SEQ ID NO: 513916 - DNA, 19 bp, Mus musculus
  siRNA target sequence for Ros1 (NM_011282.1,4444-4462).
gggagtttatatattggat

SEQ ID NO: 513917 - DNA, 19 bp, Mus musculus
  siRNA target sequence for Ros1 (NM_011282.1,4483-4501).
cccaaatttatcaagcaaa

SEQ ID NO: 513918 - DNA, 19 bp, Mus musculus
  siRNA target sequence for Ros1 (NM_011282.1,4536-4554).
gcctccaggagtaagcata

SEQ ID NO: 513919 - DNA, 19 bp, Mus musculus
  siRNA target sequence for Ros1 (NM_011282.1,4540-4558).
ccaggagtaagcatatctt

SEQ ID NO: 513920 - DNA, 19 bp, Mus musculus
  siRNA target sequence for Ros1 (NM_011282.1,4587-4605).
ccagataaagcatatctgt

SEQ ID NO: 513921 - DNA, 19 bp, Mus musculus
  siRNA target sequence for Ros1 (NM_011282.1,4606-4624).
ctctagcttcagatatggt

SEQ ID NO: 513922 - DNA, 19 bp, Mus musculus
  siRNA target sequence for Ros1 (NM_011282.1,4622-4640).
ggtagaagcaactatatta

SEQ ID NO: 513923 - DNA, 19 bp, Mus musculus
  siRNA target sequence for Ros1 (NM_011282.1,4623-4641).
gtagaagcaactatattat

SEQ ID NO: 513924 - DNA, 19 bp, Mus musculus
  siRNA target sequence for Ros1 (NM_011282.1,4652-4670).
caccagcctcacactcaaa

SEQ ID NO: 513925 - DNA, 19 bp, Mus musculus
  siRNA target sequence for Ros1 (NM_011282.1,4655-4673).
cagcctcacactcaaatta

SEQ ID NO: 513926 - DNA, 19 bp, Mus musculus
  siRNA target sequence for Ros1 (NM_011282.1,4658-4676).
cctcacactcaaattacct

SEQ ID NO: 513927 - DNA, 19 bp, Mus musculus
  siRNA target sequence for Ros1 (NM_011282.1,4802-4820).
gaatgtagcccggattgaa

SEQ ID NO: 513928 - DNA, 19 bp, Mus musculus
  siRNA target sequence for Ros1 (NM_011282.1,4831-4849).
cattttcaatgtacatgat

SEQ ID NO: 513929 - DNA, 19 bp, Mus musculus
  siRNA target sequence for Ros1 (NM_011282.1,4837-4855).
caatgtacatgattcagat

SEQ ID NO: 513930 - DNA, 19 bp, Mus musculus
  siRNA target sequence for Ros1 (NM_011282.1,4880-4898).
gcctttagaacatttacct

SEQ ID NO: 513931 - DNA, 19 bp, Mus musculus
  siRNA target sequence for Ros1 (NM_011282.1,4977-4995).
gacaccagtctccatgtat

SEQ ID NO: 513932 - DNA, 19 bp, Mus musculus
  siRNA target sequence for Ros1 (NM_011282.1,5086-5104).
ctctaagacagggtgaatt

SEQ ID NO: 513933 - DNA, 19 bp, Mus musculus
  siRNA target sequence for Ros1 (NM_011282.1,5126-5144).
gctcatcactaaactatct

SEQ ID NO: 513934 - DNA, 19 bp, Mus musculus
  siRNA target sequence for Ros1 (NM_011282.1,5176-5194).
cgtgccaccctgaggaaat

SEQ ID NO: 513935 - DNA, 19 bp, Mus musculus
  siRNA target sequence for Ros1 (NM_011282.1,5294-5312).
gaaggctcgatcaaacgtt

SEQ ID NO: 513936 - DNA, 19 bp, Mus musculus
  siRNA target sequence for Ros1 (NM_011282.1,5299-5317).
ctcgatcaaacgttaacct

SEQ ID NO: 513937 - DNA, 19 bp, Mus musculus
  siRNA target sequence for Ros1 (NM_011282.1,5310-5328).
gttaacctcaccggatttt

SEQ ID NO: 513938 - DNA, 19 bp, Mus musculus
  siRNA target sequence for Ros1 (NM_011282.1,5318-5336).
caccggattttggtttgaa

SEQ ID NO: 513939 - DNA, 19 bp, Mus musculus
  siRNA target sequence for Ros1 (NM_011282.1,5392-5410).
gtccagtttatgtctgtaa

SEQ ID NO: 513940 - DNA, 19 bp, Mus musculus
  siRNA target sequence for Ros1 (NM_011282.1,5394-5412).
ccagtttatgtctgtaaca

SEQ ID NO: 513941 - DNA, 19 bp, Mus musculus
  siRNA target sequence for Ros1 (NM_011282.1,5424-5442).
caaccttacacctcctata

SEQ ID NO: 513942 - DNA, 19 bp, Mus musculus
  siRNA target sequence for Ros1 (NM_011282.1,5448-5466).
cgagtggtggtggtctata

SEQ ID NO: 513943 - DNA, 19 bp, Mus musculus
  siRNA target sequence for Ros1 (NM_011282.1,5451-5469).
gtggtggtggtctatacga

SEQ ID NO: 513944 - DNA, 19 bp, Mus musculus
  siRNA target sequence for Ros1 (NM_011282.1,5485-5503).
cctccattccagagagttt

SEQ ID NO: 513945 - DNA, 19 bp, Mus musculus
  siRNA target sequence for Ros1 (NM_011282.1,5536-5554).
gtattcctaaattactaga

SEQ ID NO: 513946 - DNA, 19 bp, Mus musculus
  siRNA target sequence for Ros1 (NM_011282.1,5550-5568).
ctagaagggagtaaaaatt

SEQ ID NO: 513947 - DNA, 19 bp, Mus musculus
  siRNA target sequence for Ros1 (NM_011282.1,5553-5571).
gaagggagtaaaaattcca

SEQ ID NO: 513948 - DNA, 19 bp, Mus musculus
  siRNA target sequence for Ros1 (NM_011282.1,5592-5610).
gataatgggagcagattga

SEQ ID NO: 513949 - DNA, 19 bp, Mus musculus
  siRNA target sequence for Ros1 (NM_011282.1,5598-5616).
gggagcagattgatgtact

SEQ ID NO: 513950 - DNA, 19 bp, Mus musculus
  siRNA target sequence for Ros1 (NM_011282.1,5627-5645).
ggtcagaaaaggcatttca

SEQ ID NO: 513951 - DNA, 19 bp, Mus musculus
  siRNA target sequence for Ros1 (NM_011282.1,5671-5689).
ggtggaaggtggtgtttaa

SEQ ID NO: 513952 - DNA, 19 bp, Mus musculus
  siRNA target sequence for Ros1 (NM_011282.1,5672-5690).
gtggaaggtggtgtttaat

SEQ ID NO: 513953 - DNA, 19 bp, Mus musculus
  siRNA target sequence for Ros1 (NM_011282.1,5730-5748).
ctaaaaggaacatttcagt

SEQ ID NO: 513954 - DNA, 19 bp, Mus musculus
  siRNA target sequence for Ros1 (NM_011282.1,5781-5799).
ggagaatatagtgaaatca

SEQ ID NO: 513955 - DNA, 19 bp, Mus musculus
  siRNA target sequence for Ros1 (NM_011282.1,5826-5844).
ggtgtttggataacagaaa

SEQ ID NO: 513956 - DNA, 19 bp, Mus musculus
  siRNA target sequence for Ros1 (NM_011282.1,5845-5863).
caagttttatacttactat

SEQ ID NO: 513957 - DNA, 19 bp, Mus musculus
  siRNA target sequence for Ros1 (NM_011282.1,5860-5878).
ctatcatagttgggatatt

SEQ ID NO: 513958 - DNA, 19 bp, Mus musculus
  siRNA target sequence for Ros1 (NM_011282.1,5892-5910).
gtcccactgacctttgtct

SEQ ID NO: 513959 - DNA, 19 bp, Mus musculus
  siRNA target sequence for Ros1 (NM_011282.1,6143-6161).
gtatgaaggcacagctata

SEQ ID NO: 513960 - DNA, 19 bp, Mus musculus
  siRNA target sequence for Ros1 (NM_011282.1,6261-6279).
cacctgatgagcaagttta

SEQ ID NO: 513961 - DNA, 19 bp, Mus musculus
  siRNA target sequence for Ros1 (NM_011282.1,6263-6281).
cctgatgagcaagtttaat

SEQ ID NO: 513962 - DNA, 19 bp, Mus musculus
  siRNA target sequence for Ros1 (NM_011282.1,6302-6320).
gctgggagtctgtctgtta

SEQ ID NO: 513963 - DNA, 19 bp, Mus musculus
  siRNA target sequence for Ros1 (NM_011282.1,6321-6339).
ggcgaaccccagtacatta

SEQ ID NO: 513964 - DNA, 19 bp, Mus musculus
  siRNA target sequence for Ros1 (NM_011282.1,6322-6340).
gcgaaccccagtacattat

SEQ ID NO: 513965 - DNA, 19 bp, Mus musculus
  siRNA target sequence for Ros1 (NM_011282.1,6358-6376).
ggggagaccttctaagcta

SEQ ID NO: 513966 - DNA, 19 bp, Mus musculus
  siRNA target sequence for Ros1 (NM_011282.1,6359-6377).
gggagaccttctaagctat

SEQ ID NO: 513967 - DNA, 19 bp, Mus musculus
  siRNA target sequence for Ros1 (NM_011282.1,6421-6439).
ccttgcttgaccttgtaga

SEQ ID NO: 513968 - DNA, 19 bp, Mus musculus
  siRNA target sequence for Ros1 (NM_011282.1,6457-6475).
caaaaggctgcgtctactt

SEQ ID NO: 513969 - DNA, 19 bp, Mus musculus
  siRNA target sequence for Ros1 (NM_011282.1,6514-6532).
ggaattgccttgtatcagt

SEQ ID NO: 513970 - DNA, 19 bp, Mus musculus
  siRNA target sequence for Ros1 (NM_011282.1,6520-6538).
gccttgtatcagtgaaaga

SEQ ID NO: 513971 - DNA, 19 bp, Mus musculus
  siRNA target sequence for Ros1 (NM_011282.1,6646-6664).
ggatggctcctgaaaactt

SEQ ID NO: 513972 - DNA, 19 bp, Mus musculus
  siRNA target sequence for Ros1 (NM_011282.1,6757-6775).
cgcattccaaccttgatgt

SEQ ID NO: 513973 - DNA, 19 bp, Mus musculus
  siRNA target sequence for Ros1 (NM_011282.1,6880-6898).
gacccactttccataacat

SEQ ID NO: 513974 - DNA, 19 bp, Mus musculus
  siRNA target sequence for Ros1 (NM_011282.1,6883-6901).
ccactttccataacattca

SEQ ID NO: 513975 - DNA, 19 bp, Mus musculus
  siRNA target sequence for Ros1 (NM_011282.1,6967-6985).
ccaccggtggagtcatcaa

SEQ ID NO: 513976 - DNA, 19 bp, Mus musculus
  siRNA target sequence for Ros1 (NM_011282.1,6970-6988).
ccggtggagtcatcaacaa

SEQ ID NO: 513977 - DNA, 19 bp, Mus musculus
  siRNA target sequence for Ros1 (NM_011282.1,6971-6989).
cggtggagtcatcaacaaa

SEQ ID NO: 513978 - DNA, 19 bp, Mus musculus
  siRNA target sequence for Ros1 (NM_011282.1,6992-7010).
ctttgaaggtgaagatgat

SEQ ID NO: 513979 - DNA, 19 bp, Mus musculus
  siRNA target sequence for Ros1 (NM_011282.1,7071-7089).
caagaaggattaaattata

SEQ ID NO: 513980 - DNA, 19 bp, Mus musculus
  siRNA target sequence for Ros1 (NM_011282.1,7151-7169).
ggaacttgggtcatgtgat

SEQ ID NO: 513981 - DNA, 19 bp, Mus musculus
  siRNA target sequence for Ros1 (NM_011282.1,7192-7210).
cacaggcagacaaagattt

SEQ ID NO: 513982 - DNA, 19 bp, Mus musculus
  siRNA target sequence for Ros1 (NM_011282.1,7250-7268).
gtctgaaggcctgaattat

SEQ ID NO: 513983 - DNA, 19 bp, Mus musculus
  siRNA target sequence for Rp1h (NM_011283.1,267-285).
cttcccctcgccattcaaa

SEQ ID NO: 513984 - DNA, 19 bp, Mus musculus
  siRNA target sequence for Rp1h (NM_011283.1,270-288).
cccctcgccattcaaatat

SEQ ID NO: 513985 - DNA, 19 bp, Mus musculus
  siRNA target sequence for Rp1h (NM_011283.1,302-320).
gtggctaaacgcatcagtt

SEQ ID NO: 513986 - DNA, 19 bp, Mus musculus
  siRNA target sequence for Rp1h (NM_011283.1,305-323).
gctaaacgcatcagtttct

SEQ ID NO: 513987 - DNA, 19 bp, Mus musculus
  siRNA target sequence for Rp1h (NM_011283.1,311-329).
cgcatcagtttctataaga

SEQ ID NO: 513988 - DNA, 19 bp, Mus musculus
  siRNA target sequence for Rp1h (NM_011283.1,313-331).
catcagtttctataagagt

SEQ ID NO: 513989 - DNA, 19 bp, Mus musculus
  siRNA target sequence for Rp1h (NM_011283.1,365-383).
gtcaaccctcgttccttta

SEQ ID NO: 513990 - DNA, 19 bp, Mus musculus
  siRNA target sequence for Rp1h (NM_011283.1,370-388).
ccctcgttcctttaagact

SEQ ID NO: 513991 - DNA, 19 bp, Mus musculus
  siRNA target sequence for Rp1h (NM_011283.1,371-389).
cctcgttcctttaagactt

SEQ ID NO: 513992 - DNA, 19 bp, Mus musculus
  siRNA target sequence for Rp1h (NM_011283.1,398-416).
ctgctggacagtttatcca

SEQ ID NO: 513993 - DNA, 19 bp, Mus musculus
  siRNA target sequence for Rp1h (NM_011283.1,515-533).
gtgtgctcccacaataaga

SEQ ID NO: 513994 - DNA, 19 bp, Mus musculus
  siRNA target sequence for Rp1h (NM_011283.1,584-602).
ctgagtagtcgctccataa

SEQ ID NO: 513995 - DNA, 19 bp, Mus musculus
  siRNA target sequence for Rp1h (NM_011283.1,623-641).
cctgcaactgccaatatgt

SEQ ID NO: 513996 - DNA, 19 bp, Mus musculus
  siRNA target sequence for Rp1h (NM_011283.1,694-712).
gaatggtgacccgaagaat

SEQ ID NO: 513997 - DNA, 19 bp, Mus musculus
  siRNA target sequence for Rp1h (NM_011283.1,699-717).
gtgacccgaagaataagca

SEQ ID NO: 513998 - DNA, 19 bp, Mus musculus
  siRNA target sequence for Rp1h (NM_011283.1,837-855).
gtctccaggcagtgatact

SEQ ID NO: 513999 - DNA, 19 bp, Mus musculus
  siRNA target sequence for Rp1h (NM_011283.1,878-896).
gctggaagggagccattta

SEQ ID NO: 514000 - DNA, 19 bp, Mus musculus
  siRNA target sequence for Rp1h (NM_011283.1,900-918).
caggaaattacgacataca

SEQ ID NO: 514001 - DNA, 19 bp, Mus musculus
  siRNA target sequence for Rp1h (NM_011283.1,1025-1043).
ctaagaccccagactgatt

SEQ ID NO: 514002 - DNA, 19 bp, Mus musculus
  siRNA target sequence for Rp1h (NM_011283.1,1046-1064).
ctgatctcggagaaaacat

SEQ ID NO: 514003 - DNA, 19 bp, Mus musculus
  siRNA target sequence for Rp1h (NM_011283.1,1051-1069).
ctcggagaaaacatatgat

SEQ ID NO: 514004 - DNA, 19 bp, Mus musculus
  siRNA target sequence for Rp1h (NM_011283.1,1057-1075).
gaaaacatatgattgcttt

SEQ ID NO: 514005 - DNA, 19 bp, Mus musculus
  siRNA target sequence for Rp1h (NM_011283.1,1124-1142).
gagtctcagtctctatcaa

SEQ ID NO: 514006 - DNA, 19 bp, Mus musculus
  siRNA target sequence for Rp1h (NM_011283.1,1126-1144).
gtctcagtctctatcaact

SEQ ID NO: 514007 - DNA, 19 bp, Mus musculus
  siRNA target sequence for Rp1h (NM_011283.1,1128-1146).
ctcagtctctatcaactta

SEQ ID NO: 514008 - DNA, 19 bp, Mus musculus
  siRNA target sequence for Rp1h (NM_011283.1,1132-1150).
gtctctatcaacttatcct

SEQ ID NO: 514009 - DNA, 19 bp, Mus musculus
  siRNA target sequence for Rp1h (NM_011283.1,1197-1215).
cgatgacggtcgtgatgaa

SEQ ID NO: 514010 - DNA, 19 bp, Mus musculus
  siRNA target sequence for Rp1h (NM_011283.1,1201-1219).
gacggtcgtgatgaaagtt

SEQ ID NO: 514011 - DNA, 19 bp, Mus musculus
  siRNA target sequence for Rp1h (NM_011283.1,1213-1231).
gaaagttcgattcaagata

SEQ ID NO: 514012 - DNA, 19 bp, Mus musculus
  siRNA target sequence for Rp1h (NM_011283.1,1373-1391).
cctgaagacatcgtagata

SEQ ID NO: 514013 - DNA, 19 bp, Mus musculus
  siRNA target sequence for Rp1h (NM_011283.1,1442-1460).
cagcaggctctgtcatgta

SEQ ID NO: 514014 - DNA, 19 bp, Mus musculus
  siRNA target sequence for Rp1h (NM_011283.1,1509-1527).
gccagaaacaagtgaaaca

SEQ ID NO: 514015 - DNA, 19 bp, Mus musculus
  siRNA target sequence for Rp1h (NM_011283.1,1586-1604).
gggactgtcacagtagtat

SEQ ID NO: 514016 - DNA, 19 bp, Mus musculus
  siRNA target sequence for Rp1h (NM_011283.1,1588-1606).
gactgtcacagtagtatct

SEQ ID NO: 514017 - DNA, 19 bp, Mus musculus
  siRNA target sequence for Rp1h (NM_011283.1,1686-1704).
cacattcttgcagtaaaat

SEQ ID NO: 514018 - DNA, 19 bp, Mus musculus
  siRNA target sequence for Rp1h (NM_011283.1,1750-1768).
gatggagtcagcattagaa

SEQ ID NO: 514019 - DNA, 19 bp, Mus musculus
  siRNA target sequence for Rp1h (NM_011283.1,1753-1771).
ggagtcagcattagaaaga

SEQ ID NO: 514020 - DNA, 19 bp, Mus musculus
  siRNA target sequence for Rp1h (NM_011283.1,1754-1772).
gagtcagcattagaaagaa

SEQ ID NO: 514021 - DNA, 19 bp, Mus musculus
  siRNA target sequence for Rp1h (NM_011283.1,1811-1829).
gctggtgctattgaaatta

SEQ ID NO: 514022 - DNA, 19 bp, Mus musculus
  siRNA target sequence for Rp1h (NM_011283.1,1833-1851).
gtcagaaggtcttaaagat

SEQ ID NO: 514023 - DNA, 19 bp, Mus musculus
  siRNA target sequence for Rp1h (NM_011283.1,1835-1853).
cagaaggtcttaaagatgt

SEQ ID NO: 514024 - DNA, 19 bp, Mus musculus
  siRNA target sequence for Rp1h (NM_011283.1,1929-1947).
caggcacagccactatcaa

SEQ ID NO: 514025 - DNA, 19 bp, Mus musculus
  siRNA target sequence for Rp1h (NM_011283.1,1945-1963).
caagcacttcagaacttgt

SEQ ID NO: 514026 - DNA, 19 bp, Mus musculus
  siRNA target sequence for Rp1h (NM_011283.1,1970-1988).
gccaatgacagcttcagtt

SEQ ID NO: 514027 - DNA, 19 bp, Mus musculus
  siRNA target sequence for Rp1h (NM_011283.1,1978-1996).
cagcttcagttctatcaca

SEQ ID NO: 514028 - DNA, 19 bp, Mus musculus
  siRNA target sequence for Rp1h (NM_011283.1,2009-2027).
cctacctcagttaacaatt

SEQ ID NO: 514029 - DNA, 19 bp, Mus musculus
  siRNA target sequence for Rp1h (NM_011283.1,2010-2028).
ctacctcagttaacaatta

SEQ ID NO: 514030 - DNA, 19 bp, Mus musculus
  siRNA target sequence for Rp1h (NM_011283.1,2016-2034).
cagttaacaattattcaaa

SEQ ID NO: 514031 - DNA, 19 bp, Mus musculus
  siRNA target sequence for Rp1h (NM_011283.1,2080-2098).
caccatgagacttgttaat

SEQ ID NO: 514032 - DNA, 19 bp, Mus musculus
  siRNA target sequence for Rp1h (NM_011283.1,2194-2212).
gcgaatgataacttccaat

SEQ ID NO: 514033 - DNA, 19 bp, Mus musculus
  siRNA target sequence for Rp1h (NM_011283.1,2235-2253).
ccaaaggacccccaaatat

SEQ ID NO: 514034 - DNA, 19 bp, Mus musculus
  siRNA target sequence for Rp1h (NM_011283.1,2295-2313).
gactattgcaagaatcaga

SEQ ID NO: 514035 - DNA, 19 bp, Mus musculus
  siRNA target sequence for Rp1h (NM_011283.1,2340-2358).
gtgagcagggccttaatat

SEQ ID NO: 514036 - DNA, 19 bp, Mus musculus
  siRNA target sequence for Rp1h (NM_011283.1,2342-2360).
gagcagggccttaatataa

SEQ ID NO: 514037 - DNA, 19 bp, Mus musculus
  siRNA target sequence for Rp1h (NM_011283.1,2344-2362).
gcagggccttaatataagt

SEQ ID NO: 514038 - DNA, 19 bp, Mus musculus
  siRNA target sequence for Rp1h (NM_011283.1,2364-2382).
ctatggcaattgaatcaaa

SEQ ID NO: 514039 - DNA, 19 bp, Mus musculus
  siRNA target sequence for Rp1h (NM_011283.1,2405-2423).
cccacattttctaagaatt

SEQ ID NO: 514040 - DNA, 19 bp, Mus musculus
  siRNA target sequence for Rp1h (NM_011283.1,2457-2475).
ctaagactcaaaaactttt

SEQ ID NO: 514041 - DNA, 19 bp, Mus musculus
  siRNA target sequence for Rp1h (NM_011283.1,2564-2582).
catagtgactcgaaactct

SEQ ID NO: 514042 - DNA, 19 bp, Mus musculus
  siRNA target sequence for Rp1h (NM_011283.1,2574-2592).
cgaaactctgtgaaagtca

SEQ ID NO: 514043 - DNA, 19 bp, Mus musculus
  siRNA target sequence for Rp1h (NM_011283.1,2575-2593).
gaaactctgtgaaagtcat

SEQ ID NO: 514044 - DNA, 19 bp, Mus musculus
  siRNA target sequence for Rp1h (NM_011283.1,2699-2717).
ggaatggcaaaaaagagtt

SEQ ID NO: 514045 - DNA, 19 bp, Mus musculus
  siRNA target sequence for Rp1h (NM_011283.1,2700-2718).
gaatggcaaaaaagagttt

SEQ ID NO: 514046 - DNA, 19 bp, Mus musculus
  siRNA target sequence for Rp1h (NM_011283.1,2801-2819).
gtaagtgaacagcatgtta

SEQ ID NO: 514047 - DNA, 19 bp, Mus musculus
  siRNA target sequence for Rp1h (NM_011283.1,2820-2838).
caaccagggcagatccatt

SEQ ID NO: 514048 - DNA, 19 bp, Mus musculus
  siRNA target sequence for Rp1h (NM_011283.1,2848-2866).
gaaaaaacctgattttcct

SEQ ID NO: 514049 - DNA, 19 bp, Mus musculus
  siRNA target sequence for Rp1h (NM_011283.1,2867-2885).
gagggcattccccatcatt

SEQ ID NO: 514050 - DNA, 19 bp, Mus musculus
  siRNA target sequence for Rp1h (NM_011283.1,2869-2887).
gggcattccccatcattca

SEQ ID NO: 514051 - DNA, 19 bp, Mus musculus
  siRNA target sequence for Rp1h (NM_011283.1,2905-2923).
gcgatggttgcagaacata

SEQ ID NO: 514052 - DNA, 19 bp, Mus musculus
  siRNA target sequence for Rp1h (NM_011283.1,2906-2924).
cgatggttgcagaacataa

SEQ ID NO: 514053 - DNA, 19 bp, Mus musculus
  siRNA target sequence for Rp1h (NM_011283.1,2907-2925).
gatggttgcagaacataaa

SEQ ID NO: 514054 - DNA, 19 bp, Mus musculus
  siRNA target sequence for Rp1h (NM_011283.1,2936-2954).
gattttgagcatagaaagt

SEQ ID NO: 514055 - DNA, 19 bp, Mus musculus
  siRNA target sequence for Rp1h (NM_011283.1,2956-2974).
cggtccactatgccaaaat

SEQ ID NO: 514056 - DNA, 19 bp, Mus musculus
  siRNA target sequence for Rp1h (NM_011283.1,2957-2975).
ggtccactatgccaaaata

SEQ ID NO: 514057 - DNA, 19 bp, Mus musculus
  siRNA target sequence for Rp1h (NM_011283.1,2976-2994).
gaagtgatgtggtaaatta

SEQ ID NO: 514058 - DNA, 19 bp, Mus musculus
  siRNA target sequence for Rp1h (NM_011283.1,3023-3041).
ctccatacaacttcttcaa

SEQ ID NO: 514059 - DNA, 19 bp, Mus musculus
  siRNA target sequence for Rp1h (NM_011283.1,3091-3109).
caattggtcaggcaataca

SEQ ID NO: 514060 - DNA, 19 bp, Mus musculus
  siRNA target sequence for Rp1h (NM_011283.1,3188-3206).
gggtctctgtatgattctt

SEQ ID NO: 514061 - DNA, 19 bp, Mus musculus
  siRNA target sequence for Rp1h (NM_011283.1,3189-3207).
ggtctctgtatgattctta

SEQ ID NO: 514062 - DNA, 19 bp, Mus musculus
  siRNA target sequence for Rp1h (NM_011283.1,3200-3218).
gattcttacttggtttctt

SEQ ID NO: 514063 - DNA, 19 bp, Mus musculus
  siRNA target sequence for Rp1h (NM_011283.1,3221-3239).
catgacaattgtactttgt

SEQ ID NO: 514064 - DNA, 19 bp, Mus musculus
  siRNA target sequence for Rp1h (NM_011283.1,3240-3258).
cacagaccactattaatga

SEQ ID NO: 514065 - DNA, 19 bp, Mus musculus
  siRNA target sequence for Rp1h (NM_011283.1,3259-3277).
gcctagtactaaaagtcat

SEQ ID NO: 514066 - DNA, 19 bp, Mus musculus
  siRNA target sequence for Rp1h (NM_011283.1,3260-3278).
cctagtactaaaagtcatt

SEQ ID NO: 514067 - DNA, 19 bp, Mus musculus
  siRNA target sequence for Rp1h (NM_011283.1,3362-3380).
gccattcaggtagatacta

SEQ ID NO: 514068 - DNA, 19 bp, Mus musculus
  siRNA target sequence for Rp1h (NM_011283.1,3438-3456).
cttttgttcctaataatca

SEQ ID NO: 514069 - DNA, 19 bp, Mus musculus
  siRNA target sequence for Rp1h (NM_011283.1,3466-3484).
gaatggaatttctcaaata

SEQ ID NO: 514070 - DNA, 19 bp, Mus musculus
  siRNA target sequence for Rp1h (NM_011283.1,3477-3495).
ctcaaataccaggttcatt

SEQ ID NO: 514071 - DNA, 19 bp, Mus musculus
  siRNA target sequence for Rp1h (NM_011283.1,3512-3530).
ccttctgtaatagataatt

SEQ ID NO: 514072 - DNA, 19 bp, Mus musculus
  siRNA target sequence for Rp1h (NM_011283.1,3555-3573).
ggcttttggtactaaacct

SEQ ID NO: 514073 - DNA, 19 bp, Mus musculus
  siRNA target sequence for Rp1h (NM_011283.1,3556-3574).
gcttttggtactaaaccta

SEQ ID NO: 514074 - DNA, 19 bp, Mus musculus
  siRNA target sequence for Rp1h (NM_011283.1,3557-3575).
cttttggtactaaacctaa

SEQ ID NO: 514075 - DNA, 19 bp, Mus musculus
  siRNA target sequence for Rp1h (NM_011283.1,3572-3590).
ctaaagagaactatgaata

SEQ ID NO: 514076 - DNA, 19 bp, Mus musculus
  siRNA target sequence for Rp1h (NM_011283.1,3586-3604).
gaatagcttctgtcaaagt

SEQ ID NO: 514077 - DNA, 19 bp, Mus musculus
  siRNA target sequence for Rp1h (NM_011283.1,3597-3615).
gtcaaagtgatgctcataa

SEQ ID NO: 514078 - DNA, 19 bp, Mus musculus
  siRNA target sequence for Rp1h (NM_011283.1,3710-3728).
gccaacttgatggaatcaa

SEQ ID NO: 514079 - DNA, 19 bp, Mus musculus
  siRNA target sequence for Rp1h (NM_011283.1,3718-3736).
gatggaatcaaccaaaact

SEQ ID NO: 514080 - DNA, 19 bp, Mus musculus
  siRNA target sequence for Rp1h (NM_011283.1,3753-3771).
ggagagaacaagatatgct

SEQ ID NO: 514081 - DNA, 19 bp, Mus musculus
  siRNA target sequence for Rp1h (NM_011283.1,3754-3772).
gagagaacaagatatgcta

SEQ ID NO: 514082 - DNA, 19 bp, Mus musculus
  siRNA target sequence for Rp1h (NM_011283.1,3769-3787).
gctaccagtaaattgtaca

SEQ ID NO: 514083 - DNA, 19 bp, Mus musculus
  siRNA target sequence for Rp1h (NM_011283.1,3789-3807).
catccagccttcatagtgt

SEQ ID NO: 514084 - DNA, 19 bp, Mus musculus
  siRNA target sequence for Rp1h (NM_011283.1,3804-3822).
gtgtggacgagtgtaatga

SEQ ID NO: 514085 - DNA, 19 bp, Mus musculus
  siRNA target sequence for Rp1h (NM_011283.1,3806-3824).
gtggacgagtgtaatgaaa

SEQ ID NO: 514086 - DNA, 19 bp, Mus musculus
  siRNA target sequence for Rp1h (NM_011283.1,3808-3826).
ggacgagtgtaatgaaaat

SEQ ID NO: 514087 - DNA, 19 bp, Mus musculus
  siRNA target sequence for Rp1h (NM_011283.1,3847-3865).
cttggatgaaggctattct

SEQ ID NO: 514088 - DNA, 19 bp, Mus musculus
  siRNA target sequence for Rp1h (NM_011283.1,3925-3943).
gcacatggtgagcaaaact

SEQ ID NO: 514089 - DNA, 19 bp, Mus musculus
  siRNA target sequence for Rp1h (NM_011283.1,3926-3944).
cacatggtgagcaaaacta

SEQ ID NO: 514090 - DNA, 19 bp, Mus musculus
  siRNA target sequence for Rp1h (NM_011283.1,3928-3946).
catggtgagcaaaactaat

SEQ ID NO: 514091 - DNA, 19 bp, Mus musculus
  siRNA target sequence for Rp1h (NM_011283.1,3977-3995).
ggccttcttactagcaata

SEQ ID NO: 514092 - DNA, 19 bp, Mus musculus
  siRNA target sequence for Rp1h (NM_011283.1,4090-4108).
gggagcttgcctaagtgat

SEQ ID NO: 514093 - DNA, 19 bp, Mus musculus
  siRNA target sequence for Rp1h (NM_011283.1,4106-4124).
gatgagactcacattccta

SEQ ID NO: 514094 - DNA, 19 bp, Mus musculus
  siRNA target sequence for Rp1h (NM_011283.1,4111-4129).
gactcacattcctatcaga

SEQ ID NO: 514095 - DNA, 19 bp, Mus musculus
  siRNA target sequence for Rp1h (NM_011283.1,4126-4144).
cagagactgccatacaatt

SEQ ID NO: 514096 - DNA, 19 bp, Mus musculus
  siRNA target sequence for Rp1h (NM_011283.1,4128-4146).
gagactgccatacaattca

SEQ ID NO: 514097 - DNA, 19 bp, Mus musculus
  siRNA target sequence for Rp1h (NM_011283.1,4130-4148).
gactgccatacaattcact

SEQ ID NO: 514098 - DNA, 19 bp, Mus musculus
  siRNA target sequence for Rp1h (NM_011283.1,4147-4165).
ctctgtgcattcaaaagaa

SEQ ID NO: 514099 - DNA, 19 bp, Mus musculus
  siRNA target sequence for Rp1h (NM_011283.1,4310-4328).
caacgcactctcctaagta

SEQ ID NO: 514100 - DNA, 19 bp, Mus musculus
  siRNA target sequence for Rp1h (NM_011283.1,4340-4358).
gactctgataaggactata

SEQ ID NO: 514101 - DNA, 19 bp, Mus musculus
  siRNA target sequence for Rp1h (NM_011283.1,4454-4472).
gaaccaaggtcaataacca

SEQ ID NO: 514102 - DNA, 19 bp, Mus musculus
  siRNA target sequence for Rp1h (NM_011283.1,4457-4475).
ccaaggtcaataaccaata

SEQ ID NO: 514103 - DNA, 19 bp, Mus musculus
  siRNA target sequence for Rp1h (NM_011283.1,4471-4489).
caatagcatgacatcaagt

SEQ ID NO: 514104 - DNA, 19 bp, Mus musculus
  siRNA target sequence for Rp1h (NM_011283.1,4477-4495).
catgacatcaagtgaaaga

SEQ ID NO: 514105 - DNA, 19 bp, Mus musculus
  siRNA target sequence for Rp1h (NM_011283.1,4494-4512).
gaaatgccatttcagaatt

SEQ ID NO: 514106 - DNA, 19 bp, Mus musculus
  siRNA target sequence for Rp1h (NM_011283.1,4541-4559).
gacacaagtatcttcaata

SEQ ID NO: 514107 - DNA, 19 bp, Mus musculus
  siRNA target sequence for Rp1h (NM_011283.1,4596-4614).
cgatgcaaaaacaatcaga

SEQ ID NO: 514108 - DNA, 19 bp, Mus musculus
  siRNA target sequence for Rp1h (NM_011283.1,4616-4634).
gctaggatgagttcagaat

SEQ ID NO: 514109 - DNA, 19 bp, Mus musculus
  siRNA target sequence for Rp1h (NM_011283.1,4620-4638).
ggatgagttcagaattgat

SEQ ID NO: 514110 - DNA, 19 bp, Mus musculus
  siRNA target sequence for Rp1h (NM_011283.1,4621-4639).
gatgagttcagaattgata

SEQ ID NO: 514111 - DNA, 19 bp, Mus musculus
  siRNA target sequence for Rp1h (NM_011283.1,4642-4660).
cgtatcagggaggaaaatt

SEQ ID NO: 514112 - DNA, 19 bp, Mus musculus
  siRNA target sequence for Rp1h (NM_011283.1,4647-4665).
cagggaggaaaattataga

SEQ ID NO: 514113 - DNA, 19 bp, Mus musculus
  siRNA target sequence for Rp1h (NM_011283.1,4717-4735).
gacaccaccatctttagct

SEQ ID NO: 514114 - DNA, 19 bp, Mus musculus
  siRNA target sequence for Rp1h (NM_011283.1,4733-4751).
gctttttgctacgattcta

SEQ ID NO: 514115 - DNA, 19 bp, Mus musculus
  siRNA target sequence for Rp1h (NM_011283.1,4734-4752).
ctttttgctacgattctaa

SEQ ID NO: 514116 - DNA, 19 bp, Mus musculus
  siRNA target sequence for Rp1h (NM_011283.1,4740-4758).
gctacgattctaacaaaaa

SEQ ID NO: 514117 - DNA, 19 bp, Mus musculus
  siRNA target sequence for Rp1h (NM_011283.1,4784-4802).
gaaactaagatgagagtta

SEQ ID NO: 514118 - DNA, 19 bp, Mus musculus
  siRNA target sequence for Rp1h (NM_011283.1,4788-4806).
ctaagatgagagttaagaa

SEQ ID NO: 514119 - DNA, 19 bp, Mus musculus
  siRNA target sequence for Rp1h (NM_011283.1,4837-4855).
ctcggagtcctcacttaat

SEQ ID NO: 514120 - DNA, 19 bp, Mus musculus
  siRNA target sequence for Rp1h (NM_011283.1,4839-4857).
cggagtcctcacttaattt

SEQ ID NO: 514121 - DNA, 19 bp, Mus musculus
  siRNA target sequence for Rp1h (NM_011283.1,4840-4858).
ggagtcctcacttaatttt

SEQ ID NO: 514122 - DNA, 19 bp, Mus musculus
  siRNA target sequence for Rp1h (NM_011283.1,4841-4859).
gagtcctcacttaatttta

SEQ ID NO: 514123 - DNA, 19 bp, Mus musculus
  siRNA target sequence for Rp1h (NM_011283.1,4843-4861).
gtcctcacttaattttaaa

SEQ ID NO: 514124 - DNA, 19 bp, Mus musculus
  siRNA target sequence for Rp1h (NM_011283.1,4885-4903).
cttagactggtcagactat

SEQ ID NO: 514125 - DNA, 19 bp, Mus musculus
  siRNA target sequence for Rp1h (NM_011283.1,4894-4912).
gtcagactatggatcagat

SEQ ID NO: 514126 - DNA, 19 bp, Mus musculus
  siRNA target sequence for Rp1h (NM_011283.1,4918-4936).
gagtggatatccttgtaaa

SEQ ID NO: 514127 - DNA, 19 bp, Mus musculus
  siRNA target sequence for Rp1h (NM_011283.1,4922-4940).
ggatatccttgtaaagcat

SEQ ID NO: 514128 - DNA, 19 bp, Mus musculus
  siRNA target sequence for Rp1h (NM_011283.1,4941-4959).
cgagcaatagtcacaatga

SEQ ID NO: 514129 - DNA, 19 bp, Mus musculus
  siRNA target sequence for Rp1h (NM_011283.1,4982-5000).
cccacaagaggaattgtta

SEQ ID NO: 514130 - DNA, 19 bp, Mus musculus
  siRNA target sequence for Rp1h (NM_011283.1,4983-5001).
ccacaagaggaattgttaa

SEQ ID NO: 514131 - DNA, 19 bp, Mus musculus
  siRNA target sequence for Rp1h (NM_011283.1,4984-5002).
cacaagaggaattgttaaa

SEQ ID NO: 514132 - DNA, 19 bp, Mus musculus
  siRNA target sequence for Rp1h (NM_011283.1,5056-5074).
ccatgggtctatacacaaa

SEQ ID NO: 514133 - DNA, 19 bp, Mus musculus
  siRNA target sequence for Rp1h (NM_011283.1,5057-5075).
catgggtctatacacaaat

SEQ ID NO: 514134 - DNA, 19 bp, Mus musculus
  siRNA target sequence for Rp1h (NM_011283.1,5165-5183).
gaacaggtatccagaagtt

SEQ ID NO: 514135 - DNA, 19 bp, Mus musculus
  siRNA target sequence for Rp1h (NM_011283.1,5203-5221).
ccctcaggttgatgctaat

SEQ ID NO: 514136 - DNA, 19 bp, Mus musculus
  siRNA target sequence for Rp1h (NM_011283.1,5276-5294).
gcgcatgacagggtcttta

SEQ ID NO: 514137 - DNA, 19 bp, Mus musculus
  siRNA target sequence for Rp1h (NM_011283.1,5286-5304).
gggtctttacagaaaaaga

SEQ ID NO: 514138 - DNA, 19 bp, Mus musculus
  siRNA target sequence for Rp1h (NM_011283.1,5403-5421).
ccacatcagtggatactct

SEQ ID NO: 514139 - DNA, 19 bp, Mus musculus
  siRNA target sequence for Rp1h (NM_011283.1,5404-5422).
cacatcagtggatactcta

SEQ ID NO: 514140 - DNA, 19 bp, Mus musculus
  siRNA target sequence for Rp1h (NM_011283.1,5411-5429).
gtggatactctaatagata

SEQ ID NO: 514141 - DNA, 19 bp, Mus musculus
  siRNA target sequence for Rp1h (NM_011283.1,5437-5455).
cattgaggtgccatattca

SEQ ID NO: 514142 - DNA, 19 bp, Mus musculus
  siRNA target sequence for Rp1h (NM_011283.1,5523-5541).
ctcaaccccttgaagtgaa

SEQ ID NO: 514143 - DNA, 19 bp, Mus musculus
  siRNA target sequence for Rp1h (NM_011283.1,5528-5546).
ccccttgaagtgaaatgca

SEQ ID NO: 514144 - DNA, 19 bp, Mus musculus
  siRNA target sequence for Rp1h (NM_011283.1,5652-5670).
cagaggagaagggtaatta

SEQ ID NO: 514145 - DNA, 19 bp, Mus musculus
  siRNA target sequence for Rp1h (NM_011283.1,5707-5725).
ctttgtttctgctggtaat

SEQ ID NO: 514146 - DNA, 19 bp, Mus musculus
  siRNA target sequence for Rp1h (NM_011283.1,5738-5756).
gtctgcagtgacgctatta

SEQ ID NO: 514147 - DNA, 19 bp, Mus musculus
  siRNA target sequence for Rp1h (NM_011283.1,5740-5758).
ctgcagtgacgctattaaa

SEQ ID NO: 514148 - DNA, 19 bp, Mus musculus
  siRNA target sequence for Rp1h (NM_011283.1,5743-5761).
cagtgacgctattaaaact

SEQ ID NO: 514149 - DNA, 19 bp, Mus musculus
  siRNA target sequence for Rp1h (NM_011283.1,5745-5763).
gtgacgctattaaaactca

SEQ ID NO: 514150 - DNA, 19 bp, Mus musculus
  siRNA target sequence for Rp1h (NM_011283.1,5765-5783).
ccattacctgggagtaaca

SEQ ID NO: 514151 - DNA, 19 bp, Mus musculus
  siRNA target sequence for Rp1h (NM_011283.1,5804-5822).
gaaggtgactctttggata

SEQ ID NO: 514152 - DNA, 19 bp, Mus musculus
  siRNA target sequence for Rp1h (NM_011283.1,5808-5826).
gtgactctttggataaact

SEQ ID NO: 514153 - DNA, 19 bp, Mus musculus
  siRNA target sequence for Rp1h (NM_011283.1,5843-5861).
caacattgtccgatactaa

SEQ ID NO: 514154 - DNA, 19 bp, Mus musculus
  siRNA target sequence for Rp1h (NM_011283.1,5850-5868).
gtccgatactaactgttat

SEQ ID NO: 514155 - DNA, 19 bp, Mus musculus
  siRNA target sequence for Rp1h (NM_011283.1,5852-5870).
ccgatactaactgttatta

SEQ ID NO: 514156 - DNA, 19 bp, Mus musculus
  siRNA target sequence for Rp1h (NM_011283.1,5853-5871).
cgatactaactgttattat

SEQ ID NO: 514157 - DNA, 19 bp, Mus musculus
  siRNA target sequence for Rp1h (NM_011283.1,5887-5905).
ggaaagccgaggatttgct

SEQ ID NO: 514158 - DNA, 19 bp, Mus musculus
  siRNA target sequence for Rp1h (NM_011283.1,5904-5922).
cttatcgcaaagattctga

SEQ ID NO: 514159 - DNA, 19 bp, Mus musculus
  siRNA target sequence for Rp1h (NM_011283.1,5915-5933).
gattctgatattgaaaatt

SEQ ID NO: 514160 - DNA, 19 bp, Mus musculus
  siRNA target sequence for Rp1h (NM_011283.1,5945-5963).
cagttatggatgaaaatat

SEQ ID NO: 514161 - DNA, 19 bp, Mus musculus
  siRNA target sequence for Rp1h (NM_011283.1,6017-6035).
gtgagtgtgggtgaagaat

SEQ ID NO: 514162 - DNA, 19 bp, Mus musculus
  siRNA target sequence for Rp1h (NM_011283.1,6019-6037).
gagtgtgggtgaagaattt

SEQ ID NO: 514163 - DNA, 19 bp, Mus musculus
  siRNA target sequence for Rp1h (NM_011283.1,6101-6119).
gatcaaagagctaactctt

SEQ ID NO: 514164 - DNA, 19 bp, Mus musculus
  siRNA target sequence for Rp1h (NM_011283.1,6200-6218).
gtggtggagaataggaatt

SEQ ID NO: 514165 - DNA, 19 bp, Mus musculus
  siRNA target sequence for Rp1h (NM_011283.1,6233-6251).
cctagcagttggacagata

SEQ ID NO: 514166 - DNA, 19 bp, Mus musculus
  siRNA target sequence for Rp1h (NM_011283.1,6234-6252).
ctagcagttggacagataa

SEQ ID NO: 514167 - DNA, 19 bp, Mus musculus
  siRNA target sequence for Rp1h (NM_011283.1,6237-6255).
gcagttggacagataactt

SEQ ID NO: 514168 - DNA, 19 bp, Mus musculus
  siRNA target sequence for Rp1h (NM_011283.1,6240-6258).
gttggacagataacttcaa

SEQ ID NO: 514169 - DNA, 19 bp, Mus musculus
  siRNA target sequence for Rp1h (NM_011283.1,6261-6279).
gtattgatgagaataacaa

SEQ ID NO: 514170 - DNA, 19 bp, Mus musculus
  siRNA target sequence for Rp1h (NM_011283.1,6277-6295).
caacttccttaacagatta

SEQ ID NO: 514171 - DNA, 19 bp, Mus musculus
  siRNA target sequence for Rp1h (NM_011283.1,6291-6309).
gattaccgaactcaagtaa

SEQ ID NO: 514172 - DNA, 19 bp, Mus musculus
  siRNA target sequence for Rp1h (NM_011283.1,6332-6350).
gagaacactaattttcagt

SEQ ID NO: 514173 - DNA, 19 bp, Mus musculus
  siRNA target sequence for Rp1h (NM_011283.1,6403-6421).
gaaacccttaaatatcaaa

SEQ ID NO: 514174 - DNA, 19 bp, Mus musculus
  siRNA target sequence for Rp1h (NM_011283.1,6455-6473).
gagggtgaagttcttttca

SEQ ID NO: 514175 - DNA, 19 bp, Mus musculus
  siRNA target sequence for Rp2h (NM_133669.2,215-233).
gggagaaggttgatccaaa

SEQ ID NO: 514176 - DNA, 19 bp, Mus musculus
  siRNA target sequence for Rp2h (NM_133669.2,216-234).
ggagaaggttgatccaaaa

SEQ ID NO: 514177 - DNA, 19 bp, Mus musculus
  siRNA target sequence for Rp2h (NM_133669.2,223-241).
gttgatccaaaagattaca

SEQ ID NO: 514178 - DNA, 19 bp, Mus musculus
  siRNA target sequence for Rp2h (NM_133669.2,226-244).
gatccaaaagattacatgt

SEQ ID NO: 514179 - DNA, 19 bp, Mus musculus
  siRNA target sequence for Rp2h (NM_133669.2,229-247).
ccaaaagattacatgttta

SEQ ID NO: 514180 - DNA, 19 bp, Mus musculus
  siRNA target sequence for Rp2h (NM_133669.2,251-269).
gactgaaggatgaaacagt

SEQ ID NO: 514181 - DNA, 19 bp, Mus musculus
  siRNA target sequence for Rp2h (NM_133669.2,272-290).
gtcgcttacctggaaaagt

SEQ ID NO: 514182 - DNA, 19 bp, Mus musculus
  siRNA target sequence for Rp2h (NM_133669.2,320-338).
gtgagaactgtaacatcta

SEQ ID NO: 514183 - DNA, 19 bp, Mus musculus
  siRNA target sequence for Rp2h (NM_133669.2,356-374).
ctactattaccattgatga

SEQ ID NO: 514184 - DNA, 19 bp, Mus musculus
  siRNA target sequence for Rp2h (NM_133669.2,373-391).
gactgcactaactgtgtaa

SEQ ID NO: 514185 - DNA, 19 bp, Mus musculus
  siRNA target sequence for Rp2h (NM_133669.2,375-393).
ctgcactaactgtgtaatt

SEQ ID NO: 514186 - DNA, 19 bp, Mus musculus
  siRNA target sequence for Rp2h (NM_133669.2,418-436).
gtctttttccgaaattgta

SEQ ID NO: 514187 - DNA, 19 bp, Mus musculus
  siRNA target sequence for Rp2h (NM_133669.2,420-438).
ctttttccgaaattgtaga

SEQ ID NO: 514188 - DNA, 19 bp, Mus musculus
  siRNA target sequence for Rp2h (NM_133669.2,456-474).
ggcttgccagcaatttcgt

SEQ ID NO: 514189 - DNA, 19 bp, Mus musculus
  siRNA target sequence for Rp2h (NM_133669.2,472-490).
cgtgtgagagactgtagaa

SEQ ID NO: 514190 - DNA, 19 bp, Mus musculus
  siRNA target sequence for Rp2h (NM_133669.2,512-530).
gtgctactcaacccattat

SEQ ID NO: 514191 - DNA, 19 bp, Mus musculus
  siRNA target sequence for Rp2h (NM_133669.2,520-538).
caacccattattgaatctt

SEQ ID NO: 514192 - DNA, 19 bp, Mus musculus
  siRNA target sequence for Rp2h (NM_133669.2,570-588).
gtactaccctgaattagca

SEQ ID NO: 514193 - DNA, 19 bp, Mus musculus
  siRNA target sequence for Rp2h (NM_133669.2,580-598).
gaattagcagcccaattca

SEQ ID NO: 514194 - DNA, 19 bp, Mus musculus
  siRNA target sequence for Rp2h (NM_133669.2,604-622).
gcaggcctcagtatcttca

SEQ ID NO: 514195 - DNA, 19 bp, Mus musculus
  siRNA target sequence for Rp2h (NM_133669.2,607-625).
ggcctcagtatcttcaata

SEQ ID NO: 514196 - DNA, 19 bp, Mus musculus
  siRNA target sequence for Rp2h (NM_133669.2,610-628).
ctcagtatcttcaataaca

SEQ ID NO: 514197 - DNA, 19 bp, Mus musculus
  siRNA target sequence for Rp2h (NM_133669.2,724-742).
ccaatgactgaagaattca

SEQ ID NO: 514198 - DNA, 19 bp, Mus musculus
  siRNA target sequence for Rp2h (NM_133669.2,813-831).
cagtgatgaatcatgtctt

SEQ ID NO: 514199 - DNA, 19 bp, Mus musculus
  siRNA target sequence for Rp2h (NM_133669.2,835-853).
gtattatttgccgatgatt

SEQ ID NO: 514200 - DNA, 19 bp, Mus musculus
  siRNA target sequence for Rp2h (NM_133669.2,869-887).
ccaggaaactaattgatga

SEQ ID NO: 514201 - DNA, 19 bp, Mus musculus
  siRNA target sequence for Rp2h (NM_133669.2,909-927).
cctagtgcagacaaaggaa

SEQ ID NO: 514202 - DNA, 19 bp, Mus musculus
  siRNA target sequence for Rp2h (NM_133669.2,910-928).
ctagtgcagacaaaggaaa

SEQ ID NO: 514203 - DNA, 19 bp, Mus musculus
  siRNA target sequence for Rp2h (NM_133669.2,972-990).
ggcatcagattttttactt

SEQ ID NO: 514204 - DNA, 19 bp, Mus musculus
  siRNA target sequence for Rp2h (NM_133669.2,1009-1027).
gtgattgccttggaattta

SEQ ID NO: 514205 - DNA, 19 bp, Mus musculus
  siRNA target sequence for Rp2h (NM_133669.2,1033-1051).
gatgacgctgtacaagaat

SEQ ID NO: 514206 - DNA, 19 bp, Mus musculus
  siRNA target sequence for Rp2h (NM_133669.2,1048-1066).
gaatgtcaccttattgtaa

SEQ ID NO: 514207 - DNA, 19 bp, Mus musculus
  siRNA target sequence for Rp2h (NM_133669.2,1077-1095).
caacgggacaaagatgttt

SEQ ID NO: 514208 - DNA, 19 bp, Mus musculus
  siRNA target sequence for Rp2h (NM_133669.2,1080-1098).
cgggacaaagatgtttgta

SEQ ID NO: 514209 - DNA, 19 bp, Mus musculus
  siRNA target sequence for Rp2h (NM_133669.2,1081-1099).
gggacaaagatgtttgtat

SEQ ID NO: 514210 - DNA, 19 bp, Mus musculus
  siRNA target sequence for Rp2h (NM_133669.2,1083-1101).
gacaaagatgtttgtatca

SEQ ID NO: 514211 - DNA, 19 bp, Mus musculus
  siRNA target sequence for Rp2h (NM_133669.2,1113-1131).
gaccgcatctggagatgtt

SEQ ID NO: 514212 - DNA, 19 bp, Mus musculus
  siRNA target sequence for Rp2h (NM_133669.2,1115-1133).
ccgcatctggagatgttga

SEQ ID NO: 514213 - DNA, 19 bp, Mus musculus
  siRNA target sequence for Rp2h (NM_133669.2,1126-1144).
gatgttgatagcttctata

SEQ ID NO: 514214 - DNA, 19 bp, Mus musculus
  siRNA target sequence for Rp2h (NM_133669.2,1129-1147).
gttgatagcttctataact

SEQ ID NO: 514215 - DNA, 19 bp, Mus musculus
  siRNA target sequence for Rps6ka1 (NM_009097.1,550-568).
cgagggcaagctctatctt

SEQ ID NO: 514216 - DNA, 19 bp, Mus musculus
  siRNA target sequence for Rps6ka1 (NM_009097.1,551-569).
gagggcaagctctatctta

SEQ ID NO: 514217 - DNA, 19 bp, Mus musculus
  siRNA target sequence for Rps6ka1 (NM_009097.1,553-571).
gggcaagctctatcttatt

SEQ ID NO: 514218 - DNA, 19 bp, Mus musculus
  siRNA target sequence for Rps6ka1 (NM_009097.1,610-628).
ctcaaaggaggtcatgttt

SEQ ID NO: 514219 - DNA, 19 bp, Mus musculus
  siRNA target sequence for Rps6ka1 (NM_009097.1,685-703).
gcacagcttgggcattatt

SEQ ID NO: 514220 - DNA, 19 bp, Mus musculus
  siRNA target sequence for Rps6ka1 (NM_009097.1,1340-1358).
cacgggaagaacttggttt

SEQ ID NO: 514221 - DNA, 19 bp, Mus musculus
  siRNA target sequence for Rps6ka1 (NM_009097.1,1362-1380).
gtgacggctacgtagtaaa

SEQ ID NO: 514222 - DNA, 19 bp, Mus musculus
  siRNA target sequence for Rps6ka1 (NM_009097.1,1601-1619).
ggcgagctgctggataaga

SEQ ID NO: 514223 - DNA, 19 bp, Mus musculus
  siRNA target sequence for Rps6ka1 (NM_009097.1,2253-2271).
ctcagctcaagccaattga

SEQ ID NO: 514224 - DNA, 19 bp, Mus musculus
  siRNA target sequence for Rps6ka2 (NM_011299.3,350-368).
cccagttcgagctactaaa

SEQ ID NO: 514225 - DNA, 19 bp, Mus musculus
  siRNA target sequence for Rps6ka2 (NM_011299.3,377-395).
gacaagggtcgtatggaaa

SEQ ID NO: 514226 - DNA, 19 bp, Mus musculus
  siRNA target sequence for Rps6ka2 (NM_011299.3,1221-1239).
ctttgaccccgagtttact

SEQ ID NO: 514227 - DNA, 19 bp, Mus musculus
  siRNA target sequence for Rps6ka2 (NM_011299.3,1415-1433).
ctgacggctatgagatcaa

SEQ ID NO: 514228 - DNA, 19 bp, Mus musculus
  siRNA target sequence for Rps6ka2 (NM_011299.3,1466-1484).
gcaagcggtgtgtacacaa

SEQ ID NO: 514229 - DNA, 19 bp, Mus musculus
  siRNA target sequence for Rps6ka2 (NM_011299.3,1590-1608).
caccctaaaagatgtctat

SEQ ID NO: 514230 - DNA, 19 bp, Mus musculus
  siRNA target sequence for Rps6ka2 (NM_011299.3,1709-1727).
gtgatgtgctctataccat

SEQ ID NO: 514231 - DNA, 19 bp, Mus musculus
  siRNA target sequence for Rps6ka2 (NM_011299.3,1768-1786).
catcgggacctgaaaccaa

SEQ ID NO: 514232 - DNA, 19 bp, Mus musculus
  siRNA target sequence for Rps6ka2 (NM_011299.3,1784-1802).
caagtaacattctgtacat

SEQ ID NO: 514233 - DNA, 19 bp, Mus musculus
  siRNA target sequence for Rps6ka2 (NM_011299.3,1811-1829).
ctggaaaccccgaatctat

SEQ ID NO: 514234 - DNA, 19 bp, Mus musculus
  siRNA target sequence for Rps6ka2 (NM_011299.3,1884-1902).
catgaccccctgctatact

SEQ ID NO: 514235 - DNA, 19 bp, Mus musculus
  siRNA target sequence for Rps6ka2 (NM_011299.3,2086-2104).
ggaaactgggactccatat

SEQ ID NO: 514236 - DNA, 19 bp, Mus musculus
  siRNA target sequence for Rps6ka2 (NM_011299.3,2091-2109).
ctgggactccatatctgat

SEQ ID NO: 514237 - DNA, 19 bp, Mus musculus
  siRNA target sequence for Rps6ka2 (NM_011299.3,2197-2215).
gtgaacagagagtacctat

SEQ ID NO: 514238 - DNA, 19 bp, Mus musculus
  siRNA target sequence for Rps6ka2 (NM_011299.3,2341-2359).
caacgcagaggcatgaaga

SEQ ID NO: 514239 - DNA, 19 bp, Mus musculus
  siRNA target sequence for Rps6ka3 (NM_148945.1,20-38).
cggacccgtggcagaagat

SEQ ID NO: 514240 - DNA, 19 bp, Mus musculus
  siRNA target sequence for Rps6ka3 (NM_148945.1,137-155).
gtatcaaagaaattgcaat

SEQ ID NO: 514241 - DNA, 19 bp, Mus musculus
  siRNA target sequence for Rps6ka3 (NM_148945.1,141-159).
caaagaaattgcaatcaca

SEQ ID NO: 514242 - DNA, 19 bp, Mus musculus
  siRNA target sequence for Rps6ka3 (NM_148945.1,249-267).
cttagttaaaaaaatctca

SEQ ID NO: 514243 - DNA, 19 bp, Mus musculus
  siRNA target sequence for Rps6ka3 (NM_148945.1,344-362).
caaaaatggaacgtgatat

SEQ ID NO: 514244 - DNA, 19 bp, Mus musculus
  siRNA target sequence for Rps6ka3 (NM_148945.1,412-430).
caaacggaagggaagttgt

SEQ ID NO: 514245 - DNA, 19 bp, Mus musculus
  siRNA target sequence for Rps6ka3 (NM_148945.1,416-434).
cggaagggaagttgtatct

SEQ ID NO: 514246 - DNA, 19 bp, Mus musculus
  siRNA target sequence for Rps6ka3 (NM_148945.1,418-436).
gaagggaagttgtatctta

SEQ ID NO: 514247 - DNA, 19 bp, Mus musculus
  siRNA target sequence for Rps6ka3 (NM_148945.1,426-444).
gttgtatcttattttggat

SEQ ID NO: 514248 - DNA, 19 bp, Mus musculus
  siRNA target sequence for Rps6ka3 (NM_148945.1,465-483).
gtttacacgcttatccaaa

SEQ ID NO: 514249 - DNA, 19 bp, Mus musculus
  siRNA target sequence for Rps6ka3 (NM_148945.1,550-568).
cttcatagcctgggaataa

SEQ ID NO: 514250 - DNA, 19 bp, Mus musculus
  siRNA target sequence for Rps6ka3 (NM_148945.1,553-571).
catagcctgggaataatct

SEQ ID NO: 514251 - DNA, 19 bp, Mus musculus
  siRNA target sequence for Rps6ka3 (NM_148945.1,763-781).
ggtgtgttgatgtttgaaa

SEQ ID NO: 514252 - DNA, 19 bp, Mus musculus
  siRNA target sequence for Rps6ka3 (NM_148945.1,814-832).
gatcgtaaagaaacaatga

SEQ ID NO: 514253 - DNA, 19 bp, Mus musculus
  siRNA target sequence for Rps6ka3 (NM_148945.1,817-835).
cgtaaagaaacaatgacta

SEQ ID NO: 514254 - DNA, 19 bp, Mus musculus
  siRNA target sequence for Rps6ka3 (NM_148945.1,883-901).
gcccagagtcttttacgaa

SEQ ID NO: 514255 - DNA, 19 bp, Mus musculus
  siRNA target sequence for Rps6ka3 (NM_148945.1,884-902).
cccagagtcttttacgaat

SEQ ID NO: 514256 - DNA, 19 bp, Mus musculus
  siRNA target sequence for Rps6ka3 (NM_148945.1,888-906).
gagtcttttacgaatgctt

SEQ ID NO: 514257 - DNA, 19 bp, Mus musculus
  siRNA target sequence for Rps6ka3 (NM_148945.1,892-910).
cttttacgaatgcttttca

SEQ ID NO: 514258 - DNA, 19 bp, Mus musculus
  siRNA target sequence for Rps6ka3 (NM_148945.1,1045-1063).
ggcagacctgaagatacat

SEQ ID NO: 514259 - DNA, 19 bp, Mus musculus
  siRNA target sequence for Rps6ka3 (NM_148945.1,1047-1065).
cagacctgaagatacattt

SEQ ID NO: 514260 - DNA, 19 bp, Mus musculus
  siRNA target sequence for Rps6ka3 (NM_148945.1,1087-1105).
gcaaaaactcccaaagatt

SEQ ID NO: 514261 - DNA, 19 bp, Mus musculus
  siRNA target sequence for Rps6ka3 (NM_148945.1,1127-1145).
ctaacgcacatcagctttt

SEQ ID NO: 514262 - DNA, 19 bp, Mus musculus
  siRNA target sequence for Rps6ka3 (NM_148945.1,1140-1158).
gctttttcgggggtttagt

SEQ ID NO: 514263 - DNA, 19 bp, Mus musculus
  siRNA target sequence for Rps6ka3 (NM_148945.1,1141-1159).
ctttttcgggggtttagtt

SEQ ID NO: 514264 - DNA, 19 bp, Mus musculus
  siRNA target sequence for Rps6ka3 (NM_148945.1,1202-1220).
cagttggtgtgcattcaat

SEQ ID NO: 514265 - DNA, 19 bp, Mus musculus
  siRNA target sequence for Rps6ka3 (NM_148945.1,1217-1235).
caattgttcagcaattaca

SEQ ID NO: 514266 - DNA, 19 bp, Mus musculus
  siRNA target sequence for Rps6ka3 (NM_148945.1,1256-1274).
ctgatggatatgaagtaaa

SEQ ID NO: 514267 - DNA, 19 bp, Mus musculus
  siRNA target sequence for Rps6ka3 (NM_148945.1,1291-1309).
ggctcatactccgtttgta

SEQ ID NO: 514268 - DNA, 19 bp, Mus musculus
  siRNA target sequence for Rps6ka3 (NM_148945.1,1292-1310).
gctcatactccgtttgtaa

SEQ ID NO: 514269 - DNA, 19 bp, Mus musculus
  siRNA target sequence for Rps6ka3 (NM_148945.1,1301-1319).
ccgtttgtaagagatgtat

SEQ ID NO: 514270 - DNA, 19 bp, Mus musculus
  siRNA target sequence for Rps6ka3 (NM_148945.1,1307-1325).
gtaagagatgtatacataa

SEQ ID NO: 514271 - DNA, 19 bp, Mus musculus
  siRNA target sequence for Rps6ka3 (NM_148945.1,1316-1334).
gtatacataaagctacaaa

SEQ ID NO: 514272 - DNA, 19 bp, Mus musculus
  siRNA target sequence for Rps6ka3 (NM_148945.1,1339-1357).
gagtttgccgtgaagatta

SEQ ID NO: 514273 - DNA, 19 bp, Mus musculus
  siRNA target sequence for Rps6ka3 (NM_148945.1,1341-1359).
gtttgccgtgaagattatt

SEQ ID NO: 514274 - DNA, 19 bp, Mus musculus
  siRNA target sequence for Rps6ka3 (NM_148945.1,1368-1386).
caagagagacccaacagaa

SEQ ID NO: 514275 - DNA, 19 bp, Mus musculus
  siRNA target sequence for Rps6ka3 (NM_148945.1,1378-1396).
ccaacagaagagattgaaa

SEQ ID NO: 514276 - DNA, 19 bp, Mus musculus
  siRNA target sequence for Rps6ka3 (NM_148945.1,1471-1489).
gtagtaacagaacttatga

SEQ ID NO: 514277 - DNA, 19 bp, Mus musculus
  siRNA target sequence for Rps6ka3 (NM_148945.1,1493-1511).
gaggtgaattgctggataa

SEQ ID NO: 514278 - DNA, 19 bp, Mus musculus
  siRNA target sequence for Rps6ka3 (NM_148945.1,1503-1521).
gctggataagattcttaga

SEQ ID NO: 514279 - DNA, 19 bp, Mus musculus
  siRNA target sequence for Rps6ka3 (NM_148945.1,1550-1568).
gcgctgtcctgtttactat

SEQ ID NO: 514280 - DNA, 19 bp, Mus musculus
  siRNA target sequence for Rps6ka3 (NM_148945.1,1551-1569).
cgctgtcctgtttactata

SEQ ID NO: 514281 - DNA, 19 bp, Mus musculus
  siRNA target sequence for Rps6ka3 (NM_148945.1,1552-1570).
gctgtcctgtttactataa

SEQ ID NO: 514282 - DNA, 19 bp, Mus musculus
  siRNA target sequence for Rps6ka3 (NM_148945.1,1557-1575).
cctgtttactataaccaaa

SEQ ID NO: 514283 - DNA, 19 bp, Mus musculus
  siRNA target sequence for Rps6ka3 (NM_148945.1,1620-1638).
gaaacctagcaacattctt

SEQ ID NO: 514284 - DNA, 19 bp, Mus musculus
  siRNA target sequence for Rps6ka3 (NM_148945.1,1644-1662).
ggatgagtctggtaatcca

SEQ ID NO: 514285 - DNA, 19 bp, Mus musculus
  siRNA target sequence for Rps6ka3 (NM_148945.1,1650-1668).
gtctggtaatccagaatct

SEQ ID NO: 514286 - DNA, 19 bp, Mus musculus
  siRNA target sequence for Rps6ka3 (NM_148945.1,1652-1670).
ctggtaatccagaatctat

SEQ ID NO: 514287 - DNA, 19 bp, Mus musculus
  siRNA target sequence for Rps6ka3 (NM_148945.1,1667-1685).
ctattcgaatttgtgattt

SEQ ID NO: 514288 - DNA, 19 bp, Mus musculus
  siRNA target sequence for Rps6ka3 (NM_148945.1,1723-1741).
ctcatgactccttgttata

SEQ ID NO: 514289 - DNA, 19 bp, Mus musculus
  siRNA target sequence for Rps6ka3 (NM_148945.1,1732-1750).
ccttgttatactgcaaatt

SEQ ID NO: 514290 - DNA, 19 bp, Mus musculus
  siRNA target sequence for Rps6ka3 (NM_148945.1,1733-1751).
cttgttatactgcaaattt

SEQ ID NO: 514291 - DNA, 19 bp, Mus musculus
  siRNA target sequence for Rps6ka3 (NM_148945.1,1753-1771).
gttgcaccagaggttttaa

SEQ ID NO: 514292 - DNA, 19 bp, Mus musculus
  siRNA target sequence for Rps6ka3 (NM_148945.1,1808-1826).
gtcttggcgtcctccttta

SEQ ID NO: 514293 - DNA, 19 bp, Mus musculus
  siRNA target sequence for Rps6ka3 (NM_148945.1,1810-1828).
cttggcgtcctcctttata

SEQ ID NO: 514294 - DNA, 19 bp, Mus musculus
  siRNA target sequence for Rps6ka3 (NM_148945.1,1814-1832).
gcgtcctcctttatacaat

SEQ ID NO: 514295 - DNA, 19 bp, Mus musculus
  siRNA target sequence for Rps6ka3 (NM_148945.1,1818-1836).
cctcctttatacaatgctt

SEQ ID NO: 514296 - DNA, 19 bp, Mus musculus
  siRNA target sequence for Rps6ka3 (NM_148945.1,1819-1837).
ctcctttatacaatgctta

SEQ ID NO: 514297 - DNA, 19 bp, Mus musculus
  siRNA target sequence for Rps6ka3 (NM_148945.1,1855-1873).
gcaaatggccctgatgata

SEQ ID NO: 514298 - DNA, 19 bp, Mus musculus
  siRNA target sequence for Rps6ka3 (NM_148945.1,1881-1899).
ggaaatactggcacgaata

SEQ ID NO: 514299 - DNA, 19 bp, Mus musculus
  siRNA target sequence for Rps6ka3 (NM_148945.1,1894-1912).
cgaataggtagtggaaaat

SEQ ID NO: 514300 - DNA, 19 bp, Mus musculus
  siRNA target sequence for Rps6ka3 (NM_148945.1,1927-1945).
ggttactggaattctgttt

SEQ ID NO: 514301 - DNA, 19 bp, Mus musculus
  siRNA target sequence for Rps6ka3 (NM_148945.1,1968-1986).
gtcaaagatgcttcatgta

SEQ ID NO: 514302 - DNA, 19 bp, Mus musculus
  siRNA target sequence for Rps6ka3 (NM_148945.1,2056-2074).
ccacaataccaactaaaca

SEQ ID NO: 514303 - DNA, 19 bp, Mus musculus
  siRNA target sequence for Rps6ka3 (NM_148945.1,2125-2143).
gctttaaaccgcaatcagt

SEQ ID NO: 514304 - DNA, 19 bp, Mus musculus
  siRNA target sequence for Rps6ka3 (NM_148945.1,2182-2200).
cagcggagagggattaaaa

SEQ ID NO: 514305 - DNA, 19 bp, Mus musculus
  siRNA target sequence for Rps6ka3 (NM_148945.1,2184-2202).
gcggagagggattaaaaaa

SEQ ID NO: 514306 - DNA, 19 bp, Mus musculus
  siRNA target sequence for Rps6ka4 (NM_019924.1,457-475).
ggctgaggttcgagtgtat

SEQ ID NO: 514307 - DNA, 19 bp, Mus musculus
  siRNA target sequence for Rps6ka4 (NM_019924.1,570-588).
gtcacatcgtccttacaga

SEQ ID NO: 514308 - DNA, 19 bp, Mus musculus
  siRNA target sequence for Rps6ka4 (NM_019924.1,800-818).
gtgtcccgacggatcttga

SEQ ID NO: 514309 - DNA, 19 bp, Mus musculus
  siRNA target sequence for Rps6ka4 (NM_019924.1,1104-1122).
gggaccctcggatctttca

SEQ ID NO: 514310 - DNA, 19 bp, Mus musculus
  siRNA target sequence for Rps6ka4 (NM_019924.1,1140-1158).
ctccgtccatcctctttga

SEQ ID NO: 514311 - DNA, 19 bp, Mus musculus
  siRNA target sequence for Rps6ka4 (NM_019924.1,1838-1856).
ggtgtcattctgtacatga

SEQ ID NO: 514312 - DNA, 19 bp, Mus musculus
  siRNA target sequence for Rps6ka4 (NM_019924.1,1839-1857).
gtgtcattctgtacatgat

SEQ ID NO: 514313 - DNA, 19 bp, Mus musculus
  siRNA target sequence for Rps6ka4 (NM_019924.1,2153-2171).
gggctcaatgccactttca

SEQ ID NO: 514314 - DNA, 19 bp, Mus musculus
  siRNA target sequence for Rps6ka4 (NM_019924.1,2188-2206).
caagcgcgagggcttcttt

SEQ ID NO: 514315 - DNA, 19 bp, Mus musculus
  siRNA target sequence for Rps6ka4 (NM_019924.1,2192-2210).
cgcgagggcttctttctca

SEQ ID NO: 514316 - DNA, 19 bp, Mus musculus
  siRNA target sequence for Rps6ka4 (NM_019924.1,2193-2211).
gcgagggcttctttctcaa

SEQ ID NO: 514317 - DNA, 19 bp, Mus musculus
  siRNA target sequence for Rps6ka6 (NM_025949.1,270-288).
gcgagccacaggttgtgtt

SEQ ID NO: 514318 - DNA, 19 bp, Mus musculus
  siRNA target sequence for Rps6ka6 (NM_025949.1,275-293).
ccacaggttgtgtttacca

SEQ ID NO: 514319 - DNA, 19 bp, Mus musculus
  siRNA target sequence for Rps6ka6 (NM_025949.1,276-294).
cacaggttgtgtttaccat

SEQ ID NO: 514320 - DNA, 19 bp, Mus musculus
  siRNA target sequence for Rps6ka6 (NM_025949.1,330-348).
gcaaagaggtaaatgatct

SEQ ID NO: 514321 - DNA, 19 bp, Mus musculus
  siRNA target sequence for Rps6ka6 (NM_025949.1,355-373).
ggttgatgagccaatggaa

SEQ ID NO: 514322 - DNA, 19 bp, Mus musculus
  siRNA target sequence for Rps6ka6 (NM_025949.1,422-440).
cctattacacagcatgtta

SEQ ID NO: 514323 - DNA, 19 bp, Mus musculus
  siRNA target sequence for Rps6ka6 (NM_025949.1,423-441).
ctattacacagcatgttaa

SEQ ID NO: 514324 - DNA, 19 bp, Mus musculus
  siRNA target sequence for Rps6ka6 (NM_025949.1,459-477).
cagatcccgcacagtttga

SEQ ID NO: 514325 - DNA, 19 bp, Mus musculus
  siRNA target sequence for Rps6ka6 (NM_025949.1,461-479).
gatcccgcacagtttgact

SEQ ID NO: 514326 - DNA, 19 bp, Mus musculus
  siRNA target sequence for Rps6ka6 (NM_025949.1,549-567).
ctgggcagctctatgcaat

SEQ ID NO: 514327 - DNA, 19 bp, Mus musculus
  siRNA target sequence for Rps6ka6 (NM_025949.1,568-586).
gaaggtgttaagaaaagct

SEQ ID NO: 514328 - DNA, 19 bp, Mus musculus
  siRNA target sequence for Rps6ka6 (NM_025949.1,602-620).
gaccgagttcgcacaaaga

SEQ ID NO: 514329 - DNA, 19 bp, Mus musculus
  siRNA target sequence for Rps6ka6 (NM_025949.1,692-710).
gggaagctgtacttaatat

SEQ ID NO: 514330 - DNA, 19 bp, Mus musculus
  siRNA target sequence for Rps6ka6 (NM_025949.1,697-715).
gctgtacttaatattggat

SEQ ID NO: 514331 - DNA, 19 bp, Mus musculus
  siRNA target sequence for Rps6ka6 (NM_025949.1,698-716).
ctgtacttaatattggatt

SEQ ID NO: 514332 - DNA, 19 bp, Mus musculus
  siRNA target sequence for Rps6ka6 (NM_025949.1,728-746).
ggagatgtcttcacaagat

SEQ ID NO: 514333 - DNA, 19 bp, Mus musculus
  siRNA target sequence for Rps6ka6 (NM_025949.1,734-752).
gtcttcacaagattatcca

SEQ ID NO: 514334 - DNA, 19 bp, Mus musculus
  siRNA target sequence for Rps6ka6 (NM_025949.1,804-822).
ccctggctttggatcatct

SEQ ID NO: 514335 - DNA, 19 bp, Mus musculus
  siRNA target sequence for Rps6ka6 (NM_025949.1,818-836).
catctacatcgattaggaa

SEQ ID NO: 514336 - DNA, 19 bp, Mus musculus
  siRNA target sequence for Rps6ka6 (NM_025949.1,824-842).
catcgattaggaattgttt

SEQ ID NO: 514337 - DNA, 19 bp, Mus musculus
  siRNA target sequence for Rps6ka6 (NM_025949.1,868-886).
cttacttgatgaaatagga

SEQ ID NO: 514338 - DNA, 19 bp, Mus musculus
  siRNA target sequence for Rps6ka6 (NM_025949.1,875-893).
gatgaaataggacatatca

SEQ ID NO: 514339 - DNA, 19 bp, Mus musculus
  siRNA target sequence for Rps6ka6 (NM_025949.1,940-958).
gaaggcctactcattttgt

SEQ ID NO: 514340 - DNA, 19 bp, Mus musculus
  siRNA target sequence for Rps6ka6 (NM_025949.1,1544-1562).
gaggatattggtattggtt

SEQ ID NO: 514341 - DNA, 19 bp, Mus musculus
  siRNA target sequence for Rps6ka6 (NM_025949.1,2038-2056).
cactcaacagggatatgat

SEQ ID NO: 514342 - DNA, 19 bp, Mus musculus
  siRNA target sequence for Rps6kb2 (NM_021485.1,7-25).
gccgtatttgatttagact

SEQ ID NO: 514343 - DNA, 19 bp, Mus musculus
  siRNA target sequence for Rps6kb2 (NM_021485.1,265-283).
ggcaccaacttgggaaaaa

SEQ ID NO: 514344 - DNA, 19 bp, Mus musculus
  siRNA target sequence for Rps6kb2 (NM_021485.1,270-288).
caacttgggaaaaatatat

SEQ ID NO: 514345 - DNA, 19 bp, Mus musculus
  siRNA target sequence for Rps6kb2 (NM_021485.1,290-308).
ccatgaaggtcttaaggaa

SEQ ID NO: 514346 - DNA, 19 bp, Mus musculus
  siRNA target sequence for Rps6kb2 (NM_021485.1,300-318).
cttaaggaaggccaagatt

SEQ ID NO: 514347 - DNA, 19 bp, Mus musculus
  siRNA target sequence for Rps6kb2 (NM_021485.1,647-665).
gcaaggagtccattcatga

SEQ ID NO: 514348 - DNA, 19 bp, Mus musculus
  siRNA target sequence for Rps6kb2 (NM_021485.1,705-723).
catggccccagagattcta

SEQ ID NO: 514349 - DNA, 19 bp, Mus musculus
  siRNA target sequence for Rps6kb2 (NM_021485.1,814-832).
gagaaccggaagaaaacta

SEQ ID NO: 514350 - DNA, 19 bp, Mus musculus
  siRNA target sequence for Rps6kb2 (NM_021485.1,819-837).
ccggaagaaaactatggat

SEQ ID NO: 514351 - DNA, 19 bp, Mus musculus
  siRNA target sequence for Rps6kb2 (NM_021485.1,830-848).
ctatggataaaatcattaa

SEQ ID NO: 514352 - DNA, 19 bp, Mus musculus
  siRNA target sequence for Rps6kb2 (NM_021485.1,889-907).
cgggaccttgccaaaaagt

SEQ ID NO: 514353 - DNA, 19 bp, Mus musculus
  siRNA target sequence for Rps6kb2 (NM_021485.1,890-908).
gggaccttgccaaaaagtt

SEQ ID NO: 514354 - DNA, 19 bp, Mus musculus
  siRNA target sequence for Rps6kb2 (NM_021485.1,891-909).
ggaccttgccaaaaagttt

SEQ ID NO: 514355 - DNA, 19 bp, Mus musculus
  siRNA target sequence for Rps6kb2 (NM_021485.1,977-995).
cctttttccggcacatcaa

SEQ ID NO: 514356 - DNA, 19 bp, Mus musculus
  siRNA target sequence for Rps6kb2 (NM_021485.1,978-996).
ctttttccggcacatcaat

SEQ ID NO: 514357 - DNA, 19 bp, Mus musculus
  siRNA target sequence for Rps6kb2 (NM_021485.1,1037-1055).
ggccaagtctgcaatcaga

SEQ ID NO: 514358 - DNA, 19 bp, Mus musculus
  siRNA target sequence for Rps6kb2 (NM_021485.1,1071-1089).
gtttgatgcacgattcaca

SEQ ID NO: 514359 - DNA, 19 bp, Mus musculus
  siRNA target sequence for Rps6kb2 (NM_021485.1,1090-1108).
cggcagacgccggtagata

SEQ ID NO: 514360 - DNA, 19 bp, Mus musculus
  siRNA target sequence for Rps6kb2 (NM_021485.1,1092-1110).
gcagacgccggtagatagt

SEQ ID NO: 514361 - DNA, 19 bp, Mus musculus
  siRNA target sequence for Ruvbl1 (NM_019685.1,285-303).
ggcatgtggcgtcattgta

SEQ ID NO: 514362 - DNA, 19 bp, Mus musculus
  siRNA target sequence for Ruvbl1 (NM_019685.1,292-310).
ggcgtcattgtagaattaa

SEQ ID NO: 514363 - DNA, 19 bp, Mus musculus
  siRNA target sequence for Ruvbl1 (NM_019685.1,293-311).
gcgtcattgtagaattaat

SEQ ID NO: 514364 - DNA, 19 bp, Mus musculus
  siRNA target sequence for Ruvbl1 (NM_019685.1,295-313).
gtcattgtagaattaatca

SEQ ID NO: 514365 - DNA, 19 bp, Mus musculus
  siRNA target sequence for Ruvbl1 (NM_019685.1,433-451).
gtgggtagcgaggtatact

SEQ ID NO: 514366 - DNA, 19 bp, Mus musculus
  siRNA target sequence for Ruvbl1 (NM_019685.1,500-518).
ccattgggttgcggataaa

SEQ ID NO: 514367 - DNA, 19 bp, Mus musculus
  siRNA target sequence for Ruvbl1 (NM_019685.1,519-537).
ggagactaaggaggtttat

SEQ ID NO: 514368 - DNA, 19 bp, Mus musculus
  siRNA target sequence for Ruvbl1 (NM_019685.1,522-540).
gactaaggaggtttatgaa

SEQ ID NO: 514369 - DNA, 19 bp, Mus musculus
  siRNA target sequence for Ruvbl1 (NM_019685.1,602-620).
ctatcagccatgtgatcat

SEQ ID NO: 514370 - DNA, 19 bp, Mus musculus
  siRNA target sequence for Ruvbl1 (NM_019685.1,630-648).
gactgctaaaggaaccaaa

SEQ ID NO: 514371 - DNA, 19 bp, Mus musculus
  siRNA target sequence for Ruvbl1 (NM_019685.1,664-682).
cccagtatttttgaaagtt

SEQ ID NO: 514372 - DNA, 19 bp, Mus musculus
  siRNA target sequence for Ruvbl1 (NM_019685.1,765-783).
cacctatgccacagagttt

SEQ ID NO: 514373 - DNA, 19 bp, Mus musculus
  siRNA target sequence for Ruvbl1 (NM_019685.1,892-910).
cctcagggtgggcaagata

SEQ ID NO: 514374 - DNA, 19 bp, Mus musculus
  siRNA target sequence for Ruvbl1 (NM_019685.1,893-911).
ctcagggtgggcaagatat

SEQ ID NO: 514375 - DNA, 19 bp, Mus musculus
  siRNA target sequence for Ruvbl1 (NM_019685.1,898-916).
ggtgggcaagatattctgt

SEQ ID NO: 514376 - DNA, 19 bp, Mus musculus
  siRNA target sequence for Ruvbl1 (NM_019685.1,971-989).
gaggggagatcaacaaagt

SEQ ID NO: 514377 - DNA, 19 bp, Mus musculus
  siRNA target sequence for Ruvbl1 (NM_019685.1,1026-1044).
ggtccctggagtgcttttt

SEQ ID NO: 514378 - DNA, 19 bp, Mus musculus
  siRNA target sequence for Ruvbl1 (NM_019685.1,1162-1180).
ggcactgaggacatcactt

SEQ ID NO: 514379 - DNA, 19 bp, Mus musculus
  siRNA target sequence for Ruvbl2 (NM_011304.1,218-236).
gatccgagaagggaagatt

SEQ ID NO: 514380 - DNA, 19 bp, Mus musculus
  siRNA target sequence for Ruvbl2 (NM_011304.1,346-364).
gcagtgagatcttttctct

SEQ ID NO: 514381 - DNA, 19 bp, Mus musculus
  siRNA target sequence for Ruvbl2 (NM_011304.1,688-706).
gctcccagaccaagtttgt

SEQ ID NO: 514382 - DNA, 19 bp, Mus musculus
  siRNA target sequence for Ruvbl2 (NM_011304.1,754-772).
ccgtgtccctccatgagat

SEQ ID NO: 514383 - DNA, 19 bp, Mus musculus
  siRNA target sequence for Ruvbl2 (NM_011304.1,755-773).
cgtgtccctccatgagatt

SEQ ID NO: 514384 - DNA, 19 bp, Mus musculus
  siRNA target sequence for Ruvbl2 (NM_011304.1,768-786).
gagattgacgtcatcaact

SEQ ID NO: 514385 - DNA, 19 bp, Mus musculus
  siRNA target sequence for Ruvbl2 (NM_011304.1,841-859).
cagaagtccgagaacagat

SEQ ID NO: 514386 - DNA, 19 bp, Mus musculus
  siRNA target sequence for Ruvbl2 (NM_011304.1,849-867).
cgagaacagatcaatgcaa

SEQ ID NO: 514387 - DNA, 19 bp, Mus musculus
  siRNA target sequence for Ruvbl2 (NM_011304.1,945-963).
gacattgagagtttctctt

SEQ ID NO: 514388 - DNA, 19 bp, Mus musculus
  siRNA target sequence for Ruvbl2 (NM_011304.1,1085-1103).
ggaccgcttgctcattgta

SEQ ID NO: 514389 - DNA, 19 bp, Mus musculus
  siRNA target sequence for Ruvbl2 (NM_011304.1,1086-1104).
gaccgcttgctcattgtat

SEQ ID NO: 514390 - DNA, 19 bp, Mus musculus
  siRNA target sequence for Ruvbl2 (NM_011304.1,1088-1106).
ccgcttgctcattgtatca

SEQ ID NO: 514391 - DNA, 19 bp, Mus musculus
  siRNA target sequence for Ruvbl2 (NM_011304.1,1089-1107).
cgcttgctcattgtatcaa

SEQ ID NO: 514392 - DNA, 19 bp, Mus musculus
  siRNA target sequence for Ruvbl2 (NM_011304.1,1263-1281).
ctggtgtgccggaaacgaa

SEQ ID NO: 514393 - DNA, 19 bp, Mus musculus
  siRNA target sequence for Ruvbl2 (NM_011304.1,1292-1310).
ggtgcaggtcgatgacatt

SEQ ID NO: 514394 - DNA, 19 bp, Mus musculus
  siRNA target sequence for Ruvbl2 (NM_011304.1,1293-1311).
gtgcaggtcgatgacatta

SEQ ID NO: 514395 - DNA, 19 bp, Mus musculus
  siRNA target sequence for Ruvbl2 (NM_011304.1,1305-1323).
gacattaagcgtgtatact

SEQ ID NO: 514396 - DNA, 19 bp, Mus musculus
  siRNA target sequence for Ruvbl2 (NM_011304.1,1342-1360).
cccgctccacacagtacat

SEQ ID NO: 514397 - DNA, 19 bp, Mus musculus
  siRNA target sequence for Ruvbl2 (NM_011304.1,1392-1410).
gagctcaaaggcgaaacaa

SEQ ID NO: 514398 - DNA, 19 bp, Mus musculus
  siRNA target sequence for Sars1 (NM_011319.1,59-77).
gtttcgggtggataaagga

SEQ ID NO: 514399 - DNA, 19 bp, Mus musculus
  siRNA target sequence for Sars1 (NM_011319.1,164-182).
gtggcgacgatgcagattt

SEQ ID NO: 514400 - DNA, 19 bp, Mus musculus
  siRNA target sequence for Sars1 (NM_011319.1,183-201).
cgggcagacaacttgaaca

SEQ ID NO: 514401 - DNA, 19 bp, Mus musculus
  siRNA target sequence for Sars1 (NM_011319.1,184-202).
gggcagacaacttgaacaa

SEQ ID NO: 514402 - DNA, 19 bp, Mus musculus
  siRNA target sequence for Sars1 (NM_011319.1,319-337).
cgctagctgccctgaaagt

SEQ ID NO: 514403 - DNA, 19 bp, Mus musculus
  siRNA target sequence for Sars1 (NM_011319.1,356-374).
ccgactcctcattgatgaa

SEQ ID NO: 514404 - DNA, 19 bp, Mus musculus
  siRNA target sequence for Sars1 (NM_011319.1,411-429).
gaagcagagcgatttgaga

SEQ ID NO: 514405 - DNA, 19 bp, Mus musculus
  siRNA target sequence for Sars1 (NM_011319.1,458-476).
cccctctgtgcccattagt

SEQ ID NO: 514406 - DNA, 19 bp, Mus musculus
  siRNA target sequence for Sars1 (NM_011319.1,485-503).
ggacgcagacaacaaagta

SEQ ID NO: 514407 - DNA, 19 bp, Mus musculus
  siRNA target sequence for Sars1 (NM_011319.1,494-512).
caacaaagtagaacgtatt

SEQ ID NO: 514408 - DNA, 19 bp, Mus musculus
  siRNA target sequence for Sars1 (NM_011319.1,507-525).
cgtatttggggagattgta

SEQ ID NO: 514409 - DNA, 19 bp, Mus musculus
  siRNA target sequence for Sars1 (NM_011319.1,647-665).
ggagcaggcgcttatccaa

SEQ ID NO: 514410 - DNA, 19 bp, Mus musculus
  siRNA target sequence for Sars1 (NM_011319.1,648-666).
gagcaggcgcttatccaat

SEQ ID NO: 514411 - DNA, 19 bp, Mus musculus
  siRNA target sequence for Sars1 (NM_011319.1,650-668).
gcaggcgcttatccaatat

SEQ ID NO: 514412 - DNA, 19 bp, Mus musculus
  siRNA target sequence for Sars1 (NM_011319.1,653-671).
ggcgcttatccaatatgca

SEQ ID NO: 514413 - DNA, 19 bp, Mus musculus
  siRNA target sequence for Sars1 (NM_011319.1,691-709).
ggggctacactccaatcta

SEQ ID NO: 514414 - DNA, 19 bp, Mus musculus
  siRNA target sequence for Sars1 (NM_011319.1,693-711).
ggctacactccaatctaca

SEQ ID NO: 514415 - DNA, 19 bp, Mus musculus
  siRNA target sequence for Sars1 (NM_011319.1,794-812).
caaaggcagcgaaaagtca

SEQ ID NO: 514416 - DNA, 19 bp, Mus musculus
  siRNA target sequence for Sars1 (NM_011319.1,823-841).
cctatgacgagaaatactt

SEQ ID NO: 514417 - DNA, 19 bp, Mus musculus
  siRNA target sequence for Sars1 (NM_011319.1,967-985).
gtgacacccgtggtatctt

SEQ ID NO: 514418 - DNA, 19 bp, Mus musculus
  siRNA target sequence for Sars1 (NM_011319.1,983-1001).
cttccgagtccatcagttt

SEQ ID NO: 514419 - DNA, 19 bp, Mus musculus
  siRNA target sequence for Sars1 (NM_011319.1,987-1005).
cgagtccatcagtttgaga

SEQ ID NO: 514420 - DNA, 19 bp, Mus musculus
  siRNA target sequence for Sars1 (NM_011319.1,988-1006).
gagtccatcagtttgagaa

SEQ ID NO: 514421 - DNA, 19 bp, Mus musculus
  siRNA target sequence for Sars1 (NM_011319.1,1027-1045).
catcgccccatgacaataa

SEQ ID NO: 514422 - DNA, 19 bp, Mus musculus
  siRNA target sequence for Sars1 (NM_011319.1,1070-1088).
gatcgccaccgcagaagaa

SEQ ID NO: 514423 - DNA, 19 bp, Mus musculus
  siRNA target sequence for Sars1 (NM_011319.1,1074-1092).
gccaccgcagaagaattct

SEQ ID NO: 514424 - DNA, 19 bp, Mus musculus
  siRNA target sequence for Sars1 (NM_011319.1,1075-1093).
ccaccgcagaagaattcta

SEQ ID NO: 514425 - DNA, 19 bp, Mus musculus
  siRNA target sequence for Sars1 (NM_011319.1,1105-1123).
ggatcccttaccacattgt

SEQ ID NO: 514426 - DNA, 19 bp, Mus musculus
  siRNA target sequence for Sars1 (NM_011319.1,1225-1243).
ctaattgcacggattacca

SEQ ID NO: 514427 - DNA, 19 bp, Mus musculus
  siRNA target sequence for Sars1 (NM_011319.1,1377-1395).
gtccatatgcttaatgcta

SEQ ID NO: 514428 - DNA, 19 bp, Mus musculus
  siRNA target sequence for Sars1 (NM_011319.1,1385-1403).
gcttaatgctacaatgtgt

SEQ ID NO: 514429 - DNA, 19 bp, Mus musculus
  siRNA target sequence for Sars1 (NM_011319.1,1506-1524).
gagctgatcccgtttgtga

SEQ ID NO: 514430 - DNA, 19 bp, Mus musculus
  siRNA target sequence for Sars1 (NM_011319.1,1539-1557).
gaccaggagccatctaaga

SEQ ID NO: 514431 - DNA, 19 bp, Mus musculus
  siRNA target sequence for Sars2 (NM_023637.1,209-227).
gtgcgcatgcccagaaaaa

SEQ ID NO: 514432 - DNA, 19 bp, Mus musculus
  siRNA target sequence for Sars2 (NM_023637.1,271-289).
ccgacctgcctgcgattat

SEQ ID NO: 514433 - DNA, 19 bp, Mus musculus
  siRNA target sequence for Sars2 (NM_023637.1,273-291).
gacctgcctgcgattatct

SEQ ID NO: 514434 - DNA, 19 bp, Mus musculus
  siRNA target sequence for Sars2 (NM_023637.1,646-664).
gcgagaaactggacatcat

SEQ ID NO: 514435 - DNA, 19 bp, Mus musculus
  siRNA target sequence for Sars2 (NM_023637.1,691-709).
ctggccaccggtcctatta

SEQ ID NO: 514436 - DNA, 19 bp, Mus musculus
  siRNA target sequence for Sars2 (NM_023637.1,852-870).
gccaacccatcccagattt

SEQ ID NO: 514437 - DNA, 19 bp, Mus musculus
  siRNA target sequence for Sars2 (NM_023637.1,862-880).
cccagatttacaatattga

SEQ ID NO: 514438 - DNA, 19 bp, Mus musculus
  siRNA target sequence for Sars2 (NM_023637.1,886-904).
ctcgcttcgaagaccttaa

SEQ ID NO: 514439 - DNA, 19 bp, Mus musculus
  siRNA target sequence for Sars2 (NM_023637.1,889-907).
gcttcgaagaccttaacct

SEQ ID NO: 514440 - DNA, 19 bp, Mus musculus
  siRNA target sequence for Sars2 (NM_023637.1,928-946).
ggctggcaggatacttcat

SEQ ID NO: 514441 - DNA, 19 bp, Mus musculus
  siRNA target sequence for Sars2 (NM_023637.1,1050-1068).
cgagtccatcacttcacta

SEQ ID NO: 514442 - DNA, 19 bp, Mus musculus
  siRNA target sequence for Sars2 (NM_023637.1,1064-1082).
cactaaggtggagatgttt

SEQ ID NO: 514443 - DNA, 19 bp, Mus musculus
  siRNA target sequence for Sbk (NM_145587.1,618-636).
ctggctgccagcgatgtta

SEQ ID NO: 514444 - DNA, 19 bp, Mus musculus
  siRNA target sequence for Sbk (NM_145587.1,622-640).
ctgccagcgatgttaccaa

SEQ ID NO: 514445 - DNA, 19 bp, Mus musculus
  siRNA target sequence for Sbk (NM_145587.1,727-745).
ccctgaaatttgtgaataa

SEQ ID NO: 514446 - DNA, 19 bp, Mus musculus
  siRNA target sequence for Sbk (NM_145587.1,731-749).
gaaatttgtgaataagagt

SEQ ID NO: 514447 - DNA, 19 bp, Mus musculus
  siRNA target sequence for Sbk (NM_145587.1,1106-1124).
gcgcgtgagcggcactata

SEQ ID NO: 514448 - DNA, 19 bp, Mus musculus
  siRNA target sequence for Sbk (NM_145587.1,1201-1219).
cctttggcgtgctcatctt

SEQ ID NO: 514449 - DNA, 19 bp, Mus musculus
  siRNA target sequence for Scn8a (NM_011323.1,246-264).
ggactttgacccgtactat

SEQ ID NO: 514450 - DNA, 19 bp, Mus musculus
  siRNA target sequence for Scn8a (NM_011323.1,247-265).
gactttgacccgtactatt

SEQ ID NO: 514451 - DNA, 19 bp, Mus musculus
  siRNA target sequence for Scn8a (NM_011323.1,435-453).
ctgtgtattcatgactttt

SEQ ID NO: 514452 - DNA, 19 bp, Mus musculus
  siRNA target sequence for Scn8a (NM_011323.1,439-457).
gtattcatgacttttagta

SEQ ID NO: 514453 - DNA, 19 bp, Mus musculus
  siRNA target sequence for Scn8a (NM_011323.1,464-482).
ccgaatggtccaagaatgt

SEQ ID NO: 514454 - DNA, 19 bp, Mus musculus
  siRNA target sequence for Scn8a (NM_011323.1,501-519).
gatttacacatttgaatca

SEQ ID NO: 514455 - DNA, 19 bp, Mus musculus
  siRNA target sequence for Scn8a (NM_011323.1,823-841).
gggaaccttcgaaacaagt

SEQ ID NO: 514456 - DNA, 19 bp, Mus musculus
  siRNA target sequence for Scn8a (NM_011323.1,842-860).
gtgtcgtgtggcccataaa

SEQ ID NO: 514457 - DNA, 19 bp, Mus musculus
  siRNA target sequence for Scn8a (NM_011323.1,844-862).
gtcgtgtggcccataaact

SEQ ID NO: 514458 - DNA, 19 bp, Mus musculus
  siRNA target sequence for Scn8a (NM_011323.1,847-865).
gtgtggcccataaacttca

SEQ ID NO: 514459 - DNA, 19 bp, Mus musculus
  siRNA target sequence for Scn8a (NM_011323.1,901-919).
gactgggaggagtatatca

SEQ ID NO: 514460 - DNA, 19 bp, Mus musculus
  siRNA target sequence for Scn8a (NM_011323.1,905-923).
gggaggagtatatcaacaa

SEQ ID NO: 514461 - DNA, 19 bp, Mus musculus
  siRNA target sequence for Scn8a (NM_011323.1,906-924).
ggaggagtatatcaacaat

SEQ ID NO: 514462 - DNA, 19 bp, Mus musculus
  siRNA target sequence for Scn8a (NM_011323.1,907-925).
gaggagtatatcaacaata

SEQ ID NO: 514463 - DNA, 19 bp, Mus musculus
  siRNA target sequence for Scn8a (NM_011323.1,1141-1159).
cgagcggctgggaaaacgt

SEQ ID NO: 514464 - DNA, 19 bp, Mus musculus
  siRNA target sequence for Scn8a (NM_011323.1,1142-1160).
gagcggctgggaaaacgta

SEQ ID NO: 514465 - DNA, 19 bp, Mus musculus
  siRNA target sequence for Scn8a (NM_011323.1,1365-1383).
gggcaccgtctcagaagat

SEQ ID NO: 514466 - DNA, 19 bp, Mus musculus
  siRNA target sequence for Scn8a (NM_011323.1,1430-1448).
catctgagctgtctaaact

SEQ ID NO: 514467 - DNA, 19 bp, Mus musculus
  siRNA target sequence for Scn8a (NM_011323.1,1531-1549).
gaccccgagaaggtgttta

SEQ ID NO: 514468 - DNA, 19 bp, Mus musculus
  siRNA target sequence for Scn8a (NM_011323.1,1534-1552).
cccgagaaggtgtttaagt

SEQ ID NO: 514469 - DNA, 19 bp, Mus musculus
  siRNA target sequence for Scn8a (NM_011323.1,1536-1554).
cgagaaggtgtttaagtca

SEQ ID NO: 514470 - DNA, 19 bp, Mus musculus
  siRNA target sequence for Scn8a (NM_011323.1,1584-1602).
cttccggctgccagacaat

SEQ ID NO: 514471 - DNA, 19 bp, Mus musculus
  siRNA target sequence for Scn8a (NM_011323.1,1588-1606).
cggctgccagacaatagga

SEQ ID NO: 514472 - DNA, 19 bp, Mus musculus
  siRNA target sequence for Scn8a (NM_011323.1,2026-2044).
cctggatcgctcttagtct

SEQ ID NO: 514473 - DNA, 19 bp, Mus musculus
  siRNA target sequence for Scn8a (NM_011323.1,2076-2094).
ggacagaatcaacagtata

SEQ ID NO: 514474 - DNA, 19 bp, Mus musculus
  siRNA target sequence for Scn8a (NM_011323.1,2163-2181).
gtataagtttgccaatact

SEQ ID NO: 514475 - DNA, 19 bp, Mus musculus
  siRNA target sequence for Scn8a (NM_011323.1,2198-2216).
gtcacccctactggataaa

SEQ ID NO: 514476 - DNA, 19 bp, Mus musculus
  siRNA target sequence for Scn8a (NM_011323.1,2204-2222).
cctactggataaaactgaa

SEQ ID NO: 514477 - DNA, 19 bp, Mus musculus
  siRNA target sequence for Scn8a (NM_011323.1,2241-2259).
cgtcatggaccctttcgta

SEQ ID NO: 514478 - DNA, 19 bp, Mus musculus
  siRNA target sequence for Scn8a (NM_011323.1,2247-2265).
ggaccctttcgtagactta

SEQ ID NO: 514479 - DNA, 19 bp, Mus musculus
  siRNA target sequence for Scn8a (NM_011323.1,2257-2275).
gtagacttagccataacca

SEQ ID NO: 514480 - DNA, 19 bp, Mus musculus
  siRNA target sequence for Scn8a (NM_011323.1,2321-2339).
ccatgacgccacaattcga

SEQ ID NO: 514481 - DNA, 19 bp, Mus musculus
  siRNA target sequence for Scn8a (NM_011323.1,2322-2340).
catgacgccacaattcgaa

SEQ ID NO: 514482 - DNA, 19 bp, Mus musculus
  siRNA target sequence for Scn8a (NM_011323.1,2327-2345).
cgccacaattcgaacatgt

SEQ ID NO: 514483 - DNA, 19 bp, Mus musculus
  siRNA target sequence for Scn8a (NM_011323.1,2534-2552).
gattgctccgagtcttcaa

SEQ ID NO: 514484 - DNA, 19 bp, Mus musculus
  siRNA target sequence for Scn8a (NM_011323.1,2852-2870).
gccttatcgtgttcatgat

SEQ ID NO: 514485 - DNA, 19 bp, Mus musculus
  siRNA target sequence for Scn8a (NM_011323.1,2959-2977).
gacgacgacggggaaatga

SEQ ID NO: 514486 - DNA, 19 bp, Mus musculus
  siRNA target sequence for Scn8a (NM_011323.1,2962-2980).
gacgacggggaaatgaaca

SEQ ID NO: 514487 - DNA, 19 bp, Mus musculus
  siRNA target sequence for Scn8a (NM_011323.1,3071-3089).
gggaggctgatgaagtgaa

SEQ ID NO: 514488 - DNA, 19 bp, Mus musculus
  siRNA target sequence for Scn8a (NM_011323.1,3165-3183).
cgacttccagaaaaatgga

SEQ ID NO: 514489 - DNA, 19 bp, Mus musculus
  siRNA target sequence for Scn8a (NM_011323.1,3237-3255).
ggaccacatgtccttcatt

SEQ ID NO: 514490 - DNA, 19 bp, Mus musculus
  siRNA target sequence for Scn8a (NM_011323.1,3238-3256).
gaccacatgtccttcatta

SEQ ID NO: 514491 - DNA, 19 bp, Mus musculus
  siRNA target sequence for Scn8a (NM_011323.1,3316-3334).
ctcaacacagaggatgtta

SEQ ID NO: 514492 - DNA, 19 bp, Mus musculus
  siRNA target sequence for Scn8a (NM_011323.1,3395-3413).
ggagtaccatcgacatcaa

SEQ ID NO: 514493 - DNA, 19 bp, Mus musculus
  siRNA target sequence for Scn8a (NM_011323.1,3571-3589).
ctcattgtggagcacaatt

SEQ ID NO: 514494 - DNA, 19 bp, Mus musculus
  siRNA target sequence for Scn8a (NM_011323.1,3854-3872).
cggaactaggtgccataaa

SEQ ID NO: 514495 - DNA, 19 bp, Mus musculus
  siRNA target sequence for Scn8a (NM_011323.1,4076-4094).
cagaaatccggttcgaaat

SEQ ID NO: 514496 - DNA, 19 bp, Mus musculus
  siRNA target sequence for Scn8a (NM_011323.1,4095-4113).
cgacgaggtgaacaataaa

SEQ ID NO: 514497 - DNA, 19 bp, Mus musculus
  siRNA target sequence for Scn8a (NM_011323.1,4096-4114).
gacgaggtgaacaataaaa

SEQ ID NO: 514498 - DNA, 19 bp, Mus musculus
  siRNA target sequence for Scn8a (NM_011323.1,4157-4175).
gatggaagaacgtcaagat

SEQ ID NO: 514499 - DNA, 19 bp, Mus musculus
  siRNA target sequence for Scn8a (NM_011323.1,4277-4295).
cggacgagcagcctgatta

SEQ ID NO: 514500 - DNA, 19 bp, Mus musculus
  siRNA target sequence for Scn8a (NM_011323.1,4278-4296).
ggacgagcagcctgattat

SEQ ID NO: 514501 - DNA, 19 bp, Mus musculus
  siRNA target sequence for Scn8a (NM_011323.1,4506-4524).
cccccgacctttgaacaaa

SEQ ID NO: 514502 - DNA, 19 bp, Mus musculus
  siRNA target sequence for Scn8a (NM_011323.1,4507-4525).
ccccgacctttgaacaaaa

SEQ ID NO: 514503 - DNA, 19 bp, Mus musculus
  siRNA target sequence for Scn8a (NM_011323.1,4511-4529).
gacctttgaacaaaatcca

SEQ ID NO: 514504 - DNA, 19 bp, Mus musculus
  siRNA target sequence for Scn8a (NM_011323.1,4573-4591).
gtgatcatgatgcttatct

SEQ ID NO: 514505 - DNA, 19 bp, Mus musculus
  siRNA target sequence for Scn8a (NM_011323.1,4650-4668).
cattctctactggattaat

SEQ ID NO: 514506 - DNA, 19 bp, Mus musculus
  siRNA target sequence for Scn8a (NM_011323.1,4794-4812).
gttcctggctgatatcatt

SEQ ID NO: 514507 - DNA, 19 bp, Mus musculus
  siRNA target sequence for Scn8a (NM_011323.1,4871-4889).
gcatcttgcgtctgatcaa

SEQ ID NO: 514508 - DNA, 19 bp, Mus musculus
  siRNA target sequence for Scn8a (NM_011323.1,5252-5270).
cctttctgatcgtggtaaa

SEQ ID NO: 514509 - DNA, 19 bp, Mus musculus
  siRNA target sequence for Scn8a (NM_011323.1,5341-5359).
gacgacttcgagactttct

SEQ ID NO: 514510 - DNA, 19 bp, Mus musculus
  siRNA target sequence for Scn8a (NM_011323.1,5343-5361).
cgacttcgagactttctat

SEQ ID NO: 514511 - DNA, 19 bp, Mus musculus
  siRNA target sequence for Scn8a (NM_011323.1,5395-5413).
cagttcatcgagtactgta

SEQ ID NO: 514512 - DNA, 19 bp, Mus musculus
  siRNA target sequence for Scn8a (NM_011323.1,5831-5849).
cttacgacagcgtgacaaa

SEQ ID NO: 514513 - DNA, 19 bp, Mus musculus
  siRNA target sequence for Scyl1 (NM_023912.1,202-220).
ccatcttcgtgtatgatgt

SEQ ID NO: 514514 - DNA, 19 bp, Mus musculus
  siRNA target sequence for Scyl1 (NM_023912.1,263-281).
cttcaaacgcctcaaaact

SEQ ID NO: 514515 - DNA, 19 bp, Mus musculus
  siRNA target sequence for Scyl1 (NM_023912.1,292-310).
ccaacatcctggcctatat

SEQ ID NO: 514516 - DNA, 19 bp, Mus musculus
  siRNA target sequence for Scyl1 (NM_023912.1,499-517).
gcatggccgctgtgtttgt

SEQ ID NO: 514517 - DNA, 19 bp, Mus musculus
  siRNA target sequence for Scyl1 (NM_023912.1,524-542).
ggctggcgagtggaaactt

SEQ ID NO: 514518 - DNA, 19 bp, Mus musculus
  siRNA target sequence for Scyl1 (NM_023912.1,608-626).
ggagctcgagcagtatgat

SEQ ID NO: 514519 - DNA, 19 bp, Mus musculus
  siRNA target sequence for Scyl1 (NM_023912.1,776-794).
cctggtgacccattactgt

SEQ ID NO: 514520 - DNA, 19 bp, Mus musculus
  siRNA target sequence for Scyl1 (NM_023912.1,803-821).
gggagctaacccaaaagta

SEQ ID NO: 514521 - DNA, 19 bp, Mus musculus
  siRNA target sequence for Scyl1 (NM_023912.1,872-890).
catgagcaaccgctttgtt

SEQ ID NO: 514522 - DNA, 19 bp, Mus musculus
  siRNA target sequence for Scyl1 (NM_023912.1,964-982).
gcaagagtctagactcatt

SEQ ID NO: 514523 - DNA, 19 bp, Mus musculus
  siRNA target sequence for Scyl1 (NM_023912.1,965-983).
caagagtctagactcattt

SEQ ID NO: 514524 - DNA, 19 bp, Mus musculus
  siRNA target sequence for Scyl1 (NM_023912.1,975-993).
gactcatttcccgaagatt

SEQ ID NO: 514525 - DNA, 19 bp, Mus musculus
  siRNA target sequence for Scyl1 (NM_023912.1,1193-1211).
gcagttcatccaatacctt

SEQ ID NO: 514526 - DNA, 19 bp, Mus musculus
  siRNA target sequence for Scyl1 (NM_023912.1,1328-1346).
gaatgaggccaatctcaat

SEQ ID NO: 514527 - DNA, 19 bp, Mus musculus
  siRNA target sequence for Scyl1 (NM_023912.1,1417-1435).
cggtctgcttgggcaaaat

SEQ ID NO: 514528 - DNA, 19 bp, Mus musculus
  siRNA target sequence for Scyl1 (NM_023912.1,1541-1559).
ctttgctgccacacacaat

SEQ ID NO: 514529 - DNA, 19 bp, Mus musculus
  siRNA target sequence for Scyl1 (NM_023912.1,1548-1566).
gccacacacaatctctatt

SEQ ID NO: 514530 - DNA, 19 bp, Mus musculus
  siRNA target sequence for Scyl1 (NM_023912.1,1663-1681).
gaagcttcctgtccaaatt

SEQ ID NO: 514531 - DNA, 19 bp, Mus musculus
  siRNA target sequence for Scyl1 (NM_023912.1,1666-1684).
gcttcctgtccaaattaga

SEQ ID NO: 514532 - DNA, 19 bp, Mus musculus
  siRNA target sequence for Scyl1 (NM_023912.1,1906-1924).
ctgcccttgcccaagctat

SEQ ID NO: 514533 - DNA, 19 bp, Mus musculus
  siRNA target sequence for Scyl1 (NM_023912.1,2086-2104).
gccgagctggacagatcaa

SEQ ID NO: 514534 - DNA, 19 bp, Mus musculus
  siRNA target sequence for Scyl1 (NM_023912.1,2117-2135).
caaatctctggaatcacat

SEQ ID NO: 514535 - DNA, 19 bp, Mus musculus
  siRNA target sequence for Scyl1 (NM_023912.1,2217-2235).
cggctagctagcgaatata

SEQ ID NO: 514536 - DNA, 19 bp, Mus musculus
  siRNA target sequence for Scyl1 (NM_023912.1,2218-2236).
ggctagctagcgaatataa

SEQ ID NO: 514537 - DNA, 19 bp, Mus musculus
  siRNA target sequence for Scyl1 (NM_023912.1,2427-2445).
gccaaacgggcagagaaaa

SEQ ID NO: 514538 - DNA, 19 bp, Mus musculus
  siRNA target sequence for Scyl1 (NM_023912.1,2428-2446).
ccaaacgggcagagaaaaa

SEQ ID NO: 514539 - DNA, 19 bp, Mus musculus
  siRNA target sequence for Sephs1 (NM_175400.3,320-338).
ctactcgagagtcctttaa

SEQ ID NO: 514540 - DNA, 19 bp, Mus musculus
  siRNA target sequence for Sephs1 (NM_175400.3,332-350).
cctttaacccggagactta

SEQ ID NO: 514541 - DNA, 19 bp, Mus musculus
  siRNA target sequence for Sephs1 (NM_175400.3,341-359).
cggagacttatgaattgga

SEQ ID NO: 514542 - DNA, 19 bp, Mus musculus
  siRNA target sequence for Sephs1 (NM_175400.3,369-387).
ccggctaaccaggtttact

SEQ ID NO: 514543 - DNA, 19 bp, Mus musculus
  siRNA target sequence for Sephs1 (NM_175400.3,371-389).
ggctaaccaggtttactga

SEQ ID NO: 514544 - DNA, 19 bp, Mus musculus
  siRNA target sequence for Sephs1 (NM_175400.3,520-538).
gatacttgcgtcattcctt

SEQ ID NO: 514545 - DNA, 19 bp, Mus musculus
  siRNA target sequence for Sephs1 (NM_175400.3,567-585).
gaccacagattacatttat

SEQ ID NO: 514546 - DNA, 19 bp, Mus musculus
  siRNA target sequence for Sephs1 (NM_175400.3,570-588).
cacagattacatttatcct

SEQ ID NO: 514547 - DNA, 19 bp, Mus musculus
  siRNA target sequence for Sephs1 (NM_175400.3,592-610).
gtcgacgacccgtatatga

SEQ ID NO: 514548 - DNA, 19 bp, Mus musculus
  siRNA target sequence for Sephs1 (NM_175400.3,636-654).
cctcagtgacctttatgca

SEQ ID NO: 514549 - DNA, 19 bp, Mus musculus
  siRNA target sequence for Sephs1 (NM_175400.3,775-793).
gaagcgggaacctctgtaa

SEQ ID NO: 514550 - DNA, 19 bp, Mus musculus
  siRNA target sequence for Sephs1 (NM_175400.3,854-872).
gccagcccaatgaatttat

SEQ ID NO: 514551 - DNA, 19 bp, Mus musculus
  siRNA target sequence for Sephs1 (NM_175400.3,948-966).
gcaccagtggctggatatt

SEQ ID NO: 514552 - DNA, 19 bp, Mus musculus
  siRNA target sequence for Sephs1 (NM_175400.3,957-975).
gctggatattcccgaaaaa

SEQ ID NO: 514553 - DNA, 19 bp, Mus musculus
  siRNA target sequence for Sephs1 (NM_175400.3,958-976).
ctggatattcccgaaaaat

SEQ ID NO: 514554 - DNA, 19 bp, Mus musculus
  siRNA target sequence for Sephs1 (NM_175400.3,961-979).
gatattcccgaaaaatgga

SEQ ID NO: 514555 - DNA, 19 bp, Mus musculus
  siRNA target sequence for Sephs1 (NM_175400.3,1001-1019).
cccaagaagacgtagagtt

SEQ ID NO: 514556 - DNA, 19 bp, Mus musculus
  siRNA target sequence for Sephs1 (NM_175400.3,1011-1029).
cgtagagttggcataccaa

SEQ ID NO: 514557 - DNA, 19 bp, Mus musculus
  siRNA target sequence for Sephs1 (NM_175400.3,1022-1040).
cataccaagaggcaatgat

SEQ ID NO: 514558 - DNA, 19 bp, Mus musculus
  siRNA target sequence for Sephs1 (NM_175400.3,1223-1241).
gcaaagcctgcggaaacat

SEQ ID NO: 514559 - DNA, 19 bp, Mus musculus
  siRNA target sequence for Sephs1 (NM_175400.3,1239-1257).
catgttcggcctaatgcat

SEQ ID NO: 514560 - DNA, 19 bp, Mus musculus
  siRNA target sequence for Sephs1 (NM_175400.3,1274-1292).
cgtcaggaggcctgctaat

SEQ ID NO: 514561 - DNA, 19 bp, Mus musculus
  siRNA target sequence for Sephs1 (NM_175400.3,1357-1375).
gggcaccaagcatggatta

SEQ ID NO: 514562 - DNA, 19 bp, Mus musculus
  siRNA target sequence for Sephs1 (NM_175400.3,1358-1376).
ggcaccaagcatggattat

SEQ ID NO: 514563 - DNA, 19 bp, Mus musculus
  siRNA target sequence for Sephs1 (NM_175400.3,1359-1377).
gcaccaagcatggattatt

SEQ ID NO: 514564 - DNA, 19 bp, Mus musculus
  siRNA target sequence for Sephs1 (NM_175400.3,1416-1434).
cgacaagcctcggattatt

SEQ ID NO: 514565 - DNA, 19 bp, Mus musculus
  siRNA target sequence for Sephs1 (NM_175400.3,1444-1462).
cctcaagtagccacacaaa

SEQ ID NO: 514566 - DNA, 19 bp, Mus musculus
  siRNA target sequence for Sephs2 (NM_009266.1,548-566).
gcagaccaccgacttcttt

SEQ ID NO: 514567 - DNA, 19 bp, Mus musculus
  siRNA target sequence for Sephs2 (NM_009266.1,549-567).
cagaccaccgacttctttt

SEQ ID NO: 514568 - DNA, 19 bp, Mus musculus
  siRNA target sequence for Sephs2 (NM_009266.1,632-650).
ctatgccatgggtatcact

SEQ ID NO: 514569 - DNA, 19 bp, Mus musculus
  siRNA target sequence for Sephs2 (NM_009266.1,717-735).
gtgacaccgctcatgatca

SEQ ID NO: 514570 - DNA, 19 bp, Mus musculus
  siRNA target sequence for Sephs2 (NM_009266.1,719-737).
gacaccgctcatgatcaaa

SEQ ID NO: 514571 - DNA, 19 bp, Mus musculus
  siRNA target sequence for Sephs2 (NM_009266.1,792-810).
gtggtcaacccgtggatta

SEQ ID NO: 514572 - DNA, 19 bp, Mus musculus
  siRNA target sequence for Sephs2 (NM_009266.1,795-813).
gtcaacccgtggattatca

SEQ ID NO: 514573 - DNA, 19 bp, Mus musculus
  siRNA target sequence for Sephs2 (NM_009266.1,829-847).
cggtggtgtgtcagcaaaa

SEQ ID NO: 514574 - DNA, 19 bp, Mus musculus
  siRNA target sequence for Sephs2 (NM_009266.1,830-848).
ggtggtgtgtcagcaaaat

SEQ ID NO: 514575 - DNA, 19 bp, Mus musculus
  siRNA target sequence for Sephs2 (NM_009266.1,935-953).
ccaatggctggataatcct

SEQ ID NO: 514576 - DNA, 19 bp, Mus musculus
  siRNA target sequence for Sephs2 (NM_009266.1,942-960).
ctggataatcctgagaaat

SEQ ID NO: 514577 - DNA, 19 bp, Mus musculus
  siRNA target sequence for Sephs2 (NM_009266.1,1006-1024).
cctatcaggaagctatgtt

SEQ ID NO: 514578 - DNA, 19 bp, Mus musculus
  siRNA target sequence for Sephs2 (NM_009266.1,1011-1029).
caggaagctatgttcaata

SEQ ID NO: 514579 - DNA, 19 bp, Mus musculus
  siRNA target sequence for Sephs2 (NM_009266.1,1022-1040).
gttcaatatggctactcta

SEQ ID NO: 514580 - DNA, 19 bp, Mus musculus
  siRNA target sequence for Sephs2 (NM_009266.1,1054-1072).
ctggcttgatgcacacttt

SEQ ID NO: 514581 - DNA, 19 bp, Mus musculus
  siRNA target sequence for Sephs2 (NM_009266.1,1057-1075).
gcttgatgcacacttttaa

SEQ ID NO: 514582 - DNA, 19 bp, Mus musculus
  siRNA target sequence for Sephs2 (NM_009266.1,1080-1098).
cacgcagccacggatatca

SEQ ID NO: 514583 - DNA, 19 bp, Mus musculus
  siRNA target sequence for Sephs2 (NM_009266.1,1082-1100).
cgcagccacggatatcaca

SEQ ID NO: 514584 - DNA, 19 bp, Mus musculus
  siRNA target sequence for Sephs2 (NM_009266.1,1157-1175).
gtcctttgtcatacataat

SEQ ID NO: 514585 - DNA, 19 bp, Mus musculus
  siRNA target sequence for Sephs2 (NM_009266.1,1255-1273).
cctctgggggattactgat

SEQ ID NO: 514586 - DNA, 19 bp, Mus musculus
  siRNA target sequence for Sephs2 (NM_009266.1,1256-1274).
ctctgggggattactgatt

SEQ ID NO: 514587 - DNA, 19 bp, Mus musculus
  siRNA target sequence for Sephs2 (NM_009266.1,1261-1279).
ggggattactgatttgtct

SEQ ID NO: 514588 - DNA, 19 bp, Mus musculus
  siRNA target sequence for Sephs2 (NM_009266.1,1299-1317).
cgcttttgttcggaaatca

SEQ ID NO: 514589 - DNA, 19 bp, Mus musculus
  siRNA target sequence for Sephs2 (NM_009266.1,1300-1318).
gcttttgttcggaaatcaa

SEQ ID NO: 514590 - DNA, 19 bp, Mus musculus
  siRNA target sequence for Sephs2 (NM_009266.1,1381-1399).
ggacagcccggatcattga

SEQ ID NO: 514591 - DNA, 19 bp, Mus musculus
  siRNA target sequence for Sephs2 (NM_009266.1,1403-1421).
gcctcgcgttattgaagtt

SEQ ID NO: 514592 - DNA, 19 bp, Mus musculus
  siRNA target sequence for Sephs2 (NM_009266.1,1405-1423).
ctcgcgttattgaagttct

SEQ ID NO: 514593 - DNA, 19 bp, Mus musculus
  siRNA target sequence for Sephs2 (NM_009266.1,1449-1467).
gctgctgctcctgataatt

SEQ ID NO: 514594 - DNA, 19 bp, Mus musculus
  siRNA target sequence for Sephs2 (NM_009266.1,1452-1470).
gctgctcctgataattcca

SEQ ID NO: 514595 - DNA, 19 bp, Mus musculus
  siRNA target sequence for Sgk (NM_011361.1,91-109).
ctcgaagcacccttaccta

SEQ ID NO: 514596 - DNA, 19 bp, Mus musculus
  siRNA target sequence for Sgk (NM_011361.1,102-120).
cttacctactccagaatga

SEQ ID NO: 514597 - DNA, 19 bp, Mus musculus
  siRNA target sequence for Sgk (NM_011361.1,113-131).
cagaatgaggggaatggta

SEQ ID NO: 514598 - DNA, 19 bp, Mus musculus
  siRNA target sequence for Sgk (NM_011361.1,132-150).
gcgattctcatcgctttta

SEQ ID NO: 514599 - DNA, 19 bp, Mus musculus
  siRNA target sequence for Sgk (NM_011361.1,133-151).
cgattctcatcgcttttat

SEQ ID NO: 514600 - DNA, 19 bp, Mus musculus
  siRNA target sequence for Sgk (NM_011361.1,163-181).
ggatgggcctgaacgattt

SEQ ID NO: 514601 - DNA, 19 bp, Mus musculus
  siRNA target sequence for Sgk (NM_011361.1,164-182).
gatgggcctgaacgatttt

SEQ ID NO: 514602 - DNA, 19 bp, Mus musculus
  siRNA target sequence for Sgk (NM_011361.1,171-189).
ctgaacgattttattcaga

SEQ ID NO: 514603 - DNA, 19 bp, Mus musculus
  siRNA target sequence for Sgk (NM_011361.1,176-194).
cgattttattcagaagatt

SEQ ID NO: 514604 - DNA, 19 bp, Mus musculus
  siRNA target sequence for Sgk (NM_011361.1,195-213).
gccagcaacacctatgcat

SEQ ID NO: 514605 - DNA, 19 bp, Mus musculus
  siRNA target sequence for Sgk (NM_011361.1,214-232).
gcaaacacgctgaagttca

SEQ ID NO: 514606 - DNA, 19 bp, Mus musculus
  siRNA target sequence for Sgk (NM_011361.1,301-319).
gtccctctcaacaaatcaa

SEQ ID NO: 514607 - DNA, 19 bp, Mus musculus
  siRNA target sequence for Sgk (NM_011361.1,346-364).
ccaaaccctccgactttca

SEQ ID NO: 514608 - DNA, 19 bp, Mus musculus
  siRNA target sequence for Sgk (NM_011361.1,355-373).
ccgactttcacttcttgaa

SEQ ID NO: 514609 - DNA, 19 bp, Mus musculus
  siRNA target sequence for Sgk (NM_011361.1,356-374).
cgactttcacttcttgaaa

SEQ ID NO: 514610 - DNA, 19 bp, Mus musculus
  siRNA target sequence for Sgk (NM_011361.1,422-440).
ggcagaagaagtattctat

SEQ ID NO: 514611 - DNA, 19 bp, Mus musculus
  siRNA target sequence for Sgk (NM_011361.1,483-501).
gaggagaagcatattatgt

SEQ ID NO: 514612 - DNA, 19 bp, Mus musculus
  siRNA target sequence for Sgk (NM_011361.1,507-525).
cggaatgttctgttgaaga

SEQ ID NO: 514613 - DNA, 19 bp, Mus musculus
  siRNA target sequence for Sgk (NM_011361.1,546-564).
gtgggccttcacttctcat

SEQ ID NO: 514614 - DNA, 19 bp, Mus musculus
  siRNA target sequence for Sgk (NM_011361.1,667-685).
gattctacgcagctgaaat

SEQ ID NO: 514615 - DNA, 19 bp, Mus musculus
  siRNA target sequence for Sgk (NM_011361.1,713-731).
cctaaacatcgtttataga

SEQ ID NO: 514616 - DNA, 19 bp, Mus musculus
  siRNA target sequence for Sgk (NM_011361.1,719-737).
catcgtttatagagactta

SEQ ID NO: 514617 - DNA, 19 bp, Mus musculus
  siRNA target sequence for Sgk (NM_011361.1,722-740).
cgtttatagagacttaaaa

SEQ ID NO: 514618 - DNA, 19 bp, Mus musculus
  siRNA target sequence for Sgk (NM_011361.1,813-831).
gagcataacgggacaacat

SEQ ID NO: 514619 - DNA, 19 bp, Mus musculus
  siRNA target sequence for Sgk (NM_011361.1,815-833).
gcataacgggacaacatct

SEQ ID NO: 514620 - DNA, 19 bp, Mus musculus
  siRNA target sequence for Sgk (NM_011361.1,839-857).
ctgtggcacgcctgagtat

SEQ ID NO: 514621 - DNA, 19 bp, Mus musculus
  siRNA target sequence for Sgk (NM_011361.1,841-859).
gtggcacgcctgagtatct

SEQ ID NO: 514622 - DNA, 19 bp, Mus musculus
  siRNA target sequence for Sgk (NM_011361.1,862-880).
ctcctgaggtcctccataa

SEQ ID NO: 514623 - DNA, 19 bp, Mus musculus
  siRNA target sequence for Sgk (NM_011361.1,1001-1019).
caagcctctccagttgaaa

SEQ ID NO: 514624 - DNA, 19 bp, Mus musculus
  siRNA target sequence for Sgk (NM_011361.1,1006-1024).
ctctccagttgaaaccaaa

SEQ ID NO: 514625 - DNA, 19 bp, Mus musculus
  siRNA target sequence for Sgk (NM_011361.1,1008-1026).
ctccagttgaaaccaaata

SEQ ID NO: 514626 - DNA, 19 bp, Mus musculus
  siRNA target sequence for Sgk (NM_011361.1,1010-1028).
ccagttgaaaccaaatatt

SEQ ID NO: 514627 - DNA, 19 bp, Mus musculus
  siRNA target sequence for Sgk (NM_011361.1,1098-1116).
gatgactttatggagatta

SEQ ID NO: 514628 - DNA, 19 bp, Mus musculus
  siRNA target sequence for Sgk (NM_011361.1,1101-1119).
gactttatggagattaaga

SEQ ID NO: 514629 - DNA, 19 bp, Mus musculus
  siRNA target sequence for Sgk (NM_011361.1,1147-1165).
gggatgatctcatcaataa

SEQ ID NO: 514630 - DNA, 19 bp, Mus musculus
  siRNA target sequence for Sgk2 (NM_013731.1,634-652).
ccccagagaaactctactt

SEQ ID NO: 514631 - DNA, 19 bp, Mus musculus
  siRNA target sequence for Sgk2 (NM_013731.1,637-655).
cagagaaactctactttgt

SEQ ID NO: 514632 - DNA, 19 bp, Mus musculus
  siRNA target sequence for Sgk2 (NM_013731.1,747-765).
gtggcgagcgccattggtt

SEQ ID NO: 514633 - DNA, 19 bp, Mus musculus
  siRNA target sequence for Sgk2 (NM_013731.1,752-770).
gagcgccattggttacctt

SEQ ID NO: 514634 - DNA, 19 bp, Mus musculus
  siRNA target sequence for Sgk2 (NM_013731.1,771-789).
cactctctcaacatcatct

SEQ ID NO: 514635 - DNA, 19 bp, Mus musculus
  siRNA target sequence for Sgk2 (NM_013731.1,857-875).
cctttgcaaggaatgtgta

SEQ ID NO: 514636 - DNA, 19 bp, Mus musculus
  siRNA target sequence for Sgk2 (NM_013731.1,1030-1048).
ctgacgtggcccagatgta

SEQ ID NO: 514637 - DNA, 19 bp, Mus musculus
  siRNA target sequence for Sgk2 (NM_013731.1,1037-1055).
ggcccagatgtatgagaat

SEQ ID NO: 514638 - DNA, 19 bp, Mus musculus
  siRNA target sequence for Sgk2 (NM_013731.1,1038-1056).
gcccagatgtatgagaata

SEQ ID NO: 514639 - DNA, 19 bp, Mus musculus
  siRNA target sequence for Sgk2 (NM_013731.1,1201-1219).
ccataaactgggatgatct

SEQ ID NO: 514640 - DNA, 19 bp, Mus musculus
  siRNA target sequence for Sgk2 (NM_013731.1,1361-1379).
ggcttcaagtgcattcctt

SEQ ID NO: 514641 - DNA, 19 bp, Mus musculus
  siRNA target sequence for Sgk2 (NM_013731.1,1366-1384).
caagtgcattccttggatt

SEQ ID NO: 514642 - DNA, 19 bp, Mus musculus
  siRNA target sequence for Sgk2 (NM_013731.1,1371-1389).
gcattccttggattttcct

SEQ ID NO: 514643 - DNA, 19 bp, Mus musculus
  siRNA target sequence for Sgk3 (NM_133220.1,372-390).
gaagaggttcacggtttat

SEQ ID NO: 514644 - DNA, 19 bp, Mus musculus
  siRNA target sequence for Sgk3 (NM_133220.1,375-393).
gaggttcacggtttataaa

SEQ ID NO: 514645 - DNA, 19 bp, Mus musculus
  siRNA target sequence for Sgk3 (NM_133220.1,377-395).
ggttcacggtttataaagt

SEQ ID NO: 514646 - DNA, 19 bp, Mus musculus
  siRNA target sequence for Sgk3 (NM_133220.1,378-396).
gttcacggtttataaagtt

SEQ ID NO: 514647 - DNA, 19 bp, Mus musculus
  siRNA target sequence for Sgk3 (NM_133220.1,441-459).
cgcagagtttgacaaactt

SEQ ID NO: 514648 - DNA, 19 bp, Mus musculus
  siRNA target sequence for Sgk3 (NM_133220.1,442-460).
gcagagtttgacaaacttt

SEQ ID NO: 514649 - DNA, 19 bp, Mus musculus
  siRNA target sequence for Sgk3 (NM_133220.1,513-531).
gagaatatttggtgataat

SEQ ID NO: 514650 - DNA, 19 bp, Mus musculus
  siRNA target sequence for Sgk3 (NM_133220.1,557-575).
gaagagcaggattgaatga

SEQ ID NO: 514651 - DNA, 19 bp, Mus musculus
  siRNA target sequence for Sgk3 (NM_133220.1,585-603).
gaacttggtcagatatcca

SEQ ID NO: 514652 - DNA, 19 bp, Mus musculus
  siRNA target sequence for Sgk3 (NM_133220.1,596-614).
gatatccagagctttacaa

SEQ ID NO: 514653 - DNA, 19 bp, Mus musculus
  siRNA target sequence for Sgk3 (NM_133220.1,713-731).
ctacctcacggaacatcaa

SEQ ID NO: 514654 - DNA, 19 bp, Mus musculus
  siRNA target sequence for Sgk3 (NM_133220.1,763-781).
ccaactgacttcgattttt

SEQ ID NO: 514655 - DNA, 19 bp, Mus musculus
  siRNA target sequence for Sgk3 (NM_133220.1,983-1001).
caactgaaaagctttattt

SEQ ID NO: 514656 - DNA, 19 bp, Mus musculus
  siRNA target sequence for Sgk3 (NM_133220.1,1044-1062).
ccaaagggaaaggtctttt

SEQ ID NO: 514657 - DNA, 19 bp, Mus musculus
  siRNA target sequence for Sgk3 (NM_133220.1,1066-1084).
gaacccagagcgaggtttt

SEQ ID NO: 514658 - DNA, 19 bp, Mus musculus
  siRNA target sequence for Sgk3 (NM_133220.1,1116-1134).
cctgcactccatcaaaata

SEQ ID NO: 514659 - DNA, 19 bp, Mus musculus
  siRNA target sequence for Sgk3 (NM_133220.1,1120-1138).
cactccatcaaaatagtgt

SEQ ID NO: 514660 - DNA, 19 bp, Mus musculus
  siRNA target sequence for Sgk3 (NM_133220.1,1170-1188).
ggattcaatgggacatgtt

SEQ ID NO: 514661 - DNA, 19 bp, Mus musculus
  siRNA target sequence for Sgk3 (NM_133220.1,1376-1394).
gccgagatgttgctgaaat

SEQ ID NO: 514662 - DNA, 19 bp, Mus musculus
  siRNA target sequence for Sgk3 (NM_133220.1,1411-1429).
cacaagcccttaaacttga

SEQ ID NO: 514663 - DNA, 19 bp, Mus musculus
  siRNA target sequence for Sgk3 (NM_133220.1,1559-1577).
ggactgacctcgtacaaaa

SEQ ID NO: 514664 - DNA, 19 bp, Mus musculus
  siRNA target sequence for Sgk3 (NM_133220.1,1560-1578).
gactgacctcgtacaaaaa

SEQ ID NO: 514665 - DNA, 19 bp, Mus musculus
  siRNA target sequence for Sgk3 (NM_133220.1,1564-1582).
gacctcgtacaaaaaaaga

SEQ ID NO: 514666 - DNA, 19 bp, Mus musculus
  siRNA target sequence for Sgk3 (NM_133220.1,1566-1584).
cctcgtacaaaaaaagatt

SEQ ID NO: 514667 - DNA, 19 bp, Mus musculus
  siRNA target sequence for Sgk3 (NM_133220.1,1615-1633).
ccagatgatatcagaaact

SEQ ID NO: 514668 - DNA, 19 bp, Mus musculus
  siRNA target sequence for Sgk3 (NM_133220.1,1719-1737).
ggcagatgatgcatttgtt

SEQ ID NO: 514669 - DNA, 19 bp, Mus musculus
  siRNA target sequence for Skd3 (NM_009191.2,87-105).
ggctcttcctagggttaat

SEQ ID NO: 514670 - DNA, 19 bp, Mus musculus
  siRNA target sequence for Skd3 (NM_009191.2,91-109).
cttcctagggttaatcaaa

SEQ ID NO: 514671 - DNA, 19 bp, Mus musculus
  siRNA target sequence for Skd3 (NM_009191.2,94-112).
cctagggttaatcaaatct

SEQ ID NO: 514672 - DNA, 19 bp, Mus musculus
  siRNA target sequence for Skd3 (NM_009191.2,318-336).
ctagccccgaagaaacact

SEQ ID NO: 514673 - DNA, 19 bp, Mus musculus
  siRNA target sequence for Skd3 (NM_009191.2,564-582).
catccatcagccacaatga

SEQ ID NO: 514674 - DNA, 19 bp, Mus musculus
  siRNA target sequence for Skd3 (NM_009191.2,771-789).
ctgtcctggccgatgacta

SEQ ID NO: 514675 - DNA, 19 bp, Mus musculus
  siRNA target sequence for Skd3 (NM_009191.2,872-890).
cgggaaggggaggttatga

SEQ ID NO: 514676 - DNA, 19 bp, Mus musculus
  siRNA target sequence for Skd3 (NM_009191.2,883-901).
ggttatgaagcttctgaaa

SEQ ID NO: 514677 - DNA, 19 bp, Mus musculus
  siRNA target sequence for Skd3 (NM_009191.2,884-902).
gttatgaagcttctgaaaa

SEQ ID NO: 514678 - DNA, 19 bp, Mus musculus
  siRNA target sequence for Skd3 (NM_009191.2,889-907).
gaagcttctgaaaacttct

SEQ ID NO: 514679 - DNA, 19 bp, Mus musculus
  siRNA target sequence for Skd3 (NM_009191.2,1418-1436).
gccatcttcatcatgactt

SEQ ID NO: 514680 - DNA, 19 bp, Mus musculus
  siRNA target sequence for Skd3 (NM_009191.2,1624-1642).
gtttctgggacggatcaat

SEQ ID NO: 514681 - DNA, 19 bp, Mus musculus
  siRNA target sequence for Skd3 (NM_009191.2,1628-1646).
ctgggacggatcaatgaga

SEQ ID NO: 514682 - DNA, 19 bp, Mus musculus
  siRNA target sequence for Skd3 (NM_009191.2,1761-1779).
gcgaggtggcagatgtgtt

SEQ ID NO: 514683 - DNA, 19 bp, Mus musculus
  siRNA target sequence for Skd3 (NM_009191.2,1806-1824).
gtgcccgctccattaagca

SEQ ID NO: 514684 - DNA, 19 bp, Mus musculus
  siRNA target sequence for Skd3 (NM_009191.2,1834-1852).
gcggcgtgtggtaaaccaa

SEQ ID NO: 514685 - DNA, 19 bp, Mus musculus
  siRNA target sequence for Skd3 (NM_009191.2,1983-2001).
cattgcgactggagatcat

SEQ ID NO: 514686 - DNA, 19 bp, Mus musculus
  siRNA target sequence for Skd3 (NM_009191.2,1988-2006).
cgactggagatcattgata

SEQ ID NO: 514687 - DNA, 19 bp, Mus musculus
  siRNA target sequence for Skd3 (NM_009191.2,1989-2007).
gactggagatcattgataa

SEQ ID NO: 514688 - DNA, 19 bp, Mus musculus
  siRNA target sequence for Slc22a17 (NM_021551.1,802-820).
ctaaggactggcgatttct

SEQ ID NO: 514689 - DNA, 19 bp, Mus musculus
  siRNA target sequence for Slc22a17 (NM_021551.1,814-832).
gatttctacagcgaatgat

SEQ ID NO: 514690 - DNA, 19 bp, Mus musculus
  siRNA target sequence for Slc22a17 (NM_021551.1,1035-1053).
cctgcaacgtccacctttt

SEQ ID NO: 514691 - DNA, 19 bp, Mus musculus
  siRNA target sequence for Slc22a17 (NM_021551.1,1038-1056).
gcaacgtccaccttttcct

SEQ ID NO: 514692 - DNA, 19 bp, Mus musculus
  siRNA target sequence for Slc22a17 (NM_021551.1,1068-1086).
ctcaactaccgcaacatct

SEQ ID NO: 514693 - DNA, 19 bp, Mus musculus
  siRNA target sequence for Slc22a17 (NM_021551.1,1168-1186).
gcagcccatcagacttcta

SEQ ID NO: 514694 - DNA, 19 bp, Mus musculus
  siRNA target sequence for Slc22a17 (NM_021551.1,1171-1189).
gcccatcagacttctactt

SEQ ID NO: 514695 - DNA, 19 bp, Mus musculus
  siRNA target sequence for Slc22a17 (NM_021551.1,1173-1191).
ccatcagacttctacttgt

SEQ ID NO: 514696 - DNA, 19 bp, Mus musculus
  siRNA target sequence for Smc1l1 (NM_019710.1,109-127).
gtttcctgaaactgattga

SEQ ID NO: 514697 - DNA, 19 bp, Mus musculus
  siRNA target sequence for Smc1l1 (NM_019710.1,122-140).
gattgagatcgagaacttt

SEQ ID NO: 514698 - DNA, 19 bp, Mus musculus
  siRNA target sequence for Smc1l1 (NM_019710.1,146-164).
gtacaagggtcgacagatt

SEQ ID NO: 514699 - DNA, 19 bp, Mus musculus
  siRNA target sequence for Smc1l1 (NM_019710.1,179-197).
gaggtttaccgccatcatt

SEQ ID NO: 514700 - DNA, 19 bp, Mus musculus
  siRNA target sequence for Smc1l1 (NM_019710.1,208-226).
gctctggtaagtcaaatct

SEQ ID NO: 514701 - DNA, 19 bp, Mus musculus
  siRNA target sequence for Smc1l1 (NM_019710.1,283-301).
ccctgcgggacctgataca

SEQ ID NO: 514702 - DNA, 19 bp, Mus musculus
  siRNA target sequence for Smc1l1 (NM_019710.1,403-421).
ggggctcttctgagtacaa

SEQ ID NO: 514703 - DNA, 19 bp, Mus musculus
  siRNA target sequence for Smc1l1 (NM_019710.1,405-423).
ggctcttctgagtacaaga

SEQ ID NO: 514704 - DNA, 19 bp, Mus musculus
  siRNA target sequence for Smc1l1 (NM_019710.1,412-430).
ctgagtacaagatcaacaa

SEQ ID NO: 514705 - DNA, 19 bp, Mus musculus
  siRNA target sequence for Smc1l1 (NM_019710.1,435-453).
gttgtccagctacatgaat

SEQ ID NO: 514706 - DNA, 19 bp, Mus musculus
  siRNA target sequence for Smc1l1 (NM_019710.1,438-456).
gtccagctacatgaataca

SEQ ID NO: 514707 - DNA, 19 bp, Mus musculus
  siRNA target sequence for Smc1l1 (NM_019710.1,525-543).
gagtctattgccatgaaga

SEQ ID NO: 514708 - DNA, 19 bp, Mus musculus
  siRNA target sequence for Smc1l1 (NM_019710.1,557-575).
gacagctctgtttgaagaa

SEQ ID NO: 514709 - DNA, 19 bp, Mus musculus
  siRNA target sequence for Smc1l1 (NM_019710.1,691-709).
gaaaggaggccaaacaaga

SEQ ID NO: 514710 - DNA, 19 bp, Mus musculus
  siRNA target sequence for Smc1l1 (NM_019710.1,765-783).
gtacagttgcagctcttta

SEQ ID NO: 514711 - DNA, 19 bp, Mus musculus
  siRNA target sequence for Smc1l1 (NM_019710.1,960-978).
gaaaaggactcggaattga

SEQ ID NO: 514712 - DNA, 19 bp, Mus musculus
  siRNA target sequence for Smc1l1 (NM_019710.1,1011-1029).
gagaatacatcccacaaaa

SEQ ID NO: 514713 - DNA, 19 bp, Mus musculus
  siRNA target sequence for Smc1l1 (NM_019710.1,1068-1086).
gctcagaaacattataaga

SEQ ID NO: 514714 - DNA, 19 bp, Mus musculus
  siRNA target sequence for Smc1l1 (NM_019710.1,1139-1157).
ggcccgacaggagtttgaa

SEQ ID NO: 514715 - DNA, 19 bp, Mus musculus
  siRNA target sequence for Smc1l1 (NM_019710.1,1141-1159).
cccgacaggagtttgaaga

SEQ ID NO: 514716 - DNA, 19 bp, Mus musculus
  siRNA target sequence for Smc1l1 (NM_019710.1,1223-1241).
gaaataccaccgattgaaa

SEQ ID NO: 514717 - DNA, 19 bp, Mus musculus
  siRNA target sequence for Smc1l1 (NM_019710.1,1229-1247).
ccaccgattgaaagaagaa

SEQ ID NO: 514718 - DNA, 19 bp, Mus musculus
  siRNA target sequence for Smc1l1 (NM_019710.1,1337-1355).
gcggaagaaagtagaaaca

SEQ ID NO: 514719 - DNA, 19 bp, Mus musculus
  siRNA target sequence for Smc1l1 (NM_019710.1,1412-1430).
gaagctagaagaatatatt

SEQ ID NO: 514720 - DNA, 19 bp, Mus musculus
  siRNA target sequence for Smc1l1 (NM_019710.1,1416-1434).
ctagaagaatatattacca

SEQ ID NO: 514721 - DNA, 19 bp, Mus musculus
  siRNA target sequence for Smc1l1 (NM_019710.1,1496-1514).
gatggccaagcgtcgtatt

SEQ ID NO: 514722 - DNA, 19 bp, Mus musculus
  siRNA target sequence for Smc1l1 (NM_019710.1,1499-1517).
ggccaagcgtcgtattgat

SEQ ID NO: 514723 - DNA, 19 bp, Mus musculus
  siRNA target sequence for Smc1l1 (NM_019710.1,1509-1527).
cgtattgatgagatcaata

SEQ ID NO: 514724 - DNA, 19 bp, Mus musculus
  siRNA target sequence for Smc1l1 (NM_019710.1,1595-1613).
gcagcgaaaggcagaaata

SEQ ID NO: 514725 - DNA, 19 bp, Mus musculus
  siRNA target sequence for Smc1l1 (NM_019710.1,1596-1614).
cagcgaaaggcagaaataa

SEQ ID NO: 514726 - DNA, 19 bp, Mus musculus
  siRNA target sequence for Smc1l1 (NM_019710.1,1667-1685).
cctctgccagcctacacaa

SEQ ID NO: 514727 - DNA, 19 bp, Mus musculus
  siRNA target sequence for Smc1l1 (NM_019710.1,1668-1686).
ctctgccagcctacacaaa

SEQ ID NO: 514728 - DNA, 19 bp, Mus musculus
  siRNA target sequence for Smc1l1 (NM_019710.1,1674-1692).
cagcctacacaaaagaagt

SEQ ID NO: 514729 - DNA, 19 bp, Mus musculus
  siRNA target sequence for Smc1l1 (NM_019710.1,1676-1694).
gcctacacaaaagaagtat

SEQ ID NO: 514730 - DNA, 19 bp, Mus musculus
  siRNA target sequence for Smc1l1 (NM_019710.1,1678-1696).
ctacacaaaagaagtatca

SEQ ID NO: 514731 - DNA, 19 bp, Mus musculus
  siRNA target sequence for Smc1l1 (NM_019710.1,1757-1775).
gacaggtcgggactgtatt

SEQ ID NO: 514732 - DNA, 19 bp, Mus musculus
  siRNA target sequence for Smc1l1 (NM_019710.1,1759-1777).
caggtcgggactgtattca

SEQ ID NO: 514733 - DNA, 19 bp, Mus musculus
  siRNA target sequence for Smc1l1 (NM_019710.1,1761-1779).
ggtcgggactgtattcagt

SEQ ID NO: 514734 - DNA, 19 bp, Mus musculus
  siRNA target sequence for Smc1l1 (NM_019710.1,1762-1780).
gtcgggactgtattcagta

SEQ ID NO: 514735 - DNA, 19 bp, Mus musculus
  siRNA target sequence for Smc1l1 (NM_019710.1,1764-1782).
cgggactgtattcagtata

SEQ ID NO: 514736 - DNA, 19 bp, Mus musculus
  siRNA target sequence for Smc1l1 (NM_019710.1,1765-1783).
gggactgtattcagtatat

SEQ ID NO: 514737 - DNA, 19 bp, Mus musculus
  siRNA target sequence for Smc1l1 (NM_019710.1,1832-1850).
ggaggtgaaacctactgat

SEQ ID NO: 514738 - DNA, 19 bp, Mus musculus
  siRNA target sequence for Smc1l1 (NM_019710.1,1874-1892).
ggccaagctagtgattgat

SEQ ID NO: 514739 - DNA, 19 bp, Mus musculus
  siRNA target sequence for Smc1l1 (NM_019710.1,1884-1902).
gtgattgatgtaattcgtt

SEQ ID NO: 514740 - DNA, 19 bp, Mus musculus
  siRNA target sequence for Smc1l1 (NM_019710.1,1886-1904).
gattgatgtaattcgttat

SEQ ID NO: 514741 - DNA, 19 bp, Mus musculus
  siRNA target sequence for Smc1l1 (NM_019710.1,1905-1923).
gaaccacctcacattaaaa

SEQ ID NO: 514742 - DNA, 19 bp, Mus musculus
  siRNA target sequence for Smc1l1 (NM_019710.1,1945-1963).
gcaatgcccttgtttgtga

SEQ ID NO: 514743 - DNA, 19 bp, Mus musculus
  siRNA target sequence for Smc1l1 (NM_019710.1,1946-1964).
caatgcccttgtttgtgat

SEQ ID NO: 514744 - DNA, 19 bp, Mus musculus
  siRNA target sequence for Smc1l1 (NM_019710.1,2092-2110).
cacggcgctgggatgagaa

SEQ ID NO: 514745 - DNA, 19 bp, Mus musculus
  siRNA target sequence for Smc1l1 (NM_019710.1,2214-2232).
caggcccacgggcttcaaa

SEQ ID NO: 514746 - DNA, 19 bp, Mus musculus
  siRNA target sequence for Smc1l1 (NM_019710.1,2229-2247).
caaatgcggctgaagtact

SEQ ID NO: 514747 - DNA, 19 bp, Mus musculus
  siRNA target sequence for Smc1l1 (NM_019710.1,2258-2276).
cctagaacagactaagaca

SEQ ID NO: 514748 - DNA, 19 bp, Mus musculus
  siRNA target sequence for Smc1l1 (NM_019710.1,2278-2296).
ggcatcttgccctgaatct

SEQ ID NO: 514749 - DNA, 19 bp, Mus musculus
  siRNA target sequence for Smc1l1 (NM_019710.1,2333-2351).
cttcgggcctcgcattaat

SEQ ID NO: 514750 - DNA, 19 bp, Mus musculus
  siRNA target sequence for Smc1l1 (NM_019710.1,2336-2354).
cgggcctcgcattaatgat

SEQ ID NO: 514751 - DNA, 19 bp, Mus musculus
  siRNA target sequence for Smc1l1 (NM_019710.1,2337-2355).
gggcctcgcattaatgata

SEQ ID NO: 514752 - DNA, 19 bp, Mus musculus
  siRNA target sequence for Smc1l1 (NM_019710.1,2338-2356).
ggcctcgcattaatgatat

SEQ ID NO: 514753 - DNA, 19 bp, Mus musculus
  siRNA target sequence for Smc1l1 (NM_019710.1,2340-2358).
cctcgcattaatgatatca

SEQ ID NO: 514754 - DNA, 19 bp, Mus musculus
  siRNA target sequence for Smc1l1 (NM_019710.1,2374-2392).
gccgagagagggaaatgaa

SEQ ID NO: 514755 - DNA, 19 bp, Mus musculus
  siRNA target sequence for Smc1l1 (NM_019710.1,2462-2480).
gcgtaacatccgagaattt

SEQ ID NO: 514756 - DNA, 19 bp, Mus musculus
  siRNA target sequence for Smc1l1 (NM_019710.1,2464-2482).
gtaacatccgagaatttga

SEQ ID NO: 514757 - DNA, 19 bp, Mus musculus
  siRNA target sequence for Smc1l1 (NM_019710.1,2493-2511).
gtgaagcggcagaatgaaa

SEQ ID NO: 514758 - DNA, 19 bp, Mus musculus
  siRNA target sequence for Smc1l1 (NM_019710.1,2516-2534).
caagaaacgcttggaattt

SEQ ID NO: 514759 - DNA, 19 bp, Mus musculus
  siRNA target sequence for Smc1l1 (NM_019710.1,2548-2566).
ctcgcttgggcatccaatt

SEQ ID NO: 514760 - DNA, 19 bp, Mus musculus
  siRNA target sequence for Smc1l1 (NM_019710.1,2555-2573).
gggcatccaattggatttt

SEQ ID NO: 514761 - DNA, 19 bp, Mus musculus
  siRNA target sequence for Smc1l1 (NM_019710.1,2557-2575).
gcatccaattggattttga

SEQ ID NO: 514762 - DNA, 19 bp, Mus musculus
  siRNA target sequence for Smc1l1 (NM_019710.1,2558-2576).
catccaattggattttgaa

SEQ ID NO: 514763 - DNA, 19 bp, Mus musculus
  siRNA target sequence for Smc1l1 (NM_019710.1,2617-2635).
gggaacagacggtgaaaaa

SEQ ID NO: 514764 - DNA, 19 bp, Mus musculus
  siRNA target sequence for Smc1l1 (NM_019710.1,2707-2725).
ctcagcttcaagaccttaa

SEQ ID NO: 514765 - DNA, 19 bp, Mus musculus
  siRNA target sequence for Smc1l1 (NM_019710.1,2732-2750).
gcacctggccaaaaagtca

SEQ ID NO: 514766 - DNA, 19 bp, Mus musculus
  siRNA target sequence for Smc1l1 (NM_019710.1,2889-2907).
ctgctacaggcctgtaaga

SEQ ID NO: 514767 - DNA, 19 bp, Mus musculus
  siRNA target sequence for Smc1l1 (NM_019710.1,2937-2955).
ggcaccatggatgatatta

SEQ ID NO: 514768 - DNA, 19 bp, Mus musculus
  siRNA target sequence for Smc1l1 (NM_019710.1,3027-3045).
cgagaggccctcattgaga

SEQ ID NO: 514769 - DNA, 19 bp, Mus musculus
  siRNA target sequence for Smc1l1 (NM_019710.1,3034-3052).
ccctcattgagattgacta

SEQ ID NO: 514770 - DNA, 19 bp, Mus musculus
  siRNA target sequence for Smc1l1 (NM_019710.1,3053-3071).
cggtgacctgtgtgaagat

SEQ ID NO: 514771 - DNA, 19 bp, Mus musculus
  siRNA target sequence for Smc1l1 (NM_019710.1,3160-3178).
ggattgctgcccctaacat

SEQ ID NO: 514772 - DNA, 19 bp, Mus musculus
  siRNA target sequence for Smc1l1 (NM_019710.1,3308-3326).
ccgattcaatgcttgcttt

SEQ ID NO: 514773 - DNA, 19 bp, Mus musculus
  siRNA target sequence for Smc1l1 (NM_019710.1,3331-3349).
ctgtggctaccaacattga

SEQ ID NO: 514774 - DNA, 19 bp, Mus musculus
  siRNA target sequence for Smc1l1 (NM_019710.1,3340-3358).
ccaacattgatgagatcta

SEQ ID NO: 514775 - DNA, 19 bp, Mus musculus
  siRNA target sequence for Smc1l1 (NM_019710.1,3412-3430).
ctgaagagccctatttgga

SEQ ID NO: 514776 - DNA, 19 bp, Mus musculus
  siRNA target sequence for Smc1l1 (NM_019710.1,3429-3447).
gatggcatcaactacaact

SEQ ID NO: 514777 - DNA, 19 bp, Mus musculus
  siRNA target sequence for Smc1l1 (NM_019710.1,3450-3468).
gtagctcctggcaaacgtt

SEQ ID NO: 514778 - DNA, 19 bp, Mus musculus
  siRNA target sequence for Smc1l1 (NM_019710.1,3471-3489).
cggcctatggacaatttgt

SEQ ID NO: 514779 - DNA, 19 bp, Mus musculus
  siRNA target sequence for Smc1l1 (NM_019710.1,3606-3624).
ggcaaggtggcaaattaca

SEQ ID NO: 514780 - DNA, 19 bp, Mus musculus
  siRNA target sequence for Smc2l1 (NM_008017.2,14-32).
caatcattctcgaaggatt

SEQ ID NO: 514781 - DNA, 19 bp, Mus musculus
  siRNA target sequence for Smc2l1 (NM_008017.2,81-99).
caatgcgatcactggttta

SEQ ID NO: 514782 - DNA, 19 bp, Mus musculus
  siRNA target sequence for Smc2l1 (NM_008017.2,164-182).
cccaggtgcgggcttcaaa

SEQ ID NO: 514783 - DNA, 19 bp, Mus musculus
  siRNA target sequence for Smc2l1 (NM_008017.2,165-183).
ccaggtgcgggcttcaaat

SEQ ID NO: 514784 - DNA, 19 bp, Mus musculus
  siRNA target sequence for Smc2l1 (NM_008017.2,166-184).
caggtgcgggcttcaaatt

SEQ ID NO: 514785 - DNA, 19 bp, Mus musculus
  siRNA target sequence for Smc2l1 (NM_008017.2,270-288).
gagtccgttgggatttgaa

SEQ ID NO: 514786 - DNA, 19 bp, Mus musculus
  siRNA target sequence for Smc2l1 (NM_008017.2,279-297).
gggatttgaagctcatgat

SEQ ID NO: 514787 - DNA, 19 bp, Mus musculus
  siRNA target sequence for Smc2l1 (NM_008017.2,295-313).
gatgaaatcacagtaacaa

SEQ ID NO: 514788 - DNA, 19 bp, Mus musculus
  siRNA target sequence for Smc2l1 (NM_008017.2,345-363).
cttaatcaatggagtgaat

SEQ ID NO: 514789 - DNA, 19 bp, Mus musculus
  siRNA target sequence for Smc2l1 (NM_008017.2,432-450).
catcatgcagggcagaatt

SEQ ID NO: 514790 - DNA, 19 bp, Mus musculus
  siRNA target sequence for Smc2l1 (NM_008017.2,443-461).
gcagaattacgaaagtatt

SEQ ID NO: 514791 - DNA, 19 bp, Mus musculus
  siRNA target sequence for Smc2l1 (NM_008017.2,452-470).
cgaaagtattaaatatgaa

SEQ ID NO: 514792 - DNA, 19 bp, Mus musculus
  siRNA target sequence for Smc2l1 (NM_008017.2,472-490).
ccaccagagatattatcca

SEQ ID NO: 514793 - DNA, 19 bp, Mus musculus
  siRNA target sequence for Smc2l1 (NM_008017.2,480-498).
gatattatccatgattgaa

SEQ ID NO: 514794 - DNA, 19 bp, Mus musculus
  siRNA target sequence for Smc2l1 (NM_008017.2,509-527).
gaaccaggatgtatgagta

SEQ ID NO: 514795 - DNA, 19 bp, Mus musculus
  siRNA target sequence for Smc2l1 (NM_008017.2,516-534).
gatgtatgagtacaaaaaa

SEQ ID NO: 514796 - DNA, 19 bp, Mus musculus
  siRNA target sequence for Smc2l1 (NM_008017.2,567-585).
ggctaagctgaaagaaata

SEQ ID NO: 514797 - DNA, 19 bp, Mus musculus
  siRNA target sequence for Smc2l1 (NM_008017.2,590-608).
cgatactggaagaagagat

SEQ ID NO: 514798 - DNA, 19 bp, Mus musculus
  siRNA target sequence for Smc2l1 (NM_008017.2,606-624).
gattactccaacgattcaa

SEQ ID NO: 514799 - DNA, 19 bp, Mus musculus
  siRNA target sequence for Smc2l1 (NM_008017.2,611-629).
ctccaacgattcaaaaatt

SEQ ID NO: 514800 - DNA, 19 bp, Mus musculus
  siRNA target sequence for Smc2l1 (NM_008017.2,613-631).
ccaacgattcaaaaattaa

SEQ ID NO: 514801 - DNA, 19 bp, Mus musculus
  siRNA target sequence for Smc2l1 (NM_008017.2,682-700).
gagcatctgagtcgtttat

SEQ ID NO: 514802 - DNA, 19 bp, Mus musculus
  siRNA target sequence for Smc2l1 (NM_008017.2,743-761).
gctcagctggggagctaaa

SEQ ID NO: 514803 - DNA, 19 bp, Mus musculus
  siRNA target sequence for Smc2l1 (NM_008017.2,771-789).
ggataaaatagtaaatctt

SEQ ID NO: 514804 - DNA, 19 bp, Mus musculus
  siRNA target sequence for Smc2l1 (NM_008017.2,827-845).
ctctcaattgtgaaatcga

SEQ ID NO: 514805 - DNA, 19 bp, Mus musculus
  siRNA target sequence for Smc2l1 (NM_008017.2,913-931).
gaagcccagcgagttaata

SEQ ID NO: 514806 - DNA, 19 bp, Mus musculus
  siRNA target sequence for Smc2l1 (NM_008017.2,916-934).
gcccagcgagttaatacta

SEQ ID NO: 514807 - DNA, 19 bp, Mus musculus
  siRNA target sequence for Smc2l1 (NM_008017.2,917-935).
cccagcgagttaatactaa

SEQ ID NO: 514808 - DNA, 19 bp, Mus musculus
  siRNA target sequence for Smc2l1 (NM_008017.2,919-937).
cagcgagttaatactaagt

SEQ ID NO: 514809 - DNA, 19 bp, Mus musculus
  siRNA target sequence for Smc2l1 (NM_008017.2,921-939).
gcgagttaatactaagtct

SEQ ID NO: 514810 - DNA, 19 bp, Mus musculus
  siRNA target sequence for Smc2l1 (NM_008017.2,944-962).
gtgcatttgacctcaagaa

SEQ ID NO: 514811 - DNA, 19 bp, Mus musculus
  siRNA target sequence for Smc2l1 (NM_008017.2,993-1011).
caaagagctacaaaacagt

SEQ ID NO: 514812 - DNA, 19 bp, Mus musculus
  siRNA target sequence for Smc2l1 (NM_008017.2,1010-1028).
gtatggctgaggattctaa

SEQ ID NO: 514813 - DNA, 19 bp, Mus musculus
  siRNA target sequence for Smc2l1 (NM_008017.2,1015-1033).
gctgaggattctaaagcat

SEQ ID NO: 514814 - DNA, 19 bp, Mus musculus
  siRNA target sequence for Smc2l1 (NM_008017.2,1030-1048).
gcattagcagcaaaggaaa

SEQ ID NO: 514815 - DNA, 19 bp, Mus musculus
  siRNA target sequence for Smc2l1 (NM_008017.2,1206-1224).
gatagcctgtaaaaacgat

SEQ ID NO: 514816 - DNA, 19 bp, Mus musculus
  siRNA target sequence for Smc2l1 (NM_008017.2,1210-1228).
gcctgtaaaaacgatatca

SEQ ID NO: 514817 - DNA, 19 bp, Mus musculus
  siRNA target sequence for Smc2l1 (NM_008017.2,1247-1265).
ccaagcaggctcagatgaa

SEQ ID NO: 514818 - DNA, 19 bp, Mus musculus
  siRNA target sequence for Smc2l1 (NM_008017.2,1273-1291).
catgcccaacaagaactaa

SEQ ID NO: 514819 - DNA, 19 bp, Mus musculus
  siRNA target sequence for Smc2l1 (NM_008017.2,1278-1296).
ccaacaagaactaaagagt

SEQ ID NO: 514820 - DNA, 19 bp, Mus musculus
  siRNA target sequence for Smc2l1 (NM_008017.2,1295-1313).
gtaagcaagcagaggttaa

SEQ ID NO: 514821 - DNA, 19 bp, Mus musculus
  siRNA target sequence for Smc2l1 (NM_008017.2,1347-1365).
cgcttttgaagctgtgaaa

SEQ ID NO: 514822 - DNA, 19 bp, Mus musculus
  siRNA target sequence for Smc2l1 (NM_008017.2,1459-1477).
cgtgacatcaacaacctaa

SEQ ID NO: 514823 - DNA, 19 bp, Mus musculus
  siRNA target sequence for Smc2l1 (NM_008017.2,1460-1478).
gtgacatcaacaacctaaa

SEQ ID NO: 514824 - DNA, 19 bp, Mus musculus
  siRNA target sequence for Smc2l1 (NM_008017.2,1464-1482).
catcaacaacctaaaagga

SEQ ID NO: 514825 - DNA, 19 bp, Mus musculus
  siRNA target sequence for Smc2l1 (NM_008017.2,1540-1558).
gagaagaactggaatcgaa

SEQ ID NO: 514826 - DNA, 19 bp, Mus musculus
  siRNA target sequence for Smc2l1 (NM_008017.2,1579-1597).
gcttctctgataaatgtga

SEQ ID NO: 514827 - DNA, 19 bp, Mus musculus
  siRNA target sequence for Smc2l1 (NM_008017.2,1583-1601).
ctctgataaatgtgaaaga

SEQ ID NO: 514828 - DNA, 19 bp, Mus musculus
  siRNA target sequence for Smc2l1 (NM_008017.2,1918-1936).
gcctttgataaaaggataa

SEQ ID NO: 514829 - DNA, 19 bp, Mus musculus
  siRNA target sequence for Smc2l1 (NM_008017.2,1919-1937).
cctttgataaaaggataat

SEQ ID NO: 514830 - DNA, 19 bp, Mus musculus
  siRNA target sequence for Smc2l1 (NM_008017.2,1932-1950).
gataatgaccagaactgta

SEQ ID NO: 514831 - DNA, 19 bp, Mus musculus
  siRNA target sequence for Smc2l1 (NM_008017.2,1952-1970).
cccttgggggtgatgtatt

SEQ ID NO: 514832 - DNA, 19 bp, Mus musculus
  siRNA target sequence for Smc2l1 (NM_008017.2,1953-1971).
ccttgggggtgatgtattt

SEQ ID NO: 514833 - DNA, 19 bp, Mus musculus
  siRNA target sequence for Smc2l1 (NM_008017.2,2004-2022).
gtcccaggcagcttcgatt

SEQ ID NO: 514834 - DNA, 19 bp, Mus musculus
  siRNA target sequence for Smc2l1 (NM_008017.2,2011-2029).
gcagcttcgattttaacca

SEQ ID NO: 514835 - DNA, 19 bp, Mus musculus
  siRNA target sequence for Smc2l1 (NM_008017.2,2012-2030).
cagcttcgattttaaccaa

SEQ ID NO: 514836 - DNA, 19 bp, Mus musculus
  siRNA target sequence for Smc2l1 (NM_008017.2,2018-2036).
cgattttaaccaagtttca

SEQ ID NO: 514837 - DNA, 19 bp, Mus musculus
  siRNA target sequence for Smc2l1 (NM_008017.2,2100-2118).
ggagttagcaggtcttaaa

SEQ ID NO: 514838 - DNA, 19 bp, Mus musculus
  siRNA target sequence for Smc2l1 (NM_008017.2,2173-2191).
gagggagacttattgcaaa

SEQ ID NO: 514839 - DNA, 19 bp, Mus musculus
  siRNA target sequence for Smc2l1 (NM_008017.2,2177-2195).
gagacttattgcaaactaa

SEQ ID NO: 514840 - DNA, 19 bp, Mus musculus
  siRNA target sequence for Smc2l1 (NM_008017.2,2181-2199).
cttattgcaaactaaactt

SEQ ID NO: 514841 - DNA, 19 bp, Mus musculus
  siRNA target sequence for Smc2l1 (NM_008017.2,2416-2434).
gatgcatctagcaagaaaa

SEQ ID NO: 514842 - DNA, 19 bp, Mus musculus
  siRNA target sequence for Smc2l1 (NM_008017.2,2451-2469).
ggaggttgaagctattact

SEQ ID NO: 514843 - DNA, 19 bp, Mus musculus
  siRNA target sequence for Smc2l1 (NM_008017.2,2454-2472).
ggttgaagctattactcta

SEQ ID NO: 514844 - DNA, 19 bp, Mus musculus
  siRNA target sequence for Smc2l1 (NM_008017.2,2492-2510).
gagagcatgcttctaatga

SEQ ID NO: 514845 - DNA, 19 bp, Mus musculus
  siRNA target sequence for Smc2l1 (NM_008017.2,2517-2535).
gcttgatgccgtgaatgaa

SEQ ID NO: 514846 - DNA, 19 bp, Mus musculus
  siRNA target sequence for Smc2l1 (NM_008017.2,2575-2593).
gctgaggtcgctaaaaata

SEQ ID NO: 514847 - DNA, 19 bp, Mus musculus
  siRNA target sequence for Smc2l1 (NM_008017.2,2576-2594).
ctgaggtcgctaaaaataa

SEQ ID NO: 514848 - DNA, 19 bp, Mus musculus
  siRNA target sequence for Smc2l1 (NM_008017.2,2581-2599).
gtcgctaaaaataaggaat

SEQ ID NO: 514849 - DNA, 19 bp, Mus musculus
  siRNA target sequence for Smc2l1 (NM_008017.2,2585-2603).
ctaaaaataaggaatcagt

SEQ ID NO: 514850 - DNA, 19 bp, Mus musculus
  siRNA target sequence for Smc2l1 (NM_008017.2,2648-2666).
cagcccaggacaacataat

SEQ ID NO: 514851 - DNA, 19 bp, Mus musculus
  siRNA target sequence for Smc2l1 (NM_008017.2,2650-2668).
gcccaggacaacataatta

SEQ ID NO: 514852 - DNA, 19 bp, Mus musculus
  siRNA target sequence for Smc2l1 (NM_008017.2,2709-2727).
caatgagtctcaacttaaa

SEQ ID NO: 514853 - DNA, 19 bp, Mus musculus
  siRNA target sequence for Smc2l1 (NM_008017.2,2713-2731).
gagtctcaacttaaaatta

SEQ ID NO: 514854 - DNA, 19 bp, Mus musculus
  siRNA target sequence for Smc2l1 (NM_008017.2,2734-2752).
gagttggaccacagcataa

SEQ ID NO: 514855 - DNA, 19 bp, Mus musculus
  siRNA target sequence for Smc2l1 (NM_008017.2,2739-2757).
ggaccacagcataagcaaa

SEQ ID NO: 514856 - DNA, 19 bp, Mus musculus
  siRNA target sequence for Smc2l1 (NM_008017.2,2783-2801).
ctgcaaaggtatccaaaat

SEQ ID NO: 514857 - DNA, 19 bp, Mus musculus
  siRNA target sequence for Smc2l1 (NM_008017.2,2790-2808).
ggtatccaaaatgttaagt

SEQ ID NO: 514858 - DNA, 19 bp, Mus musculus
  siRNA target sequence for Smc2l1 (NM_008017.2,2807-2825).
gtgattatgattggattaa

SEQ ID NO: 514859 - DNA, 19 bp, Mus musculus
  siRNA target sequence for Smc2l1 (NM_008017.2,2838-2856).
cctatttggccaacctaat

SEQ ID NO: 514860 - DNA, 19 bp, Mus musculus
  siRNA target sequence for Smc2l1 (NM_008017.2,2851-2869).
cctaatagtgcctatgatt

SEQ ID NO: 514861 - DNA, 19 bp, Mus musculus
  siRNA target sequence for Smc2l1 (NM_008017.2,2852-2870).
ctaatagtgcctatgattt

SEQ ID NO: 514862 - DNA, 19 bp, Mus musculus
  siRNA target sequence for Smc2l1 (NM_008017.2,2894-2912).
ctggccagagacttcagaa

SEQ ID NO: 514863 - DNA, 19 bp, Mus musculus
  siRNA target sequence for Smc2l1 (NM_008017.2,2981-2999).
ctgaagagcggtataatga

SEQ ID NO: 514864 - DNA, 19 bp, Mus musculus
  siRNA target sequence for Smc2l1 (NM_008017.2,2983-3001).
gaagagcggtataatgatt

SEQ ID NO: 514865 - DNA, 19 bp, Mus musculus
  siRNA target sequence for Smc2l1 (NM_008017.2,2989-3007).
cggtataatgatttgatga

SEQ ID NO: 514866 - DNA, 19 bp, Mus musculus
  siRNA target sequence for Smc2l1 (NM_008017.2,3022-3040).
gtagaaaatgacaaatcca

SEQ ID NO: 514867 - DNA, 19 bp, Mus musculus
  siRNA target sequence for Smc2l1 (NM_008017.2,3038-3056).
ccaaaatccttgcaactat

SEQ ID NO: 514868 - DNA, 19 bp, Mus musculus
  siRNA target sequence for Smc2l1 (NM_008017.2,3098-3116).
cttggcaaaaggtgaacaa

SEQ ID NO: 514869 - DNA, 19 bp, Mus musculus
  siRNA target sequence for Smc2l1 (NM_008017.2,3101-3119).
ggcaaaaggtgaacaaaga

SEQ ID NO: 514870 - DNA, 19 bp, Mus musculus
  siRNA target sequence for Smc2l1 (NM_008017.2,3214-3232).
gttgccttaggaaatacgt

SEQ ID NO: 514871 - DNA, 19 bp, Mus musculus
  siRNA target sequence for Smc2l1 (NM_008017.2,3274-3292).
ctagtggctctctcactaa

SEQ ID NO: 514872 - DNA, 19 bp, Mus musculus
  siRNA target sequence for Smc2l1 (NM_008017.2,3280-3298).
gctctctcactaatattgt

SEQ ID NO: 514873 - DNA, 19 bp, Mus musculus
  siRNA target sequence for Smc2l1 (NM_008017.2,3312-3330).
caaacctgctccaatttat

SEQ ID NO: 514874 - DNA, 19 bp, Mus musculus
  siRNA target sequence for Smc2l1 (NM_008017.2,3346-3364).
gatgcggccttggatcttt

SEQ ID NO: 514875 - DNA, 19 bp, Mus musculus
  siRNA target sequence for Smc2l1 (NM_008017.2,3361-3379).
ctttctcatacccagaata

SEQ ID NO: 514876 - DNA, 19 bp, Mus musculus
  siRNA target sequence for Smc2l1 (NM_008017.2,3394-3412).
cggactcacttcacacatt

SEQ ID NO: 514877 - DNA, 19 bp, Mus musculus
  siRNA target sequence for Smc2l1 (NM_008017.2,3400-3418).
cacttcacacattctcaat

SEQ ID NO: 514878 - DNA, 19 bp, Mus musculus
  siRNA target sequence for Smc2l1 (NM_008017.2,3431-3449).
ccctcaaagaaggtatgtt

SEQ ID NO: 514879 - DNA, 19 bp, Mus musculus
  siRNA target sequence for Smc2l1 (NM_008017.2,3447-3465).
gttcaacaatgcaaacgtt

SEQ ID NO: 514880 - DNA, 19 bp, Mus musculus
  siRNA target sequence for Smc5l1 (NM_153808.1,91-109).
ccaacccccaggtttccaa

SEQ ID NO: 514881 - DNA, 19 bp, Mus musculus
  siRNA target sequence for Smc5l1 (NM_153808.1,141-159).
gtcccgagcaagagaaaga

SEQ ID NO: 514882 - DNA, 19 bp, Mus musculus
  siRNA target sequence for Smc5l1 (NM_153808.1,278-296).
ccatctgaacatgatcatt

SEQ ID NO: 514883 - DNA, 19 bp, Mus musculus
  siRNA target sequence for Smc5l1 (NM_153808.1,352-370).
caggcaaacctgctttcat

SEQ ID NO: 514884 - DNA, 19 bp, Mus musculus
  siRNA target sequence for Smc5l1 (NM_153808.1,401-419).
gaagagaggatgttccaaa

SEQ ID NO: 514885 - DNA, 19 bp, Mus musculus
  siRNA target sequence for Smc5l1 (NM_153808.1,448-466).
cttctggaaatcttataat

SEQ ID NO: 514886 - DNA, 19 bp, Mus musculus
  siRNA target sequence for Smc5l1 (NM_153808.1,469-487).
cccgcgagattgatgtgat

SEQ ID NO: 514887 - DNA, 19 bp, Mus musculus
  siRNA target sequence for Smc5l1 (NM_153808.1,470-488).
ccgcgagattgatgtgata

SEQ ID NO: 514888 - DNA, 19 bp, Mus musculus
  siRNA target sequence for Smc5l1 (NM_153808.1,471-489).
cgcgagattgatgtgataa

SEQ ID NO: 514889 - DNA, 19 bp, Mus musculus
  siRNA target sequence for Smc5l1 (NM_153808.1,472-490).
gcgagattgatgtgataaa

SEQ ID NO: 514890 - DNA, 19 bp, Mus musculus
  siRNA target sequence for Smc5l1 (NM_153808.1,521-539).
gcctgtaacccagaagata

SEQ ID NO: 514891 - DNA, 19 bp, Mus musculus
  siRNA target sequence for Smc5l1 (NM_153808.1,602-620).
ggacaaagttggggaattt

SEQ ID NO: 514892 - DNA, 19 bp, Mus musculus
  siRNA target sequence for Smc5l1 (NM_153808.1,605-623).
caaagttggggaatttgct

SEQ ID NO: 514893 - DNA, 19 bp, Mus musculus
  siRNA target sequence for Smc5l1 (NM_153808.1,731-749).
gctagagacctcttgcaaa

SEQ ID NO: 514894 - DNA, 19 bp, Mus musculus
  siRNA target sequence for Smc5l1 (NM_153808.1,825-843).
cgaaaacgacatttagatt

SEQ ID NO: 514895 - DNA, 19 bp, Mus musculus
  siRNA target sequence for Smc5l1 (NM_153808.1,871-889).
catgggtggaatatgagaa

SEQ ID NO: 514896 - DNA, 19 bp, Mus musculus
  siRNA target sequence for Smc5l1 (NM_153808.1,887-905).
gaatgtacgtcaggaatat

SEQ ID NO: 514897 - DNA, 19 bp, Mus musculus
  siRNA target sequence for Smc5l1 (NM_153808.1,1026-1044).
cgaatcaaagaaaagtcaa

SEQ ID NO: 514898 - DNA, 19 bp, Mus musculus
  siRNA target sequence for Smc5l1 (NM_153808.1,1076-1094).
gcaaaggcaagacttgatt

SEQ ID NO: 514899 - DNA, 19 bp, Mus musculus
  siRNA target sequence for Smc5l1 (NM_153808.1,1161-1179).
gaccggcagaagagaataa

SEQ ID NO: 514900 - DNA, 19 bp, Mus musculus
  siRNA target sequence for Smc5l1 (NM_153808.1,1180-1198).
gtaacacccgcaagatgat

SEQ ID NO: 514901 - DNA, 19 bp, Mus musculus
  siRNA target sequence for Smc5l1 (NM_153808.1,1256-1274).
gatcgacaccgtcacaaat

SEQ ID NO: 514902 - DNA, 19 bp, Mus musculus
  siRNA target sequence for Smc5l1 (NM_153808.1,1259-1277).
cgacaccgtcacaaatgat

SEQ ID NO: 514903 - DNA, 19 bp, Mus musculus
  siRNA target sequence for Smc5l1 (NM_153808.1,1292-1310).
ggaggagaaagccttatgt

SEQ ID NO: 514904 - DNA, 19 bp, Mus musculus
  siRNA target sequence for Smc5l1 (NM_153808.1,1295-1313).
ggagaaagccttatgtgaa

SEQ ID NO: 514905 - DNA, 19 bp, Mus musculus
  siRNA target sequence for Smc5l1 (NM_153808.1,1311-1329).
gaaggcgagatcattgata

SEQ ID NO: 514906 - DNA, 19 bp, Mus musculus
  siRNA target sequence for Smc5l1 (NM_153808.1,1365-1383).
cggagtgtgagtgatcata

SEQ ID NO: 514907 - DNA, 19 bp, Mus musculus
  siRNA target sequence for Smc5l1 (NM_153808.1,1387-1405).
cacggtttgacaatcttat

SEQ ID NO: 514908 - DNA, 19 bp, Mus musculus
  siRNA target sequence for Smc5l1 (NM_153808.1,1389-1407).
cggtttgacaatcttatga

SEQ ID NO: 514909 - DNA, 19 bp, Mus musculus
  siRNA target sequence for Smc5l1 (NM_153808.1,1391-1409).
gtttgacaatcttatgaat

SEQ ID NO: 514910 - DNA, 19 bp, Mus musculus
  siRNA target sequence for Smc5l1 (NM_153808.1,1433-1451).
gcggtaccgggatacgtat

SEQ ID NO: 514911 - DNA, 19 bp, Mus musculus
  siRNA target sequence for Smc5l1 (NM_153808.1,1436-1454).
gtaccgggatacgtatgat

SEQ ID NO: 514912 - DNA, 19 bp, Mus musculus
  siRNA target sequence for Smc5l1 (NM_153808.1,1458-1476).
gtcttgtggctgagaaata

SEQ ID NO: 514913 - DNA, 19 bp, Mus musculus
  siRNA target sequence for Smc5l1 (NM_153808.1,1463-1481).
gtggctgagaaataacaga

SEQ ID NO: 514914 - DNA, 19 bp, Mus musculus
  siRNA target sequence for Smc5l1 (NM_153808.1,1478-1496).
cagagacaggtttaaacaa

SEQ ID NO: 514915 - DNA, 19 bp, Mus musculus
  siRNA target sequence for Smc5l1 (NM_153808.1,1509-1527).
cccataatgctcacgatta

SEQ ID NO: 514916 - DNA, 19 bp, Mus musculus
  siRNA target sequence for Smc5l1 (NM_153808.1,1510-1528).
ccataatgctcacgattaa

SEQ ID NO: 514917 - DNA, 19 bp, Mus musculus
  siRNA target sequence for Smc5l1 (NM_153808.1,1520-1538).
cacgattaatatgaaagat

SEQ ID NO: 514918 - DNA, 19 bp, Mus musculus
  siRNA target sequence for Smc5l1 (NM_153808.1,1522-1540).
cgattaatatgaaagataa

SEQ ID NO: 514919 - DNA, 19 bp, Mus musculus
  siRNA target sequence for Smc5l1 (NM_153808.1,1633-1651).
gagaggttcgtgacaacaa

SEQ ID NO: 514920 - DNA, 19 bp, Mus musculus
  siRNA target sequence for Smc5l1 (NM_153808.1,1635-1653).
gaggttcgtgacaacaaga

SEQ ID NO: 514921 - DNA, 19 bp, Mus musculus
  siRNA target sequence for Smc5l1 (NM_153808.1,1638-1656).
gttcgtgacaacaagaagt

SEQ ID NO: 514922 - DNA, 19 bp, Mus musculus
  siRNA target sequence for Smc5l1 (NM_153808.1,1641-1659).
cgtgacaacaagaagttaa

SEQ ID NO: 514923 - DNA, 19 bp, Mus musculus
  siRNA target sequence for Smc5l1 (NM_153808.1,1671-1689).
gttattgcccccaagatct

SEQ ID NO: 514924 - DNA, 19 bp, Mus musculus
  siRNA target sequence for Smc5l1 (NM_153808.1,1698-1716).
gacaaagccccttcaagat

SEQ ID NO: 514925 - DNA, 19 bp, Mus musculus
  siRNA target sequence for Smc5l1 (NM_153808.1,1700-1718).
caaagccccttcaagatct

SEQ ID NO: 514926 - DNA, 19 bp, Mus musculus
  siRNA target sequence for Smc5l1 (NM_153808.1,1706-1724).
cccttcaagatctctgaat

SEQ ID NO: 514927 - DNA, 19 bp, Mus musculus
  siRNA target sequence for Smc5l1 (NM_153808.1,1750-1768).
catatcttcgggagttatt

SEQ ID NO: 514928 - DNA, 19 bp, Mus musculus
  siRNA target sequence for Smc5l1 (NM_153808.1,1776-1794).
cctgatcctgtgatgagtt

SEQ ID NO: 514929 - DNA, 19 bp, Mus musculus
  siRNA target sequence for Smc5l1 (NM_153808.1,1777-1795).
ctgatcctgtgatgagtta

SEQ ID NO: 514930 - DNA, 19 bp, Mus musculus
  siRNA target sequence for Smc5l1 (NM_153808.1,1801-1819).
gctgccagtatcatattca

SEQ ID NO: 514931 - DNA, 19 bp, Mus musculus
  siRNA target sequence for Smc5l1 (NM_153808.1,1802-1820).
ctgccagtatcatattcat

SEQ ID NO: 514932 - DNA, 19 bp, Mus musculus
  siRNA target sequence for Smc5l1 (NM_153808.1,1804-1822).
gccagtatcatattcatga

SEQ ID NO: 514933 - DNA, 19 bp, Mus musculus
  siRNA target sequence for Smc5l1 (NM_153808.1,1843-1861).
ggacccgagaaagaattga

SEQ ID NO: 514934 - DNA, 19 bp, Mus musculus
  siRNA target sequence for Smc5l1 (NM_153808.1,1855-1873).
gaattgaacgggtaataca

SEQ ID NO: 514935 - DNA, 19 bp, Mus musculus
  siRNA target sequence for Smc5l1 (NM_153808.1,1860-1878).
gaacgggtaatacaagaaa

SEQ ID NO: 514936 - DNA, 19 bp, Mus musculus
  siRNA target sequence for Smc5l1 (NM_153808.1,1913-1931).
gtatgtgttaaaaacttct

SEQ ID NO: 514937 - DNA, 19 bp, Mus musculus
  siRNA target sequence for Smc5l1 (NM_153808.1,1957-1975).
gtaatacatccctgaaagt

SEQ ID NO: 514938 - DNA, 19 bp, Mus musculus
  siRNA target sequence for Smc5l1 (NM_153808.1,2000-2018).
ggatctagagcaaagaaga

SEQ ID NO: 514939 - DNA, 19 bp, Mus musculus
  siRNA target sequence for Smc5l1 (NM_153808.1,2080-2098).
ctgccttgcgtgatacgaa

SEQ ID NO: 514940 - DNA, 19 bp, Mus musculus
  siRNA target sequence for Smc5l1 (NM_153808.1,2103-2121).
caccttgagctcaaagaca

SEQ ID NO: 514941 - DNA, 19 bp, Mus musculus
  siRNA target sequence for Smc5l1 (NM_153808.1,2195-2213).
ctccaagctggcaagtata

SEQ ID NO: 514942 - DNA, 19 bp, Mus musculus
  siRNA target sequence for Smc5l1 (NM_153808.1,2322-2340).
ggccttgtaaagatatgca

SEQ ID NO: 514943 - DNA, 19 bp, Mus musculus
  siRNA target sequence for Smc5l1 (NM_153808.1,2418-2436).
gattacatggcgtcatctt

SEQ ID NO: 514944 - DNA, 19 bp, Mus musculus
  siRNA target sequence for Smc5l1 (NM_153808.1,2441-2459).
gctgcgcgtcacagaacaa

SEQ ID NO: 514945 - DNA, 19 bp, Mus musculus
  siRNA target sequence for Smc5l1 (NM_153808.1,2444-2462).
gcgcgtcacagaacaacaa

SEQ ID NO: 514946 - DNA, 19 bp, Mus musculus
  siRNA target sequence for Smc5l1 (NM_153808.1,2445-2463).
cgcgtcacagaacaacaat

SEQ ID NO: 514947 - DNA, 19 bp, Mus musculus
  siRNA target sequence for Smc5l1 (NM_153808.1,2446-2464).
gcgtcacagaacaacaatt

SEQ ID NO: 514948 - DNA, 19 bp, Mus musculus
  siRNA target sequence for Smc5l1 (NM_153808.1,2603-2621).
cacattggatgaaatcgat

SEQ ID NO: 514949 - DNA, 19 bp, Mus musculus
  siRNA target sequence for Smc5l1 (NM_153808.1,2609-2627).
ggatgaaatcgatgcatta

SEQ ID NO: 514950 - DNA, 19 bp, Mus musculus
  siRNA target sequence for Smc5l1 (NM_153808.1,2610-2628).
gatgaaatcgatgcattat

SEQ ID NO: 514951 - DNA, 19 bp, Mus musculus
  siRNA target sequence for Smc5l1 (NM_153808.1,2618-2636).
cgatgcattattaactgaa

SEQ ID NO: 514952 - DNA, 19 bp, Mus musculus
  siRNA target sequence for Smc5l1 (NM_153808.1,2684-2702).
ggttgaggagtactcaaaa

SEQ ID NO: 514953 - DNA, 19 bp, Mus musculus
  siRNA target sequence for Smc5l1 (NM_153808.1,2685-2703).
gttgaggagtactcaaaaa

SEQ ID NO: 514954 - DNA, 19 bp, Mus musculus
  siRNA target sequence for Smc5l1 (NM_153808.1,2751-2769).
gttgaactagatgaataca

SEQ ID NO: 514955 - DNA, 19 bp, Mus musculus
  siRNA target sequence for Smc5l1 (NM_153808.1,2777-2795).
catttcgcaggtgaaagaa

SEQ ID NO: 514956 - DNA, 19 bp, Mus musculus
  siRNA target sequence for Smc5l1 (NM_153808.1,2925-2943).
ggaatccggattagagtaa

SEQ ID NO: 514957 - DNA, 19 bp, Mus musculus
  siRNA target sequence for Smc5l1 (NM_153808.1,2940-2958).
gtaaaatttcgcagtagta

SEQ ID NO: 514958 - DNA, 19 bp, Mus musculus
  siRNA target sequence for Smc5l1 (NM_153808.1,2956-2974).
gtactcagctgcatgaatt

SEQ ID NO: 514959 - DNA, 19 bp, Mus musculus
  siRNA target sequence for Smc5l1 (NM_153808.1,3007-3025).
gtgtttctactatgctata

SEQ ID NO: 514960 - DNA, 19 bp, Mus musculus
  siRNA target sequence for Smc5l1 (NM_153808.1,3013-3031).
ctactatgctatacttgat

SEQ ID NO: 514961 - DNA, 19 bp, Mus musculus
  siRNA target sequence for Smc5l1 (NM_153808.1,3033-3051).
gcacttcaggagcttaaca

SEQ ID NO: 514962 - DNA, 19 bp, Mus musculus
  siRNA target sequence for Smc5l1 (NM_153808.1,3062-3080).
cagagtagtcgatgaaatt

SEQ ID NO: 514963 - DNA, 19 bp, Mus musculus
  siRNA target sequence for Smc5l1 (NM_153808.1,3064-3082).
gagtagtcgatgaaattaa

SEQ ID NO: 514964 - DNA, 19 bp, Mus musculus
  siRNA target sequence for Smc5l1 (NM_153808.1,3084-3102).
cagggtatggacccaatta

SEQ ID NO: 514965 - DNA, 19 bp, Mus musculus
  siRNA target sequence for Smc5l1 (NM_153808.1,3086-3104).
gggtatggacccaattaat

SEQ ID NO: 514966 - DNA, 19 bp, Mus musculus
  siRNA target sequence for Smc5l1 (NM_153808.1,3088-3106).
gtatggacccaattaatga

SEQ ID NO: 514967 - DNA, 19 bp, Mus musculus
  siRNA target sequence for Smc5l1 (NM_153808.1,3109-3127).
ggagagtatttgaaatggt

SEQ ID NO: 514968 - DNA, 19 bp, Mus musculus
  siRNA target sequence for Smc5l1 (NM_153808.1,3138-3156).
gcctgtaaagagaacacat

SEQ ID NO: 514969 - DNA, 19 bp, Mus musculus
  siRNA target sequence for Smc5l1 (NM_153808.1,3178-3196).
cgaagcttctacagaatct

SEQ ID NO: 514970 - DNA, 19 bp, Mus musculus
  siRNA target sequence for Smc5l1 (NM_153808.1,3186-3204).
ctacagaatcttccttatt

SEQ ID NO: 514971 - DNA, 19 bp, Mus musculus
  siRNA target sequence for Smc5l1 (NM_153808.1,3251-3269).
ggagccaaaccgatggaat

SEQ ID NO: 514972 - DNA, 19 bp, Mus musculus
  siRNA target sequence for Smc5l1 (NM_153808.1,3252-3270).
gagccaaaccgatggaatt

SEQ ID NO: 514973 - DNA, 19 bp, Mus musculus
  siRNA target sequence for Smc5l1 (NM_153808.1,3256-3274).
caaaccgatggaatttaaa

SEQ ID NO: 514974 - DNA, 19 bp, Mus musculus
  siRNA target sequence for Smc5l1 (NM_153808.1,3288-3306).
cgtcggcgaaggataacct

SEQ ID NO: 514975 - DNA, 19 bp, Mus musculus
  siRNA target sequence for Smc5l1 (NM_153808.1,3289-3307).
gtcggcgaaggataacctt

SEQ ID NO: 514976 - DNA, 19 bp, Mus musculus
  siRNA target sequence for Smc6l1 (NM_025695.2,30-48).
ctctcctgaaaatgctaaa

SEQ ID NO: 514977 - DNA, 19 bp, Mus musculus
  siRNA target sequence for Smc6l1 (NM_025695.2,117-135).
cacgaatggaacatctact

SEQ ID NO: 514978 - DNA, 19 bp, Mus musculus
  siRNA target sequence for Smc6l1 (NM_025695.2,155-173).
gaataattgagagtattca

SEQ ID NO: 514979 - DNA, 19 bp, Mus musculus
  siRNA target sequence for Smc6l1 (NM_025695.2,163-181).
gagagtattcagctaagaa

SEQ ID NO: 514980 - DNA, 19 bp, Mus musculus
  siRNA target sequence for Smc6l1 (NM_025695.2,165-183).
gagtattcagctaagaaat

SEQ ID NO: 514981 - DNA, 19 bp, Mus musculus
  siRNA target sequence for Smc6l1 (NM_025695.2,224-242).
ctaacgtcaactttgttgt

SEQ ID NO: 514982 - DNA, 19 bp, Mus musculus
  siRNA target sequence for Smc6l1 (NM_025695.2,273-291).
gctcaccgcactcatagtt

SEQ ID NO: 514983 - DNA, 19 bp, Mus musculus
  siRNA target sequence for Smc6l1 (NM_025695.2,370-388).
gatatctcaataacattaa

SEQ ID NO: 514984 - DNA, 19 bp, Mus musculus
  siRNA target sequence for Smc6l1 (NM_025695.2,423-441).
gtatggtgactctatagtt

SEQ ID NO: 514985 - DNA, 19 bp, Mus musculus
  siRNA target sequence for Smc6l1 (NM_025695.2,463-481).
gatggaagtcgatcttaca

SEQ ID NO: 514986 - DNA, 19 bp, Mus musculus
  siRNA target sequence for Smc6l1 (NM_025695.2,467-485).
gaagtcgatcttacaaact

SEQ ID NO: 514987 - DNA, 19 bp, Mus musculus
  siRNA target sequence for Smc6l1 (NM_025695.2,476-494).
cttacaaactaaaaagtga

SEQ ID NO: 514988 - DNA, 19 bp, Mus musculus
  siRNA target sequence for Smc6l1 (NM_025695.2,504-522).
cgtggtttctactaggaaa

SEQ ID NO: 514989 - DNA, 19 bp, Mus musculus
  siRNA target sequence for Smc6l1 (NM_025695.2,565-583).
gataatccggtttctgttt

SEQ ID NO: 514990 - DNA, 19 bp, Mus musculus
  siRNA target sequence for Smc6l1 (NM_025695.2,629-647).
gagacaaatacaaattctt

SEQ ID NO: 514991 - DNA, 19 bp, Mus musculus
  siRNA target sequence for Smc6l1 (NM_025695.2,659-677).
cccagctcgaacagatgaa

SEQ ID NO: 514992 - DNA, 19 bp, Mus musculus
  siRNA target sequence for Smc6l1 (NM_025695.2,672-690).
gatgaaggaagattattca

SEQ ID NO: 514993 - DNA, 19 bp, Mus musculus
  siRNA target sequence for Smc6l1 (NM_025695.2,678-696).
ggaagattattcatatatt

SEQ ID NO: 514994 - DNA, 19 bp, Mus musculus
  siRNA target sequence for Smc6l1 (NM_025695.2,737-755).
gagaagagcgacttactga

SEQ ID NO: 514995 - DNA, 19 bp, Mus musculus
  siRNA target sequence for Smc6l1 (NM_025695.2,742-760).
gagcgacttactgaactaa

SEQ ID NO: 514996 - DNA, 19 bp, Mus musculus
  siRNA target sequence for Smc6l1 (NM_025695.2,815-833).
caatgaagactaatttaga

SEQ ID NO: 514997 - DNA, 19 bp, Mus musculus
  siRNA target sequence for Smc6l1 (NM_025695.2,877-895).
gaaaaacaattgaatgcta

SEQ ID NO: 514998 - DNA, 19 bp, Mus musculus
  siRNA target sequence for Smc6l1 (NM_025695.2,888-906).
gaatgctattcgagacaat

SEQ ID NO: 514999 - DNA, 19 bp, Mus musculus
  siRNA target sequence for Smc6l1 (NM_025695.2,892-910).
gctattcgagacaatatca

SEQ ID NO: 515000 - DNA, 19 bp, Mus musculus
  siRNA target sequence for Smc6l1 (NM_025695.2,893-911).
ctattcgagacaatatcaa

SEQ ID NO: 515001 - DNA, 19 bp, Mus musculus
  siRNA target sequence for Smc6l1 (NM_025695.2,960-978).
gcaggtcagacttaatgat

SEQ ID NO: 515002 - DNA, 19 bp, Mus musculus
  siRNA target sequence for Smc6l1 (NM_025695.2,990-1008).
gtacaaagatatacaagat

SEQ ID NO: 515003 - DNA, 19 bp, Mus musculus
  siRNA target sequence for Smc6l1 (NM_025695.2,1039-1057).
gcacgagcaccagaatgta

SEQ ID NO: 515004 - DNA, 19 bp, Mus musculus
  siRNA target sequence for Smc6l1 (NM_025695.2,1061-1079).
cattgaaaacagatgtcat

SEQ ID NO: 515005 - DNA, 19 bp, Mus musculus
  siRNA target sequence for Smc6l1 (NM_025695.2,1085-1103).
ggacaagagcctttaatga

SEQ ID NO: 515006 - DNA, 19 bp, Mus musculus
  siRNA target sequence for Smc6l1 (NM_025695.2,1102-1120).
gacgctgaggttttatata

SEQ ID NO: 515007 - DNA, 19 bp, Mus musculus
  siRNA target sequence for Smc6l1 (NM_025695.2,1123-1141).
cgttccctaaatgaatata

SEQ ID NO: 515008 - DNA, 19 bp, Mus musculus
  siRNA target sequence for Smc6l1 (NM_025695.2,1124-1142).
gttccctaaatgaatataa

SEQ ID NO: 515009 - DNA, 19 bp, Mus musculus
  siRNA target sequence for Smc6l1 (NM_025695.2,1129-1147).
ctaaatgaatataaagcat

SEQ ID NO: 515010 - DNA, 19 bp, Mus musculus
  siRNA target sequence for Smc6l1 (NM_025695.2,1159-1177).
ggtgaacagctttgtaaaa

SEQ ID NO: 515011 - DNA, 19 bp, Mus musculus
  siRNA target sequence for Smc6l1 (NM_025695.2,1199-1217).
gtactgatcagtcattaga

SEQ ID NO: 515012 - DNA, 19 bp, Mus musculus
  siRNA target sequence for Smc6l1 (NM_025695.2,1250-1268).
gctggttaaaagagaaagt

SEQ ID NO: 515013 - DNA, 19 bp, Mus musculus
  siRNA target sequence for Smc6l1 (NM_025695.2,1253-1271).
ggttaaaagagaaagtcaa

SEQ ID NO: 515014 - DNA, 19 bp, Mus musculus
  siRNA target sequence for Smc6l1 (NM_025695.2,1356-1374).
ccgagttaggaaagaagat

SEQ ID NO: 515015 - DNA, 19 bp, Mus musculus
  siRNA target sequence for Smc6l1 (NM_025695.2,1357-1375).
cgagttaggaaagaagata

SEQ ID NO: 515016 - DNA, 19 bp, Mus musculus
  siRNA target sequence for Smc6l1 (NM_025695.2,1383-1401).
gagacatgcactcaactat

SEQ ID NO: 515017 - DNA, 19 bp, Mus musculus
  siRNA target sequence for Smc6l1 (NM_025695.2,1385-1403).
gacatgcactcaactataa

SEQ ID NO: 515018 - DNA, 19 bp, Mus musculus
  siRNA target sequence for Smc6l1 (NM_025695.2,1433-1451).
gtaaaactgatcgactaaa

SEQ ID NO: 515019 - DNA, 19 bp, Mus musculus
  siRNA target sequence for Smc6l1 (NM_025695.2,1439-1457).
ctgatcgactaaaaagatt

SEQ ID NO: 515020 - DNA, 19 bp, Mus musculus
  siRNA target sequence for Smc6l1 (NM_025695.2,1499-1517).
cttacagacggagacaatt

SEQ ID NO: 515021 - DNA, 19 bp, Mus musculus
  siRNA target sequence for Smc6l1 (NM_025695.2,1509-1527).
gagacaatttacccataaa

SEQ ID NO: 515022 - DNA, 19 bp, Mus musculus
  siRNA target sequence for Smc6l1 (NM_025695.2,1581-1599).
ggccattgaatcttgctta

SEQ ID NO: 515023 - DNA, 19 bp, Mus musculus
  siRNA target sequence for Smc6l1 (NM_025695.2,1582-1600).
gccattgaatcttgcttaa

SEQ ID NO: 515024 - DNA, 19 bp, Mus musculus
  siRNA target sequence for Smc6l1 (NM_025695.2,1583-1601).
ccattgaatcttgcttaaa

SEQ ID NO: 515025 - DNA, 19 bp, Mus musculus
  siRNA target sequence for Smc6l1 (NM_025695.2,1584-1602).
cattgaatcttgcttaaaa

SEQ ID NO: 515026 - DNA, 19 bp, Mus musculus
  siRNA target sequence for Smc6l1 (NM_025695.2,1686-1704).
gacctctcggccacagata

SEQ ID NO: 515027 - DNA, 19 bp, Mus musculus
  siRNA target sequence for Smc6l1 (NM_025695.2,1689-1707).
ctctcggccacagataatt

SEQ ID NO: 515028 - DNA, 19 bp, Mus musculus
  siRNA target sequence for Smc6l1 (NM_025695.2,1691-1709).
ctcggccacagataattgt

SEQ ID NO: 515029 - DNA, 19 bp, Mus musculus
  siRNA target sequence for Smc6l1 (NM_025695.2,1693-1711).
cggccacagataattgtgt

SEQ ID NO: 515030 - DNA, 19 bp, Mus musculus
  siRNA target sequence for Smc6l1 (NM_025695.2,1828-1846).
gacatgcggagcatagaga

SEQ ID NO: 515031 - DNA, 19 bp, Mus musculus
  siRNA target sequence for Smc6l1 (NM_025695.2,1849-1867).
gtgctgctgatcaaaaata

SEQ ID NO: 515032 - DNA, 19 bp, Mus musculus
  siRNA target sequence for Smc6l1 (NM_025695.2,1851-1869).
gctgctgatcaaaaataat

SEQ ID NO: 515033 - DNA, 19 bp, Mus musculus
  siRNA target sequence for Smc6l1 (NM_025695.2,1852-1870).
ctgctgatcaaaaataatt

SEQ ID NO: 515034 - DNA, 19 bp, Mus musculus
  siRNA target sequence for Smc6l1 (NM_025695.2,1854-1872).
gctgatcaaaaataattct

SEQ ID NO: 515035 - DNA, 19 bp, Mus musculus
  siRNA target sequence for Smc6l1 (NM_025695.2,1876-1894).
gctcgtgcagtcatgcaat

SEQ ID NO: 515036 - DNA, 19 bp, Mus musculus
  siRNA target sequence for Smc6l1 (NM_025695.2,1902-1920).
gccacccaaaaattgtaga

SEQ ID NO: 515037 - DNA, 19 bp, Mus musculus
  siRNA target sequence for Smc6l1 (NM_025695.2,1931-1949).
ctgctgatggtgatcaagt

SEQ ID NO: 515038 - DNA, 19 bp, Mus musculus
  siRNA target sequence for Smc6l1 (NM_025695.2,1948-1966).
gtgtttgcaggacgttatt

SEQ ID NO: 515039 - DNA, 19 bp, Mus musculus
  siRNA target sequence for Smc6l1 (NM_025695.2,1950-1968).
gtttgcaggacgttattat

SEQ ID NO: 515040 - DNA, 19 bp, Mus musculus
  siRNA target sequence for Smc6l1 (NM_025695.2,1979-1997).
gtacaagacccaagtttct

SEQ ID NO: 515041 - DNA, 19 bp, Mus musculus
  siRNA target sequence for Smc6l1 (NM_025695.2,2005-2023).
gatgtggattctgaaataa

SEQ ID NO: 515042 - DNA, 19 bp, Mus musculus
  siRNA target sequence for Smc6l1 (NM_025695.2,2081-2099).
gtctgtctgcgcttgagaa

SEQ ID NO: 515043 - DNA, 19 bp, Mus musculus
  siRNA target sequence for Smc6l1 (NM_025695.2,2087-2105).
ctgcgcttgagaaggatat

SEQ ID NO: 515044 - DNA, 19 bp, Mus musculus
  siRNA target sequence for Smc6l1 (NM_025695.2,2089-2107).
gcgcttgagaaggatatca

SEQ ID NO: 515045 - DNA, 19 bp, Mus musculus
  siRNA target sequence for Smc6l1 (NM_025695.2,2090-2108).
cgcttgagaaggatatcaa

SEQ ID NO: 515046 - DNA, 19 bp, Mus musculus
  siRNA target sequence for Smc6l1 (NM_025695.2,2100-2118).
ggatatcaaacgcaatgaa

SEQ ID NO: 515047 - DNA, 19 bp, Mus musculus
  siRNA target sequence for Smc6l1 (NM_025695.2,2135-2153).
gccaactacattataaaga

SEQ ID NO: 515048 - DNA, 19 bp, Mus musculus
  siRNA target sequence for Smc6l1 (NM_025695.2,2192-2210).
gggaacttgagaatataga

SEQ ID NO: 515049 - DNA, 19 bp, Mus musculus
  siRNA target sequence for Smc6l1 (NM_025695.2,2212-2230).
gaacaccaatctgtagata

SEQ ID NO: 515050 - DNA, 19 bp, Mus musculus
  siRNA target sequence for Smc6l1 (NM_025695.2,2404-2422).
ccacttaaggatgagttaa

SEQ ID NO: 515051 - DNA, 19 bp, Mus musculus
  siRNA target sequence for Smc6l1 (NM_025695.2,2405-2423).
cacttaaggatgagttaaa

SEQ ID NO: 515052 - DNA, 19 bp, Mus musculus
  siRNA target sequence for Smc6l1 (NM_025695.2,2456-2474).
gaggaaagcagcactatga

SEQ ID NO: 515053 - DNA, 19 bp, Mus musculus
  siRNA target sequence for Smc6l1 (NM_025695.2,2490-2508).
gcatttggataccttaaat

SEQ ID NO: 515054 - DNA, 19 bp, Mus musculus
  siRNA target sequence for Smc6l1 (NM_025695.2,2577-2595).
ctgcccagaacggatagaa

SEQ ID NO: 515055 - DNA, 19 bp, Mus musculus
  siRNA target sequence for Smc6l1 (NM_025695.2,2579-2597).
gcccagaacggatagaagt

SEQ ID NO: 515056 - DNA, 19 bp, Mus musculus
  siRNA target sequence for Smc6l1 (NM_025695.2,2580-2598).
cccagaacggatagaagta

SEQ ID NO: 515057 - DNA, 19 bp, Mus musculus
  siRNA target sequence for Smc6l1 (NM_025695.2,2581-2599).
ccagaacggatagaagtaa

SEQ ID NO: 515058 - DNA, 19 bp, Mus musculus
  siRNA target sequence for Smc6l1 (NM_025695.2,2582-2600).
cagaacggatagaagtaaa

SEQ ID NO: 515059 - DNA, 19 bp, Mus musculus
  siRNA target sequence for Smc6l1 (NM_025695.2,2589-2607).
gatagaagtaaaaaaatct

SEQ ID NO: 515060 - DNA, 19 bp, Mus musculus
  siRNA target sequence for Smc6l1 (NM_025695.2,2675-2693).
gagatcgggaggaaataat

SEQ ID NO: 515061 - DNA, 19 bp, Mus musculus
  siRNA target sequence for Smc6l1 (NM_025695.2,2677-2695).
gatcgggaggaaataatga

SEQ ID NO: 515062 - DNA, 19 bp, Mus musculus
  siRNA target sequence for Smc6l1 (NM_025695.2,2714-2732).
gagaaacctaccttgatct

SEQ ID NO: 515063 - DNA, 19 bp, Mus musculus
  siRNA target sequence for Smc6l1 (NM_025695.2,2812-2830).
caatttagaaggtgtttga

SEQ ID NO: 515064 - DNA, 19 bp, Mus musculus
  siRNA target sequence for Smc6l1 (NM_025695.2,2829-2847).
gacattacgatgcaaatta

SEQ ID NO: 515065 - DNA, 19 bp, Mus musculus
  siRNA target sequence for Smc6l1 (NM_025695.2,2831-2849).
cattacgatgcaaattata

SEQ ID NO: 515066 - DNA, 19 bp, Mus musculus
  siRNA target sequence for Smc6l1 (NM_025695.2,2871-2889).
gcgtgcttattgtggaaaa

SEQ ID NO: 515067 - DNA, 19 bp, Mus musculus
  siRNA target sequence for Smc6l1 (NM_025695.2,2872-2890).
cgtgcttattgtggaaaaa

SEQ ID NO: 515068 - DNA, 19 bp, Mus musculus
  siRNA target sequence for Smc6l1 (NM_025695.2,2892-2910).
gaattttgatcacaagaat

SEQ ID NO: 515069 - DNA, 19 bp, Mus musculus
  siRNA target sequence for Smc6l1 (NM_025695.2,2904-2922).
caagaatgaaactcttagt

SEQ ID NO: 515070 - DNA, 19 bp, Mus musculus
  siRNA target sequence for Smc6l1 (NM_025695.2,3027-3045).
gtggtccattgctgaatca

SEQ ID NO: 515071 - DNA, 19 bp, Mus musculus
  siRNA target sequence for Smc6l1 (NM_025695.2,3073-3091).
gtctacatggatatggtta

SEQ ID NO: 515072 - DNA, 19 bp, Mus musculus
  siRNA target sequence for Smc6l1 (NM_025695.2,3075-3093).
ctacatggatatggttaat

SEQ ID NO: 515073 - DNA, 19 bp, Mus musculus
  siRNA target sequence for Smc6l1 (NM_025695.2,3104-3122).
cgatggacatgatccttaa

SEQ ID NO: 515074 - DNA, 19 bp, Mus musculus
  siRNA target sequence for Smc6l1 (NM_025695.2,3127-3145).
gcagattcccaacgtttta

SEQ ID NO: 515075 - DNA, 19 bp, Mus musculus
  siRNA target sequence for Smc6l1 (NM_025695.2,3189-3207).
ctcaagtaaactgattaga

SEQ ID NO: 515076 - DNA, 19 bp, Mus musculus
  siRNA target sequence for Smc6l1 (NM_025695.2,3194-3212).
gtaaactgattagaattct

SEQ ID NO: 515077 - DNA, 19 bp, Mus musculus
  siRNA target sequence for Snf1lk (NM_010831.1,191-209).
ccctccgggtgggctttta

SEQ ID NO: 515078 - DNA, 19 bp, Mus musculus
  siRNA target sequence for Snf1lk (NM_010831.1,236-254).
gcaattttgcagtggttaa

SEQ ID NO: 515079 - DNA, 19 bp, Mus musculus
  siRNA target sequence for Snf1lk (NM_010831.1,262-280).
cggcaccgagtcaccaaaa

SEQ ID NO: 515080 - DNA, 19 bp, Mus musculus
  siRNA target sequence for Snf1lk (NM_010831.1,275-293).
ccaaaacgcaggttgcaat

SEQ ID NO: 515081 - DNA, 19 bp, Mus musculus
  siRNA target sequence for Snf1lk (NM_010831.1,276-294).
caaaacgcaggttgcaata

SEQ ID NO: 515082 - DNA, 19 bp, Mus musculus
  siRNA target sequence for Snf1lk (NM_010831.1,281-299).
cgcaggttgcaataaaaat

SEQ ID NO: 515083 - DNA, 19 bp, Mus musculus
  siRNA target sequence for Snf1lk (NM_010831.1,304-322).
gacaagacacggttagatt

SEQ ID NO: 515084 - DNA, 19 bp, Mus musculus
  siRNA target sequence for Snf1lk (NM_010831.1,306-324).
caagacacggttagattct

SEQ ID NO: 515085 - DNA, 19 bp, Mus musculus
  siRNA target sequence for Snf1lk (NM_010831.1,413-431).
caaaggatatgctctacat

SEQ ID NO: 515086 - DNA, 19 bp, Mus musculus
  siRNA target sequence for Snf1lk (NM_010831.1,502-520).
gaggctaggcagaagttct

SEQ ID NO: 515087 - DNA, 19 bp, Mus musculus
  siRNA target sequence for Snf1lk (NM_010831.1,634-652).
ggatttgggaatttctaca

SEQ ID NO: 515088 - DNA, 19 bp, Mus musculus
  siRNA target sequence for Snf1lk (NM_010831.1,1080-1098).
cgaccggcagcggactata

SEQ ID NO: 515089 - DNA, 19 bp, Mus musculus
  siRNA target sequence for Snf1lk (NM_010831.1,1084-1102).
cggcagcggactatagagt

SEQ ID NO: 515090 - DNA, 19 bp, Mus musculus
  siRNA target sequence for Snf1lk (NM_010831.1,1370-1388).
gctcacttcagcccttatt

SEQ ID NO: 515091 - DNA, 19 bp, Mus musculus
  siRNA target sequence for Snf1lk (NM_010831.1,1371-1389).
ctcacttcagcccttatta

SEQ ID NO: 515092 - DNA, 19 bp, Mus musculus
  siRNA target sequence for Snf1lk (NM_010831.1,1538-1556).
caggccggaggcacacatt

SEQ ID NO: 515093 - DNA, 19 bp, Mus musculus
  siRNA target sequence for Snf1lk (NM_010831.1,1561-1579).
gaagtctccacccatttct

SEQ ID NO: 515094 - DNA, 19 bp, Mus musculus
  siRNA target sequence for Snf1lk (NM_010831.1,1894-1912).
cggcagcagctgaggaaaa

SEQ ID NO: 515095 - DNA, 19 bp, Mus musculus
  siRNA target sequence for Snf1lk (NM_010831.1,2070-2088).
gggcaggagcctacttgaa

SEQ ID NO: 515096 - DNA, 19 bp, Mus musculus
  siRNA target sequence for Snf1lk (NM_010831.1,2072-2090).
gcaggagcctacttgaaga

SEQ ID NO: 515097 - DNA, 19 bp, Mus musculus
  siRNA target sequence for Snrk (NM_133741.1,669-687).
gctgcgggtctcttgcata

SEQ ID NO: 515098 - DNA, 19 bp, Mus musculus
  siRNA target sequence for Snrk (NM_133741.1,673-691).
cgggtctcttgcatactct

SEQ ID NO: 515099 - DNA, 19 bp, Mus musculus
  siRNA target sequence for Snrk (NM_133741.1,725-743).
gcccctgcagtagacatat

SEQ ID NO: 515100 - DNA, 19 bp, Mus musculus
  siRNA target sequence for Snrk (NM_133741.1,747-765).
gcctgggcgtgatcctttt

SEQ ID NO: 515101 - DNA, 19 bp, Mus musculus
  siRNA target sequence for Snrk (NM_133741.1,812-830).
gagacactgaccatgatca

SEQ ID NO: 515102 - DNA, 19 bp, Mus musculus
  siRNA target sequence for Snrk (NM_133741.1,880-898).
cctgatcacacgaatgcta

SEQ ID NO: 515103 - DNA, 19 bp, Mus musculus
  siRNA target sequence for Snrk (NM_133741.1,922-940).
ctctctggaagagattgaa

SEQ ID NO: 515104 - DNA, 19 bp, Mus musculus
  siRNA target sequence for Snrk (NM_133741.1,974-992).
ccagccaccaagtataaca

SEQ ID NO: 515105 - DNA, 19 bp, Mus musculus
  siRNA target sequence for Snrk (NM_133741.1,996-1014).
ccctcgtgtcctacaagaa

SEQ ID NO: 515106 - DNA, 19 bp, Mus musculus
  siRNA target sequence for Snrk (NM_133741.1,1118-1136).
cacattaccgccacttact

SEQ ID NO: 515107 - DNA, 19 bp, Mus musculus
  siRNA target sequence for Snrk (NM_133741.1,1120-1138).
cattaccgccacttacttt

SEQ ID NO: 515108 - DNA, 19 bp, Mus musculus
  siRNA target sequence for Snrk (NM_133741.1,1233-1251).
catggccaaccaaaattga

SEQ ID NO: 515109 - DNA, 19 bp, Mus musculus
  siRNA target sequence for Snrk (NM_133741.1,1236-1254).
ggccaaccaaaattgatgt

SEQ ID NO: 515110 - DNA, 19 bp, Mus musculus
  siRNA target sequence for Snrk (NM_133741.1,1237-1255).
gccaaccaaaattgatgta

SEQ ID NO: 515111 - DNA, 19 bp, Mus musculus
  siRNA target sequence for Snrk (NM_133741.1,1323-1341).
ctagggctggtgacaatgt

SEQ ID NO: 515112 - DNA, 19 bp, Mus musculus
  siRNA target sequence for Snrk (NM_133741.1,1599-1617).
cagtgctcaaccagatctt

SEQ ID NO: 515113 - DNA, 19 bp, Mus musculus
  siRNA target sequence for Snrk (NM_133741.1,1632-1650).
cagacgacgagtttgacat

SEQ ID NO: 515114 - DNA, 19 bp, Mus musculus
  siRNA target sequence for Spata5 (NM_021343.1,239-257).
gttcatcttggacttaaca

SEQ ID NO: 515115 - DNA, 19 bp, Mus musculus
  siRNA target sequence for Spata5 (NM_021343.1,242-260).
catcttggacttaacacta

SEQ ID NO: 515116 - DNA, 19 bp, Mus musculus
  siRNA target sequence for Spata5 (NM_021343.1,245-263).
cttggacttaacactatga

SEQ ID NO: 515117 - DNA, 19 bp, Mus musculus
  siRNA target sequence for Spata5 (NM_021343.1,295-313).
gctccttaccagtttggat

SEQ ID NO: 515118 - DNA, 19 bp, Mus musculus
  siRNA target sequence for Spata5 (NM_021343.1,472-490).
cttggcgctgagtgacaaa

SEQ ID NO: 515119 - DNA, 19 bp, Mus musculus
  siRNA target sequence for Spata5 (NM_021343.1,515-533).
ctgactggttgtattctga

SEQ ID NO: 515120 - DNA, 19 bp, Mus musculus
  siRNA target sequence for Spata5 (NM_021343.1,563-581).
ggcaactttctatactgta

SEQ ID NO: 515121 - DNA, 19 bp, Mus musculus
  siRNA target sequence for Spata5 (NM_021343.1,626-644).
gggacagatggcacaacat

SEQ ID NO: 515122 - DNA, 19 bp, Mus musculus
  siRNA target sequence for Spata5 (NM_021343.1,627-645).
ggacagatggcacaacatt

SEQ ID NO: 515123 - DNA, 19 bp, Mus musculus
  siRNA target sequence for Spata5 (NM_021343.1,717-735).
gcgatgtggatctatcctt

SEQ ID NO: 515124 - DNA, 19 bp, Mus musculus
  siRNA target sequence for Spata5 (NM_021343.1,811-829).
cagaactgtgaataaagct

SEQ ID NO: 515125 - DNA, 19 bp, Mus musculus
  siRNA target sequence for Spata5 (NM_021343.1,890-908).
gaaagcacaggtcttaagt

SEQ ID NO: 515126 - DNA, 19 bp, Mus musculus
  siRNA target sequence for Spata5 (NM_021343.1,897-915).
caggtcttaagtgtagttt

SEQ ID NO: 515127 - DNA, 19 bp, Mus musculus
  siRNA target sequence for Spata5 (NM_021343.1,902-920).
cttaagtgtagttttgact

SEQ ID NO: 515128 - DNA, 19 bp, Mus musculus
  siRNA target sequence for Spata5 (NM_021343.1,991-1009).
gagcaatactgatactttt

SEQ ID NO: 515129 - DNA, 19 bp, Mus musculus
  siRNA target sequence for Spata5 (NM_021343.1,1029-1047).
caagaatcaatcttcgaaa

SEQ ID NO: 515130 - DNA, 19 bp, Mus musculus
  siRNA target sequence for Spata5 (NM_021343.1,1032-1050).
gaatcaatcttcgaaaaat

SEQ ID NO: 515131 - DNA, 19 bp, Mus musculus
  siRNA target sequence for Spata5 (NM_021343.1,1040-1058).
cttcgaaaaatttgtacaa

SEQ ID NO: 515132 - DNA, 19 bp, Mus musculus
  siRNA target sequence for Spata5 (NM_021343.1,1102-1120).
gattggaggcttaaacagt

SEQ ID NO: 515133 - DNA, 19 bp, Mus musculus
  siRNA target sequence for Spata5 (NM_021343.1,1123-1141).
gctgaaagcaataagagaa

SEQ ID NO: 515134 - DNA, 19 bp, Mus musculus
  siRNA target sequence for Spata5 (NM_021343.1,1194-1212).
cagcgcctagagggttatt

SEQ ID NO: 515135 - DNA, 19 bp, Mus musculus
  siRNA target sequence for Spata5 (NM_021343.1,1197-1215).
cgcctagagggttattact

SEQ ID NO: 515136 - DNA, 19 bp, Mus musculus
  siRNA target sequence for Spata5 (NM_021343.1,1199-1217).
cctagagggttattactct

SEQ ID NO: 515137 - DNA, 19 bp, Mus musculus
  siRNA target sequence for Spata5 (NM_021343.1,1200-1218).
ctagagggttattactcta

SEQ ID NO: 515138 - DNA, 19 bp, Mus musculus
  siRNA target sequence for Spata5 (NM_021343.1,1229-1247).
ggtaccggaaagacaatga

SEQ ID NO: 515139 - DNA, 19 bp, Mus musculus
  siRNA target sequence for Spata5 (NM_021343.1,1230-1248).
gtaccggaaagacaatgat

SEQ ID NO: 515140 - DNA, 19 bp, Mus musculus
  siRNA target sequence for Spata5 (NM_021343.1,1251-1269).
ctagggctgttgctaatga

SEQ ID NO: 515141 - DNA, 19 bp, Mus musculus
  siRNA target sequence for Spata5 (NM_021343.1,1254-1272).
gggctgttgctaatgaagt

SEQ ID NO: 515142 - DNA, 19 bp, Mus musculus
  siRNA target sequence for Spata5 (NM_021343.1,1338-1356).
caaggttacgccagatatt

SEQ ID NO: 515143 - DNA, 19 bp, Mus musculus
  siRNA target sequence for Spata5 (NM_021343.1,1342-1360).
gttacgccagatatttgct

SEQ ID NO: 515144 - DNA, 19 bp, Mus musculus
  siRNA target sequence for Spata5 (NM_021343.1,1368-1386).
ctctacgacacccatcaat

SEQ ID NO: 515145 - DNA, 19 bp, Mus musculus
  siRNA target sequence for Spata5 (NM_021343.1,1370-1388).
ctacgacacccatcaatta

SEQ ID NO: 515146 - DNA, 19 bp, Mus musculus
  siRNA target sequence for Spata5 (NM_021343.1,1374-1392).
gacacccatcaattatttt

SEQ ID NO: 515147 - DNA, 19 bp, Mus musculus
  siRNA target sequence for Spata5 (NM_021343.1,1406-1424).
gatgcactttgccctaaaa

SEQ ID NO: 515148 - DNA, 19 bp, Mus musculus
  siRNA target sequence for Spata5 (NM_021343.1,1410-1428).
cactttgccctaaaagaga

SEQ ID NO: 515149 - DNA, 19 bp, Mus musculus
  siRNA target sequence for Spata5 (NM_021343.1,1463-1481).
gcttcactcttaacattga

SEQ ID NO: 515150 - DNA, 19 bp, Mus musculus
  siRNA target sequence for Spata5 (NM_021343.1,1506-1524).
gtgaaggacgggtattagt

SEQ ID NO: 515151 - DNA, 19 bp, Mus musculus
  siRNA target sequence for Spata5 (NM_021343.1,1571-1589).
cgacctgggagatttgata

SEQ ID NO: 515152 - DNA, 19 bp, Mus musculus
  siRNA target sequence for Spata5 (NM_021343.1,1578-1596).
ggagatttgataaagagat

SEQ ID NO: 515153 - DNA, 19 bp, Mus musculus
  siRNA target sequence for Spata5 (NM_021343.1,1581-1599).
gatttgataaagagattga

SEQ ID NO: 515154 - DNA, 19 bp, Mus musculus
  siRNA target sequence for Spata5 (NM_021343.1,1616-1634).
gcccaagaccggcttgata

SEQ ID NO: 515155 - DNA, 19 bp, Mus musculus
  siRNA target sequence for Spata5 (NM_021343.1,1617-1635).
cccaagaccggcttgatat

SEQ ID NO: 515156 - DNA, 19 bp, Mus musculus
  siRNA target sequence for Spata5 (NM_021343.1,1618-1636).
ccaagaccggcttgatatt

SEQ ID NO: 515157 - DNA, 19 bp, Mus musculus
  siRNA target sequence for Spata5 (NM_021343.1,1685-1703).
cttctgaggttggcaaata

SEQ ID NO: 515158 - DNA, 19 bp, Mus musculus
  siRNA target sequence for Spata5 (NM_021343.1,1698-1716).
caaataatgcccatggtta

SEQ ID NO: 515159 - DNA, 19 bp, Mus musculus
  siRNA target sequence for Spata5 (NM_021343.1,1727-1745).
gacttgaaagcgttgtgta

SEQ ID NO: 515160 - DNA, 19 bp, Mus musculus
  siRNA target sequence for Spata5 (NM_021343.1,1729-1747).
cttgaaagcgttgtgtaat

SEQ ID NO: 515161 - DNA, 19 bp, Mus musculus
  siRNA target sequence for Spata5 (NM_021343.1,1791-1809).
ctaacctccctgatagcaa

SEQ ID NO: 515162 - DNA, 19 bp, Mus musculus
  siRNA target sequence for Spata5 (NM_021343.1,1818-1836).
gcatggtgaagattactct

SEQ ID NO: 515163 - DNA, 19 bp, Mus musculus
  siRNA target sequence for Spata5 (NM_021343.1,1819-1837).
catggtgaagattactcta

SEQ ID NO: 515164 - DNA, 19 bp, Mus musculus
  siRNA target sequence for Spata5 (NM_021343.1,1822-1840).
ggtgaagattactctaaat

SEQ ID NO: 515165 - DNA, 19 bp, Mus musculus
  siRNA target sequence for Spata5 (NM_021343.1,1825-1843).
gaagattactctaaatgat

SEQ ID NO: 515166 - DNA, 19 bp, Mus musculus
  siRNA target sequence for Spata5 (NM_021343.1,1878-1896).
ctatgagagaggtagcaat

SEQ ID NO: 515167 - DNA, 19 bp, Mus musculus
  siRNA target sequence for Spata5 (NM_021343.1,1893-1911).
caattgatgtcccaaatgt

SEQ ID NO: 515168 - DNA, 19 bp, Mus musculus
  siRNA target sequence for Spata5 (NM_021343.1,1969-1987).
ggaatggcccttgaaacat

SEQ ID NO: 515169 - DNA, 19 bp, Mus musculus
  siRNA target sequence for Spata5 (NM_021343.1,1978-1996).
cttgaaacatcctaagtct

SEQ ID NO: 515170 - DNA, 19 bp, Mus musculus
  siRNA target sequence for Spata5 (NM_021343.1,2019-2037).
cacccaaaggagttctctt

SEQ ID NO: 515171 - DNA, 19 bp, Mus musculus
  siRNA target sequence for Spata5 (NM_021343.1,2044-2062).
gccacctggatgctcaaaa

SEQ ID NO: 515172 - DNA, 19 bp, Mus musculus
  siRNA target sequence for Spata5 (NM_021343.1,2051-2069).
ggatgctcaaaaacaatga

SEQ ID NO: 515173 - DNA, 19 bp, Mus musculus
  siRNA target sequence for Spata5 (NM_021343.1,2097-2115).
ggttgaactttctagctat

SEQ ID NO: 515174 - DNA, 19 bp, Mus musculus
  siRNA target sequence for Spata5 (NM_021343.1,2098-2116).
gttgaactttctagctata

SEQ ID NO: 515175 - DNA, 19 bp, Mus musculus
  siRNA target sequence for Spata5 (NM_021343.1,2171-2189).
gagatattccgtaaagcaa

SEQ ID NO: 515176 - DNA, 19 bp, Mus musculus
  siRNA target sequence for Spata5 (NM_021343.1,2192-2210).
gcagtggcaccgtccatta

SEQ ID NO: 515177 - DNA, 19 bp, Mus musculus
  siRNA target sequence for Spata5 (NM_021343.1,2195-2213).
gtggcaccgtccattatct

SEQ ID NO: 515178 - DNA, 19 bp, Mus musculus
  siRNA target sequence for Spata5 (NM_021343.1,2198-2216).
gcaccgtccattatctttt

SEQ ID NO: 515179 - DNA, 19 bp, Mus musculus
  siRNA target sequence for Spata5 (NM_021343.1,2199-2217).
caccgtccattatcttttt

SEQ ID NO: 515180 - DNA, 19 bp, Mus musculus
  siRNA target sequence for Spata5 (NM_021343.1,2296-2314).
gctgttaacggaaatggat

SEQ ID NO: 515181 - DNA, 19 bp, Mus musculus
  siRNA target sequence for Spata5 (NM_021343.1,2315-2333).
gggattgaacagctaaaaa

SEQ ID NO: 515182 - DNA, 19 bp, Mus musculus
  siRNA target sequence for Spata5 (NM_021343.1,2316-2334).
ggattgaacagctaaaaaa

SEQ ID NO: 515183 - DNA, 19 bp, Mus musculus
  siRNA target sequence for Spata5 (NM_021343.1,2340-2358).
cagttttggcagctactaa

SEQ ID NO: 515184 - DNA, 19 bp, Mus musculus
  siRNA target sequence for Spata5 (NM_021343.1,2355-2373).
ctaatcgcccagatagaat

SEQ ID NO: 515185 - DNA, 19 bp, Mus musculus
  siRNA target sequence for Spata5 (NM_021343.1,2360-2378).
cgcccagatagaatagaca

SEQ ID NO: 515186 - DNA, 19 bp, Mus musculus
  siRNA target sequence for Spata5 (NM_021343.1,2361-2379).
gcccagatagaatagacaa

SEQ ID NO: 515187 - DNA, 19 bp, Mus musculus
  siRNA target sequence for Spata5 (NM_021343.1,2471-2489).
cactcaatgccgatcagta

SEQ ID NO: 515188 - DNA, 19 bp, Mus musculus
  siRNA target sequence for Spata5 (NM_021343.1,2573-2591).
ctcctagctctggaagaaa

SEQ ID NO: 515189 - DNA, 19 bp, Mus musculus
  siRNA target sequence for Spg4 (NM_016962.1,65-83).
cggacgacggaagaagaaa

SEQ ID NO: 515190 - DNA, 19 bp, Mus musculus
  siRNA target sequence for Spg4 (NM_016962.1,186-204).
cggaacccgtcttctttct

SEQ ID NO: 515191 - DNA, 19 bp, Mus musculus
  siRNA target sequence for Spg4 (NM_016962.1,471-489).
caagctgtggaatggtata

SEQ ID NO: 515192 - DNA, 19 bp, Mus musculus
  siRNA target sequence for Spg4 (NM_016962.1,474-492).
gctgtggaatggtataaga

SEQ ID NO: 515193 - DNA, 19 bp, Mus musculus
  siRNA target sequence for Spg4 (NM_016962.1,480-498).
gaatggtataagaaaggta

SEQ ID NO: 515194 - DNA, 19 bp, Mus musculus
  siRNA target sequence for Spg4 (NM_016962.1,485-503).
gtataagaaaggtatcgaa

SEQ ID NO: 515195 - DNA, 19 bp, Mus musculus
  siRNA target sequence for Spg4 (NM_016962.1,500-518).
cgaagaactggaaaaagga

SEQ ID NO: 515196 - DNA, 19 bp, Mus musculus
  siRNA target sequence for Spg4 (NM_016962.1,516-534).
ggaatcgctgttatagtta

SEQ ID NO: 515197 - DNA, 19 bp, Mus musculus
  siRNA target sequence for Spg4 (NM_016962.1,540-558).
caaggtgaacagtatgaaa

SEQ ID NO: 515198 - DNA, 19 bp, Mus musculus
  siRNA target sequence for Spg4 (NM_016962.1,576-594).
gccaaaatgatgactaatt

SEQ ID NO: 515199 - DNA, 19 bp, Mus musculus
  siRNA target sequence for Spg4 (NM_016962.1,577-595).
ccaaaatgatgactaattt

SEQ ID NO: 515200 - DNA, 19 bp, Mus musculus
  siRNA target sequence for Spg4 (NM_016962.1,578-596).
caaaatgatgactaattta

SEQ ID NO: 515201 - DNA, 19 bp, Mus musculus
  siRNA target sequence for Spg4 (NM_016962.1,602-620).
ggccaaggaccgtttacaa

SEQ ID NO: 515202 - DNA, 19 bp, Mus musculus
  siRNA target sequence for Spg4 (NM_016962.1,605-623).
caaggaccgtttacaactt

SEQ ID NO: 515203 - DNA, 19 bp, Mus musculus
  siRNA target sequence for Spg4 (NM_016962.1,608-626).
ggaccgtttacaacttcta

SEQ ID NO: 515204 - DNA, 19 bp, Mus musculus
  siRNA target sequence for Spg4 (NM_016962.1,632-650).
gctgcaaccagttttgcaa

SEQ ID NO: 515205 - DNA, 19 bp, Mus musculus
  siRNA target sequence for Spg4 (NM_016962.1,639-657).
ccagttttgcaattttcca

SEQ ID NO: 515206 - DNA, 19 bp, Mus musculus
  siRNA target sequence for Spg4 (NM_016962.1,640-658).
cagttttgcaattttccaa

SEQ ID NO: 515207 - DNA, 19 bp, Mus musculus
  siRNA target sequence for Spg4 (NM_016962.1,661-679).
cacagacggacgtctataa

SEQ ID NO: 515208 - DNA, 19 bp, Mus musculus
  siRNA target sequence for Spg4 (NM_016962.1,672-690).
gtctataacgagagtacta

SEQ ID NO: 515209 - DNA, 19 bp, Mus musculus
  siRNA target sequence for Spg4 (NM_016962.1,708-726).
ggacatctccagtcagaaa

SEQ ID NO: 515210 - DNA, 19 bp, Mus musculus
  siRNA target sequence for Spg4 (NM_016962.1,746-764).
gaaagaccccttaacacat

SEQ ID NO: 515211 - DNA, 19 bp, Mus musculus
  siRNA target sequence for Spg4 (NM_016962.1,754-772).
ccttaacacatgctagtaa

SEQ ID NO: 515212 - DNA, 19 bp, Mus musculus
  siRNA target sequence for Spg4 (NM_016962.1,755-773).
cttaacacatgctagtaat

SEQ ID NO: 515213 - DNA, 19 bp, Mus musculus
  siRNA target sequence for Spg4 (NM_016962.1,760-778).
cacatgctagtaattcatt

SEQ ID NO: 515214 - DNA, 19 bp, Mus musculus
  siRNA target sequence for Spg4 (NM_016962.1,911-929).
gggtactccaaaaccaaat

SEQ ID NO: 515215 - DNA, 19 bp, Mus musculus
  siRNA target sequence for Spg4 (NM_016962.1,912-930).
ggtactccaaaaccaaata

SEQ ID NO: 515216 - DNA, 19 bp, Mus musculus
  siRNA target sequence for Spg4 (NM_016962.1,955-973).
caactgcagttcggaaaaa

SEQ ID NO: 515217 - DNA, 19 bp, Mus musculus
  siRNA target sequence for Spg4 (NM_016962.1,958-976).
ctgcagttcggaaaaagaa

SEQ ID NO: 515218 - DNA, 19 bp, Mus musculus
  siRNA target sequence for Spg4 (NM_016962.1,1004-1022).
cagcaatcttgctaacctt

SEQ ID NO: 515219 - DNA, 19 bp, Mus musculus
  siRNA target sequence for Spg4 (NM_016962.1,1006-1024).
gcaatcttgctaaccttat

SEQ ID NO: 515220 - DNA, 19 bp, Mus musculus
  siRNA target sequence for Spg4 (NM_016962.1,1015-1033).
ctaaccttataatgaatga

SEQ ID NO: 515221 - DNA, 19 bp, Mus musculus
  siRNA target sequence for Spg4 (NM_016962.1,1048-1066).
ggacagctgttaagtttga

SEQ ID NO: 515222 - DNA, 19 bp, Mus musculus
  siRNA target sequence for Spg4 (NM_016962.1,1335-1353).
gaacttcaaccatctataa

SEQ ID NO: 515223 - DNA, 19 bp, Mus musculus
  siRNA target sequence for Spg4 (NM_016962.1,1338-1356).
cttcaaccatctataattt

SEQ ID NO: 515224 - DNA, 19 bp, Mus musculus
  siRNA target sequence for Spg4 (NM_016962.1,1410-1428).
gctagcagacggctaaaga

SEQ ID NO: 515225 - DNA, 19 bp, Mus musculus
  siRNA target sequence for Spg4 (NM_016962.1,1419-1437).
cggctaaagacggaatttt

SEQ ID NO: 515226 - DNA, 19 bp, Mus musculus
  siRNA target sequence for Spg4 (NM_016962.1,1422-1440).
ctaaagacggaatttttaa

SEQ ID NO: 515227 - DNA, 19 bp, Mus musculus
  siRNA target sequence for Spg4 (NM_016962.1,1429-1447).
cggaatttttaatagaatt

SEQ ID NO: 515228 - DNA, 19 bp, Mus musculus
  siRNA target sequence for Spg4 (NM_016962.1,1485-1503).
gtaatgggtgcaactaaca

SEQ ID NO: 515229 - DNA, 19 bp, Mus musculus
  siRNA target sequence for Spg4 (NM_016962.1,1527-1545).
gttctcaggcgtttcatta

SEQ ID NO: 515230 - DNA, 19 bp, Mus musculus
  siRNA target sequence for Spg4 (NM_016962.1,1579-1597).
caagactccttctgcttaa

SEQ ID NO: 515231 - DNA, 19 bp, Mus musculus
  siRNA target sequence for Spg4 (NM_016962.1,1654-1672).
ctagaatgaccgatggata

SEQ ID NO: 515232 - DNA, 19 bp, Mus musculus
  siRNA target sequence for Spg4 (NM_016962.1,1717-1735).
gtcctatccgagaactgaa

SEQ ID NO: 515233 - DNA, 19 bp, Mus musculus
  siRNA target sequence for Spg4 (NM_016962.1,1767-1785).
gagatgagaaatattcgat

SEQ ID NO: 515234 - DNA, 19 bp, Mus musculus
  siRNA target sequence for Spg4 (NM_016962.1,1829-1847).
gagtcctcagaccttagaa

SEQ ID NO: 515235 - DNA, 19 bp, Mus musculus
  siRNA target sequence for Spg7 (NM_153176.3,522-540).
cgcgcctcagagtttgcta

SEQ ID NO: 515236 - DNA, 19 bp, Mus musculus
  siRNA target sequence for Spg7 (NM_153176.3,523-541).
gcgcctcagagtttgctat

SEQ ID NO: 515237 - DNA, 19 bp, Mus musculus
  siRNA target sequence for Spg7 (NM_153176.3,524-542).
cgcctcagagtttgctatt

SEQ ID NO: 515238 - DNA, 19 bp, Mus musculus
  siRNA target sequence for Spg7 (NM_153176.3,555-573).
ccctagctttgaaggtatt

SEQ ID NO: 515239 - DNA, 19 bp, Mus musculus
  siRNA target sequence for Spg7 (NM_153176.3,556-574).
cctagctttgaaggtatta

SEQ ID NO: 515240 - DNA, 19 bp, Mus musculus
  siRNA target sequence for Spg7 (NM_153176.3,569-587).
gtattagcggattgttact

SEQ ID NO: 515241 - DNA, 19 bp, Mus musculus
  siRNA target sequence for Spg7 (NM_153176.3,575-593).
gcggattgttactgaaaca

SEQ ID NO: 515242 - DNA, 19 bp, Mus musculus
  siRNA target sequence for Spg7 (NM_153176.3,582-600).
gttactgaaacagcatata

SEQ ID NO: 515243 - DNA, 19 bp, Mus musculus
  siRNA target sequence for Spg7 (NM_153176.3,628-646).
ctttcaggtagcactttgt

SEQ ID NO: 515244 - DNA, 19 bp, Mus musculus
  siRNA target sequence for Spg7 (NM_153176.3,772-790).
ctgcgcaccctgttcatca

SEQ ID NO: 515245 - DNA, 19 bp, Mus musculus
  siRNA target sequence for Spg7 (NM_153176.3,813-831).
gaactccctcagtacaagt

SEQ ID NO: 515246 - DNA, 19 bp, Mus musculus
  siRNA target sequence for Spg7 (NM_153176.3,914-932).
gtgatgtggtggaagtcta

SEQ ID NO: 515247 - DNA, 19 bp, Mus musculus
  siRNA target sequence for Spg7 (NM_153176.3,965-983).
ctcggctggccctgatgta

SEQ ID NO: 515248 - DNA, 19 bp, Mus musculus
  siRNA target sequence for Spg7 (NM_153176.3,994-1012).
gttgcaaacatcgacaaat

SEQ ID NO: 515249 - DNA, 19 bp, Mus musculus
  siRNA target sequence for Spg7 (NM_153176.3,998-1016).
caaacatcgacaaatttga

SEQ ID NO: 515250 - DNA, 19 bp, Mus musculus
  siRNA target sequence for Spg7 (NM_153176.3,1034-1052).
ccgaagatgaactgaacat

SEQ ID NO: 515251 - DNA, 19 bp, Mus musculus
  siRNA target sequence for Spg7 (NM_153176.3,1035-1053).
cgaagatgaactgaacatt

SEQ ID NO: 515252 - DNA, 19 bp, Mus musculus
  siRNA target sequence for Spg7 (NM_153176.3,1193-1211).
gcggattcagtgcttttaa

SEQ ID NO: 515253 - DNA, 19 bp, Mus musculus
  siRNA target sequence for Spg7 (NM_153176.3,1204-1222).
gcttttaatcagcttaaga

SEQ ID NO: 515254 - DNA, 19 bp, Mus musculus
  siRNA target sequence for Spg7 (NM_153176.3,1205-1223).
cttttaatcagcttaagat

SEQ ID NO: 515255 - DNA, 19 bp, Mus musculus
  siRNA target sequence for Spg7 (NM_153176.3,1302-1320).
gctggaagtccgagaattt

SEQ ID NO: 515256 - DNA, 19 bp, Mus musculus
  siRNA target sequence for Spg7 (NM_153176.3,1311-1329).
ccgagaatttgtggattat

SEQ ID NO: 515257 - DNA, 19 bp, Mus musculus
  siRNA target sequence for Spg7 (NM_153176.3,1550-1568).
ccccttgcatagtgtacat

SEQ ID NO: 515258 - DNA, 19 bp, Mus musculus
  siRNA target sequence for Spg7 (NM_153176.3,1553-1571).
cttgcatagtgtacattga

SEQ ID NO: 515259 - DNA, 19 bp, Mus musculus
  siRNA target sequence for Spg7 (NM_153176.3,1679-1697).
gcaccacagaccatgtcat

SEQ ID NO: 515260 - DNA, 19 bp, Mus musculus
  siRNA target sequence for Spg7 (NM_153176.3,1712-1730).
ccaatcgagctgatgttct

SEQ ID NO: 515261 - DNA, 19 bp, Mus musculus
  siRNA target sequence for Spg7 (NM_153176.3,1757-1775).
ggctcgacaggcatgtctt

SEQ ID NO: 515262 - DNA, 19 bp, Mus musculus
  siRNA target sequence for Spg7 (NM_153176.3,1761-1779).
cgacaggcatgtcttcatt

SEQ ID NO: 515263 - DNA, 19 bp, Mus musculus
  siRNA target sequence for Spg7 (NM_153176.3,1795-1813).
caggagaggcgggagattt

SEQ ID NO: 515264 - DNA, 19 bp, Mus musculus
  siRNA target sequence for Spg7 (NM_153176.3,1964-1982).
ccgtgcacacgttcaactt

SEQ ID NO: 515265 - DNA, 19 bp, Mus musculus
  siRNA target sequence for Spg7 (NM_153176.3,1965-1983).
cgtgcacacgttcaacttt

SEQ ID NO: 515266 - DNA, 19 bp, Mus musculus
  siRNA target sequence for Spg7 (NM_153176.3,1969-1987).
cacacgttcaactttgagt

SEQ ID NO: 515267 - DNA, 19 bp, Mus musculus
  siRNA target sequence for Spg7 (NM_153176.3,2011-2029).
ggtactgctaaaaagagta

SEQ ID NO: 515268 - DNA, 19 bp, Mus musculus
  siRNA target sequence for Spg7 (NM_153176.3,2012-2030).
gtactgctaaaaagagtaa

SEQ ID NO: 515269 - DNA, 19 bp, Mus musculus
  siRNA target sequence for Spg7 (NM_153176.3,2015-2033).
ctgctaaaaagagtaagat

SEQ ID NO: 515270 - DNA, 19 bp, Mus musculus
  siRNA target sequence for Spg7 (NM_153176.3,2249-2267).
cagctgaagccatctcatt

SEQ ID NO: 515271 - DNA, 19 bp, Mus musculus
  siRNA target sequence for Spg7 (NM_153176.3,2251-2269).
gctgaagccatctcattca

SEQ ID NO: 515272 - DNA, 19 bp, Mus musculus
  siRNA target sequence for Spg7 (NM_153176.3,2321-2339).
cttactccatggtgaaaca

SEQ ID NO: 515273 - DNA, 19 bp, Mus musculus
  siRNA target sequence for Sphk2 (NM_020011.3,1303-1321).
ctggagacgggctgcttta

SEQ ID NO: 515274 - DNA, 19 bp, Mus musculus
  siRNA target sequence for Sphk2 (NM_020011.3,1306-1324).
gagacgggctgctttacga

SEQ ID NO: 515275 - DNA, 19 bp, Mus musculus
  siRNA target sequence for Sphk2 (NM_020011.3,1759-1777).
ccaagtcagaactagtctt

SEQ ID NO: 515276 - DNA, 19 bp, Mus musculus
  siRNA target sequence for Sphk2 (NM_020011.3,1991-2009).
ccccaacgctctcaaaaca

SEQ ID NO: 515277 - DNA, 19 bp, Mus musculus
  siRNA target sequence for Sphk2 (NM_020011.3,2150-2168).
ccaagactgggtgacaata

SEQ ID NO: 515278 - DNA, 19 bp, Mus musculus
  siRNA target sequence for Sphk2 (NM_020011.3,2164-2182).
caatagagggggagtttgt

SEQ ID NO: 515279 - DNA, 19 bp, Mus musculus
  siRNA target sequence for Sphk2 (NM_020011.3,2236-2254).
cacatgcacgctttgatga

SEQ ID NO: 515280 - DNA, 19 bp, Mus musculus
  siRNA target sequence for Sphk2 (NM_020011.3,2302-2320).
cacttctacgcattttgct

SEQ ID NO: 515281 - DNA, 19 bp, Mus musculus
  siRNA target sequence for Sphk2 (NM_020011.3,2425-2443).
ctgtagatggggagttagt

SEQ ID NO: 515282 - DNA, 19 bp, Mus musculus
  siRNA target sequence for Src (NM_009271.1,184-202).
ctcttcggaggcttcaact

SEQ ID NO: 515283 - DNA, 19 bp, Mus musculus
  siRNA target sequence for Src (NM_009271.1,320-338).
gggagcggctgcagattgt

SEQ ID NO: 515284 - DNA, 19 bp, Mus musculus
  siRNA target sequence for Src (NM_009271.1,325-343).
cggctgcagattgtcaata

SEQ ID NO: 515285 - DNA, 19 bp, Mus musculus
  siRNA target sequence for Src (NM_009271.1,326-344).
ggctgcagattgtcaataa

SEQ ID NO: 515286 - DNA, 19 bp, Mus musculus
  siRNA target sequence for Src (NM_009271.1,401-419).
cgggacagaccggttacat

SEQ ID NO: 515287 - DNA, 19 bp, Mus musculus
  siRNA target sequence for Src (NM_009271.1,552-570).
gagtgagaccacaaaaggt

SEQ ID NO: 515288 - DNA, 19 bp, Mus musculus
  siRNA target sequence for Src (NM_009271.1,600-618).
caatgccaagggcctaaat

SEQ ID NO: 515289 - DNA, 19 bp, Mus musculus
  siRNA target sequence for Src (NM_009271.1,604-622).
gccaagggcctaaatgtga

SEQ ID NO: 515290 - DNA, 19 bp, Mus musculus
  siRNA target sequence for Src (NM_009271.1,605-623).
ccaagggcctaaatgtgaa

SEQ ID NO: 515291 - DNA, 19 bp, Mus musculus
  siRNA target sequence for Src (NM_009271.1,606-624).
caagggcctaaatgtgaaa

SEQ ID NO: 515292 - DNA, 19 bp, Mus musculus
  siRNA target sequence for Src (NM_009271.1,610-628).
ggcctaaatgtgaaacact

SEQ ID NO: 515293 - DNA, 19 bp, Mus musculus
  siRNA target sequence for Src (NM_009271.1,611-629).
gcctaaatgtgaaacacta

SEQ ID NO: 515294 - DNA, 19 bp, Mus musculus
  siRNA target sequence for Src (NM_009271.1,697-715).
cagctcgtggcttactact

SEQ ID NO: 515295 - DNA, 19 bp, Mus musculus
  siRNA target sequence for Src (NM_009271.1,705-723).
ggcttactactccaaacat

SEQ ID NO: 515296 - DNA, 19 bp, Mus musculus
  siRNA target sequence for Src (NM_009271.1,1077-1095).
gggggaaacgggcaaatat

SEQ ID NO: 515297 - DNA, 19 bp, Mus musculus
  siRNA target sequence for Src (NM_009271.1,1078-1096).
ggggaaacgggcaaatatt

SEQ ID NO: 515298 - DNA, 19 bp, Mus musculus
  siRNA target sequence for Src (NM_009271.1,1079-1097).
gggaaacgggcaaatattt

SEQ ID NO: 515299 - DNA, 19 bp, Mus musculus
  siRNA target sequence for Src (NM_009271.1,1252-1270).
ctcatagaagacaacgaat

SEQ ID NO: 515300 - DNA, 19 bp, Mus musculus
  siRNA target sequence for Srms (NM_011481.2,484-502).
cctttttctgggataagat

SEQ ID NO: 515301 - DNA, 19 bp, Mus musculus
  siRNA target sequence for Srms (NM_011481.2,707-725).
ggagggggactacatcttt

SEQ ID NO: 515302 - DNA, 19 bp, Mus musculus
  siRNA target sequence for Srms (NM_011481.2,807-825).
gaccaaccttggtacttca

SEQ ID NO: 515303 - DNA, 19 bp, Mus musculus
  siRNA target sequence for Srms (NM_011481.2,1033-1051).
cactgctggcttactacaa

SEQ ID NO: 515304 - DNA, 19 bp, Mus musculus
  siRNA target sequence for Srms (NM_011481.2,1127-1145).
ggaacgaccacgttcagaa

SEQ ID NO: 515305 - DNA, 19 bp, Mus musculus
  siRNA target sequence for Srms (NM_011481.2,1132-1150).
gaccacgttcagaatttgt

SEQ ID NO: 515306 - DNA, 19 bp, Mus musculus
  siRNA target sequence for Srms (NM_011481.2,1316-1334).
ccggctgcacgctatatgt

SEQ ID NO: 515307 - DNA, 19 bp, Mus musculus
  siRNA target sequence for Srms (NM_011481.2,1317-1335).
cggctgcacgctatatgtt

SEQ ID NO: 515308 - DNA, 19 bp, Mus musculus
  siRNA target sequence for Srms (NM_011481.2,1344-1362).
gaacctgtgtacatcgtta

SEQ ID NO: 515309 - DNA, 19 bp, Mus musculus
  siRNA target sequence for Srms (NM_011481.2,1348-1366).
ctgtgtacatcgttactga

SEQ ID NO: 515310 - DNA, 19 bp, Mus musculus
  siRNA target sequence for Srms (NM_011481.2,1546-1564).
cctgcaaggtagctgattt

SEQ ID NO: 515311 - DNA, 19 bp, Mus musculus
  siRNA target sequence for Srms (NM_011481.2,1650-1668).
gctaattaccgtgtctttt

SEQ ID NO: 515312 - DNA, 19 bp, Mus musculus
  siRNA target sequence for Srms (NM_011481.2,1704-1722).
ctgtatgaggtcttcactt

SEQ ID NO: 515313 - DNA, 19 bp, Mus musculus
  siRNA target sequence for Srms (NM_011481.2,1706-1724).
gtatgaggtcttcacttat

SEQ ID NO: 515314 - DNA, 19 bp, Mus musculus
  siRNA target sequence for Srms (NM_011481.2,1758-1776).
gagacgctacagcagatta

SEQ ID NO: 515315 - DNA, 19 bp, Mus musculus
  siRNA target sequence for Srms (NM_011481.2,1760-1778).
gacgctacagcagattagt

SEQ ID NO: 515316 - DNA, 19 bp, Mus musculus
  siRNA target sequence for Srms (NM_011481.2,1810-1828).
gcccagcagaggtctatgt

SEQ ID NO: 515317 - DNA, 19 bp, Mus musculus
  siRNA target sequence for Srms (NM_011481.2,1869-1887).
cccacctttgccatactga

SEQ ID NO: 515318 - DNA, 19 bp, Mus musculus
  siRNA target sequence for Srpk1 (NM_016795.2,238-256).
ggttatcatcttgtgaaaa

SEQ ID NO: 515319 - DNA, 19 bp, Mus musculus
  siRNA target sequence for Srpk1 (NM_016795.2,239-257).
gttatcatcttgtgaaaat

SEQ ID NO: 515320 - DNA, 19 bp, Mus musculus
  siRNA target sequence for Srpk1 (NM_016795.2,273-291).
cgggagataccatgtgatt

SEQ ID NO: 515321 - DNA, 19 bp, Mus musculus
  siRNA target sequence for Srpk1 (NM_016795.2,412-430).
gaaatccggctgctgaaat

SEQ ID NO: 515322 - DNA, 19 bp, Mus musculus
  siRNA target sequence for Srpk1 (NM_016795.2,438-456).
caactcagacccgaatgat

SEQ ID NO: 515323 - DNA, 19 bp, Mus musculus
  siRNA target sequence for Srpk1 (NM_016795.2,443-461).
cagacccgaatgatccaaa

SEQ ID NO: 515324 - DNA, 19 bp, Mus musculus
  siRNA target sequence for Srpk1 (NM_016795.2,447-465).
cccgaatgatccaaatgga

SEQ ID NO: 515325 - DNA, 19 bp, Mus musculus
  siRNA target sequence for Srpk1 (NM_016795.2,471-489).
ggttgttcaactactagat

SEQ ID NO: 515326 - DNA, 19 bp, Mus musculus
  siRNA target sequence for Srpk1 (NM_016795.2,481-499).
ctactagatgactttaaaa

SEQ ID NO: 515327 - DNA, 19 bp, Mus musculus
  siRNA target sequence for Srpk1 (NM_016795.2,505-523).
ggcgttaatggaacacata

SEQ ID NO: 515328 - DNA, 19 bp, Mus musculus
  siRNA target sequence for Srpk1 (NM_016795.2,506-524).
gcgttaatggaacacatat

SEQ ID NO: 515329 - DNA, 19 bp, Mus musculus
  siRNA target sequence for Srpk1 (NM_016795.2,508-526).
gttaatggaacacatatct

SEQ ID NO: 515330 - DNA, 19 bp, Mus musculus
  siRNA target sequence for Srpk1 (NM_016795.2,595-613).
ccgctgccttgtgtcaaaa

SEQ ID NO: 515331 - DNA, 19 bp, Mus musculus
  siRNA target sequence for Srpk1 (NM_016795.2,810-828).
gcctaagccagctgacaaa

SEQ ID NO: 515332 - DNA, 19 bp, Mus musculus
  siRNA target sequence for Srpk1 (NM_016795.2,811-829).
cctaagccagctgacaaaa

SEQ ID NO: 515333 - DNA, 19 bp, Mus musculus
  siRNA target sequence for Srpk1 (NM_016795.2,812-830).
ctaagccagctgacaaaat

SEQ ID NO: 515334 - DNA, 19 bp, Mus musculus
  siRNA target sequence for Srpk1 (NM_016795.2,867-885).
gaagcgccaggcagaatta

SEQ ID NO: 515335 - DNA, 19 bp, Mus musculus
  siRNA target sequence for Srpk1 (NM_016795.2,870-888).
gcgccaggcagaattacta

SEQ ID NO: 515336 - DNA, 19 bp, Mus musculus
  siRNA target sequence for Srpk1 (NM_016795.2,995-1013).
cagagaacccacctaataa

SEQ ID NO: 515337 - DNA, 19 bp, Mus musculus
  siRNA target sequence for Srpk1 (NM_016795.2,1087-1105).
ggtggtgcgccagagatta

SEQ ID NO: 515338 - DNA, 19 bp, Mus musculus
  siRNA target sequence for Srpk1 (NM_016795.2,1088-1106).
gtggtgcgccagagattaa

SEQ ID NO: 515339 - DNA, 19 bp, Mus musculus
  siRNA target sequence for Srpk1 (NM_016795.2,1090-1108).
ggtgcgccagagattaatt

SEQ ID NO: 515340 - DNA, 19 bp, Mus musculus
  siRNA target sequence for Srpk1 (NM_016795.2,1093-1111).
gcgccagagattaattgca

SEQ ID NO: 515341 - DNA, 19 bp, Mus musculus
  siRNA target sequence for Srpk1 (NM_016795.2,1094-1112).
cgccagagattaattgcaa

SEQ ID NO: 515342 - DNA, 19 bp, Mus musculus
  siRNA target sequence for Srpk1 (NM_016795.2,1095-1113).
gccagagattaattgcaat

SEQ ID NO: 515343 - DNA, 19 bp, Mus musculus
  siRNA target sequence for Srpk1 (NM_016795.2,1115-1133).
gagtgattggagtcgttaa

SEQ ID NO: 515344 - DNA, 19 bp, Mus musculus
  siRNA target sequence for Srpk1 (NM_016795.2,1117-1135).
gtgattggagtcgttaatt

SEQ ID NO: 515345 - DNA, 19 bp, Mus musculus
  siRNA target sequence for Srpk1 (NM_016795.2,1137-1155).
ccctgagaacagtaataat

SEQ ID NO: 515346 - DNA, 19 bp, Mus musculus
  siRNA target sequence for Srpk1 (NM_016795.2,1174-1192).
gaggatctgcataatgcta

SEQ ID NO: 515347 - DNA, 19 bp, Mus musculus
  siRNA target sequence for Srpk1 (NM_016795.2,1199-1217).
gtgatgtccacactttgaa

SEQ ID NO: 515348 - DNA, 19 bp, Mus musculus
  siRNA target sequence for Srpk1 (NM_016795.2,1566-1584).
gcagtatcggtctttggaa

SEQ ID NO: 515349 - DNA, 19 bp, Mus musculus
  siRNA target sequence for Srpk1 (NM_016795.2,1692-1710).
ggattacacacgagatgaa

SEQ ID NO: 515350 - DNA, 19 bp, Mus musculus
  siRNA target sequence for Srpk1 (NM_016795.2,1713-1731).
ccacatcgccctgatcata

SEQ ID NO: 515351 - DNA, 19 bp, Mus musculus
  siRNA target sequence for Srpk1 (NM_016795.2,1719-1737).
cgccctgatcatagaactt

SEQ ID NO: 515352 - DNA, 19 bp, Mus musculus
  siRNA target sequence for Srpk1 (NM_016795.2,1892-1910).
ccggcttcacagatttcct

SEQ ID NO: 515353 - DNA, 19 bp, Mus musculus
  siRNA target sequence for Srpk2 (NM_009274.1,166-184).
gaggaccccgcagattact

SEQ ID NO: 515354 - DNA, 19 bp, Mus musculus
  siRNA target sequence for Srpk2 (NM_009274.1,193-211).
ggctatcatccagtgaaaa

SEQ ID NO: 515355 - DNA, 19 bp, Mus musculus
  siRNA target sequence for Srpk2 (NM_009274.1,194-212).
gctatcatccagtgaaaat

SEQ ID NO: 515356 - DNA, 19 bp, Mus musculus
  siRNA target sequence for Srpk2 (NM_009274.1,195-213).
ctatcatccagtgaaaatt

SEQ ID NO: 515357 - DNA, 19 bp, Mus musculus
  siRNA target sequence for Srpk2 (NM_009274.1,229-247).
ggtcgatatcatgtcatta

SEQ ID NO: 515358 - DNA, 19 bp, Mus musculus
  siRNA target sequence for Srpk2 (NM_009274.1,256-274).
ggatgggggcacttttcta

SEQ ID NO: 515359 - DNA, 19 bp, Mus musculus
  siRNA target sequence for Srpk2 (NM_009274.1,356-374).
cagccttggatgaaattaa

SEQ ID NO: 515360 - DNA, 19 bp, Mus musculus
  siRNA target sequence for Srpk2 (NM_009274.1,381-399).
caaatgcgttcgagaaagt

SEQ ID NO: 515361 - DNA, 19 bp, Mus musculus
  siRNA target sequence for Srpk2 (NM_009274.1,423-441).
catggtagttcagctaatt

SEQ ID NO: 515362 - DNA, 19 bp, Mus musculus
  siRNA target sequence for Srpk2 (NM_009274.1,436-454).
ctaattgatgacttcaaga

SEQ ID NO: 515363 - DNA, 19 bp, Mus musculus
  siRNA target sequence for Srpk2 (NM_009274.1,553-571).
gtacgttgtgtgaagagta

SEQ ID NO: 515364 - DNA, 19 bp, Mus musculus
  siRNA target sequence for Srpk2 (NM_009274.1,556-574).
cgttgtgtgaagagtatca

SEQ ID NO: 515365 - DNA, 19 bp, Mus musculus
  siRNA target sequence for Srpk2 (NM_009274.1,557-575).
gttgtgtgaagagtatcat

SEQ ID NO: 515366 - DNA, 19 bp, Mus musculus
  siRNA target sequence for Srpk2 (NM_009274.1,585-603).
ccttcaagggttagattat

SEQ ID NO: 515367 - DNA, 19 bp, Mus musculus
  siRNA target sequence for Srpk2 (NM_009274.1,598-616).
gattatctacacagtaagt

SEQ ID NO: 515368 - DNA, 19 bp, Mus musculus
  siRNA target sequence for Srpk2 (NM_009274.1,607-625).
cacagtaagtgcaagataa

SEQ ID NO: 515369 - DNA, 19 bp, Mus musculus
  siRNA target sequence for Srpk2 (NM_009274.1,611-629).
gtaagtgcaagataattca

SEQ ID NO: 515370 - DNA, 19 bp, Mus musculus
  siRNA target sequence for Srpk2 (NM_009274.1,670-688).
gacgcttacgtgagaagaa

SEQ ID NO: 515371 - DNA, 19 bp, Mus musculus
  siRNA target sequence for Srpk2 (NM_009274.1,752-770).
gtacggctccacagcaaaa

SEQ ID NO: 515372 - DNA, 19 bp, Mus musculus
  siRNA target sequence for Srpk2 (NM_009274.1,954-972).
gccggaggtgacactgaaa

SEQ ID NO: 515373 - DNA, 19 bp, Mus musculus
  siRNA target sequence for Srpk2 (NM_009274.1,1068-1086).
cgcggagaaggatgaagat

SEQ ID NO: 515374 - DNA, 19 bp, Mus musculus
  siRNA target sequence for Srpk2 (NM_009274.1,1258-1276).
gagagtgattacacgtata

SEQ ID NO: 515375 - DNA, 19 bp, Mus musculus
  siRNA target sequence for Srpk2 (NM_009274.1,1272-1290).
gtatagcagctcctatgaa

SEQ ID NO: 515376 - DNA, 19 bp, Mus musculus
  siRNA target sequence for Srpk2 (NM_009274.1,1277-1295).
gcagctcctatgaacaatt

SEQ ID NO: 515377 - DNA, 19 bp, Mus musculus
  siRNA target sequence for Srpk2 (NM_009274.1,1309-1327).
ccaaatggacaacataaga

SEQ ID NO: 515378 - DNA, 19 bp, Mus musculus
  siRNA target sequence for Srpk2 (NM_009274.1,1350-1368).
gttttctgggcccttagaa

SEQ ID NO: 515379 - DNA, 19 bp, Mus musculus
  siRNA target sequence for Srpk2 (NM_009274.1,1463-1481).
cctctagtactggagattt

SEQ ID NO: 515380 - DNA, 19 bp, Mus musculus
  siRNA target sequence for Srpk2 (NM_009274.1,1580-1598).
cttgttgggtgcataaaca

SEQ ID NO: 515381 - DNA, 19 bp, Mus musculus
  siRNA target sequence for Srpk2 (NM_009274.1,1707-1725).
gctcgccacaggagactat

SEQ ID NO: 515382 - DNA, 19 bp, Mus musculus
  siRNA target sequence for Srpk2 (NM_009274.1,1893-1911).
ctggagcctctttgatgta

SEQ ID NO: 515383 - DNA, 19 bp, Mus musculus
  siRNA target sequence for Srpk2 (NM_009274.1,1895-1913).
ggagcctctttgatgtact

SEQ ID NO: 515384 - DNA, 19 bp, Mus musculus
  siRNA target sequence for Srpk2 (NM_009274.1,1898-1916).
gcctctttgatgtacttgt

SEQ ID NO: 515385 - DNA, 19 bp, Mus musculus
  siRNA target sequence for Srpk2 (NM_009274.1,1906-1924).
gatgtacttgtggaaaagt

SEQ ID NO: 515386 - DNA, 19 bp, Mus musculus
  siRNA target sequence for Srpk2 (NM_009274.1,1945-1963).
gctgcacaatttacagatt

SEQ ID NO: 515387 - DNA, 19 bp, Mus musculus
  siRNA target sequence for Srpk2 (NM_009274.1,1983-2001).
gatggttccagaaaaacga

SEQ ID NO: 515388 - DNA, 19 bp, Mus musculus
  siRNA target sequence for Srpk2 (NM_009274.1,2023-2041).
cgacatccttggttgaatt

SEQ ID NO: 515389 - DNA, 19 bp, Mus musculus
  siRNA target sequence for Sstk (NM_032004.1,177-195).
ggccacctccaagaagtat

SEQ ID NO: 515390 - DNA, 19 bp, Mus musculus
  siRNA target sequence for Sstk (NM_032004.1,239-257).
ctccggacttcgtcaacaa

SEQ ID NO: 515391 - DNA, 19 bp, Mus musculus
  siRNA target sequence for Sstk (NM_032004.1,241-259).
ccggacttcgtcaacaagt

SEQ ID NO: 515392 - DNA, 19 bp, Mus musculus
  siRNA target sequence for Sstk (NM_032004.1,242-260).
cggacttcgtcaacaagtt

SEQ ID NO: 515393 - DNA, 19 bp, Mus musculus
  siRNA target sequence for Sstk (NM_032004.1,302-320).
cgcacatcgtacacgtttt

SEQ ID NO: 515394 - DNA, 19 bp, Mus musculus
  siRNA target sequence for Sstk (NM_032004.1,338-356).
gcaatgggaagctgtacat

SEQ ID NO: 515395 - DNA, 19 bp, Mus musculus
  siRNA target sequence for Sstk (NM_032004.1,652-670).
ccctacgaccctaagaaat

SEQ ID NO: 515396 - DNA, 19 bp, Mus musculus
  siRNA target sequence for Sstk (NM_032004.1,653-671).
cctacgaccctaagaaata

SEQ ID NO: 515397 - DNA, 19 bp, Mus musculus
  siRNA target sequence for Sstk (NM_032004.1,799-817).
ctgtcggaacgatgcaaat

SEQ ID NO: 515398 - DNA, 19 bp, Mus musculus
  siRNA target sequence for Sstk (NM_032004.1,803-821).
cggaacgatgcaaatcctt

SEQ ID NO: 515399 - DNA, 19 bp, Mus musculus
  siRNA target sequence for Stch (NM_030201.1,45-63).
cggagagatgacgatctta

SEQ ID NO: 515400 - DNA, 19 bp, Mus musculus
  siRNA target sequence for Stch (NM_030201.1,95-113).
gctacttggcacaacagta

SEQ ID NO: 515401 - DNA, 19 bp, Mus musculus
  siRNA target sequence for Stch (NM_030201.1,96-114).
ctacttggcacaacagtat

SEQ ID NO: 515402 - DNA, 19 bp, Mus musculus
  siRNA target sequence for Stch (NM_030201.1,103-121).
gcacaacagtatttaccat

SEQ ID NO: 515403 - DNA, 19 bp, Mus musculus
  siRNA target sequence for Stch (NM_030201.1,104-122).
cacaacagtatttaccatt

SEQ ID NO: 515404 - DNA, 19 bp, Mus musculus
  siRNA target sequence for Stch (NM_030201.1,119-137).
cattgcctacgccaaaagt

SEQ ID NO: 515405 - DNA, 19 bp, Mus musculus
  siRNA target sequence for Stch (NM_030201.1,123-141).
gcctacgccaaaagtgatt

SEQ ID NO: 515406 - DNA, 19 bp, Mus musculus
  siRNA target sequence for Stch (NM_030201.1,165-183).
ctgttcggttggtgtattt

SEQ ID NO: 515407 - DNA, 19 bp, Mus musculus
  siRNA target sequence for Stch (NM_030201.1,167-185).
gttcggttggtgtattttt

SEQ ID NO: 515408 - DNA, 19 bp, Mus musculus
  siRNA target sequence for Stch (NM_030201.1,217-235).
gatgaaaacgggcatatca

SEQ ID NO: 515409 - DNA, 19 bp, Mus musculus
  siRNA target sequence for Stch (NM_030201.1,260-278).
cggacggtgatgtgtatgt

SEQ ID NO: 515410 - DNA, 19 bp, Mus musculus
  siRNA target sequence for Stch (NM_030201.1,304-322).
gattcaaatcctcaaaaca

SEQ ID NO: 515411 - DNA, 19 bp, Mus musculus
  siRNA target sequence for Stch (NM_030201.1,340-358).
cggttcatcgggaagatct

SEQ ID NO: 515412 - DNA, 19 bp, Mus musculus
  siRNA target sequence for Stch (NM_030201.1,341-359).
ggttcatcgggaagatctt

SEQ ID NO: 515413 - DNA, 19 bp, Mus musculus
  siRNA target sequence for Stch (NM_030201.1,385-403).
gttggcagatacccattta

SEQ ID NO: 515414 - DNA, 19 bp, Mus musculus
  siRNA target sequence for Stch (NM_030201.1,389-407).
gcagatacccatttaaggt

SEQ ID NO: 515415 - DNA, 19 bp, Mus musculus
  siRNA target sequence for Stch (NM_030201.1,487-505).
cgattgctgctgaagctaa

SEQ ID NO: 515416 - DNA, 19 bp, Mus musculus
  siRNA target sequence for Stch (NM_030201.1,488-506).
gattgctgctgaagctaaa

SEQ ID NO: 515417 - DNA, 19 bp, Mus musculus
  siRNA target sequence for Stch (NM_030201.1,566-584).
cagaattcgacctacaaca

SEQ ID NO: 515418 - DNA, 19 bp, Mus musculus
  siRNA target sequence for Stch (NM_030201.1,573-591).
cgacctacaacagagaaat

SEQ ID NO: 515419 - DNA, 19 bp, Mus musculus
  siRNA target sequence for Stch (NM_030201.1,574-592).
gacctacaacagagaaatt

SEQ ID NO: 515420 - DNA, 19 bp, Mus musculus
  siRNA target sequence for Stch (NM_030201.1,627-645).
gatcttgagggtgataaat

SEQ ID NO: 515421 - DNA, 19 bp, Mus musculus
  siRNA target sequence for Stch (NM_030201.1,717-735).
gggtggaggaactcttgat

SEQ ID NO: 515422 - DNA, 19 bp, Mus musculus
  siRNA target sequence for Stch (NM_030201.1,730-748).
cttgatgtgtcgttactga

SEQ ID NO: 515423 - DNA, 19 bp, Mus musculus
  siRNA target sequence for Stch (NM_030201.1,733-751).
gatgtgtcgttactgaata

SEQ ID NO: 515424 - DNA, 19 bp, Mus musculus
  siRNA target sequence for Stch (NM_030201.1,776-794).
gagcgatgtctggaaacaa

SEQ ID NO: 515425 - DNA, 19 bp, Mus musculus
  siRNA target sequence for Stch (NM_030201.1,778-796).
gcgatgtctggaaacaaca

SEQ ID NO: 515426 - DNA, 19 bp, Mus musculus
  siRNA target sequence for Stch (NM_030201.1,779-797).
cgatgtctggaaacaacaa

SEQ ID NO: 515427 - DNA, 19 bp, Mus musculus
  siRNA target sequence for Stch (NM_030201.1,886-904).
gaggaaatccacagattaa

SEQ ID NO: 515428 - DNA, 19 bp, Mus musculus
  siRNA target sequence for Stch (NM_030201.1,913-931).
gtggagatggtcaagctaa

SEQ ID NO: 515429 - DNA, 19 bp, Mus musculus
  siRNA target sequence for Stch (NM_030201.1,916-934).
gagatggtcaagctaaact

SEQ ID NO: 515430 - DNA, 19 bp, Mus musculus
  siRNA target sequence for Stch (NM_030201.1,924-942).
caagctaaacttgacaatt

SEQ ID NO: 515431 - DNA, 19 bp, Mus musculus
  siRNA target sequence for Stch (NM_030201.1,927-945).
gctaaacttgacaattcat

SEQ ID NO: 515432 - DNA, 19 bp, Mus musculus
  siRNA target sequence for Stch (NM_030201.1,948-966).
gtctgcccaggtatcagtt

SEQ ID NO: 515433 - DNA, 19 bp, Mus musculus
  siRNA target sequence for Stch (NM_030201.1,950-968).
ctgcccaggtatcagtttt

SEQ ID NO: 515434 - DNA, 19 bp, Mus musculus
  siRNA target sequence for Stch (NM_030201.1,1052-1070).
gtcaccatgtgaatagagt

SEQ ID NO: 515435 - DNA, 19 bp, Mus musculus
  siRNA target sequence for Stch (NM_030201.1,1056-1074).
ccatgtgaatagagtgttt

SEQ ID NO: 515436 - DNA, 19 bp, Mus musculus
  siRNA target sequence for Stch (NM_030201.1,1057-1075).
catgtgaatagagtgttta

SEQ ID NO: 515437 - DNA, 19 bp, Mus musculus
  siRNA target sequence for Stch (NM_030201.1,1155-1173).
cctcaatgaagatctcttt

SEQ ID NO: 515438 - DNA, 19 bp, Mus musculus
  siRNA target sequence for Stch (NM_030201.1,1186-1204).
gtacccattcagcaagtat

SEQ ID NO: 515439 - DNA, 19 bp, Mus musculus
  siRNA target sequence for Stch (NM_030201.1,1218-1236).
cttagacaagacggaaatt

SEQ ID NO: 515440 - DNA, 19 bp, Mus musculus
  siRNA target sequence for Stch (NM_030201.1,1273-1291).
cctcggatccgccaagtta

SEQ ID NO: 515441 - DNA, 19 bp, Mus musculus
  siRNA target sequence for Stch (NM_030201.1,1274-1292).
ctcggatccgccaagttat

SEQ ID NO: 515442 - DNA, 19 bp, Mus musculus
  siRNA target sequence for Stch (NM_030201.1,1277-1295).
ggatccgccaagttattca

SEQ ID NO: 515443 - DNA, 19 bp, Mus musculus
  siRNA target sequence for Stch (NM_030201.1,1306-1324).
ggaaaggacccgaatacat

SEQ ID NO: 515444 - DNA, 19 bp, Mus musculus
  siRNA target sequence for Stch (NM_030201.1,1389-1407).
ctggcctctccaagttagt

SEQ ID NO: 515445 - DNA, 19 bp, Mus musculus
  siRNA target sequence for Stch (NM_030201.1,1398-1416).
ccaagttagtgctttggaa

SEQ ID NO: 515446 - DNA, 19 bp, Mus musculus
  siRNA target sequence for Stch (NM_030201.1,1420-1438).
cccaataagcatttacaga

SEQ ID NO: 515447 - DNA, 19 bp, Mus musculus
  siRNA target sequence for Stk10 (NM_009288.1,121-139).
cgcatcttgcggttatcca

SEQ ID NO: 515448 - DNA, 19 bp, Mus musculus
  siRNA target sequence for Stk10 (NM_009288.1,150-168).
gagaaagtcccgtgaatat

SEQ ID NO: 515449 - DNA, 19 bp, Mus musculus
  siRNA target sequence for Stk10 (NM_009288.1,152-170).
gaaagtcccgtgaatatga

SEQ ID NO: 515450 - DNA, 19 bp, Mus musculus
  siRNA target sequence for Stk10 (NM_009288.1,187-205).
ctggaccccaacgatgtat

SEQ ID NO: 515451 - DNA, 19 bp, Mus musculus
  siRNA target sequence for Stk10 (NM_009288.1,362-380).
gtgaccacccgtatatcgt

SEQ ID NO: 515452 - DNA, 19 bp, Mus musculus
  siRNA target sequence for Stk10 (NM_009288.1,577-595).
gctggcaacgtgcttatga

SEQ ID NO: 515453 - DNA, 19 bp, Mus musculus
  siRNA target sequence for Stk10 (NM_009288.1,633-651).
gtctgccaagaatctgaaa

SEQ ID NO: 515454 - DNA, 19 bp, Mus musculus
  siRNA target sequence for Stk10 (NM_009288.1,828-846).
gcgggtcctgctcaagatt

SEQ ID NO: 515455 - DNA, 19 bp, Mus musculus
  siRNA target sequence for Stk10 (NM_009288.1,895-913).
gagttccgagactttctga

SEQ ID NO: 515456 - DNA, 19 bp, Mus musculus
  siRNA target sequence for Stk10 (NM_009288.1,983-1001).
gcagagtcaccagcaataa

SEQ ID NO: 515457 - DNA, 19 bp, Mus musculus
  siRNA target sequence for Stk10 (NM_009288.1,1028-1046).
caaaggcggaggtaatgga

SEQ ID NO: 515458 - DNA, 19 bp, Mus musculus
  siRNA target sequence for Stk10 (NM_009288.1,1125-1143).
ggactctgccaatgtaact

SEQ ID NO: 515459 - DNA, 19 bp, Mus musculus
  siRNA target sequence for Stk10 (NM_009288.1,1344-1362).
gtccatggatgccagaatt

SEQ ID NO: 515460 - DNA, 19 bp, Mus musculus
  siRNA target sequence for Stk10 (NM_009288.1,1358-1376).
gaattcagatggatgaaga

SEQ ID NO: 515461 - DNA, 19 bp, Mus musculus
  siRNA target sequence for Stk10 (NM_009288.1,1522-1540).
gtcactccaagccattcta

SEQ ID NO: 515462 - DNA, 19 bp, Mus musculus
  siRNA target sequence for Stk10 (NM_009288.1,1643-1661).
ctctcaagggctcaaaact

SEQ ID NO: 515463 - DNA, 19 bp, Mus musculus
  siRNA target sequence for Stk10 (NM_009288.1,1651-1669).
ggctcaaaactgcacaata

SEQ ID NO: 515464 - DNA, 19 bp, Mus musculus
  siRNA target sequence for Stk10 (NM_009288.1,1872-1890).
gcagatgcacaaacgtttt

SEQ ID NO: 515465 - DNA, 19 bp, Mus musculus
  siRNA target sequence for Stk10 (NM_009288.1,1875-1893).
gatgcacaaacgttttgaa

SEQ ID NO: 515466 - DNA, 19 bp, Mus musculus
  siRNA target sequence for Stk10 (NM_009288.1,1878-1896).
gcacaaacgttttgaacaa

SEQ ID NO: 515467 - DNA, 19 bp, Mus musculus
  siRNA target sequence for Stk10 (NM_009288.1,1905-1923).
cgccaagaagaaattctat

SEQ ID NO: 515468 - DNA, 19 bp, Mus musculus
  siRNA target sequence for Stk10 (NM_009288.1,2088-2106).
gaagagtgaggttgagaaa

SEQ ID NO: 515469 - DNA, 19 bp, Mus musculus
  siRNA target sequence for Stk10 (NM_009288.1,2543-2561).
cgcgcatggccatgtacaa

SEQ ID NO: 515470 - DNA, 19 bp, Mus musculus
  siRNA target sequence for Stk11 (NM_011492.1,505-523).
gactccaccgaggtaatct

SEQ ID NO: 515471 - DNA, 19 bp, Mus musculus
  siRNA target sequence for Stk11 (NM_011492.1,616-634).
ctggactccgagaccttat

SEQ ID NO: 515472 - DNA, 19 bp, Mus musculus
  siRNA target sequence for Stk11 (NM_011492.1,635-653).
gccgcagggcggtcaagat

SEQ ID NO: 515473 - DNA, 19 bp, Mus musculus
  siRNA target sequence for Stk11 (NM_011492.1,644-662).
cggtcaagatcctcaagaa

SEQ ID NO: 515474 - DNA, 19 bp, Mus musculus
  siRNA target sequence for Stk11 (NM_011492.1,730-748).
ctgcggcatcggaatgtga

SEQ ID NO: 515475 - DNA, 19 bp, Mus musculus
  siRNA target sequence for Stk11 (NM_011492.1,1138-1156).
gctggggtcacactttaca

SEQ ID NO: 515476 - DNA, 19 bp, Mus musculus
  siRNA target sequence for Stk11 (NM_011492.1,1141-1159).
ggggtcacactttacaaca

SEQ ID NO: 515477 - DNA, 19 bp, Mus musculus
  siRNA target sequence for Stk11 (NM_011492.1,1142-1160).
gggtcacactttacaacat

SEQ ID NO: 515478 - DNA, 19 bp, Mus musculus
  siRNA target sequence for Stk11 (NM_011492.1,1144-1162).
gtcacactttacaacatca

SEQ ID NO: 515479 - DNA, 19 bp, Mus musculus
  siRNA target sequence for Stk11 (NM_011492.1,1166-1184).
cgggcctgtacccatttga

SEQ ID NO: 515480 - DNA, 19 bp, Mus musculus
  siRNA target sequence for Stk11 (NM_011492.1,1177-1195).
ccatttgagggggacaata

SEQ ID NO: 515481 - DNA, 19 bp, Mus musculus
  siRNA target sequence for Stk11 (NM_011492.1,1183-1201).
gagggggacaatatctaca

SEQ ID NO: 515482 - DNA, 19 bp, Mus musculus
  siRNA target sequence for Stk11 (NM_011492.1,1308-1326).
gttctccatccgacagatt

SEQ ID NO: 515483 - DNA, 19 bp, Mus musculus
  siRNA target sequence for Stk11 (NM_011492.1,1337-1355).
gctggttccggaagaaaca

SEQ ID NO: 515484 - DNA, 19 bp, Mus musculus
  siRNA target sequence for Stk11 (NM_011492.1,1364-1382).
ctgaggcgctcgtacctat

SEQ ID NO: 515485 - DNA, 19 bp, Mus musculus
  siRNA target sequence for Stk11 (NM_011492.1,1405-1423).
gaccgctggcgcagtatga

SEQ ID NO: 515486 - DNA, 19 bp, Mus musculus
  siRNA target sequence for Stk11 (NM_011492.1,1407-1425).
ccgctggcgcagtatgact

SEQ ID NO: 515487 - DNA, 19 bp, Mus musculus
  siRNA target sequence for Stk16 (NM_011494.2,598-616).
ggtacactgtggaatgaga

SEQ ID NO: 515488 - DNA, 19 bp, Mus musculus
  siRNA target sequence for Stk16 (NM_011494.2,599-617).
gtacactgtggaatgagat

SEQ ID NO: 515489 - DNA, 19 bp, Mus musculus
  siRNA target sequence for Stk16 (NM_011494.2,689-707).
gaggccttgaggctattca

SEQ ID NO: 515490 - DNA, 19 bp, Mus musculus
  siRNA target sequence for Stk16 (NM_011494.2,700-718).
gctattcatgccaaaggtt

SEQ ID NO: 515491 - DNA, 19 bp, Mus musculus
  siRNA target sequence for Stk16 (NM_011494.2,738-756).
gcccaccaatattttgctt

SEQ ID NO: 515492 - DNA, 19 bp, Mus musculus
  siRNA target sequence for Stk16 (NM_011494.2,767-785).
ggcagccagttttaatgga

SEQ ID NO: 515493 - DNA, 19 bp, Mus musculus
  siRNA target sequence for Stk16 (NM_011494.2,786-804).
cttgggttctatgaatcaa

SEQ ID NO: 515494 - DNA, 19 bp, Mus musculus
  siRNA target sequence for Stk16 (NM_011494.2,879-897).
ctaccgggcacctgaactt

SEQ ID NO: 515495 - DNA, 19 bp, Mus musculus
  siRNA target sequence for Stk16 (NM_011494.2,882-900).
ccgggcacctgaacttttt

SEQ ID NO: 515496 - DNA, 19 bp, Mus musculus
  siRNA target sequence for Stk16 (NM_011494.2,883-901).
cgggcacctgaactttttt

SEQ ID NO: 515497 - DNA, 19 bp, Mus musculus
  siRNA target sequence for Stk16 (NM_011494.2,885-903).
ggcacctgaacttttttct

SEQ ID NO: 515498 - DNA, 19 bp, Mus musculus
  siRNA target sequence for Stk16 (NM_011494.2,979-997).
ggggaaggcccttacgata

SEQ ID NO: 515499 - DNA, 19 bp, Mus musculus
  siRNA target sequence for Stk16 (NM_011494.2,980-998).
gggaaggcccttacgatat

SEQ ID NO: 515500 - DNA, 19 bp, Mus musculus
  siRNA target sequence for Stk16 (NM_011494.2,1076-1094).
cagcattgcgacagctatt

SEQ ID NO: 515501 - DNA, 19 bp, Mus musculus
  siRNA target sequence for Stk16 (NM_011494.2,1078-1096).
gcattgcgacagctattgt

SEQ ID NO: 515502 - DNA, 19 bp, Mus musculus
  siRNA target sequence for Stk16 (NM_011494.2,1084-1102).
cgacagctattgtcttcta

SEQ ID NO: 515503 - DNA, 19 bp, Mus musculus
  siRNA target sequence for Stk16 (NM_011494.2,1186-1204).
cagcacaccacccaaatct

SEQ ID NO: 515504 - DNA, 19 bp, Mus musculus
  siRNA target sequence for Stk17b (NM_133810.2,139-157).
gtctcggaggagattcgat

SEQ ID NO: 515505 - DNA, 19 bp, Mus musculus
  siRNA target sequence for Stk17b (NM_133810.2,189-207).
cccctcaaacgccgattaa

SEQ ID NO: 515506 - DNA, 19 bp, Mus musculus
  siRNA target sequence for Stk17b (NM_133810.2,190-208).
ccctcaaacgccgattaaa

SEQ ID NO: 515507 - DNA, 19 bp, Mus musculus
  siRNA target sequence for Stk17b (NM_133810.2,191-209).
cctcaaacgccgattaaaa

SEQ ID NO: 515508 - DNA, 19 bp, Mus musculus
  siRNA target sequence for Stk17b (NM_133810.2,199-217).
gccgattaaaacagagaat

SEQ ID NO: 515509 - DNA, 19 bp, Mus musculus
  siRNA target sequence for Stk17b (NM_133810.2,200-218).
ccgattaaaacagagaatt

SEQ ID NO: 515510 - DNA, 19 bp, Mus musculus
  siRNA target sequence for Stk17b (NM_133810.2,201-219).
cgattaaaacagagaattt

SEQ ID NO: 515511 - DNA, 19 bp, Mus musculus
  siRNA target sequence for Stk17b (NM_133810.2,202-220).
gattaaaacagagaatttt

SEQ ID NO: 515512 - DNA, 19 bp, Mus musculus
  siRNA target sequence for Stk17b (NM_133810.2,269-287).
gctgtggttagacaatgta

SEQ ID NO: 515513 - DNA, 19 bp, Mus musculus
  siRNA target sequence for Stk17b (NM_133810.2,274-292).
ggttagacaatgtatatca

SEQ ID NO: 515514 - DNA, 19 bp, Mus musculus
  siRNA target sequence for Stk17b (NM_133810.2,275-293).
gttagacaatgtatatcaa

SEQ ID NO: 515515 - DNA, 19 bp, Mus musculus
  siRNA target sequence for Stk17b (NM_133810.2,317-335).
gccaaatccctgaaaaaga

SEQ ID NO: 515516 - DNA, 19 bp, Mus musculus
  siRNA target sequence for Stk17b (NM_133810.2,402-420).
cttgtccccacgtgattaa

SEQ ID NO: 515517 - DNA, 19 bp, Mus musculus
  siRNA target sequence for Stk17b (NM_133810.2,405-423).
gtccccacgtgattaatct

SEQ ID NO: 515518 - DNA, 19 bp, Mus musculus
  siRNA target sequence for Stk17b (NM_133810.2,424-442).
gcatgaggtctacgaaaat

SEQ ID NO: 515519 - DNA, 19 bp, Mus musculus
  siRNA target sequence for Stk17b (NM_133810.2,444-462).
caacggaaatcattttggt

SEQ ID NO: 515520 - DNA, 19 bp, Mus musculus
  siRNA target sequence for Stk17b (NM_133810.2,476-494).
gcgggtggagaaattttca

SEQ ID NO: 515521 - DNA, 19 bp, Mus musculus
  siRNA target sequence for Stk17b (NM_133810.2,477-495).
cgggtggagaaattttcaa

SEQ ID NO: 515522 - DNA, 19 bp, Mus musculus
  siRNA target sequence for Stk17b (NM_133810.2,509-527).
gagttagccgaaatggtat

SEQ ID NO: 515523 - DNA, 19 bp, Mus musculus
  siRNA target sequence for Stk17b (NM_133810.2,515-533).
gccgaaatggtatctgaaa

SEQ ID NO: 515524 - DNA, 19 bp, Mus musculus
  siRNA target sequence for Stk17b (NM_133810.2,516-534).
ccgaaatggtatctgaaaa

SEQ ID NO: 515525 - DNA, 19 bp, Mus musculus
  siRNA target sequence for Stk17b (NM_133810.2,517-535).
cgaaatggtatctgaaaat

SEQ ID NO: 515526 - DNA, 19 bp, Mus musculus
  siRNA target sequence for Stk17b (NM_133810.2,562-580).
ccttgaaggagttcattat

SEQ ID NO: 515527 - DNA, 19 bp, Mus musculus
  siRNA target sequence for Stk17b (NM_133810.2,570-588).
gagttcattatctacatca

SEQ ID NO: 515528 - DNA, 19 bp, Mus musculus
  siRNA target sequence for Stk17b (NM_133810.2,575-593).
cattatctacatcagaata

SEQ ID NO: 515529 - DNA, 19 bp, Mus musculus
  siRNA target sequence for Stk17b (NM_133810.2,646-664).
cccactcggggacataaaa

SEQ ID NO: 515530 - DNA, 19 bp, Mus musculus
  siRNA target sequence for Stk17b (NM_133810.2,647-665).
ccactcggggacataaaaa

SEQ ID NO: 515531 - DNA, 19 bp, Mus musculus
  siRNA target sequence for Stk17b (NM_133810.2,648-666).
cactcggggacataaaaat

SEQ ID NO: 515532 - DNA, 19 bp, Mus musculus
  siRNA target sequence for Stk17b (NM_133810.2,652-670).
cggggacataaaaattgta

SEQ ID NO: 515533 - DNA, 19 bp, Mus musculus
  siRNA target sequence for Stk17b (NM_133810.2,654-672).
gggacataaaaattgtaga

SEQ ID NO: 515534 - DNA, 19 bp, Mus musculus
  siRNA target sequence for Stk17b (NM_133810.2,655-673).
ggacataaaaattgtagat

SEQ ID NO: 515535 - DNA, 19 bp, Mus musculus
  siRNA target sequence for Stk17b (NM_133810.2,656-674).
gacataaaaattgtagatt

SEQ ID NO: 515536 - DNA, 19 bp, Mus musculus
  siRNA target sequence for Stk17b (NM_133810.2,686-704).
cgaaaaattgggaatgcaa

SEQ ID NO: 515537 - DNA, 19 bp, Mus musculus
  siRNA target sequence for Stk17b (NM_133810.2,705-723).
gtgagcttcgggaaatcat

SEQ ID NO: 515538 - DNA, 19 bp, Mus musculus
  siRNA target sequence for Stk17b (NM_133810.2,724-742).
gggaacacctgaatactta

SEQ ID NO: 515539 - DNA, 19 bp, Mus musculus
  siRNA target sequence for Stk17b (NM_133810.2,800-818).
ggcataatagcgtatatgt

SEQ ID NO: 515540 - DNA, 19 bp, Mus musculus
  siRNA target sequence for Stk17b (NM_133810.2,801-819).
gcataatagcgtatatgtt

SEQ ID NO: 515541 - DNA, 19 bp, Mus musculus
  siRNA target sequence for Stk17b (NM_133810.2,810-828).
cgtatatgttgttaactca

SEQ ID NO: 515542 - DNA, 19 bp, Mus musculus
  siRNA target sequence for Stk17b (NM_133810.2,811-829).
gtatatgttgttaactcat

SEQ ID NO: 515543 - DNA, 19 bp, Mus musculus
  siRNA target sequence for Stk17b (NM_133810.2,817-835).
gttgttaactcatacatca

SEQ ID NO: 515544 - DNA, 19 bp, Mus musculus
  siRNA target sequence for Stk17b (NM_133810.2,881-899).
caagtgaatgtagattatt

SEQ ID NO: 515545 - DNA, 19 bp, Mus musculus
  siRNA target sequence for Stk17b (NM_133810.2,943-961).
catccagagccttctagta

SEQ ID NO: 515546 - DNA, 19 bp, Mus musculus
  siRNA target sequence for Stk17b (NM_133810.2,1016-1034).
cagcagtgggactttggaa

SEQ ID NO: 515547 - DNA, 19 bp, Mus musculus
  siRNA target sequence for Stk17b (NM_133810.2,1056-1074).
cttcaggctcctctcaaat

SEQ ID NO: 515548 - DNA, 19 bp, Mus musculus
  siRNA target sequence for Stk17b (NM_133810.2,1216-1234).
gcccagcccccatgaactt

SEQ ID NO: 515549 - DNA, 19 bp, Mus musculus
  siRNA target sequence for Stk17b (NM_133810.2,1229-1247).
gaacttgttccagatttgt

SEQ ID NO: 515550 - DNA, 19 bp, Mus musculus
  siRNA target sequence for Stk19 (NM_019442.2,95-113).
ccgtgagagcggatccttt

SEQ ID NO: 515551 - DNA, 19 bp, Mus musculus
  siRNA target sequence for Stk19 (NM_019442.2,96-114).
cgtgagagcggatccttta

SEQ ID NO: 515552 - DNA, 19 bp, Mus musculus
  siRNA target sequence for Stk19 (NM_019442.2,97-115).
gtgagagcggatcctttaa

SEQ ID NO: 515553 - DNA, 19 bp, Mus musculus
  siRNA target sequence for Stk19 (NM_019442.2,99-117).
gagagcggatcctttaaga

SEQ ID NO: 515554 - DNA, 19 bp, Mus musculus
  siRNA target sequence for Stk19 (NM_019442.2,245-263).
cggtggccgacctacaact

SEQ ID NO: 515555 - DNA, 19 bp, Mus musculus
  siRNA target sequence for Stk19 (NM_019442.2,280-298).
ctgggagagatccgaatta

SEQ ID NO: 515556 - DNA, 19 bp, Mus musculus
  siRNA target sequence for Stk19 (NM_019442.2,284-302).
gagagatccgaattatcca

SEQ ID NO: 515557 - DNA, 19 bp, Mus musculus
  siRNA target sequence for Stk19 (NM_019442.2,563-581).
ctggagctgggagattcat

SEQ ID NO: 515558 - DNA, 19 bp, Mus musculus
  siRNA target sequence for Stk19 (NM_019442.2,565-583).
ggagctgggagattcatca

SEQ ID NO: 515559 - DNA, 19 bp, Mus musculus
  siRNA target sequence for Stk19 (NM_019442.2,568-586).
gctgggagattcatcaagt

SEQ ID NO: 515560 - DNA, 19 bp, Mus musculus
  siRNA target sequence for Stk19 (NM_019442.2,772-790).
cttcgcctgccagatacat

SEQ ID NO: 515561 - DNA, 19 bp, Mus musculus
  siRNA target sequence for Stk22a (NM_009435.1,91-109).
gctacatcatggggataaa

SEQ ID NO: 515562 - DNA, 19 bp, Mus musculus
  siRNA target sequence for Stk22a (NM_009435.1,257-275).
gctaaaccaccgctctatt

SEQ ID NO: 515563 - DNA, 19 bp, Mus musculus
  siRNA target sequence for Stk22a (NM_009435.1,309-327).
ggcaaggtctacattgtca

SEQ ID NO: 515564 - DNA, 19 bp, Mus musculus
  siRNA target sequence for Stk22a (NM_009435.1,310-328).
gcaaggtctacattgtcat

SEQ ID NO: 515565 - DNA, 19 bp, Mus musculus
  siRNA target sequence for Stk22a (NM_009435.1,354-372).
ctcgagttcatcaaaacca

SEQ ID NO: 515566 - DNA, 19 bp, Mus musculus
  siRNA target sequence for Stk22a (NM_009435.1,390-408).
gatgatgctcgaaagaagt

SEQ ID NO: 515567 - DNA, 19 bp, Mus musculus
  siRNA target sequence for Stk22a (NM_009435.1,537-555).
cgctgcttgcgggatgata

SEQ ID NO: 515568 - DNA, 19 bp, Mus musculus
  siRNA target sequence for Stk22a (NM_009435.1,539-557).
ctgcttgcgggatgatagt

SEQ ID NO: 515569 - DNA, 19 bp, Mus musculus
  siRNA target sequence for Stk22a (NM_009435.1,552-570).
gatagtggtcgactgatat

SEQ ID NO: 515570 - DNA, 19 bp, Mus musculus
  siRNA target sequence for Stk22a (NM_009435.1,558-576).
ggtcgactgatattaagca

SEQ ID NO: 515571 - DNA, 19 bp, Mus musculus
  siRNA target sequence for Stk22a (NM_009435.1,559-577).
gtcgactgatattaagcaa

SEQ ID NO: 515572 - DNA, 19 bp, Mus musculus
  siRNA target sequence for Stk22a (NM_009435.1,797-815).
cctcatctacagaatgtta

SEQ ID NO: 515573 - DNA, 19 bp, Mus musculus
  siRNA target sequence for Stk22a (NM_009435.1,895-913).
cctctggagccatcaacaa

SEQ ID NO: 515574 - DNA, 19 bp, Mus musculus
  siRNA target sequence for Stk22a (NM_009435.1,955-973).
ctgaacctggtgctgataa

SEQ ID NO: 515575 - DNA, 19 bp, Mus musculus
  siRNA target sequence for Stk22a (NM_009435.1,957-975).
gaacctggtgctgataaga

SEQ ID NO: 515576 - DNA, 19 bp, Mus musculus
  siRNA target sequence for Stk22b (NM_009436.1,89-107).
gctcctacgcaaaagtcaa

SEQ ID NO: 515577 - DNA, 19 bp, Mus musculus
  siRNA target sequence for Stk22b (NM_009436.1,90-108).
ctcctacgcaaaagtcaaa

SEQ ID NO: 515578 - DNA, 19 bp, Mus musculus
  siRNA target sequence for Stk22b (NM_009436.1,93-111).
ctacgcaaaagtcaaatct

SEQ ID NO: 515579 - DNA, 19 bp, Mus musculus
  siRNA target sequence for Stk22b (NM_009436.1,165-183).
gaaaacacccactgacttt

SEQ ID NO: 515580 - DNA, 19 bp, Mus musculus
  siRNA target sequence for Stk22b (NM_009436.1,228-246).
caaccaccgttccatcatt

SEQ ID NO: 515581 - DNA, 19 bp, Mus musculus
  siRNA target sequence for Stk22b (NM_009436.1,272-290).
ctgatggacgcatctacat

SEQ ID NO: 515582 - DNA, 19 bp, Mus musculus
  siRNA target sequence for Stk22b (NM_009436.1,907-925).
gctgattgcaagttggata

SEQ ID NO: 515583 - DNA, 19 bp, Mus musculus
  siRNA target sequence for Stk22b (NM_009436.1,996-1014).
ggtgacacccgagaatgaa

SEQ ID NO: 515584 - DNA, 19 bp, Mus musculus
  siRNA target sequence for Stk23 (NM_019684.1,195-213).
gaccctaaggactattgca

SEQ ID NO: 515585 - DNA, 19 bp, Mus musculus
  siRNA target sequence for Stk23 (NM_019684.1,220-238).
gttactacccagtgaagat

SEQ ID NO: 515586 - DNA, 19 bp, Mus musculus
  siRNA target sequence for Stk23 (NM_019684.1,231-249).
gtgaagatcggtgatttgt

SEQ ID NO: 515587 - DNA, 19 bp, Mus musculus
  siRNA target sequence for Stk23 (NM_019684.1,236-254).
gatcggtgatttgttcaat

SEQ ID NO: 515588 - DNA, 19 bp, Mus musculus
  siRNA target sequence for Stk23 (NM_019684.1,263-281).
ccatgtggtgcgaaagcta

SEQ ID NO: 515589 - DNA, 19 bp, Mus musculus
  siRNA target sequence for Stk23 (NM_019684.1,279-297).
ctaggctggggccatttct

SEQ ID NO: 515590 - DNA, 19 bp, Mus musculus
  siRNA target sequence for Stk23 (NM_019684.1,395-413).
gatcaagctcctgaaatgt

SEQ ID NO: 515591 - DNA, 19 bp, Mus musculus
  siRNA target sequence for Stk23 (NM_019684.1,447-465).
gagaccattgttcaactta

SEQ ID NO: 515592 - DNA, 19 bp, Mus musculus
  siRNA target sequence for Stk23 (NM_019684.1,451-469).
ccattgttcaacttatcga

SEQ ID NO: 515593 - DNA, 19 bp, Mus musculus
  siRNA target sequence for Stk23 (NM_019684.1,479-497).
gatctcaggagtaaatgga

SEQ ID NO: 515594 - DNA, 19 bp, Mus musculus
  siRNA target sequence for Stk23 (NM_019684.1,621-639).
ctggattacctccatacta

SEQ ID NO: 515595 - DNA, 19 bp, Mus musculus
  siRNA target sequence for Stk23 (NM_019684.1,624-642).
gattacctccatactaagt

SEQ ID NO: 515596 - DNA, 19 bp, Mus musculus
  siRNA target sequence for Stk23 (NM_019684.1,633-651).
catactaagtgcaagatca

SEQ ID NO: 515597 - DNA, 19 bp, Mus musculus
  siRNA target sequence for Stk23 (NM_019684.1,1118-1136).
cctctcaggttcatctaat

SEQ ID NO: 515598 - DNA, 19 bp, Mus musculus
  siRNA target sequence for Stk23 (NM_019684.1,1202-1220).
ccctctggagccccaaaat

SEQ ID NO: 515599 - DNA, 19 bp, Mus musculus
  siRNA target sequence for Stk23 (NM_019684.1,1393-1411).
ccactggtgactacctatt

SEQ ID NO: 515600 - DNA, 19 bp, Mus musculus
  siRNA target sequence for Stk23 (NM_019684.1,1500-1518).
gccctctcaggccgatatt

SEQ ID NO: 515601 - DNA, 19 bp, Mus musculus
  siRNA target sequence for Stk23 (NM_019684.1,1502-1520).
cctctcaggccgatattca

SEQ ID NO: 515602 - DNA, 19 bp, Mus musculus
  siRNA target sequence for Stk23 (NM_019684.1,1513-1531).
gatattcacgggagttctt

SEQ ID NO: 515603 - DNA, 19 bp, Mus musculus
  siRNA target sequence for Stk23 (NM_019684.1,1706-1724).
gcatccctggcttaatcca

SEQ ID NO: 515604 - DNA, 19 bp, Mus musculus
  siRNA target sequence for Stk24 (NM_145465.1,181-199).
ccagaagagctttttacca

SEQ ID NO: 515605 - DNA, 19 bp, Mus musculus
  siRNA target sequence for Stk24 (NM_145465.1,224-242).
cttttggtgaagtgttcaa

SEQ ID NO: 515606 - DNA, 19 bp, Mus musculus
  siRNA target sequence for Stk24 (NM_145465.1,235-253).
gtgttcaaaggcattgaca

SEQ ID NO: 515607 - DNA, 19 bp, Mus musculus
  siRNA target sequence for Stk24 (NM_145465.1,362-380).
cctacgtcaccaagtacta

SEQ ID NO: 515608 - DNA, 19 bp, Mus musculus
  siRNA target sequence for Stk24 (NM_145465.1,363-381).
ctacgtcaccaagtactat

SEQ ID NO: 515609 - DNA, 19 bp, Mus musculus
  siRNA target sequence for Stk24 (NM_145465.1,367-385).
gtcaccaagtactatggat

SEQ ID NO: 515610 - DNA, 19 bp, Mus musculus
  siRNA target sequence for Stk24 (NM_145465.1,397-415).
gatactaagttgtggataa

SEQ ID NO: 515611 - DNA, 19 bp, Mus musculus
  siRNA target sequence for Stk24 (NM_145465.1,401-419).
ctaagttgtggataatcat

SEQ ID NO: 515612 - DNA, 19 bp, Mus musculus
  siRNA target sequence for Stk24 (NM_145465.1,440-458).
ctgccctggatctgttaga

SEQ ID NO: 515613 - DNA, 19 bp, Mus musculus
  siRNA target sequence for Stk24 (NM_145465.1,461-479).
ctggccctttagatgaaat

SEQ ID NO: 515614 - DNA, 19 bp, Mus musculus
  siRNA target sequence for Stk24 (NM_145465.1,467-485).
ctttagatgaaattcagat

SEQ ID NO: 515615 - DNA, 19 bp, Mus musculus
  siRNA target sequence for Stk24 (NM_145465.1,483-501).
gattgcaaccatattacga

SEQ ID NO: 515616 - DNA, 19 bp, Mus musculus
  siRNA target sequence for Stk24 (NM_145465.1,491-509).
ccatattacgagaaattct

SEQ ID NO: 515617 - DNA, 19 bp, Mus musculus
  siRNA target sequence for Stk24 (NM_145465.1,630-648).
gacggatacccagatcaaa

SEQ ID NO: 515618 - DNA, 19 bp, Mus musculus
  siRNA target sequence for Stk24 (NM_145465.1,740-758).
gcatcaccgcaatagaact

SEQ ID NO: 515619 - DNA, 19 bp, Mus musculus
  siRNA target sequence for Stk24 (NM_145465.1,790-808).
caccccatgaaggtgttat

SEQ ID NO: 515620 - DNA, 19 bp, Mus musculus
  siRNA target sequence for Stk24 (NM_145465.1,794-812).
ccatgaaggtgttattcct

SEQ ID NO: 515621 - DNA, 19 bp, Mus musculus
  siRNA target sequence for Stk24 (NM_145465.1,914-932).
ctgctaaggaattattgaa

SEQ ID NO: 515622 - DNA, 19 bp, Mus musculus
  siRNA target sequence for Stk24 (NM_145465.1,922-940).
gaattattgaagcacaaat

SEQ ID NO: 515623 - DNA, 19 bp, Mus musculus
  siRNA target sequence for Stk24 (NM_145465.1,949-967).
cgcaatgcaaagaaaacgt

SEQ ID NO: 515624 - DNA, 19 bp, Mus musculus
  siRNA target sequence for Stk24 (NM_145465.1,982-1000).
cttatcgacaggtacaaga

SEQ ID NO: 515625 - DNA, 19 bp, Mus musculus
  siRNA target sequence for Stk24 (NM_145465.1,1090-1108).
ggggactggatcttcacta

SEQ ID NO: 515626 - DNA, 19 bp, Mus musculus
  siRNA target sequence for Stk24 (NM_145465.1,1104-1122).
cactatccgggagaaagat

SEQ ID NO: 515627 - DNA, 19 bp, Mus musculus
  siRNA target sequence for Stk24 (NM_145465.1,1157-1175).
cggacttggaaagaaataa

SEQ ID NO: 515628 - DNA, 19 bp, Mus musculus
  siRNA target sequence for Stk24 (NM_145465.1,1197-1215).
gcctttctctcagtgttta

SEQ ID NO: 515629 - DNA, 19 bp, Mus musculus
  siRNA target sequence for Stk24 (NM_145465.1,1207-1225).
cagtgtttatccacaatca

SEQ ID NO: 515630 - DNA, 19 bp, Mus musculus
  siRNA target sequence for Stk24 (NM_145465.1,1209-1227).
gtgtttatccacaatcatt

SEQ ID NO: 515631 - DNA, 19 bp, Mus musculus
  siRNA target sequence for Stk24 (NM_145465.1,1274-1292).
ggaacttggggtcaataga

SEQ ID NO: 515632 - DNA, 19 bp, Mus musculus
  siRNA target sequence for Stk24 (NM_145465.1,1275-1293).
gaacttggggtcaatagaa

SEQ ID NO: 515633 - DNA, 19 bp, Mus musculus
  siRNA target sequence for Stk24 (NM_145465.1,1369-1387).
cagcggctgcagagatatt

SEQ ID NO: 515634 - DNA, 19 bp, Mus musculus
  siRNA target sequence for Stk24 (NM_145465.1,1371-1389).
gcggctgcagagatattct

SEQ ID NO: 515635 - DNA, 19 bp, Mus musculus
  siRNA target sequence for Stk25 (NM_021537.2,435-453).
gcaccaagctgtggattat

SEQ ID NO: 515636 - DNA, 19 bp, Mus musculus
  siRNA target sequence for Stk25 (NM_021537.2,438-456).
ccaagctgtggattatcat

SEQ ID NO: 515637 - DNA, 19 bp, Mus musculus
  siRNA target sequence for Stk25 (NM_021537.2,503-521).
cccctggaagagacctata

SEQ ID NO: 515638 - DNA, 19 bp, Mus musculus
  siRNA target sequence for Stk25 (NM_021537.2,504-522).
ccctggaagagacctatat

SEQ ID NO: 515639 - DNA, 19 bp, Mus musculus
  siRNA target sequence for Stk25 (NM_021537.2,505-523).
cctggaagagacctatatt

SEQ ID NO: 515640 - DNA, 19 bp, Mus musculus
  siRNA target sequence for Stk25 (NM_021537.2,576-594).
gcaagatccaccgagatat

SEQ ID NO: 515641 - DNA, 19 bp, Mus musculus
  siRNA target sequence for Stk25 (NM_021537.2,802-820).
gggggagccgccaaactct

SEQ ID NO: 515642 - DNA, 19 bp, Mus musculus
  siRNA target sequence for Stk25 (NM_021537.2,1016-1034).
gaacttattgaccgatata

SEQ ID NO: 515643 - DNA, 19 bp, Mus musculus
  siRNA target sequence for Stk3 (NM_019635.1,148-166).
ggcgtccaagagtaagcta

SEQ ID NO: 515644 - DNA, 19 bp, Mus musculus
  siRNA target sequence for Stk3 (NM_019635.1,149-167).
gcgtccaagagtaagctaa

SEQ ID NO: 515645 - DNA, 19 bp, Mus musculus
  siRNA target sequence for Stk3 (NM_019635.1,150-168).
cgtccaagagtaagctaaa

SEQ ID NO: 515646 - DNA, 19 bp, Mus musculus
  siRNA target sequence for Stk3 (NM_019635.1,151-169).
gtccaagagtaagctaaaa

SEQ ID NO: 515647 - DNA, 19 bp, Mus musculus
  siRNA target sequence for Stk3 (NM_019635.1,153-171).
ccaagagtaagctaaaaaa

SEQ ID NO: 515648 - DNA, 19 bp, Mus musculus
  siRNA target sequence for Stk3 (NM_019635.1,173-191).
ctgagtgaagacagtttga

SEQ ID NO: 515649 - DNA, 19 bp, Mus musculus
  siRNA target sequence for Stk3 (NM_019635.1,281-299).
ggtcaagtggttgcaatta

SEQ ID NO: 515650 - DNA, 19 bp, Mus musculus
  siRNA target sequence for Stk3 (NM_019635.1,320-338).
gatcttcaggaaataatca

SEQ ID NO: 515651 - DNA, 19 bp, Mus musculus
  siRNA target sequence for Stk3 (NM_019635.1,348-366).
ccataatgcaacaatgtga

SEQ ID NO: 515652 - DNA, 19 bp, Mus musculus
  siRNA target sequence for Stk3 (NM_019635.1,363-381).
gtgacagtccatatgttgt

SEQ ID NO: 515653 - DNA, 19 bp, Mus musculus
  siRNA target sequence for Stk3 (NM_019635.1,371-389).
ccatatgttgtgaagtact

SEQ ID NO: 515654 - DNA, 19 bp, Mus musculus
  siRNA target sequence for Stk3 (NM_019635.1,441-459).
gagcggggtccgtttcaga

SEQ ID NO: 515655 - DNA, 19 bp, Mus musculus
  siRNA target sequence for Stk3 (NM_019635.1,445-463).
ggggtccgtttcagacata

SEQ ID NO: 515656 - DNA, 19 bp, Mus musculus
  siRNA target sequence for Stk3 (NM_019635.1,446-464).
gggtccgtttcagacataa

SEQ ID NO: 515657 - DNA, 19 bp, Mus musculus
  siRNA target sequence for Stk3 (NM_019635.1,448-466).
gtccgtttcagacataatt

SEQ ID NO: 515658 - DNA, 19 bp, Mus musculus
  siRNA target sequence for Stk3 (NM_019635.1,451-469).
cgtttcagacataattaga

SEQ ID NO: 515659 - DNA, 19 bp, Mus musculus
  siRNA target sequence for Stk3 (NM_019635.1,468-486).
gattgcgaaacaagacatt

SEQ ID NO: 515660 - DNA, 19 bp, Mus musculus
  siRNA target sequence for Stk3 (NM_019635.1,472-490).
gcgaaacaagacattaaca

SEQ ID NO: 515661 - DNA, 19 bp, Mus musculus
  siRNA target sequence for Stk3 (NM_019635.1,497-515).
gaaattgcaactattctaa

SEQ ID NO: 515662 - DNA, 19 bp, Mus musculus
  siRNA target sequence for Stk3 (NM_019635.1,530-548).
ggattagaatatttgcatt

SEQ ID NO: 515663 - DNA, 19 bp, Mus musculus
  siRNA target sequence for Stk3 (NM_019635.1,531-549).
gattagaatatttgcattt

SEQ ID NO: 515664 - DNA, 19 bp, Mus musculus
  siRNA target sequence for Stk3 (NM_019635.1,629-647).
ggagtggctggccagttaa

SEQ ID NO: 515665 - DNA, 19 bp, Mus musculus
  siRNA target sequence for Stk3 (NM_019635.1,634-652).
ggctggccagttaacagat

SEQ ID NO: 515666 - DNA, 19 bp, Mus musculus
  siRNA target sequence for Stk3 (NM_019635.1,639-657).
gccagttaacagatacaat

SEQ ID NO: 515667 - DNA, 19 bp, Mus musculus
  siRNA target sequence for Stk3 (NM_019635.1,659-677).
gcaaaacgcaacactgtaa

SEQ ID NO: 515668 - DNA, 19 bp, Mus musculus
  siRNA target sequence for Stk3 (NM_019635.1,660-678).
caaaacgcaacactgtaat

SEQ ID NO: 515669 - DNA, 19 bp, Mus musculus
  siRNA target sequence for Stk3 (NM_019635.1,713-731).
caagaaataggttacaact

SEQ ID NO: 515670 - DNA, 19 bp, Mus musculus
  siRNA target sequence for Stk3 (NM_019635.1,748-766).
gtcccttggcattacttct

SEQ ID NO: 515671 - DNA, 19 bp, Mus musculus
  siRNA target sequence for Stk3 (NM_019635.1,751-769).
ccttggcattacttctata

SEQ ID NO: 515672 - DNA, 19 bp, Mus musculus
  siRNA target sequence for Stk3 (NM_019635.1,789-807).
ctccttatgctgatataca

SEQ ID NO: 515673 - DNA, 19 bp, Mus musculus
  siRNA target sequence for Stk3 (NM_019635.1,806-824).
catccgatgagggctattt

SEQ ID NO: 515674 - DNA, 19 bp, Mus musculus
  siRNA target sequence for Stk3 (NM_019635.1,881-899).
gacttcaccgattttgtga

SEQ ID NO: 515675 - DNA, 19 bp, Mus musculus
  siRNA target sequence for Stk3 (NM_019635.1,974-992).
gcaaaacccgtgtcgatat

SEQ ID NO: 515676 - DNA, 19 bp, Mus musculus
  siRNA target sequence for Stk3 (NM_019635.1,975-993).
caaaacccgtgtcgatatt

SEQ ID NO: 515677 - DNA, 19 bp, Mus musculus
  siRNA target sequence for Stk3 (NM_019635.1,981-999).
ccgtgtcgatattaagaga

SEQ ID NO: 515678 - DNA, 19 bp, Mus musculus
  siRNA target sequence for Stk3 (NM_019635.1,1170-1188).
gagcccagacgatgattga

SEQ ID NO: 515679 - DNA, 19 bp, Mus musculus
  siRNA target sequence for Stk3 (NM_019635.1,1214-1232).
gacctggggaccatggtta

SEQ ID NO: 515680 - DNA, 19 bp, Mus musculus
  siRNA target sequence for Stk3 (NM_019635.1,1273-1291).
ggaggacggaactatgaaa

SEQ ID NO: 515681 - DNA, 19 bp, Mus musculus
  siRNA target sequence for Stk3 (NM_019635.1,1279-1297).
cggaactatgaaaagaaat

SEQ ID NO: 515682 - DNA, 19 bp, Mus musculus
  siRNA target sequence for Stk3 (NM_019635.1,1299-1317).
caacgtcacctcaagtaca

SEQ ID NO: 515683 - DNA, 19 bp, Mus musculus
  siRNA target sequence for Stk3 (NM_019635.1,1303-1321).
gtcacctcaagtacaaaga

SEQ ID NO: 515684 - DNA, 19 bp, Mus musculus
  siRNA target sequence for Stk3 (NM_019635.1,1366-1384).
gagtcatgaaaattgtgat

SEQ ID NO: 515685 - DNA, 19 bp, Mus musculus
  siRNA target sequence for Stk3 (NM_019635.1,1406-1424).
cctatgtccaacagtgttt

SEQ ID NO: 515686 - DNA, 19 bp, Mus musculus
  siRNA target sequence for Stk32 (NM_022416.1,319-337).
gaacgaagaagtcaacttt

SEQ ID NO: 515687 - DNA, 19 bp, Mus musculus
  siRNA target sequence for Stk32 (NM_022416.1,639-657).
ggaccgtgaagctgtacat

SEQ ID NO: 515688 - DNA, 19 bp, Mus musculus
  siRNA target sequence for Stk32 (NM_022416.1,936-954).
gaggctggaggccatatga

SEQ ID NO: 515689 - DNA, 19 bp, Mus musculus
  siRNA target sequence for Stk32 (NM_022416.1,939-957).
gctggaggccatatgagat

SEQ ID NO: 515690 - DNA, 19 bp, Mus musculus
  siRNA target sequence for Stk32 (NM_022416.1,963-981).
cagccacacccattgatga

SEQ ID NO: 515691 - DNA, 19 bp, Mus musculus
  siRNA target sequence for Stk32 (NM_022416.1,977-995).
gatgagattctcaacatgt

SEQ ID NO: 515692 - DNA, 19 bp, Mus musculus
  siRNA target sequence for Stk32 (NM_022416.1,980-998).
gagattctcaacatgttca

SEQ ID NO: 515693 - DNA, 19 bp, Mus musculus
  siRNA target sequence for Stk32 (NM_022416.1,1076-1094).
cctgagagccgcttgtcaa

SEQ ID NO: 515694 - DNA, 19 bp, Mus musculus
  siRNA target sequence for Stk32 (NM_022416.1,1081-1099).
gagccgcttgtcaagtctt

SEQ ID NO: 515695 - DNA, 19 bp, Mus musculus
  siRNA target sequence for Stk32 (NM_022416.1,1242-1260).
ccaagccacttcacaaaaa

SEQ ID NO: 515696 - DNA, 19 bp, Mus musculus
  siRNA target sequence for Stk32 (NM_022416.1,1323-1341).
gacacctgcagcagtgttt

SEQ ID NO: 515697 - DNA, 19 bp, Mus musculus
  siRNA target sequence for Stk32 (NM_022416.1,1343-1361).
gagacagtgcggaaagagt

SEQ ID NO: 515698 - DNA, 19 bp, Mus musculus
  siRNA target sequence for Stk32 (NM_022416.1,1351-1369).
gcggaaagagttcatcata

SEQ ID NO: 515699 - DNA, 19 bp, Mus musculus
  siRNA target sequence for Stk32 (NM_022416.1,1462-1480).
gcaggatggtcgaaacaat

SEQ ID NO: 515700 - DNA, 19 bp, Mus musculus
  siRNA target sequence for Stk32 (NM_022416.1,1463-1481).
caggatggtcgaaacaata

SEQ ID NO: 515701 - DNA, 19 bp, Mus musculus
  siRNA target sequence for Stk32 (NM_022416.1,1466-1484).
gatggtcgaaacaataaca

SEQ ID NO: 515702 - DNA, 19 bp, Mus musculus
  siRNA target sequence for Stk38 (NM_134115.1,252-270).
cttgctcatccatgagtaa

SEQ ID NO: 515703 - DNA, 19 bp, Mus musculus
  siRNA target sequence for Stk38 (NM_134115.1,255-273).
gctcatccatgagtaatca

SEQ ID NO: 515704 - DNA, 19 bp, Mus musculus
  siRNA target sequence for Stk38 (NM_134115.1,256-274).
ctcatccatgagtaatcat

SEQ ID NO: 515705 - DNA, 19 bp, Mus musculus
  siRNA target sequence for Stk38 (NM_134115.1,261-279).
ccatgagtaatcatacgaa

SEQ ID NO: 515706 - DNA, 19 bp, Mus musculus
  siRNA target sequence for Stk38 (NM_134115.1,276-294).
cgaaggagagggtgacaat

SEQ ID NO: 515707 - DNA, 19 bp, Mus musculus
  siRNA target sequence for Stk38 (NM_134115.1,328-346).
ccttatcgctcaacatgaa

SEQ ID NO: 515708 - DNA, 19 bp, Mus musculus
  siRNA target sequence for Stk38 (NM_134115.1,350-368).
cgagaaatgagacaaaaga

SEQ ID NO: 515709 - DNA, 19 bp, Mus musculus
  siRNA target sequence for Stk38 (NM_134115.1,431-449).
gcgcacgctcggaaggaaa

SEQ ID NO: 515710 - DNA, 19 bp, Mus musculus
  siRNA target sequence for Stk38 (NM_134115.1,511-529).
cataggccgaggagcattt

SEQ ID NO: 515711 - DNA, 19 bp, Mus musculus
  siRNA target sequence for Stk38 (NM_134115.1,564-582).
ggcatgtgtacgcaatgaa

SEQ ID NO: 515712 - DNA, 19 bp, Mus musculus
  siRNA target sequence for Stk38 (NM_134115.1,565-583).
gcatgtgtacgcaatgaaa

SEQ ID NO: 515713 - DNA, 19 bp, Mus musculus
  siRNA target sequence for Stk38 (NM_134115.1,566-584).
catgtgtacgcaatgaaaa

SEQ ID NO: 515714 - DNA, 19 bp, Mus musculus
  siRNA target sequence for Stk38 (NM_134115.1,633-651).
gtgcggagcgtgacattct

SEQ ID NO: 515715 - DNA, 19 bp, Mus musculus
  siRNA target sequence for Stk38 (NM_134115.1,636-654).
cggagcgtgacattctagt

SEQ ID NO: 515716 - DNA, 19 bp, Mus musculus
  siRNA target sequence for Stk38 (NM_134115.1,653-671).
gtggaggcagacagtttgt

SEQ ID NO: 515717 - DNA, 19 bp, Mus musculus
  siRNA target sequence for Stk38 (NM_134115.1,788-806).
gaggagactcagttttata

SEQ ID NO: 515718 - DNA, 19 bp, Mus musculus
  siRNA target sequence for Stk38 (NM_134115.1,790-808).
ggagactcagttttatata

SEQ ID NO: 515719 - DNA, 19 bp, Mus musculus
  siRNA target sequence for Stk38 (NM_134115.1,848-866).
ggattcatccacagagata

SEQ ID NO: 515720 - DNA, 19 bp, Mus musculus
  siRNA target sequence for Stk38 (NM_134115.1,894-912).
gcaagggccatgtgaaact

SEQ ID NO: 515721 - DNA, 19 bp, Mus musculus
  siRNA target sequence for Stk38 (NM_134115.1,895-913).
caagggccatgtgaaactt

SEQ ID NO: 515722 - DNA, 19 bp, Mus musculus
  siRNA target sequence for Stk38 (NM_134115.1,1146-1164).
ggtcgctcggggtaatcat

SEQ ID NO: 515723 - DNA, 19 bp, Mus musculus
  siRNA target sequence for Stk38 (NM_134115.1,1149-1167).
cgctcggggtaatcatgta

SEQ ID NO: 515724 - DNA, 19 bp, Mus musculus
  siRNA target sequence for Stk38 (NM_134115.1,1150-1168).
gctcggggtaatcatgtat

SEQ ID NO: 515725 - DNA, 19 bp, Mus musculus
  siRNA target sequence for Stk38 (NM_134115.1,1155-1173).
gggtaatcatgtatgagat

SEQ ID NO: 515726 - DNA, 19 bp, Mus musculus
  siRNA target sequence for Stk38 (NM_134115.1,1338-1356).
cccctggagttgaagaaat

SEQ ID NO: 515727 - DNA, 19 bp, Mus musculus
  siRNA target sequence for Stk38 (NM_134115.1,1407-1425).
gaccagctgcgatatctat

SEQ ID NO: 515728 - DNA, 19 bp, Mus musculus
  siRNA target sequence for Stk38 (NM_134115.1,1410-1428).
cagctgcgatatctattga

SEQ ID NO: 515729 - DNA, 19 bp, Mus musculus
  siRNA target sequence for Stk38 (NM_134115.1,1412-1430).
gctgcgatatctattgaaa

SEQ ID NO: 515730 - DNA, 19 bp, Mus musculus
  siRNA target sequence for Stk38 (NM_134115.1,1413-1431).
ctgcgatatctattgaaat

SEQ ID NO: 515731 - DNA, 19 bp, Mus musculus
  siRNA target sequence for Stk38 (NM_134115.1,1415-1433).
gcgatatctattgaaatca

SEQ ID NO: 515732 - DNA, 19 bp, Mus musculus
  siRNA target sequence for Stk38 (NM_134115.1,1450-1468).
ctcaaacttcgatgaattt

SEQ ID NO: 515733 - DNA, 19 bp, Mus musculus
  siRNA target sequence for Stk38 (NM_134115.1,1490-1508).
cccacagtgaccacaagta

SEQ ID NO: 515734 - DNA, 19 bp, Mus musculus
  siRNA target sequence for Stk38 (NM_134115.1,1544-1562).
gtcttcatcaattacacat

SEQ ID NO: 515735 - DNA, 19 bp, Mus musculus
  siRNA target sequence for Stk38 (NM_134115.1,1595-1613).
gccataccttcgtacatga

SEQ ID NO: 515736 - DNA, 19 bp, Mus musculus
  siRNA target sequence for Stk38 (NM_134115.1,1596-1614).
ccataccttcgtacatgaa

SEQ ID NO: 515737 - DNA, 19 bp, Mus musculus
  siRNA target sequence for Stk38 (NM_134115.1,1597-1615).
cataccttcgtacatgaaa

SEQ ID NO: 515738 - DNA, 19 bp, Mus musculus
  siRNA target sequence for Stk38 (NM_134115.1,1606-1624).
gtacatgaaagcagcaaaa

SEQ ID NO: 515739 - DNA, 19 bp, Mus musculus
  siRNA target sequence for Stk38l (NM_172734.2,70-88).
gcaacaactacctttccta

SEQ ID NO: 515740 - DNA, 19 bp, Mus musculus
  siRNA target sequence for Stk38l (NM_172734.2,185-203).
ggcagaagaagttagaagt

SEQ ID NO: 515741 - DNA, 19 bp, Mus musculus
  siRNA target sequence for Stk38l (NM_172734.2,195-213).
gttagaagtggctatggaa

SEQ ID NO: 515742 - DNA, 19 bp, Mus musculus
  siRNA target sequence for Stk38l (NM_172734.2,254-272).
cgcagcatgctcgtaaaga

SEQ ID NO: 515743 - DNA, 19 bp, Mus musculus
  siRNA target sequence for Stk38l (NM_172734.2,255-273).
gcagcatgctcgtaaagaa

SEQ ID NO: 515744 - DNA, 19 bp, Mus musculus
  siRNA target sequence for Stk38l (NM_172734.2,277-295).
gagttcttacgccttaaga

SEQ ID NO: 515745 - DNA, 19 bp, Mus musculus
  siRNA target sequence for Stk38l (NM_172734.2,307-325).
ggcctagatgactttgagt

SEQ ID NO: 515746 - DNA, 19 bp, Mus musculus
  siRNA target sequence for Stk38l (NM_172734.2,391-409).
cacatctatgccatgaaga

SEQ ID NO: 515747 - DNA, 19 bp, Mus musculus
  siRNA target sequence for Stk38l (NM_172734.2,457-475).
cgagcagaaagggacattt

SEQ ID NO: 515748 - DNA, 19 bp, Mus musculus
  siRNA target sequence for Stk38l (NM_172734.2,458-476).
gagcagaaagggacatttt

SEQ ID NO: 515749 - DNA, 19 bp, Mus musculus
  siRNA target sequence for Stk38l (NM_172734.2,525-543).
ggacaaacggaatctctat

SEQ ID NO: 515750 - DNA, 19 bp, Mus musculus
  siRNA target sequence for Stk38l (NM_172734.2,597-615).
ggacaccttaacagaagaa

SEQ ID NO: 515751 - DNA, 19 bp, Mus musculus
  siRNA target sequence for Stk38l (NM_172734.2,616-634).
gagacacagttctacatct

SEQ ID NO: 515752 - DNA, 19 bp, Mus musculus
  siRNA target sequence for Stk38l (NM_172734.2,639-657).
gactgtcttggcgatagat

SEQ ID NO: 515753 - DNA, 19 bp, Mus musculus
  siRNA target sequence for Stk38l (NM_172734.2,645-663).
cttggcgatagatgcaatt

SEQ ID NO: 515754 - DNA, 19 bp, Mus musculus
  siRNA target sequence for Stk38l (NM_172734.2,691-709).
gtcaaaccagacaaccttt

SEQ ID NO: 515755 - DNA, 19 bp, Mus musculus
  siRNA target sequence for Stk38l (NM_172734.2,718-736).
gccaagggacatgtaaaat

SEQ ID NO: 515756 - DNA, 19 bp, Mus musculus
  siRNA target sequence for Stk38l (NM_172734.2,719-737).
ccaagggacatgtaaaatt

SEQ ID NO: 515757 - DNA, 19 bp, Mus musculus
  siRNA target sequence for Stk38l (NM_172734.2,725-743).
gacatgtaaaattatctga

SEQ ID NO: 515758 - DNA, 19 bp, Mus musculus
  siRNA target sequence for Stk38l (NM_172734.2,811-829).
ccgccaagcgacttctcat

SEQ ID NO: 515759 - DNA, 19 bp, Mus musculus
  siRNA target sequence for Stk38l (NM_172734.2,812-830).
cgccaagcgacttctcatt

SEQ ID NO: 515760 - DNA, 19 bp, Mus musculus
  siRNA target sequence for Stk38l (NM_172734.2,813-831).
gccaagcgacttctcattt

SEQ ID NO: 515761 - DNA, 19 bp, Mus musculus
  siRNA target sequence for Stk38l (NM_172734.2,818-836).
gcgacttctcatttcagaa

SEQ ID NO: 515762 - DNA, 19 bp, Mus musculus
  siRNA target sequence for Stk38l (NM_172734.2,969-987).
gtggtccttgggagtgatt

SEQ ID NO: 515763 - DNA, 19 bp, Mus musculus
  siRNA target sequence for Stk38l (NM_172734.2,971-989).
ggtccttgggagtgattat

SEQ ID NO: 515764 - DNA, 19 bp, Mus musculus
  siRNA target sequence for Stk38l (NM_172734.2,1117-1135).
gacttgattctcagatttt

SEQ ID NO: 515765 - DNA, 19 bp, Mus musculus
  siRNA target sequence for Stk38l (NM_172734.2,1130-1148).
gattttgtactgattctga

SEQ ID NO: 515766 - DNA, 19 bp, Mus musculus
  siRNA target sequence for Stk38l (NM_172734.2,1227-1245).
ggaaagaccagcagctatt

SEQ ID NO: 515767 - DNA, 19 bp, Mus musculus
  siRNA target sequence for Stk38l (NM_172734.2,1232-1250).
gaccagcagctattcctat

SEQ ID NO: 515768 - DNA, 19 bp, Mus musculus
  siRNA target sequence for Stk38l (NM_172734.2,1293-1311).
ccctgagtctgatatctta

SEQ ID NO: 515769 - DNA, 19 bp, Mus musculus
  siRNA target sequence for Stk38l (NM_172734.2,1312-1330).
cagccagtgccgaatacca

SEQ ID NO: 515770 - DNA, 19 bp, Mus musculus
  siRNA target sequence for Stk38l (NM_172734.2,1328-1346).
ccacagagcccgactacaa

SEQ ID NO: 515771 - DNA, 19 bp, Mus musculus
  siRNA target sequence for Stk38l (NM_172734.2,1329-1347).
cacagagcccgactacaaa

SEQ ID NO: 515772 - DNA, 19 bp, Mus musculus
  siRNA target sequence for Stk38l (NM_172734.2,1333-1351).
gagcccgactacaaatcca

SEQ ID NO: 515773 - DNA, 19 bp, Mus musculus
  siRNA target sequence for Stk38l (NM_172734.2,1335-1353).
gcccgactacaaatccaaa

SEQ ID NO: 515774 - DNA, 19 bp, Mus musculus
  siRNA target sequence for Stk38l (NM_172734.2,1354-1372).
gactgggtttttctcaatt

SEQ ID NO: 515775 - DNA, 19 bp, Mus musculus
  siRNA target sequence for Stk38l (NM_172734.2,1425-1443).
catgaaagctgggaagtta

SEQ ID NO: 515776 - DNA, 19 bp, Mus musculus
  siRNA target sequence for Stk4 (NM_021420.2,65-83).
ccgcgcaggcagctgaaaa

SEQ ID NO: 515777 - DNA, 19 bp, Mus musculus
  siRNA target sequence for Stk4 (NM_021420.2,66-84).
cgcgcaggcagctgaaaaa

SEQ ID NO: 515778 - DNA, 19 bp, Mus musculus
  siRNA target sequence for Stk4 (NM_021420.2,85-103).
gttggatgaagatagttta

SEQ ID NO: 515779 - DNA, 19 bp, Mus musculus
  siRNA target sequence for Stk4 (NM_021420.2,89-107).
gatgaagatagtttaacca

SEQ ID NO: 515780 - DNA, 19 bp, Mus musculus
  siRNA target sequence for Stk4 (NM_021420.2,112-130).
gcccgaggaagtgtttgat

SEQ ID NO: 515781 - DNA, 19 bp, Mus musculus
  siRNA target sequence for Stk4 (NM_021420.2,156-174).
cttatggcagcgtgtacaa

SEQ ID NO: 515782 - DNA, 19 bp, Mus musculus
  siRNA target sequence for Stk4 (NM_021420.2,165-183).
gcgtgtacaaggctattca

SEQ ID NO: 515783 - DNA, 19 bp, Mus musculus
  siRNA target sequence for Stk4 (NM_021420.2,166-184).
cgtgtacaaggctattcat

SEQ ID NO: 515784 - DNA, 19 bp, Mus musculus
  siRNA target sequence for Stk4 (NM_021420.2,195-213).
gccagattgttgcaatcaa

SEQ ID NO: 515785 - DNA, 19 bp, Mus musculus
  siRNA target sequence for Stk4 (NM_021420.2,231-249).
cggacctgcaggagataat

SEQ ID NO: 515786 - DNA, 19 bp, Mus musculus
  siRNA target sequence for Stk4 (NM_021420.2,282-300).
gccctcacgtagtcaagta

SEQ ID NO: 515787 - DNA, 19 bp, Mus musculus
  siRNA target sequence for Stk4 (NM_021420.2,283-301).
ccctcacgtagtcaagtat

SEQ ID NO: 515788 - DNA, 19 bp, Mus musculus
  siRNA target sequence for Stk4 (NM_021420.2,284-302).
cctcacgtagtcaagtatt

SEQ ID NO: 515789 - DNA, 19 bp, Mus musculus
  siRNA target sequence for Stk4 (NM_021420.2,349-367).
ctgtggggctggttctgta

SEQ ID NO: 515790 - DNA, 19 bp, Mus musculus
  siRNA target sequence for Stk4 (NM_021420.2,356-374).
gctggttctgtatctgata

SEQ ID NO: 515791 - DNA, 19 bp, Mus musculus
  siRNA target sequence for Stk4 (NM_021420.2,416-434).
gctacaatattacaatcaa

SEQ ID NO: 515792 - DNA, 19 bp, Mus musculus
  siRNA target sequence for Stk4 (NM_021420.2,435-453).
ctcttaagggactagaata

SEQ ID NO: 515793 - DNA, 19 bp, Mus musculus
  siRNA target sequence for Stk4 (NM_021420.2,482-500).
gatatcaaggcgggaaata

SEQ ID NO: 515794 - DNA, 19 bp, Mus musculus
  siRNA target sequence for Stk4 (NM_021420.2,547-565).
cgcaggtcaacttacagat

SEQ ID NO: 515795 - DNA, 19 bp, Mus musculus
  siRNA target sequence for Stk4 (NM_021420.2,552-570).
gtcaacttacagataccat

SEQ ID NO: 515796 - DNA, 19 bp, Mus musculus
  siRNA target sequence for Stk4 (NM_021420.2,658-676).
ctggtctctgggaataact

SEQ ID NO: 515797 - DNA, 19 bp, Mus musculus
  siRNA target sequence for Stk4 (NM_021420.2,702-720).
ccccatatgctgatatcca

SEQ ID NO: 515798 - DNA, 19 bp, Mus musculus
  siRNA target sequence for Stk4 (NM_021420.2,703-721).
cccatatgctgatatccat

SEQ ID NO: 515799 - DNA, 19 bp, Mus musculus
  siRNA target sequence for Stk4 (NM_021420.2,719-737).
catccaatgagggcaatat

SEQ ID NO: 515800 - DNA, 19 bp, Mus musculus
  siRNA target sequence for Stk4 (NM_021420.2,723-741).
caatgagggcaatattcat

SEQ ID NO: 515801 - DNA, 19 bp, Mus musculus
  siRNA target sequence for Stk4 (NM_021420.2,727-745).
gagggcaatattcatgatt

SEQ ID NO: 515802 - DNA, 19 bp, Mus musculus
  siRNA target sequence for Stk4 (NM_021420.2,731-749).
gcaatattcatgattccta

SEQ ID NO: 515803 - DNA, 19 bp, Mus musculus
  siRNA target sequence for Stk4 (NM_021420.2,863-881).
ctacagcacccgtttgtta

SEQ ID NO: 515804 - DNA, 19 bp, Mus musculus
  siRNA target sequence for Stk4 (NM_021420.2,866-884).
cagcacccgtttgttaaga

SEQ ID NO: 515805 - DNA, 19 bp, Mus musculus
  siRNA target sequence for Stk4 (NM_021420.2,868-886).
gcacccgtttgttaagagt

SEQ ID NO: 515806 - DNA, 19 bp, Mus musculus
  siRNA target sequence for Stk4 (NM_021420.2,888-906).
ccaaaggagtgtcaatatt

SEQ ID NO: 515807 - DNA, 19 bp, Mus musculus
  siRNA target sequence for Stk4 (NM_021420.2,898-916).
gtcaatattgcgagactta

SEQ ID NO: 515808 - DNA, 19 bp, Mus musculus
  siRNA target sequence for Stk4 (NM_021420.2,926-944).
gccatggatgtgaaactga

SEQ ID NO: 515809 - DNA, 19 bp, Mus musculus
  siRNA target sequence for Stk4 (NM_021420.2,927-945).
ccatggatgtgaaactgaa

SEQ ID NO: 515810 - DNA, 19 bp, Mus musculus
  siRNA target sequence for Stk4 (NM_021420.2,1080-1098).
gcggaggagccaatactat

SEQ ID NO: 515811 - DNA, 19 bp, Mus musculus
  siRNA target sequence for Stk4 (NM_021420.2,1082-1100).
ggaggagccaatactatga

SEQ ID NO: 515812 - DNA, 19 bp, Mus musculus
  siRNA target sequence for Stk4 (NM_021420.2,1083-1101).
gaggagccaatactatgat

SEQ ID NO: 515813 - DNA, 19 bp, Mus musculus
  siRNA target sequence for Stk4 (NM_021420.2,1086-1104).
gagccaatactatgattga

SEQ ID NO: 515814 - DNA, 19 bp, Mus musculus
  siRNA target sequence for Stk4 (NM_021420.2,1214-1232).
ccgtctttccttgaatact

SEQ ID NO: 515815 - DNA, 19 bp, Mus musculus
  siRNA target sequence for Stk4 (NM_021420.2,1215-1233).
cgtctttccttgaatactt

SEQ ID NO: 515816 - DNA, 19 bp, Mus musculus
  siRNA target sequence for Stk4 (NM_021420.2,1218-1236).
ctttccttgaatactttga

SEQ ID NO: 515817 - DNA, 19 bp, Mus musculus
  siRNA target sequence for Stk4 (NM_021420.2,1222-1240).
ccttgaatactttgaacaa

SEQ ID NO: 515818 - DNA, 19 bp, Mus musculus
  siRNA target sequence for Stk4 (NM_021420.2,1286-1304).
ggctctctgaagaattctt

SEQ ID NO: 515819 - DNA, 19 bp, Mus musculus
  siRNA target sequence for Stk4 (NM_021420.2,1322-1340).
caggatggagactatgagt

SEQ ID NO: 515820 - DNA, 19 bp, Mus musculus
  siRNA target sequence for Stk4 (NM_021420.2,1329-1347).
gagactatgagtttctcaa

SEQ ID NO: 515821 - DNA, 19 bp, Mus musculus
  siRNA target sequence for Syk (NM_011518.1,507-525).
ccacctgacctactttttt

SEQ ID NO: 515822 - DNA, 19 bp, Mus musculus
  siRNA target sequence for Syk (NM_011518.1,668-686).
ccatcgagagggaacttaa

SEQ ID NO: 515823 - DNA, 19 bp, Mus musculus
  siRNA target sequence for Syk (NM_011518.1,669-687).
catcgagagggaacttaat

SEQ ID NO: 515824 - DNA, 19 bp, Mus musculus
  siRNA target sequence for Syk (NM_011518.1,855-873).
catcagggaatatgtgaaa

SEQ ID NO: 515825 - DNA, 19 bp, Mus musculus
  siRNA target sequence for Syk (NM_011518.1,1027-1045).
gggtcaaagaccaatggaa

SEQ ID NO: 515826 - DNA, 19 bp, Mus musculus
  siRNA target sequence for Syk (NM_011518.1,1095-1113).
gctgcacgaagggaaagta

SEQ ID NO: 515827 - DNA, 19 bp, Mus musculus
  siRNA target sequence for Syk (NM_011518.1,1096-1114).
ctgcacgaagggaaagtat

SEQ ID NO: 515828 - DNA, 19 bp, Mus musculus
  siRNA target sequence for Syk (NM_011518.1,1187-1205).
ggcagctagtggaacatta

SEQ ID NO: 515829 - DNA, 19 bp, Mus musculus
  siRNA target sequence for Syk (NM_011518.1,1189-1207).
cagctagtggaacattact

SEQ ID NO: 515830 - DNA, 19 bp, Mus musculus
  siRNA target sequence for Syk (NM_011518.1,1191-1209).
gctagtggaacattactct

SEQ ID NO: 515831 - DNA, 19 bp, Mus musculus
  siRNA target sequence for Syk (NM_011518.1,1192-1210).
ctagtggaacattactctt

SEQ ID NO: 515832 - DNA, 19 bp, Mus musculus
  siRNA target sequence for Syk (NM_011518.1,1215-1233).
gccagatgggctactaaga

SEQ ID NO: 515833 - DNA, 19 bp, Mus musculus
  siRNA target sequence for Syk (NM_011518.1,1241-1259).
cggtaccatgccaaaagat

SEQ ID NO: 515834 - DNA, 19 bp, Mus musculus
  siRNA target sequence for Syk (NM_011518.1,1242-1260).
ggtaccatgccaaaagatt

SEQ ID NO: 515835 - DNA, 19 bp, Mus musculus
  siRNA target sequence for Syk (NM_011518.1,1310-1328).
ggtcaccgggtggaataat

SEQ ID NO: 515836 - DNA, 19 bp, Mus musculus
  siRNA target sequence for Syk (NM_011518.1,1315-1333).
ccgggtggaataatctcaa

SEQ ID NO: 515837 - DNA, 19 bp, Mus musculus
  siRNA target sequence for Syk (NM_011518.1,1355-1373).
caaagcctggccacaaaaa

SEQ ID NO: 515838 - DNA, 19 bp, Mus musculus
  siRNA target sequence for Syk (NM_011518.1,1497-1515).
gtacgagagcccttatgct

SEQ ID NO: 515839 - DNA, 19 bp, Mus musculus
  siRNA target sequence for Syk (NM_011518.1,1617-1635).
gggatactaccaaatgaaa

SEQ ID NO: 515840 - DNA, 19 bp, Mus musculus
  siRNA target sequence for Syk (NM_011518.1,1623-1641).
ctaccaaatgaaaaaagtt

SEQ ID NO: 515841 - DNA, 19 bp, Mus musculus
  siRNA target sequence for Syk (NM_011518.1,1837-1855).
cagcagaacaggcacatta

SEQ ID NO: 515842 - DNA, 19 bp, Mus musculus
  siRNA target sequence for Syk (NM_011518.1,1842-1860).
gaacaggcacattaaggat

SEQ ID NO: 515843 - DNA, 19 bp, Mus musculus
  siRNA target sequence for Syk (NM_011518.1,1988-2006).
gcgatttcggtctttccaa

SEQ ID NO: 515844 - DNA, 19 bp, Mus musculus
  siRNA target sequence for Syk (NM_011518.1,1989-2007).
cgatttcggtctttccaaa

SEQ ID NO: 515845 - DNA, 19 bp, Mus musculus
  siRNA target sequence for Syk (NM_011518.1,2008-2026).
gccctgcgtgctgatgaaa

SEQ ID NO: 515846 - DNA, 19 bp, Mus musculus
  siRNA target sequence for Syk (NM_011518.1,2015-2033).
gtgctgatgaaaactacta

SEQ ID NO: 515847 - DNA, 19 bp, Mus musculus
  siRNA target sequence for Syk (NM_011518.1,2084-2102).
gcatcaactactacaagtt

SEQ ID NO: 515848 - DNA, 19 bp, Mus musculus
  siRNA target sequence for Syk (NM_011518.1,2243-2261).
gatgcccgagagagatgta

SEQ ID NO: 515849 - DNA, 19 bp, Mus musculus
  siRNA target sequence for Syk (NM_011518.1,2274-2292).
cctgtgctggacttacgat

SEQ ID NO: 515850 - DNA, 19 bp, Mus musculus
  siRNA target sequence for Syk (NM_011518.1,2326-2344).
ctgaggcttcgcaattact

SEQ ID NO: 515851 - DNA, 19 bp, Mus musculus
  siRNA target sequence for Syk (NM_011518.1,2330-2348).
ggcttcgcaattactacta

SEQ ID NO: 515852 - DNA, 19 bp, Mus musculus
  siRNA target sequence for Sytl1 (NM_031393.1,1094-1112).
gtgaagaaacggaatctga

SEQ ID NO: 515853 - DNA, 19 bp, Mus musculus
  siRNA target sequence for Sytl1 (NM_031393.1,1339-1357).
gtctctgtcccttaagtat

SEQ ID NO: 515854 - DNA, 19 bp, Mus musculus
  siRNA target sequence for Sytl1 (NM_031393.1,1341-1359).
ctctgtcccttaagtatgt

SEQ ID NO: 515855 - DNA, 19 bp, Mus musculus
  siRNA target sequence for Sytl1 (NM_031393.1,1449-1467).
caggatccctggacactta

SEQ ID NO: 515856 - DNA, 19 bp, Mus musculus
  siRNA target sequence for Sytl1 (NM_031393.1,1451-1469).
ggatccctggacacttaca

SEQ ID NO: 515857 - DNA, 19 bp, Mus musculus
  siRNA target sequence for Sytl1 (NM_031393.1,1457-1475).
ctggacacttacattcaat

SEQ ID NO: 515858 - DNA, 19 bp, Mus musculus
  siRNA target sequence for Tap1 (NM_013683.1,300-318).
gggtgacagcgctggatta

SEQ ID NO: 515859 - DNA, 19 bp, Mus musculus
  siRNA target sequence for Tap1 (NM_013683.1,340-358).
gatgccttcgctatcagtt

SEQ ID NO: 515860 - DNA, 19 bp, Mus musculus
  siRNA target sequence for Tap1 (NM_013683.1,344-362).
ccttcgctatcagttatgt

SEQ ID NO: 515861 - DNA, 19 bp, Mus musculus
  siRNA target sequence for Tap1 (NM_013683.1,810-828).
cgtgtgcgagtccattagt

SEQ ID NO: 515862 - DNA, 19 bp, Mus musculus
  siRNA target sequence for Tap1 (NM_013683.1,1081-1099).
ggtgaggcccagaagttca

SEQ ID NO: 515863 - DNA, 19 bp, Mus musculus
  siRNA target sequence for Tap1 (NM_013683.1,1192-1210).
ctgaaggtgggaattctgt

SEQ ID NO: 515864 - DNA, 19 bp, Mus musculus
  siRNA target sequence for Tap1 (NM_013683.1,1250-1268).
gcggcaaccttgtctcatt

SEQ ID NO: 515865 - DNA, 19 bp, Mus musculus
  siRNA target sequence for Tap1 (NM_013683.1,1254-1272).
caaccttgtctcattcgtt

SEQ ID NO: 515866 - DNA, 19 bp, Mus musculus
  siRNA target sequence for Tap1 (NM_013683.1,1354-1372).
gagaaaatattcgaatact

SEQ ID NO: 515867 - DNA, 19 bp, Mus musculus
  siRNA target sequence for Tap1 (NM_013683.1,1682-1700).
gacaagagccgctgctatt

SEQ ID NO: 515868 - DNA, 19 bp, Mus musculus
  siRNA target sequence for Tap1 (NM_013683.1,1784-1802).
ctggagcccacgatttcat

SEQ ID NO: 515869 - DNA, 19 bp, Mus musculus
  siRNA target sequence for Tap1 (NM_013683.1,2003-2021).
cttctcggacggttcttct

SEQ ID NO: 515870 - DNA, 19 bp, Mus musculus
  siRNA target sequence for Tap1 (NM_013683.1,2006-2024).
ctcggacggttcttcttat

SEQ ID NO: 515871 - DNA, 19 bp, Mus musculus
  siRNA target sequence for Tap1 (NM_013683.1,2008-2026).
cggacggttcttcttatca

SEQ ID NO: 515872 - DNA, 19 bp, Mus musculus
  siRNA target sequence for Tap2 (NM_011530.1,144-162).
gctgtggggactgctaaaa

SEQ ID NO: 515873 - DNA, 19 bp, Mus musculus
  siRNA target sequence for Tap2 (NM_011530.1,512-530).
gctattcgggtcgtgtaat

SEQ ID NO: 515874 - DNA, 19 bp, Mus musculus
  siRNA target sequence for Tap2 (NM_011530.1,513-531).
ctattcgggtcgtgtaatt

SEQ ID NO: 515875 - DNA, 19 bp, Mus musculus
  siRNA target sequence for Tap2 (NM_011530.1,553-571).
gaccccgacgcctttgcaa

SEQ ID NO: 515876 - DNA, 19 bp, Mus musculus
  siRNA target sequence for Tap2 (NM_011530.1,568-586).
gcaagcgccatctttttca

SEQ ID NO: 515877 - DNA, 19 bp, Mus musculus
  siRNA target sequence for Tap2 (NM_011530.1,569-587).
caagcgccatctttttcat

SEQ ID NO: 515878 - DNA, 19 bp, Mus musculus
  siRNA target sequence for Tap2 (NM_011530.1,671-689).
ggatacgagagcagctttt

SEQ ID NO: 515879 - DNA, 19 bp, Mus musculus
  siRNA target sequence for Tap2 (NM_011530.1,1113-1131).
ggaaaaagacgtgtatcta

SEQ ID NO: 515880 - DNA, 19 bp, Mus musculus
  siRNA target sequence for Tap2 (NM_011530.1,1181-1199).
gcggcgtgcagcagattct

SEQ ID NO: 515881 - DNA, 19 bp, Mus musculus
  siRNA target sequence for Tap2 (NM_011530.1,1267-1285).
gtccggaacctggtttaca

SEQ ID NO: 515882 - DNA, 19 bp, Mus musculus
  siRNA target sequence for Tap2 (NM_011530.1,1270-1288).
cggaacctggtttacatgt

SEQ ID NO: 515883 - DNA, 19 bp, Mus musculus
  siRNA target sequence for Tap2 (NM_011530.1,1319-1337).
ctgaaaaggtgttttccta

SEQ ID NO: 515884 - DNA, 19 bp, Mus musculus
  siRNA target sequence for Tap2 (NM_011530.1,1411-1429).
caagacgtctccttttcgt

SEQ ID NO: 515885 - DNA, 19 bp, Mus musculus
  siRNA target sequence for Tap2 (NM_011530.1,1596-1614).
gcccctgaccgagtatgat

SEQ ID NO: 515886 - DNA, 19 bp, Mus musculus
  siRNA target sequence for Tap2 (NM_011530.1,1672-1690).
ggttctgtcaaggacaata

SEQ ID NO: 515887 - DNA, 19 bp, Mus musculus
  siRNA target sequence for Tap2 (NM_011530.1,1673-1691).
gttctgtcaaggacaatat

SEQ ID NO: 515888 - DNA, 19 bp, Mus musculus
  siRNA target sequence for Tap2 (NM_011530.1,1712-1730).
gtgaggacgctcaagtgat

SEQ ID NO: 515889 - DNA, 19 bp, Mus musculus
  siRNA target sequence for Tap2 (NM_011530.1,1761-1779).
cttcataggggaaatgact

SEQ ID NO: 515890 - DNA, 19 bp, Mus musculus
  siRNA target sequence for Tap2 (NM_011530.1,1770-1788).
ggaaatgactaatggaata

SEQ ID NO: 515891 - DNA, 19 bp, Mus musculus
  siRNA target sequence for Tap2 (NM_011530.1,1985-2003).
ggctgcacacggttcagaa

SEQ ID NO: 515892 - DNA, 19 bp, Mus musculus
  siRNA target sequence for Tars (NM_033074.2,242-260).
gaggtcgagcagagttgaa

SEQ ID NO: 515893 - DNA, 19 bp, Mus musculus
  siRNA target sequence for Tars (NM_033074.2,262-280).
ccctggcctgaatacatta

SEQ ID NO: 515894 - DNA, 19 bp, Mus musculus
  siRNA target sequence for Tars (NM_033074.2,286-304).
cgccttgatatgtacaaca

SEQ ID NO: 515895 - DNA, 19 bp, Mus musculus
  siRNA target sequence for Tars (NM_033074.2,333-351).
ggccgaaaaggcagcaaaa

SEQ ID NO: 515896 - DNA, 19 bp, Mus musculus
  siRNA target sequence for Tars (NM_033074.2,397-415).
gatgcggagtcctggaaaa

SEQ ID NO: 515897 - DNA, 19 bp, Mus musculus
  siRNA target sequence for Tars (NM_033074.2,427-445).
cagattgcttgtggaatta

SEQ ID NO: 515898 - DNA, 19 bp, Mus musculus
  siRNA target sequence for Tars (NM_033074.2,559-577).
gaagcgcaggccgtatact

SEQ ID NO: 515899 - DNA, 19 bp, Mus musculus
  siRNA target sequence for Tars (NM_033074.2,619-637).
gtctatggcggatgtctat

SEQ ID NO: 515900 - DNA, 19 bp, Mus musculus
  siRNA target sequence for Tars (NM_033074.2,638-656).
gttacggcccaccaataga

SEQ ID NO: 515901 - DNA, 19 bp, Mus musculus
  siRNA target sequence for Tars (NM_033074.2,822-840).
caagtgccggatattgaat

SEQ ID NO: 515902 - DNA, 19 bp, Mus musculus
  siRNA target sequence for Tars (NM_033074.2,827-845).
gccggatattgaatgagaa

SEQ ID NO: 515903 - DNA, 19 bp, Mus musculus
  siRNA target sequence for Tars (NM_033074.2,828-846).
ccggatattgaatgagaaa

SEQ ID NO: 515904 - DNA, 19 bp, Mus musculus
  siRNA target sequence for Tars (NM_033074.2,875-893).
gatgtggccctctgataga

SEQ ID NO: 515905 - DNA, 19 bp, Mus musculus
  siRNA target sequence for Tars (NM_033074.2,915-933).
ccgacacaccggcaagatt

SEQ ID NO: 515906 - DNA, 19 bp, Mus musculus
  siRNA target sequence for Tars (NM_033074.2,916-934).
cgacacaccggcaagatta

SEQ ID NO: 515907 - DNA, 19 bp, Mus musculus
  siRNA target sequence for Tars (NM_033074.2,942-960).
gaagatacacaagaattct

SEQ ID NO: 515908 - DNA, 19 bp, Mus musculus
  siRNA target sequence for Tars (NM_033074.2,993-1011).
gacgctccagcggatctat

SEQ ID NO: 515909 - DNA, 19 bp, Mus musculus
  siRNA target sequence for Tars (NM_033074.2,1002-1020).
gcggatctatggcatttca

SEQ ID NO: 515910 - DNA, 19 bp, Mus musculus
  siRNA target sequence for Tars (NM_033074.2,1003-1021).
cggatctatggcatttcat

SEQ ID NO: 515911 - DNA, 19 bp, Mus musculus
  siRNA target sequence for Tars (NM_033074.2,1004-1022).
ggatctatggcatttcatt

SEQ ID NO: 515912 - DNA, 19 bp, Mus musculus
  siRNA target sequence for Tars (NM_033074.2,1030-1048).
cccaagctactgaaagagt

SEQ ID NO: 515913 - DNA, 19 bp, Mus musculus
  siRNA target sequence for Tars (NM_033074.2,1095-1113).
cgggagggaccaagaacta

SEQ ID NO: 515914 - DNA, 19 bp, Mus musculus
  siRNA target sequence for Tars (NM_033074.2,1096-1114).
gggagggaccaagaactat

SEQ ID NO: 515915 - DNA, 19 bp, Mus musculus
  siRNA target sequence for Tars (NM_033074.2,1097-1115).
ggagggaccaagaactata

SEQ ID NO: 515916 - DNA, 19 bp, Mus musculus
  siRNA target sequence for Tars (NM_033074.2,1098-1116).
gagggaccaagaactatat

SEQ ID NO: 515917 - DNA, 19 bp, Mus musculus
  siRNA target sequence for Tars (NM_033074.2,1100-1118).
gggaccaagaactatattt

SEQ ID NO: 515918 - DNA, 19 bp, Mus musculus
  siRNA target sequence for Tars (NM_033074.2,1102-1120).
gaccaagaactatatttct

SEQ ID NO: 515919 - DNA, 19 bp, Mus musculus
  siRNA target sequence for Tars (NM_033074.2,1155-1173).
gcccaaaggagcctacatt

SEQ ID NO: 515920 - DNA, 19 bp, Mus musculus
  siRNA target sequence for Tars (NM_033074.2,1162-1180).
ggagcctacatttataata

SEQ ID NO: 515921 - DNA, 19 bp, Mus musculus
  siRNA target sequence for Tars (NM_033074.2,1167-1185).
ctacatttataatacacta

SEQ ID NO: 515922 - DNA, 19 bp, Mus musculus
  siRNA target sequence for Tars (NM_033074.2,1197-1215).
caggagtgaatataggaaa

SEQ ID NO: 515923 - DNA, 19 bp, Mus musculus
  siRNA target sequence for Tars (NM_033074.2,1200-1218).
gagtgaatataggaaaaga

SEQ ID NO: 515924 - DNA, 19 bp, Mus musculus
  siRNA target sequence for Tars (NM_033074.2,1231-1249).
gtcgtcactcccaacatct

SEQ ID NO: 515925 - DNA, 19 bp, Mus musculus
  siRNA target sequence for Tars (NM_033074.2,1410-1428).
cctgcggctagctgacttt

SEQ ID NO: 515926 - DNA, 19 bp, Mus musculus
  siRNA target sequence for Tars (NM_033074.2,1558-1576).
gattttcttcgcacagtat

SEQ ID NO: 515927 - DNA, 19 bp, Mus musculus
  siRNA target sequence for Tars (NM_033074.2,1569-1587).
cacagtatatagtgtcttt

SEQ ID NO: 515928 - DNA, 19 bp, Mus musculus
  siRNA target sequence for Tars (NM_033074.2,1613-1631).
ctactcgcccagaaaaatt

SEQ ID NO: 515929 - DNA, 19 bp, Mus musculus
  siRNA target sequence for Tars (NM_033074.2,1616-1634).
ctcgcccagaaaaattcct

SEQ ID NO: 515930 - DNA, 19 bp, Mus musculus
  siRNA target sequence for Tars (NM_033074.2,1633-1651).
cttggagatattgaaatat

SEQ ID NO: 515931 - DNA, 19 bp, Mus musculus
  siRNA target sequence for Tars (NM_033074.2,1696-1714).
ggtgagaagtgggaactaa

SEQ ID NO: 515932 - DNA, 19 bp, Mus musculus
  siRNA target sequence for Tars (NM_033074.2,1742-1760).
caaagattgacatacagat

SEQ ID NO: 515933 - DNA, 19 bp, Mus musculus
  siRNA target sequence for Tars (NM_033074.2,1813-1831).
cagttgcccatcaggttta

SEQ ID NO: 515934 - DNA, 19 bp, Mus musculus
  siRNA target sequence for Tars (NM_033074.2,1849-1867).
cacgatggcgatgataaga

SEQ ID NO: 515935 - DNA, 19 bp, Mus musculus
  siRNA target sequence for Tars (NM_033074.2,1851-1869).
cgatggcgatgataagaaa

SEQ ID NO: 515936 - DNA, 19 bp, Mus musculus
  siRNA target sequence for Tars (NM_033074.2,1852-1870).
gatggcgatgataagaaaa

SEQ ID NO: 515937 - DNA, 19 bp, Mus musculus
  siRNA target sequence for Tars (NM_033074.2,1995-2013).
gggaccgacatgtgatgaa

SEQ ID NO: 515938 - DNA, 19 bp, Mus musculus
  siRNA target sequence for Tars (NM_033074.2,1996-2014).
ggaccgacatgtgatgaat

SEQ ID NO: 515939 - DNA, 19 bp, Mus musculus
  siRNA target sequence for Tars (NM_033074.2,1997-2015).
gaccgacatgtgatgaata

SEQ ID NO: 515940 - DNA, 19 bp, Mus musculus
  siRNA target sequence for Tars (NM_033074.2,2035-2053).
caattccatgatgctaaat

SEQ ID NO: 515941 - DNA, 19 bp, Mus musculus
  siRNA target sequence for Tars (NM_033074.2,2077-2095).
ccaggctgtaccttgaata

SEQ ID NO: 515942 - DNA, 19 bp, Mus musculus
  siRNA target sequence for Tars (NM_033074.2,2080-2098).
ggctgtaccttgaataaga

SEQ ID NO: 515943 - DNA, 19 bp, Mus musculus
  siRNA target sequence for Tars (NM_033074.2,2100-2118).
gatcagaaacgcacagtta

SEQ ID NO: 515944 - DNA, 19 bp, Mus musculus
  siRNA target sequence for Tars (NM_033074.2,2109-2127).
cgcacagttagcacagtat

SEQ ID NO: 515945 - DNA, 19 bp, Mus musculus
  siRNA target sequence for Tars (NM_033074.2,2110-2128).
gcacagttagcacagtata

SEQ ID NO: 515946 - DNA, 19 bp, Mus musculus
  siRNA target sequence for Tars (NM_033074.2,2111-2129).
cacagttagcacagtataa

SEQ ID NO: 515947 - DNA, 19 bp, Mus musculus
  siRNA target sequence for Tars (NM_033074.2,2162-2180).
ccagtggcacggtgaacat

SEQ ID NO: 515948 - DNA, 19 bp, Mus musculus
  siRNA target sequence for Tars (NM_033074.2,2178-2196).
catccgcacgagagacaat

SEQ ID NO: 515949 - DNA, 19 bp, Mus musculus
  siRNA target sequence for Tars (NM_033074.2,2183-2201).
gcacgagagacaataaggt

SEQ ID NO: 515950 - DNA, 19 bp, Mus musculus
  siRNA target sequence for Tbk1 (NM_019786.2,139-157).
ggctcctgtctgatatcct

SEQ ID NO: 515951 - DNA, 19 bp, Mus musculus
  siRNA target sequence for Tbk1 (NM_019786.2,200-218).
gaaaactggtgatctctat

SEQ ID NO: 515952 - DNA, 19 bp, Mus musculus
  siRNA target sequence for Tbk1 (NM_019786.2,252-270).
cgcccagtggatgttcaaa

SEQ ID NO: 515953 - DNA, 19 bp, Mus musculus
  siRNA target sequence for Tbk1 (NM_019786.2,253-271).
gcccagtggatgttcaaat

SEQ ID NO: 515954 - DNA, 19 bp, Mus musculus
  siRNA target sequence for Tbk1 (NM_019786.2,349-367).
caagacataaagtgcttat

SEQ ID NO: 515955 - DNA, 19 bp, Mus musculus
  siRNA target sequence for Tbk1 (NM_019786.2,352-370).
gacataaagtgcttattat

SEQ ID NO: 515956 - DNA, 19 bp, Mus musculus
  siRNA target sequence for Tbk1 (NM_019786.2,360-378).
gtgcttattatggagtttt

SEQ ID NO: 515957 - DNA, 19 bp, Mus musculus
  siRNA target sequence for Tbk1 (NM_019786.2,383-401).
ctgtgggagtttatacact

SEQ ID NO: 515958 - DNA, 19 bp, Mus musculus
  siRNA target sequence for Tbk1 (NM_019786.2,389-407).
gagtttatacactgttcta

SEQ ID NO: 515959 - DNA, 19 bp, Mus musculus
  siRNA target sequence for Tbk1 (NM_019786.2,430-448).
gacttccagaatcagaatt

SEQ ID NO: 515960 - DNA, 19 bp, Mus musculus
  siRNA target sequence for Tbk1 (NM_019786.2,502-520).
gcatagtgcaccgagatat

SEQ ID NO: 515961 - DNA, 19 bp, Mus musculus
  siRNA target sequence for Tbk1 (NM_019786.2,609-627).
gacgatgagcagtttgtgt

SEQ ID NO: 515962 - DNA, 19 bp, Mus musculus
  siRNA target sequence for Tbk1 (NM_019786.2,653-671).
gcatccggacatgtatgaa

SEQ ID NO: 515963 - DNA, 19 bp, Mus musculus
  siRNA target sequence for Tbk1 (NM_019786.2,654-672).
catccggacatgtatgaaa

SEQ ID NO: 515964 - DNA, 19 bp, Mus musculus
  siRNA target sequence for Tbk1 (NM_019786.2,669-687).
gaaagggcagtgctaagaa

SEQ ID NO: 515965 - DNA, 19 bp, Mus musculus
  siRNA target sequence for Tbk1 (NM_019786.2,727-745).
ggagtgttggagtgacatt

SEQ ID NO: 515966 - DNA, 19 bp, Mus musculus
  siRNA target sequence for Tbk1 (NM_019786.2,761-779).
ggggtcgctgccgtttaga

SEQ ID NO: 515967 - DNA, 19 bp, Mus musculus
  siRNA target sequence for Tbk1 (NM_019786.2,799-817).
ggaacaaagaagtaatgta

SEQ ID NO: 515968 - DNA, 19 bp, Mus musculus
  siRNA target sequence for Tbk1 (NM_019786.2,833-851).
gaagccgtctggtgcaata

SEQ ID NO: 515969 - DNA, 19 bp, Mus musculus
  siRNA target sequence for Tbk1 (NM_019786.2,836-854).
gccgtctggtgcaatatct

SEQ ID NO: 515970 - DNA, 19 bp, Mus musculus
  siRNA target sequence for Tbk1 (NM_019786.2,870-888).
gaaaacggaccaattgact

SEQ ID NO: 515971 - DNA, 19 bp, Mus musculus
  siRNA target sequence for Tbk1 (NM_019786.2,1067-1085).
catgacggcgcataagatt

SEQ ID NO: 515972 - DNA, 19 bp, Mus musculus
  siRNA target sequence for Tbk1 (NM_019786.2,1118-1136).
ccatgaactggtctataaa

SEQ ID NO: 515973 - DNA, 19 bp, Mus musculus
  siRNA target sequence for Tbk1 (NM_019786.2,1183-1201).
gacgcttagtcctagaact

SEQ ID NO: 515974 - DNA, 19 bp, Mus musculus
  siRNA target sequence for Tbk1 (NM_019786.2,1204-1222).
gacgactagcccagcattt

SEQ ID NO: 515975 - DNA, 19 bp, Mus musculus
  siRNA target sequence for Tbk1 (NM_019786.2,1212-1230).
gcccagcattttcctaaaa

SEQ ID NO: 515976 - DNA, 19 bp, Mus musculus
  siRNA target sequence for Tbk1 (NM_019786.2,1258-1276).
cgagccgggaacaactcaa

SEQ ID NO: 515977 - DNA, 19 bp, Mus musculus
  siRNA target sequence for Tbk1 (NM_019786.2,1279-1297).
ccgtaggactgagatatga

SEQ ID NO: 515978 - DNA, 19 bp, Mus musculus
  siRNA target sequence for Tbk1 (NM_019786.2,1280-1298).
cgtaggactgagatatgaa

SEQ ID NO: 515979 - DNA, 19 bp, Mus musculus
  siRNA target sequence for Tbk1 (NM_019786.2,1402-1420).
gtaccctgctgctctatca

SEQ ID NO: 515980 - DNA, 19 bp, Mus musculus
  siRNA target sequence for Tbk1 (NM_019786.2,1409-1427).
gctgctctatcaagaatta

SEQ ID NO: 515981 - DNA, 19 bp, Mus musculus
  siRNA target sequence for Tbk1 (NM_019786.2,1451-1469).
ggttgaactggttaaggat

SEQ ID NO: 515982 - DNA, 19 bp, Mus musculus
  siRNA target sequence for Tbk1 (NM_019786.2,1455-1473).
gaactggttaaggatgatt

SEQ ID NO: 515983 - DNA, 19 bp, Mus musculus
  siRNA target sequence for Tbk1 (NM_019786.2,1458-1476).
ctggttaaggatgattaca

SEQ ID NO: 515984 - DNA, 19 bp, Mus musculus
  siRNA target sequence for Tbk1 (NM_019786.2,1598-1616).
gggtgagatttcagacata

SEQ ID NO: 515985 - DNA, 19 bp, Mus musculus
  siRNA target sequence for Tbk1 (NM_019786.2,1712-1730).
cgacacctgggcacatcaa

SEQ ID NO: 515986 - DNA, 19 bp, Mus musculus
  siRNA target sequence for Tbk1 (NM_019786.2,1787-1805).
catcacagagatttactat

SEQ ID NO: 515987 - DNA, 19 bp, Mus musculus
  siRNA target sequence for Tbk1 (NM_019786.2,1825-1843).
cagaacgcagactagctta

SEQ ID NO: 515988 - DNA, 19 bp, Mus musculus
  siRNA target sequence for Tbk1 (NM_019786.2,1831-1849).
gcagactagcttataatga

SEQ ID NO: 515989 - DNA, 19 bp, Mus musculus
  siRNA target sequence for Tbk1 (NM_019786.2,1834-1852).
gactagcttataatgaaga

SEQ ID NO: 515990 - DNA, 19 bp, Mus musculus
  siRNA target sequence for Tbk1 (NM_019786.2,1859-1877).
ccacaaatttgataagcaa

SEQ ID NO: 515991 - DNA, 19 bp, Mus musculus
  siRNA target sequence for Tbk1 (NM_019786.2,1869-1887).
gataagcaaaaattgtatt

SEQ ID NO: 515992 - DNA, 19 bp, Mus musculus
  siRNA target sequence for Tbk1 (NM_019786.2,1874-1892).
gcaaaaattgtattaccat

SEQ ID NO: 515993 - DNA, 19 bp, Mus musculus
  siRNA target sequence for Tbk1 (NM_019786.2,1937-1955).
gtatgaagcgtttaaagat

SEQ ID NO: 515994 - DNA, 19 bp, Mus musculus
  siRNA target sequence for Tbk1 (NM_019786.2,1960-1978).
cggaagagtggatgagaaa

SEQ ID NO: 515995 - DNA, 19 bp, Mus musculus
  siRNA target sequence for Tbk1 (NM_019786.2,2008-2026).
cgctaactaatcagtgttt

SEQ ID NO: 515996 - DNA, 19 bp, Mus musculus
  siRNA target sequence for Tbk1 (NM_019786.2,2223-2241).
ctggccgagaacaatcata

SEQ ID NO: 515997 - DNA, 19 bp, Mus musculus
  siRNA target sequence for Tbk1 (NM_019786.2,2225-2243).
ggccgagaacaatcatatt

SEQ ID NO: 515998 - DNA, 19 bp, Mus musculus
  siRNA target sequence for Tbk1 (NM_019786.2,2226-2244).
gccgagaacaatcatattt

SEQ ID NO: 515999 - DNA, 19 bp, Mus musculus
  siRNA target sequence for Tbk1 (NM_019786.2,2228-2246).
cgagaacaatcatatttta

SEQ ID NO: 516000 - DNA, 19 bp, Mus musculus
  siRNA target sequence for Tbk1 (NM_019786.2,2283-2301).
cgcaatgtggactgtcttt

SEQ ID NO: 516001 - DNA, 19 bp, Mus musculus
  siRNA target sequence for Tcp1 (NM_013686.1,132-150).
ctattgccaacattgttaa

SEQ ID NO: 516002 - DNA, 19 bp, Mus musculus
  siRNA target sequence for Tcp1 (NM_013686.1,161-179).
gggccagttggcttggata

SEQ ID NO: 516003 - DNA, 19 bp, Mus musculus
  siRNA target sequence for Tcp1 (NM_013686.1,162-180).
ggccagttggcttggataa

SEQ ID NO: 516004 - DNA, 19 bp, Mus musculus
  siRNA target sequence for Tcp1 (NM_013686.1,184-202).
gttggtggatgatattggt

SEQ ID NO: 516005 - DNA, 19 bp, Mus musculus
  siRNA target sequence for Tcp1 (NM_013686.1,201-219).
gtgatgtaaccattactaa

SEQ ID NO: 516006 - DNA, 19 bp, Mus musculus
  siRNA target sequence for Tcp1 (NM_013686.1,241-259).
gttactggaggtagaacat

SEQ ID NO: 516007 - DNA, 19 bp, Mus musculus
  siRNA target sequence for Tcp1 (NM_013686.1,341-359).
gcagcggagcttctgaaaa

SEQ ID NO: 516008 - DNA, 19 bp, Mus musculus
  siRNA target sequence for Tcp1 (NM_013686.1,342-360).
cagcggagcttctgaaaaa

SEQ ID NO: 516009 - DNA, 19 bp, Mus musculus
  siRNA target sequence for Tcp1 (NM_013686.1,363-381).
cagatgagctagtcaaaca

SEQ ID NO: 516010 - DNA, 19 bp, Mus musculus
  siRNA target sequence for Tcp1 (NM_013686.1,389-407).
catccaacatcagttatta

SEQ ID NO: 516011 - DNA, 19 bp, Mus musculus
  siRNA target sequence for Tcp1 (NM_013686.1,431-449).
gaagcggtgcgttatatca

SEQ ID NO: 516012 - DNA, 19 bp, Mus musculus
  siRNA target sequence for Tcp1 (NM_013686.1,435-453).
cggtgcgttatatcaatga

SEQ ID NO: 516013 - DNA, 19 bp, Mus musculus
  siRNA target sequence for Tcp1 (NM_013686.1,437-455).
gtgcgttatatcaatgaga

SEQ ID NO: 516014 - DNA, 19 bp, Mus musculus
  siRNA target sequence for Tcp1 (NM_013686.1,448-466).
caatgagaacctgattatt

SEQ ID NO: 516015 - DNA, 19 bp, Mus musculus
  siRNA target sequence for Tcp1 (NM_013686.1,797-815).
ggtgtacaggtggttatta

SEQ ID NO: 516016 - DNA, 19 bp, Mus musculus
  siRNA target sequence for Tcp1 (NM_013686.1,822-840).
ctgagaaattggaccaaat

SEQ ID NO: 516017 - DNA, 19 bp, Mus musculus
  siRNA target sequence for Tcp1 (NM_013686.1,889-907).
ggcaactggtgccaatgtt

SEQ ID NO: 516018 - DNA, 19 bp, Mus musculus
  siRNA target sequence for Tcp1 (NM_013686.1,890-908).
gcaactggtgccaatgtta

SEQ ID NO: 516019 - DNA, 19 bp, Mus musculus
  siRNA target sequence for Tcp1 (NM_013686.1,896-914).
ggtgccaatgttattctaa

SEQ ID NO: 516020 - DNA, 19 bp, Mus musculus
  siRNA target sequence for Tcp1 (NM_013686.1,970-988).
ggctgttaggagagtttta

SEQ ID NO: 516021 - DNA, 19 bp, Mus musculus
  siRNA target sequence for Tcp1 (NM_013686.1,1038-1056).
ctacgctggccaatttgga

SEQ ID NO: 516022 - DNA, 19 bp, Mus musculus
  siRNA target sequence for Tcp1 (NM_013686.1,1059-1077).
gcgaagaaacttttgaagt

SEQ ID NO: 516023 - DNA, 19 bp, Mus musculus
  siRNA target sequence for Tcp1 (NM_013686.1,1102-1120).
ggtcgtacaggagagaatt

SEQ ID NO: 516024 - DNA, 19 bp, Mus musculus
  siRNA target sequence for Tcp1 (NM_013686.1,1105-1123).
cgtacaggagagaatttgt

SEQ ID NO: 516025 - DNA, 19 bp, Mus musculus
  siRNA target sequence for Tcp1 (NM_013686.1,1132-1150).
gctgatcttaatcaaaaat

SEQ ID NO: 516026 - DNA, 19 bp, Mus musculus
  siRNA target sequence for Tcp1 (NM_013686.1,1158-1176).
ctcgtacatctgcttcaat

SEQ ID NO: 516027 - DNA, 19 bp, Mus musculus
  siRNA target sequence for Tcp1 (NM_013686.1,1160-1178).
cgtacatctgcttcaatca

SEQ ID NO: 516028 - DNA, 19 bp, Mus musculus
  siRNA target sequence for Tcp1 (NM_013686.1,1164-1182).
catctgcttcaatcatctt

SEQ ID NO: 516029 - DNA, 19 bp, Mus musculus
  siRNA target sequence for Tcp1 (NM_013686.1,1177-1195).
catcttacgaggagcaaat

SEQ ID NO: 516030 - DNA, 19 bp, Mus musculus
  siRNA target sequence for Tcp1 (NM_013686.1,1180-1198).
cttacgaggagcaaatgat

SEQ ID NO: 516031 - DNA, 19 bp, Mus musculus
  siRNA target sequence for Tcp1 (NM_013686.1,1184-1202).
cgaggagcaaatgatttca

SEQ ID NO: 516032 - DNA, 19 bp, Mus musculus
  siRNA target sequence for Tcp1 (NM_013686.1,1187-1205).
ggagcaaatgatttcatgt

SEQ ID NO: 516033 - DNA, 19 bp, Mus musculus
  siRNA target sequence for Tcp1 (NM_013686.1,1196-1214).
gatttcatgtgtgatgaaa

SEQ ID NO: 516034 - DNA, 19 bp, Mus musculus
  siRNA target sequence for Tcp1 (NM_013686.1,1216-1234).
ggagcgctctttacatgat

SEQ ID NO: 516035 - DNA, 19 bp, Mus musculus
  siRNA target sequence for Tcp1 (NM_013686.1,1302-1320).
ctgccctgtccatatacct

SEQ ID NO: 516036 - DNA, 19 bp, Mus musculus
  siRNA target sequence for Tcp1 (NM_013686.1,1347-1365).
ctcgggaacagcttgctat

SEQ ID NO: 516037 - DNA, 19 bp, Mus musculus
  siRNA target sequence for Tcp1 (NM_013686.1,1351-1369).
ggaacagcttgctattgca

SEQ ID NO: 516038 - DNA, 19 bp, Mus musculus
  siRNA target sequence for Tcp1 (NM_013686.1,1387-1405).
gcttgtgattcctaataca

SEQ ID NO: 516039 - DNA, 19 bp, Mus musculus
  siRNA target sequence for Tcp1 (NM_013686.1,1483-1501).
cccggaacgtaaaaatcta

SEQ ID NO: 516040 - DNA, 19 bp, Mus musculus
  siRNA target sequence for Tcp1 (NM_013686.1,1484-1502).
ccggaacgtaaaaatctaa

SEQ ID NO: 516041 - DNA, 19 bp, Mus musculus
  siRNA target sequence for Tcp1 (NM_013686.1,1485-1503).
cggaacgtaaaaatctaaa

SEQ ID NO: 516042 - DNA, 19 bp, Mus musculus
  siRNA target sequence for Tcp1 (NM_013686.1,1487-1505).
gaacgtaaaaatctaaagt

SEQ ID NO: 516043 - DNA, 19 bp, Mus musculus
  siRNA target sequence for Tcp1 (NM_013686.1,1569-1587).
caaccatagttaaagtgaa

SEQ ID NO: 516044 - DNA, 19 bp, Mus musculus
  siRNA target sequence for Tcp1 (NM_013686.1,1618-1636).
caccatccttcggattgat

SEQ ID NO: 516045 - DNA, 19 bp, Mus musculus
  siRNA target sequence for Tcp1 (NM_013686.1,1621-1639).
catccttcggattgatgat

SEQ ID NO: 516046 - DNA, 19 bp, Mus musculus
  siRNA target sequence for Tcp1 (NM_013686.1,1629-1647).
ggattgatgatctgataaa

SEQ ID NO: 516047 - DNA, 19 bp, Mus musculus
  siRNA target sequence for Tcp1 (NM_013686.1,1630-1648).
gattgatgatctgataaaa

SEQ ID NO: 516048 - DNA, 19 bp, Mus musculus
  siRNA target sequence for Tcp1 (NM_013686.1,1678-1696).
cggaagttatgaaaatgct

SEQ ID NO: 516049 - DNA, 19 bp, Mus musculus
  siRNA target sequence for Tec (NM_013689.2,433-451).
ggtgtcattccctgtcaaa

SEQ ID NO: 516050 - DNA, 19 bp, Mus musculus
  siRNA target sequence for Tec (NM_013689.2,434-452).
gtgtcattccctgtcaaaa

SEQ ID NO: 516051 - DNA, 19 bp, Mus musculus
  siRNA target sequence for Tec (NM_013689.2,482-500).
gaccgatgggtgaagaagt

SEQ ID NO: 516052 - DNA, 19 bp, Mus musculus
  siRNA target sequence for Tec (NM_013689.2,484-502).
ccgatgggtgaagaagtta

SEQ ID NO: 516053 - DNA, 19 bp, Mus musculus
  siRNA target sequence for Tec (NM_013689.2,485-503).
cgatgggtgaagaagttaa

SEQ ID NO: 516054 - DNA, 19 bp, Mus musculus
  siRNA target sequence for Tec (NM_013689.2,486-504).
gatgggtgaagaagttaaa

SEQ ID NO: 516055 - DNA, 19 bp, Mus musculus
  siRNA target sequence for Tec (NM_013689.2,520-538).
caacaataatatcatgatt

SEQ ID NO: 516056 - DNA, 19 bp, Mus musculus
  siRNA target sequence for Tec (NM_013689.2,603-621).
cacccggatgtgagaagta

SEQ ID NO: 516057 - DNA, 19 bp, Mus musculus
  siRNA target sequence for Tec (NM_013689.2,605-623).
cccggatgtgagaagtaca

SEQ ID NO: 516058 - DNA, 19 bp, Mus musculus
  siRNA target sequence for Tec (NM_013689.2,606-624).
ccggatgtgagaagtacaa

SEQ ID NO: 516059 - DNA, 19 bp, Mus musculus
  siRNA target sequence for Tec (NM_013689.2,607-625).
cggatgtgagaagtacaat

SEQ ID NO: 516060 - DNA, 19 bp, Mus musculus
  siRNA target sequence for Tec (NM_013689.2,626-644).
ctttttgagagtagtataa

SEQ ID NO: 516061 - DNA, 19 bp, Mus musculus
  siRNA target sequence for Tec (NM_013689.2,786-804).
gaggccaagagtatatcat

SEQ ID NO: 516062 - DNA, 19 bp, Mus musculus
  siRNA target sequence for Tec (NM_013689.2,855-873).
ggtactgcagaaataccaa

SEQ ID NO: 516063 - DNA, 19 bp, Mus musculus
  siRNA target sequence for Tec (NM_013689.2,893-911).
ctcctcagaacggaagata

SEQ ID NO: 516064 - DNA, 19 bp, Mus musculus
  siRNA target sequence for Tec (NM_013689.2,999-1017).
caggtttcaggcattatca

SEQ ID NO: 516065 - DNA, 19 bp, Mus musculus
  siRNA target sequence for Tec (NM_013689.2,1002-1020).
gtttcaggcattatcacat

SEQ ID NO: 516066 - DNA, 19 bp, Mus musculus
  siRNA target sequence for Tec (NM_013689.2,1008-1026).
ggcattatcacataaagga

SEQ ID NO: 516067 - DNA, 19 bp, Mus musculus
  siRNA target sequence for Tec (NM_013689.2,1035-1053).
catccccaaagaagtatta

SEQ ID NO: 516068 - DNA, 19 bp, Mus musculus
  siRNA target sequence for Tec (NM_013689.2,1080-1098).
ccattcctgagatcattga

SEQ ID NO: 516069 - DNA, 19 bp, Mus musculus
  siRNA target sequence for Tec (NM_013689.2,1139-1157).
cggtacccggtcagtacaa

SEQ ID NO: 516070 - DNA, 19 bp, Mus musculus
  siRNA target sequence for Tec (NM_013689.2,1140-1158).
ggtacccggtcagtacaaa

SEQ ID NO: 516071 - DNA, 19 bp, Mus musculus
  siRNA target sequence for Tec (NM_013689.2,1181-1199).
gccggcttcagctatgata

SEQ ID NO: 516072 - DNA, 19 bp, Mus musculus
  siRNA target sequence for Tec (NM_013689.2,1182-1200).
ccggcttcagctatgataa

SEQ ID NO: 516073 - DNA, 19 bp, Mus musculus
  siRNA target sequence for Tec (NM_013689.2,1330-1348).
gtgtgaagaggatttcata

SEQ ID NO: 516074 - DNA, 19 bp, Mus musculus
  siRNA target sequence for Tec (NM_013689.2,1585-1603).
ggctgccagaaattgtcta

SEQ ID NO: 516075 - DNA, 19 bp, Mus musculus
  siRNA target sequence for Tec (NM_013689.2,1590-1608).
ccagaaattgtctagtgaa

SEQ ID NO: 516076 - DNA, 19 bp, Mus musculus
  siRNA target sequence for Tec (NM_013689.2,1593-1611).
gaaattgtctagtgaatga

SEQ ID NO: 516077 - DNA, 19 bp, Mus musculus
  siRNA target sequence for Tec (NM_013689.2,1658-1676).
ctggatgatcagtacacaa

SEQ ID NO: 516078 - DNA, 19 bp, Mus musculus
  siRNA target sequence for Tec (NM_013689.2,1707-1725).
ggtgtcccccagaagtgtt

SEQ ID NO: 516079 - DNA, 19 bp, Mus musculus
  siRNA target sequence for Tec (NM_013689.2,1775-1793).
ctaatgtgggaaatattca

SEQ ID NO: 516080 - DNA, 19 bp, Mus musculus
  siRNA target sequence for Tec (NM_013689.2,1875-1893).
caaagctggctaccaaata

SEQ ID NO: 516081 - DNA, 19 bp, Mus musculus
  siRNA target sequence for Tec (NM_013689.2,1880-1898).
ctggctaccaaatatttgt

SEQ ID NO: 516082 - DNA, 19 bp, Mus musculus
  siRNA target sequence for Tec (NM_013689.2,1882-1900).
ggctaccaaatatttgtat

SEQ ID NO: 516083 - DNA, 19 bp, Mus musculus
  siRNA target sequence for Tec (NM_013689.2,1884-1902).
ctaccaaatatttgtatga

SEQ ID NO: 516084 - DNA, 19 bp, Mus musculus
  siRNA target sequence for Tec (NM_013689.2,1957-1975).
cttgctgcgtacgatagat

SEQ ID NO: 516085 - DNA, 19 bp, Mus musculus
  siRNA target sequence for Tec (NM_013689.2,1960-1978).
gctgcgtacgatagatgaa

SEQ ID NO: 516086 - DNA, 19 bp, Mus musculus
  siRNA target sequence for Tec (NM_013689.2,1963-1981).
gcgtacgatagatgaacta

SEQ ID NO: 516087 - DNA, 19 bp, Mus musculus
  siRNA target sequence for Tec (NM_013689.2,1965-1983).
gtacgatagatgaactagt

SEQ ID NO: 516088 - DNA, 19 bp, Mus musculus
  siRNA target sequence for Tec (NM_013689.2,1968-1986).
cgatagatgaactagttga

SEQ ID NO: 516089 - DNA, 19 bp, Mus musculus
  siRNA target sequence for Tec (NM_013689.2,1979-1997).
ctagttgaatgtgaagaaa

SEQ ID NO: 516090 - DNA, 19 bp, Mus musculus
  siRNA target sequence for Tek (NM_013690.1,357-375).
ctctttagccggcttagtt

SEQ ID NO: 516091 - DNA, 19 bp, Mus musculus
  siRNA target sequence for Tek (NM_013690.1,423-441).
ggacctgatcttgatcaat

SEQ ID NO: 516092 - DNA, 19 bp, Mus musculus
  siRNA target sequence for Tek (NM_013690.1,424-442).
gacctgatcttgatcaatt

SEQ ID NO: 516093 - DNA, 19 bp, Mus musculus
  siRNA target sequence for Tek (NM_013690.1,454-472).
gtgtctgatgccgaaacat

SEQ ID NO: 516094 - DNA, 19 bp, Mus musculus
  siRNA target sequence for Tek (NM_013690.1,667-685).
gttcgaggacaggctataa

SEQ ID NO: 516095 - DNA, 19 bp, Mus musculus
  siRNA target sequence for Tek (NM_013690.1,670-688).
cgaggacaggctataagga

SEQ ID NO: 516096 - DNA, 19 bp, Mus musculus
  siRNA target sequence for Tek (NM_013690.1,671-689).
gaggacaggctataaggat

SEQ ID NO: 516097 - DNA, 19 bp, Mus musculus
  siRNA target sequence for Tek (NM_013690.1,720-738).
cttcctacctgctacttta

SEQ ID NO: 516098 - DNA, 19 bp, Mus musculus
  siRNA target sequence for Tek (NM_013690.1,723-741).
cctacctgctactttaact

SEQ ID NO: 516099 - DNA, 19 bp, Mus musculus
  siRNA target sequence for Tek (NM_013690.1,756-774).
gggagataatgtgaacata

SEQ ID NO: 516100 - DNA, 19 bp, Mus musculus
  siRNA target sequence for Tek (NM_013690.1,760-778).
gataatgtgaacatatctt

SEQ ID NO: 516101 - DNA, 19 bp, Mus musculus
  siRNA target sequence for Tek (NM_013690.1,918-936).
gtactcggccaggtacata

SEQ ID NO: 516102 - DNA, 19 bp, Mus musculus
  siRNA target sequence for Tek (NM_013690.1,972-990).
gattgttcggagatgtgaa

SEQ ID NO: 516103 - DNA, 19 bp, Mus musculus
  siRNA target sequence for Tek (NM_013690.1,1011-1029).
ctgtagccgtccttgtact

SEQ ID NO: 516104 - DNA, 19 bp, Mus musculus
  siRNA target sequence for Tek (NM_013690.1,1171-1189).
ggatgcaagtcttatgtgt

SEQ ID NO: 516105 - DNA, 19 bp, Mus musculus
  siRNA target sequence for Tek (NM_013690.1,1172-1190).
gatgcaagtcttatgtgtt

SEQ ID NO: 516106 - DNA, 19 bp, Mus musculus
  siRNA target sequence for Tek (NM_013690.1,1236-1254).
ggggttgcagtgcaatgaa

SEQ ID NO: 516107 - DNA, 19 bp, Mus musculus
  siRNA target sequence for Tek (NM_013690.1,1256-1274).
catgcccatctggttacta

SEQ ID NO: 516108 - DNA, 19 bp, Mus musculus
  siRNA target sequence for Tek (NM_013690.1,1296-1314).
gtgccactgtaccaatgaa

SEQ ID NO: 516109 - DNA, 19 bp, Mus musculus
  siRNA target sequence for Tek (NM_013690.1,1413-1431).
ggatttgccagatcacatt

SEQ ID NO: 516110 - DNA, 19 bp, Mus musculus
  siRNA target sequence for Tek (NM_013690.1,1423-1441).
gatcacattgaagtaaaca

SEQ ID NO: 516111 - DNA, 19 bp, Mus musculus
  siRNA target sequence for Tek (NM_013690.1,1435-1453).
gtaaacagtggaaaattta

SEQ ID NO: 516112 - DNA, 19 bp, Mus musculus
  siRNA target sequence for Tek (NM_013690.1,1479-1497).
gccactacctactagtgaa

SEQ ID NO: 516113 - DNA, 19 bp, Mus musculus
  siRNA target sequence for Tek (NM_013690.1,1668-1686).
catttccgtcaaagttctt

SEQ ID NO: 516114 - DNA, 19 bp, Mus musculus
  siRNA target sequence for Tek (NM_013690.1,1694-1712).
ccctgcacgccccaaatgt

SEQ ID NO: 516115 - DNA, 19 bp, Mus musculus
  siRNA target sequence for Tek (NM_013690.1,1724-1742).
gacataactttgctatcat

SEQ ID NO: 516116 - DNA, 19 bp, Mus musculus
  siRNA target sequence for Tek (NM_013690.1,1726-1744).
cataactttgctatcatca

SEQ ID NO: 516117 - DNA, 19 bp, Mus musculus
  siRNA target sequence for Tek (NM_013690.1,1810-1828).
gtcaatcaggcctggaaat

SEQ ID NO: 516118 - DNA, 19 bp, Mus musculus
  siRNA target sequence for Tek (NM_013690.1,1837-1855).
gtgacgaatgagattttca

SEQ ID NO: 516119 - DNA, 19 bp, Mus musculus
  siRNA target sequence for Tek (NM_013690.1,1839-1857).
gacgaatgagattttcact

SEQ ID NO: 516120 - DNA, 19 bp, Mus musculus
  siRNA target sequence for Tek (NM_013690.1,1941-1959).
gcctgtgagacgatttaca

SEQ ID NO: 516121 - DNA, 19 bp, Mus musculus
  siRNA target sequence for Tek (NM_013690.1,1942-1960).
cctgtgagacgatttacaa

SEQ ID NO: 516122 - DNA, 19 bp, Mus musculus
  siRNA target sequence for Tek (NM_013690.1,2014-2032).
cagacagctctaaatttga

SEQ ID NO: 516123 - DNA, 19 bp, Mus musculus
  siRNA target sequence for Tek (NM_013690.1,2016-2034).
gacagctctaaatttgact

SEQ ID NO: 516124 - DNA, 19 bp, Mus musculus
  siRNA target sequence for Tek (NM_013690.1,2031-2049).
gacttggcaaccgatattt

SEQ ID NO: 516125 - DNA, 19 bp, Mus musculus
  siRNA target sequence for Tek (NM_013690.1,2036-2054).
ggcaaccgatatttacaaa

SEQ ID NO: 516126 - DNA, 19 bp, Mus musculus
  siRNA target sequence for Tek (NM_013690.1,2038-2056).
caaccgatatttacaaact

SEQ ID NO: 516127 - DNA, 19 bp, Mus musculus
  siRNA target sequence for Tek (NM_013690.1,2088-2106).
gcgatccctgcaaacaaca

SEQ ID NO: 516128 - DNA, 19 bp, Mus musculus
  siRNA target sequence for Tek (NM_013690.1,2089-2107).
cgatccctgcaaacaacaa

SEQ ID NO: 516129 - DNA, 19 bp, Mus musculus
  siRNA target sequence for Tek (NM_013690.1,2148-2166).
ggtgctactgagcaactta

SEQ ID NO: 516130 - DNA, 19 bp, Mus musculus
  siRNA target sequence for Tek (NM_013690.1,2240-2258).
gggcctggacccttagtga

SEQ ID NO: 516131 - DNA, 19 bp, Mus musculus
  siRNA target sequence for Tek (NM_013690.1,2267-2285).
ctcctcaaccagaaaacat

SEQ ID NO: 516132 - DNA, 19 bp, Mus musculus
  siRNA target sequence for Tek (NM_013690.1,2305-2323).
gactccacagctatggttt

SEQ ID NO: 516133 - DNA, 19 bp, Mus musculus
  siRNA target sequence for Tek (NM_013690.1,2337-2355).
ggatggctattcgatttct

SEQ ID NO: 516134 - DNA, 19 bp, Mus musculus
  siRNA target sequence for Tek (NM_013690.1,2338-2356).
gatggctattcgatttctt

SEQ ID NO: 516135 - DNA, 19 bp, Mus musculus
  siRNA target sequence for Tek (NM_013690.1,2357-2375).
ccatcatcatccggtataa

SEQ ID NO: 516136 - DNA, 19 bp, Mus musculus
  siRNA target sequence for Tek (NM_013690.1,2455-2473).
ctagagccagagactacat

SEQ ID NO: 516137 - DNA, 19 bp, Mus musculus
  siRNA target sequence for Tek (NM_013690.1,2460-2478).
gccagagactacataccat

SEQ ID NO: 516138 - DNA, 19 bp, Mus musculus
  siRNA target sequence for Tek (NM_013690.1,2580-2598).
ggggaaagatgctactcat

SEQ ID NO: 516139 - DNA, 19 bp, Mus musculus
  siRNA target sequence for Tek (NM_013690.1,2581-2599).
gggaaagatgctactcata

SEQ ID NO: 516140 - DNA, 19 bp, Mus musculus
  siRNA target sequence for Tek (NM_013690.1,2609-2627).
gggtcggctggaatgactt

SEQ ID NO: 516141 - DNA, 19 bp, Mus musculus
  siRNA target sequence for Tek (NM_013690.1,2709-2727).
ccagaacgtgagagaagaa

SEQ ID NO: 516142 - DNA, 19 bp, Mus musculus
  siRNA target sequence for Tek (NM_013690.1,2749-2767).
ggaactctggcccttaaca

SEQ ID NO: 516143 - DNA, 19 bp, Mus musculus
  siRNA target sequence for Tek (NM_013690.1,2766-2784).
caggaaggccaaaaacaat

SEQ ID NO: 516144 - DNA, 19 bp, Mus musculus
  siRNA target sequence for Tek (NM_013690.1,2781-2799).
caatccggatcccacaatt

SEQ ID NO: 516145 - DNA, 19 bp, Mus musculus
  siRNA target sequence for Tek (NM_013690.1,2817-2835).
gaatgacatcaagtttcaa

SEQ ID NO: 516146 - DNA, 19 bp, Mus musculus
  siRNA target sequence for Tek (NM_013690.1,2931-2949).
gtatgcctccaaagatgat

SEQ ID NO: 516147 - DNA, 19 bp, Mus musculus
  siRNA target sequence for Tek (NM_013690.1,2968-2986).
gaactggaggttctttgta

SEQ ID NO: 516148 - DNA, 19 bp, Mus musculus
  siRNA target sequence for Tek (NM_013690.1,3029-3047).
gtgaacaccgaggctattt

SEQ ID NO: 516149 - DNA, 19 bp, Mus musculus
  siRNA target sequence for Tek (NM_013690.1,3031-3049).
gaacaccgaggctatttgt

SEQ ID NO: 516150 - DNA, 19 bp, Mus musculus
  siRNA target sequence for Tek (NM_013690.1,3042-3060).
ctatttgtacctagctatt

SEQ ID NO: 516151 - DNA, 19 bp, Mus musculus
  siRNA target sequence for Tek (NM_013690.1,3048-3066).
gtacctagctattgagtat

SEQ ID NO: 516152 - DNA, 19 bp, Mus musculus
  siRNA target sequence for Tek (NM_013690.1,3279-3297).
ctacatagccaaaatagca

SEQ ID NO: 516153 - DNA, 19 bp, Mus musculus
  siRNA target sequence for Tek (NM_013690.1,3360-3378).
gcgttggatggcaatcgaa

SEQ ID NO: 516154 - DNA, 19 bp, Mus musculus
  siRNA target sequence for Tek (NM_013690.1,3361-3379).
cgttggatggcaatcgaat

SEQ ID NO: 516155 - DNA, 19 bp, Mus musculus
  siRNA target sequence for Tek (NM_013690.1,3365-3383).
ggatggcaatcgaatcact

SEQ ID NO: 516156 - DNA, 19 bp, Mus musculus
  siRNA target sequence for Tek (NM_013690.1,3371-3389).
caatcgaatcactgaacta

SEQ ID NO: 516157 - DNA, 19 bp, Mus musculus
  siRNA target sequence for Tek (NM_013690.1,3438-3456).
ctgggagattgttagctta

SEQ ID NO: 516158 - DNA, 19 bp, Mus musculus
  siRNA target sequence for Tek (NM_013690.1,3482-3500).
cgtgcgcggagctctatga

SEQ ID NO: 516159 - DNA, 19 bp, Mus musculus
  siRNA target sequence for Tek (NM_013690.1,3550-3568).
gaggtgtatgatctaatga

SEQ ID NO: 516160 - DNA, 19 bp, Mus musculus
  siRNA target sequence for Tek (NM_013690.1,3590-3608).
cttatgagagaccatcatt

SEQ ID NO: 516161 - DNA, 19 bp, Mus musculus
  siRNA target sequence for Tek (NM_013690.1,3601-3619).
ccatcatttgcccagatat

SEQ ID NO: 516162 - DNA, 19 bp, Mus musculus
  siRNA target sequence for Tek (NM_013690.1,3602-3620).
catcatttgcccagatatt

SEQ ID NO: 516163 - DNA, 19 bp, Mus musculus
  siRNA target sequence for Tek (NM_013690.1,3605-3623).
catttgcccagatattggt

SEQ ID NO: 516164 - DNA, 19 bp, Mus musculus
  siRNA target sequence for Tek (NM_013690.1,3660-3678).
cgtgaacaccacactgtat

SEQ ID NO: 516165 - DNA, 19 bp, Mus musculus
  siRNA target sequence for Tek (NM_013690.1,3673-3691).
ctgtatgagaagtttacct

SEQ ID NO: 516166 - DNA, 19 bp, Mus musculus
  siRNA target sequence for Tesk1 (NM_011571.2,1636-1654).
cgcgtgtggacgatttcga

SEQ ID NO: 516167 - DNA, 19 bp, Mus musculus
  siRNA target sequence for Tesk1 (NM_011571.2,1711-1729).
gacagtcgggacaagtcat

SEQ ID NO: 516168 - DNA, 19 bp, Mus musculus
  siRNA target sequence for Tesk1 (NM_011571.2,1798-1816).
ggctccggcaccctaacat

SEQ ID NO: 516169 - DNA, 19 bp, Mus musculus
  siRNA target sequence for Tesk1 (NM_011571.2,1862-1880).
gcttacagagtatatgaat

SEQ ID NO: 516170 - DNA, 19 bp, Mus musculus
  siRNA target sequence for Tesk1 (NM_011571.2,2474-2492).
ggctcccttgacatacaat

SEQ ID NO: 516171 - DNA, 19 bp, Mus musculus
  siRNA target sequence for Tesk1 (NM_011571.2,2579-2597).
gccaccttcgccagaatca

SEQ ID NO: 516172 - DNA, 19 bp, Mus musculus
  siRNA target sequence for Tesk1 (NM_011571.2,2602-2620).
ccagctggggggacaatct

SEQ ID NO: 516173 - DNA, 19 bp, Mus musculus
  siRNA target sequence for Tesk1 (NM_011571.2,2655-2673).
ctcaggggtggcaagatca

SEQ ID NO: 516174 - DNA, 19 bp, Mus musculus
  siRNA target sequence for Tesk1 (NM_011571.2,3028-3046).
caggacctcccctcaacaa

SEQ ID NO: 516175 - DNA, 19 bp, Mus musculus
  siRNA target sequence for Tesk1 (NM_011571.2,3031-3049).
gacctcccctcaacaataa

SEQ ID NO: 516176 - DNA, 19 bp, Mus musculus
  siRNA target sequence for Tesk1 (NM_011571.2,3054-3072).
cctgctgtggtggtgaatt

SEQ ID NO: 516177 - DNA, 19 bp, Mus musculus
  siRNA target sequence for Tesk1 (NM_011571.2,3273-3291).
gcccgctaccgcaacttga

SEQ ID NO: 516178 - DNA, 19 bp, Mus musculus
  siRNA target sequence for Tesk1 (NM_011571.2,3274-3292).
cccgctaccgcaacttgaa

SEQ ID NO: 516179 - DNA, 19 bp, Mus musculus
  siRNA target sequence for Tesk1 (NM_011571.2,3276-3294).
cgctaccgcaacttgaact

SEQ ID NO: 516180 - DNA, 19 bp, Mus musculus
  siRNA target sequence for Tesk2 (NM_146151.2,383-401).
cggagcaagcggaactcaa

SEQ ID NO: 516181 - DNA, 19 bp, Mus musculus
  siRNA target sequence for Tesk2 (NM_146151.2,388-406).
caagcggaactcaattgca

SEQ ID NO: 516182 - DNA, 19 bp, Mus musculus
  siRNA target sequence for Tesk2 (NM_146151.2,422-440).
gtggagcgtctggaagaat

SEQ ID NO: 516183 - DNA, 19 bp, Mus musculus
  siRNA target sequence for Tesk2 (NM_146151.2,424-442).
ggagcgtctggaagaattt

SEQ ID NO: 516184 - DNA, 19 bp, Mus musculus
  siRNA target sequence for Tesk2 (NM_146151.2,475-493).
gcaggtgggaagagtttca

SEQ ID NO: 516185 - DNA, 19 bp, Mus musculus
  siRNA target sequence for Tesk2 (NM_146151.2,481-499).
gggaagagtttcatcatct

SEQ ID NO: 516186 - DNA, 19 bp, Mus musculus
  siRNA target sequence for Tesk2 (NM_146151.2,498-516).
cttcatatcgtgcgattat

SEQ ID NO: 516187 - DNA, 19 bp, Mus musculus
  siRNA target sequence for Tesk2 (NM_146151.2,553-571).
cacccgtgaaaaaatagga

SEQ ID NO: 516188 - DNA, 19 bp, Mus musculus
  siRNA target sequence for Tesk2 (NM_146151.2,727-745).
gggtgtatgtgtacatcaa

SEQ ID NO: 516189 - DNA, 19 bp, Mus musculus
  siRNA target sequence for Tesk2 (NM_146151.2,761-779).
cttacagagtatatcaact

SEQ ID NO: 516190 - DNA, 19 bp, Mus musculus
  siRNA target sequence for Tesk2 (NM_146151.2,799-817).
gctggacagtgacttgtat

SEQ ID NO: 516191 - DNA, 19 bp, Mus musculus
  siRNA target sequence for Tesk2 (NM_146151.2,800-818).
ctggacagtgacttgtatt

SEQ ID NO: 516192 - DNA, 19 bp, Mus musculus
  siRNA target sequence for Tesk2 (NM_146151.2,823-841).
gtggactgtgagagtgaaa

SEQ ID NO: 516193 - DNA, 19 bp, Mus musculus
  siRNA target sequence for Tesk2 (NM_146151.2,864-882).
gcctcagctaccttcactt

SEQ ID NO: 516194 - DNA, 19 bp, Mus musculus
  siRNA target sequence for Tesk2 (NM_146151.2,896-914).
catcgggacctcacatcaa

SEQ ID NO: 516195 - DNA, 19 bp, Mus musculus
  siRNA target sequence for Tesk2 (NM_146151.2,985-1003).
gatccctgacgctagtata

SEQ ID NO: 516196 - DNA, 19 bp, Mus musculus
  siRNA target sequence for Tesk2 (NM_146151.2,1058-1076).
ctccgagatgagccttata

SEQ ID NO: 516197 - DNA, 19 bp, Mus musculus
  siRNA target sequence for Tesk2 (NM_146151.2,1060-1078).
ccgagatgagccttataat

SEQ ID NO: 516198 - DNA, 19 bp, Mus musculus
  siRNA target sequence for Tesk2 (NM_146151.2,1064-1082).
gatgagccttataatgaga

SEQ ID NO: 516199 - DNA, 19 bp, Mus musculus
  siRNA target sequence for Tesk2 (NM_146151.2,1084-1102).
ggcagatgtcttctcttat

SEQ ID NO: 516200 - DNA, 19 bp, Mus musculus
  siRNA target sequence for Tesk2 (NM_146151.2,1138-1156).
ggctgatccggactatctt

SEQ ID NO: 516201 - DNA, 19 bp, Mus musculus
  siRNA target sequence for Tesk2 (NM_146151.2,1264-1282).
caaactgcgcccatccttt

SEQ ID NO: 516202 - DNA, 19 bp, Mus musculus
  siRNA target sequence for Tesk2 (NM_146151.2,1443-1461).
cacgtccaagacgtactat

SEQ ID NO: 516203 - DNA, 19 bp, Mus musculus
  siRNA target sequence for Tesk2 (NM_146151.2,1445-1463).
cgtccaagacgtactatct

SEQ ID NO: 516204 - DNA, 19 bp, Mus musculus
  siRNA target sequence for Tesk2 (NM_146151.2,1472-1490).
cgaagccagtcagatattt

SEQ ID NO: 516205 - DNA, 19 bp, Mus musculus
  siRNA target sequence for Tesk2 (NM_146151.2,1518-1536).
gtgtcttggacccctatta

SEQ ID NO: 516206 - DNA, 19 bp, Mus musculus
  siRNA target sequence for Tesk2 (NM_146151.2,1608-1626).
ggaaggtcaaattctttga

SEQ ID NO: 516207 - DNA, 19 bp, Mus musculus
  siRNA target sequence for Tesk2 (NM_146151.2,1709-1727).
gagcctttggccatgtctt

SEQ ID NO: 516208 - DNA, 19 bp, Mus musculus
  siRNA target sequence for Tesk2 (NM_146151.2,1749-1767).
ctggttcacctgagttctt

SEQ ID NO: 516209 - DNA, 19 bp, Mus musculus
  siRNA target sequence for Tesk2 (NM_146151.2,1827-1845).
gactcagtagtctcaagta

SEQ ID NO: 516210 - DNA, 19 bp, Mus musculus
  siRNA target sequence for Tesk2 (NM_146151.2,1917-1935).
gctctaacccccaagaaga

SEQ ID NO: 516211 - DNA, 19 bp, Mus musculus
  siRNA target sequence for Tex14 (NM_031386.1,468-486).
gagcccaccttctctttct

SEQ ID NO: 516212 - DNA, 19 bp, Mus musculus
  siRNA target sequence for Tex14 (NM_031386.1,495-513).
ccctacatggtcatgacta

SEQ ID NO: 516213 - DNA, 19 bp, Mus musculus
  siRNA target sequence for Tex14 (NM_031386.1,496-514).
cctacatggtcatgactaa

SEQ ID NO: 516214 - DNA, 19 bp, Mus musculus
  siRNA target sequence for Tex14 (NM_031386.1,529-547).
ggagcagagtcacagtaaa

SEQ ID NO: 516215 - DNA, 19 bp, Mus musculus
  siRNA target sequence for Tex14 (NM_031386.1,628-646).
gcaacctgcggcatcctaa

SEQ ID NO: 516216 - DNA, 19 bp, Mus musculus
  siRNA target sequence for Tex14 (NM_031386.1,653-671).
gcaactgatggctgtatgt

SEQ ID NO: 516217 - DNA, 19 bp, Mus musculus
  siRNA target sequence for Tex14 (NM_031386.1,654-672).
caactgatggctgtatgtt

SEQ ID NO: 516218 - DNA, 19 bp, Mus musculus
  siRNA target sequence for Tex14 (NM_031386.1,806-824).
ggttgctgatgccttgata

SEQ ID NO: 516219 - DNA, 19 bp, Mus musculus
  siRNA target sequence for Tex14 (NM_031386.1,807-825).
gttgctgatgccttgatat

SEQ ID NO: 516220 - DNA, 19 bp, Mus musculus
  siRNA target sequence for Tex14 (NM_031386.1,811-829).
ctgatgccttgatatacct

SEQ ID NO: 516221 - DNA, 19 bp, Mus musculus
  siRNA target sequence for Tex14 (NM_031386.1,892-910).
gagaagcaaggctgactaa

SEQ ID NO: 516222 - DNA, 19 bp, Mus musculus
  siRNA target sequence for Tex14 (NM_031386.1,1030-1048).
cggtgaagtcagacatata

SEQ ID NO: 516223 - DNA, 19 bp, Mus musculus
  siRNA target sequence for Tex14 (NM_031386.1,1049-1067).
cagcttttccgtgatcata

SEQ ID NO: 516224 - DNA, 19 bp, Mus musculus
  siRNA target sequence for Tex14 (NM_031386.1,1051-1069).
gcttttccgtgatcataca

SEQ ID NO: 516225 - DNA, 19 bp, Mus musculus
  siRNA target sequence for Tex14 (NM_031386.1,1052-1070).
cttttccgtgatcatacaa

SEQ ID NO: 516226 - DNA, 19 bp, Mus musculus
  siRNA target sequence for Tex14 (NM_031386.1,1061-1079).
gatcatacaagagatctta

SEQ ID NO: 516227 - DNA, 19 bp, Mus musculus
  siRNA target sequence for Tex14 (NM_031386.1,1073-1091).
gatcttaacagacagtata

SEQ ID NO: 516228 - DNA, 19 bp, Mus musculus
  siRNA target sequence for Tex14 (NM_031386.1,1165-1183).
ggcttccggaaccttacta

SEQ ID NO: 516229 - DNA, 19 bp, Mus musculus
  siRNA target sequence for Tex14 (NM_031386.1,1166-1184).
gcttccggaaccttactat

SEQ ID NO: 516230 - DNA, 19 bp, Mus musculus
  siRNA target sequence for Tex14 (NM_031386.1,1170-1188).
ccggaaccttactatgata

SEQ ID NO: 516231 - DNA, 19 bp, Mus musculus
  siRNA target sequence for Tex14 (NM_031386.1,1181-1199).
ctatgatattgttaagtca

SEQ ID NO: 516232 - DNA, 19 bp, Mus musculus
  siRNA target sequence for Tex14 (NM_031386.1,1215-1233).
cagaagaaccgaacaatga

SEQ ID NO: 516233 - DNA, 19 bp, Mus musculus
  siRNA target sequence for Tex14 (NM_031386.1,1228-1246).
caatgaaccttcaagatat

SEQ ID NO: 516234 - DNA, 19 bp, Mus musculus
  siRNA target sequence for Tex14 (NM_031386.1,1232-1250).
gaaccttcaagatattcgt

SEQ ID NO: 516235 - DNA, 19 bp, Mus musculus
  siRNA target sequence for Tex14 (NM_031386.1,1235-1253).
ccttcaagatattcgttat

SEQ ID NO: 516236 - DNA, 19 bp, Mus musculus
  siRNA target sequence for Tex14 (NM_031386.1,1236-1254).
cttcaagatattcgttata

SEQ ID NO: 516237 - DNA, 19 bp, Mus musculus
  siRNA target sequence for Tex14 (NM_031386.1,1262-1280).
gaatgacttaaaggaattt

SEQ ID NO: 516238 - DNA, 19 bp, Mus musculus
  siRNA target sequence for Tex14 (NM_031386.1,1332-1350).
gaaccccatcctgatgtta

SEQ ID NO: 516239 - DNA, 19 bp, Mus musculus
  siRNA target sequence for Tex14 (NM_031386.1,1335-1353).
ccccatcctgatgttaata

SEQ ID NO: 516240 - DNA, 19 bp, Mus musculus
  siRNA target sequence for Tex14 (NM_031386.1,1359-1377).
ctaggtctaacttcagaat

SEQ ID NO: 516241 - DNA, 19 bp, Mus musculus
  siRNA target sequence for Tex14 (NM_031386.1,1452-1470).
cactcctttctcactgtaa

SEQ ID NO: 516242 - DNA, 19 bp, Mus musculus
  siRNA target sequence for Tex14 (NM_031386.1,1482-1500).
gctcctcagaccctagatt

SEQ ID NO: 516243 - DNA, 19 bp, Mus musculus
  siRNA target sequence for Tex14 (NM_031386.1,1517-1535).
gaaacctgacaatgcaaat

SEQ ID NO: 516244 - DNA, 19 bp, Mus musculus
  siRNA target sequence for Tex14 (NM_031386.1,1749-1767).
gataagatggagagagaat

SEQ ID NO: 516245 - DNA, 19 bp, Mus musculus
  siRNA target sequence for Tex14 (NM_031386.1,1780-1798).
gtgaagaggacaaaagcat

SEQ ID NO: 516246 - DNA, 19 bp, Mus musculus
  siRNA target sequence for Tex14 (NM_031386.1,1806-1824).
gttgacacagaccttcttt

SEQ ID NO: 516247 - DNA, 19 bp, Mus musculus
  siRNA target sequence for Tex14 (NM_031386.1,1833-1851).
gatgactggcaaagtgatt

SEQ ID NO: 516248 - DNA, 19 bp, Mus musculus
  siRNA target sequence for Tex14 (NM_031386.1,1912-1930).
ggtccaagactgatgagta

SEQ ID NO: 516249 - DNA, 19 bp, Mus musculus
  siRNA target sequence for Tex14 (NM_031386.1,1913-1931).
gtccaagactgatgagtat

SEQ ID NO: 516250 - DNA, 19 bp, Mus musculus
  siRNA target sequence for Tex14 (NM_031386.1,1921-1939).
ctgatgagtatgtcagtaa

SEQ ID NO: 516251 - DNA, 19 bp, Mus musculus
  siRNA target sequence for Tex14 (NM_031386.1,1923-1941).
gatgagtatgtcagtaagt

SEQ ID NO: 516252 - DNA, 19 bp, Mus musculus
  siRNA target sequence for Tex14 (NM_031386.1,1936-1954).
gtaagtgtgtgctgaatct

SEQ ID NO: 516253 - DNA, 19 bp, Mus musculus
  siRNA target sequence for Tex14 (NM_031386.1,2065-2083).
gtttgcgggatgcttcatt

SEQ ID NO: 516254 - DNA, 19 bp, Mus musculus
  siRNA target sequence for Tex14 (NM_031386.1,2070-2088).
cgggatgcttcattaaagt

SEQ ID NO: 516255 - DNA, 19 bp, Mus musculus
  siRNA target sequence for Tex14 (NM_031386.1,2071-2089).
gggatgcttcattaaagtt

SEQ ID NO: 516256 - DNA, 19 bp, Mus musculus
  siRNA target sequence for Tex14 (NM_031386.1,2134-2152).
cctatcttcctcctgttat

SEQ ID NO: 516257 - DNA, 19 bp, Mus musculus
  siRNA target sequence for Tex14 (NM_031386.1,2139-2157).
cttcctcctgttatgcaat

SEQ ID NO: 516258 - DNA, 19 bp, Mus musculus
  siRNA target sequence for Tex14 (NM_031386.1,2235-2253).
caagagggacattttagca

SEQ ID NO: 516259 - DNA, 19 bp, Mus musculus
  siRNA target sequence for Tex14 (NM_031386.1,2320-2338).
gggactgctcagagctaaa

SEQ ID NO: 516260 - DNA, 19 bp, Mus musculus
  siRNA target sequence for Tex14 (NM_031386.1,2458-2476).
cgtctgtgtcttctgaaat

SEQ ID NO: 516261 - DNA, 19 bp, Mus musculus
  siRNA target sequence for Tex14 (NM_031386.1,2511-2529).
ggagaggcacacttgaaat

SEQ ID NO: 516262 - DNA, 19 bp, Mus musculus
  siRNA target sequence for Tex14 (NM_031386.1,2530-2548).
ggagattggcagtaaaaga

SEQ ID NO: 516263 - DNA, 19 bp, Mus musculus
  siRNA target sequence for Tex14 (NM_031386.1,2533-2551).
gattggcagtaaaagaaat

SEQ ID NO: 516264 - DNA, 19 bp, Mus musculus
  siRNA target sequence for Tex14 (NM_031386.1,2570-2588).
cggacagctcttattacct

SEQ ID NO: 516265 - DNA, 19 bp, Mus musculus
  siRNA target sequence for Tex14 (NM_031386.1,2579-2597).
cttattacctccttggaat

SEQ ID NO: 516266 - DNA, 19 bp, Mus musculus
  siRNA target sequence for Tex14 (NM_031386.1,2608-2626).
gtgcgccttttgagagtaa

SEQ ID NO: 516267 - DNA, 19 bp, Mus musculus
  siRNA target sequence for Tex14 (NM_031386.1,2612-2630).
gccttttgagagtaaggtt

SEQ ID NO: 516268 - DNA, 19 bp, Mus musculus
  siRNA target sequence for Tex14 (NM_031386.1,2689-2707).
ggcagcacattttagaata

SEQ ID NO: 516269 - DNA, 19 bp, Mus musculus
  siRNA target sequence for Tex14 (NM_031386.1,2729-2747).
caaaggaaatacgaagttt

SEQ ID NO: 516270 - DNA, 19 bp, Mus musculus
  siRNA target sequence for Tex14 (NM_031386.1,2764-2782).
gtgactgtgacaagaacaa

SEQ ID NO: 516271 - DNA, 19 bp, Mus musculus
  siRNA target sequence for Tex14 (NM_031386.1,2804-2822).
ccagcgcttcactggtatt

SEQ ID NO: 516272 - DNA, 19 bp, Mus musculus
  siRNA target sequence for Tex14 (NM_031386.1,2805-2823).
cagcgcttcactggtatta

SEQ ID NO: 516273 - DNA, 19 bp, Mus musculus
  siRNA target sequence for Tex14 (NM_031386.1,2807-2825).
gcgcttcactggtattaga

SEQ ID NO: 516274 - DNA, 19 bp, Mus musculus
  siRNA target sequence for Tex14 (NM_031386.1,2808-2826).
cgcttcactggtattagat

SEQ ID NO: 516275 - DNA, 19 bp, Mus musculus
  siRNA target sequence for Tex14 (NM_031386.1,2809-2827).
gcttcactggtattagata

SEQ ID NO: 516276 - DNA, 19 bp, Mus musculus
  siRNA target sequence for Tex14 (NM_031386.1,2818-2836).
gtattagatacccattctt

SEQ ID NO: 516277 - DNA, 19 bp, Mus musculus
  siRNA target sequence for Tex14 (NM_031386.1,2929-2947).
ccataggagacgactttga

SEQ ID NO: 516278 - DNA, 19 bp, Mus musculus
  siRNA target sequence for Tex14 (NM_031386.1,2930-2948).
cataggagacgactttgaa

SEQ ID NO: 516279 - DNA, 19 bp, Mus musculus
  siRNA target sequence for Tex14 (NM_031386.1,2939-2957).
cgactttgaaagattccaa

SEQ ID NO: 516280 - DNA, 19 bp, Mus musculus
  siRNA target sequence for Tex14 (NM_031386.1,2969-2987).
ccaacgtcaaggctatgtt

SEQ ID NO: 516281 - DNA, 19 bp, Mus musculus
  siRNA target sequence for Tex14 (NM_031386.1,2974-2992).
gtcaaggctatgttgaaga

SEQ ID NO: 516282 - DNA, 19 bp, Mus musculus
  siRNA target sequence for Tex14 (NM_031386.1,2980-2998).
gctatgttgaagaaaattt

SEQ ID NO: 516283 - DNA, 19 bp, Mus musculus
  siRNA target sequence for Tex14 (NM_031386.1,3048-3066).
cagtttcaagctattcaat

SEQ ID NO: 516284 - DNA, 19 bp, Mus musculus
  siRNA target sequence for Tex14 (NM_031386.1,3101-3119).
gacgccaaaggaactgaaa

SEQ ID NO: 516285 - DNA, 19 bp, Mus musculus
  siRNA target sequence for Tex14 (NM_031386.1,3130-3148).
catcactgacagacattca

SEQ ID NO: 516286 - DNA, 19 bp, Mus musculus
  siRNA target sequence for Tex14 (NM_031386.1,3133-3151).
cactgacagacattcaaga

SEQ ID NO: 516287 - DNA, 19 bp, Mus musculus
  siRNA target sequence for Tex14 (NM_031386.1,3157-3175).
ccagcatcacctatgatca

SEQ ID NO: 516288 - DNA, 19 bp, Mus musculus
  siRNA target sequence for Tex14 (NM_031386.1,3177-3195).
gacggctattttaaggaaa

SEQ ID NO: 516289 - DNA, 19 bp, Mus musculus
  siRNA target sequence for Tex14 (NM_031386.1,3249-3267).
ctaagcccagagtcgattt

SEQ ID NO: 516290 - DNA, 19 bp, Mus musculus
  siRNA target sequence for Tex14 (NM_031386.1,3254-3272).
cccagagtcgatttcttca

SEQ ID NO: 516291 - DNA, 19 bp, Mus musculus
  siRNA target sequence for Tex14 (NM_031386.1,3288-3306).
gaagactgccttgaaaata

SEQ ID NO: 516292 - DNA, 19 bp, Mus musculus
  siRNA target sequence for Tex14 (NM_031386.1,3296-3314).
ccttgaaaataccacattt

SEQ ID NO: 516293 - DNA, 19 bp, Mus musculus
  siRNA target sequence for Tex14 (NM_031386.1,3308-3326).
cacatttcatgttaaaaga

SEQ ID NO: 516294 - DNA, 19 bp, Mus musculus
  siRNA target sequence for Tex14 (NM_031386.1,3318-3336).
gttaaaagaggatctacat

SEQ ID NO: 516295 - DNA, 19 bp, Mus musculus
  siRNA target sequence for Tex14 (NM_031386.1,3348-3366).
ggccaagaagctatgagaa

SEQ ID NO: 516296 - DNA, 19 bp, Mus musculus
  siRNA target sequence for Tex14 (NM_031386.1,3351-3369).
caagaagctatgagaactt

SEQ ID NO: 516297 - DNA, 19 bp, Mus musculus
  siRNA target sequence for Tex14 (NM_031386.1,3371-3389).
gtctgccaaatttacaact

SEQ ID NO: 516298 - DNA, 19 bp, Mus musculus
  siRNA target sequence for Tex14 (NM_031386.1,3403-3421).
ctaagagcctggaatcact

SEQ ID NO: 516299 - DNA, 19 bp, Mus musculus
  siRNA target sequence for Tex14 (NM_031386.1,3418-3436).
cacttctcgcttcttctaa

SEQ ID NO: 516300 - DNA, 19 bp, Mus musculus
  siRNA target sequence for Tex14 (NM_031386.1,3420-3438).
cttctcgcttcttctaaaa

SEQ ID NO: 516301 - DNA, 19 bp, Mus musculus
  siRNA target sequence for Tex14 (NM_031386.1,3453-3471).
ctgactgactccaagagat

SEQ ID NO: 516302 - DNA, 19 bp, Mus musculus
  siRNA target sequence for Tex14 (NM_031386.1,3463-3481).
ccaagagattgtgtatgtt

SEQ ID NO: 516303 - DNA, 19 bp, Mus musculus
  siRNA target sequence for Tex14 (NM_031386.1,3488-3506).
gactggctcttctaacgtt

SEQ ID NO: 516304 - DNA, 19 bp, Mus musculus
  siRNA target sequence for Tex14 (NM_031386.1,3503-3521).
cgtttctgcggcatttgta

SEQ ID NO: 516305 - DNA, 19 bp, Mus musculus
  siRNA target sequence for Tex14 (NM_031386.1,3504-3522).
gtttctgcggcatttgtaa

SEQ ID NO: 516306 - DNA, 19 bp, Mus musculus
  siRNA target sequence for Tex14 (NM_031386.1,3510-3528).
gcggcatttgtaacatcaa

SEQ ID NO: 516307 - DNA, 19 bp, Mus musculus
  siRNA target sequence for Tex14 (NM_031386.1,3512-3530).
ggcatttgtaacatcaact

SEQ ID NO: 516308 - DNA, 19 bp, Mus musculus
  siRNA target sequence for Tex14 (NM_031386.1,3580-3598).
ctcaacagcatcttgatga

SEQ ID NO: 516309 - DNA, 19 bp, Mus musculus
  siRNA target sequence for Tex14 (NM_031386.1,3617-3635).
ggagctacttgatgaaatt

SEQ ID NO: 516310 - DNA, 19 bp, Mus musculus
  siRNA target sequence for Tex14 (NM_031386.1,3891-3909).
ggctctacaagggagaaaa

SEQ ID NO: 516311 - DNA, 19 bp, Mus musculus
  siRNA target sequence for Tex14 (NM_031386.1,4052-4070).
cgaaccttccaggataatt

SEQ ID NO: 516312 - DNA, 19 bp, Mus musculus
  siRNA target sequence for Tgfbr1 (NM_009370.2,87-105).
cgaaggcattacagtgttt

SEQ ID NO: 516313 - DNA, 19 bp, Mus musculus
  siRNA target sequence for Tgfbr1 (NM_009370.2,110-128).
cacctctgtacaaaggata

SEQ ID NO: 516314 - DNA, 19 bp, Mus musculus
  siRNA target sequence for Tgfbr1 (NM_009370.2,142-160).
gacagatggtctttgcttt

SEQ ID NO: 516315 - DNA, 19 bp, Mus musculus
  siRNA target sequence for Tgfbr1 (NM_009370.2,177-195).
ccacagacaaagttataca

SEQ ID NO: 516316 - DNA, 19 bp, Mus musculus
  siRNA target sequence for Tgfbr1 (NM_009370.2,182-200).
gacaaagttatacacaata

SEQ ID NO: 516317 - DNA, 19 bp, Mus musculus
  siRNA target sequence for Tgfbr1 (NM_009370.2,184-202).
caaagttatacacaatagt

SEQ ID NO: 516318 - DNA, 19 bp, Mus musculus
  siRNA target sequence for Tgfbr1 (NM_009370.2,231-249).
ctcgagacaggccatttgt

SEQ ID NO: 516319 - DNA, 19 bp, Mus musculus
  siRNA target sequence for Tgfbr1 (NM_009370.2,272-290).
ggggcagttactacaacat

SEQ ID NO: 516320 - DNA, 19 bp, Mus musculus
  siRNA target sequence for Tgfbr1 (NM_009370.2,273-291).
gggcagttactacaacata

SEQ ID NO: 516321 - DNA, 19 bp, Mus musculus
  siRNA target sequence for Tgfbr1 (NM_009370.2,274-292).
ggcagttactacaacatat

SEQ ID NO: 516322 - DNA, 19 bp, Mus musculus
  siRNA target sequence for Tgfbr1 (NM_009370.2,275-293).
gcagttactacaacatatt

SEQ ID NO: 516323 - DNA, 19 bp, Mus musculus
  siRNA target sequence for Tgfbr1 (NM_009370.2,336-354).
caggacctttttcagaaaa

SEQ ID NO: 516324 - DNA, 19 bp, Mus musculus
  siRNA target sequence for Tgfbr1 (NM_009370.2,451-469).
ccataaccgcactgtcatt

SEQ ID NO: 516325 - DNA, 19 bp, Mus musculus
  siRNA target sequence for Tgfbr1 (NM_009370.2,472-490).
ccaccgtgtgccaaatgaa

SEQ ID NO: 516326 - DNA, 19 bp, Mus musculus
  siRNA target sequence for Tgfbr1 (NM_009370.2,501-519).
cactagatcgccctttcat

SEQ ID NO: 516327 - DNA, 19 bp, Mus musculus
  siRNA target sequence for Tgfbr1 (NM_009370.2,503-521).
ctagatcgccctttcattt

SEQ ID NO: 516328 - DNA, 19 bp, Mus musculus
  siRNA target sequence for Tgfbr1 (NM_009370.2,522-540).
cagagggcaccaccttaaa

SEQ ID NO: 516329 - DNA, 19 bp, Mus musculus
  siRNA target sequence for Tgfbr1 (NM_009370.2,526-544).
gggcaccaccttaaaagat

SEQ ID NO: 516330 - DNA, 19 bp, Mus musculus
  siRNA target sequence for Tgfbr1 (NM_009370.2,528-546).
gcaccaccttaaaagattt

SEQ ID NO: 516331 - DNA, 19 bp, Mus musculus
  siRNA target sequence for Tgfbr1 (NM_009370.2,531-549).
ccaccttaaaagatttaat

SEQ ID NO: 516332 - DNA, 19 bp, Mus musculus
  siRNA target sequence for Tgfbr1 (NM_009370.2,571-589).
gtctggatcaggtttacca

SEQ ID NO: 516333 - DNA, 19 bp, Mus musculus
  siRNA target sequence for Tgfbr1 (NM_009370.2,590-608).
ctgcttgttcaaagaacaa

SEQ ID NO: 516334 - DNA, 19 bp, Mus musculus
  siRNA target sequence for Tgfbr1 (NM_009370.2,612-630).
ccaggaccattgtgttaca

SEQ ID NO: 516335 - DNA, 19 bp, Mus musculus
  siRNA target sequence for Tgfbr1 (NM_009370.2,613-631).
caggaccattgtgttacaa

SEQ ID NO: 516336 - DNA, 19 bp, Mus musculus
  siRNA target sequence for Tgfbr1 (NM_009370.2,746-764).
gagatttatcagactgtaa

SEQ ID NO: 516337 - DNA, 19 bp, Mus musculus
  siRNA target sequence for Tgfbr1 (NM_009370.2,761-779).
gtaatgttacgccatgaaa

SEQ ID NO: 516338 - DNA, 19 bp, Mus musculus
  siRNA target sequence for Tgfbr1 (NM_009370.2,835-853).
gtggttggtgtcagattat

SEQ ID NO: 516339 - DNA, 19 bp, Mus musculus
  siRNA target sequence for Tgfbr1 (NM_009370.2,837-855).
ggttggtgtcagattatca

SEQ ID NO: 516340 - DNA, 19 bp, Mus musculus
  siRNA target sequence for Tgfbr1 (NM_009370.2,838-856).
gttggtgtcagattatcat

SEQ ID NO: 516341 - DNA, 19 bp, Mus musculus
  siRNA target sequence for Tgfbr1 (NM_009370.2,859-877).
gcatggatcccttttcgat

SEQ ID NO: 516342 - DNA, 19 bp, Mus musculus
  siRNA target sequence for Tgfbr1 (NM_009370.2,860-878).
catggatcccttttcgatt

SEQ ID NO: 516343 - DNA, 19 bp, Mus musculus
  siRNA target sequence for Tgfbr1 (NM_009370.2,863-881).
ggatcccttttcgattact

SEQ ID NO: 516344 - DNA, 19 bp, Mus musculus
  siRNA target sequence for Tgfbr1 (NM_009370.2,864-882).
gatcccttttcgattactt

SEQ ID NO: 516345 - DNA, 19 bp, Mus musculus
  siRNA target sequence for Tgfbr1 (NM_009370.2,867-885).
cccttttcgattacttgaa

SEQ ID NO: 516346 - DNA, 19 bp, Mus musculus
  siRNA target sequence for Tgfbr1 (NM_009370.2,868-886).
ccttttcgattacttgaat

SEQ ID NO: 516347 - DNA, 19 bp, Mus musculus
  siRNA target sequence for Tgfbr1 (NM_009370.2,869-887).
cttttcgattacttgaata

SEQ ID NO: 516348 - DNA, 19 bp, Mus musculus
  siRNA target sequence for Tgfbr1 (NM_009370.2,875-893).
gattacttgaatagataca

SEQ ID NO: 516349 - DNA, 19 bp, Mus musculus
  siRNA target sequence for Tgfbr1 (NM_009370.2,883-901).
gaatagatacactgttact

SEQ ID NO: 516350 - DNA, 19 bp, Mus musculus
  siRNA target sequence for Tgfbr1 (NM_009370.2,894-912).
ctgttactgtggaaggaat

SEQ ID NO: 516351 - DNA, 19 bp, Mus musculus
  siRNA target sequence for Tgfbr1 (NM_009370.2,989-1007).
gctattgcccatagagatt

SEQ ID NO: 516352 - DNA, 19 bp, Mus musculus
  siRNA target sequence for Tgfbr1 (NM_009370.2,1018-1036).
gaatatcttggtgaagaaa

SEQ ID NO: 516353 - DNA, 19 bp, Mus musculus
  siRNA target sequence for Tgfbr1 (NM_009370.2,1089-1107).
ccacagatacaattgatat

SEQ ID NO: 516354 - DNA, 19 bp, Mus musculus
  siRNA target sequence for Tgfbr1 (NM_009370.2,1090-1108).
cacagatacaattgatatt

SEQ ID NO: 516355 - DNA, 19 bp, Mus musculus
  siRNA target sequence for Tgfbr1 (NM_009370.2,1117-1135).
ccacagagtaggcactaaa

SEQ ID NO: 516356 - DNA, 19 bp, Mus musculus
  siRNA target sequence for Tgfbr1 (NM_009370.2,1122-1140).
gagtaggcactaaaaggta

SEQ ID NO: 516357 - DNA, 19 bp, Mus musculus
  siRNA target sequence for Tgfbr1 (NM_009370.2,1146-1164).
cccctgaagttctagatga

SEQ ID NO: 516358 - DNA, 19 bp, Mus musculus
  siRNA target sequence for Tgfbr1 (NM_009370.2,1147-1165).
ccctgaagttctagatgat

SEQ ID NO: 516359 - DNA, 19 bp, Mus musculus
  siRNA target sequence for Tgfbr1 (NM_009370.2,1160-1178).
gatgattccataaatatga

SEQ ID NO: 516360 - DNA, 19 bp, Mus musculus
  siRNA target sequence for Tgfbr1 (NM_009370.2,1199-1217).
cgcgctgacatctatgcaa

SEQ ID NO: 516361 - DNA, 19 bp, Mus musculus
  siRNA target sequence for Tgfbr1 (NM_009370.2,1308-1326).
ctgatccatcggttgaaga

SEQ ID NO: 516362 - DNA, 19 bp, Mus musculus
  siRNA target sequence for Tgfbr1 (NM_009370.2,1310-1328).
gatccatcggttgaagaaa

SEQ ID NO: 516363 - DNA, 19 bp, Mus musculus
  siRNA target sequence for Tgfbr1 (NM_009370.2,1325-1343).
gaaatgagaaaagtagttt

SEQ ID NO: 516364 - DNA, 19 bp, Mus musculus
  siRNA target sequence for Tgfbr1 (NM_009370.2,1340-1358).
gtttgcgaacagaagttaa

SEQ ID NO: 516365 - DNA, 19 bp, Mus musculus
  siRNA target sequence for Tgfbr1 (NM_009370.2,1351-1369).
gaagttaaggccaaatatt

SEQ ID NO: 516366 - DNA, 19 bp, Mus musculus
  siRNA target sequence for Tgfbr1 (NM_009370.2,1354-1372).
gttaaggccaaatattcca

SEQ ID NO: 516367 - DNA, 19 bp, Mus musculus
  siRNA target sequence for Tgfbr1 (NM_009370.2,1399-1417).
gagagtgatggctaaaatt

SEQ ID NO: 516368 - DNA, 19 bp, Mus musculus
  siRNA target sequence for Tgfbr1 (NM_009370.2,1401-1419).
gagtgatggctaaaattat

SEQ ID NO: 516369 - DNA, 19 bp, Mus musculus
  siRNA target sequence for Tgfbr1 (NM_009370.2,1403-1421).
gtgatggctaaaattatga

SEQ ID NO: 516370 - DNA, 19 bp, Mus musculus
  siRNA target sequence for Tgfbr1 (NM_009370.2,1454-1472).
ctgacagctttgcgaatta

SEQ ID NO: 516371 - DNA, 19 bp, Mus musculus
  siRNA target sequence for Tgfbr1 (NM_009370.2,1456-1474).
gacagctttgcgaattaaa

SEQ ID NO: 516372 - DNA, 19 bp, Mus musculus
  siRNA target sequence for Tgfbr1 (NM_009370.2,1499-1517).
caggaaggcatcaaaatgt

SEQ ID NO: 516373 - DNA, 19 bp, Mus musculus
  siRNA target sequence for Tgfbr2 (NM_009371.2,399-417).
gaccatccatccactgaaa

SEQ ID NO: 516374 - DNA, 19 bp, Mus musculus
  siRNA target sequence for Tgfbr2 (NM_009371.2,405-423).
ccatccactgaaacatttt

SEQ ID NO: 516375 - DNA, 19 bp, Mus musculus
  siRNA target sequence for Tgfbr2 (NM_009371.2,406-424).
catccactgaaacatttta

SEQ ID NO: 516376 - DNA, 19 bp, Mus musculus
  siRNA target sequence for Tgfbr2 (NM_009371.2,557-575).
gtgagaagccgcatgaagt

SEQ ID NO: 516377 - DNA, 19 bp, Mus musculus
  siRNA target sequence for Tgfbr2 (NM_009371.2,597-615).
gaacgacaagaacattact

SEQ ID NO: 516378 - DNA, 19 bp, Mus musculus
  siRNA target sequence for Tgfbr2 (NM_009371.2,680-698).
ctcccaagtgtgtcatgaa

SEQ ID NO: 516379 - DNA, 19 bp, Mus musculus
  siRNA target sequence for Tgfbr2 (NM_009371.2,748-766).
gaagagtgcaacgattaca

SEQ ID NO: 516380 - DNA, 19 bp, Mus musculus
  siRNA target sequence for Tgfbr2 (NM_009371.2,751-769).
gagtgcaacgattacatca

SEQ ID NO: 516381 - DNA, 19 bp, Mus musculus
  siRNA target sequence for Tgfbr2 (NM_009371.2,755-773).
gcaacgattacatcatctt

SEQ ID NO: 516382 - DNA, 19 bp, Mus musculus
  siRNA target sequence for Tgfbr2 (NM_009371.2,794-812).
gcagtcccgacctgttgtt

SEQ ID NO: 516383 - DNA, 19 bp, Mus musculus
  siRNA target sequence for Tgfbr2 (NM_009371.2,946-964).
cggaaactgatggatttca

SEQ ID NO: 516384 - DNA, 19 bp, Mus musculus
  siRNA target sequence for Tgfbr2 (NM_009371.2,1013-1031).
ccacgtgcgccaacaacat

SEQ ID NO: 516385 - DNA, 19 bp, Mus musculus
  siRNA target sequence for Tgfbr2 (NM_009371.2,1088-1106).
gcttcgccgaggtctacaa

SEQ ID NO: 516386 - DNA, 19 bp, Mus musculus
  siRNA target sequence for Tgfbr2 (NM_009371.2,1176-1194).
gtactcctcgtggaaaaca

SEQ ID NO: 516387 - DNA, 19 bp, Mus musculus
  siRNA target sequence for Tgfbr2 (NM_009371.2,1201-1219).
gacatcttctccgatatca

SEQ ID NO: 516388 - DNA, 19 bp, Mus musculus
  siRNA target sequence for Tgfbr2 (NM_009371.2,1472-1490).
gctctaacatcctagtgaa

SEQ ID NO: 516389 - DNA, 19 bp, Mus musculus
  siRNA target sequence for Tgfbr2 (NM_009371.2,1582-1600).
gtgggaacggcaagataca

SEQ ID NO: 516390 - DNA, 19 bp, Mus musculus
  siRNA target sequence for Tgfbr2 (NM_009371.2,1980-1998).
ctgctcccaggagaagatt

SEQ ID NO: 516391 - DNA, 19 bp, Mus musculus
  siRNA target sequence for Tgfbr2 (NM_009371.2,2005-2023).
gatggctcgctgaacacta

SEQ ID NO: 516392 - DNA, 19 bp, Mus musculus
  siRNA target sequence for Tgfbr2 (NM_029575.2,82-100).
gttcccaagtcggttaaca

SEQ ID NO: 516393 - DNA, 19 bp, Mus musculus
  siRNA target sequence for Tgfbr2 (NM_029575.2,92-110).
cggttaacagtgatgtcat

SEQ ID NO: 516394 - DNA, 19 bp, Mus musculus
  siRNA target sequence for Tie1 (NM_011587.1,419-437).
gcgtctgttgacttaacat

SEQ ID NO: 516395 - DNA, 19 bp, Mus musculus
  siRNA target sequence for Tie1 (NM_011587.1,420-438).
cgtctgttgacttaacatt

SEQ ID NO: 516396 - DNA, 19 bp, Mus musculus
  siRNA target sequence for Tie1 (NM_011587.1,633-651).
ccaagccctcggatttggt

SEQ ID NO: 516397 - DNA, 19 bp, Mus musculus
  siRNA target sequence for Tie1 (NM_011587.1,634-652).
caagccctcggatttggta

SEQ ID NO: 516398 - DNA, 19 bp, Mus musculus
  siRNA target sequence for Tie1 (NM_011587.1,688-706).
gcgcactcgagttctctat

SEQ ID NO: 516399 - DNA, 19 bp, Mus musculus
  siRNA target sequence for Tie1 (NM_011587.1,690-708).
gcactcgagttctctatgt

SEQ ID NO: 516400 - DNA, 19 bp, Mus musculus
  siRNA target sequence for Tie1 (NM_011587.1,815-833).
gacgtgatctggaagaaca

SEQ ID NO: 516401 - DNA, 19 bp, Mus musculus
  siRNA target sequence for Tie1 (NM_011587.1,832-850).
caacggatcctacttcaat

SEQ ID NO: 516402 - DNA, 19 bp, Mus musculus
  siRNA target sequence for Tie1 (NM_011587.1,870-888).
ccgatgacgggcgttttca

SEQ ID NO: 516403 - DNA, 19 bp, Mus musculus
  siRNA target sequence for Tie1 (NM_011587.1,871-889).
cgatgacgggcgttttcaa

SEQ ID NO: 516404 - DNA, 19 bp, Mus musculus
  siRNA target sequence for Tie1 (NM_011587.1,914-932).
ccatcaagtggcatctaca

SEQ ID NO: 516405 - DNA, 19 bp, Mus musculus
  siRNA target sequence for Tie1 (NM_011587.1,1016-1034).
ccaggatgtgtcaaggatt

SEQ ID NO: 516406 - DNA, 19 bp, Mus musculus
  siRNA target sequence for Tie1 (NM_011587.1,1126-1144).
ctgcagggagggtcgtttt

SEQ ID NO: 516407 - DNA, 19 bp, Mus musculus
  siRNA target sequence for Tie1 (NM_011587.1,1129-1147).
cagggagggtcgttttgga

SEQ ID NO: 516408 - DNA, 19 bp, Mus musculus
  siRNA target sequence for Tie1 (NM_011587.1,1422-1440).
ccacagaggtggagttcaa

SEQ ID NO: 516409 - DNA, 19 bp, Mus musculus
  siRNA target sequence for Tie1 (NM_011587.1,1664-1682).
cgcttcaaggtcaatgtca

SEQ ID NO: 516410 - DNA, 19 bp, Mus musculus
  siRNA target sequence for Tie1 (NM_011587.1,1847-1865).
gatcccagtgagaatgtga

SEQ ID NO: 516411 - DNA, 19 bp, Mus musculus
  siRNA target sequence for Tie1 (NM_011587.1,1949-1967).
ggaccttctgcccttatga

SEQ ID NO: 516412 - DNA, 19 bp, Mus musculus
  siRNA target sequence for Tie1 (NM_011587.1,1952-1970).
ccttctgcccttatgacta

SEQ ID NO: 516413 - DNA, 19 bp, Mus musculus
  siRNA target sequence for Tie1 (NM_011587.1,2067-2085).
cactgtccggtgatggttt

SEQ ID NO: 516414 - DNA, 19 bp, Mus musculus
  siRNA target sequence for Tie1 (NM_011587.1,2124-2142).
ggcgggagaacatctcatt

SEQ ID NO: 516415 - DNA, 19 bp, Mus musculus
  siRNA target sequence for Tie1 (NM_011587.1,2197-2215).
gctggatgtgcgactgtat

SEQ ID NO: 516416 - DNA, 19 bp, Mus musculus
  siRNA target sequence for Tie1 (NM_011587.1,2201-2219).
gatgtgcgactgtatcact

SEQ ID NO: 516417 - DNA, 19 bp, Mus musculus
  siRNA target sequence for Tie1 (NM_011587.1,2351-2369).
gctccgtctgggcctatat

SEQ ID NO: 516418 - DNA, 19 bp, Mus musculus
  siRNA target sequence for Tie1 (NM_011587.1,2355-2373).
cgtctgggcctatatccaa

SEQ ID NO: 516419 - DNA, 19 bp, Mus musculus
  siRNA target sequence for Tie1 (NM_011587.1,2443-2461).
ggagacaagcatcattgtt

SEQ ID NO: 516420 - DNA, 19 bp, Mus musculus
  siRNA target sequence for Tie1 (NM_011587.1,2459-2477).
gttcgtggcctcaatgcta

SEQ ID NO: 516421 - DNA, 19 bp, Mus musculus
  siRNA target sequence for Tie1 (NM_011587.1,2470-2488).
caatgctagcacacgatat

SEQ ID NO: 516422 - DNA, 19 bp, Mus musculus
  siRNA target sequence for Tie1 (NM_011587.1,2474-2492).
gctagcacacgatatcttt

SEQ ID NO: 516423 - DNA, 19 bp, Mus musculus
  siRNA target sequence for Tie1 (NM_011587.1,2475-2493).
ctagcacacgatatctttt

SEQ ID NO: 516424 - DNA, 19 bp, Mus musculus
  siRNA target sequence for Tie1 (NM_011587.1,2519-2537).
cttggcgactggagcaata

SEQ ID NO: 516425 - DNA, 19 bp, Mus musculus
  siRNA target sequence for Tie1 (NM_011587.1,2523-2541).
gcgactggagcaatacagt

SEQ ID NO: 516426 - DNA, 19 bp, Mus musculus
  siRNA target sequence for Tie1 (NM_011587.1,2524-2542).
cgactggagcaatacagta

SEQ ID NO: 516427 - DNA, 19 bp, Mus musculus
  siRNA target sequence for Tie1 (NM_011587.1,2945-2963).
gcagccatcaagatgctaa

SEQ ID NO: 516428 - DNA, 19 bp, Mus musculus
  siRNA target sequence for Tie1 (NM_011587.1,2995-3013).
ctttgcaggtgaactagaa

SEQ ID NO: 516429 - DNA, 19 bp, Mus musculus
  siRNA target sequence for Tie1 (NM_011587.1,3032-3050).
caccaccccaatattatca

SEQ ID NO: 516430 - DNA, 19 bp, Mus musculus
  siRNA target sequence for Tie1 (NM_011587.1,3068-3086).
gagaaccgaggctacttgt

SEQ ID NO: 516431 - DNA, 19 bp, Mus musculus
  siRNA target sequence for Tie1 (NM_011587.1,3070-3088).
gaaccgaggctacttgtat

SEQ ID NO: 516432 - DNA, 19 bp, Mus musculus
  siRNA target sequence for Tie1 (NM_011587.1,3073-3091).
ccgaggctacttgtatatt

SEQ ID NO: 516433 - DNA, 19 bp, Mus musculus
  siRNA target sequence for Tie1 (NM_011587.1,3082-3100).
cttgtatattgctatcgaa

SEQ ID NO: 516434 - DNA, 19 bp, Mus musculus
  siRNA target sequence for Tie1 (NM_011587.1,3258-3276).
gtgagaagcagttcattca

SEQ ID NO: 516435 - DNA, 19 bp, Mus musculus
  siRNA target sequence for Tie1 (NM_011587.1,3398-3416).
cgttggatggccattgagt

SEQ ID NO: 516436 - DNA, 19 bp, Mus musculus
  siRNA target sequence for Tie1 (NM_011587.1,3648-3666).
ctcagatcgcactacagtt

SEQ ID NO: 516437 - DNA, 19 bp, Mus musculus
  siRNA target sequence for Timm44 (NM_011592.1,59-77).
cctaggcagcggaatccaa

SEQ ID NO: 516438 - DNA, 19 bp, Mus musculus
  siRNA target sequence for Timm44 (NM_011592.1,60-78).
ctaggcagcggaatccaat

SEQ ID NO: 516439 - DNA, 19 bp, Mus musculus
  siRNA target sequence for Timm44 (NM_011592.1,64-82).
gcagcggaatccaatttct

SEQ ID NO: 516440 - DNA, 19 bp, Mus musculus
  siRNA target sequence for Timm44 (NM_011592.1,105-123).
ggttcaagctaccagataa

SEQ ID NO: 516441 - DNA, 19 bp, Mus musculus
  siRNA target sequence for Timm44 (NM_011592.1,141-159).
ctgacactgaccaaatctt

SEQ ID NO: 516442 - DNA, 19 bp, Mus musculus
  siRNA target sequence for Timm44 (NM_011592.1,143-161).
gacactgaccaaatcttat

SEQ ID NO: 516443 - DNA, 19 bp, Mus musculus
  siRNA target sequence for Timm44 (NM_011592.1,149-167).
gaccaaatcttattcttct

SEQ ID NO: 516444 - DNA, 19 bp, Mus musculus
  siRNA target sequence for Timm44 (NM_011592.1,190-208).
caggcttgctagataacat

SEQ ID NO: 516445 - DNA, 19 bp, Mus musculus
  siRNA target sequence for Timm44 (NM_011592.1,192-210).
ggcttgctagataacatca

SEQ ID NO: 516446 - DNA, 19 bp, Mus musculus
  siRNA target sequence for Timm44 (NM_011592.1,193-211).
gcttgctagataacatcaa

SEQ ID NO: 516447 - DNA, 19 bp, Mus musculus
  siRNA target sequence for Timm44 (NM_011592.1,194-212).
cttgctagataacatcaaa

SEQ ID NO: 516448 - DNA, 19 bp, Mus musculus
  siRNA target sequence for Timm44 (NM_011592.1,303-321).
gaagccagaaggaagtata

SEQ ID NO: 516449 - DNA, 19 bp, Mus musculus
  siRNA target sequence for Timm44 (NM_011592.1,310-328).
gaaggaagtataaatccat

SEQ ID NO: 516450 - DNA, 19 bp, Mus musculus
  siRNA target sequence for Timm44 (NM_011592.1,344-362).
gcgtaccagtgaagcaata

SEQ ID NO: 516451 - DNA, 19 bp, Mus musculus
  siRNA target sequence for Timm44 (NM_011592.1,345-363).
cgtaccagtgaagcaataa

SEQ ID NO: 516452 - DNA, 19 bp, Mus musculus
  siRNA target sequence for Timm44 (NM_011592.1,346-364).
gtaccagtgaagcaataaa

SEQ ID NO: 516453 - DNA, 19 bp, Mus musculus
  siRNA target sequence for Timm44 (NM_011592.1,621-639).
gagcggctccggaaaagga

SEQ ID NO: 516454 - DNA, 19 bp, Mus musculus
  siRNA target sequence for Timm44 (NM_011592.1,629-647).
ccggaaaaggacagagttt

SEQ ID NO: 516455 - DNA, 19 bp, Mus musculus
  siRNA target sequence for Timm44 (NM_011592.1,756-774).
gataacaacgttgtattca

SEQ ID NO: 516456 - DNA, 19 bp, Mus musculus
  siRNA target sequence for Timm44 (NM_011592.1,794-812).
gatgaagtatgatgaaagt

SEQ ID NO: 516457 - DNA, 19 bp, Mus musculus
  siRNA target sequence for Timm44 (NM_011592.1,924-942).
gtggacccaacctttgaca

SEQ ID NO: 516458 - DNA, 19 bp, Mus musculus
  siRNA target sequence for Timm44 (NM_011592.1,1006-1024).
ccggggagcttgacattct

SEQ ID NO: 516459 - DNA, 19 bp, Mus musculus
  siRNA target sequence for Timm44 (NM_011592.1,1008-1026).
ggggagcttgacattctca

SEQ ID NO: 516460 - DNA, 19 bp, Mus musculus
  siRNA target sequence for Timm44 (NM_011592.1,1009-1027).
gggagcttgacattctcaa

SEQ ID NO: 516461 - DNA, 19 bp, Mus musculus
  siRNA target sequence for Timm44 (NM_011592.1,1025-1043).
caaagactggtgctatgaa

SEQ ID NO: 516462 - DNA, 19 bp, Mus musculus
  siRNA target sequence for Timm44 (NM_011592.1,1164-1182).
ggcccagtgctgatcgtta

SEQ ID NO: 516463 - DNA, 19 bp, Mus musculus
  siRNA target sequence for Timm44 (NM_011592.1,1219-1237).
ccaaaggcgaggtgtatga

SEQ ID NO: 516464 - DNA, 19 bp, Mus musculus
  siRNA target sequence for Timm44 (NM_011592.1,1298-1316).
ggagctcaacccttatgct

SEQ ID NO: 516465 - DNA, 19 bp, Mus musculus
  siRNA target sequence for Tk1 (NM_009387.1,764-782).
gctggctcagacaacaaga

SEQ ID NO: 516466 - DNA, 19 bp, Mus musculus
  siRNA target sequence for Tk1 (NM_009387.1,767-785).
ggctcagacaacaagaact

SEQ ID NO: 516467 - DNA, 19 bp, Mus musculus
  siRNA target sequence for Tk2 (NM_021028.2,123-141).
cgcctggcctccggataaa

SEQ ID NO: 516468 - DNA, 19 bp, Mus musculus
  siRNA target sequence for Tk2 (NM_021028.2,129-147).
gcctccggataaagataga

SEQ ID NO: 516469 - DNA, 19 bp, Mus musculus
  siRNA target sequence for Tk2 (NM_021028.2,131-149).
ctccggataaagatagaga

SEQ ID NO: 516470 - DNA, 19 bp, Mus musculus
  siRNA target sequence for Tk2 (NM_021028.2,209-227).
cgacatgcctggagttctt

SEQ ID NO: 516471 - DNA, 19 bp, Mus musculus
  siRNA target sequence for Tk2 (NM_021028.2,219-237).
ggagttcttctccaataca

SEQ ID NO: 516472 - DNA, 19 bp, Mus musculus
  siRNA target sequence for Tk2 (NM_021028.2,239-257).
cagacgtcgaggtgttaat

SEQ ID NO: 516473 - DNA, 19 bp, Mus musculus
  siRNA target sequence for Tk2 (NM_021028.2,400-418).
cctgtacggttgatggaaa

SEQ ID NO: 516474 - DNA, 19 bp, Mus musculus
  siRNA target sequence for Tk2 (NM_021028.2,408-426).
gttgatggaaaggtcaatt

SEQ ID NO: 516475 - DNA, 19 bp, Mus musculus
  siRNA target sequence for Tk2 (NM_021028.2,429-447).
cagcgcaagatacattttt

SEQ ID NO: 516476 - DNA, 19 bp, Mus musculus
  siRNA target sequence for Tk2 (NM_021028.2,431-449).
gcgcaagatacatttttgt

SEQ ID NO: 516477 - DNA, 19 bp, Mus musculus
  siRNA target sequence for Tk2 (NM_021028.2,432-450).
cgcaagatacatttttgta

SEQ ID NO: 516478 - DNA, 19 bp, Mus musculus
  siRNA target sequence for Tk2 (NM_021028.2,484-502).
gttgactacgcgattctgt

SEQ ID NO: 516479 - DNA, 19 bp, Mus musculus
  siRNA target sequence for Tk2 (NM_021028.2,516-534).
ctggatcgtcaggaacatt

SEQ ID NO: 516480 - DNA, 19 bp, Mus musculus
  siRNA target sequence for Tk2 (NM_021028.2,540-558).
ctctgttgatctgatagtt

SEQ ID NO: 516481 - DNA, 19 bp, Mus musculus
  siRNA target sequence for Tk2 (NM_021028.2,542-560).
ctgttgatctgatagttta

SEQ ID NO: 516482 - DNA, 19 bp, Mus musculus
  siRNA target sequence for Tk2 (NM_021028.2,565-583).
cgaaccactcccgaaatct

SEQ ID NO: 516483 - DNA, 19 bp, Mus musculus
  siRNA target sequence for Tk2 (NM_021028.2,730-748).
gaccacaacttggagaaaa

SEQ ID NO: 516484 - DNA, 19 bp, Mus musculus
  siRNA target sequence for Tlk1 (NM_172664.2,567-585).
gggggacgtggccataaga

SEQ ID NO: 516485 - DNA, 19 bp, Mus musculus
  siRNA target sequence for Tlk1 (NM_172664.2,568-586).
ggggacgtggccataagat

SEQ ID NO: 516486 - DNA, 19 bp, Mus musculus
  siRNA target sequence for Tlk1 (NM_172664.2,570-588).
ggacgtggccataagatca

SEQ ID NO: 516487 - DNA, 19 bp, Mus musculus
  siRNA target sequence for Tlk1 (NM_172664.2,589-607).
gcgactattttgaatacca

SEQ ID NO: 516488 - DNA, 19 bp, Mus musculus
  siRNA target sequence for Tlk1 (NM_172664.2,590-608).
cgactattttgaataccaa

SEQ ID NO: 516489 - DNA, 19 bp, Mus musculus
  siRNA target sequence for Tlk1 (NM_172664.2,683-701).
cactccttcctcatctgtt

SEQ ID NO: 516490 - DNA, 19 bp, Mus musculus
  siRNA target sequence for Tlk1 (NM_172664.2,713-731).
cccttctcctactgcatta

SEQ ID NO: 516491 - DNA, 19 bp, Mus musculus
  siRNA target sequence for Tlk1 (NM_172664.2,718-736).
ctcctactgcattagcttt

SEQ ID NO: 516492 - DNA, 19 bp, Mus musculus
  siRNA target sequence for Tlk1 (NM_172664.2,737-755).
cggggaccaccctgttgta

SEQ ID NO: 516493 - DNA, 19 bp, Mus musculus
  siRNA target sequence for Tlk1 (NM_172664.2,739-757).
gggaccaccctgttgtaca

SEQ ID NO: 516494 - DNA, 19 bp, Mus musculus
  siRNA target sequence for Tlk1 (NM_172664.2,740-758).
ggaccaccctgttgtacaa

SEQ ID NO: 516495 - DNA, 19 bp, Mus musculus
  siRNA target sequence for Tlk1 (NM_172664.2,753-771).
gtacaaccaaagcagttat

SEQ ID NO: 516496 - DNA, 19 bp, Mus musculus
  siRNA target sequence for Tlk1 (NM_172664.2,756-774).
caaccaaagcagttatcct

SEQ ID NO: 516497 - DNA, 19 bp, Mus musculus
  siRNA target sequence for Tlk1 (NM_172664.2,792-810).
gatcttacaatgctgaaat

SEQ ID NO: 516498 - DNA, 19 bp, Mus musculus
  siRNA target sequence for Tlk1 (NM_172664.2,816-834).
gcattagaaagtactaaaa

SEQ ID NO: 516499 - DNA, 19 bp, Mus musculus
  siRNA target sequence for Tlk1 (NM_172664.2,851-869).
gaaggaaggccggattgat

SEQ ID NO: 516500 - DNA, 19 bp, Mus musculus
  siRNA target sequence for Tlk1 (NM_172664.2,854-872).
ggaaggccggattgatgat

SEQ ID NO: 516501 - DNA, 19 bp, Mus musculus
  siRNA target sequence for Tlk1 (NM_172664.2,896-914).
caggcggcaaatagatgat

SEQ ID NO: 516502 - DNA, 19 bp, Mus musculus
  siRNA target sequence for Tlk1 (NM_172664.2,898-916).
ggcggcaaatagatgatca

SEQ ID NO: 516503 - DNA, 19 bp, Mus musculus
  siRNA target sequence for Tlk1 (NM_172664.2,899-917).
gcggcaaatagatgatcaa

SEQ ID NO: 516504 - DNA, 19 bp, Mus musculus
  siRNA target sequence for Tlk1 (NM_172664.2,901-919).
ggcaaatagatgatcaaca

SEQ ID NO: 516505 - DNA, 19 bp, Mus musculus
  siRNA target sequence for Tlk1 (NM_172664.2,964-982).
ctatgagcaagaaactact

SEQ ID NO: 516506 - DNA, 19 bp, Mus musculus
  siRNA target sequence for Tlk1 (NM_172664.2,970-988).
gcaagaaactacttattga

SEQ ID NO: 516507 - DNA, 19 bp, Mus musculus
  siRNA target sequence for Tlk1 (NM_172664.2,1016-1034).
cagagaaaagagtatgcaa

SEQ ID NO: 516508 - DNA, 19 bp, Mus musculus
  siRNA target sequence for Tlk1 (NM_172664.2,1044-1062).
cgccttgggcactttacca

SEQ ID NO: 516509 - DNA, 19 bp, Mus musculus
  siRNA target sequence for Tlk1 (NM_172664.2,1052-1070).
gcactttaccacagttaga

SEQ ID NO: 516510 - DNA, 19 bp, Mus musculus
  siRNA target sequence for Tlk1 (NM_172664.2,1073-1091).
cggcgcttcctttacagaa

SEQ ID NO: 516511 - DNA, 19 bp, Mus musculus
  siRNA target sequence for Tlk1 (NM_172664.2,1105-1123).
gttttgcatttcagaatct

SEQ ID NO: 516512 - DNA, 19 bp, Mus musculus
  siRNA target sequence for Tlk1 (NM_172664.2,1200-1218).
cctcccacagctaataatt

SEQ ID NO: 516513 - DNA, 19 bp, Mus musculus
  siRNA target sequence for Tlk1 (NM_172664.2,1271-1289).
caatggagcggaaaacgat

SEQ ID NO: 516514 - DNA, 19 bp, Mus musculus
  siRNA target sequence for Tlk1 (NM_172664.2,1280-1298).
ggaaaacgatccctttgtt

SEQ ID NO: 516515 - DNA, 19 bp, Mus musculus
  siRNA target sequence for Tlk1 (NM_172664.2,1281-1299).
gaaaacgatccctttgtta

SEQ ID NO: 516516 - DNA, 19 bp, Mus musculus
  siRNA target sequence for Tlk1 (NM_172664.2,1292-1310).
ctttgttaggccaaattta

SEQ ID NO: 516517 - DNA, 19 bp, Mus musculus
  siRNA target sequence for Tlk1 (NM_172664.2,1322-1340).
gactctggcagagtatcat

SEQ ID NO: 516518 - DNA, 19 bp, Mus musculus
  siRNA target sequence for Tlk1 (NM_172664.2,1324-1342).
ctctggcagagtatcatga

SEQ ID NO: 516519 - DNA, 19 bp, Mus musculus
  siRNA target sequence for Tlk1 (NM_172664.2,1328-1346).
ggcagagtatcatgaacaa

SEQ ID NO: 516520 - DNA, 19 bp, Mus musculus
  siRNA target sequence for Tlk1 (NM_172664.2,1472-1490).
ggataattcacagttcaaa

SEQ ID NO: 516521 - DNA, 19 bp, Mus musculus
  siRNA target sequence for Tlk1 (NM_172664.2,1487-1505).
caaagatcatccaacgtta

SEQ ID NO: 516522 - DNA, 19 bp, Mus musculus
  siRNA target sequence for Tlk1 (NM_172664.2,1494-1512).
catccaacgttaaatgaaa

SEQ ID NO: 516523 - DNA, 19 bp, Mus musculus
  siRNA target sequence for Tlk1 (NM_172664.2,1497-1515).
ccaacgttaaatgaaagat

SEQ ID NO: 516524 - DNA, 19 bp, Mus musculus
  siRNA target sequence for Tlk1 (NM_172664.2,1545-1563).
ggctttagtgaggtctata

SEQ ID NO: 516525 - DNA, 19 bp, Mus musculus
  siRNA target sequence for Tlk1 (NM_172664.2,1546-1564).
gctttagtgaggtctataa

SEQ ID NO: 516526 - DNA, 19 bp, Mus musculus
  siRNA target sequence for Tlk1 (NM_172664.2,1601-1619).
gaagatccaccagcttaat

SEQ ID NO: 516527 - DNA, 19 bp, Mus musculus
  siRNA target sequence for Tlk1 (NM_172664.2,1662-1680).
gcttgccgagagtatcgaa

SEQ ID NO: 516528 - DNA, 19 bp, Mus musculus
  siRNA target sequence for Tlk1 (NM_172664.2,1663-1681).
cttgccgagagtatcgaat

SEQ ID NO: 516529 - DNA, 19 bp, Mus musculus
  siRNA target sequence for Tlk1 (NM_172664.2,1666-1684).
gccgagagtatcgaataca

SEQ ID NO: 516530 - DNA, 19 bp, Mus musculus
  siRNA target sequence for Tlk1 (NM_172664.2,1668-1686).
cgagagtatcgaatacaca

SEQ ID NO: 516531 - DNA, 19 bp, Mus musculus
  siRNA target sequence for Tlk1 (NM_172664.2,1669-1687).
gagagtatcgaatacacaa

SEQ ID NO: 516532 - DNA, 19 bp, Mus musculus
  siRNA target sequence for Tlk1 (NM_172664.2,1701-1719).
cccagaatagttaaactct

SEQ ID NO: 516533 - DNA, 19 bp, Mus musculus
  siRNA target sequence for Tlk1 (NM_172664.2,1702-1720).
ccagaatagttaaactcta

SEQ ID NO: 516534 - DNA, 19 bp, Mus musculus
  siRNA target sequence for Tlk1 (NM_172664.2,1722-1740).
gattacttctccttggata

SEQ ID NO: 516535 - DNA, 19 bp, Mus musculus
  siRNA target sequence for Tlk1 (NM_172664.2,1737-1755).
gatacagatacgttttgta

SEQ ID NO: 516536 - DNA, 19 bp, Mus musculus
  siRNA target sequence for Tlk1 (NM_172664.2,1808-1826).
caagttgatgtctgagaaa

SEQ ID NO: 516537 - DNA, 19 bp, Mus musculus
  siRNA target sequence for Tlk1 (NM_172664.2,1823-1841).
gaaagaagctcggtctatt

SEQ ID NO: 516538 - DNA, 19 bp, Mus musculus
  siRNA target sequence for Tlk1 (NM_172664.2,1861-1879).
ccttacgctatctcaatga

SEQ ID NO: 516539 - DNA, 19 bp, Mus musculus
  siRNA target sequence for Tlk1 (NM_172664.2,1862-1880).
cttacgctatctcaatgaa

SEQ ID NO: 516540 - DNA, 19 bp, Mus musculus
  siRNA target sequence for Tlk1 (NM_172664.2,1866-1884).
cgctatctcaatgaaatca

SEQ ID NO: 516541 - DNA, 19 bp, Mus musculus
  siRNA target sequence for Tlk1 (NM_172664.2,1867-1885).
gctatctcaatgaaatcaa

SEQ ID NO: 516542 - DNA, 19 bp, Mus musculus
  siRNA target sequence for Tlk1 (NM_172664.2,1868-1886).
ctatctcaatgaaatcaaa

SEQ ID NO: 516543 - DNA, 19 bp, Mus musculus
  siRNA target sequence for Tlk1 (NM_172664.2,1878-1896).
gaaatcaaacctcctatta

SEQ ID NO: 516544 - DNA, 19 bp, Mus musculus
  siRNA target sequence for Tlk1 (NM_172664.2,1883-1901).
caaacctcctattatacat

SEQ ID NO: 516545 - DNA, 19 bp, Mus musculus
  siRNA target sequence for Tlk1 (NM_172664.2,1958-1976).
caaaatcactgattttggt

SEQ ID NO: 516546 - DNA, 19 bp, Mus musculus
  siRNA target sequence for Tlk1 (NM_172664.2,1997-2015).
cgatagttacggtgttgat

SEQ ID NO: 516547 - DNA, 19 bp, Mus musculus
  siRNA target sequence for Tlk1 (NM_172664.2,2034-2052).
cagggggcaggcacttact

SEQ ID NO: 516548 - DNA, 19 bp, Mus musculus
  siRNA target sequence for Tlk1 (NM_172664.2,2040-2058).
gcaggcacttactggtatt

SEQ ID NO: 516549 - DNA, 19 bp, Mus musculus
  siRNA target sequence for Tlk1 (NM_172664.2,2045-2063).
cacttactggtatttacct

SEQ ID NO: 516550 - DNA, 19 bp, Mus musculus
  siRNA target sequence for Tlk1 (NM_172664.2,2071-2089).
gctttgtagttggaaaaga

SEQ ID NO: 516551 - DNA, 19 bp, Mus musculus
  siRNA target sequence for Tlk1 (NM_172664.2,2151-2169).
ctctatggtagaaaaccat

SEQ ID NO: 516552 - DNA, 19 bp, Mus musculus
  siRNA target sequence for Tlk1 (NM_172664.2,2153-2171).
ctatggtagaaaaccattt

SEQ ID NO: 516553 - DNA, 19 bp, Mus musculus
  siRNA target sequence for Tlk1 (NM_172664.2,2185-2203).
ctcaacaagacattctaca

SEQ ID NO: 516554 - DNA, 19 bp, Mus musculus
  siRNA target sequence for Tlk1 (NM_172664.2,2290-2308).
gtttggcttaccgaaaaga

SEQ ID NO: 516555 - DNA, 19 bp, Mus musculus
  siRNA target sequence for Tlk1 (NM_172664.2,2294-2312).
ggcttaccgaaaagaagat

SEQ ID NO: 516556 - DNA, 19 bp, Mus musculus
  siRNA target sequence for Tlk1 (NM_172664.2,2428-2446).
cttcaagcataattactta

SEQ ID NO: 516557 - DNA, 19 bp, Mus musculus
  siRNA target sequence for Tlk2 (NM_011903.1,872-890).
gcactcctaggggacataa

SEQ ID NO: 516558 - DNA, 19 bp, Mus musculus
  siRNA target sequence for Tlk2 (NM_011903.1,873-891).
cactcctaggggacataaa

SEQ ID NO: 516559 - DNA, 19 bp, Mus musculus
  siRNA target sequence for Tlk2 (NM_011903.1,875-893).
ctcctaggggacataaaat

SEQ ID NO: 516560 - DNA, 19 bp, Mus musculus
  siRNA target sequence for Tlk2 (NM_011903.1,877-895).
cctaggggacataaaatta

SEQ ID NO: 516561 - DNA, 19 bp, Mus musculus
  siRNA target sequence for Tlk2 (NM_011903.1,886-904).
cataaaattagtgattact

SEQ ID NO: 516562 - DNA, 19 bp, Mus musculus
  siRNA target sequence for Tlk2 (NM_011903.1,919-937).
gaacagcctctgtatggtt

SEQ ID NO: 516563 - DNA, 19 bp, Mus musculus
  siRNA target sequence for Tlk2 (NM_011903.1,1111-1129).
ggcaatacagaacattctt

SEQ ID NO: 516564 - DNA, 19 bp, Mus musculus
  siRNA target sequence for Tlk2 (NM_011903.1,1199-1217).
ctgcactagaaaacagtaa

SEQ ID NO: 516565 - DNA, 19 bp, Mus musculus
  siRNA target sequence for Tlk2 (NM_011903.1,1212-1230).
cagtaagaactctgactta

SEQ ID NO: 516566 - DNA, 19 bp, Mus musculus
  siRNA target sequence for Tlk2 (NM_011903.1,1214-1232).
gtaagaactctgacttaga

SEQ ID NO: 516567 - DNA, 19 bp, Mus musculus
  siRNA target sequence for Tlk2 (NM_011903.1,1283-1301).
gacgacagatagatgaaca

SEQ ID NO: 516568 - DNA, 19 bp, Mus musculus
  siRNA target sequence for Tlk2 (NM_011903.1,1323-1341).
caaggaacgattaaataga

SEQ ID NO: 516569 - DNA, 19 bp, Mus musculus
  siRNA target sequence for Tlk2 (NM_011903.1,1326-1344).
ggaacgattaaatagatgt

SEQ ID NO: 516570 - DNA, 19 bp, Mus musculus
  siRNA target sequence for Tlk2 (NM_011903.1,1353-1371).
gagcaagaagctccttata

SEQ ID NO: 516571 - DNA, 19 bp, Mus musculus
  siRNA target sequence for Tlk2 (NM_011903.1,1356-1374).
caagaagctccttatagaa

SEQ ID NO: 516572 - DNA, 19 bp, Mus musculus
  siRNA target sequence for Tlk2 (NM_011903.1,1428-1446).
gcgattaggccactttact

SEQ ID NO: 516573 - DNA, 19 bp, Mus musculus
  siRNA target sequence for Tlk2 (NM_011903.1,1429-1447).
cgattaggccactttacta

SEQ ID NO: 516574 - DNA, 19 bp, Mus musculus
  siRNA target sequence for Tlk2 (NM_011903.1,1453-1471).
cggcatggagcctcgttta

SEQ ID NO: 516575 - DNA, 19 bp, Mus musculus
  siRNA target sequence for Tlk2 (NM_011903.1,1455-1473).
gcatggagcctcgtttact

SEQ ID NO: 516576 - DNA, 19 bp, Mus musculus
  siRNA target sequence for Tlk2 (NM_011903.1,1644-1662).
gactaatggagctgaaaat

SEQ ID NO: 516577 - DNA, 19 bp, Mus musculus
  siRNA target sequence for Tlk2 (NM_011903.1,1652-1670).
gagctgaaaatgaaacgtt

SEQ ID NO: 516578 - DNA, 19 bp, Mus musculus
  siRNA target sequence for Tlk2 (NM_011903.1,1715-1733).
gattaggtcatcttaagaa

SEQ ID NO: 516579 - DNA, 19 bp, Mus musculus
  siRNA target sequence for Tlk2 (NM_011903.1,1766-1784).
ggctggaaagggttaggaa

SEQ ID NO: 516580 - DNA, 19 bp, Mus musculus
  siRNA target sequence for Tlk2 (NM_011903.1,1786-1804).
ctacacatcagggaattaa

SEQ ID NO: 516581 - DNA, 19 bp, Mus musculus
  siRNA target sequence for Tlk2 (NM_011903.1,1843-1861).
catccaacactaaatgaca

SEQ ID NO: 516582 - DNA, 19 bp, Mus musculus
  siRNA target sequence for Tlk2 (NM_011903.1,1862-1880).
gatatttgttgttacatct

SEQ ID NO: 516583 - DNA, 19 bp, Mus musculus
  siRNA target sequence for Tlk2 (NM_011903.1,1891-1909).
ggaggtttcagtgaagttt

SEQ ID NO: 516584 - DNA, 19 bp, Mus musculus
  siRNA target sequence for Tlk2 (NM_011903.1,1921-1939).
gatctaacggagcaaagat

SEQ ID NO: 516585 - DNA, 19 bp, Mus musculus
  siRNA target sequence for Tlk2 (NM_011903.1,2018-2036).
gggaataccggattcacaa

SEQ ID NO: 516586 - DNA, 19 bp, Mus musculus
  siRNA target sequence for Tlk2 (NM_011903.1,2061-2079).
gaagctgtatgattacttt

SEQ ID NO: 516587 - DNA, 19 bp, Mus musculus
  siRNA target sequence for Tlk2 (NM_011903.1,2083-2101).
ctggacactgactcgtttt

SEQ ID NO: 516588 - DNA, 19 bp, Mus musculus
  siRNA target sequence for Tlk2 (NM_011903.1,2085-2103).
ggacactgactcgttttgt

SEQ ID NO: 516589 - DNA, 19 bp, Mus musculus
  siRNA target sequence for Tlk2 (NM_011903.1,2086-2104).
gacactgactcgttttgta

SEQ ID NO: 516590 - DNA, 19 bp, Mus musculus
  siRNA target sequence for Tlk2 (NM_011903.1,2088-2106).
cactgactcgttttgtaca

SEQ ID NO: 516591 - DNA, 19 bp, Mus musculus
  siRNA target sequence for Tlk2 (NM_011903.1,2133-2151).
cctggacttctacctaaaa

SEQ ID NO: 516592 - DNA, 19 bp, Mus musculus
  siRNA target sequence for Tlk2 (NM_011903.1,2176-2194).
gaagcccgatccattatta

SEQ ID NO: 516593 - DNA, 19 bp, Mus musculus
  siRNA target sequence for Tlk2 (NM_011903.1,2180-2198).
cccgatccattattatgca

SEQ ID NO: 516594 - DNA, 19 bp, Mus musculus
  siRNA target sequence for Tlk2 (NM_011903.1,2237-2255).
ctcccatcatacactatga

SEQ ID NO: 516595 - DNA, 19 bp, Mus musculus
  siRNA target sequence for Tlk2 (NM_011903.1,2300-2318).
gagagataaaaattacaga

SEQ ID NO: 516596 - DNA, 19 bp, Mus musculus
  siRNA target sequence for Tlk2 (NM_011903.1,2389-2407).
ggagctggtacttattggt

SEQ ID NO: 516597 - DNA, 19 bp, Mus musculus
  siRNA target sequence for Tlk2 (NM_011903.1,2390-2408).
gagctggtacttattggta

SEQ ID NO: 516598 - DNA, 19 bp, Mus musculus
  siRNA target sequence for Tlk2 (NM_011903.1,2392-2410).
gctggtacttattggtatt

SEQ ID NO: 516599 - DNA, 19 bp, Mus musculus
  siRNA target sequence for Tlk2 (NM_011903.1,2393-2411).
ctggtacttattggtattt

SEQ ID NO: 516600 - DNA, 19 bp, Mus musculus
  siRNA target sequence for Tlk2 (NM_011903.1,2490-2508).
cttctaccagtgtctttat

SEQ ID NO: 516601 - DNA, 19 bp, Mus musculus
  siRNA target sequence for Tlk2 (NM_011903.1,2535-2553).
gtcccagcaagatattcta

SEQ ID NO: 516602 - DNA, 19 bp, Mus musculus
  siRNA target sequence for Tlk2 (NM_011903.1,2537-2555).
cccagcaagatattctaca

SEQ ID NO: 516603 - DNA, 19 bp, Mus musculus
  siRNA target sequence for Tlk2 (NM_011903.1,2538-2556).
ccagcaagatattctacaa

SEQ ID NO: 516604 - DNA, 19 bp, Mus musculus
  siRNA target sequence for Tlk2 (NM_011903.1,2554-2572).
caagagaatactattctta

SEQ ID NO: 516605 - DNA, 19 bp, Mus musculus
  siRNA target sequence for Tlk2 (NM_011903.1,2592-2610).
cccgccaaagccagtagta

SEQ ID NO: 516606 - DNA, 19 bp, Mus musculus
  siRNA target sequence for Tlk2 (NM_011903.1,2593-2611).
ccgccaaagccagtagtaa

SEQ ID NO: 516607 - DNA, 19 bp, Mus musculus
  siRNA target sequence for Tlk2 (NM_011903.1,2595-2613).
gccaaagccagtagtaaca

SEQ ID NO: 516608 - DNA, 19 bp, Mus musculus
  siRNA target sequence for Tlk2 (NM_011903.1,2639-2657).
gatgtctggcctatcgaaa

SEQ ID NO: 516609 - DNA, 19 bp, Mus musculus
  siRNA target sequence for Tlk2 (NM_011903.1,2686-2704).
gcctgtgacccctacttgt

SEQ ID NO: 516610 - DNA, 19 bp, Mus musculus
  siRNA target sequence for Tlk2 (NM_011903.1,2765-2783).
cctctggggcatccaataa

SEQ ID NO: 516611 - DNA, 19 bp, Mus musculus
  siRNA target sequence for Tlk2 (NM_011903.1,2770-2788).
ggggcatccaataacagtt

SEQ ID NO: 516612 - DNA, 19 bp, Mus musculus
  siRNA target sequence for Tlk2 (NM_011903.1,2773-2791).
gcatccaataacagttctt

SEQ ID NO: 516613 - DNA, 19 bp, Mus musculus
  siRNA target sequence for Tlk2 (NM_011903.1,2778-2796).
caataacagttcttcgaat

SEQ ID NO: 516614 - DNA, 19 bp, Mus musculus
  siRNA target sequence for Tnk1 (NM_031880.2,202-220).
ggctactccgggatgttca

SEQ ID NO: 516615 - DNA, 19 bp, Mus musculus
  siRNA target sequence for Tnk1 (NM_031880.2,203-221).
gctactccgggatgttcaa

SEQ ID NO: 516616 - DNA, 19 bp, Mus musculus
  siRNA target sequence for Tnk1 (NM_031880.2,216-234).
gttcaactggcccagtttt

SEQ ID NO: 516617 - DNA, 19 bp, Mus musculus
  siRNA target sequence for Tnk1 (NM_031880.2,260-278).
cgtcactcggccagaacat

SEQ ID NO: 516618 - DNA, 19 bp, Mus musculus
  siRNA target sequence for Tnk1 (NM_031880.2,261-279).
gtcactcggccagaacatt

SEQ ID NO: 516619 - DNA, 19 bp, Mus musculus
  siRNA target sequence for Tnk1 (NM_031880.2,263-281).
cactcggccagaacatttt

SEQ ID NO: 516620 - DNA, 19 bp, Mus musculus
  siRNA target sequence for Tnk1 (NM_031880.2,267-285).
cggccagaacattttgact

SEQ ID NO: 516621 - DNA, 19 bp, Mus musculus
  siRNA target sequence for Tnk1 (NM_031880.2,328-346).
ctgcccagcgcagacttaa

SEQ ID NO: 516622 - DNA, 19 bp, Mus musculus
  siRNA target sequence for Tnk1 (NM_031880.2,331-349).
cccagcgcagacttaatga

SEQ ID NO: 516623 - DNA, 19 bp, Mus musculus
  siRNA target sequence for Tnk1 (NM_031880.2,332-350).
ccagcgcagacttaatgaa

SEQ ID NO: 516624 - DNA, 19 bp, Mus musculus
  siRNA target sequence for Tnk1 (NM_031880.2,372-390).
ggggtcaagtccaagaatt

SEQ ID NO: 516625 - DNA, 19 bp, Mus musculus
  siRNA target sequence for Tnk1 (NM_031880.2,386-404).
gaattgggtgtacaagata

SEQ ID NO: 516626 - DNA, 19 bp, Mus musculus
  siRNA target sequence for Tnk1 (NM_031880.2,412-430).
gctttgctcccgaacagaa

SEQ ID NO: 516627 - DNA, 19 bp, Mus musculus
  siRNA target sequence for Tnk1 (NM_031880.2,555-573).
gtacatcgagggttatgga

SEQ ID NO: 516628 - DNA, 19 bp, Mus musculus
  siRNA target sequence for Tnk1 (NM_031880.2,657-675).
gacttcctgcgggaagtat

SEQ ID NO: 516629 - DNA, 19 bp, Mus musculus
  siRNA target sequence for Tnk1 (NM_031880.2,659-677).
cttcctgcgggaagtatct

SEQ ID NO: 516630 - DNA, 19 bp, Mus musculus
  siRNA target sequence for Tnk1 (NM_031880.2,667-685).
gggaagtatctgtcatgat

SEQ ID NO: 516631 - DNA, 19 bp, Mus musculus
  siRNA target sequence for Tnk1 (NM_031880.2,927-945).
gcctcacctcgaatgatca

SEQ ID NO: 516632 - DNA, 19 bp, Mus musculus
  siRNA target sequence for Tnk1 (NM_031880.2,1098-1116).
gtgacactctgggaaatgt

SEQ ID NO: 516633 - DNA, 19 bp, Mus musculus
  siRNA target sequence for Tnk1 (NM_031880.2,1139-1157).
ggcaggtgtcccaccatat

SEQ ID NO: 516634 - DNA, 19 bp, Mus musculus
  siRNA target sequence for Tnk1 (NM_031880.2,1143-1161).
ggtgtcccaccatatctca

SEQ ID NO: 516635 - DNA, 19 bp, Mus musculus
  siRNA target sequence for Tnk1 (NM_031880.2,1144-1162).
gtgtcccaccatatctcat

SEQ ID NO: 516636 - DNA, 19 bp, Mus musculus
  siRNA target sequence for Tnk1 (NM_031880.2,1263-1281).
gcagaccggcctagctttt

SEQ ID NO: 516637 - DNA, 19 bp, Mus musculus
  siRNA target sequence for Tnk1 (NM_031880.2,1371-1389).
cccggtgaccccatcacta

SEQ ID NO: 516638 - DNA, 19 bp, Mus musculus
  siRNA target sequence for Tnk1 (NM_031880.2,1372-1390).
ccggtgaccccatcactat

SEQ ID NO: 516639 - DNA, 19 bp, Mus musculus
  siRNA target sequence for Tnk1 (NM_031880.2,1374-1392).
ggtgaccccatcactatca

SEQ ID NO: 516640 - DNA, 19 bp, Mus musculus
  siRNA target sequence for Tnk1 (NM_031880.2,1375-1393).
gtgaccccatcactatcat

SEQ ID NO: 516641 - DNA, 19 bp, Mus musculus
  siRNA target sequence for Tnk1 (NM_031880.2,1571-1589).
cagagagaaggcaacgtta

SEQ ID NO: 516642 - DNA, 19 bp, Mus musculus
  siRNA target sequence for Tnk1 (NM_031880.2,1639-1657).
ggatgcgaggcatttccaa

SEQ ID NO: 516643 - DNA, 19 bp, Mus musculus
  siRNA target sequence for Tnk1 (NM_031880.2,1735-1753).
gagctatgccgcaaagact

SEQ ID NO: 516644 - DNA, 19 bp, Mus musculus
  siRNA target sequence for Tnk1 (NM_031880.2,1788-1806).
ccacgcccacctattatct

SEQ ID NO: 516645 - DNA, 19 bp, Mus musculus
  siRNA target sequence for Tnk1 (NM_031880.2,2061-2079).
cagctcttccaccttagta

SEQ ID NO: 516646 - DNA, 19 bp, Mus musculus
  siRNA target sequence for Tor1b (NM_133673.2,153-171).
ctgtcctataccgatttct

SEQ ID NO: 516647 - DNA, 19 bp, Mus musculus
  siRNA target sequence for Tor1b (NM_133673.2,263-281).
ccttgccaccgaagtgatt

SEQ ID NO: 516648 - DNA, 19 bp, Mus musculus
  siRNA target sequence for Tor1b (NM_133673.2,268-286).
ccaccgaagtgattctcaa

SEQ ID NO: 516649 - DNA, 19 bp, Mus musculus
  siRNA target sequence for Tor1b (NM_133673.2,278-296).
gattctcaaggcattgact

SEQ ID NO: 516650 - DNA, 19 bp, Mus musculus
  siRNA target sequence for Tor1b (NM_133673.2,358-376).
gcacgggcaagaattttat

SEQ ID NO: 516651 - DNA, 19 bp, Mus musculus
  siRNA target sequence for Tor1b (NM_133673.2,383-401).
gattgtggctgaaaacctt

SEQ ID NO: 516652 - DNA, 19 bp, Mus musculus
  siRNA target sequence for Tor1b (NM_133673.2,390-408).
gctgaaaacctttatccaa

SEQ ID NO: 516653 - DNA, 19 bp, Mus musculus
  siRNA target sequence for Tor1b (NM_133673.2,406-424).
caaaaggcctgaagagtaa

SEQ ID NO: 516654 - DNA, 19 bp, Mus musculus
  siRNA target sequence for Tor1b (NM_133673.2,432-450).
cacctgttcgtctctactt

SEQ ID NO: 516655 - DNA, 19 bp, Mus musculus
  siRNA target sequence for Tor1b (NM_133673.2,569-587).
gcatcctgggatcattgat

SEQ ID NO: 516656 - DNA, 19 bp, Mus musculus
  siRNA target sequence for Tor1b (NM_133673.2,574-592).
ctgggatcattgatgcaat

SEQ ID NO: 516657 - DNA, 19 bp, Mus musculus
  siRNA target sequence for Tor1b (NM_133673.2,577-595).
ggatcattgatgcaatcaa

SEQ ID NO: 516658 - DNA, 19 bp, Mus musculus
  siRNA target sequence for Tor1b (NM_133673.2,618-636).
caggtggatgggatttcct

SEQ ID NO: 516659 - DNA, 19 bp, Mus musculus
  siRNA target sequence for Tor1b (NM_133673.2,766-784).
ctgtgggcgtcttcaacaa

SEQ ID NO: 516660 - DNA, 19 bp, Mus musculus
  siRNA target sequence for Tor1b (NM_133673.2,768-786).
gtgggcgtcttcaacaaca

SEQ ID NO: 516661 - DNA, 19 bp, Mus musculus
  siRNA target sequence for Tor1b (NM_133673.2,800-818).
gtggcacagtgggctaata

SEQ ID NO: 516662 - DNA, 19 bp, Mus musculus
  siRNA target sequence for Tor1b (NM_133673.2,802-820).
ggcacagtgggctaataga

SEQ ID NO: 516663 - DNA, 19 bp, Mus musculus
  siRNA target sequence for Tor1b (NM_133673.2,808-826).
gtgggctaatagacaaaaa

SEQ ID NO: 516664 - DNA, 19 bp, Mus musculus
  siRNA target sequence for Tra1 (NM_011631.1,140-158).
gttcgtcagagctgatgat

SEQ ID NO: 516665 - DNA, 19 bp, Mus musculus
  siRNA target sequence for Tra1 (NM_011631.1,269-287).
gttaaacgcatcacagata

SEQ ID NO: 516666 - DNA, 19 bp, Mus musculus
  siRNA target sequence for Tra1 (NM_011631.1,275-293).
cgcatcacagataagagaa

SEQ ID NO: 516667 - DNA, 19 bp, Mus musculus
  siRNA target sequence for Tra1 (NM_011631.1,335-353).
gaacaggatgatgaaactt

SEQ ID NO: 516668 - DNA, 19 bp, Mus musculus
  siRNA target sequence for Tra1 (NM_011631.1,347-365).
gaaacttatcatcaattct

SEQ ID NO: 516669 - DNA, 19 bp, Mus musculus
  siRNA target sequence for Tra1 (NM_011631.1,440-458).
catctccctaactgatgaa

SEQ ID NO: 516670 - DNA, 19 bp, Mus musculus
  siRNA target sequence for Tra1 (NM_011631.1,479-497).
ggagttaacggtcaagatt

SEQ ID NO: 516671 - DNA, 19 bp, Mus musculus
  siRNA target sequence for Tra1 (NM_011631.1,480-498).
gagttaacggtcaagatta

SEQ ID NO: 516672 - DNA, 19 bp, Mus musculus
  siRNA target sequence for Tra1 (NM_011631.1,532-550).
cagacacgggtgtaggaat

SEQ ID NO: 516673 - DNA, 19 bp, Mus musculus
  siRNA target sequence for Tra1 (NM_011631.1,536-554).
cacgggtgtaggaatgact

SEQ ID NO: 516674 - DNA, 19 bp, Mus musculus
  siRNA target sequence for Tra1 (NM_011631.1,578-596).
cggcaccatagccaaatct

SEQ ID NO: 516675 - DNA, 19 bp, Mus musculus
  siRNA target sequence for Tra1 (NM_011631.1,595-613).
ctggaacaagcgagttttt

SEQ ID NO: 516676 - DNA, 19 bp, Mus musculus
  siRNA target sequence for Tra1 (NM_011631.1,623-641).
gacagaagctcaagaagat

SEQ ID NO: 516677 - DNA, 19 bp, Mus musculus
  siRNA target sequence for Tra1 (NM_011631.1,647-665).
gtcaacctctgaactgatt

SEQ ID NO: 516678 - DNA, 19 bp, Mus musculus
  siRNA target sequence for Tra1 (NM_011631.1,758-776).
ggaatcagactccaatgaa

SEQ ID NO: 516679 - DNA, 19 bp, Mus musculus
  siRNA target sequence for Tra1 (NM_011631.1,810-828).
ctaggtcgtggaacaacaa

SEQ ID NO: 516680 - DNA, 19 bp, Mus musculus
  siRNA target sequence for Tra1 (NM_011631.1,813-831).
ggtcgtggaacaacaatta

SEQ ID NO: 516681 - DNA, 19 bp, Mus musculus
  siRNA target sequence for Tra1 (NM_011631.1,817-835).
gtggaacaacaattactct

SEQ ID NO: 516682 - DNA, 19 bp, Mus musculus
  siRNA target sequence for Tra1 (NM_011631.1,826-844).
caattactcttgtcttaaa

SEQ ID NO: 516683 - DNA, 19 bp, Mus musculus
  siRNA target sequence for Tra1 (NM_011631.1,852-870).
gcatctgattaccttgaat

SEQ ID NO: 516684 - DNA, 19 bp, Mus musculus
  siRNA target sequence for Tra1 (NM_011631.1,1081-1099).
gggattgggaacttatgaa

SEQ ID NO: 516685 - DNA, 19 bp, Mus musculus
  siRNA target sequence for Tra1 (NM_011631.1,1097-1115).
gaatgatatcaaaccaata

SEQ ID NO: 516686 - DNA, 19 bp, Mus musculus
  siRNA target sequence for Tra1 (NM_011631.1,1123-1141).
gaccatccaaagaagtaga

SEQ ID NO: 516687 - DNA, 19 bp, Mus musculus
  siRNA target sequence for Tra1 (NM_011631.1,1137-1155).
gtagaagaagacgaataca

SEQ ID NO: 516688 - DNA, 19 bp, Mus musculus
  siRNA target sequence for Tra1 (NM_011631.1,1154-1172).
caaagctttctacaaatca

SEQ ID NO: 516689 - DNA, 19 bp, Mus musculus
  siRNA target sequence for Tra1 (NM_011631.1,1230-1248).
gtcaccttcaagtcgattt

SEQ ID NO: 516690 - DNA, 19 bp, Mus musculus
  siRNA target sequence for Tra1 (NM_011631.1,1272-1290).
cgaggtctgtttgatgaat

SEQ ID NO: 516691 - DNA, 19 bp, Mus musculus
  siRNA target sequence for Tra1 (NM_011631.1,1273-1291).
gaggtctgtttgatgaata

SEQ ID NO: 516692 - DNA, 19 bp, Mus musculus
  siRNA target sequence for Tra1 (NM_011631.1,1278-1296).
ctgtttgatgaatatggat

SEQ ID NO: 516693 - DNA, 19 bp, Mus musculus
  siRNA target sequence for Tra1 (NM_011631.1,1284-1302).
gatgaatatggatctaaga

SEQ ID NO: 516694 - DNA, 19 bp, Mus musculus
  siRNA target sequence for Tra1 (NM_011631.1,1293-1311).
ggatctaagaagagtgatt

SEQ ID NO: 516695 - DNA, 19 bp, Mus musculus
  siRNA target sequence for Tra1 (NM_011631.1,1294-1312).
gatctaagaagagtgatta

SEQ ID NO: 516696 - DNA, 19 bp, Mus musculus
  siRNA target sequence for Tra1 (NM_011631.1,1297-1315).
ctaagaagagtgattatat

SEQ ID NO: 516697 - DNA, 19 bp, Mus musculus
  siRNA target sequence for Tra1 (NM_011631.1,1345-1363).
cagatgacttccatgatat

SEQ ID NO: 516698 - DNA, 19 bp, Mus musculus
  siRNA target sequence for Tra1 (NM_011631.1,1410-1428).
gatctccccctcaatgttt

SEQ ID NO: 516699 - DNA, 19 bp, Mus musculus
  siRNA target sequence for Tra1 (NM_011631.1,1434-1452).
gagactcttcagcaacata

SEQ ID NO: 516700 - DNA, 19 bp, Mus musculus
  siRNA target sequence for Tra1 (NM_011631.1,1548-1566).
gagttcggcacgaatatca

SEQ ID NO: 516701 - DNA, 19 bp, Mus musculus
  siRNA target sequence for Tra1 (NM_011631.1,1565-1583).
caagcttggtgtgattgaa

SEQ ID NO: 516702 - DNA, 19 bp, Mus musculus
  siRNA target sequence for Tra1 (NM_011631.1,1577-1595).
gattgaagaccactcaaat

SEQ ID NO: 516703 - DNA, 19 bp, Mus musculus
  siRNA target sequence for Tra1 (NM_011631.1,1581-1599).
gaagaccactcaaatcgaa

SEQ ID NO: 516704 - DNA, 19 bp, Mus musculus
  siRNA target sequence for Tra1 (NM_011631.1,1597-1615).
gaacacggcttgctaaact

SEQ ID NO: 516705 - DNA, 19 bp, Mus musculus
  siRNA target sequence for Tra1 (NM_011631.1,1600-1618).
cacggcttgctaaacttct

SEQ ID NO: 516706 - DNA, 19 bp, Mus musculus
  siRNA target sequence for Tra1 (NM_011631.1,1637-1655).
ccattcaactgacattact

SEQ ID NO: 516707 - DNA, 19 bp, Mus musculus
  siRNA target sequence for Tra1 (NM_011631.1,1642-1660).
caactgacattactagttt

SEQ ID NO: 516708 - DNA, 19 bp, Mus musculus
  siRNA target sequence for Tra1 (NM_011631.1,1662-1680).
gaccagtatgtggaaagaa

SEQ ID NO: 516709 - DNA, 19 bp, Mus musculus
  siRNA target sequence for Tra1 (NM_011631.1,1665-1683).
cagtatgtggaaagaatga

SEQ ID NO: 516710 - DNA, 19 bp, Mus musculus
  siRNA target sequence for Tra1 (NM_011631.1,1735-1753).
cggaatcttctccatttgt

SEQ ID NO: 516711 - DNA, 19 bp, Mus musculus
  siRNA target sequence for Tra1 (NM_011631.1,1772-1790).
gggctatgaagtcatttat

SEQ ID NO: 516712 - DNA, 19 bp, Mus musculus
  siRNA target sequence for Tra1 (NM_011631.1,2099-2117).
caaggacatctctacaaat

SEQ ID NO: 516713 - DNA, 19 bp, Mus musculus
  siRNA target sequence for Tra1 (NM_011631.1,2105-2123).
catctctacaaattactat

SEQ ID NO: 516714 - DNA, 19 bp, Mus musculus
  siRNA target sequence for Tra1 (NM_011631.1,2125-2143).
ccagtcaaaagaaaacgtt

SEQ ID NO: 516715 - DNA, 19 bp, Mus musculus
  siRNA target sequence for Tra1 (NM_011631.1,2135-2153).
gaaaacgttcgaaatcaat

SEQ ID NO: 516716 - DNA, 19 bp, Mus musculus
  siRNA target sequence for Tra1 (NM_011631.1,2186-2204).
gcggattaaggaagatgaa

SEQ ID NO: 516717 - DNA, 19 bp, Mus musculus
  siRNA target sequence for Tra1 (NM_011631.1,2219-2237).
catggatcttgctgtagtt

SEQ ID NO: 516718 - DNA, 19 bp, Mus musculus
  siRNA target sequence for Tra1 (NM_011631.1,2223-2241).
gatcttgctgtagttttgt

SEQ ID NO: 516719 - DNA, 19 bp, Mus musculus
  siRNA target sequence for Tra1 (NM_011631.1,2240-2258).
gtttgaaacggcaacactt

SEQ ID NO: 516720 - DNA, 19 bp, Mus musculus
  siRNA target sequence for Tra1 (NM_011631.1,2254-2272).
cacttcggtcaggatatct

SEQ ID NO: 516721 - DNA, 19 bp, Mus musculus
  siRNA target sequence for Tra1 (NM_011631.1,2288-2306).
ggcgtatggagatagaata

SEQ ID NO: 516722 - DNA, 19 bp, Mus musculus
  siRNA target sequence for Tra1 (NM_011631.1,2311-2329).
gaatgcttcgcctcagttt

SEQ ID NO: 516723 - DNA, 19 bp, Mus musculus
  siRNA target sequence for Tra1 (NM_011631.1,2316-2334).
cttcgcctcagtttaaaca

SEQ ID NO: 516724 - DNA, 19 bp, Mus musculus
  siRNA target sequence for Tra1 (NM_011631.1,2320-2338).
gcctcagtttaaacattga

SEQ ID NO: 516725 - DNA, 19 bp, Mus musculus
  siRNA target sequence for Trpc4ap (NM_019828.1,314-332).
cattctcaaggagatttct

SEQ ID NO: 516726 - DNA, 19 bp, Mus musculus
  siRNA target sequence for Trpc4ap (NM_019828.1,348-366).
gaggctatggcgtttgtaa

SEQ ID NO: 516727 - DNA, 19 bp, Mus musculus
  siRNA target sequence for Trpc4ap (NM_019828.1,350-368).
ggctatggcgtttgtaact

SEQ ID NO: 516728 - DNA, 19 bp, Mus musculus
  siRNA target sequence for Trpc4ap (NM_019828.1,352-370).
ctatggcgtttgtaactga

SEQ ID NO: 516729 - DNA, 19 bp, Mus musculus
  siRNA target sequence for Trpc4ap (NM_019828.1,390-408).
gaagctacatacccaaata

SEQ ID NO: 516730 - DNA, 19 bp, Mus musculus
  siRNA target sequence for Trpc4ap (NM_019828.1,393-411).
gctacatacccaaatacat

SEQ ID NO: 516731 - DNA, 19 bp, Mus musculus
  siRNA target sequence for Trpc4ap (NM_019828.1,394-412).
ctacatacccaaatacata

SEQ ID NO: 516732 - DNA, 19 bp, Mus musculus
  siRNA target sequence for Trpc4ap (NM_019828.1,435-453).
gttgatcttcttgtagaaa

SEQ ID NO: 516733 - DNA, 19 bp, Mus musculus
  siRNA target sequence for Trpc4ap (NM_019828.1,475-493).
ctatccggggacagaaact

SEQ ID NO: 516734 - DNA, 19 bp, Mus musculus
  siRNA target sequence for Trpc4ap (NM_019828.1,553-571).
gcacggaaggagtaacgaa

SEQ ID NO: 516735 - DNA, 19 bp, Mus musculus
  siRNA target sequence for Trpc4ap (NM_019828.1,568-586).
cgaagcgtttggcagaaaa

SEQ ID NO: 516736 - DNA, 19 bp, Mus musculus
  siRNA target sequence for Trpc4ap (NM_019828.1,574-592).
gtttggcagaaaagaatga

SEQ ID NO: 516737 - DNA, 19 bp, Mus musculus
  siRNA target sequence for Trpc4ap (NM_019828.1,578-596).
ggcagaaaagaatgatttt

SEQ ID NO: 516738 - DNA, 19 bp, Mus musculus
  siRNA target sequence for Trpc4ap (NM_019828.1,625-643).
gtaagaagacattcttaca

SEQ ID NO: 516739 - DNA, 19 bp, Mus musculus
  siRNA target sequence for Trpc4ap (NM_019828.1,646-664).
cagcgactctcattgaaga

SEQ ID NO: 516740 - DNA, 19 bp, Mus musculus
  siRNA target sequence for Trpc4ap (NM_019828.1,663-681).
gacattttgggtgttaaga

SEQ ID NO: 516741 - DNA, 19 bp, Mus musculus
  siRNA target sequence for Trpc4ap (NM_019828.1,689-707).
gatccggctagatgaagtt

SEQ ID NO: 516742 - DNA, 19 bp, Mus musculus
  siRNA target sequence for Trpc4ap (NM_019828.1,699-717).
gatgaagttcccaatctga

SEQ ID NO: 516743 - DNA, 19 bp, Mus musculus
  siRNA target sequence for Trpc4ap (NM_019828.1,716-734).
gagttccttagtatccaat

SEQ ID NO: 516744 - DNA, 19 bp, Mus musculus
  siRNA target sequence for Trpc4ap (NM_019828.1,718-736).
gttccttagtatccaattt

SEQ ID NO: 516745 - DNA, 19 bp, Mus musculus
  siRNA target sequence for Trpc4ap (NM_019828.1,721-739).
ccttagtatccaatttcga

SEQ ID NO: 516746 - DNA, 19 bp, Mus musculus
  siRNA target sequence for Trpc4ap (NM_019828.1,722-740).
cttagtatccaatttcgat

SEQ ID NO: 516747 - DNA, 19 bp, Mus musculus
  siRNA target sequence for Trpc4ap (NM_019828.1,799-817).
cggggaatgacgacaaaca

SEQ ID NO: 516748 - DNA, 19 bp, Mus musculus
  siRNA target sequence for Trpc4ap (NM_019828.1,801-819).
gggaatgacgacaaacaca

SEQ ID NO: 516749 - DNA, 19 bp, Mus musculus
  siRNA target sequence for Trpc4ap (NM_019828.1,818-836).
cacgcttcttgccaaaaat

SEQ ID NO: 516750 - DNA, 19 bp, Mus musculus
  siRNA target sequence for Trpc4ap (NM_019828.1,936-954).
ctggcaactaggaaagtgt

SEQ ID NO: 516751 - DNA, 19 bp, Mus musculus
  siRNA target sequence for Trpc4ap (NM_019828.1,1058-1076).
ggagtctgaacacaatcaa

SEQ ID NO: 516752 - DNA, 19 bp, Mus musculus
  siRNA target sequence for Trpc4ap (NM_019828.1,1127-1145).
gccccagtccatgaagatt

SEQ ID NO: 516753 - DNA, 19 bp, Mus musculus
  siRNA target sequence for Trpc4ap (NM_019828.1,1128-1146).
ccccagtccatgaagatta

SEQ ID NO: 516754 - DNA, 19 bp, Mus musculus
  siRNA target sequence for Trpc4ap (NM_019828.1,1129-1147).
cccagtccatgaagattat

SEQ ID NO: 516755 - DNA, 19 bp, Mus musculus
  siRNA target sequence for Trpc4ap (NM_019828.1,1148-1166).
gcatgagattatgtacaaa

SEQ ID NO: 516756 - DNA, 19 bp, Mus musculus
  siRNA target sequence for Trpc4ap (NM_019828.1,1254-1272).
ccaggactcaataatttgt

SEQ ID NO: 516757 - DNA, 19 bp, Mus musculus
  siRNA target sequence for Trpc4ap (NM_019828.1,1281-1299).
ctgatttggaggaagcatt

SEQ ID NO: 516758 - DNA, 19 bp, Mus musculus
  siRNA target sequence for Trpc4ap (NM_019828.1,1532-1550).
caagaggggcctactaact

SEQ ID NO: 516759 - DNA, 19 bp, Mus musculus
  siRNA target sequence for Trpc4ap (NM_019828.1,1683-1701).
ctggagcacatcttatact

SEQ ID NO: 516760 - DNA, 19 bp, Mus musculus
  siRNA target sequence for Trpc4ap (NM_019828.1,1720-1738).
gcaagtctagggatgtact

SEQ ID NO: 516761 - DNA, 19 bp, Mus musculus
  siRNA target sequence for Trpc4ap (NM_019828.1,1782-1800).
gtcgatgcattcaagagat

SEQ ID NO: 516762 - DNA, 19 bp, Mus musculus
  siRNA target sequence for Trpc4ap (NM_019828.1,1785-1803).
gatgcattcaagagattca

SEQ ID NO: 516763 - DNA, 19 bp, Mus musculus
  siRNA target sequence for Trpc4ap (NM_019828.1,1788-1806).
gcattcaagagattcaata

SEQ ID NO: 516764 - DNA, 19 bp, Mus musculus
  siRNA target sequence for Trpc4ap (NM_019828.1,1833-1851).
caggtgttcctgaaacaga

SEQ ID NO: 516765 - DNA, 19 bp, Mus musculus
  siRNA target sequence for Trpc4ap (NM_019828.1,1901-1919).
gtcactggaccgatttgaa

SEQ ID NO: 516766 - DNA, 19 bp, Mus musculus
  siRNA target sequence for Trpc4ap (NM_019828.1,1903-1921).
cactggaccgatttgaaaa

SEQ ID NO: 516767 - DNA, 19 bp, Mus musculus
  siRNA target sequence for Trpc4ap (NM_019828.1,1961-1979).
ccgcctgcttgcctacata

SEQ ID NO: 516768 - DNA, 19 bp, Mus musculus
  siRNA target sequence for Trpc4ap (NM_019828.1,1962-1980).
cgcctgcttgcctacatat

SEQ ID NO: 516769 - DNA, 19 bp, Mus musculus
  siRNA target sequence for Trpc4ap (NM_019828.1,1983-2001).
caggtgcccacgcaaatgt

SEQ ID NO: 516770 - DNA, 19 bp, Mus musculus
  siRNA target sequence for Trpc4ap (NM_019828.1,2217-2235).
cactacctgcacaaggata

SEQ ID NO: 516771 - DNA, 19 bp, Mus musculus
  siRNA target sequence for Trpc4ap (NM_019828.1,2253-2271).
gagaatagctcctgtatca

SEQ ID NO: 516772 - DNA, 19 bp, Mus musculus
  siRNA target sequence for Trpc4ap (NM_019828.1,2289-2307).
gagacagtgtccatcttgt

SEQ ID NO: 516773 - DNA, 19 bp, Mus musculus
  siRNA target sequence for Trpm6 (NM_153417.1,73-91).
gaaggggtattctacaaga

SEQ ID NO: 516774 - DNA, 19 bp, Mus musculus
  siRNA target sequence for Trpm6 (NM_153417.1,87-105).
caagagagagtgtaacaaa

SEQ ID NO: 516775 - DNA, 19 bp, Mus musculus
  siRNA target sequence for Trpm6 (NM_153417.1,149-167).
gccaaatctgccacaattt

SEQ ID NO: 516776 - DNA, 19 bp, Mus musculus
  siRNA target sequence for Trpm6 (NM_153417.1,150-168).
ccaaatctgccacaattta

SEQ ID NO: 516777 - DNA, 19 bp, Mus musculus
  siRNA target sequence for Trpm6 (NM_153417.1,298-316).
gataccttcggcaccatta

SEQ ID NO: 516778 - DNA, 19 bp, Mus musculus
  siRNA target sequence for Trpm6 (NM_153417.1,306-324).
cggcaccattaatttccaa

SEQ ID NO: 516779 - DNA, 19 bp, Mus musculus
  siRNA target sequence for Trpm6 (NM_153417.1,345-363).
ctccaagtacattagaact

SEQ ID NO: 516780 - DNA, 19 bp, Mus musculus
  siRNA target sequence for Trpm6 (NM_153417.1,374-392).
caaaatcggatcatctgtt

SEQ ID NO: 516781 - DNA, 19 bp, Mus musculus
  siRNA target sequence for Trpm6 (NM_153417.1,451-469).
gggggtcttcagaacttca

SEQ ID NO: 516782 - DNA, 19 bp, Mus musculus
  siRNA target sequence for Trpm6 (NM_153417.1,452-470).
ggggtcttcagaacttcaa

SEQ ID NO: 516783 - DNA, 19 bp, Mus musculus
  siRNA target sequence for Trpm6 (NM_153417.1,528-546).
cacaggagcatggataatt

SEQ ID NO: 516784 - DNA, 19 bp, Mus musculus
  siRNA target sequence for Trpm6 (NM_153417.1,533-551).
gagcatggataattacaga

SEQ ID NO: 516785 - DNA, 19 bp, Mus musculus
  siRNA target sequence for Trpm6 (NM_153417.1,579-597).
cgttggggatgccctaaaa

SEQ ID NO: 516786 - DNA, 19 bp, Mus musculus
  siRNA target sequence for Trpm6 (NM_153417.1,599-617).
cccattcctctaagtcttt

SEQ ID NO: 516787 - DNA, 19 bp, Mus musculus
  siRNA target sequence for Trpm6 (NM_153417.1,601-619).
cattcctctaagtctttga

SEQ ID NO: 516788 - DNA, 19 bp, Mus musculus
  siRNA target sequence for Trpm6 (NM_153417.1,671-689).
gagagctggtcggaaaaga

SEQ ID NO: 516789 - DNA, 19 bp, Mus musculus
  siRNA target sequence for Trpm6 (NM_153417.1,732-750).
gctcaccacgctaaactgt

SEQ ID NO: 516790 - DNA, 19 bp, Mus musculus
  siRNA target sequence for Trpm6 (NM_153417.1,733-751).
ctcaccacgctaaactgta

SEQ ID NO: 516791 - DNA, 19 bp, Mus musculus
  siRNA target sequence for Trpm6 (NM_153417.1,749-767).
gtatgcactctcacttcat

SEQ ID NO: 516792 - DNA, 19 bp, Mus musculus
  siRNA target sequence for Trpm6 (NM_153417.1,932-950).
gggagaccgtcaagaacaa

SEQ ID NO: 516793 - DNA, 19 bp, Mus musculus
  siRNA target sequence for Trpm6 (NM_153417.1,1149-1167).
ggattctatcaccatattt

SEQ ID NO: 516794 - DNA, 19 bp, Mus musculus
  siRNA target sequence for Trpm6 (NM_153417.1,1222-1240).
ctgaagggtacaagcttat

SEQ ID NO: 516795 - DNA, 19 bp, Mus musculus
  siRNA target sequence for Trpm6 (NM_153417.1,1224-1242).
gaagggtacaagcttatca

SEQ ID NO: 516796 - DNA, 19 bp, Mus musculus
  siRNA target sequence for Trpm6 (NM_153417.1,1227-1245).
gggtacaagcttatcaata

SEQ ID NO: 516797 - DNA, 19 bp, Mus musculus
  siRNA target sequence for Trpm6 (NM_153417.1,1228-1246).
ggtacaagcttatcaatat

SEQ ID NO: 516798 - DNA, 19 bp, Mus musculus
  siRNA target sequence for Trpm6 (NM_153417.1,1232-1250).
caagcttatcaatatcaga

SEQ ID NO: 516799 - DNA, 19 bp, Mus musculus
  siRNA target sequence for Trpm6 (NM_153417.1,1236-1254).
cttatcaatatcagaacaa

SEQ ID NO: 516800 - DNA, 19 bp, Mus musculus
  siRNA target sequence for Trpm6 (NM_153417.1,1447-1465).
gaagagctctataacacaa

SEQ ID NO: 516801 - DNA, 19 bp, Mus musculus
  siRNA target sequence for Trpm6 (NM_153417.1,1463-1481).
caaaacaaggaccaactaa

SEQ ID NO: 516802 - DNA, 19 bp, Mus musculus
  siRNA target sequence for Trpm6 (NM_153417.1,1468-1486).
caaggaccaactaataaat

SEQ ID NO: 516803 - DNA, 19 bp, Mus musculus
  siRNA target sequence for Trpm6 (NM_153417.1,1471-1489).
ggaccaactaataaatttt

SEQ ID NO: 516804 - DNA, 19 bp, Mus musculus
  siRNA target sequence for Trpm6 (NM_153417.1,1524-1542).
ccttctctcgagctataga

SEQ ID NO: 516805 - DNA, 19 bp, Mus musculus
  siRNA target sequence for Trpm6 (NM_153417.1,1530-1548).
ctcgagctatagaataaca

SEQ ID NO: 516806 - DNA, 19 bp, Mus musculus
  siRNA target sequence for Trpm6 (NM_153417.1,1532-1550).
cgagctatagaataacact

SEQ ID NO: 516807 - DNA, 19 bp, Mus musculus
  siRNA target sequence for Trpm6 (NM_153417.1,1541-1559).
gaataacactcattgacat

SEQ ID NO: 516808 - DNA, 19 bp, Mus musculus
  siRNA target sequence for Trpm6 (NM_153417.1,1578-1596).
cctcattggtggagcatat

SEQ ID NO: 516809 - DNA, 19 bp, Mus musculus
  siRNA target sequence for Trpm6 (NM_153417.1,1608-1626).
cactaggaaaagtttcaga

SEQ ID NO: 516810 - DNA, 19 bp, Mus musculus
  siRNA target sequence for Trpm6 (NM_153417.1,1610-1628).
ctaggaaaagtttcagaat

SEQ ID NO: 516811 - DNA, 19 bp, Mus musculus
  siRNA target sequence for Trpm6 (NM_153417.1,1770-1788).
gacggcccagccctacaaa

SEQ ID NO: 516812 - DNA, 19 bp, Mus musculus
  siRNA target sequence for Trpm6 (NM_153417.1,1800-1818).
gcctgaggactctcaaaaa

SEQ ID NO: 516813 - DNA, 19 bp, Mus musculus
  siRNA target sequence for Trpm6 (NM_153417.1,1801-1819).
cctgaggactctcaaaaat

SEQ ID NO: 516814 - DNA, 19 bp, Mus musculus
  siRNA target sequence for Trpm6 (NM_153417.1,2037-2055).
ggtggatgacacttcagaa

SEQ ID NO: 516815 - DNA, 19 bp, Mus musculus
  siRNA target sequence for Trpm6 (NM_153417.1,2086-2104).
cagctcgccctggatgtat

SEQ ID NO: 516816 - DNA, 19 bp, Mus musculus
  siRNA target sequence for Trpm6 (NM_153417.1,2088-2106).
gctcgccctggatgtatta

SEQ ID NO: 516817 - DNA, 19 bp, Mus musculus
  siRNA target sequence for Trpm6 (NM_153417.1,2207-2225).
gaggtctgcgcccttttgt

SEQ ID NO: 516818 - DNA, 19 bp, Mus musculus
  siRNA target sequence for Trpm6 (NM_153417.1,2218-2236).
ccttttgtgtcgcattctt

SEQ ID NO: 516819 - DNA, 19 bp, Mus musculus
  siRNA target sequence for Trpm6 (NM_153417.1,2240-2258).
cccaaatgctgctaacaga

SEQ ID NO: 516820 - DNA, 19 bp, Mus musculus
  siRNA target sequence for Trpm6 (NM_153417.1,2262-2280).
gtggatggggcgtctgaaa

SEQ ID NO: 516821 - DNA, 19 bp, Mus musculus
  siRNA target sequence for Trpm6 (NM_153417.1,2269-2287).
gggcgtctgaaaatgagaa

SEQ ID NO: 516822 - DNA, 19 bp, Mus musculus
  siRNA target sequence for Trpm6 (NM_153417.1,2270-2288).
ggcgtctgaaaatgagaaa

SEQ ID NO: 516823 - DNA, 19 bp, Mus musculus
  siRNA target sequence for Trpm6 (NM_153417.1,2294-2312).
cctggctgaagataatcat

SEQ ID NO: 516824 - DNA, 19 bp, Mus musculus
  siRNA target sequence for Trpm6 (NM_153417.1,2319-2337).
cctcttaccacccatgatt

SEQ ID NO: 516825 - DNA, 19 bp, Mus musculus
  siRNA target sequence for Trpm6 (NM_153417.1,2320-2338).
ctcttaccacccatgattt

SEQ ID NO: 516826 - DNA, 19 bp, Mus musculus
  siRNA target sequence for Trpm6 (NM_153417.1,2389-2407).
caggatttccagtttacat

SEQ ID NO: 516827 - DNA, 19 bp, Mus musculus
  siRNA target sequence for Trpm6 (NM_153417.1,2417-2435).
gtgaccagggcctgagtaa

SEQ ID NO: 516828 - DNA, 19 bp, Mus musculus
  siRNA target sequence for Trpm6 (NM_153417.1,2500-2518).
gaacctctgcatttagact

SEQ ID NO: 516829 - DNA, 19 bp, Mus musculus
  siRNA target sequence for Trpm6 (NM_153417.1,2552-2570).
ggagagtctacgagttcta

SEQ ID NO: 516830 - DNA, 19 bp, Mus musculus
  siRNA target sequence for Trpm6 (NM_153417.1,2573-2591).
gcgctccgtttgtcaagtt

SEQ ID NO: 516831 - DNA, 19 bp, Mus musculus
  siRNA target sequence for Trpm6 (NM_153417.1,2574-2592).
cgctccgtttgtcaagttt

SEQ ID NO: 516832 - DNA, 19 bp, Mus musculus
  siRNA target sequence for Trpm6 (NM_153417.1,2578-2596).
ccgtttgtcaagttttggt

SEQ ID NO: 516833 - DNA, 19 bp, Mus musculus
  siRNA target sequence for Trpm6 (NM_153417.1,2623-2641).
ctcatgctgttcacttaca

SEQ ID NO: 516834 - DNA, 19 bp, Mus musculus
  siRNA target sequence for Trpm6 (NM_153417.1,2625-2643).
catgctgttcacttacaca

SEQ ID NO: 516835 - DNA, 19 bp, Mus musculus
  siRNA target sequence for Trpm6 (NM_153417.1,2725-2743).
gtcagggagatctgcattt

SEQ ID NO: 516836 - DNA, 19 bp, Mus musculus
  siRNA target sequence for Trpm6 (NM_153417.1,2727-2745).
cagggagatctgcatttca

SEQ ID NO: 516837 - DNA, 19 bp, Mus musculus
  siRNA target sequence for Trpm6 (NM_153417.1,2795-2813).
ggaacctcatggaaactgt

SEQ ID NO: 516838 - DNA, 19 bp, Mus musculus
  siRNA target sequence for Trpm6 (NM_153417.1,2853-2871).
ggggcatccacctttgcaa

SEQ ID NO: 516839 - DNA, 19 bp, Mus musculus
  siRNA target sequence for Trpm6 (NM_153417.1,2892-2910).
ctgcatagacatcatattt

SEQ ID NO: 516840 - DNA, 19 bp, Mus musculus
  siRNA target sequence for Trpm6 (NM_153417.1,2918-2936).
ctcggctcatggacttctt

SEQ ID NO: 516841 - DNA, 19 bp, Mus musculus
  siRNA target sequence for Trpm6 (NM_153417.1,2931-2949).
cttctttgctgtgaatcaa

SEQ ID NO: 516842 - DNA, 19 bp, Mus musculus
  siRNA target sequence for Trpm6 (NM_153417.1,2934-2952).
ctttgctgtgaatcaacat

SEQ ID NO: 516843 - DNA, 19 bp, Mus musculus
  siRNA target sequence for Trpm6 (NM_153417.1,2950-2968).
catgcaggtccatatgtga

SEQ ID NO: 516844 - DNA, 19 bp, Mus musculus
  siRNA target sequence for Trpm6 (NM_153417.1,3095-3113).
ctcgtgacatcgtctttga

SEQ ID NO: 516845 - DNA, 19 bp, Mus musculus
  siRNA target sequence for Trpm6 (NM_153417.1,3106-3124).
gtctttgagccgtattgga

SEQ ID NO: 516846 - DNA, 19 bp, Mus musculus
  siRNA target sequence for Trpm6 (NM_153417.1,3112-3130).
gagccgtattggatgatgt

SEQ ID NO: 516847 - DNA, 19 bp, Mus musculus
  siRNA target sequence for Trpm6 (NM_153417.1,3126-3144).
gatgtatggagaagtctat

SEQ ID NO: 516848 - DNA, 19 bp, Mus musculus
  siRNA target sequence for Trpm6 (NM_153417.1,3141-3159).
ctatgcttcagatatagat

SEQ ID NO: 516849 - DNA, 19 bp, Mus musculus
  siRNA target sequence for Trpm6 (NM_153417.1,3265-3283).
gcctgtttcaacaacattt

SEQ ID NO: 516850 - DNA, 19 bp, Mus musculus
  siRNA target sequence for Trpm6 (NM_153417.1,3266-3284).
cctgtttcaacaacattta

SEQ ID NO: 516851 - DNA, 19 bp, Mus musculus
  siRNA target sequence for Trpm6 (NM_153417.1,3328-3346).
cgctatcgctacatcatga

SEQ ID NO: 516852 - DNA, 19 bp, Mus musculus
  siRNA target sequence for Trpm6 (NM_153417.1,3377-3395).
cctttatcctgctgaatca

SEQ ID NO: 516853 - DNA, 19 bp, Mus musculus
  siRNA target sequence for Trpm6 (NM_153417.1,3455-3473).
gggacggagggctaaagct

SEQ ID NO: 516854 - DNA, 19 bp, Mus musculus
  siRNA target sequence for Trpm6 (NM_153417.1,3463-3481).
gggctaaagctctatctca

SEQ ID NO: 516855 - DNA, 19 bp, Mus musculus
  siRNA target sequence for Trpm6 (NM_153417.1,3471-3489).
gctctatctcactaaggat

SEQ ID NO: 516856 - DNA, 19 bp, Mus musculus
  siRNA target sequence for Trpm6 (NM_153417.1,3480-3498).
cactaaggatgacttgaaa

SEQ ID NO: 516857 - DNA, 19 bp, Mus musculus
  siRNA target sequence for Trpm6 (NM_153417.1,3546-3564).
gaagacggaaggtctgaat

SEQ ID NO: 516858 - DNA, 19 bp, Mus musculus
  siRNA target sequence for Trpm6 (NM_153417.1,3549-3567).
gacggaaggtctgaattgt

SEQ ID NO: 516859 - DNA, 19 bp, Mus musculus
  siRNA target sequence for Trpm6 (NM_153417.1,3552-3570).
ggaaggtctgaattgtagt

SEQ ID NO: 516860 - DNA, 19 bp, Mus musculus
  siRNA target sequence for Trpm6 (NM_153417.1,3553-3571).
gaaggtctgaattgtagtt

SEQ ID NO: 516861 - DNA, 19 bp, Mus musculus
  siRNA target sequence for Trpm6 (NM_153417.1,3612-3630).
gatgtttttccaactgaaa

SEQ ID NO: 516862 - DNA, 19 bp, Mus musculus
  siRNA target sequence for Trpm6 (NM_153417.1,3702-3720).
ggacctctcggccataact

SEQ ID NO: 516863 - DNA, 19 bp, Mus musculus
  siRNA target sequence for Trpm6 (NM_153417.1,3719-3737).
ctgttgacaccttaaaggt

SEQ ID NO: 516864 - DNA, 19 bp, Mus musculus
  siRNA target sequence for Trpm6 (NM_153417.1,3756-3774).
cttgcaagaagatgagatt

SEQ ID NO: 516865 - DNA, 19 bp, Mus musculus
  siRNA target sequence for Trpm6 (NM_153417.1,3915-3933).
gaggagcctcgctagaagt

SEQ ID NO: 516866 - DNA, 19 bp, Mus musculus
  siRNA target sequence for Trpm6 (NM_153417.1,3970-3988).
gaggttacgcacagtaaga

SEQ ID NO: 516867 - DNA, 19 bp, Mus musculus
  siRNA target sequence for Trpm6 (NM_153417.1,3972-3990).
ggttacgcacagtaagaga

SEQ ID NO: 516868 - DNA, 19 bp, Mus musculus
  siRNA target sequence for Trpm6 (NM_153417.1,4070-4088).
gacaagcacactctaagta

SEQ ID NO: 516869 - DNA, 19 bp, Mus musculus
  siRNA target sequence for Trpm6 (NM_153417.1,4181-4199).
gtatagatggtctggtatt

SEQ ID NO: 516870 - DNA, 19 bp, Mus musculus
  siRNA target sequence for Trpm6 (NM_153417.1,4190-4208).
gtctggtattggagcatat

SEQ ID NO: 516871 - DNA, 19 bp, Mus musculus
  siRNA target sequence for Trpm6 (NM_153417.1,4203-4221).
gcatatacaccaaagtgat

SEQ ID NO: 516872 - DNA, 19 bp, Mus musculus
  siRNA target sequence for Trpm6 (NM_153417.1,4290-4308).
ccaacatgaggcagttaca

SEQ ID NO: 516873 - DNA, 19 bp, Mus musculus
  siRNA target sequence for Trpm6 (NM_153417.1,4456-4474).
gatgaaacaggtgtgttta

SEQ ID NO: 516874 - DNA, 19 bp, Mus musculus
  siRNA target sequence for Trpm6 (NM_153417.1,4459-4477).
gaaacaggtgtgtttagct

SEQ ID NO: 516875 - DNA, 19 bp, Mus musculus
  siRNA target sequence for Trpm6 (NM_153417.1,4463-4481).
caggtgtgtttagctttaa

SEQ ID NO: 516876 - DNA, 19 bp, Mus musculus
  siRNA target sequence for Trpm6 (NM_153417.1,4503-4521).
ggcctccacttgcaatagt

SEQ ID NO: 516877 - DNA, 19 bp, Mus musculus
  siRNA target sequence for Trpm6 (NM_153417.1,4505-4523).
cctccacttgcaatagtga

SEQ ID NO: 516878 - DNA, 19 bp, Mus musculus
  siRNA target sequence for Trpm6 (NM_153417.1,4562-4580).
gtagatccggactggataa

SEQ ID NO: 516879 - DNA, 19 bp, Mus musculus
  siRNA target sequence for Trpm6 (NM_153417.1,4665-4683).
cagagataaagctctcatt

SEQ ID NO: 516880 - DNA, 19 bp, Mus musculus
  siRNA target sequence for Trpm6 (NM_153417.1,4669-4687).
gataaagctctcattaaga

SEQ ID NO: 516881 - DNA, 19 bp, Mus musculus
  siRNA target sequence for Trpm6 (NM_153417.1,4678-4696).
ctcattaagagtcatagtt

SEQ ID NO: 516882 - DNA, 19 bp, Mus musculus
  siRNA target sequence for Trpm6 (NM_153417.1,4842-4860).
gctccaggtgccggtaata

SEQ ID NO: 516883 - DNA, 19 bp, Mus musculus
  siRNA target sequence for Trpm6 (NM_153417.1,4843-4861).
ctccaggtgccggtaataa

SEQ ID NO: 516884 - DNA, 19 bp, Mus musculus
  siRNA target sequence for Trpm6 (NM_153417.1,4845-4863).
ccaggtgccggtaataaca

SEQ ID NO: 516885 - DNA, 19 bp, Mus musculus
  siRNA target sequence for Trpm6 (NM_153417.1,4851-4869).
gccggtaataacagtcaat

SEQ ID NO: 516886 - DNA, 19 bp, Mus musculus
  siRNA target sequence for Trpm6 (NM_153417.1,4864-4882).
gtcaatgcctgctatcaaa

SEQ ID NO: 516887 - DNA, 19 bp, Mus musculus
  siRNA target sequence for Trpm6 (NM_153417.1,4866-4884).
caatgcctgctatcaaagt

SEQ ID NO: 516888 - DNA, 19 bp, Mus musculus
  siRNA target sequence for Trpm6 (NM_153417.1,4913-4931).
ctaacaccactgaagagtt

SEQ ID NO: 516889 - DNA, 19 bp, Mus musculus
  siRNA target sequence for Trpm6 (NM_153417.1,4959-4977).
cttcagccagataggttta

SEQ ID NO: 516890 - DNA, 19 bp, Mus musculus
  siRNA target sequence for Trpm6 (NM_153417.1,4972-4990).
ggtttagagccttacatat

SEQ ID NO: 516891 - DNA, 19 bp, Mus musculus
  siRNA target sequence for Trpm6 (NM_153417.1,4973-4991).
gtttagagccttacatata

SEQ ID NO: 516892 - DNA, 19 bp, Mus musculus
  siRNA target sequence for Trpm6 (NM_153417.1,4981-4999).
ccttacatataccagaaaa

SEQ ID NO: 516893 - DNA, 19 bp, Mus musculus
  siRNA target sequence for Trpm6 (NM_153417.1,5016-5034).
caagcgacatactacacaa

SEQ ID NO: 516894 - DNA, 19 bp, Mus musculus
  siRNA target sequence for Trpm6 (NM_153417.1,5105-5123).
gcctcagcaggagttttct

SEQ ID NO: 516895 - DNA, 19 bp, Mus musculus
  siRNA target sequence for Trpm6 (NM_153417.1,5109-5127).
cagcaggagttttctaaca

SEQ ID NO: 516896 - DNA, 19 bp, Mus musculus
  siRNA target sequence for Trpm6 (NM_153417.1,5112-5130).
caggagttttctaacaaga

SEQ ID NO: 516897 - DNA, 19 bp, Mus musculus
  siRNA target sequence for Trpm6 (NM_153417.1,5129-5147).
gaagtccaaatgaagttca

SEQ ID NO: 516898 - DNA, 19 bp, Mus musculus
  siRNA target sequence for Trpm6 (NM_153417.1,5135-5153).
caaatgaagttcacaagat

SEQ ID NO: 516899 - DNA, 19 bp, Mus musculus
  siRNA target sequence for Trpm6 (NM_153417.1,5140-5158).
gaagttcacaagatctcaa

SEQ ID NO: 516900 - DNA, 19 bp, Mus musculus
  siRNA target sequence for Trpm6 (NM_153417.1,5151-5169).
gatctcaacctccttaaaa

SEQ ID NO: 516901 - DNA, 19 bp, Mus musculus
  siRNA target sequence for Trpm6 (NM_153417.1,5206-5224).
gaaaggaataatttaatga

SEQ ID NO: 516902 - DNA, 19 bp, Mus musculus
  siRNA target sequence for Trpm6 (NM_153417.1,5286-5304).
ctacaagcttgaagaaagt

SEQ ID NO: 516903 - DNA, 19 bp, Mus musculus
  siRNA target sequence for Trpm6 (NM_153417.1,5306-5324).
ctcctctgaccctggataa

SEQ ID NO: 516904 - DNA, 19 bp, Mus musculus
  siRNA target sequence for Trpm6 (NM_153417.1,5351-5369).
gcagagctgccatgattca

SEQ ID NO: 516905 - DNA, 19 bp, Mus musculus
  siRNA target sequence for Trpm6 (NM_153417.1,5432-5450).
ggtctgaggatgatgttct

SEQ ID NO: 516906 - DNA, 19 bp, Mus musculus
  siRNA target sequence for Trpm6 (NM_153417.1,5546-5564).
gccttagggaaattcaaca

SEQ ID NO: 516907 - DNA, 19 bp, Mus musculus
  siRNA target sequence for Trpm6 (NM_153417.1,5570-5588).
gagctgcccaaaaactcat

SEQ ID NO: 516908 - DNA, 19 bp, Mus musculus
  siRNA target sequence for Trpm6 (NM_153417.1,5575-5593).
gcccaaaaactcatctata

SEQ ID NO: 516909 - DNA, 19 bp, Mus musculus
  siRNA target sequence for Trpm6 (NM_153417.1,5586-5604).
catctatacctttaaccaa

SEQ ID NO: 516910 - DNA, 19 bp, Mus musculus
  siRNA target sequence for Trpm6 (NM_153417.1,5595-5613).
ctttaaccaagtaaaacca

SEQ ID NO: 516911 - DNA, 19 bp, Mus musculus
  siRNA target sequence for Trpm6 (NM_153417.1,5636-5654).
ggtttctcgaggtttcctt

SEQ ID NO: 516912 - DNA, 19 bp, Mus musculus
  siRNA target sequence for Trpm6 (NM_153417.1,5677-5695).
caatggttaaccattgaga

SEQ ID NO: 516913 - DNA, 19 bp, Mus musculus
  siRNA target sequence for Trpm6 (NM_153417.1,5705-5723).
caggggagttccggaaata

SEQ ID NO: 516914 - DNA, 19 bp, Mus musculus
  siRNA target sequence for Trpm6 (NM_153417.1,5707-5725).
ggggagttccggaaataca

SEQ ID NO: 516915 - DNA, 19 bp, Mus musculus
  siRNA target sequence for Trpm6 (NM_153417.1,5708-5726).
gggagttccggaaatacaa

SEQ ID NO: 516916 - DNA, 19 bp, Mus musculus
  siRNA target sequence for Trpm6 (NM_153417.1,5709-5727).
ggagttccggaaatacaat

SEQ ID NO: 516917 - DNA, 19 bp, Mus musculus
  siRNA target sequence for Trpm6 (NM_153417.1,5710-5728).
gagttccggaaatacaata

SEQ ID NO: 516918 - DNA, 19 bp, Mus musculus
  siRNA target sequence for Trpm6 (NM_153417.1,5716-5734).
cggaaatacaataacaaca

SEQ ID NO: 516919 - DNA, 19 bp, Mus musculus
  siRNA target sequence for Trpm6 (NM_153417.1,5743-5761).
gaaatagctcccaccaata

SEQ ID NO: 516920 - DNA, 19 bp, Mus musculus
  siRNA target sequence for Trpm6 (NM_153417.1,5787-5805).
ctctcactggacctatgaa

SEQ ID NO: 516921 - DNA, 19 bp, Mus musculus
  siRNA target sequence for Trpm6 (NM_153417.1,5818-5836).
gagctgctggttttagatt

SEQ ID NO: 516922 - DNA, 19 bp, Mus musculus
  siRNA target sequence for Trpm6 (NM_153417.1,5823-5841).
gctggttttagatttgcaa

SEQ ID NO: 516923 - DNA, 19 bp, Mus musculus
  siRNA target sequence for Trpm6 (NM_153417.1,5910-5928).
gtttggaccggccaattta

SEQ ID NO: 516924 - DNA, 19 bp, Mus musculus
  siRNA target sequence for Trpm6 (NM_153417.1,5929-5947).
ggggaagatgcaattagaa

SEQ ID NO: 516925 - DNA, 19 bp, Mus musculus
  siRNA target sequence for Trpm6 (NM_153417.1,5991-6009).
cagactgccggatttaaaa

SEQ ID NO: 516926 - DNA, 19 bp, Mus musculus
  siRNA target sequence for Trpm6 (NM_153417.1,5995-6013).
ctgccggatttaaaaagga

SEQ ID NO: 516927 - DNA, 19 bp, Mus musculus
  siRNA target sequence for Trpm6 (NM_153417.1,5997-6015).
gccggatttaaaaaggaat

SEQ ID NO: 516928 - DNA, 19 bp, Mus musculus
  siRNA target sequence for Trpm6 (NM_153417.1,6000-6018).
ggatttaaaaaggaatgat

SEQ ID NO: 516929 - DNA, 19 bp, Mus musculus
  siRNA target sequence for Trpm7 (NM_021450.1,270-288).
ccaagagggagtgtgtata

SEQ ID NO: 516930 - DNA, 19 bp, Mus musculus
  siRNA target sequence for Trpm7 (NM_021450.1,344-362).
cagcaacttgtcagatgtt

SEQ ID NO: 516931 - DNA, 19 bp, Mus musculus
  siRNA target sequence for Trpm7 (NM_021450.1,379-397).
caagcaacatgcatgcttt

SEQ ID NO: 516932 - DNA, 19 bp, Mus musculus
  siRNA target sequence for Trpm7 (NM_021450.1,401-419).
gcaagtcttgccatgaaat

SEQ ID NO: 516933 - DNA, 19 bp, Mus musculus
  siRNA target sequence for Trpm7 (NM_021450.1,445-463).
ctttaaccaggcaatagaa

SEQ ID NO: 516934 - DNA, 19 bp, Mus musculus
  siRNA target sequence for Trpm7 (NM_021450.1,506-524).
gcttatggagtcatcaatt

SEQ ID NO: 516935 - DNA, 19 bp, Mus musculus
  siRNA target sequence for Trpm7 (NM_021450.1,551-569).
gctaagtatgtgagactat

SEQ ID NO: 516936 - DNA, 19 bp, Mus musculus
  siRNA target sequence for Trpm7 (NM_021450.1,564-582).
gactatcatatgataccaa

SEQ ID NO: 516937 - DNA, 19 bp, Mus musculus
  siRNA target sequence for Trpm7 (NM_021450.1,579-597).
ccaaacctgaaatcattct

SEQ ID NO: 516938 - DNA, 19 bp, Mus musculus
  siRNA target sequence for Trpm7 (NM_021450.1,599-617).
caacttctgcttaaagaat

SEQ ID NO: 516939 - DNA, 19 bp, Mus musculus
  siRNA target sequence for Trpm7 (NM_021450.1,625-643).
ggagttacccaaacttgtt

SEQ ID NO: 516940 - DNA, 19 bp, Mus musculus
  siRNA target sequence for Trpm7 (NM_021450.1,664-682).
gcagaagtttgaacttcat

SEQ ID NO: 516941 - DNA, 19 bp, Mus musculus
  siRNA target sequence for Trpm7 (NM_021450.1,700-718).
gcttggaaagggtcttatt

SEQ ID NO: 516942 - DNA, 19 bp, Mus musculus
  siRNA target sequence for Trpm7 (NM_021450.1,701-719).
cttggaaagggtcttatta

SEQ ID NO: 516943 - DNA, 19 bp, Mus musculus
  siRNA target sequence for Trpm7 (NM_021450.1,732-750).
caaccggagcttggatttt

SEQ ID NO: 516944 - DNA, 19 bp, Mus musculus
  siRNA target sequence for Trpm7 (NM_021450.1,736-754).
cggagcttggattttaact

SEQ ID NO: 516945 - DNA, 19 bp, Mus musculus
  siRNA target sequence for Trpm7 (NM_021450.1,813-831).
ccagatcatctcgaaaaat

SEQ ID NO: 516946 - DNA, 19 bp, Mus musculus
  siRNA target sequence for Trpm7 (NM_021450.1,814-832).
cagatcatctcgaaaaatt

SEQ ID NO: 516947 - DNA, 19 bp, Mus musculus
  siRNA target sequence for Trpm7 (NM_021450.1,851-869).
ccatggggagtgatagaaa

SEQ ID NO: 516948 - DNA, 19 bp, Mus musculus
  siRNA target sequence for Trpm7 (NM_021450.1,852-870).
catggggagtgatagaaaa

SEQ ID NO: 516949 - DNA, 19 bp, Mus musculus
  siRNA target sequence for Trpm7 (NM_021450.1,896-914).
gtggttgctccttatcaaa

SEQ ID NO: 516950 - DNA, 19 bp, Mus musculus
  siRNA target sequence for Trpm7 (NM_021450.1,905-923).
ccttatcaaaccctattga

SEQ ID NO: 516951 - DNA, 19 bp, Mus musculus
  siRNA target sequence for Trpm7 (NM_021450.1,906-924).
cttatcaaaccctattgaa

SEQ ID NO: 516952 - DNA, 19 bp, Mus musculus
  siRNA target sequence for Trpm7 (NM_021450.1,927-945).
ccttgagcaaattgaatgt

SEQ ID NO: 516953 - DNA, 19 bp, Mus musculus
  siRNA target sequence for Trpm7 (NM_021450.1,934-952).
caaattgaatgttctgaat

SEQ ID NO: 516954 - DNA, 19 bp, Mus musculus
  siRNA target sequence for Trpm7 (NM_021450.1,1158-1176).
ccccagttccagttgttgt

SEQ ID NO: 516955 - DNA, 19 bp, Mus musculus
  siRNA target sequence for Trpm7 (NM_021450.1,1200-1218).
cagatttactagcctatat

SEQ ID NO: 516956 - DNA, 19 bp, Mus musculus
  siRNA target sequence for Trpm7 (NM_021450.1,1211-1229).
gcctatatccacaaacaga

SEQ ID NO: 516957 - DNA, 19 bp, Mus musculus
  siRNA target sequence for Trpm7 (NM_021450.1,1262-1280).
gagcctgatattatatcaa

SEQ ID NO: 516958 - DNA, 19 bp, Mus musculus
  siRNA target sequence for Trpm7 (NM_021450.1,1266-1284).
ctgatattatatcaactat

SEQ ID NO: 516959 - DNA, 19 bp, Mus musculus
  siRNA target sequence for Trpm7 (NM_021450.1,1311-1329).
gtgaagcagttcatttatt

SEQ ID NO: 516960 - DNA, 19 bp, Mus musculus
  siRNA target sequence for Trpm7 (NM_021450.1,1364-1382).
cttatcactgtttttcaca

SEQ ID NO: 516961 - DNA, 19 bp, Mus musculus
  siRNA target sequence for Trpm7 (NM_021450.1,1432-1450).
gctgaaaggtactaatgca

SEQ ID NO: 516962 - DNA, 19 bp, Mus musculus
  siRNA target sequence for Trpm7 (NM_021450.1,1433-1451).
ctgaaaggtactaatgcat

SEQ ID NO: 516963 - DNA, 19 bp, Mus musculus
  siRNA target sequence for Trpm7 (NM_021450.1,1452-1470).
ctgcatttgaccagcttat

SEQ ID NO: 516964 - DNA, 19 bp, Mus musculus
  siRNA target sequence for Trpm7 (NM_021450.1,1480-1498).
ggcatgggacagagttgat

SEQ ID NO: 516965 - DNA, 19 bp, Mus musculus
  siRNA target sequence for Trpm7 (NM_021450.1,1481-1499).
gcatgggacagagttgata

SEQ ID NO: 516966 - DNA, 19 bp, Mus musculus
  siRNA target sequence for Trpm7 (NM_021450.1,1482-1500).
catgggacagagttgatat

SEQ ID NO: 516967 - DNA, 19 bp, Mus musculus
  siRNA target sequence for Trpm7 (NM_021450.1,1491-1509).
gagttgatattgccaaaaa

SEQ ID NO: 516968 - DNA, 19 bp, Mus musculus
  siRNA target sequence for Trpm7 (NM_021450.1,1503-1521).
ccaaaaatcatgtatttgt

SEQ ID NO: 516969 - DNA, 19 bp, Mus musculus
  siRNA target sequence for Trpm7 (NM_021450.1,1549-1567).
cttggaacaggctatgctt

SEQ ID NO: 516970 - DNA, 19 bp, Mus musculus
  siRNA target sequence for Trpm7 (NM_021450.1,1577-1595).
gtaatggacagagtttcat

SEQ ID NO: 516971 - DNA, 19 bp, Mus musculus
  siRNA target sequence for Trpm7 (NM_021450.1,1618-1636).
cggagtaagcatgcataaa

SEQ ID NO: 516972 - DNA, 19 bp, Mus musculus
  siRNA target sequence for Trpm7 (NM_021450.1,1620-1638).
gagtaagcatgcataaatt

SEQ ID NO: 516973 - DNA, 19 bp, Mus musculus
  siRNA target sequence for Trpm7 (NM_021450.1,1657-1675).
ggaagaactttataacact

SEQ ID NO: 516974 - DNA, 19 bp, Mus musculus
  siRNA target sequence for Trpm7 (NM_021450.1,1679-1697).
caaggtccaaccaatccaa

SEQ ID NO: 516975 - DNA, 19 bp, Mus musculus
  siRNA target sequence for Trpm7 (NM_021450.1,1683-1701).
gtccaaccaatccaatgtt

SEQ ID NO: 516976 - DNA, 19 bp, Mus musculus
  siRNA target sequence for Trpm7 (NM_021450.1,1685-1703).
ccaaccaatccaatgttgt

SEQ ID NO: 516977 - DNA, 19 bp, Mus musculus
  siRNA target sequence for Trpm7 (NM_021450.1,1686-1704).
caaccaatccaatgttgtt

SEQ ID NO: 516978 - DNA, 19 bp, Mus musculus
  siRNA target sequence for Trpm7 (NM_021450.1,1744-1762).
ggggtacaagatcacttta

SEQ ID NO: 516979 - DNA, 19 bp, Mus musculus
  siRNA target sequence for Trpm7 (NM_021450.1,1746-1764).
ggtacaagatcactttaat

SEQ ID NO: 516980 - DNA, 19 bp, Mus musculus
  siRNA target sequence for Trpm7 (NM_021450.1,1750-1768).
caagatcactttaattgat

SEQ ID NO: 516981 - DNA, 19 bp, Mus musculus
  siRNA target sequence for Trpm7 (NM_021450.1,1775-1793).
cttgtgattgagtatctca

SEQ ID NO: 516982 - DNA, 19 bp, Mus musculus
  siRNA target sequence for Trpm7 (NM_021450.1,1815-1833).
catacacacgaaaacgttt

SEQ ID NO: 516983 - DNA, 19 bp, Mus musculus
  siRNA target sequence for Trpm7 (NM_021450.1,1821-1839).
cacgaaaacgttttcgatt

SEQ ID NO: 516984 - DNA, 19 bp, Mus musculus
  siRNA target sequence for Trpm7 (NM_021450.1,1824-1842).
gaaaacgttttcgattgat

SEQ ID NO: 516985 - DNA, 19 bp, Mus musculus
  siRNA target sequence for Trpm7 (NM_021450.1,1900-1918).
ccctcagttgcgaaagagt

SEQ ID NO: 516986 - DNA, 19 bp, Mus musculus
  siRNA target sequence for Trpm7 (NM_021450.1,1906-1924).
gttgcgaaagagtcatgaa

SEQ ID NO: 516987 - DNA, 19 bp, Mus musculus
  siRNA target sequence for Trpm7 (NM_021450.1,1909-1927).
gcgaaagagtcatgaaact

SEQ ID NO: 516988 - DNA, 19 bp, Mus musculus
  siRNA target sequence for Trpm7 (NM_021450.1,1910-1928).
cgaaagagtcatgaaactt

SEQ ID NO: 516989 - DNA, 19 bp, Mus musculus
  siRNA target sequence for Trpm7 (NM_021450.1,1911-1929).
gaaagagtcatgaaacttt

SEQ ID NO: 516990 - DNA, 19 bp, Mus musculus
  siRNA target sequence for Trpm7 (NM_021450.1,1931-1949).
ggcaatagagctgataaaa

SEQ ID NO: 516991 - DNA, 19 bp, Mus musculus
  siRNA target sequence for Trpm7 (NM_021450.1,2077-2095).
gaccaagcgctttccttat

SEQ ID NO: 516992 - DNA, 19 bp, Mus musculus
  siRNA target sequence for Trpm7 (NM_021450.1,2080-2098).
caagcgctttccttatcct

SEQ ID NO: 516993 - DNA, 19 bp, Mus musculus
  siRNA target sequence for Trpm7 (NM_021450.1,2090-2108).
ccttatcctcttaatgaat

SEQ ID NO: 516994 - DNA, 19 bp, Mus musculus
  siRNA target sequence for Trpm7 (NM_021450.1,2161-2179).
gcagcatggtgaagaatca

SEQ ID NO: 516995 - DNA, 19 bp, Mus musculus
  siRNA target sequence for Trpm7 (NM_021450.1,2162-2180).
cagcatggtgaagaatcaa

SEQ ID NO: 516996 - DNA, 19 bp, Mus musculus
  siRNA target sequence for Trpm7 (NM_021450.1,2174-2192).
gaatcaatggctaaagcat

SEQ ID NO: 516997 - DNA, 19 bp, Mus musculus
  siRNA target sequence for Trpm7 (NM_021450.1,2178-2196).
caatggctaaagcattagt

SEQ ID NO: 516998 - DNA, 19 bp, Mus musculus
  siRNA target sequence for Trpm7 (NM_021450.1,2190-2208).
cattagttgcctgtaaaat

SEQ ID NO: 516999 - DNA, 19 bp, Mus musculus
  siRNA target sequence for Trpm7 (NM_021450.1,2198-2216).
gcctgtaaaatctatcgtt

SEQ ID NO: 517000 - DNA, 19 bp, Mus musculus
  siRNA target sequence for Trpm7 (NM_021450.1,2202-2220).
gtaaaatctatcgttcaat

SEQ ID NO: 517001 - DNA, 19 bp, Mus musculus
  siRNA target sequence for Trpm7 (NM_021450.1,2245-2263).
cctggtagatgatacttca

SEQ ID NO: 517002 - DNA, 19 bp, Mus musculus
  siRNA target sequence for Trpm7 (NM_021450.1,2267-2285).
gaactgaagcagtattcca

SEQ ID NO: 517003 - DNA, 19 bp, Mus musculus
  siRNA target sequence for Trpm7 (NM_021450.1,2275-2293).
gcagtattccaatgatttt

SEQ ID NO: 517004 - DNA, 19 bp, Mus musculus
  siRNA target sequence for Trpm7 (NM_021450.1,2294-2312).
ggccaactggcagttgaat

SEQ ID NO: 517005 - DNA, 19 bp, Mus musculus
  siRNA target sequence for Trpm7 (NM_021450.1,2295-2313).
gccaactggcagttgaatt

SEQ ID NO: 517006 - DNA, 19 bp, Mus musculus
  siRNA target sequence for Trpm7 (NM_021450.1,2296-2314).
ccaactggcagttgaatta

SEQ ID NO: 517007 - DNA, 19 bp, Mus musculus
  siRNA target sequence for Trpm7 (NM_021450.1,2339-2357).
gaaacgatggctatgaaat

SEQ ID NO: 517008 - DNA, 19 bp, Mus musculus
  siRNA target sequence for Trpm7 (NM_021450.1,2343-2361).
cgatggctatgaaattact

SEQ ID NO: 517009 - DNA, 19 bp, Mus musculus
  siRNA target sequence for Trpm7 (NM_021450.1,2374-2392).
caaaaactggagtaattca

SEQ ID NO: 517010 - DNA, 19 bp, Mus musculus
  siRNA target sequence for Trpm7 (NM_021450.1,2399-2417).
ctcaagttagcagtttctt

SEQ ID NO: 517011 - DNA, 19 bp, Mus musculus
  siRNA target sequence for Trpm7 (NM_021450.1,2418-2436).
caagacttagaccttttgt

SEQ ID NO: 517012 - DNA, 19 bp, Mus musculus
  siRNA target sequence for Trpm7 (NM_021450.1,2451-2469).
cacagatgttgttatctga

SEQ ID NO: 517013 - DNA, 19 bp, Mus musculus
  siRNA target sequence for Trpm7 (NM_021450.1,2505-2523).
cctggtataaggtcatatt

SEQ ID NO: 517014 - DNA, 19 bp, Mus musculus
  siRNA target sequence for Trpm7 (NM_021450.1,2506-2524).
ctggtataaggtcatatta

SEQ ID NO: 517015 - DNA, 19 bp, Mus musculus
  siRNA target sequence for Trpm7 (NM_021450.1,2515-2533).
ggtcatattaagcatttta

SEQ ID NO: 517016 - DNA, 19 bp, Mus musculus
  siRNA target sequence for Trpm7 (NM_021450.1,2518-2536).
catattaagcattttagtt

SEQ ID NO: 517017 - DNA, 19 bp, Mus musculus
  siRNA target sequence for Trpm7 (NM_021450.1,2534-2552).
gttccacctgccatattaa

SEQ ID NO: 517018 - DNA, 19 bp, Mus musculus
  siRNA target sequence for Trpm7 (NM_021450.1,2544-2562).
ccatattaatgctagagta

SEQ ID NO: 517019 - DNA, 19 bp, Mus musculus
  siRNA target sequence for Trpm7 (NM_021450.1,2581-2599).
gtcccatatcccacaatct

SEQ ID NO: 517020 - DNA, 19 bp, Mus musculus
  siRNA target sequence for Trpm7 (NM_021450.1,2583-2601).
cccatatcccacaatctca

SEQ ID NO: 517021 - DNA, 19 bp, Mus musculus
  siRNA target sequence for Trpm7 (NM_021450.1,2617-2635).
gacgatggaggatagtgaa

SEQ ID NO: 517022 - DNA, 19 bp, Mus musculus
  siRNA target sequence for Trpm7 (NM_021450.1,2624-2642).
gaggatagtgaaaacaatt

SEQ ID NO: 517023 - DNA, 19 bp, Mus musculus
  siRNA target sequence for Trpm7 (NM_021450.1,2660-2678).
gagatacccatggaagtat

SEQ ID NO: 517024 - DNA, 19 bp, Mus musculus
  siRNA target sequence for Trpm7 (NM_021450.1,2753-2771).
ccaatcacacgaaaatttt

SEQ ID NO: 517025 - DNA, 19 bp, Mus musculus
  siRNA target sequence for Trpm7 (NM_021450.1,2754-2772).
caatcacacgaaaatttta

SEQ ID NO: 517026 - DNA, 19 bp, Mus musculus
  siRNA target sequence for Trpm7 (NM_021450.1,2776-2794).
cttttatcatgcaccaatt

SEQ ID NO: 517027 - DNA, 19 bp, Mus musculus
  siRNA target sequence for Trpm7 (NM_021450.1,2786-2804).
gcaccaattgtaaagttct

SEQ ID NO: 517028 - DNA, 19 bp, Mus musculus
  siRNA target sequence for Trpm7 (NM_021450.1,2814-2832).
cattggcatatttaggatt

SEQ ID NO: 517029 - DNA, 19 bp, Mus musculus
  siRNA target sequence for Trpm7 (NM_021450.1,2869-2887).
ggaacagttaccttcagtt

SEQ ID NO: 517030 - DNA, 19 bp, Mus musculus
  siRNA target sequence for Trpm7 (NM_021450.1,2875-2893).
gttaccttcagttcaagaa

SEQ ID NO: 517031 - DNA, 19 bp, Mus musculus
  siRNA target sequence for Trpm7 (NM_021450.1,2880-2898).
cttcagttcaagaatggat

SEQ ID NO: 517032 - DNA, 19 bp, Mus musculus
  siRNA target sequence for Trpm7 (NM_021450.1,2885-2903).
gttcaagaatggattgtta

SEQ ID NO: 517033 - DNA, 19 bp, Mus musculus
  siRNA target sequence for Trpm7 (NM_021450.1,2905-2923).
cgcttatatttttacctat

SEQ ID NO: 517034 - DNA, 19 bp, Mus musculus
  siRNA target sequence for Trpm7 (NM_021450.1,2936-2954).
gtccgtgaggtcttcatgt

SEQ ID NO: 517035 - DNA, 19 bp, Mus musculus
  siRNA target sequence for Trpm7 (NM_021450.1,2977-2995).
gaagattaaagtatggttt

SEQ ID NO: 517036 - DNA, 19 bp, Mus musculus
  siRNA target sequence for Trpm7 (NM_021450.1,2991-3009).
ggtttagtgactacttcaa

SEQ ID NO: 517037 - DNA, 19 bp, Mus musculus
  siRNA target sequence for Trpm7 (NM_021450.1,2992-3010).
gtttagtgactacttcaat

SEQ ID NO: 517038 - DNA, 19 bp, Mus musculus
  siRNA target sequence for Trpm7 (NM_021450.1,3044-3062).
gttggatttggactaagat

SEQ ID NO: 517039 - DNA, 19 bp, Mus musculus
  siRNA target sequence for Trpm7 (NM_021450.1,3065-3083).
ggagcaaaatggaactata

SEQ ID NO: 517040 - DNA, 19 bp, Mus musculus
  siRNA target sequence for Trpm7 (NM_021450.1,3157-3175).
gcgtttgctagactttcta

SEQ ID NO: 517041 - DNA, 19 bp, Mus musculus
  siRNA target sequence for Trpm7 (NM_021450.1,3169-3187).
ctttctagccgtaaatcaa

SEQ ID NO: 517042 - DNA, 19 bp, Mus musculus
  siRNA target sequence for Trpm7 (NM_021450.1,3188-3206).
caggcaggaccttatgtaa

SEQ ID NO: 517043 - DNA, 19 bp, Mus musculus
  siRNA target sequence for Trpm7 (NM_021450.1,3192-3210).
caggaccttatgtaatgat

SEQ ID NO: 517044 - DNA, 19 bp, Mus musculus
  siRNA target sequence for Trpm7 (NM_021450.1,3194-3212).
ggaccttatgtaatgatga

SEQ ID NO: 517045 - DNA, 19 bp, Mus musculus
  siRNA target sequence for Trpm7 (NM_021450.1,3195-3213).
gaccttatgtaatgatgat

SEQ ID NO: 517046 - DNA, 19 bp, Mus musculus
  siRNA target sequence for Trpm7 (NM_021450.1,3216-3234).
gaaaaatggtggccaatat

SEQ ID NO: 517047 - DNA, 19 bp, Mus musculus
  siRNA target sequence for Trpm7 (NM_021450.1,3224-3242).
gtggccaatatgttctaca

SEQ ID NO: 517048 - DNA, 19 bp, Mus musculus
  siRNA target sequence for Trpm7 (NM_021450.1,3235-3253).
gttctacattgtagtgata

SEQ ID NO: 517049 - DNA, 19 bp, Mus musculus
  siRNA target sequence for Trpm7 (NM_021450.1,3248-3266).
gtgataatggctcttgtat

SEQ ID NO: 517050 - DNA, 19 bp, Mus musculus
  siRNA target sequence for Trpm7 (NM_021450.1,3278-3296).
ggtgttcccagaaaagcaa

SEQ ID NO: 517051 - DNA, 19 bp, Mus musculus
  siRNA target sequence for Trpm7 (NM_021450.1,3285-3303).
ccagaaaagcaatacttta

SEQ ID NO: 517052 - DNA, 19 bp, Mus musculus
  siRNA target sequence for Trpm7 (NM_021450.1,3318-3336).
catcttggtctcttgctaa

SEQ ID NO: 517053 - DNA, 19 bp, Mus musculus
  siRNA target sequence for Trpm7 (NM_021450.1,3327-3345).
ctcttgctaaagatatagt

SEQ ID NO: 517054 - DNA, 19 bp, Mus musculus
  siRNA target sequence for Trpm7 (NM_021450.1,3333-3351).
ctaaagatatagtttttca

SEQ ID NO: 517055 - DNA, 19 bp, Mus musculus
  siRNA target sequence for Trpm7 (NM_021450.1,3415-3433).
cactctcccgacaatctgt

SEQ ID NO: 517056 - DNA, 19 bp, Mus musculus
  siRNA target sequence for Trpm7 (NM_021450.1,3509-3527).
cttatcgcatttttcaata

SEQ ID NO: 517057 - DNA, 19 bp, Mus musculus
  siRNA target sequence for Trpm7 (NM_021450.1,3544-3562).
gaaggcaatttccaatatt

SEQ ID NO: 517058 - DNA, 19 bp, Mus musculus
  siRNA target sequence for Trpm7 (NM_021450.1,3556-3574).
caatattgtatggaagtat

SEQ ID NO: 517059 - DNA, 19 bp, Mus musculus
  siRNA target sequence for Trpm7 (NM_021450.1,3568-3586).
gaagtatcagcggtatcat

SEQ ID NO: 517060 - DNA, 19 bp, Mus musculus
  siRNA target sequence for Trpm7 (NM_021450.1,3571-3589).
gtatcagcggtatcatttt

SEQ ID NO: 517061 - DNA, 19 bp, Mus musculus
  siRNA target sequence for Trpm7 (NM_021450.1,3595-3613).
ggcttatcatgaaaaacca

SEQ ID NO: 517062 - DNA, 19 bp, Mus musculus
  siRNA target sequence for Trpm7 (NM_021450.1,3699-3717).
ccgatgggccaaaactttt

SEQ ID NO: 517063 - DNA, 19 bp, Mus musculus
  siRNA target sequence for Trpm7 (NM_021450.1,3701-3719).
gatgggccaaaacttttct

SEQ ID NO: 517064 - DNA, 19 bp, Mus musculus
  siRNA target sequence for Trpm7 (NM_021450.1,3706-3724).
gccaaaacttttcttaaca

SEQ ID NO: 517065 - DNA, 19 bp, Mus musculus
  siRNA target sequence for Trpm7 (NM_021450.1,3761-3779).
cagtgtgttgagatgtact

SEQ ID NO: 517066 - DNA, 19 bp, Mus musculus
  siRNA target sequence for Trpm7 (NM_021450.1,3763-3781).
gtgtgttgagatgtacttt

SEQ ID NO: 517067 - DNA, 19 bp, Mus musculus
  siRNA target sequence for Trpm7 (NM_021450.1,3765-3783).
gtgttgagatgtactttga

SEQ ID NO: 517068 - DNA, 19 bp, Mus musculus
  siRNA target sequence for Trpm7 (NM_021450.1,3820-3838).
gagaatccgggtcactttt

SEQ ID NO: 517069 - DNA, 19 bp, Mus musculus
  siRNA target sequence for Trpm7 (NM_021450.1,3822-3840).
gaatccgggtcacttttga

SEQ ID NO: 517070 - DNA, 19 bp, Mus musculus
  siRNA target sequence for Trpm7 (NM_021450.1,3826-3844).
ccgggtcacttttgaaaga

SEQ ID NO: 517071 - DNA, 19 bp, Mus musculus
  siRNA target sequence for Trpm7 (NM_021450.1,3878-3896).
ggagatcgtgtcaactaca

SEQ ID NO: 517072 - DNA, 19 bp, Mus musculus
  siRNA target sequence for Trpm7 (NM_021450.1,3881-3899).
gatcgtgtcaactacataa

SEQ ID NO: 517073 - DNA, 19 bp, Mus musculus
  siRNA target sequence for Trpm7 (NM_021450.1,3911-3929).
cagtctttagattctcaaa

SEQ ID NO: 517074 - DNA, 19 bp, Mus musculus
  siRNA target sequence for Trpm7 (NM_021450.1,3913-3931).
gtctttagattctcaaatt

SEQ ID NO: 517075 - DNA, 19 bp, Mus musculus
  siRNA target sequence for Trpm7 (NM_021450.1,3949-3967).
ctcagccctaacagtagat

SEQ ID NO: 517076 - DNA, 19 bp, Mus musculus
  siRNA target sequence for Trpm7 (NM_021450.1,3953-3971).
gccctaacagtagatacat

SEQ ID NO: 517077 - DNA, 19 bp, Mus musculus
  siRNA target sequence for Trpm7 (NM_021450.1,3954-3972).
ccctaacagtagatacatt

SEQ ID NO: 517078 - DNA, 19 bp, Mus musculus
  siRNA target sequence for Trpm7 (NM_021450.1,4008-4026).
gtaaagtgcacaatgagat

SEQ ID NO: 517079 - DNA, 19 bp, Mus musculus
  siRNA target sequence for Trpm7 (NM_021450.1,4022-4040).
gagatcacacgagaattga

SEQ ID NO: 517080 - DNA, 19 bp, Mus musculus
  siRNA target sequence for Trpm7 (NM_021450.1,4024-4042).
gatcacacgagaattgagt

SEQ ID NO: 517081 - DNA, 19 bp, Mus musculus
  siRNA target sequence for Trpm7 (NM_021450.1,4027-4045).
cacacgagaattgagtatt

SEQ ID NO: 517082 - DNA, 19 bp, Mus musculus
  siRNA target sequence for Trpm7 (NM_021450.1,4057-4075).
ggctcagaatcttattgat

SEQ ID NO: 517083 - DNA, 19 bp, Mus musculus
  siRNA target sequence for Trpm7 (NM_021450.1,4059-4077).
ctcagaatcttattgatga

SEQ ID NO: 517084 - DNA, 19 bp, Mus musculus
  siRNA target sequence for Trpm7 (NM_021450.1,4145-4163).
ggtgatcgggaaagtaata

SEQ ID NO: 517085 - DNA, 19 bp, Mus musculus
  siRNA target sequence for Trpm7 (NM_021450.1,4146-4164).
gtgatcgggaaagtaataa

SEQ ID NO: 517086 - DNA, 19 bp, Mus musculus
  siRNA target sequence for Trpm7 (NM_021450.1,4151-4169).
cgggaaagtaataatcctt

SEQ ID NO: 517087 - DNA, 19 bp, Mus musculus
  siRNA target sequence for Trpm7 (NM_021450.1,4204-4222).
cccccaatataatctgttt

SEQ ID NO: 517088 - DNA, 19 bp, Mus musculus
  siRNA target sequence for Trpm7 (NM_021450.1,4237-4255).
cgtgataccccagagaaaa

SEQ ID NO: 517089 - DNA, 19 bp, Mus musculus
  siRNA target sequence for Trpm7 (NM_021450.1,4308-4326).
ctgtttctcccccagaatt

SEQ ID NO: 517090 - DNA, 19 bp, Mus musculus
  siRNA target sequence for Trpm7 (NM_021450.1,4337-4355).
cgacatggggtagaaatgt

SEQ ID NO: 517091 - DNA, 19 bp, Mus musculus
  siRNA target sequence for Trpm7 (NM_021450.1,4385-4403).
ggcagttcacctaatagtt

SEQ ID NO: 517092 - DNA, 19 bp, Mus musculus
  siRNA target sequence for Trpm7 (NM_021450.1,4414-4432).
gtcctccccaccaaccaaa

SEQ ID NO: 517093 - DNA, 19 bp, Mus musculus
  siRNA target sequence for Trpm7 (NM_021450.1,4521-4539).
cagaaggggataacataga

SEQ ID NO: 517094 - DNA, 19 bp, Mus musculus
  siRNA target sequence for Trpm7 (NM_021450.1,4565-4583).
gatagtatggacttacaga

SEQ ID NO: 517095 - DNA, 19 bp, Mus musculus
  siRNA target sequence for Trpm7 (NM_021450.1,4623-4641).
ctaatgatactcctgaaaa

SEQ ID NO: 517096 - DNA, 19 bp, Mus musculus
  siRNA target sequence for Trpm7 (NM_021450.1,4664-4682).
gctggatatagtgaatgtt

SEQ ID NO: 517097 - DNA, 19 bp, Mus musculus
  siRNA target sequence for Trpm7 (NM_021450.1,4715-4733).
gcagaaagctgtagtagaa

SEQ ID NO: 517098 - DNA, 19 bp, Mus musculus
  siRNA target sequence for Trpm7 (NM_021450.1,4786-4804).
ggattggttacgagataga

SEQ ID NO: 517099 - DNA, 19 bp, Mus musculus
  siRNA target sequence for Trpm7 (NM_021450.1,4796-4814).
cgagatagaccatcaaaca

SEQ ID NO: 517100 - DNA, 19 bp, Mus musculus
  siRNA target sequence for Trpm7 (NM_021450.1,4803-4821).
gaccatcaaacagagaaat

SEQ ID NO: 517101 - DNA, 19 bp, Mus musculus
  siRNA target sequence for Trpm7 (NM_021450.1,4847-4865).
ggtcttgcttctccattta

SEQ ID NO: 517102 - DNA, 19 bp, Mus musculus
  siRNA target sequence for Trpm7 (NM_021450.1,4860-4878).
catttaagcccgttttgga

SEQ ID NO: 517103 - DNA, 19 bp, Mus musculus
  siRNA target sequence for Trpm7 (NM_021450.1,4867-4885).
gcccgttttggatacaaat

SEQ ID NO: 517104 - DNA, 19 bp, Mus musculus
  siRNA target sequence for Trpm7 (NM_021450.1,4868-4886).
cccgttttggatacaaatt

SEQ ID NO: 517105 - DNA, 19 bp, Mus musculus
  siRNA target sequence for Trpm7 (NM_021450.1,4869-4887).
ccgttttggatacaaatta

SEQ ID NO: 517106 - DNA, 19 bp, Mus musculus
  siRNA target sequence for Trpm7 (NM_021450.1,4993-5011).
ggagagttctcccagtata

SEQ ID NO: 517107 - DNA, 19 bp, Mus musculus
  siRNA target sequence for Trpm7 (NM_021450.1,5001-5019).
ctcccagtatactgaataa

SEQ ID NO: 517108 - DNA, 19 bp, Mus musculus
  siRNA target sequence for Trpm7 (NM_021450.1,5003-5021).
cccagtatactgaataaca

SEQ ID NO: 517109 - DNA, 19 bp, Mus musculus
  siRNA target sequence for Trpm7 (NM_021450.1,5046-5064).
gcctctgtgccaaaattga

SEQ ID NO: 517110 - DNA, 19 bp, Mus musculus
  siRNA target sequence for Trpm7 (NM_021450.1,5048-5066).
ctctgtgccaaaattgagt

SEQ ID NO: 517111 - DNA, 19 bp, Mus musculus
  siRNA target sequence for Trpm7 (NM_021450.1,5052-5070).
gtgccaaaattgagttttt

SEQ ID NO: 517112 - DNA, 19 bp, Mus musculus
  siRNA target sequence for Trpm7 (NM_021450.1,5080-5098).
ggaaatgggaggtggttta

SEQ ID NO: 517113 - DNA, 19 bp, Mus musculus
  siRNA target sequence for Trpm7 (NM_021450.1,5124-5142).
cctggtcagagcacgatat

SEQ ID NO: 517114 - DNA, 19 bp, Mus musculus
  siRNA target sequence for Trpm7 (NM_021450.1,5127-5145).
ggtcagagcacgatatcct

SEQ ID NO: 517115 - DNA, 19 bp, Mus musculus
  siRNA target sequence for Trpm7 (NM_021450.1,5146-5164).
gaagtcagggcatctctat

SEQ ID NO: 517116 - DNA, 19 bp, Mus musculus
  siRNA target sequence for Trpm7 (NM_021450.1,5151-5169).
cagggcatctctatatcat

SEQ ID NO: 517117 - DNA, 19 bp, Mus musculus
  siRNA target sequence for Trpm7 (NM_021450.1,5153-5171).
gggcatctctatatcatta

SEQ ID NO: 517118 - DNA, 19 bp, Mus musculus
  siRNA target sequence for Trpm7 (NM_021450.1,5154-5172).
ggcatctctatatcattaa

SEQ ID NO: 517119 - DNA, 19 bp, Mus musculus
  siRNA target sequence for Trpm7 (NM_021450.1,5159-5177).
ctctatatcattaagtcat

SEQ ID NO: 517120 - DNA, 19 bp, Mus musculus
  siRNA target sequence for Trpm7 (NM_021450.1,5197-5215).
cacatggtcaagcatttat

SEQ ID NO: 517121 - DNA, 19 bp, Mus musculus
  siRNA target sequence for Trpm7 (NM_021450.1,5199-5217).
catggtcaagcatttataa

SEQ ID NO: 517122 - DNA, 19 bp, Mus musculus
  siRNA target sequence for Trpm7 (NM_021450.1,5299-5317).
gatgaaacccaaatccata

SEQ ID NO: 517123 - DNA, 19 bp, Mus musculus
  siRNA target sequence for Trpm7 (NM_021450.1,5308-5326).
caaatccataccatattct

SEQ ID NO: 517124 - DNA, 19 bp, Mus musculus
  siRNA target sequence for Trpm7 (NM_021450.1,5327-5345).
ccaaggttccttgaagttt

SEQ ID NO: 517125 - DNA, 19 bp, Mus musculus
  siRNA target sequence for Trpm7 (NM_021450.1,5339-5357).
gaagttttcctgttgtact

SEQ ID NO: 517126 - DNA, 19 bp, Mus musculus
  siRNA target sequence for Trpm7 (NM_021450.1,5395-5413).
catgactggtgaatttaga

SEQ ID NO: 517127 - DNA, 19 bp, Mus musculus
  siRNA target sequence for Trpm7 (NM_021450.1,5443-5461).
cattcctacaaatactcta

SEQ ID NO: 517128 - DNA, 19 bp, Mus musculus
  siRNA target sequence for Trpm7 (NM_021450.1,5515-5533).
gttactggtacttgactta

SEQ ID NO: 517129 - DNA, 19 bp, Mus musculus
  siRNA target sequence for Trpm7 (NM_021450.1,5551-5569).
cttgactgacccatctgta

SEQ ID NO: 517130 - DNA, 19 bp, Mus musculus
  siRNA target sequence for Trpm7 (NM_021450.1,5554-5572).
gactgacccatctgtaata

SEQ ID NO: 517131 - DNA, 19 bp, Mus musculus
  siRNA target sequence for Trpm7 (NM_021450.1,5670-5688).
cttgctgtcgaaagcttaa

SEQ ID NO: 517132 - DNA, 19 bp, Mus musculus
  siRNA target sequence for Trpm7 (NM_021450.1,5673-5691).
gctgtcgaaagcttaaact

SEQ ID NO: 517133 - DNA, 19 bp, Mus musculus
  siRNA target sequence for Trpm7 (NM_021450.1,5674-5692).
ctgtcgaaagcttaaactt

SEQ ID NO: 517134 - DNA, 19 bp, Mus musculus
  siRNA target sequence for Trpm7 (NM_021450.1,5696-5714).
gatttgaagaggaatgact

SEQ ID NO: 517135 - DNA, 19 bp, Mus musculus
  siRNA target sequence for Trpm7 (NM_021450.1,5711-5729).
gactacacgcctgataaaa

SEQ ID NO: 517136 - DNA, 19 bp, Mus musculus
  siRNA target sequence for Trpm7 (NM_021450.1,5713-5731).
ctacacgcctgataaaatt

SEQ ID NO: 517137 - DNA, 19 bp, Mus musculus
  siRNA target sequence for Trpm7 (NM_021450.1,5716-5734).
cacgcctgataaaattata

SEQ ID NO: 517138 - DNA, 19 bp, Mus musculus
  siRNA target sequence for Trpm7 (NM_021450.1,5744-5762).
gatgagtcatcagatttga

SEQ ID NO: 517139 - DNA, 19 bp, Mus musculus
  siRNA target sequence for Trpm7 (NM_021450.1,5749-5767).
gtcatcagatttgaatctt

SEQ ID NO: 517140 - DNA, 19 bp, Mus musculus
  siRNA target sequence for Ttbk1 (NM_080788.1,196-214).
gagagcagccagatatcct

SEQ ID NO: 517141 - DNA, 19 bp, Mus musculus
  siRNA target sequence for Ttbk1 (NM_080788.1,275-293).
ctttggagaaatttacgat

SEQ ID NO: 517142 - DNA, 19 bp, Mus musculus
  siRNA target sequence for Ttbk1 (NM_080788.1,513-531).
ggcacattcactattagca

SEQ ID NO: 517143 - DNA, 19 bp, Mus musculus
  siRNA target sequence for Ttbk1 (NM_080788.1,537-555).
cttcgtcttgggaaacaga

SEQ ID NO: 517144 - DNA, 19 bp, Mus musculus
  siRNA target sequence for Ttbk1 (NM_080788.1,560-578).
ggagtctattgaaagcata

SEQ ID NO: 517145 - DNA, 19 bp, Mus musculus
  siRNA target sequence for Ttbk1 (NM_080788.1,675-693).
ggcttggctcgacaattta

SEQ ID NO: 517146 - DNA, 19 bp, Mus musculus
  siRNA target sequence for Ttbk1 (NM_080788.1,677-695).
cttggctcgacaatttact

SEQ ID NO: 517147 - DNA, 19 bp, Mus musculus
  siRNA target sequence for Ttbk1 (NM_080788.1,680-698).
ggctcgacaatttactaat

SEQ ID NO: 517148 - DNA, 19 bp, Mus musculus
  siRNA target sequence for Ttbk1 (NM_080788.1,684-702).
cgacaatttactaattcct

SEQ ID NO: 517149 - DNA, 19 bp, Mus musculus
  siRNA target sequence for Ttbk1 (NM_080788.1,801-819).
gatgacctttggtctttat

SEQ ID NO: 517150 - DNA, 19 bp, Mus musculus
  siRNA target sequence for Ttbk1 (NM_080788.1,811-829).
ggtctttattctacatgtt

SEQ ID NO: 517151 - DNA, 19 bp, Mus musculus
  siRNA target sequence for Ttbk1 (NM_080788.1,879-897).
gagcaagtaggctccatta

SEQ ID NO: 517152 - DNA, 19 bp, Mus musculus
  siRNA target sequence for Ttbk1 (NM_080788.1,889-907).
gctccattaaggagagata

SEQ ID NO: 517153 - DNA, 19 bp, Mus musculus
  siRNA target sequence for Ttbk1 (NM_080788.1,930-948).
cacctccctccagaattca

SEQ ID NO: 517154 - DNA, 19 bp, Mus musculus
  siRNA target sequence for Ttbk1 (NM_080788.1,950-968).
cacctttcttgaccatatt

SEQ ID NO: 517155 - DNA, 19 bp, Mus musculus
  siRNA target sequence for Ttbk1 (NM_080788.1,993-1011).
ccggactaccagcttctaa

SEQ ID NO: 517156 - DNA, 19 bp, Mus musculus
  siRNA target sequence for Ttbk1 (NM_080788.1,1008-1026).
ctaacatccgtgtttgaca

SEQ ID NO: 517157 - DNA, 19 bp, Mus musculus
  siRNA target sequence for Ttbk1 (NM_080788.1,1015-1033).
ccgtgtttgacaatagcat

SEQ ID NO: 517158 - DNA, 19 bp, Mus musculus
  siRNA target sequence for Ttbk1 (NM_080788.1,1034-1052).
caagacctttggagtaatt

SEQ ID NO: 517159 - DNA, 19 bp, Mus musculus
  siRNA target sequence for Ttbk1 (NM_080788.1,1053-1071).
gagagtgacccgtttgact

SEQ ID NO: 517160 - DNA, 19 bp, Mus musculus
  siRNA target sequence for Ttk (NM_009445.1,208-226).
cccagagaactggttgaat

SEQ ID NO: 517161 - DNA, 19 bp, Mus musculus
  siRNA target sequence for Ttk (NM_009445.1,212-230).
gagaactggttgaatttct

SEQ ID NO: 517162 - DNA, 19 bp, Mus musculus
  siRNA target sequence for Ttk (NM_009445.1,223-241).
gaatttcttgctgaaacta

SEQ ID NO: 517163 - DNA, 19 bp, Mus musculus
  siRNA target sequence for Ttk (NM_009445.1,257-275).
cctctaaatgacgatcttt

SEQ ID NO: 517164 - DNA, 19 bp, Mus musculus
  siRNA target sequence for Ttk (NM_009445.1,258-276).
ctctaaatgacgatctttt

SEQ ID NO: 517165 - DNA, 19 bp, Mus musculus
  siRNA target sequence for Ttk (NM_009445.1,260-278).
ctaaatgacgatcttttaa

SEQ ID NO: 517166 - DNA, 19 bp, Mus musculus
  siRNA target sequence for Ttk (NM_009445.1,286-304).
gattggtcggtatagtcaa

SEQ ID NO: 517167 - DNA, 19 bp, Mus musculus
  siRNA target sequence for Ttk (NM_009445.1,295-313).
gtatagtcaagcgattgaa

SEQ ID NO: 517168 - DNA, 19 bp, Mus musculus
  siRNA target sequence for Ttk (NM_009445.1,300-318).
gtcaagcgattgaagtact

SEQ ID NO: 517169 - DNA, 19 bp, Mus musculus
  siRNA target sequence for Ttk (NM_009445.1,314-332).
gtacttcctccagataaat

SEQ ID NO: 517170 - DNA, 19 bp, Mus musculus
  siRNA target sequence for Ttk (NM_009445.1,365-383).
gtgagacttgctgaactaa

SEQ ID NO: 517171 - DNA, 19 bp, Mus musculus
  siRNA target sequence for Ttk (NM_009445.1,375-393).
ctgaactaaaagctattca

SEQ ID NO: 517172 - DNA, 19 bp, Mus musculus
  siRNA target sequence for Ttk (NM_009445.1,568-586).
gacggccatgcgtaactta

SEQ ID NO: 517173 - DNA, 19 bp, Mus musculus
  siRNA target sequence for Ttk (NM_009445.1,570-588).
cggccatgcgtaacttaca

SEQ ID NO: 517174 - DNA, 19 bp, Mus musculus
  siRNA target sequence for Ttk (NM_009445.1,634-652).
gtcagcatcgacagtacta

SEQ ID NO: 517175 - DNA, 19 bp, Mus musculus
  siRNA target sequence for Ttk (NM_009445.1,733-751).
ggcagccagggttttatat

SEQ ID NO: 517176 - DNA, 19 bp, Mus musculus
  siRNA target sequence for Ttk (NM_009445.1,776-794).
gccgaagtgaggcatcaaa

SEQ ID NO: 517177 - DNA, 19 bp, Mus musculus
  siRNA target sequence for Ttk (NM_009445.1,777-795).
ccgaagtgaggcatcaaaa

SEQ ID NO: 517178 - DNA, 19 bp, Mus musculus
  siRNA target sequence for Ttk (NM_009445.1,805-823).
gcagactcacgcagctaaa

SEQ ID NO: 517179 - DNA, 19 bp, Mus musculus
  siRNA target sequence for Ttk (NM_009445.1,824-842).
cggtcatgcccctttggaa

SEQ ID NO: 517180 - DNA, 19 bp, Mus musculus
  siRNA target sequence for Ttk (NM_009445.1,840-858).
gaagagtcccagtcaatct

SEQ ID NO: 517181 - DNA, 19 bp, Mus musculus
  siRNA target sequence for Ttk (NM_009445.1,845-863).
gtcccagtcaatcttctaa

SEQ ID NO: 517182 - DNA, 19 bp, Mus musculus
  siRNA target sequence for Ttk (NM_009445.1,1047-1065).
cacgtggcagtgattccta

SEQ ID NO: 517183 - DNA, 19 bp, Mus musculus
  siRNA target sequence for Ttk (NM_009445.1,1076-1094).
ggtttaaagcccattcaaa

SEQ ID NO: 517184 - DNA, 19 bp, Mus musculus
  siRNA target sequence for Ttk (NM_009445.1,1084-1102).
gcccattcaaactatctat

SEQ ID NO: 517185 - DNA, 19 bp, Mus musculus
  siRNA target sequence for Ttk (NM_009445.1,1085-1103).
cccattcaaactatctatt

SEQ ID NO: 517186 - DNA, 19 bp, Mus musculus
  siRNA target sequence for Ttk (NM_009445.1,1137-1155).
ctgaacttatgtctgattt

SEQ ID NO: 517187 - DNA, 19 bp, Mus musculus
  siRNA target sequence for Ttk (NM_009445.1,1168-1186).
gagtaaaacagattcaagt

SEQ ID NO: 517188 - DNA, 19 bp, Mus musculus
  siRNA target sequence for Ttk (NM_009445.1,1178-1196).
gattcaagtctaacaaaat

SEQ ID NO: 517189 - DNA, 19 bp, Mus musculus
  siRNA target sequence for Ttk (NM_009445.1,1182-1200).
caagtctaacaaaattgga

SEQ ID NO: 517190 - DNA, 19 bp, Mus musculus
  siRNA target sequence for Ttk (NM_009445.1,1318-1336).
caccccgaaggctgacaaa

SEQ ID NO: 517191 - DNA, 19 bp, Mus musculus
  siRNA target sequence for Ttk (NM_009445.1,1320-1338).
ccccgaaggctgacaaaga

SEQ ID NO: 517192 - DNA, 19 bp, Mus musculus
  siRNA target sequence for Ttk (NM_009445.1,1322-1340).
ccgaaggctgacaaagagt

SEQ ID NO: 517193 - DNA, 19 bp, Mus musculus
  siRNA target sequence for Ttk (NM_009445.1,1333-1351).
caaagagtcaccaccaata

SEQ ID NO: 517194 - DNA, 19 bp, Mus musculus
  siRNA target sequence for Ttk (NM_009445.1,1344-1362).
caccaatatcagttcctaa

SEQ ID NO: 517195 - DNA, 19 bp, Mus musculus
  siRNA target sequence for Ttk (NM_009445.1,1412-1430).
gatgattacatgaaatgtt

SEQ ID NO: 517196 - DNA, 19 bp, Mus musculus
  siRNA target sequence for Ttk (NM_009445.1,1552-1570).
gcagatttcaggttcttca

SEQ ID NO: 517197 - DNA, 19 bp, Mus musculus
  siRNA target sequence for Ttk (NM_009445.1,1590-1608).
cagttaacggaagaattta

SEQ ID NO: 517198 - DNA, 19 bp, Mus musculus
  siRNA target sequence for Ttk (NM_009445.1,1644-1662).
gtaaggtgtttcaggtatt

SEQ ID NO: 517199 - DNA, 19 bp, Mus musculus
  siRNA target sequence for Ttk (NM_009445.1,1648-1666).
ggtgtttcaggtattgaat

SEQ ID NO: 517200 - DNA, 19 bp, Mus musculus
  siRNA target sequence for Ttk (NM_009445.1,1711-1729).
cgccgatagccaaactatt

SEQ ID NO: 517201 - DNA, 19 bp, Mus musculus
  siRNA target sequence for Ttk (NM_009445.1,1713-1731).
ccgatagccaaactattga

SEQ ID NO: 517202 - DNA, 19 bp, Mus musculus
  siRNA target sequence for Ttk (NM_009445.1,1715-1733).
gatagccaaactattgaga

SEQ ID NO: 517203 - DNA, 19 bp, Mus musculus
  siRNA target sequence for Ttk (NM_009445.1,1740-1758).
gcaacgagatagcgttttt

SEQ ID NO: 517204 - DNA, 19 bp, Mus musculus
  siRNA target sequence for Ttk (NM_009445.1,1786-1804).
gatcatccgcctctatgat

SEQ ID NO: 517205 - DNA, 19 bp, Mus musculus
  siRNA target sequence for Ttk (NM_009445.1,1789-1807).
catccgcctctatgattat

SEQ ID NO: 517206 - DNA, 19 bp, Mus musculus
  siRNA target sequence for Ttk (NM_009445.1,1792-1810).
ccgcctctatgattatgaa

SEQ ID NO: 517207 - DNA, 19 bp, Mus musculus
  siRNA target sequence for Ttk (NM_009445.1,1793-1811).
cgcctctatgattatgaaa

SEQ ID NO: 517208 - DNA, 19 bp, Mus musculus
  siRNA target sequence for Ttk (NM_009445.1,1794-1812).
gcctctatgattatgaaat

SEQ ID NO: 517209 - DNA, 19 bp, Mus musculus
  siRNA target sequence for Ttk (NM_009445.1,1815-1833).
ccgagcagtacatctacat

SEQ ID NO: 517210 - DNA, 19 bp, Mus musculus
  siRNA target sequence for Ttk (NM_009445.1,1825-1843).
catctacatggtaatggaa

SEQ ID NO: 517211 - DNA, 19 bp, Mus musculus
  siRNA target sequence for Ttk (NM_009445.1,1847-1865).
ggaaacattgacctaaata

SEQ ID NO: 517212 - DNA, 19 bp, Mus musculus
  siRNA target sequence for Ttk (NM_009445.1,1981-1999).
gcctgctaactttgtgata

SEQ ID NO: 517213 - DNA, 19 bp, Mus musculus
  siRNA target sequence for Ttk (NM_009445.1,1996-2014).
gatagtggatggaatgcta

SEQ ID NO: 517214 - DNA, 19 bp, Mus musculus
  siRNA target sequence for Ttk (NM_009445.1,2002-2020).
ggatggaatgctaaagcta

SEQ ID NO: 517215 - DNA, 19 bp, Mus musculus
  siRNA target sequence for Ttk (NM_009445.1,2031-2049).
ggattgcaaaccaaatgca

SEQ ID NO: 517216 - DNA, 19 bp, Mus musculus
  siRNA target sequence for Ttk (NM_009445.1,2050-2068).
gccagacacaacaagcatt

SEQ ID NO: 517217 - DNA, 19 bp, Mus musculus
  siRNA target sequence for Ttk (NM_009445.1,2114-2132).
gcaatcagagacatgtctt

SEQ ID NO: 517218 - DNA, 19 bp, Mus musculus
  siRNA target sequence for Ttk (NM_009445.1,2229-2247).
cgccatttcagcacatcat

SEQ ID NO: 517219 - DNA, 19 bp, Mus musculus
  siRNA target sequence for Ttk (NM_009445.1,2231-2249).
ccatttcagcacatcatca

SEQ ID NO: 517220 - DNA, 19 bp, Mus musculus
  siRNA target sequence for Ttk (NM_009445.1,2282-2300).
cctgctcatgagattgaat

SEQ ID NO: 517221 - DNA, 19 bp, Mus musculus
  siRNA target sequence for Ttk (NM_009445.1,2304-2322).
ccgagatttcggaaaaaga

SEQ ID NO: 517222 - DNA, 19 bp, Mus musculus
  siRNA target sequence for Ttk (NM_009445.1,2305-2323).
cgagatttcggaaaaagat

SEQ ID NO: 517223 - DNA, 19 bp, Mus musculus
  siRNA target sequence for Ttk (NM_009445.1,2308-2326).
gatttcggaaaaagatctt

SEQ ID NO: 517224 - DNA, 19 bp, Mus musculus
  siRNA target sequence for Ttk (NM_009445.1,2321-2339).
gatcttcgagacgtgttaa

SEQ ID NO: 517225 - DNA, 19 bp, Mus musculus
  siRNA target sequence for Ttk (NM_009445.1,2324-2342).
cttcgagacgtgttaaagt

SEQ ID NO: 517226 - DNA, 19 bp, Mus musculus
  siRNA target sequence for Ttk (NM_009445.1,2359-2377).
ccctaaagagaggatatct

SEQ ID NO: 517227 - DNA, 19 bp, Mus musculus
  siRNA target sequence for Ttk (NM_009445.1,2361-2379).
ctaaagagaggatatctat

SEQ ID NO: 517228 - DNA, 19 bp, Mus musculus
  siRNA target sequence for Ttk (NM_009445.1,2392-2410).
cacacatccgtatgttcaa

SEQ ID NO: 517229 - DNA, 19 bp, Mus musculus
  siRNA target sequence for Ttk (NM_009445.1,2517-2535).
ctgcaaaaactttgtatga

SEQ ID NO: 517230 - DNA, 19 bp, Mus musculus
  siRNA target sequence for Ttk (NM_009445.1,2568-2586).
cgtcatccaagacttttga

SEQ ID NO: 517231 - DNA, 19 bp, Mus musculus
  siRNA target sequence for Ttk (NM_009445.1,2571-2589).
catccaagacttttgacaa

SEQ ID NO: 517232 - DNA, 19 bp, Mus musculus
  siRNA target sequence for Txk (NM_013698.1,275-293).
ggaagaactctcagaaaaa

SEQ ID NO: 517233 - DNA, 19 bp, Mus musculus
  siRNA target sequence for Txk (NM_013698.1,312-330).
ccgtggttcgccaaactga

SEQ ID NO: 517234 - DNA, 19 bp, Mus musculus
  siRNA target sequence for Txk (NM_013698.1,313-331).
cgtggttcgccaaactgat

SEQ ID NO: 517235 - DNA, 19 bp, Mus musculus
  siRNA target sequence for Txk (NM_013698.1,323-341).
caaactgatgggcaaaact

SEQ ID NO: 517236 - DNA, 19 bp, Mus musculus
  siRNA target sequence for Txk (NM_013698.1,327-345).
ctgatgggcaaaactcaat

SEQ ID NO: 517237 - DNA, 19 bp, Mus musculus
  siRNA target sequence for Txk (NM_013698.1,422-440).
ccaggtcaaggctctttat

SEQ ID NO: 517238 - DNA, 19 bp, Mus musculus
  siRNA target sequence for Txk (NM_013698.1,449-467).
gcctcgggagcctggtaat

SEQ ID NO: 517239 - DNA, 19 bp, Mus musculus
  siRNA target sequence for Txk (NM_013698.1,450-468).
cctcgggagcctggtaatt

SEQ ID NO: 517240 - DNA, 19 bp, Mus musculus
  siRNA target sequence for Txk (NM_013698.1,451-469).
ctcgggagcctggtaattt

SEQ ID NO: 517241 - DNA, 19 bp, Mus musculus
  siRNA target sequence for Txk (NM_013698.1,587-605).
cagactcgccaacttagaa

SEQ ID NO: 517242 - DNA, 19 bp, Mus musculus
  siRNA target sequence for Txk (NM_013698.1,591-609).
ctcgccaacttagaaatct

SEQ ID NO: 517243 - DNA, 19 bp, Mus musculus
  siRNA target sequence for Txk (NM_013698.1,593-611).
cgccaacttagaaatctat

SEQ ID NO: 517244 - DNA, 19 bp, Mus musculus
  siRNA target sequence for Txk (NM_013698.1,596-614).
caacttagaaatctatgaa

SEQ ID NO: 517245 - DNA, 19 bp, Mus musculus
  siRNA target sequence for Txk (NM_013698.1,612-630).
gaatggtaccacaagaaca

SEQ ID NO: 517246 - DNA, 19 bp, Mus musculus
  siRNA target sequence for Txk (NM_013698.1,642-660).
cagaccgaacgcctattga

SEQ ID NO: 517247 - DNA, 19 bp, Mus musculus
  siRNA target sequence for Txk (NM_013698.1,681-699).
gcctttatcgtgagagatt

SEQ ID NO: 517248 - DNA, 19 bp, Mus musculus
  siRNA target sequence for Txk (NM_013698.1,710-728).
ggggtcttacacaatctct

SEQ ID NO: 517249 - DNA, 19 bp, Mus musculus
  siRNA target sequence for Txk (NM_013698.1,739-757).
gagctcgaaggcatacaca

SEQ ID NO: 517250 - DNA, 19 bp, Mus musculus
  siRNA target sequence for Txk (NM_013698.1,748-766).
ggcatacacagtcttcaat

SEQ ID NO: 517251 - DNA, 19 bp, Mus musculus
  siRNA target sequence for Txk (NM_013698.1,763-781).
caataaaacattatcagat

SEQ ID NO: 517252 - DNA, 19 bp, Mus musculus
  siRNA target sequence for Txk (NM_013698.1,771-789).
cattatcagataaaaaaga

SEQ ID NO: 517253 - DNA, 19 bp, Mus musculus
  siRNA target sequence for Txk (NM_013698.1,805-823).
ggtacatcaccgaaagaca

SEQ ID NO: 517254 - DNA, 19 bp, Mus musculus
  siRNA target sequence for Txk (NM_013698.1,841-859).
ccgagttgatccagtatca

SEQ ID NO: 517255 - DNA, 19 bp, Mus musculus
  siRNA target sequence for Txk (NM_013698.1,866-884).
caatgcagctggtctcata

SEQ ID NO: 517256 - DNA, 19 bp, Mus musculus
  siRNA target sequence for Txk (NM_013698.1,930-948).
gccacatctggttttagct

SEQ ID NO: 517257 - DNA, 19 bp, Mus musculus
  siRNA target sequence for Txk (NM_013698.1,931-949).
ccacatctggttttagcta

SEQ ID NO: 517258 - DNA, 19 bp, Mus musculus
  siRNA target sequence for Txk (NM_013698.1,939-957).
ggttttagctatgaaaagt

SEQ ID NO: 517259 - DNA, 19 bp, Mus musculus
  siRNA target sequence for Txndc3 (NM_181591.2,177-195).
ctacagtcagtcgtcaata

SEQ ID NO: 517260 - DNA, 19 bp, Mus musculus
  siRNA target sequence for Txndc3 (NM_181591.2,189-207).
gtcaatagtcagaacttgt

SEQ ID NO: 517261 - DNA, 19 bp, Mus musculus
  siRNA target sequence for Txndc3 (NM_181591.2,233-251).
cttaacagtgattgatgtt

SEQ ID NO: 517262 - DNA, 19 bp, Mus musculus
  siRNA target sequence for Txndc3 (NM_181591.2,274-292).
gcaaagccgtgcaaagttt

SEQ ID NO: 517263 - DNA, 19 bp, Mus musculus
  siRNA target sequence for Txndc3 (NM_181591.2,275-293).
caaagccgtgcaaagttta

SEQ ID NO: 517264 - DNA, 19 bp, Mus musculus
  siRNA target sequence for Txndc3 (NM_181591.2,279-297).
gccgtgcaaagtttattca

SEQ ID NO: 517265 - DNA, 19 bp, Mus musculus
  siRNA target sequence for Txndc3 (NM_181591.2,282-300).
gtgcaaagtttattcagaa

SEQ ID NO: 517266 - DNA, 19 bp, Mus musculus
  siRNA target sequence for Txndc3 (NM_181591.2,366-384).
gtgactctccagccattta

SEQ ID NO: 517267 - DNA, 19 bp, Mus musculus
  siRNA target sequence for Txndc3 (NM_181591.2,368-386).
gactctccagccatttaga

SEQ ID NO: 517268 - DNA, 19 bp, Mus musculus
  siRNA target sequence for Txndc3 (NM_181591.2,394-412).
gtgagcccgtgtttctctt

SEQ ID NO: 517269 - DNA, 19 bp, Mus musculus
  siRNA target sequence for Txndc3 (NM_181591.2,401-419).
cgtgtttctctttagtctt

SEQ ID NO: 517270 - DNA, 19 bp, Mus musculus
  siRNA target sequence for Txndc3 (NM_181591.2,448-466).
gtgcaaatgctccacttat

SEQ ID NO: 517271 - DNA, 19 bp, Mus musculus
  siRNA target sequence for Txndc3 (NM_181591.2,451-469).
caaatgctccacttatcaa

SEQ ID NO: 517272 - DNA, 19 bp, Mus musculus
  siRNA target sequence for Txndc3 (NM_181591.2,456-474).
gctccacttatcaatagaa

SEQ ID NO: 517273 - DNA, 19 bp, Mus musculus
  siRNA target sequence for Txndc3 (NM_181591.2,479-497).
cattaccttgatagatgaa

SEQ ID NO: 517274 - DNA, 19 bp, Mus musculus
  siRNA target sequence for Txndc3 (NM_181591.2,524-542).
ggatcgtcctcagtatgtt

SEQ ID NO: 517275 - DNA, 19 bp, Mus musculus
  siRNA target sequence for Txndc3 (NM_181591.2,558-576).
gatgcaatcgatgaagaat

SEQ ID NO: 517276 - DNA, 19 bp, Mus musculus
  siRNA target sequence for Txndc3 (NM_181591.2,598-616).
gtgctgcggaagtttacaa

SEQ ID NO: 517277 - DNA, 19 bp, Mus musculus
  siRNA target sequence for Txndc3 (NM_181591.2,601-619).
ctgcggaagtttacaatat

SEQ ID NO: 517278 - DNA, 19 bp, Mus musculus
  siRNA target sequence for Txndc3 (NM_181591.2,609-627).
gtttacaatatggcaatta

SEQ ID NO: 517279 - DNA, 19 bp, Mus musculus
  siRNA target sequence for Txndc3 (NM_181591.2,681-699).
gccaaagaaggatttgtta

SEQ ID NO: 517280 - DNA, 19 bp, Mus musculus
  siRNA target sequence for Txndc3 (NM_181591.2,682-700).
ccaaagaaggatttgttat

SEQ ID NO: 517281 - DNA, 19 bp, Mus musculus
  siRNA target sequence for Txndc3 (NM_181591.2,735-753).
gtagtgagggaattctaca

SEQ ID NO: 517282 - DNA, 19 bp, Mus musculus
  siRNA target sequence for Txndc3 (NM_181591.2,770-788).
gcctgactttgaagagttt

SEQ ID NO: 517283 - DNA, 19 bp, Mus musculus
  siRNA target sequence for Txndc3 (NM_181591.2,780-798).
gaagagtttgtcgtttcta

SEQ ID NO: 517284 - DNA, 19 bp, Mus musculus
  siRNA target sequence for Txndc3 (NM_181591.2,783-801).
gagtttgtcgtttctatga

SEQ ID NO: 517285 - DNA, 19 bp, Mus musculus
  siRNA target sequence for Txndc3 (NM_181591.2,812-830).
cagctgtgtgctcattgta

SEQ ID NO: 517286 - DNA, 19 bp, Mus musculus
  siRNA target sequence for Txndc3 (NM_181591.2,821-839).
gctcattgtatctcaagaa

SEQ ID NO: 517287 - DNA, 19 bp, Mus musculus
  siRNA target sequence for Txndc3 (NM_181591.2,954-972).
gacagtttgcaagagtata

SEQ ID NO: 517288 - DNA, 19 bp, Mus musculus
  siRNA target sequence for Txndc3 (NM_181591.2,958-976).
gtttgcaagagtatatgga

SEQ ID NO: 517289 - DNA, 19 bp, Mus musculus
  siRNA target sequence for Txndc3 (NM_181591.2,1070-1088).
gaaaagcacgaatgtacaa

SEQ ID NO: 517290 - DNA, 19 bp, Mus musculus
  siRNA target sequence for Txndc3 (NM_181591.2,1140-1158).
gtgttgaacgttattcaca

SEQ ID NO: 517291 - DNA, 19 bp, Mus musculus
  siRNA target sequence for Txndc3 (NM_181591.2,1142-1160).
gttgaacgttattcacaat

SEQ ID NO: 517292 - DNA, 19 bp, Mus musculus
  siRNA target sequence for Txndc3 (NM_181591.2,1161-1179).
gaagggttcaccatactga

SEQ ID NO: 517293 - DNA, 19 bp, Mus musculus
  siRNA target sequence for Txndc3 (NM_181591.2,1181-1199).
gcagaggcaaatcgtatta

SEQ ID NO: 517294 - DNA, 19 bp, Mus musculus
  siRNA target sequence for Txndc3 (NM_181591.2,1182-1200).
cagaggcaaatcgtattat

SEQ ID NO: 517295 - DNA, 19 bp, Mus musculus
  siRNA target sequence for Txndc3 (NM_181591.2,1184-1202).
gaggcaaatcgtattatca

SEQ ID NO: 517296 - DNA, 19 bp, Mus musculus
  siRNA target sequence for Txndc3 (NM_181591.2,1186-1204).
ggcaaatcgtattatcaga

SEQ ID NO: 517297 - DNA, 19 bp, Mus musculus
  siRNA target sequence for Txndc3 (NM_181591.2,1225-1243).
gcaagatccatgaaaacga

SEQ ID NO: 517298 - DNA, 19 bp, Mus musculus
  siRNA target sequence for Txndc3 (NM_181591.2,1269-1287).
cacatgaccagtaatcact

SEQ ID NO: 517299 - DNA, 19 bp, Mus musculus
  siRNA target sequence for Txndc3 (NM_181591.2,1276-1294).
ccagtaatcactcttatgt

SEQ ID NO: 517300 - DNA, 19 bp, Mus musculus
  siRNA target sequence for Txndc3 (NM_181591.2,1361-1379).
ggaagcttatgcatctcat

SEQ ID NO: 517301 - DNA, 19 bp, Mus musculus
  siRNA target sequence for Tyk2 (NM_018793.1,467-485).
ctggctgcccccaaaccat

SEQ ID NO: 517302 - DNA, 19 bp, Mus musculus
  siRNA target sequence for Tyk2 (NM_018793.1,501-519).
caagacatgaacctctatt

SEQ ID NO: 517303 - DNA, 19 bp, Mus musculus
  siRNA target sequence for Tyk2 (NM_018793.1,506-524).
catgaacctctattttcga

SEQ ID NO: 517304 - DNA, 19 bp, Mus musculus
  siRNA target sequence for Tyk2 (NM_018793.1,562-580).
cccaggagccagctgtata

SEQ ID NO: 517305 - DNA, 19 bp, Mus musculus
  siRNA target sequence for Tyk2 (NM_018793.1,644-662).
ggactctgcctcgtttgaa

SEQ ID NO: 517306 - DNA, 19 bp, Mus musculus
  siRNA target sequence for Tyk2 (NM_018793.1,645-663).
gactctgcctcgtttgaat

SEQ ID NO: 517307 - DNA, 19 bp, Mus musculus
  siRNA target sequence for Tyk2 (NM_018793.1,649-667).
ctgcctcgtttgaatacct

SEQ ID NO: 517308 - DNA, 19 bp, Mus musculus
  siRNA target sequence for Tyk2 (NM_018793.1,652-670).
cctcgtttgaatacctttt

SEQ ID NO: 517309 - DNA, 19 bp, Mus musculus
  siRNA target sequence for Tyk2 (NM_018793.1,653-671).
ctcgtttgaataccttttt

SEQ ID NO: 517310 - DNA, 19 bp, Mus musculus
  siRNA target sequence for Tyk2 (NM_018793.1,741-759).
caccactttaagaatgaga

SEQ ID NO: 517311 - DNA, 19 bp, Mus musculus
  siRNA target sequence for Tyk2 (NM_018793.1,1386-1404).
cacctccaagacaacaagt

SEQ ID NO: 517312 - DNA, 19 bp, Mus musculus
  siRNA target sequence for Tyk2 (NM_018793.1,1485-1503).
gactccagccactatctgt

SEQ ID NO: 517313 - DNA, 19 bp, Mus musculus
  siRNA target sequence for Tyk2 (NM_018793.1,1562-1580).
cctgatggatccgtttgta

SEQ ID NO: 517314 - DNA, 19 bp, Mus musculus
  siRNA target sequence for Tyk2 (NM_018793.1,1638-1656).
ctgcaccgcctgatcctta

SEQ ID NO: 517315 - DNA, 19 bp, Mus musculus
  siRNA target sequence for Tyk2 (NM_018793.1,1699-1717).
gcctgcgcctgcgaaagtt

SEQ ID NO: 517316 - DNA, 19 bp, Mus musculus
  siRNA target sequence for Tyk2 (NM_018793.1,1951-1969).
gggttcaccaggatgaaat

SEQ ID NO: 517317 - DNA, 19 bp, Mus musculus
  siRNA target sequence for Tyk2 (NM_018793.1,1999-2017).
caaggaccaatgtgtatga

SEQ ID NO: 517318 - DNA, 19 bp, Mus musculus
  siRNA target sequence for Tyk2 (NM_018793.1,2010-2028).
gtgtatgagggccttctaa

SEQ ID NO: 517319 - DNA, 19 bp, Mus musculus
  siRNA target sequence for Tyk2 (NM_018793.1,2049-2067).
ggcaaagtggacaatggat

SEQ ID NO: 517320 - DNA, 19 bp, Mus musculus
  siRNA target sequence for Tyk2 (NM_018793.1,2127-2145).
gaccccagtcaccatgata

SEQ ID NO: 517321 - DNA, 19 bp, Mus musculus
  siRNA target sequence for Tyk2 (NM_018793.1,2225-2243).
cgtgcgtggctcagagaat

SEQ ID NO: 517322 - DNA, 19 bp, Mus musculus
  siRNA target sequence for Tyk2 (NM_018793.1,2246-2264).
cattgtgacagaattcgta

SEQ ID NO: 517323 - DNA, 19 bp, Mus musculus
  siRNA target sequence for Tyk2 (NM_018793.1,2252-2270).
gacagaattcgtagaacat

SEQ ID NO: 517324 - DNA, 19 bp, Mus musculus
  siRNA target sequence for Tyk2 (NM_018793.1,2658-2676).
gagaaagaacggttctaca

SEQ ID NO: 517325 - DNA, 19 bp, Mus musculus
  siRNA target sequence for Tyk2 (NM_018793.1,2764-2782).
catccttccgcaccatttt

SEQ ID NO: 517326 - DNA, 19 bp, Mus musculus
  siRNA target sequence for Tyk2 (NM_018793.1,2850-2868).
gcatcagaccccactgttt

SEQ ID NO: 517327 - DNA, 19 bp, Mus musculus
  siRNA target sequence for Tyk2 (NM_018793.1,2870-2888).
ccacaagcgctatttgaaa

SEQ ID NO: 517328 - DNA, 19 bp, Mus musculus
  siRNA target sequence for Tyk2 (NM_018793.1,2936-2954).
ctgctacgacccaaccaat

SEQ ID NO: 517329 - DNA, 19 bp, Mus musculus
  siRNA target sequence for Tyk2 (NM_018793.1,3053-3071).
gctgtaccacgaacatatt

SEQ ID NO: 517330 - DNA, 19 bp, Mus musculus
  siRNA target sequence for Tyk2 (NM_018793.1,3062-3080).
cgaacatattgtcaagtat

SEQ ID NO: 517331 - DNA, 19 bp, Mus musculus
  siRNA target sequence for Tyk2 (NM_018793.1,3236-3254).
gcacgctcagcactacatt

SEQ ID NO: 517332 - DNA, 19 bp, Mus musculus
  siRNA target sequence for Tyk2 (NM_018793.1,3340-3358).
ctgaaggccacgagtacta

SEQ ID NO: 517333 - DNA, 19 bp, Mus musculus
  siRNA target sequence for Tyk2 (NM_018793.1,3416-3434).
ggagtgcaaattttactat

SEQ ID NO: 517334 - DNA, 19 bp, Mus musculus
  siRNA target sequence for Tyk2 (NM_018793.1,3448-3466).
ggtccttcggggtaactct

SEQ ID NO: 517335 - DNA, 19 bp, Mus musculus
  siRNA target sequence for Tyk2 (NM_018793.1,3452-3470).
cttcggggtaactctgtat

SEQ ID NO: 517336 - DNA, 19 bp, Mus musculus
  siRNA target sequence for Tyk2 (NM_018793.1,3456-3474).
ggggtaactctgtatgagt

SEQ ID NO: 517337 - DNA, 19 bp, Mus musculus
  siRNA target sequence for Tyk2 (NM_018793.1,3611-3629).
gtgtccctgtgagatctat

SEQ ID NO: 517338 - DNA, 19 bp, Mus musculus
  siRNA target sequence for Tyk2 (NM_018793.1,3613-3631).
gtccctgtgagatctatca

SEQ ID NO: 517339 - DNA, 19 bp, Mus musculus
  siRNA target sequence for Tyki (NM_020557.3,582-600).
ctgccagatctgcttaact

SEQ ID NO: 517340 - DNA, 19 bp, Mus musculus
  siRNA target sequence for Tyki (NM_020557.3,584-602).
gccagatctgcttaactct

SEQ ID NO: 517341 - DNA, 19 bp, Mus musculus
  siRNA target sequence for Tyki (NM_020557.3,647-665).
gtgcacatcctttattcca

SEQ ID NO: 517342 - DNA, 19 bp, Mus musculus
  siRNA target sequence for Tyki (NM_020557.3,864-882).
gaacctactatcattcgaa

SEQ ID NO: 517343 - DNA, 19 bp, Mus musculus
  siRNA target sequence for Tyki (NM_020557.3,875-893).
cattcgaagagccttttat

SEQ ID NO: 517344 - DNA, 19 bp, Mus musculus
  siRNA target sequence for Tyki (NM_020557.3,921-939).
gaaatagctaaagaatcaa

SEQ ID NO: 517345 - DNA, 19 bp, Mus musculus
  siRNA target sequence for Tyki (NM_020557.3,981-999).
gccacctacgccatagcta

SEQ ID NO: 517346 - DNA, 19 bp, Mus musculus
  siRNA target sequence for Tyki (NM_020557.3,1138-1156).
ggggtcaggagaaaactaa

SEQ ID NO: 517347 - DNA, 19 bp, Mus musculus
  siRNA target sequence for Tyki (NM_020557.3,1139-1157).
gggtcaggagaaaactaaa

SEQ ID NO: 517348 - DNA, 19 bp, Mus musculus
  siRNA target sequence for Tyki (NM_020557.3,1191-1209).
cgtcagaaggtggaaatga

SEQ ID NO: 517349 - DNA, 19 bp, Mus musculus
  siRNA target sequence for Tyro3 (NM_019392.1,556-574).
ggaggaaaccaagatttct

SEQ ID NO: 517350 - DNA, 19 bp, Mus musculus
  siRNA target sequence for Tyro3 (NM_019392.1,684-702).
ctccagaacccgtaaccat

SEQ ID NO: 517351 - DNA, 19 bp, Mus musculus
  siRNA target sequence for Tyro3 (NM_019392.1,686-704).
ccagaacccgtaaccattt

SEQ ID NO: 517352 - DNA, 19 bp, Mus musculus
  siRNA target sequence for Tyro3 (NM_019392.1,687-705).
cagaacccgtaaccattta

SEQ ID NO: 517353 - DNA, 19 bp, Mus musculus
  siRNA target sequence for Tyro3 (NM_019392.1,689-707).
gaacccgtaaccatttact

SEQ ID NO: 517354 - DNA, 19 bp, Mus musculus
  siRNA target sequence for Tyro3 (NM_019392.1,708-726).
ggtggagaggactcactaa

SEQ ID NO: 517355 - DNA, 19 bp, Mus musculus
  siRNA target sequence for Tyro3 (NM_019392.1,778-796).
ccagcgcacagagttttct

SEQ ID NO: 517356 - DNA, 19 bp, Mus musculus
  siRNA target sequence for Tyro3 (NM_019392.1,781-799).
gcgcacagagttttcttgt

SEQ ID NO: 517357 - DNA, 19 bp, Mus musculus
  siRNA target sequence for Tyro3 (NM_019392.1,1015-1033).
ggttcctgtgccacctttt

SEQ ID NO: 517358 - DNA, 19 bp, Mus musculus
  siRNA target sequence for Tyro3 (NM_019392.1,1125-1143).
gggtgccctttcagacaaa

SEQ ID NO: 517359 - DNA, 19 bp, Mus musculus
  siRNA target sequence for Tyro3 (NM_019392.1,1161-1179).
gagctcctcagaatttcca

SEQ ID NO: 517360 - DNA, 19 bp, Mus musculus
  siRNA target sequence for Tyro3 (NM_019392.1,1316-1334).
gggaccagggccaatctga

SEQ ID NO: 517361 - DNA, 19 bp, Mus musculus
  siRNA target sequence for Tyro3 (NM_019392.1,1372-1390).
gtgtgcctccaatgcaatt

SEQ ID NO: 517362 - DNA, 19 bp, Mus musculus
  siRNA target sequence for Tyro3 (NM_019392.1,1602-1620).
gggagccagctgtacactt

SEQ ID NO: 517363 - DNA, 19 bp, Mus musculus
  siRNA target sequence for Tyro3 (NM_019392.1,1622-1640).
cgggcagcccgatctttca

SEQ ID NO: 517364 - DNA, 19 bp, Mus musculus
  siRNA target sequence for Tyro3 (NM_019392.1,1623-1641).
gggcagcccgatctttcaa

SEQ ID NO: 517365 - DNA, 19 bp, Mus musculus
  siRNA target sequence for Tyro3 (NM_019392.1,1624-1642).
ggcagcccgatctttcaat

SEQ ID NO: 517366 - DNA, 19 bp, Mus musculus
  siRNA target sequence for Tyro3 (NM_019392.1,1682-1700).
ctgggcatcagcgatgaat

SEQ ID NO: 517367 - DNA, 19 bp, Mus musculus
  siRNA target sequence for Tyro3 (NM_019392.1,1685-1703).
ggcatcagcgatgaattga

SEQ ID NO: 517368 - DNA, 19 bp, Mus musculus
  siRNA target sequence for Tyro3 (NM_019392.1,1686-1704).
gcatcagcgatgaattgaa

SEQ ID NO: 517369 - DNA, 19 bp, Mus musculus
  siRNA target sequence for Tyro3 (NM_019392.1,1863-1881).
cctcaagcgacatagaaga

SEQ ID NO: 517370 - DNA, 19 bp, Mus musculus
  siRNA target sequence for Tyro3 (NM_019392.1,1866-1884).
caagcgacatagaagagtt

SEQ ID NO: 517371 - DNA, 19 bp, Mus musculus
  siRNA target sequence for Tyro3 (NM_019392.1,1954-1972).
ccggagcagggctaaaggt

SEQ ID NO: 517372 - DNA, 19 bp, Mus musculus
  siRNA target sequence for Tyro3 (NM_019392.1,2126-2144).
ctgagctcccggaacttca

SEQ ID NO: 517373 - DNA, 19 bp, Mus musculus
  siRNA target sequence for Tyro3 (NM_019392.1,2213-2231).
ggactctctcggaaaatct

SEQ ID NO: 517374 - DNA, 19 bp, Mus musculus
  siRNA target sequence for Tyro3 (NM_019392.1,2214-2232).
gactctctcggaaaatcta

SEQ ID NO: 517375 - DNA, 19 bp, Mus musculus
  siRNA target sequence for Tyro3 (NM_019392.1,2230-2248).
ctatagcggggactattat

SEQ ID NO: 517376 - DNA, 19 bp, Mus musculus
  siRNA target sequence for Tyro3 (NM_019392.1,2302-2320).
ggctgacaacttgtatact

SEQ ID NO: 517377 - DNA, 19 bp, Mus musculus
  siRNA target sequence for Tyro3 (NM_019392.1,2304-2322).
ctgacaacttgtatactgt

SEQ ID NO: 517378 - DNA, 19 bp, Mus musculus
  siRNA target sequence for Tyro3 (NM_019392.1,2383-2401).
gccatatgctggcattgaa

SEQ ID NO: 517379 - DNA, 19 bp, Mus musculus
  siRNA target sequence for Tyro3 (NM_019392.1,2385-2403).
catatgctggcattgaaaa

SEQ ID NO: 517380 - DNA, 19 bp, Mus musculus
  siRNA target sequence for Tyro3 (NM_019392.1,2527-2545).
cacgtgtctgcgaatggaa

SEQ ID NO: 517381 - DNA, 19 bp, Mus musculus
  siRNA target sequence for Tyro3 (NM_019392.1,2586-2604).
gccaggaccccttgtacat

SEQ ID NO: 517382 - DNA, 19 bp, Mus musculus
  siRNA target sequence for Tyro3 (NM_019392.1,2591-2609).
gaccccttgtacatcaaca

SEQ ID NO: 517383 - DNA, 19 bp, Mus musculus
  siRNA target sequence for Tyro3 (NM_019392.1,2595-2613).
ccttgtacatcaacattga

SEQ ID NO: 517384 - DNA, 19 bp, Mus musculus
  siRNA target sequence for Tyro3 (NM_019392.1,2724-2742).
gtgactctcggtacatctt

SEQ ID NO: 517385 - DNA, 19 bp, Mus musculus
  siRNA target sequence for Ulk1 (NM_009469.3,481-499).
gaggtggccgtcaaatgca

SEQ ID NO: 517386 - DNA, 19 bp, Mus musculus
  siRNA target sequence for Ulk1 (NM_009469.3,487-505).
gccgtcaaatgcattaaca

SEQ ID NO: 517387 - DNA, 19 bp, Mus musculus
  siRNA target sequence for Ulk1 (NM_009469.3,488-506).
ccgtcaaatgcattaacaa

SEQ ID NO: 517388 - DNA, 19 bp, Mus musculus
  siRNA target sequence for Ulk1 (NM_009469.3,490-508).
gtcaaatgcattaacaaga

SEQ ID NO: 517389 - DNA, 19 bp, Mus musculus
  siRNA target sequence for Ulk1 (NM_009469.3,827-845).
gcaacatccgagtcaagat

SEQ ID NO: 517390 - DNA, 19 bp, Mus musculus
  siRNA target sequence for Ulk1 (NM_009469.3,828-846).
caacatccgagtcaagatt

SEQ ID NO: 517391 - DNA, 19 bp, Mus musculus
  siRNA target sequence for Ulk1 (NM_009469.3,1004-1022).
cagggaaggccccttttca

SEQ ID NO: 517392 - DNA, 19 bp, Mus musculus
  siRNA target sequence for Ulk1 (NM_009469.3,1036-1054).
caggatttgcgcctgtttt

SEQ ID NO: 517393 - DNA, 19 bp, Mus musculus
  siRNA target sequence for Ulk1 (NM_009469.3,1038-1056).
ggatttgcgcctgttttat

SEQ ID NO: 517394 - DNA, 19 bp, Mus musculus
  siRNA target sequence for Ulk1 (NM_009469.3,1048-1066).
ctgttttatgagaagaaca

SEQ ID NO: 517395 - DNA, 19 bp, Mus musculus
  siRNA target sequence for Ulk1 (NM_009469.3,1149-1167).
ggaccgcatggactttgat

SEQ ID NO: 517396 - DNA, 19 bp, Mus musculus
  siRNA target sequence for Ulk1 (NM_009469.3,2294-2312).
ctaggcagggggtagtaat

SEQ ID NO: 517397 - DNA, 19 bp, Mus musculus
  siRNA target sequence for Ulk1 (NM_009469.3,2597-2615).
gcccagcacctgtggtatt

SEQ ID NO: 517398 - DNA, 19 bp, Mus musculus
  siRNA target sequence for Ulk1 (NM_009469.3,2657-2675).
gtacccgtaccagaatgtt

SEQ ID NO: 517399 - DNA, 19 bp, Mus musculus
  siRNA target sequence for Ulk1 (NM_009469.3,3160-3178).
caggtggtacgcagactaa

SEQ ID NO: 517400 - DNA, 19 bp, Mus musculus
  siRNA target sequence for Ulk1 (NM_009469.3,3162-3180).
ggtggtacgcagactaaat

SEQ ID NO: 517401 - DNA, 19 bp, Mus musculus
  siRNA target sequence for Ulk1 (NM_009469.3,3225-3243).
gcgacttcagcgcttcttt

SEQ ID NO: 517402 - DNA, 19 bp, Mus musculus
  siRNA target sequence for Ulk1 (NM_009469.3,3305-3323).
gccatgctgtgcaaatggt

SEQ ID NO: 517403 - DNA, 19 bp, Mus musculus
  siRNA target sequence for Ulk1 (NM_009469.3,3306-3324).
ccatgctgtgcaaatggta

SEQ ID NO: 517404 - DNA, 19 bp, Mus musculus
  siRNA target sequence for Ulk1 (NM_009469.3,3363-3381).
gggctgtgtaccgagatat

SEQ ID NO: 517405 - DNA, 19 bp, Mus musculus
  siRNA target sequence for Ulk1 (NM_009469.3,3368-3386).
gtgtaccgagatatcacaa

SEQ ID NO: 517406 - DNA, 19 bp, Mus musculus
  siRNA target sequence for Ulk1 (NM_009469.3,3423-3441).
cacggaccaggcagacatt

SEQ ID NO: 517407 - DNA, 19 bp, Mus musculus
  siRNA target sequence for Ulk2 (NM_013881.3,123-141).
caccgccagaaaactgatt

SEQ ID NO: 517408 - DNA, 19 bp, Mus musculus
  siRNA target sequence for Ulk2 (NM_013881.3,138-156).
gattgggaggtggctatta

SEQ ID NO: 517409 - DNA, 19 bp, Mus musculus
  siRNA target sequence for Ulk2 (NM_013881.3,245-263).
cgtagcgctctatgatgtt

SEQ ID NO: 517410 - DNA, 19 bp, Mus musculus
  siRNA target sequence for Ulk2 (NM_013881.3,317-335).
cctggcagattatttgcaa

SEQ ID NO: 517411 - DNA, 19 bp, Mus musculus
  siRNA target sequence for Ulk2 (NM_013881.3,367-385).
gagtgtttctccatcagat

SEQ ID NO: 517412 - DNA, 19 bp, Mus musculus
  siRNA target sequence for Ulk2 (NM_013881.3,471-489).
cgaaggaagtcgaatgtca

SEQ ID NO: 517413 - DNA, 19 bp, Mus musculus
  siRNA target sequence for Ulk2 (NM_013881.3,482-500).
gaatgtcagtggtattcgt

SEQ ID NO: 517414 - DNA, 19 bp, Mus musculus
  siRNA target sequence for Ulk2 (NM_013881.3,486-504).
gtcagtggtattcgtatta

SEQ ID NO: 517415 - DNA, 19 bp, Mus musculus
  siRNA target sequence for Ulk2 (NM_013881.3,488-506).
cagtggtattcgtattaaa

SEQ ID NO: 517416 - DNA, 19 bp, Mus musculus
  siRNA target sequence for Ulk2 (NM_013881.3,524-542).
cgcacggtacctacatagt

SEQ ID NO: 517417 - DNA, 19 bp, Mus musculus
  siRNA target sequence for Ulk2 (NM_013881.3,525-543).
gcacggtacctacatagta

SEQ ID NO: 517418 - DNA, 19 bp, Mus musculus
  siRNA target sequence for Ulk2 (NM_013881.3,526-544).
cacggtacctacatagtaa

SEQ ID NO: 517419 - DNA, 19 bp, Mus musculus
  siRNA target sequence for Ulk2 (NM_013881.3,528-546).
cggtacctacatagtaaca

SEQ ID NO: 517420 - DNA, 19 bp, Mus musculus
  siRNA target sequence for Ulk2 (NM_013881.3,594-612).
gttattatgtctcaacatt

SEQ ID NO: 517421 - DNA, 19 bp, Mus musculus
  siRNA target sequence for Ulk2 (NM_013881.3,615-633).
gatgctaaggcagatttat

SEQ ID NO: 517422 - DNA, 19 bp, Mus musculus
  siRNA target sequence for Ulk2 (NM_013881.3,642-660).
ggaacagtgatctatcaat

SEQ ID NO: 517423 - DNA, 19 bp, Mus musculus
  siRNA target sequence for Ulk2 (NM_013881.3,675-693).
ccaccttttcaggctaata

SEQ ID NO: 517424 - DNA, 19 bp, Mus musculus
  siRNA target sequence for Ulk2 (NM_013881.3,694-712).
gtcctcaggacctaaggat

SEQ ID NO: 517425 - DNA, 19 bp, Mus musculus
  siRNA target sequence for Ulk2 (NM_013881.3,730-748).
ggagcttaatgcctagtat

SEQ ID NO: 517426 - DNA, 19 bp, Mus musculus
  siRNA target sequence for Ulk2 (NM_013881.3,731-749).
gagcttaatgcctagtatt

SEQ ID NO: 517427 - DNA, 19 bp, Mus musculus
  siRNA target sequence for Ulk2 (NM_013881.3,763-781).
caccttacttggctaatct

SEQ ID NO: 517428 - DNA, 19 bp, Mus musculus
  siRNA target sequence for Ulk2 (NM_013881.3,857-875).
gcaagttccagttaaaaaa

SEQ ID NO: 517429 - DNA, 19 bp, Mus musculus
  siRNA target sequence for Ulk2 (NM_013881.3,858-876).
caagttccagttaaaaaat

SEQ ID NO: 517430 - DNA, 19 bp, Mus musculus
  siRNA target sequence for Ulk2 (NM_013881.3,861-879).
gttccagttaaaaaatctt

SEQ ID NO: 517431 - DNA, 19 bp, Mus musculus
  siRNA target sequence for Ulk2 (NM_013881.3,973-991).
cagatatgcagcatattca

SEQ ID NO: 517432 - DNA, 19 bp, Mus musculus
  siRNA target sequence for Ulk2 (NM_013881.3,1016-1034).
gttgggtcctcccaactat

SEQ ID NO: 517433 - DNA, 19 bp, Mus musculus
  siRNA target sequence for Ulk2 (NM_013881.3,1019-1037).
gggtcctcccaactatcta

SEQ ID NO: 517434 - DNA, 19 bp, Mus musculus
  siRNA target sequence for Ulk2 (NM_013881.3,1046-1064).
caaagactctgcgagtaat

SEQ ID NO: 517435 - DNA, 19 bp, Mus musculus
  siRNA target sequence for Ulk2 (NM_013881.3,1050-1068).
gactctgcgagtaatagta

SEQ ID NO: 517436 - DNA, 19 bp, Mus musculus
  siRNA target sequence for Ulk2 (NM_013881.3,1086-1104).
gacacggatgactttgttt

SEQ ID NO: 517437 - DNA, 19 bp, Mus musculus
  siRNA target sequence for Ulk2 (NM_013881.3,1121-1139).
ctcgtcagaccactcatat

SEQ ID NO: 517438 - DNA, 19 bp, Mus musculus
  siRNA target sequence for Ulk2 (NM_013881.3,1123-1141).
cgtcagaccactcatatga

SEQ ID NO: 517439 - DNA, 19 bp, Mus musculus
  siRNA target sequence for Ulk2 (NM_013881.3,1170-1188).
gcttcaaatgaattcttta

SEQ ID NO: 517440 - DNA, 19 bp, Mus musculus
  siRNA target sequence for Ulk2 (NM_013881.3,1245-1263).
ccagttcctactcaagtaa

SEQ ID NO: 517441 - DNA, 19 bp, Mus musculus
  siRNA target sequence for Ulk2 (NM_013881.3,1251-1269).
cctactcaagtaaggaatt

SEQ ID NO: 517442 - DNA, 19 bp, Mus musculus
  siRNA target sequence for Ulk2 (NM_013881.3,1252-1270).
ctactcaagtaaggaatta

SEQ ID NO: 517443 - DNA, 19 bp, Mus musculus
  siRNA target sequence for Ulk2 (NM_013881.3,1255-1273).
ctcaagtaaggaattatca

SEQ ID NO: 517444 - DNA, 19 bp, Mus musculus
  siRNA target sequence for Ulk2 (NM_013881.3,1265-1283).
gaattatcagcgcatagaa

SEQ ID NO: 517445 - DNA, 19 bp, Mus musculus
  siRNA target sequence for Ulk2 (NM_013881.3,1274-1292).
gcgcatagaacagaatctt

SEQ ID NO: 517446 - DNA, 19 bp, Mus musculus
  siRNA target sequence for Ulk2 (NM_013881.3,1275-1293).
cgcatagaacagaatctta

SEQ ID NO: 517447 - DNA, 19 bp, Mus musculus
  siRNA target sequence for Ulk2 (NM_013881.3,1276-1294).
gcatagaacagaatcttat

SEQ ID NO: 517448 - DNA, 19 bp, Mus musculus
  siRNA target sequence for Ulk2 (NM_013881.3,1281-1299).
gaacagaatcttatatcca

SEQ ID NO: 517449 - DNA, 19 bp, Mus musculus
  siRNA target sequence for Ulk2 (NM_013881.3,1344-1362).
gtagtacgaaggtctaata

SEQ ID NO: 517450 - DNA, 19 bp, Mus musculus
  siRNA target sequence for Ulk2 (NM_013881.3,1347-1365).
gtacgaaggtctaatacca

SEQ ID NO: 517451 - DNA, 19 bp, Mus musculus
  siRNA target sequence for Ulk2 (NM_013881.3,1486-1504).
gtaccattcctgaacagtt

SEQ ID NO: 517452 - DNA, 19 bp, Mus musculus
  siRNA target sequence for Ulk2 (NM_013881.3,1586-1604).
ggcaccacagtcactctta

SEQ ID NO: 517453 - DNA, 19 bp, Mus musculus
  siRNA target sequence for Ulk2 (NM_013881.3,1630-1648).
ccaccctcaccgatatcta

SEQ ID NO: 517454 - DNA, 19 bp, Mus musculus
  siRNA target sequence for Ulk2 (NM_013881.3,1631-1649).
caccctcaccgatatctat

SEQ ID NO: 517455 - DNA, 19 bp, Mus musculus
  siRNA target sequence for Ulk2 (NM_013881.3,1633-1651).
ccctcaccgatatctatca

SEQ ID NO: 517456 - DNA, 19 bp, Mus musculus
  siRNA target sequence for Ulk2 (NM_013881.3,1635-1653).
ctcaccgatatctatcaga

SEQ ID NO: 517457 - DNA, 19 bp, Mus musculus
  siRNA target sequence for Ulk2 (NM_013881.3,1705-1723).
ctggagctgggtatagtta

SEQ ID NO: 517458 - DNA, 19 bp, Mus musculus
  siRNA target sequence for Ulk2 (NM_013881.3,1707-1725).
ggagctgggtatagttact

SEQ ID NO: 517459 - DNA, 19 bp, Mus musculus
  siRNA target sequence for Ulk2 (NM_013881.3,1783-1801).
cctctccacggaattctga

SEQ ID NO: 517460 - DNA, 19 bp, Mus musculus
  siRNA target sequence for Ulk2 (NM_013881.3,1793-1811).
gaattctgactggttcttt

SEQ ID NO: 517461 - DNA, 19 bp, Mus musculus
  siRNA target sequence for Ulk2 (NM_013881.3,1836-1854).
ggctctcctactaagacta

SEQ ID NO: 517462 - DNA, 19 bp, Mus musculus
  siRNA target sequence for Ulk2 (NM_013881.3,2048-2066).
cagtactgggaagttatca

SEQ ID NO: 517463 - DNA, 19 bp, Mus musculus
  siRNA target sequence for Ulk2 (NM_013881.3,2100-2118).
cagggcagcacggatagtt

SEQ ID NO: 517464 - DNA, 19 bp, Mus musculus
  siRNA target sequence for Ulk2 (NM_013881.3,2102-2120).
gggcagcacggatagttta

SEQ ID NO: 517465 - DNA, 19 bp, Mus musculus
  siRNA target sequence for Ulk2 (NM_013881.3,2103-2121).
ggcagcacggatagtttaa

SEQ ID NO: 517466 - DNA, 19 bp, Mus musculus
  siRNA target sequence for Ulk2 (NM_013881.3,2104-2122).
gcagcacggatagtttaaa

SEQ ID NO: 517467 - DNA, 19 bp, Mus musculus
  siRNA target sequence for Ulk2 (NM_013881.3,2108-2126).
cacggatagtttaaacaca

SEQ ID NO: 517468 - DNA, 19 bp, Mus musculus
  siRNA target sequence for Ulk2 (NM_013881.3,2123-2141).
cacagaacgaccaatggat

SEQ ID NO: 517469 - DNA, 19 bp, Mus musculus
  siRNA target sequence for Ulk2 (NM_013881.3,2244-2262).
gccacagcccccacttgta

SEQ ID NO: 517470 - DNA, 19 bp, Mus musculus
  siRNA target sequence for Ulk2 (NM_013881.3,2246-2264).
cacagcccccacttgtact

SEQ ID NO: 517471 - DNA, 19 bp, Mus musculus
  siRNA target sequence for Ulk2 (NM_013881.3,2250-2268).
gcccccacttgtactcata

SEQ ID NO: 517472 - DNA, 19 bp, Mus musculus
  siRNA target sequence for Ulk2 (NM_013881.3,2251-2269).
cccccacttgtactcatat

SEQ ID NO: 517473 - DNA, 19 bp, Mus musculus
  siRNA target sequence for Ulk2 (NM_013881.3,2254-2272).
ccacttgtactcatatggt

SEQ ID NO: 517474 - DNA, 19 bp, Mus musculus
  siRNA target sequence for Ulk2 (NM_013881.3,2401-2419).
gagctcccagcctaagata

SEQ ID NO: 517475 - DNA, 19 bp, Mus musculus
  siRNA target sequence for Ulk2 (NM_013881.3,2453-2471).
gggtctcatcacctttgaa

SEQ ID NO: 517476 - DNA, 19 bp, Mus musculus
  siRNA target sequence for Ulk2 (NM_013881.3,2526-2544).
cgccatctgaacatgatgt

SEQ ID NO: 517477 - DNA, 19 bp, Mus musculus
  siRNA target sequence for Ulk2 (NM_013881.3,2527-2545).
gccatctgaacatgatgtt

SEQ ID NO: 517478 - DNA, 19 bp, Mus musculus
  siRNA target sequence for Ulk2 (NM_013881.3,2537-2555).
catgatgttaatgtttact

SEQ ID NO: 517479 - DNA, 19 bp, Mus musculus
  siRNA target sequence for Ulk2 (NM_013881.3,2630-2648).
gattcaggagagtgtagtt

SEQ ID NO: 517480 - DNA, 19 bp, Mus musculus
  siRNA target sequence for Ulk2 (NM_013881.3,2780-2798).
cccatccatggctgtgaaa

SEQ ID NO: 517481 - DNA, 19 bp, Mus musculus
  siRNA target sequence for Ulk2 (NM_013881.3,2789-2807).
ggctgtgaaacaagttgtt

SEQ ID NO: 517482 - DNA, 19 bp, Mus musculus
  siRNA target sequence for Ulk2 (NM_013881.3,2840-2858).
caccatgtgcaagaaactt

SEQ ID NO: 517483 - DNA, 19 bp, Mus musculus
  siRNA target sequence for Ulk2 (NM_013881.3,2843-2861).
catgtgcaagaaacttaca

SEQ ID NO: 517484 - DNA, 19 bp, Mus musculus
  siRNA target sequence for Ulk2 (NM_013881.3,2846-2864).
gtgcaagaaacttacagaa

SEQ ID NO: 517485 - DNA, 19 bp, Mus musculus
  siRNA target sequence for Ulk2 (NM_013881.3,2875-2893).
gcttcttctccgataaaca

SEQ ID NO: 517486 - DNA, 19 bp, Mus musculus
  siRNA target sequence for Ulk2 (NM_013881.3,2882-2900).
ctccgataaacagagattt

SEQ ID NO: 517487 - DNA, 19 bp, Mus musculus
  siRNA target sequence for Ulk2 (NM_013881.3,2917-2935).
gtgtgactgcagagaaact

SEQ ID NO: 517488 - DNA, 19 bp, Mus musculus
  siRNA target sequence for Ulk2 (NM_013881.3,2925-2943).
gcagagaaactcatctata

SEQ ID NO: 517489 - DNA, 19 bp, Mus musculus
  siRNA target sequence for Ulk2 (NM_013881.3,2930-2948).
gaaactcatctataattgt

SEQ ID NO: 517490 - DNA, 19 bp, Mus musculus
  siRNA target sequence for Ulk2 (NM_013881.3,2994-3012).
cagactgaagacatcgttt

SEQ ID NO: 517491 - DNA, 19 bp, Mus musculus
  siRNA target sequence for Ulk2 (NM_013881.3,2996-3014).
gactgaagacatcgtttat

SEQ ID NO: 517492 - DNA, 19 bp, Mus musculus
  siRNA target sequence for Ulk2 (NM_013881.3,3065-3083).
ggaccctacagatgttgaa

SEQ ID NO: 517493 - DNA, 19 bp, Mus musculus
  siRNA target sequence for Umpk (NM_011675.1,166-184).
caacagtgtgtgagaagat

SEQ ID NO: 517494 - DNA, 19 bp, Mus musculus
  siRNA target sequence for Umpk (NM_011675.1,296-314).
gaagggacagtacaatttt

SEQ ID NO: 517495 - DNA, 19 bp, Mus musculus
  siRNA target sequence for Umpk (NM_011675.1,365-383).
cattgttgaaggcaaaact

SEQ ID NO: 517496 - DNA, 19 bp, Mus musculus
  siRNA target sequence for Umpk (NM_011675.1,386-404).
cgaggtccctacctatgat

SEQ ID NO: 517497 - DNA, 19 bp, Mus musculus
  siRNA target sequence for Umpk (NM_011675.1,387-405).
gaggtccctacctatgatt

SEQ ID NO: 517498 - DNA, 19 bp, Mus musculus
  siRNA target sequence for Umpk (NM_011675.1,393-411).
cctacctatgattttgtga

SEQ ID NO: 517499 - DNA, 19 bp, Mus musculus
  siRNA target sequence for V2r14 (NM_009489.1,567-585).
gtttctggaagcacatgaa

SEQ ID NO: 517500 - DNA, 19 bp, Mus musculus
  siRNA target sequence for Vars2 (NM_011690.2,609-627).
ccccactctggctgactta

SEQ ID NO: 517501 - DNA, 19 bp, Mus musculus
  siRNA target sequence for Vars2 (NM_011690.2,648-666).
gctgcctttccgatacgtt

SEQ ID NO: 517502 - DNA, 19 bp, Mus musculus
  siRNA target sequence for Vars2 (NM_011690.2,700-718).
gtgactcgctggtttaaca

SEQ ID NO: 517503 - DNA, 19 bp, Mus musculus
  siRNA target sequence for Vars2 (NM_011690.2,810-828).
ggtcatcgcaccccaaaaa

SEQ ID NO: 517504 - DNA, 19 bp, Mus musculus
  siRNA target sequence for Vars2 (NM_011690.2,813-831).
catcgcaccccaaaaaaca

SEQ ID NO: 517505 - DNA, 19 bp, Mus musculus
  siRNA target sequence for Vars2 (NM_011690.2,958-976).
gaccctggggtcattacct

SEQ ID NO: 517506 - DNA, 19 bp, Mus musculus
  siRNA target sequence for Vars2 (NM_011690.2,960-978).
ccctggggtcattacctat

SEQ ID NO: 517507 - DNA, 19 bp, Mus musculus
  siRNA target sequence for Vars2 (NM_011690.2,1253-1271).
gggagaccaccctatggaa

SEQ ID NO: 517508 - DNA, 19 bp, Mus musculus
  siRNA target sequence for Vars2 (NM_011690.2,1402-1420).
gagaagggtgacaggattt

SEQ ID NO: 517509 - DNA, 19 bp, Mus musculus
  siRNA target sequence for Vars2 (NM_011690.2,1422-1440).
ccaccaattaaagaaactt

SEQ ID NO: 517510 - DNA, 19 bp, Mus musculus
  siRNA target sequence for Vars2 (NM_011690.2,1469-1487).
gcttcaccatggatcctaa

SEQ ID NO: 517511 - DNA, 19 bp, Mus musculus
  siRNA target sequence for Vars2 (NM_011690.2,1476-1494).
catggatcctaaattgtca

SEQ ID NO: 517512 - DNA, 19 bp, Mus musculus
  siRNA target sequence for Vars2 (NM_011690.2,1595-1613).
ctgacattgaggtggataa

SEQ ID NO: 517513 - DNA, 19 bp, Mus musculus
  siRNA target sequence for Vars2 (NM_011690.2,1738-1756).
gcaacaacccggattgaga

SEQ ID NO: 517514 - DNA, 19 bp, Mus musculus
  siRNA target sequence for Vars2 (NM_011690.2,1826-1844).
gtgtcgtccacccattctt

SEQ ID NO: 517515 - DNA, 19 bp, Mus musculus
  siRNA target sequence for Vars2 (NM_011690.2,1828-1846).
gtcgtccacccattcttgt

SEQ ID NO: 517516 - DNA, 19 bp, Mus musculus
  siRNA target sequence for Vars2 (NM_011690.2,1860-1878).
catcgtcttcgatgacttt

SEQ ID NO: 517517 - DNA, 19 bp, Mus musculus
  siRNA target sequence for Vars2 (NM_011690.2,1863-1881).
cgtcttcgatgactttgta

SEQ ID NO: 517518 - DNA, 19 bp, Mus musculus
  siRNA target sequence for Vars2 (NM_011690.2,1895-1913).
gcacaggtgccgtgaagat

SEQ ID NO: 517519 - DNA, 19 bp, Mus musculus
  siRNA target sequence for Vars2 (NM_011690.2,1919-1937).
cggcacatgaccaaaatga

SEQ ID NO: 517520 - DNA, 19 bp, Mus musculus
  siRNA target sequence for Vars2 (NM_011690.2,1921-1939).
gcacatgaccaaaatgact

SEQ ID NO: 517521 - DNA, 19 bp, Mus musculus
  siRNA target sequence for Vars2 (NM_011690.2,1922-1940).
cacatgaccaaaatgacta

SEQ ID NO: 517522 - DNA, 19 bp, Mus musculus
  siRNA target sequence for Vars2 (NM_011690.2,1961-1979).
ggctcgaggccattagcat

SEQ ID NO: 517523 - DNA, 19 bp, Mus musculus
  siRNA target sequence for Vars2 (NM_011690.2,2453-2471).
gagtgtcccctgacaagat

SEQ ID NO: 517524 - DNA, 19 bp, Mus musculus
  siRNA target sequence for Vars2 (NM_011690.2,2603-2621).
gccatgatatcctcttctt

SEQ ID NO: 517525 - DNA, 19 bp, Mus musculus
  siRNA target sequence for Vars2 (NM_011690.2,2672-2690).
ccttcagagaggtctatct

SEQ ID NO: 517526 - DNA, 19 bp, Mus musculus
  siRNA target sequence for Vars2 (NM_011690.2,2780-2798).
ccttgcagggcctctatga

SEQ ID NO: 517527 - DNA, 19 bp, Mus musculus
  siRNA target sequence for Vars2 (NM_011690.2,2911-2929).
ggactctgtgcctacacat

SEQ ID NO: 517528 - DNA, 19 bp, Mus musculus
  siRNA target sequence for Vars2 (NM_011690.2,2930-2948).
cccaaggtcgagacatcaa

SEQ ID NO: 517529 - DNA, 19 bp, Mus musculus
  siRNA target sequence for Vars2 (NM_011690.2,3120-3138).
cgtgaggctcagcaatgaa

SEQ ID NO: 517530 - DNA, 19 bp, Mus musculus
  siRNA target sequence for Vars2 (NM_011690.2,3211-3229).
gtctatttggagtgtctaa

SEQ ID NO: 517531 - DNA, 19 bp, Mus musculus
  siRNA target sequence for Vars2 (NM_011690.2,3213-3231).
ctatttggagtgtctaaaa

SEQ ID NO: 517532 - DNA, 19 bp, Mus musculus
  siRNA target sequence for Vars2 (NM_011690.2,3497-3515).
ccctgcgtgctgactacaa

SEQ ID NO: 517533 - DNA, 19 bp, Mus musculus
  siRNA target sequence for Vars2 (NM_011690.2,3527-3545).
ccaggcccgactgtttctt

SEQ ID NO: 517534 - DNA, 19 bp, Mus musculus
  siRNA target sequence for Vcp (NM_009503.2,1968-1986).
cccctgtgtactcttcttt

SEQ ID NO: 517535 - DNA, 19 bp, Mus musculus
  siRNA target sequence for Vps4a (NM_126165.1,171-189).
ccatcgatctggtgacaaa

SEQ ID NO: 517536 - DNA, 19 bp, Mus musculus
  siRNA target sequence for Vps4a (NM_126165.1,172-190).
catcgatctggtgacaaaa

SEQ ID NO: 517537 - DNA, 19 bp, Mus musculus
  siRNA target sequence for Vps4a (NM_126165.1,265-283).
ccacgccatcaaatatgaa

SEQ ID NO: 517538 - DNA, 19 bp, Mus musculus
  siRNA target sequence for Vps4a (NM_126165.1,352-370).
gctgaaggattatttacga

SEQ ID NO: 517539 - DNA, 19 bp, Mus musculus
  siRNA target sequence for Vps4a (NM_126165.1,353-371).
ctgaaggattatttacgaa

SEQ ID NO: 517540 - DNA, 19 bp, Mus musculus
  siRNA target sequence for Vps4a (NM_126165.1,358-376).
ggattatttacgaaacaaa

SEQ ID NO: 517541 - DNA, 19 bp, Mus musculus
  siRNA target sequence for Vps4a (NM_126165.1,439-457).
cagtgaaggggataatcca

SEQ ID NO: 517542 - DNA, 19 bp, Mus musculus
  siRNA target sequence for Vps4a (NM_126165.1,511-529).
gaacatacggtggaatgat

SEQ ID NO: 517543 - DNA, 19 bp, Mus musculus
  siRNA target sequence for Vps4a (NM_126165.1,514-532).
catacggtggaatgatgta

SEQ ID NO: 517544 - DNA, 19 bp, Mus musculus
  siRNA target sequence for Vps4a (NM_126165.1,560-578).
ctcaaagaagctgtgattt

SEQ ID NO: 517545 - DNA, 19 bp, Mus musculus
  siRNA target sequence for Vps4a (NM_126165.1,572-590).
gtgattttgccaattaaat

SEQ ID NO: 517546 - DNA, 19 bp, Mus musculus
  siRNA target sequence for Vps4a (NM_126165.1,676-694).
caaagccgtggcaacagaa

SEQ ID NO: 517547 - DNA, 19 bp, Mus musculus
  siRNA target sequence for Vps4a (NM_126165.1,726-744).
cctcggatctgatgtctaa

SEQ ID NO: 517548 - DNA, 19 bp, Mus musculus
  siRNA target sequence for Vps4a (NM_126165.1,841-859).
ctgtgggtcacggaatgaa

SEQ ID NO: 517549 - DNA, 19 bp, Mus musculus
  siRNA target sequence for Vps4a (NM_126165.1,846-864).
ggtcacggaatgaaaatga

SEQ ID NO: 517550 - DNA, 19 bp, Mus musculus
  siRNA target sequence for Vps4a (NM_126165.1,872-890).
gccgctcgtaggatcaaaa

SEQ ID NO: 517551 - DNA, 19 bp, Mus musculus
  siRNA target sequence for Vps4a (NM_126165.1,874-892).
cgctcgtaggatcaaaaca

SEQ ID NO: 517552 - DNA, 19 bp, Mus musculus
  siRNA target sequence for Vps4a (NM_126165.1,876-894).
ctcgtaggatcaaaacaga

SEQ ID NO: 517553 - DNA, 19 bp, Mus musculus
  siRNA target sequence for Vps4a (NM_126165.1,910-928).
gcaaggagtggggaataat

SEQ ID NO: 517554 - DNA, 19 bp, Mus musculus
  siRNA target sequence for Vps4a (NM_126165.1,985-1003).
catcaggaggaggtttgaa

SEQ ID NO: 517555 - DNA, 19 bp, Mus musculus
  siRNA target sequence for Vps4a (NM_126165.1,996-1014).
ggtttgaaaagcgaattta

SEQ ID NO: 517556 - DNA, 19 bp, Mus musculus
  siRNA target sequence for Vps4a (NM_126165.1,1236-1254).
ccaaccctagcgttatgat

SEQ ID NO: 517557 - DNA, 19 bp, Mus musculus
  siRNA target sequence for Vps4a (NM_126165.1,1237-1255).
caaccctagcgttatgatt

SEQ ID NO: 517558 - DNA, 19 bp, Mus musculus
  siRNA target sequence for Vps4a (NM_126165.1,1240-1258).
ccctagcgttatgattgat

SEQ ID NO: 517559 - DNA, 19 bp, Mus musculus
  siRNA target sequence for Vps4a (NM_126165.1,1242-1260).
ctagcgttatgattgatga

SEQ ID NO: 517560 - DNA, 19 bp, Mus musculus
  siRNA target sequence for Vps4a (NM_126165.1,1245-1263).
gcgttatgattgatgatct

SEQ ID NO: 517561 - DNA, 19 bp, Mus musculus
  siRNA target sequence for Vps4a (NM_126165.1,1321-1339).
ccctggtgataaactctta

SEQ ID NO: 517562 - DNA, 19 bp, Mus musculus
  siRNA target sequence for Vps4a (NM_126165.1,1406-1424).
gacgacctcctgaaagtaa

SEQ ID NO: 517563 - DNA, 19 bp, Mus musculus
  siRNA target sequence for Vps4b (NM_009190.1,973-991).
cgaggctgcacggagaatt

SEQ ID NO: 517564 - DNA, 19 bp, Mus musculus
  siRNA target sequence for Vps4b (NM_009190.1,1489-1507).
cacaaagccaacagtcaat

SEQ ID NO: 517565 - DNA, 19 bp, Mus musculus
  siRNA target sequence for Vps4b (NM_009190.1,1491-1509).
caaagccaacagtcaatga

SEQ ID NO: 517566 - DNA, 19 bp, Mus musculus
  siRNA target sequence for Vrk1 (NM_011705.2,208-226).
ctatctggcggacacaaat

SEQ ID NO: 517567 - DNA, 19 bp, Mus musculus
  siRNA target sequence for Vrk1 (NM_011705.2,281-299).
gacaatggacctcttttca

SEQ ID NO: 517568 - DNA, 19 bp, Mus musculus
  siRNA target sequence for Vrk1 (NM_011705.2,290-308).
cctcttttcacggaattaa

SEQ ID NO: 517569 - DNA, 19 bp, Mus musculus
  siRNA target sequence for Vrk1 (NM_011705.2,327-345).
ctaaaccagagcaaattca

SEQ ID NO: 517570 - DNA, 19 bp, Mus musculus
  siRNA target sequence for Vrk1 (NM_011705.2,346-364).
gaaatggattcgtacacat

SEQ ID NO: 517571 - DNA, 19 bp, Mus musculus
  siRNA target sequence for Vrk1 (NM_011705.2,397-415).
gggatctggtctacatgat

SEQ ID NO: 517572 - DNA, 19 bp, Mus musculus
  siRNA target sequence for Vrk1 (NM_011705.2,398-416).
ggatctggtctacatgata

SEQ ID NO: 517573 - DNA, 19 bp, Mus musculus
  siRNA target sequence for Vrk1 (NM_011705.2,407-425).
ctacatgataaaaatggaa

SEQ ID NO: 517574 - DNA, 19 bp, Mus musculus
  siRNA target sequence for Vrk1 (NM_011705.2,429-447).
gttacaggtttatgataat

SEQ ID NO: 517575 - DNA, 19 bp, Mus musculus
  siRNA target sequence for Vrk1 (NM_011705.2,498-516).
ggttttctcggaaaactgt

SEQ ID NO: 517576 - DNA, 19 bp, Mus musculus
  siRNA target sequence for Vrk1 (NM_011705.2,513-531).
ctgtattgcagctaagctt

SEQ ID NO: 517577 - DNA, 19 bp, Mus musculus
  siRNA target sequence for Vrk1 (NM_011705.2,515-533).
gtattgcagctaagcttaa

SEQ ID NO: 517578 - DNA, 19 bp, Mus musculus
  siRNA target sequence for Vrk1 (NM_011705.2,520-538).
gcagctaagcttaagaatt

SEQ ID NO: 517579 - DNA, 19 bp, Mus musculus
  siRNA target sequence for Vrk1 (NM_011705.2,619-637).
gaaccctgaccaggtatat

SEQ ID NO: 517580 - DNA, 19 bp, Mus musculus
  siRNA target sequence for Vrk1 (NM_011705.2,624-642).
ctgaccaggtatatttggt

SEQ ID NO: 517581 - DNA, 19 bp, Mus musculus
  siRNA target sequence for Vrk1 (NM_011705.2,669-687).
gcccagatggagttcataa

SEQ ID NO: 517582 - DNA, 19 bp, Mus musculus
  siRNA target sequence for Vrk1 (NM_011705.2,674-692).
gatggagttcataaagagt

SEQ ID NO: 517583 - DNA, 19 bp, Mus musculus
  siRNA target sequence for Vrk1 (NM_011705.2,768-786).
catcaagacgtggtgattt

SEQ ID NO: 517584 - DNA, 19 bp, Mus musculus
  siRNA target sequence for Vrk1 (NM_011705.2,771-789).
caagacgtggtgatttgga

SEQ ID NO: 517585 - DNA, 19 bp, Mus musculus
  siRNA target sequence for Vrk1 (NM_011705.2,833-851).
ccttgggaagataacttga

SEQ ID NO: 517586 - DNA, 19 bp, Mus musculus
  siRNA target sequence for Vrk1 (NM_011705.2,834-852).
cttgggaagataacttgaa

SEQ ID NO: 517587 - DNA, 19 bp, Mus musculus
  siRNA target sequence for Vrk1 (NM_011705.2,862-880).
ctacgttagggattccaaa

SEQ ID NO: 517588 - DNA, 19 bp, Mus musculus
  siRNA target sequence for Vrk1 (NM_011705.2,865-883).
cgttagggattccaaaatt

SEQ ID NO: 517589 - DNA, 19 bp, Mus musculus
  siRNA target sequence for Vrk1 (NM_011705.2,866-884).
gttagggattccaaaatta

SEQ ID NO: 517590 - DNA, 19 bp, Mus musculus
  siRNA target sequence for Vrk1 (NM_011705.2,870-888).
gggattccaaaattagata

SEQ ID NO: 517591 - DNA, 19 bp, Mus musculus
  siRNA target sequence for Vrk1 (NM_011705.2,942-960).
caggtgagatcgctaagta

SEQ ID NO: 517592 - DNA, 19 bp, Mus musculus
  siRNA target sequence for Vrk1 (NM_011705.2,944-962).
ggtgagatcgctaagtaca

SEQ ID NO: 517593 - DNA, 19 bp, Mus musculus
  siRNA target sequence for Vrk1 (NM_011705.2,945-963).
gtgagatcgctaagtacat

SEQ ID NO: 517594 - DNA, 19 bp, Mus musculus
  siRNA target sequence for Vrk1 (NM_011705.2,969-987).
ctgtgaaactactggaata

SEQ ID NO: 517595 - DNA, 19 bp, Mus musculus
  siRNA target sequence for Vrk1 (NM_011705.2,988-1006).
caccgaaaaacctctctat

SEQ ID NO: 517596 - DNA, 19 bp, Mus musculus
  siRNA target sequence for Vrk1 (NM_011705.2,992-1010).
gaaaaacctctctatcaaa

SEQ ID NO: 517597 - DNA, 19 bp, Mus musculus
  siRNA target sequence for Vrk1 (NM_011705.2,1012-1030).
cctacgtgatatcctttta

SEQ ID NO: 517598 - DNA, 19 bp, Mus musculus
  siRNA target sequence for Vrk1 (NM_011705.2,1060-1078).
cgacggcaaactggatttt

SEQ ID NO: 517599 - DNA, 19 bp, Mus musculus
  siRNA target sequence for Vrk1 (NM_011705.2,1061-1079).
gacggcaaactggatttta

SEQ ID NO: 517600 - DNA, 19 bp, Mus musculus
  siRNA target sequence for Vrk1 (NM_011705.2,1063-1081).
cggcaaactggattttagt

SEQ ID NO: 517601 - DNA, 19 bp, Mus musculus
  siRNA target sequence for Vrk1 (NM_011705.2,1107-1125).
caagaccagcctcaaagaa

SEQ ID NO: 517602 - DNA, 19 bp, Mus musculus
  siRNA target sequence for Vrk1 (NM_011705.2,1346-1364).
ggttcacgaaccagaaaga

SEQ ID NO: 517603 - DNA, 19 bp, Mus musculus
  siRNA target sequence for Vrk2 (NM_027260.1,143-161).
gggtttggactgatatact

SEQ ID NO: 517604 - DNA, 19 bp, Mus musculus
  siRNA target sequence for Vrk2 (NM_027260.1,149-167).
ggactgatatacttagctt

SEQ ID NO: 517605 - DNA, 19 bp, Mus musculus
  siRNA target sequence for Vrk2 (NM_027260.1,191-209).
gatgcaagacatgtcataa

SEQ ID NO: 517606 - DNA, 19 bp, Mus musculus
  siRNA target sequence for Vrk2 (NM_027260.1,195-213).
caagacatgtcataaagct

SEQ ID NO: 517607 - DNA, 19 bp, Mus musculus
  siRNA target sequence for Vrk2 (NM_027260.1,341-359).
ggatttggtctgactgatt

SEQ ID NO: 517608 - DNA, 19 bp, Mus musculus
  siRNA target sequence for Vrk2 (NM_027260.1,372-390).
gttacagattcatggtaat

SEQ ID NO: 517609 - DNA, 19 bp, Mus musculus
  siRNA target sequence for Vrk2 (NM_027260.1,391-409).
ggaaagacttggaatagat

SEQ ID NO: 517610 - DNA, 19 bp, Mus musculus
  siRNA target sequence for Vrk2 (NM_027260.1,398-416).
cttggaatagatttacaga

SEQ ID NO: 517611 - DNA, 19 bp, Mus musculus
  siRNA target sequence for Vrk2 (NM_027260.1,424-442).
ggaccagaatggtggtttt

SEQ ID NO: 517612 - DNA, 19 bp, Mus musculus
  siRNA target sequence for Vrk2 (NM_027260.1,425-443).
gaccagaatggtggtttta

SEQ ID NO: 517613 - DNA, 19 bp, Mus musculus
  siRNA target sequence for Vrk2 (NM_027260.1,478-496).
gctggatgtactggaatat

SEQ ID NO: 517614 - DNA, 19 bp, Mus musculus
  siRNA target sequence for Vrk2 (NM_027260.1,582-600).
cagactatggactttccta

SEQ ID NO: 517615 - DNA, 19 bp, Mus musculus
  siRNA target sequence for Vrk2 (NM_027260.1,618-636).
ggaaccacaaacagtatca

SEQ ID NO: 517616 - DNA, 19 bp, Mus musculus
  siRNA target sequence for Vrk2 (NM_027260.1,656-674).
cataatgggacaatagagt

SEQ ID NO: 517617 - DNA, 19 bp, Mus musculus
  siRNA target sequence for Vrk2 (NM_027260.1,662-680).
gggacaatagagtttacaa

SEQ ID NO: 517618 - DNA, 19 bp, Mus musculus
  siRNA target sequence for Vrk2 (NM_027260.1,842-860).
ccagagtcggtgcttaagt

SEQ ID NO: 517619 - DNA, 19 bp, Mus musculus
  siRNA target sequence for Vrk2 (NM_027260.1,876-894).
gcagttgcagtgaacttgt

SEQ ID NO: 517620 - DNA, 19 bp, Mus musculus
  siRNA target sequence for Vrk2 (NM_027260.1,895-913).
caagtacttgatgtatgtt

SEQ ID NO: 517621 - DNA, 19 bp, Mus musculus
  siRNA target sequence for Vrk2 (NM_027260.1,932-950).
gacaagccagactatcaga

SEQ ID NO: 517622 - DNA, 19 bp, Mus musculus
  siRNA target sequence for Vrk2 (NM_027260.1,1031-1049).
cggactccagcccaacaaa

SEQ ID NO: 517623 - DNA, 19 bp, Mus musculus
  siRNA target sequence for Vrk2 (NM_027260.1,1032-1050).
ggactccagcccaacaaaa

SEQ ID NO: 517624 - DNA, 19 bp, Mus musculus
  siRNA target sequence for Vrk2 (NM_027260.1,1040-1058).
gcccaacaaaaagttgatt

SEQ ID NO: 517625 - DNA, 19 bp, Mus musculus
  siRNA target sequence for Vrk2 (NM_027260.1,1042-1060).
ccaacaaaaagttgattca

SEQ ID NO: 517626 - DNA, 19 bp, Mus musculus
  siRNA target sequence for Vrk2 (NM_027260.1,1095-1113).
cagctaagttcccaaagaa

SEQ ID NO: 517627 - DNA, 19 bp, Mus musculus
  siRNA target sequence for Vrk2 (NM_027260.1,1190-1208).
gcagcaccggaaaactcaa

SEQ ID NO: 517628 - DNA, 19 bp, Mus musculus
  siRNA target sequence for Vrk2 (NM_027260.1,1249-1267).
gatgcagagtcttcaacaa

SEQ ID NO: 517629 - DNA, 19 bp, Mus musculus
  siRNA target sequence for Vrk2 (NM_027260.1,1265-1283).
caaacacccagctatatga

SEQ ID NO: 517630 - DNA, 19 bp, Mus musculus
  siRNA target sequence for Vrk2 (NM_027260.1,1269-1287).
cacccagctatatgagttt

SEQ ID NO: 517631 - DNA, 19 bp, Mus musculus
  siRNA target sequence for Vrk2 (NM_027260.1,1273-1291).
cagctatatgagtttccaa

SEQ ID NO: 517632 - DNA, 19 bp, Mus musculus
  siRNA target sequence for Vrk2 (NM_027260.1,1315-1333).
ggactgcactagaagagat

SEQ ID NO: 517633 - DNA, 19 bp, Mus musculus
  siRNA target sequence for Vrk2 (NM_027260.1,1465-1483).
ggcagatgtgtattactat

SEQ ID NO: 517634 - DNA, 19 bp, Mus musculus
  siRNA target sequence for Vrk3 (NM_133945.1,134-152).
caagttctgcccttactgt

SEQ ID NO: 517635 - DNA, 19 bp, Mus musculus
  siRNA target sequence for Vrk3 (NM_133945.1,546-564).
gatgaccaaggcattctct

SEQ ID NO: 517636 - DNA, 19 bp, Mus musculus
  siRNA target sequence for Vrk3 (NM_133945.1,585-603).
gccgtcccctctgaatcaa

SEQ ID NO: 517637 - DNA, 19 bp, Mus musculus
  siRNA target sequence for Vrk3 (NM_133945.1,833-851).
ggatgacaacccaaagcat

SEQ ID NO: 517638 - DNA, 19 bp, Mus musculus
  siRNA target sequence for Vrk3 (NM_133945.1,938-956).
gaacctgacagctgagaat

SEQ ID NO: 517639 - DNA, 19 bp, Mus musculus
  siRNA target sequence for Vrk3 (NM_133945.1,1181-1199).
gtccctgccatggacaaat

SEQ ID NO: 517640 - DNA, 19 bp, Mus musculus
  siRNA target sequence for Vrk3 (NM_133945.1,1206-1224).
cccaacaccgaaaagataa

SEQ ID NO: 517641 - DNA, 19 bp, Mus musculus
  siRNA target sequence for Vrk3 (NM_133945.1,1208-1226).
caacaccgaaaagataact

SEQ ID NO: 517642 - DNA, 19 bp, Mus musculus
  siRNA target sequence for Vrk3 (NM_133945.1,1323-1341).
gtggtgatggccctcaatt

SEQ ID NO: 517643 - DNA, 19 bp, Mus musculus
  siRNA target sequence for Vrk3 (NM_133945.1,1325-1343).
ggtgatggccctcaattat

SEQ ID NO: 517644 - DNA, 19 bp, Mus musculus
  siRNA target sequence for Wars (NM_011710.2,137-155).
ccactggagctgttcaaca

SEQ ID NO: 517645 - DNA, 19 bp, Mus musculus
  siRNA target sequence for Wars (NM_011710.2,146-164).
ctgttcaacagcatagcta

SEQ ID NO: 517646 - DNA, 19 bp, Mus musculus
  siRNA target sequence for Wars (NM_011710.2,206-224).
ccaaaagatgagattgatt

SEQ ID NO: 517647 - DNA, 19 bp, Mus musculus
  siRNA target sequence for Wars (NM_011710.2,227-245).
gcagtaaagatgttgttat

SEQ ID NO: 517648 - DNA, 19 bp, Mus musculus
  siRNA target sequence for Wars (NM_011710.2,382-400).
gcggacaagcagtgcaaaa

SEQ ID NO: 517649 - DNA, 19 bp, Mus musculus
  siRNA target sequence for Wars (NM_011710.2,430-448).
gtttggaagcagcaaaatt

SEQ ID NO: 517650 - DNA, 19 bp, Mus musculus
  siRNA target sequence for Wars (NM_011710.2,526-544).
ctcccaccgagatatgaat

SEQ ID NO: 517651 - DNA, 19 bp, Mus musculus
  siRNA target sequence for Wars (NM_011710.2,528-546).
cccaccgagatatgaatca

SEQ ID NO: 517652 - DNA, 19 bp, Mus musculus
  siRNA target sequence for Wars (NM_011710.2,529-547).
ccaccgagatatgaatcaa

SEQ ID NO: 517653 - DNA, 19 bp, Mus musculus
  siRNA target sequence for Wars (NM_011710.2,530-548).
caccgagatatgaatcaaa

SEQ ID NO: 517654 - DNA, 19 bp, Mus musculus
  siRNA target sequence for Wars (NM_011710.2,532-550).
ccgagatatgaatcaaatt

SEQ ID NO: 517655 - DNA, 19 bp, Mus musculus
  siRNA target sequence for Wars (NM_011710.2,604-622).
ctcctccgaagcaatgcat

SEQ ID NO: 517656 - DNA, 19 bp, Mus musculus
  siRNA target sequence for Wars (NM_011710.2,627-645).
gtcatctcgtcccgtttat

SEQ ID NO: 517657 - DNA, 19 bp, Mus musculus
  siRNA target sequence for Wars (NM_011710.2,629-647).
catctcgtcccgtttattt

SEQ ID NO: 517658 - DNA, 19 bp, Mus musculus
  siRNA target sequence for Wars (NM_011710.2,638-656).
ccgtttattttcacaaagt

SEQ ID NO: 517659 - DNA, 19 bp, Mus musculus
  siRNA target sequence for Wars (NM_011710.2,751-769).
ctacaccgtagaaaatgca

SEQ ID NO: 517660 - DNA, 19 bp, Mus musculus
  siRNA target sequence for Wars (NM_011710.2,783-801).
cctgtggcttcgacatcaa

SEQ ID NO: 517661 - DNA, 19 bp, Mus musculus
  siRNA target sequence for Wars (NM_011710.2,786-804).
gtggcttcgacatcaacaa

SEQ ID NO: 517662 - DNA, 19 bp, Mus musculus
  siRNA target sequence for Wars (NM_011710.2,790-808).
cttcgacatcaacaaaact

SEQ ID NO: 517663 - DNA, 19 bp, Mus musculus
  siRNA target sequence for Wars (NM_011710.2,929-947).
gactgcatcgggaagatca

SEQ ID NO: 517664 - DNA, 19 bp, Mus musculus
  siRNA target sequence for Wars (NM_011710.2,933-951).
gcatcgggaagatcagttt

SEQ ID NO: 517665 - DNA, 19 bp, Mus musculus
  siRNA target sequence for Wars (NM_011710.2,934-952).
catcgggaagatcagtttt

SEQ ID NO: 517666 - DNA, 19 bp, Mus musculus
  siRNA target sequence for Wars (NM_011710.2,971-989).
ccatcgttcagcaactctt

SEQ ID NO: 517667 - DNA, 19 bp, Mus musculus
  siRNA target sequence for Wars (NM_011710.2,972-990).
catcgttcagcaactcttt

SEQ ID NO: 517668 - DNA, 19 bp, Mus musculus
  siRNA target sequence for Wars (NM_011710.2,1005-1023).
gagacaggacagatatcca

SEQ ID NO: 517669 - DNA, 19 bp, Mus musculus
  siRNA target sequence for Wars (NM_011710.2,1046-1064).
gaccaggatccgtacttca

SEQ ID NO: 517670 - DNA, 19 bp, Mus musculus
  siRNA target sequence for Wars (NM_011710.2,1049-1067).
caggatccgtacttcagaa

SEQ ID NO: 517671 - DNA, 19 bp, Mus musculus
  siRNA target sequence for Wars (NM_011710.2,1052-1070).
gatccgtacttcagaatga

SEQ ID NO: 517672 - DNA, 19 bp, Mus musculus
  siRNA target sequence for Wars (NM_011710.2,1087-1105).
caggatcggccatcctaaa

SEQ ID NO: 517673 - DNA, 19 bp, Mus musculus
  siRNA target sequence for Wars (NM_011710.2,1090-1108).
gatcggccatcctaaacct

SEQ ID NO: 517674 - DNA, 19 bp, Mus musculus
  siRNA target sequence for Wars (NM_011710.2,1225-1243).
ggtcaacaagcatgcattt

SEQ ID NO: 517675 - DNA, 19 bp, Mus musculus
  siRNA target sequence for Wars (NM_011710.2,1300-1318).
ggatgtatccttcatgtat

SEQ ID NO: 517676 - DNA, 19 bp, Mus musculus
  siRNA target sequence for Wars2 (NM_027462.2,178-196).
cgagagctgggtgaactta

SEQ ID NO: 517677 - DNA, 19 bp, Mus musculus
  siRNA target sequence for Wars2 (NM_027462.2,317-335).
ggcataaacccagagaaaa

SEQ ID NO: 517678 - DNA, 19 bp, Mus musculus
  siRNA target sequence for Wars2 (NM_027462.2,327-345).
cagagaaaagtatcctttt

SEQ ID NO: 517679 - DNA, 19 bp, Mus musculus
  siRNA target sequence for Wars2 (NM_027462.2,409-427).
gcctcgattgcagcattta

SEQ ID NO: 517680 - DNA, 19 bp, Mus musculus
  siRNA target sequence for Wars2 (NM_027462.2,411-429).
ctcgattgcagcatttaca

SEQ ID NO: 517681 - DNA, 19 bp, Mus musculus
  siRNA target sequence for Wars2 (NM_027462.2,471-489).
ccgtaggcctgctcacata

SEQ ID NO: 517682 - DNA, 19 bp, Mus musculus
  siRNA target sequence for Wars2 (NM_027462.2,540-558).
ctgtcggggaggatcaagt

SEQ ID NO: 517683 - DNA, 19 bp, Mus musculus
  siRNA target sequence for Wars2 (NM_027462.2,581-599).
gatctagctcgaagtttca

SEQ ID NO: 517684 - DNA, 19 bp, Mus musculus
  siRNA target sequence for Wars2 (NM_027462.2,590-608).
cgaagtttcaaccaaaagt

SEQ ID NO: 517685 - DNA, 19 bp, Mus musculus
  siRNA target sequence for Wars2 (NM_027462.2,677-695).
ccttcttccaagatgtcaa

SEQ ID NO: 517686 - DNA, 19 bp, Mus musculus
  siRNA target sequence for Wars2 (NM_027462.2,713-731).
ctcgccactgttcgaataa

SEQ ID NO: 517687 - DNA, 19 bp, Mus musculus
  siRNA target sequence for Wars2 (NM_027462.2,715-733).
cgccactgttcgaataaca

SEQ ID NO: 517688 - DNA, 19 bp, Mus musculus
  siRNA target sequence for Wars2 (NM_027462.2,717-735).
ccactgttcgaataacaga

SEQ ID NO: 517689 - DNA, 19 bp, Mus musculus
  siRNA target sequence for Wars2 (NM_027462.2,929-947).
gccgatgctgtgattgaga

SEQ ID NO: 517690 - DNA, 19 bp, Mus musculus
  siRNA target sequence for Wars2 (NM_027462.2,930-948).
ccgatgctgtgattgagaa

SEQ ID NO: 517691 - DNA, 19 bp, Mus musculus
  siRNA target sequence for Wars2 (NM_027462.2,931-949).
cgatgctgtgattgagaaa

SEQ ID NO: 517692 - DNA, 19 bp, Mus musculus
  siRNA target sequence for Wars2 (NM_027462.2,988-1006).
ggataaggaccacttaaga

SEQ ID NO: 517693 - DNA, 19 bp, Mus musculus
  siRNA target sequence for Wars2 (NM_027462.2,989-1007).
gataaggaccacttaagaa

SEQ ID NO: 517694 - DNA, 19 bp, Mus musculus
  siRNA target sequence for Wars2 (NM_027462.2,995-1013).
gaccacttaagaaaggttt

SEQ ID NO: 517695 - DNA, 19 bp, Mus musculus
  siRNA target sequence for Wee1 (NM_009516.2,352-370).
cgtaggagccgcttacagt

SEQ ID NO: 517696 - DNA, 19 bp, Mus musculus
  siRNA target sequence for Wee1 (NM_009516.2,673-691).
ctcgtcgcccgtcaaatca

SEQ ID NO: 517697 - DNA, 19 bp, Mus musculus
  siRNA target sequence for Wee1 (NM_009516.2,872-890).
ccgcacactcccaagagtt

SEQ ID NO: 517698 - DNA, 19 bp, Mus musculus
  siRNA target sequence for Wee1 (NM_009516.2,873-891).
cgcacactcccaagagttt

SEQ ID NO: 517699 - DNA, 19 bp, Mus musculus
  siRNA target sequence for Wee1 (NM_009516.2,883-901).
caagagtttgctttccaaa

SEQ ID NO: 517700 - DNA, 19 bp, Mus musculus
  siRNA target sequence for Wee1 (NM_009516.2,897-915).
ccaaagcgcgagttattga

SEQ ID NO: 517701 - DNA, 19 bp, Mus musculus
  siRNA target sequence for Wee1 (NM_009516.2,898-916).
caaagcgcgagttattgat

SEQ ID NO: 517702 - DNA, 19 bp, Mus musculus
  siRNA target sequence for Wee1 (NM_009516.2,935-953).
cggggtagttctctattca

SEQ ID NO: 517703 - DNA, 19 bp, Mus musculus
  siRNA target sequence for Wee1 (NM_009516.2,936-954).
ggggtagttctctattcat

SEQ ID NO: 517704 - DNA, 19 bp, Mus musculus
  siRNA target sequence for Wee1 (NM_009516.2,969-987).
caggaaaaagagaattcga

SEQ ID NO: 517705 - DNA, 19 bp, Mus musculus
  siRNA target sequence for Wee1 (NM_009516.2,994-1012).
gcaaactccccaagtgaat

SEQ ID NO: 517706 - DNA, 19 bp, Mus musculus
  siRNA target sequence for Wee1 (NM_009516.2,995-1013).
caaactccccaagtgaata

SEQ ID NO: 517707 - DNA, 19 bp, Mus musculus
  siRNA target sequence for Wee1 (NM_009516.2,999-1017).
ctccccaagtgaatattaa

SEQ ID NO: 517708 - DNA, 19 bp, Mus musculus
  siRNA target sequence for Wee1 (NM_009516.2,1009-1027).
gaatattaacccctttact

SEQ ID NO: 517709 - DNA, 19 bp, Mus musculus
  siRNA target sequence for Wee1 (NM_009516.2,1058-1076).
cggtgtcgtgggagaaaga

SEQ ID NO: 517710 - DNA, 19 bp, Mus musculus
  siRNA target sequence for Wee1 (NM_009516.2,1071-1089).
gaaagagagcgtattttaa

SEQ ID NO: 517711 - DNA, 19 bp, Mus musculus
  siRNA target sequence for Wee1 (NM_009516.2,1105-1123).
catggaagccagtgattat

SEQ ID NO: 517712 - DNA, 19 bp, Mus musculus
  siRNA target sequence for Wee1 (NM_009516.2,1145-1163).
cctgccaaaagaattacaa

SEQ ID NO: 517713 - DNA, 19 bp, Mus musculus
  siRNA target sequence for Wee1 (NM_009516.2,1148-1166).
gccaaaagaattacaatta

SEQ ID NO: 517714 - DNA, 19 bp, Mus musculus
  siRNA target sequence for Wee1 (NM_009516.2,1180-1198).
gaagtcacggtatacaact

SEQ ID NO: 517715 - DNA, 19 bp, Mus musculus
  siRNA target sequence for Wee1 (NM_009516.2,1183-1201).
gtcacggtatacaactgaa

SEQ ID NO: 517716 - DNA, 19 bp, Mus musculus
  siRNA target sequence for Wee1 (NM_009516.2,1185-1203).
cacggtatacaactgaatt

SEQ ID NO: 517717 - DNA, 19 bp, Mus musculus
  siRNA target sequence for Wee1 (NM_009516.2,1189-1207).
gtatacaactgaatttcat

SEQ ID NO: 517718 - DNA, 19 bp, Mus musculus
  siRNA target sequence for Wee1 (NM_009516.2,1208-1226).
gagctggagaaaattggtt

SEQ ID NO: 517719 - DNA, 19 bp, Mus musculus
  siRNA target sequence for Wee1 (NM_009516.2,1276-1294).
catttatgccattaaacga

SEQ ID NO: 517720 - DNA, 19 bp, Mus musculus
  siRNA target sequence for Wee1 (NM_009516.2,1319-1337).
gttgatgagcagaatgctt

SEQ ID NO: 517721 - DNA, 19 bp, Mus musculus
  siRNA target sequence for Wee1 (NM_009516.2,1377-1395).
cccacgtcgttcgctattt

SEQ ID NO: 517722 - DNA, 19 bp, Mus musculus
  siRNA target sequence for Wee1 (NM_009516.2,1379-1397).
cacgtcgttcgctatttct

SEQ ID NO: 517723 - DNA, 19 bp, Mus musculus
  siRNA target sequence for Wee1 (NM_009516.2,1381-1399).
cgtcgttcgctatttctct

SEQ ID NO: 517724 - DNA, 19 bp, Mus musculus
  siRNA target sequence for Wee1 (NM_009516.2,1424-1442).
cttatacagaacgaatact

SEQ ID NO: 517725 - DNA, 19 bp, Mus musculus
  siRNA target sequence for Wee1 (NM_009516.2,1492-1510).
gagctacttgactgaagta

SEQ ID NO: 517726 - DNA, 19 bp, Mus musculus
  siRNA target sequence for Wee1 (NM_009516.2,1494-1512).
gctacttgactgaagtaga

SEQ ID NO: 517727 - DNA, 19 bp, Mus musculus
  siRNA target sequence for Wee1 (NM_009516.2,1569-1587).
ctttggttcacatggatat

SEQ ID NO: 517728 - DNA, 19 bp, Mus musculus
  siRNA target sequence for Wee1 (NM_009516.2,1573-1591).
ggttcacatggatataaaa

SEQ ID NO: 517729 - DNA, 19 bp, Mus musculus
  siRNA target sequence for Wee1 (NM_009516.2,1577-1595).
cacatggatataaaaccta

SEQ ID NO: 517730 - DNA, 19 bp, Mus musculus
  siRNA target sequence for Wee1 (NM_009516.2,1582-1600).
ggatataaaacctagtaat

SEQ ID NO: 517731 - DNA, 19 bp, Mus musculus
  siRNA target sequence for Wee1 (NM_009516.2,1583-1601).
gatataaaacctagtaata

SEQ ID NO: 517732 - DNA, 19 bp, Mus musculus
  siRNA target sequence for Wee1 (NM_009516.2,1649-1667).
gatgaagatgactggatat

SEQ ID NO: 517733 - DNA, 19 bp, Mus musculus
  siRNA target sequence for Wee1 (NM_009516.2,1655-1673).
gatgactggatatccaata

SEQ ID NO: 517734 - DNA, 19 bp, Mus musculus
  siRNA target sequence for Wee1 (NM_009516.2,1660-1678).
ctggatatccaataaagtt

SEQ ID NO: 517735 - DNA, 19 bp, Mus musculus
  siRNA target sequence for Wee1 (NM_009516.2,1790-1808).
ctaccgaaagcagatattt

SEQ ID NO: 517736 - DNA, 19 bp, Mus musculus
  siRNA target sequence for Wee1 (NM_009516.2,1942-1960).
gctgagagtcatgattcat

SEQ ID NO: 517737 - DNA, 19 bp, Mus musculus
  siRNA target sequence for Wee1 (NM_009516.2,2011-2029).
gttgttgtctgcatctaga

SEQ ID NO: 517738 - DNA, 19 bp, Mus musculus
  siRNA target sequence for Wee1 (NM_009516.2,2034-2052).
gcgcagagcagttacgaat

SEQ ID NO: 517739 - DNA, 19 bp, Mus musculus
  siRNA target sequence for Wee1 (NM_009516.2,2035-2053).
cgcagagcagttacgaata

SEQ ID NO: 517740 - DNA, 19 bp, Mus musculus
  siRNA target sequence for Wee1 (NM_009516.2,2037-2055).
cagagcagttacgaataga

SEQ ID NO: 517741 - DNA, 19 bp, Mus musculus
  siRNA target sequence for Wee1 (NM_009516.2,2039-2057).
gagcagttacgaatagaat

SEQ ID NO: 517742 - DNA, 19 bp, Mus musculus
  siRNA target sequence for Wee1 (NM_009516.2,2042-2060).
cagttacgaatagaattga

SEQ ID NO: 517743 - DNA, 19 bp, Mus musculus
  siRNA target sequence for Wee1 (NM_009516.2,2110-2128).
ccaaatggcagccaaagtt

SEQ ID NO: 517744 - DNA, 19 bp, Mus musculus
  siRNA target sequence for Wee1 (NM_009516.2,2156-2174).
gatcggatggccactagat

SEQ ID NO: 517745 - DNA, 19 bp, Mus musculus
  siRNA target sequence for Wee1 (NM_009516.2,2172-2190).
gatccaccacccagagtaa

SEQ ID NO: 517746 - DNA, 19 bp, Mus musculus
  siRNA target sequence for Wee1 (NM_009516.2,2179-2197).
cacccagagtaatagaact

SEQ ID NO: 517747 - DNA, 19 bp, Mus musculus
  siRNA target sequence for Wee1 (NM_009516.2,2182-2200).
ccagagtaatagaacttct

SEQ ID NO: 517748 - DNA, 19 bp, Mus musculus
  siRNA target sequence for Wee1 (NM_009516.2,2196-2214).
cttctcgacttattggaaa

SEQ ID NO: 517749 - DNA, 19 bp, Mus musculus
  siRNA target sequence for Wee1 (NM_009516.2,2199-2217).
ctcgacttattggaaagaa

SEQ ID NO: 517750 - DNA, 19 bp, Mus musculus
  siRNA target sequence for Wee1 (NM_009516.2,2201-2219).
cgacttattggaaagaaaa

SEQ ID NO: 517751 - DNA, 19 bp, Mus musculus
  siRNA target sequence for Xab1 (NM_133756.2,440-458).
ctggcttcctcatttccaa

SEQ ID NO: 517752 - DNA, 19 bp, Mus musculus
  siRNA target sequence for Xab1 (NM_133756.2,756-774).
gcaccggcttcgatgaact

SEQ ID NO: 517753 - DNA, 19 bp, Mus musculus
  siRNA target sequence for Xab1 (NM_133756.2,802-820).
ggagtacgaaagggaatat

SEQ ID NO: 517754 - DNA, 19 bp, Mus musculus
  siRNA target sequence for Xab1 (NM_133756.2,805-823).
gtacgaaagggaatatcgt

SEQ ID NO: 517755 - DNA, 19 bp, Mus musculus
  siRNA target sequence for Xab1 (NM_133756.2,853-871).
ggcaaatgcccagagtaat

SEQ ID NO: 517756 - DNA, 19 bp, Mus musculus
  siRNA target sequence for Xab1 (NM_133756.2,890-908).
gagcgtcttcggaaggata

SEQ ID NO: 517757 - DNA, 19 bp, Mus musculus
  siRNA target sequence for Yme1l1 (NM_013771.2,178-196).
gcagcctcaggttacaatt

SEQ ID NO: 517758 - DNA, 19 bp, Mus musculus
  siRNA target sequence for Yme1l1 (NM_013771.2,218-236).
gctttccattcaccaaaaa

SEQ ID NO: 517759 - DNA, 19 bp, Mus musculus
  siRNA target sequence for Yme1l1 (NM_013771.2,312-330).
gtagtgagcctgtgcttaa

SEQ ID NO: 517760 - DNA, 19 bp, Mus musculus
  siRNA target sequence for Yme1l1 (NM_013771.2,337-355).
ggaccttggattatctgaa

SEQ ID NO: 517761 - DNA, 19 bp, Mus musculus
  siRNA target sequence for Yme1l1 (NM_013771.2,341-359).
cttggattatctgaattga

SEQ ID NO: 517762 - DNA, 19 bp, Mus musculus
  siRNA target sequence for Yme1l1 (NM_013771.2,430-448).
ctgttggcatacatctcat

SEQ ID NO: 517763 - DNA, 19 bp, Mus musculus
  siRNA target sequence for Yme1l1 (NM_013771.2,432-450).
gttggcatacatctcatat

SEQ ID NO: 517764 - DNA, 19 bp, Mus musculus
  siRNA target sequence for Yme1l1 (NM_013771.2,453-471).
cggcacagtccttttttga

SEQ ID NO: 517765 - DNA, 19 bp, Mus musculus
  siRNA target sequence for Yme1l1 (NM_013771.2,509-527).
cgttcctctagcttgtaca

SEQ ID NO: 517766 - DNA, 19 bp, Mus musculus
  siRNA target sequence for Yme1l1 (NM_013771.2,569-587).
cagtattttccagttttca

SEQ ID NO: 517767 - DNA, 19 bp, Mus musculus
  siRNA target sequence for Yme1l1 (NM_013771.2,590-608).
cagtctcggggtttcaaaa

SEQ ID NO: 517768 - DNA, 19 bp, Mus musculus
  siRNA target sequence for Yme1l1 (NM_013771.2,594-612).
ctcggggtttcaaaacgtt

SEQ ID NO: 517769 - DNA, 19 bp, Mus musculus
  siRNA target sequence for Yme1l1 (NM_013771.2,598-616).
gggtttcaaaacgttgaaa

SEQ ID NO: 517770 - DNA, 19 bp, Mus musculus
  siRNA target sequence for Yme1l1 (NM_013771.2,599-617).
ggtttcaaaacgttgaaat

SEQ ID NO: 517771 - DNA, 19 bp, Mus musculus
  siRNA target sequence for Yme1l1 (NM_013771.2,706-724).
ggacagaggaacagatctt

SEQ ID NO: 517772 - DNA, 19 bp, Mus musculus
  siRNA target sequence for Yme1l1 (NM_013771.2,725-743).
gagagtttggacaaactta

SEQ ID NO: 517773 - DNA, 19 bp, Mus musculus
  siRNA target sequence for Yme1l1 (NM_013771.2,733-751).
ggacaaacttatgaaaact

SEQ ID NO: 517774 - DNA, 19 bp, Mus musculus
  siRNA target sequence for Yme1l1 (NM_013771.2,734-752).
gacaaacttatgaaaacta

SEQ ID NO: 517775 - DNA, 19 bp, Mus musculus
  siRNA target sequence for Yme1l1 (NM_013771.2,767-785).
gctcaccaagatgcattta

SEQ ID NO: 517776 - DNA, 19 bp, Mus musculus
  siRNA target sequence for Yme1l1 (NM_013771.2,811-829).
caaagctcaagctcttaca

SEQ ID NO: 517777 - DNA, 19 bp, Mus musculus
  siRNA target sequence for Yme1l1 (NM_013771.2,832-850).
gaagaccaatgattcctta

SEQ ID NO: 517778 - DNA, 19 bp, Mus musculus
  siRNA target sequence for Yme1l1 (NM_013771.2,858-876).
ctcgtctgatcctctttgt

SEQ ID NO: 517779 - DNA, 19 bp, Mus musculus
  siRNA target sequence for Yme1l1 (NM_013771.2,890-908).
ggcatttatggactcttaa

SEQ ID NO: 517780 - DNA, 19 bp, Mus musculus
  siRNA target sequence for Yme1l1 (NM_013771.2,926-944).
gtgcgctttcggacaacta

SEQ ID NO: 517781 - DNA, 19 bp, Mus musculus
  siRNA target sequence for Yme1l1 (NM_013771.2,928-946).
gcgctttcggacaactaca

SEQ ID NO: 517782 - DNA, 19 bp, Mus musculus
  siRNA target sequence for Yme1l1 (NM_013771.2,986-1004).
gtcacttttgaacatgtta

SEQ ID NO: 517783 - DNA, 19 bp, Mus musculus
  siRNA target sequence for Yme1l1 (NM_013771.2,1074-1092).
ctgtgcttggaggtaaact

SEQ ID NO: 517784 - DNA, 19 bp, Mus musculus
  siRNA target sequence for Yme1l1 (NM_013771.2,1166-1184).
gctgacgtccctttttatt

SEQ ID NO: 517785 - DNA, 19 bp, Mus musculus
  siRNA target sequence for Yme1l1 (NM_013771.2,1237-1255).
gatcagaaatctttttaga

SEQ ID NO: 517786 - DNA, 19 bp, Mus musculus
  siRNA target sequence for Yme1l1 (NM_013771.2,1288-1306).
catcgatgaattagattct

SEQ ID NO: 517787 - DNA, 19 bp, Mus musculus
  siRNA target sequence for Yme1l1 (NM_013771.2,1291-1309).
cgatgaattagattctgtt

SEQ ID NO: 517788 - DNA, 19 bp, Mus musculus
  siRNA target sequence for Yme1l1 (NM_013771.2,1331-1349).
ccaatgcacccgtattcaa

SEQ ID NO: 517789 - DNA, 19 bp, Mus musculus
  siRNA target sequence for Yme1l1 (NM_013771.2,1432-1450).
cccagaggcattagataat

SEQ ID NO: 517790 - DNA, 19 bp, Mus musculus
  siRNA target sequence for Yme1l1 (NM_013771.2,1440-1458).
cattagataatgccttaat

SEQ ID NO: 517791 - DNA, 19 bp, Mus musculus
  siRNA target sequence for Yme1l1 (NM_013771.2,1460-1478).
cgtcctggtcgttttgata

SEQ ID NO: 517792 - DNA, 19 bp, Mus musculus
  siRNA target sequence for Yme1l1 (NM_013771.2,1461-1479).
gtcctggtcgttttgatat

SEQ ID NO: 517793 - DNA, 19 bp, Mus musculus
  siRNA target sequence for Yme1l1 (NM_013771.2,1464-1482).
ctggtcgttttgatatgca

SEQ ID NO: 517794 - DNA, 19 bp, Mus musculus
  siRNA target sequence for Yme1l1 (NM_013771.2,1469-1487).
cgttttgatatgcaagtta

SEQ ID NO: 517795 - DNA, 19 bp, Mus musculus
  siRNA target sequence for Yme1l1 (NM_013771.2,1505-1523).
gtgaagggtcgaactgaaa

SEQ ID NO: 517796 - DNA, 19 bp, Mus musculus
  siRNA target sequence for Yme1l1 (NM_013771.2,1507-1525).
gaagggtcgaactgaaatt

SEQ ID NO: 517797 - DNA, 19 bp, Mus musculus
  siRNA target sequence for Yme1l1 (NM_013771.2,1512-1530).
gtcgaactgaaattttgaa

SEQ ID NO: 517798 - DNA, 19 bp, Mus musculus
  siRNA target sequence for Yme1l1 (NM_013771.2,1533-1551).
ggtatctcaacaagataaa

SEQ ID NO: 517799 - DNA, 19 bp, Mus musculus
  siRNA target sequence for Yme1l1 (NM_013771.2,1608-1626).
gagcagagttggagaatct

SEQ ID NO: 517800 - DNA, 19 bp, Mus musculus
  siRNA target sequence for Yme1l1 (NM_013771.2,1688-1706).
ctagagttttccaaggata

SEQ ID NO: 517801 - DNA, 19 bp, Mus musculus
  siRNA target sequence for Yme1l1 (NM_013771.2,1728-1746).
gaagaagtgtggaaattga

SEQ ID NO: 517802 - DNA, 19 bp, Mus musculus
  siRNA target sequence for Yme1l1 (NM_013771.2,1731-1749).
gaagtgtggaaattgataa

SEQ ID NO: 517803 - DNA, 19 bp, Mus musculus
  siRNA target sequence for Yme1l1 (NM_013771.2,1734-1752).
gtgtggaaattgataacaa

SEQ ID NO: 517804 - DNA, 19 bp, Mus musculus
  siRNA target sequence for Yme1l1 (NM_013771.2,1761-1779).
ctataacagcctatcatga

SEQ ID NO: 517805 - DNA, 19 bp, Mus musculus
  siRNA target sequence for Yme1l1 (NM_013771.2,1846-1864).
gcctcgagggccaacactt

SEQ ID NO: 517806 - DNA, 19 bp, Mus musculus
  siRNA target sequence for Yme1l1 (NM_013771.2,1856-1874).
ccaacacttgggcatgtat

SEQ ID NO: 517807 - DNA, 19 bp, Mus musculus
  siRNA target sequence for Yme1l1 (NM_013771.2,1922-1940).
cttgcacagatggatgtta

SEQ ID NO: 517808 - DNA, 19 bp, Mus musculus
  siRNA target sequence for Yme1l1 (NM_013771.2,1926-1944).
cacagatggatgttagcat

SEQ ID NO: 517809 - DNA, 19 bp, Mus musculus
  siRNA target sequence for Yme1l1 (NM_013771.2,1953-1971).
gagtggcagaggaactcat

SEQ ID NO: 517810 - DNA, 19 bp, Mus musculus
  siRNA target sequence for Yme1l1 (NM_013771.2,1976-1994).
ggaactgatcatattacaa

SEQ ID NO: 517811 - DNA, 19 bp, Mus musculus
  siRNA target sequence for Yme1l1 (NM_013771.2,1998-2016).
gtgcttctagtgattttga

SEQ ID NO: 517812 - DNA, 19 bp, Mus musculus
  siRNA target sequence for Yme1l1 (NM_013771.2,2034-2052).
ctaagaggatggttaccaa

SEQ ID NO: 517813 - DNA, 19 bp, Mus musculus
  siRNA target sequence for Yme1l1 (NM_013771.2,2066-2084).
gaaaagcttggagttatga

SEQ ID NO: 517814 - DNA, 19 bp, Mus musculus
  siRNA target sequence for Yme1l1 (NM_013771.2,2193-2211).
cacatgcgaaagaacataa

SEQ ID NO: 517815 - DNA, 19 bp, Mus musculus
  siRNA target sequence for Yme1l1 (NM_013771.2,2233-2251).
gacctatgagactttggat

SEQ ID NO: 517816 - DNA, 19 bp, Mus musculus
  siRNA target sequence for Yme1l1 (NM_013771.2,2248-2266).
ggatgccaaagagattcaa

SEQ ID NO: 517817 - DNA, 19 bp, Mus musculus
  siRNA target sequence for Zap70 (NM_009539.2,107-125).
gcgcacctgccattcttct

SEQ ID NO: 517818 - DNA, 19 bp, Mus musculus
  siRNA target sequence for Zap70 (NM_009539.2,108-126).
cgcacctgccattcttcta

SEQ ID NO: 517819 - DNA, 19 bp, Mus musculus
  siRNA target sequence for Zap70 (NM_009539.2,270-288).
ccatcgagcgccaactcaa

SEQ ID NO: 517820 - DNA, 19 bp, Mus musculus
  siRNA target sequence for Zap70 (NM_009539.2,605-623).
gaggccgagcgcaaactct

SEQ ID NO: 517821 - DNA, 19 bp, Mus musculus
  siRNA target sequence for Zap70 (NM_009539.2,607-625).
ggccgagcgcaaactctat

SEQ ID NO: 517822 - DNA, 19 bp, Mus musculus
  siRNA target sequence for Zap70 (NM_009539.2,608-626).
gccgagcgcaaactctatt

SEQ ID NO: 517823 - DNA, 19 bp, Mus musculus
  siRNA target sequence for Zap70 (NM_009539.2,670-688).
ggagcagggcacatatgca

SEQ ID NO: 517824 - DNA, 19 bp, Mus musculus
  siRNA target sequence for Zap70 (NM_009539.2,760-778).
ccccgaaggcaccaagttt

SEQ ID NO: 517825 - DNA, 19 bp, Mus musculus
  siRNA target sequence for Zap70 (NM_009539.2,1476-1494).
cagcccgcaatgttctact

SEQ ID NO: 517826 - DNA, 19 bp, Mus musculus
  siRNA target sequence for Zap70 (NM_009539.2,1547-1565).
ggtgctgacgacagctatt

SEQ ID NO: 517827 - DNA, 19 bp, Mus musculus
  siRNA target sequence for Zap70 (NM_009539.2,1548-1566).
gtgctgacgacagctatta

SEQ ID NO: 517828 - DNA, 19 bp, Mus musculus
  siRNA target sequence for Zap70 (NM_009539.2,1550-1568).
gctgacgacagctattaca

SEQ ID NO: 517829 - DNA, 19 bp, Mus musculus
  siRNA target sequence for Zap70 (NM_009539.2,1607-1625).
gcgccagagtgcatcaact

SEQ ID NO: 517830 - DNA, 19 bp, Mus musculus
  siRNA target sequence for Zap70 (NM_009539.2,1608-1626).
cgccagagtgcatcaactt

SEQ ID NO: 517831 - DNA, 19 bp, Mus musculus
  siRNA target sequence for Zap70 (NM_009539.2,1609-1627).
gccagagtgcatcaacttt

SEQ ID NO: 517832 - DNA, 19 bp, Mus musculus
  siRNA target sequence for Zap70 (NM_009539.2,1777-1795).
gtgtcctcctgagatgtat

SEQ ID NO: 517833 - DNA, 19 bp, Mus musculus
  siRNA target sequence for Zap70 (NM_009539.2,1785-1803).
ctgagatgtatgcacttat

SEQ ID NO: 517834 - DNA, 19 bp, Mus musculus
  siRNA target sequence for Zap70 (NM_009539.2,1808-1826).
gactgctggatctacaagt

SEQ ID NO: 517835 - DNA, 19 bp, Mus musculus
  siRNA target sequence for Zap70 (NM_009539.2,1859-1877).
caacgtatgcggaactatt

SEQ ID NO: 517836 - DNA, 19 bp, Mus musculus
  siRNA target sequence for Zap70 (NM_009539.2,1862-1880).
cgtatgcggaactattact

SEQ ID NO: 517837 - DNA, 19 bp, Mus musculus
  siRNA target sequence for Zap70 (NM_009539.2,1863-1881).
gtatgcggaactattacta

SEQ ID NO: 517838 - DNA, 19 bp, Mus musculus
  siRNA target sequence for 9330170P05Rik (NM_144850.1,439-457).
gctcttaccagctagtgtt

SEQ ID NO: 517839 - DNA, 19 bp, Mus musculus
  siRNA target sequence for 9330170P05Rik (NM_144850.1,493-511).
gctggacaccacttaccaa

SEQ ID NO: 517840 - DNA, 19 bp, Mus musculus
  siRNA target sequence for 9330170P05Rik (NM_144850.1,626-644).
ccgagacagaaaataccat

SEQ ID NO: 517841 - DNA, 19 bp, Mus musculus
  siRNA target sequence for 9330170P05Rik (NM_144850.1,804-822).
gaccgagatgcccaattct

SEQ ID NO: 517842 - DNA, 19 bp, Mus musculus
  siRNA target sequence for 9330170P05Rik (NM_144850.1,807-825).
cgagatgcccaattctaca

SEQ ID NO: 517843 - DNA, 19 bp, Mus musculus
  siRNA target sequence for 9330170P05Rik (NM_144850.1,845-863).
cgagcctacaggaactcaa

SEQ ID NO: 517844 - DNA, 19 bp, Mus musculus
  siRNA target sequence for 9330170P05Rik (NM_144850.1,990-1008).
gaagagctgctgcatatca

SEQ ID NO: 517845 - DNA, 19 bp, Mus musculus
  siRNA target sequence for 9330170P05Rik (NM_144850.1,1011-1029).
gcggtggcacacctttcta

SEQ ID NO: 517846 - DNA, 19 bp, Mus musculus
  siRNA target sequence for 9330170P05Rik (NM_144850.1,1014-1032).
gtggcacacctttctaact

SEQ ID NO: 517847 - DNA, 19 bp, Mus musculus
  siRNA target sequence for 9330170P05Rik (NM_144850.1,1115-1133).
gggtacctcgtggtacatt

SEQ ID NO: 517848 - DNA, 19 bp, Mus musculus
  siRNA target sequence for 9330170P05Rik (NM_144850.1,1136-1154).
ctggaagggatctgtcaat

SEQ ID NO: 517849 - DNA, 19 bp, Mus musculus
  siRNA target sequence for 9330170P05Rik (NM_144850.1,1249-1267).
ccatcatccttcgagaaaa

SEQ ID NO: 517850 - DNA, 19 bp, Mus musculus
  siRNA target sequence for 9330170P05Rik (NM_144850.1,1250-1268).
catcatccttcgagaaaat

SEQ ID NO: 517851 - DNA, 19 bp, Mus musculus
  siRNA target sequence for 9330170P05Rik (NM_144850.1,1256-1274).
ccttcgagaaaataactgt

SEQ ID NO: 517852 - DNA, 19 bp, Mus musculus
  siRNA target sequence for 9330170P05Rik (NM_144850.1,1355-1373).
cggcaaagtggtcttagtt

SEQ ID NO: 517853 - DNA, 19 bp, Mus musculus
  siRNA target sequence for 9330170P05Rik (NM_144850.1,1357-1375).
gcaaagtggtcttagttct

SEQ ID NO: 517854 - DNA, 19 bp, Mus musculus
  siRNA target sequence for 9330170P05Rik (NM_144850.1,1450-1468).
gcaccccagagaaaatcct

SEQ ID NO: 517855 - DNA, 19 bp, Mus musculus
  siRNA target sequence for 9330170P05Rik (NM_144850.1,1451-1469).
caccccagagaaaatccta

SEQ ID NO: 517856 - DNA, 19 bp, Mus musculus
  siRNA target sequence for 9330170P05Rik (NM_144850.1,1698-1716).
cgatgggtggccctgtata

SEQ ID NO: 517857 - DNA, 19 bp, Mus musculus
  siRNA target sequence for 9330170P05Rik (NM_144850.1,1783-1801).
gagatgcccgacttagcaa

SEQ ID NO: 517858 - DNA, 19 bp, Mus musculus
  siRNA target sequence for 9330170P05Rik (NM_144850.1,1833-1851).
cgacaccacaggttggaaa

SEQ ID NO: 517859 - DNA, 19 bp, Mus musculus
  siRNA target sequence for 9330170P05Rik (NM_144850.1,2026-2044).
cctcggtgagagaagtgat

SEQ ID NO: 517860 - DNA, 19 bp, Mus musculus
  siRNA target sequence for 9330170P05Rik (NM_144850.1,2087-2105).
gttggtgaaggtcaattct

SEQ ID NO: 517861 - DNA, 19 bp, Mus musculus
  siRNA target sequence for 9330170P05Rik (NM_144850.1,2521-2539).
ctttctttgcggtcatgtt

SEQ ID NO: 517862 - DNA, 19 bp, Mus musculus
  siRNA target sequence for 9330170P05Rik (NM_144850.1,2582-2600).
ggagcgcctgccccataaa

SEQ ID NO: 517863 - DNA, 19 bp, Mus musculus
  siRNA target sequence for 9330170P05Rik (NM_144850.1,2585-2603).
gcgcctgccccataaagta

SEQ ID NO: 517864 - DNA, 19 bp, Mus musculus
  siRNA target sequence for Cnga3 (NM_009918.1,351-369).
ccgacccaactttcaataa

SEQ ID NO: 517865 - DNA, 19 bp, Mus musculus
  siRNA target sequence for Cnga3 (NM_009918.1,352-370).
cgacccaactttcaataaa

SEQ ID NO: 517866 - DNA, 19 bp, Mus musculus
  siRNA target sequence for Cnga3 (NM_009918.1,415-433).
gggtgtcacgcctcatcat

SEQ ID NO: 517867 - DNA, 19 bp, Mus musculus
  siRNA target sequence for Cnga3 (NM_009918.1,448-466).
gggcctccaggcacttaca

SEQ ID NO: 517868 - DNA, 19 bp, Mus musculus
  siRNA target sequence for Cnga3 (NM_009918.1,457-475).
ggcacttacacgatgaaga

SEQ ID NO: 517869 - DNA, 19 bp, Mus musculus
  siRNA target sequence for Cnga3 (NM_009918.1,491-509).
ctttttggatcgatttcat

SEQ ID NO: 517870 - DNA, 19 bp, Mus musculus
  siRNA target sequence for Cnga3 (NM_009918.1,530-548).
ctccacccgggaaagcaat

SEQ ID NO: 517871 - DNA, 19 bp, Mus musculus
  siRNA target sequence for Cnga3 (NM_009918.1,662-680).
cgcgctcccagtcttctat

SEQ ID NO: 517872 - DNA, 19 bp, Mus musculus
  siRNA target sequence for Cnga3 (NM_009918.1,663-681).
gcgctcccagtcttctata

SEQ ID NO: 517873 - DNA, 19 bp, Mus musculus
  siRNA target sequence for Cnga3 (NM_009918.1,700-718).
gcagggcctgttttgatga

SEQ ID NO: 517874 - DNA, 19 bp, Mus musculus
  siRNA target sequence for Cnga3 (NM_009918.1,868-886).
caaagaccttgcacttcaa

SEQ ID NO: 517875 - DNA, 19 bp, Mus musculus
  siRNA target sequence for Cnga3 (NM_009918.1,910-928).
ccacagacctggcttattt

SEQ ID NO: 517876 - DNA, 19 bp, Mus musculus
  siRNA target sequence for Cnga3 (NM_009918.1,915-933).
gacctggcttatttaaagt

SEQ ID NO: 517877 - DNA, 19 bp, Mus musculus
  siRNA target sequence for Cnga3 (NM_009918.1,982-1000).
ctcggctctttgaattctt

SEQ ID NO: 517878 - DNA, 19 bp, Mus musculus
  siRNA target sequence for Cnga3 (NM_009918.1,985-1003).
ggctctttgaattctttga

SEQ ID NO: 517879 - DNA, 19 bp, Mus musculus
  siRNA target sequence for Cnga3 (NM_009918.1,1047-1065).
gggaacttggtcctttaca

SEQ ID NO: 517880 - DNA, 19 bp, Mus musculus
  siRNA target sequence for Cnga3 (NM_009918.1,1084-1102).
ggaatgcctgcatctactt

SEQ ID NO: 517881 - DNA, 19 bp, Mus musculus
  siRNA target sequence for Cnga3 (NM_009918.1,1176-1194).
cgactctcccggaagtaca

SEQ ID NO: 517882 - DNA, 19 bp, Mus musculus
  siRNA target sequence for Cnga3 (NM_009918.1,1177-1195).
gactctcccggaagtacat

SEQ ID NO: 517883 - DNA, 19 bp, Mus musculus
  siRNA target sequence for Cnga3 (NM_009918.1,1179-1197).
ctctcccggaagtacattt

SEQ ID NO: 517884 - DNA, 19 bp, Mus musculus
  siRNA target sequence for Cnga3 (NM_009918.1,1184-1202).
ccggaagtacatttacagt

SEQ ID NO: 517885 - DNA, 19 bp, Mus musculus
  siRNA target sequence for Cnga3 (NM_009918.1,1295-1313).
ggtgggtatcctgatcttt

SEQ ID NO: 517886 - DNA, 19 bp, Mus musculus
  siRNA target sequence for Cnga3 (NM_009918.1,1328-1346).
caacgtaggctccatgatt

SEQ ID NO: 517887 - DNA, 19 bp, Mus musculus
  siRNA target sequence for Cnga3 (NM_009918.1,1446-1464).
gttatccggtggtttgact

SEQ ID NO: 517888 - DNA, 19 bp, Mus musculus
  siRNA target sequence for Cnga3 (NM_009918.1,1653-1671).
ggggactacatatgcaaaa

SEQ ID NO: 517889 - DNA, 19 bp, Mus musculus
  siRNA target sequence for Cnga3 (NM_009918.1,1784-1802).
gattagcatcttaaacatt

SEQ ID NO: 517890 - DNA, 19 bp, Mus musculus
  siRNA target sequence for Cnga3 (NM_009918.1,1934-1952).
ggaaaagggccgtcagatt

SEQ ID NO: 517891 - DNA, 19 bp, Mus musculus
  siRNA target sequence for Cnga3 (NM_009918.1,1953-1971).
ctgatgaaggacaacctaa

SEQ ID NO: 517892 - DNA, 19 bp, Mus musculus
  siRNA target sequence for Cnga3 (NM_009918.1,1955-1973).
gatgaaggacaacctaatt

SEQ ID NO: 517893 - DNA, 19 bp, Mus musculus
  siRNA target sequence for Hcn1 (NM_010408.1,483-501).
cgacaacaccgtggattat

SEQ ID NO: 517894 - DNA, 19 bp, Mus musculus
  siRNA target sequence for Hcn1 (NM_010408.1,486-504).
caacaccgtggattatttt

SEQ ID NO: 517895 - DNA, 19 bp, Mus musculus
  siRNA target sequence for Hcn1 (NM_010408.1,508-526).
cgtggcatccgatactgtt

SEQ ID NO: 517896 - DNA, 19 bp, Mus musculus
  siRNA target sequence for Hcn1 (NM_010408.1,509-527).
gtggcatccgatactgttt

SEQ ID NO: 517897 - DNA, 19 bp, Mus musculus
  siRNA target sequence for Hcn1 (NM_010408.1,532-550).
gttggacttaatcatgaat

SEQ ID NO: 517898 - DNA, 19 bp, Mus musculus
  siRNA target sequence for Hcn1 (NM_010408.1,555-573).
ggactgggactgtcaatga

SEQ ID NO: 517899 - DNA, 19 bp, Mus musculus
  siRNA target sequence for Hcn1 (NM_010408.1,556-574).
gactgggactgtcaatgaa

SEQ ID NO: 517900 - DNA, 19 bp, Mus musculus
  siRNA target sequence for Hcn1 (NM_010408.1,572-590).
gaagacagctcggaaatca

SEQ ID NO: 517901 - DNA, 19 bp, Mus musculus
  siRNA target sequence for Hcn1 (NM_010408.1,596-614).
gaccctaaagtgatcaaga

SEQ ID NO: 517902 - DNA, 19 bp, Mus musculus
  siRNA target sequence for Hcn1 (NM_010408.1,599-617).
cctaaagtgatcaagatga

SEQ ID NO: 517903 - DNA, 19 bp, Mus musculus
  siRNA target sequence for Hcn1 (NM_010408.1,600-618).
ctaaagtgatcaagatgaa

SEQ ID NO: 517904 - DNA, 19 bp, Mus musculus
  siRNA target sequence for Hcn1 (NM_010408.1,605-623).
gtgatcaagatgaattatt

SEQ ID NO: 517905 - DNA, 19 bp, Mus musculus
  siRNA target sequence for Hcn1 (NM_010408.1,696-714).
ggatggactcagaagttta

SEQ ID NO: 517906 - DNA, 19 bp, Mus musculus
  siRNA target sequence for Hcn1 (NM_010408.1,720-738).
cagccagagcacttcgtat

SEQ ID NO: 517907 - DNA, 19 bp, Mus musculus
  siRNA target sequence for Hcn1 (NM_010408.1,734-752).
cgtatcgtgaggtttacaa

SEQ ID NO: 517908 - DNA, 19 bp, Mus musculus
  siRNA target sequence for Hcn1 (NM_010408.1,735-753).
gtatcgtgaggtttacaaa

SEQ ID NO: 517909 - DNA, 19 bp, Mus musculus
  siRNA target sequence for Hcn1 (NM_010408.1,739-757).
cgtgaggtttacaaaaatt

SEQ ID NO: 517910 - DNA, 19 bp, Mus musculus
  siRNA target sequence for Hcn1 (NM_010408.1,760-778).
cagtctcttgcggttatta

SEQ ID NO: 517911 - DNA, 19 bp, Mus musculus
  siRNA target sequence for Hcn1 (NM_010408.1,779-797).
cgcctttcaaggttaatca

SEQ ID NO: 517912 - DNA, 19 bp, Mus musculus
  siRNA target sequence for Hcn1 (NM_010408.1,789-807).
ggttaatcagatacataca

SEQ ID NO: 517913 - DNA, 19 bp, Mus musculus
  siRNA target sequence for Hcn1 (NM_010408.1,957-975).
gctgggtttctctgaatga

SEQ ID NO: 517914 - DNA, 19 bp, Mus musculus
  siRNA target sequence for Hcn1 (NM_010408.1,960-978).
gggtttctctgaatgaaat

SEQ ID NO: 517915 - DNA, 19 bp, Mus musculus
  siRNA target sequence for Hcn1 (NM_010408.1,993-1011).
ggggaaaacaatattccta

SEQ ID NO: 517916 - DNA, 19 bp, Mus musculus
  siRNA target sequence for Hcn1 (NM_010408.1,1120-1138).
cacctgctacgcaatgttt

SEQ ID NO: 517917 - DNA, 19 bp, Mus musculus
  siRNA target sequence for Hcn1 (NM_010408.1,1122-1140).
cctgctacgcaatgtttgt

SEQ ID NO: 517918 - DNA, 19 bp, Mus musculus
  siRNA target sequence for Hcn1 (NM_010408.1,1123-1141).
ctgctacgcaatgtttgtt

SEQ ID NO: 517919 - DNA, 19 bp, Mus musculus
  siRNA target sequence for Hcn1 (NM_010408.1,1179-1197).
caaggaggcagtatcaaga

SEQ ID NO: 517920 - DNA, 19 bp, Mus musculus
  siRNA target sequence for Hcn1 (NM_010408.1,1185-1203).
ggcagtatcaagagaagta

SEQ ID NO: 517921 - DNA, 19 bp, Mus musculus
  siRNA target sequence for Hcn1 (NM_010408.1,1186-1204).
gcagtatcaagagaagtat

SEQ ID NO: 517922 - DNA, 19 bp, Mus musculus
  siRNA target sequence for Hcn1 (NM_010408.1,1294-1312).
caagatcttcgatgaagaa

SEQ ID NO: 517923 - DNA, 19 bp, Mus musculus
  siRNA target sequence for Hcn1 (NM_010408.1,1297-1315).
gatcttcgatgaagaaaat

SEQ ID NO: 517924 - DNA, 19 bp, Mus musculus
  siRNA target sequence for Hcn1 (NM_010408.1,1300-1318).
cttcgatgaagaaaatatt

SEQ ID NO: 517925 - DNA, 19 bp, Mus musculus
  siRNA target sequence for Hcn1 (NM_010408.1,1338-1356).
ctctgagagaggaaatagt

SEQ ID NO: 517926 - DNA, 19 bp, Mus musculus
  siRNA target sequence for Hcn1 (NM_010408.1,1340-1358).
ctgagagaggaaatagtca

SEQ ID NO: 517927 - DNA, 19 bp, Mus musculus
  siRNA target sequence for Hcn1 (NM_010408.1,1349-1367).
gaaatagtcaacttcaact

SEQ ID NO: 517928 - DNA, 19 bp, Mus musculus
  siRNA target sequence for Hcn1 (NM_010408.1,1401-1419).
ctaacgccgatcccaattt

SEQ ID NO: 517929 - DNA, 19 bp, Mus musculus
  siRNA target sequence for Hcn1 (NM_010408.1,1456-1474).
gttccagcccggagactat

SEQ ID NO: 517930 - DNA, 19 bp, Mus musculus
  siRNA target sequence for Hcn1 (NM_010408.1,1460-1478).
cagcccggagactatatca

SEQ ID NO: 517931 - DNA, 19 bp, Mus musculus
  siRNA target sequence for Hcn1 (NM_010408.1,1462-1480).
gcccggagactatatcatt

SEQ ID NO: 517932 - DNA, 19 bp, Mus musculus
  siRNA target sequence for Hcn1 (NM_010408.1,1523-1541).
ggtgttgctggcgttatca

SEQ ID NO: 517933 - DNA, 19 bp, Mus musculus
  siRNA target sequence for Hcn1 (NM_010408.1,1565-1583).
ctgacagatggctcttact

SEQ ID NO: 517934 - DNA, 19 bp, Mus musculus
  siRNA target sequence for Hcn1 (NM_010408.1,1576-1594).
ctcttacttcggagagata

SEQ ID NO: 517935 - DNA, 19 bp, Mus musculus
  siRNA target sequence for Hcn1 (NM_010408.1,1626-1644).
gtgtccgagctgataccta

SEQ ID NO: 517936 - DNA, 19 bp, Mus musculus
  siRNA target sequence for Hcn1 (NM_010408.1,1659-1677).
ccctttcggtggacaattt

SEQ ID NO: 517937 - DNA, 19 bp, Mus musculus
  siRNA target sequence for Hcn1 (NM_010408.1,1685-1703).
gtcttggaggaatatccaa

SEQ ID NO: 517938 - DNA, 19 bp, Mus musculus
  siRNA target sequence for Hcn1 (NM_010408.1,1744-1762).
cgatcggataggcaagaaa

SEQ ID NO: 517939 - DNA, 19 bp, Mus musculus
  siRNA target sequence for Hcn1 (NM_010408.1,1786-1804).
ccagaaggatctaaacact

SEQ ID NO: 517940 - DNA, 19 bp, Mus musculus
  siRNA target sequence for Hcn1 (NM_010408.1,1860-1878).
gagagatggtacaagctat

SEQ ID NO: 517941 - DNA, 19 bp, Mus musculus
  siRNA target sequence for Hcn1 (NM_010408.1,1874-1892).
gctatccctccaatcaact

SEQ ID NO: 517942 - DNA, 19 bp, Mus musculus
  siRNA target sequence for Hcn1 (NM_010408.1,1875-1893).
ctatccctccaatcaacta

SEQ ID NO: 517943 - DNA, 19 bp, Mus musculus
  siRNA target sequence for Hcn1 (NM_010408.1,1884-1902).
caatcaactatcctcaaat

SEQ ID NO: 517944 - DNA, 19 bp, Mus musculus
  siRNA target sequence for Hcn1 (NM_010408.1,1910-1928).
ctcaactgcacatcttcaa

SEQ ID NO: 517945 - DNA, 19 bp, Mus musculus
  siRNA target sequence for Hcn1 (NM_010408.1,2051-2069).
ctttcaccctgctcctata

SEQ ID NO: 517946 - DNA, 19 bp, Mus musculus
  siRNA target sequence for Hcn1 (NM_010408.1,2109-2127).
ccacacgaactttccatta

SEQ ID NO: 517947 - DNA, 19 bp, Mus musculus
  siRNA target sequence for Hcn1 (NM_010408.1,2110-2128).
cacacgaactttccattat

SEQ ID NO: 517948 - DNA, 19 bp, Mus musculus
  siRNA target sequence for Hcn1 (NM_010408.1,2346-2364).
gctccacaccgaaaaatga

SEQ ID NO: 517949 - DNA, 19 bp, Mus musculus
  siRNA target sequence for Hcn1 (NM_010408.1,2347-2365).
ctccacaccgaaaaatgaa

SEQ ID NO: 517950 - DNA, 19 bp, Mus musculus
  siRNA target sequence for Hcn2 (NM_008226.1,327-345).
cccaaggtttcgttctcat

SEQ ID NO: 517951 - DNA, 19 bp, Mus musculus
  siRNA target sequence for Hcn2 (NM_008226.1,623-641).
gggaaatctcattatcatt

SEQ ID NO: 517952 - DNA, 19 bp, Mus musculus
  siRNA target sequence for Hcn2 (NM_008226.1,699-717).
gtggtctcggacactttct

SEQ ID NO: 517953 - DNA, 19 bp, Mus musculus
  siRNA target sequence for Hcn2 (NM_008226.1,743-761).
ccgcaccggcattgttatt

SEQ ID NO: 517954 - DNA, 19 bp, Mus musculus
  siRNA target sequence for Hcn2 (NM_008226.1,745-763).
gcaccggcattgttattga

SEQ ID NO: 517955 - DNA, 19 bp, Mus musculus
  siRNA target sequence for Hcn2 (NM_008226.1,976-994).
cacggctcatccgatatat

SEQ ID NO: 517956 - DNA, 19 bp, Mus musculus
  siRNA target sequence for Hcn2 (NM_008226.1,979-997).
ggctcatccgatatatcca

SEQ ID NO: 517957 - DNA, 19 bp, Mus musculus
  siRNA target sequence for Hcn2 (NM_008226.1,1041-1059).
gcagtgatgcgcatctgta

SEQ ID NO: 517958 - DNA, 19 bp, Mus musculus
  siRNA target sequence for Hcn2 (NM_008226.1,1530-1548).
ctgcgtgaggagattgtga

SEQ ID NO: 517959 - DNA, 19 bp, Mus musculus
  siRNA target sequence for Hcn2 (NM_008226.1,1534-1552).
gtgaggagattgtgaactt

SEQ ID NO: 517960 - DNA, 19 bp, Mus musculus
  siRNA target sequence for Hcn2 (NM_008226.1,1622-1640).
gctgacaaagctcaaattt

SEQ ID NO: 517961 - DNA, 19 bp, Mus musculus
  siRNA target sequence for Hcn2 (NM_008226.1,2607-2625).
cgcctctcttccaacttgt

SEQ ID NO: 517962 - DNA, 19 bp, Mus musculus
  siRNA target sequence for Hcn3 (NM_008227.1,255-273).
cagccgacggtcaacaagt

SEQ ID NO: 517963 - DNA, 19 bp, Mus musculus
  siRNA target sequence for Hcn3 (NM_008227.1,258-276).
ccgacggtcaacaagttct

SEQ ID NO: 517964 - DNA, 19 bp, Mus musculus
  siRNA target sequence for Hcn3 (NM_008227.1,295-313).
gccacaaagcagtagaaat

SEQ ID NO: 517965 - DNA, 19 bp, Mus musculus
  siRNA target sequence for Hcn3 (NM_008227.1,373-391).
ggttttactgggatctcat

SEQ ID NO: 517966 - DNA, 19 bp, Mus musculus
  siRNA target sequence for Hcn3 (NM_008227.1,407-425).
ggtggggaacctcatagtt

SEQ ID NO: 517967 - DNA, 19 bp, Mus musculus
  siRNA target sequence for Hcn3 (NM_008227.1,426-444).
ctgcctgtgggtatcactt

SEQ ID NO: 517968 - DNA, 19 bp, Mus musculus
  siRNA target sequence for Hcn3 (NM_008227.1,610-628).
ggttcctggttgatctgat

SEQ ID NO: 517969 - DNA, 19 bp, Mus musculus
  siRNA target sequence for Hcn3 (NM_008227.1,668-686).
gctggagccacgactagat

SEQ ID NO: 517970 - DNA, 19 bp, Mus musculus
  siRNA target sequence for Hcn3 (NM_008227.1,711-729).
gccctgcgcatcgttagat

SEQ ID NO: 517971 - DNA, 19 bp, Mus musculus
  siRNA target sequence for Hcn3 (NM_008227.1,712-730).
ccctgcgcatcgttagatt

SEQ ID NO: 517972 - DNA, 19 bp, Mus musculus
  siRNA target sequence for Hcn3 (NM_008227.1,714-732).
ctgcgcatcgttagattca

SEQ ID NO: 517973 - DNA, 19 bp, Mus musculus
  siRNA target sequence for Hcn3 (NM_008227.1,770-788).
ccgcctcatccgctacata

SEQ ID NO: 517974 - DNA, 19 bp, Mus musculus
  siRNA target sequence for Hcn3 (NM_008227.1,772-790).
gcctcatccgctacataca

SEQ ID NO: 517975 - DNA, 19 bp, Mus musculus
  siRNA target sequence for Hcn3 (NM_008227.1,791-809).
ccagtgggaggagatcttt

SEQ ID NO: 517976 - DNA, 19 bp, Mus musculus
  siRNA target sequence for Hcn3 (NM_008227.1,834-852).
gcagtggttcgcatcttca

SEQ ID NO: 517977 - DNA, 19 bp, Mus musculus
  siRNA target sequence for Hcn3 (NM_008227.1,835-853).
cagtggttcgcatcttcaa

SEQ ID NO: 517978 - DNA, 19 bp, Mus musculus
  siRNA target sequence for Hcn3 (NM_008227.1,1323-1341).
cttcgggaggagattatta

SEQ ID NO: 517979 - DNA, 19 bp, Mus musculus
  siRNA target sequence for Hcn3 (NM_008227.1,1326-1344).
cgggaggagattattaact

SEQ ID NO: 517980 - DNA, 19 bp, Mus musculus
  siRNA target sequence for Hcn3 (NM_008227.1,1550-1568).
cactgatggatcctacttt

SEQ ID NO: 517981 - DNA, 19 bp, Mus musculus
  siRNA target sequence for Hcn3 (NM_008227.1,1611-1629).
gtaagggctgacacctatt

SEQ ID NO: 517982 - DNA, 19 bp, Mus musculus
  siRNA target sequence for Hcn3 (NM_008227.1,1728-1746).
cggcgcatcggcaaaaaga

SEQ ID NO: 517983 - DNA, 19 bp, Mus musculus
  siRNA target sequence for Hcn3 (NM_008227.1,1729-1747).
ggcgcatcggcaaaaagaa

SEQ ID NO: 517984 - DNA, 19 bp, Mus musculus
  siRNA target sequence for Hcn3 (NM_008227.1,1730-1748).
gcgcatcggcaaaaagaat

SEQ ID NO: 517985 - DNA, 19 bp, Mus musculus
  siRNA target sequence for Hcn3 (NM_008227.1,1731-1749).
cgcatcggcaaaaagaatt

SEQ ID NO: 517986 - DNA, 19 bp, Mus musculus
  siRNA target sequence for Hcn3 (NM_008227.1,1798-1816).
gcgtcatggagcagcattt

SEQ ID NO: 517987 - DNA, 19 bp, Mus musculus
  siRNA target sequence for Hcn3 (NM_008227.1,2173-2191).
ggcgttcccaggtatctct

SEQ ID NO: 517988 - DNA, 19 bp, Mus musculus
  siRNA target sequence for Hcn3 (NM_008227.1,2418-2436).
caaatttctgccaacatgt

SEQ ID NO: 517989 - DNA, 19 bp, Mus musculus
  siRNA target sequence for Prkar1b (NM_008923.2,127-145).
gatgtacgtgcagaaacat

SEQ ID NO: 517990 - DNA, 19 bp, Mus musculus
  siRNA target sequence for Prkar1b (NM_008923.2,218-236).
ctccgggagcactttgaga

SEQ ID NO: 517991 - DNA, 19 bp, Mus musculus
  siRNA target sequence for Prkar1b (NM_008923.2,266-284).
ctggctcggcagaagtcaa

SEQ ID NO: 517992 - DNA, 19 bp, Mus musculus
  siRNA target sequence for Prkar1b (NM_008923.2,269-287).
gctcggcagaagtcaaact

SEQ ID NO: 517993 - DNA, 19 bp, Mus musculus
  siRNA target sequence for Prkar1b (NM_008923.2,366-384).
gtgtgagtgctgaagtcta

SEQ ID NO: 517994 - DNA, 19 bp, Mus musculus
  siRNA target sequence for Prkar1b (NM_008923.2,419-437).
gtcattcccaaggactata

SEQ ID NO: 517995 - DNA, 19 bp, Mus musculus
  siRNA target sequence for Prkar1b (NM_008923.2,790-808).
gaggaaacgcaagatgtat

SEQ ID NO: 517996 - DNA, 19 bp, Mus musculus
  siRNA target sequence for Prkar1b (NM_008923.2,1102-1120).
cctcaagtgtgtgaagtta

SEQ ID NO: 517997 - DNA, 19 bp, Mus musculus
  siRNA target sequence for Prkar1b (NM_008923.2,1184-1202).
cgttacaacagcttcatct

SEQ ID NO: 517998 - DNA, 19 bp, Mus musculus
  siRNA target sequence for Prkar1b (NM_008923.2,1194-1212).
gcttcatctccctaactgt

SEQ ID NO: 517999 - DNA, 19 bp, Mus musculus
  siRNA target sequence for Prkar2a (NM_008924.1,573-591).
ccggttcctagcaaattta

SEQ ID NO: 518000 - DNA, 19 bp, Mus musculus
  siRNA target sequence for Prkar2a (NM_008924.1,576-594).
gttcctagcaaatttacta

SEQ ID NO: 518001 - DNA, 19 bp, Mus musculus
  siRNA target sequence for Prkar2a (NM_008924.1,606-624).
gtctgtgcagaaacgttta

SEQ ID NO: 518002 - DNA, 19 bp, Mus musculus
  siRNA target sequence for Prkar2a (NM_008924.1,619-637).
cgtttaaccctgatgaaga

SEQ ID NO: 518003 - DNA, 19 bp, Mus musculus
  siRNA target sequence for Prkar2a (NM_008924.1,620-638).
gtttaaccctgatgaagaa

SEQ ID NO: 518004 - DNA, 19 bp, Mus musculus
  siRNA target sequence for Prkar2a (NM_008924.1,659-677).
ggtggttcatcccaaaact

SEQ ID NO: 518005 - DNA, 19 bp, Mus musculus
  siRNA target sequence for Prkar2a (NM_008924.1,662-680).
ggttcatcccaaaactgat

SEQ ID NO: 518006 - DNA, 19 bp, Mus musculus
  siRNA target sequence for Prkar2a (NM_008924.1,701-719).
ggaagcttgtaaagatatt

SEQ ID NO: 518007 - DNA, 19 bp, Mus musculus
  siRNA target sequence for Prkar2a (NM_008924.1,793-811).
ctgacgagcatgtcattga

SEQ ID NO: 518008 - DNA, 19 bp, Mus musculus
  siRNA target sequence for Prkar2a (NM_008924.1,817-835).
gcgacgacggggacaactt

SEQ ID NO: 518009 - DNA, 19 bp, Mus musculus
  siRNA target sequence for Prkar2a (NM_008924.1,818-836).
cgacgacggggacaacttt

SEQ ID NO: 518010 - DNA, 19 bp, Mus musculus
  siRNA target sequence for Prkar2a (NM_008924.1,821-839).
cgacggggacaacttttat

SEQ ID NO: 518011 - DNA, 19 bp, Mus musculus
  siRNA target sequence for Prkar2a (NM_008924.1,842-860).
catagaacggggaacctat

SEQ ID NO: 518012 - DNA, 19 bp, Mus musculus
  siRNA target sequence for Prkar2a (NM_008924.1,846-864).
gaacggggaacctatgaca

SEQ ID NO: 518013 - DNA, 19 bp, Mus musculus
  siRNA target sequence for Prkar2a (NM_008924.1,849-867).
cggggaacctatgacattt

SEQ ID NO: 518014 - DNA, 19 bp, Mus musculus
  siRNA target sequence for Prkar2a (NM_008924.1,851-869).
gggaacctatgacatttta

SEQ ID NO: 518015 - DNA, 19 bp, Mus musculus
  siRNA target sequence for Prkar2a (NM_008924.1,863-881).
cattttagtaacgaaagat

SEQ ID NO: 518016 - DNA, 19 bp, Mus musculus
  siRNA target sequence for Prkar2a (NM_008924.1,892-910).
gttctgttggtcagtatga

SEQ ID NO: 518017 - DNA, 19 bp, Mus musculus
  siRNA target sequence for Prkar2a (NM_008924.1,895-913).
ctgttggtcagtatgacaa

SEQ ID NO: 518018 - DNA, 19 bp, Mus musculus
  siRNA target sequence for Prkar2a (NM_008924.1,928-946).
gagaactagctctgatgta

SEQ ID NO: 518019 - DNA, 19 bp, Mus musculus
  siRNA target sequence for Prkar2a (NM_008924.1,933-951).
ctagctctgatgtacaata

SEQ ID NO: 518020 - DNA, 19 bp, Mus musculus
  siRNA target sequence for Prkar2a (NM_008924.1,1004-1022).
ggaccgggtgacttttaga

SEQ ID NO: 518021 - DNA, 19 bp, Mus musculus
  siRNA target sequence for Prkar2a (NM_008924.1,1005-1023).
gaccgggtgacttttagaa

SEQ ID NO: 518022 - DNA, 19 bp, Mus musculus
  siRNA target sequence for Prkar2a (NM_008924.1,1077-1095).
gagtctgttccactcttta

SEQ ID NO: 518023 - DNA, 19 bp, Mus musculus
  siRNA target sequence for Prkar2a (NM_008924.1,1109-1127).
gtcagaacgaatgaagatt

SEQ ID NO: 518024 - DNA, 19 bp, Mus musculus
  siRNA target sequence for Prkar2a (NM_008924.1,1131-1149).
gatgtgatcggggaaaaga

SEQ ID NO: 518025 - DNA, 19 bp, Mus musculus
  siRNA target sequence for Prkar2a (NM_008924.1,1192-1210).
ccgacagcttctatatcat

SEQ ID NO: 518026 - DNA, 19 bp, Mus musculus
  siRNA target sequence for Prkar2a (NM_008924.1,1193-1211).
cgacagcttctatatcata

SEQ ID NO: 518027 - DNA, 19 bp, Mus musculus
  siRNA target sequence for Prkar2a (NM_008924.1,1297-1315).
gccataaggggcagtactt

SEQ ID NO: 518028 - DNA, 19 bp, Mus musculus
  siRNA target sequence for Prkar2a (NM_008924.1,1364-1382).
cgcggttggagatgtcaaa

SEQ ID NO: 518029 - DNA, 19 bp, Mus musculus
  siRNA target sequence for Prkar2a (NM_008924.1,1374-1392).
gatgtcaaatgcttagtta

SEQ ID NO: 518030 - DNA, 19 bp, Mus musculus
  siRNA target sequence for Prkar2a (NM_008924.1,1384-1402).
gcttagttatggatgttca

SEQ ID NO: 518031 - DNA, 19 bp, Mus musculus
  siRNA target sequence for Prkar2a (NM_008924.1,1385-1403).
cttagttatggatgttcaa

SEQ ID NO: 518032 - DNA, 19 bp, Mus musculus
  siRNA target sequence for Prkar2a (NM_008924.1,1447-1465).
ggaacatctcacattacga

SEQ ID NO: 518033 - DNA, 19 bp, Mus musculus
  siRNA target sequence for Prkar2a (NM_008924.1,1448-1466).
gaacatctcacattacgaa

SEQ ID NO: 518034 - DNA, 19 bp, Mus musculus
  siRNA target sequence for 1110031N17Rik (NM_026817.1,191-209).
gtgggcaagtccaaactca

SEQ ID NO: 518035 - DNA, 19 bp, Mus musculus
  siRNA target sequence for 1110031N17Rik (NM_026817.1,244-262).
gcaactgtccacatatgct

SEQ ID NO: 518036 - DNA, 19 bp, Mus musculus
  siRNA target sequence for 1110031N17Rik (NM_026817.1,380-398).
cacgcctgcatcatggtat

SEQ ID NO: 518037 - DNA, 19 bp, Mus musculus
  siRNA target sequence for 1110031N17Rik (NM_026817.1,385-403).
ctgcatcatggtatttgat

SEQ ID NO: 518038 - DNA, 19 bp, Mus musculus
  siRNA target sequence for 1110031N17Rik (NM_026817.1,411-429).
ggaaaatcacctataagaa

SEQ ID NO: 518039 - DNA, 19 bp, Mus musculus
  siRNA target sequence for 1110031N17Rik (NM_026817.1,487-505).
ggtggccaataaaattgat

SEQ ID NO: 518040 - DNA, 19 bp, Mus musculus
  siRNA target sequence for 1110031N17Rik (NM_026817.1,520-538).
gcacctgggtgacagtaat

SEQ ID NO: 518041 - DNA, 19 bp, Mus musculus
  siRNA target sequence for 1110031N17Rik (NM_026817.1,521-539).
cacctgggtgacagtaatt

SEQ ID NO: 518042 - DNA, 19 bp, Mus musculus
  siRNA target sequence for 1110031N17Rik (NM_026817.1,524-542).
ctgggtgacagtaattcct

SEQ ID NO: 518043 - DNA, 19 bp, Mus musculus
  siRNA target sequence for 1110031N17Rik (NM_026817.1,549-567).
caagcaccacacatttcct

SEQ ID NO: 518044 - DNA, 19 bp, Mus musculus
  siRNA target sequence for 1110031N17Rik (NM_026817.1,577-595).
gaatggcccacctttgttt

SEQ ID NO: 518045 - DNA, 19 bp, Mus musculus
  siRNA target sequence for 1110031N17Rik (NM_026817.1,602-620).
ccaagatgctccctttcta

SEQ ID NO: 518046 - DNA, 19 bp, Mus musculus
  siRNA target sequence for 1110031N17Rik (NM_026817.1,653-671).
caagacacagacccatatt

SEQ ID NO: 518047 - DNA, 19 bp, Mus musculus
  siRNA target sequence for 1110031N17Rik (NM_026817.1,852-870).
ctgatggtaccaatgttgt

SEQ ID NO: 518048 - DNA, 19 bp, Mus musculus
  siRNA target sequence for 1110033P22Rik (NM_026823.1,264-282).
cgcgtcaggacagttcaat

SEQ ID NO: 518049 - DNA, 19 bp, Mus musculus
  siRNA target sequence for 1110033P22Rik (NM_026823.1,406-424).
ggagtgagcgccattgtgt

SEQ ID NO: 518050 - DNA, 19 bp, Mus musculus
  siRNA target sequence for 1110033P22Rik (NM_026823.1,409-427).
gtgagcgccattgtgtata

SEQ ID NO: 518051 - DNA, 19 bp, Mus musculus
  siRNA target sequence for 1110033P22Rik (NM_026823.1,413-431).
gcgccattgtgtatatggt

SEQ ID NO: 518052 - DNA, 19 bp, Mus musculus
  siRNA target sequence for 1110033P22Rik (NM_026823.1,453-471).
gatcgaggcctccaagaat

SEQ ID NO: 518053 - DNA, 19 bp, Mus musculus
  siRNA target sequence for 1110033P22Rik (NM_026823.1,515-533).
cggtcttagtccttggtaa

SEQ ID NO: 518054 - DNA, 19 bp, Mus musculus
  siRNA target sequence for 1110033P22Rik (NM_026823.1,548-566).
ccggagcgctagatgagaa

SEQ ID NO: 518055 - DNA, 19 bp, Mus musculus
  siRNA target sequence for 1110036H21Rik (NM_025404.1,253-271).
gtcgtcattgggttggatt

SEQ ID NO: 518056 - DNA, 19 bp, Mus musculus
  siRNA target sequence for 1300011P19Rik (NM_026130.1,171-189).
gtcaacgcgttgattcgtt

SEQ ID NO: 518057 - DNA, 19 bp, Mus musculus
  siRNA target sequence for 1300011P19Rik (NM_026130.1,747-765).
ggcaagggtctggacaaat

SEQ ID NO: 518058 - DNA, 19 bp, Mus musculus
  siRNA target sequence for 1300011P19Rik (NM_026130.1,756-774).
ctggacaaatccagtaaat

SEQ ID NO: 518059 - DNA, 19 bp, Mus musculus
  siRNA target sequence for 1300011P19Rik (NM_026130.1,988-1006).
gggccactcaaaataccaa

SEQ ID NO: 518060 - DNA, 19 bp, Mus musculus
  siRNA target sequence for 1300011P19Rik (NM_026130.1,1112-1130).
gatgcgtgatcatctcatt

SEQ ID NO: 518061 - DNA, 19 bp, Mus musculus
  siRNA target sequence for 1300011P19Rik (NM_026130.1,1116-1134).
cgtgatcatctcattgcta

SEQ ID NO: 518062 - DNA, 19 bp, Mus musculus
  siRNA target sequence for 1300011P19Rik (NM_026130.1,1117-1135).
gtgatcatctcattgctaa

SEQ ID NO: 518063 - DNA, 19 bp, Mus musculus
  siRNA target sequence for 1300011P19Rik (NM_026130.1,1200-1218).
gtgatggggacatttagca

SEQ ID NO: 518064 - DNA, 19 bp, Mus musculus
  siRNA target sequence for 1300011P19Rik (NM_026130.1,1428-1446).
ctcattgctgcctgtgata

SEQ ID NO: 518065 - DNA, 19 bp, Mus musculus
  siRNA target sequence for 1300011P19Rik (NM_026130.1,1531-1549).
gtacgatggtgcagttgtt

SEQ ID NO: 518066 - DNA, 19 bp, Mus musculus
  siRNA target sequence for 1300011P19Rik (NM_026130.1,1538-1556).
ggtgcagttgtttgaaaaa

SEQ ID NO: 518067 - DNA, 19 bp, Mus musculus
  siRNA target sequence for 1300011P19Rik (NM_026130.1,1645-1663).
ctggccgcatgcaagacaa

SEQ ID NO: 518068 - DNA, 19 bp, Mus musculus
  siRNA target sequence for 1300011P19Rik (NM_026130.1,1680-1698).
gccctggccaaactcatta

SEQ ID NO: 518069 - DNA, 19 bp, Mus musculus
  siRNA target sequence for 1300011P19Rik (NM_026130.1,1761-1779).
gatcaactggtcaagttca

SEQ ID NO: 518070 - DNA, 19 bp, Mus musculus
  siRNA target sequence for 1300011P19Rik (NM_026130.1,1811-1829).
gacacctcggctcattgat

SEQ ID NO: 518071 - DNA, 19 bp, Mus musculus
  siRNA target sequence for 1300011P19Rik (NM_026130.1,1844-1862).
caaatttgacaccattgat

SEQ ID NO: 518072 - DNA, 19 bp, Mus musculus
  siRNA target sequence for 1300011P19Rik (NM_026130.1,1872-1890).
ggagctgctatctctatga

SEQ ID NO: 518073 - DNA, 19 bp, Mus musculus
  siRNA target sequence for 1300011P19Rik (NM_026130.1,1875-1893).
gctgctatctctatgacat

SEQ ID NO: 518074 - DNA, 19 bp, Mus musculus
  siRNA target sequence for 1300011P19Rik (NM_026130.1,1876-1894).
ctgctatctctatgacata

SEQ ID NO: 518075 - DNA, 19 bp, Mus musculus
  siRNA target sequence for 1300011P19Rik (NM_026130.1,1903-1921).
gcaaacccatcgtctttgt

SEQ ID NO: 518076 - DNA, 19 bp, Mus musculus
  siRNA target sequence for 1300011P19Rik (NM_026130.1,1942-1960).
gtgacctacgcagtcttaa

SEQ ID NO: 518077 - DNA, 19 bp, Mus musculus
  siRNA target sequence for 1700093E07Rik (NM_133685.1,211-229).
gttttgtccaggatcactt

SEQ ID NO: 518078 - DNA, 19 bp, Mus musculus
  siRNA target sequence for 1700093E07Rik (NM_133685.1,247-265).
ccactattggggcatcttt

SEQ ID NO: 518079 - DNA, 19 bp, Mus musculus
  siRNA target sequence for 1700093E07Rik (NM_133685.1,278-296).
cgtgccttgtggaaatgaa

SEQ ID NO: 518080 - DNA, 19 bp, Mus musculus
  siRNA target sequence for 1700093E07Rik (NM_133685.1,283-301).
cttgtggaaatgaacttca

SEQ ID NO: 518081 - DNA, 19 bp, Mus musculus
  siRNA target sequence for 1700093E07Rik (NM_133685.1,379-397).
cagccgtcatcgtctatga

SEQ ID NO: 518082 - DNA, 19 bp, Mus musculus
  siRNA target sequence for 1700093E07Rik (NM_133685.1,381-399).
gccgtcatcgtctatgaca

SEQ ID NO: 518083 - DNA, 19 bp, Mus musculus
  siRNA target sequence for 1700093E07Rik (NM_133685.1,542-560).
ggagtacgctgaatccata

SEQ ID NO: 518084 - DNA, 19 bp, Mus musculus
  siRNA target sequence for 1700093E07Rik (NM_133685.1,583-601).
gcgcgaagaatgccattaa

SEQ ID NO: 518085 - DNA, 19 bp, Mus musculus
  siRNA target sequence for 1700093E07Rik (NM_133685.1,602-620).
catcgaggagctctttcaa

SEQ ID NO: 518086 - DNA, 19 bp, Mus musculus
  siRNA target sequence for 1700093E07Rik (NM_133685.1,643-661).
ccttgggccctcaggaaaa

SEQ ID NO: 518087 - DNA, 19 bp, Mus musculus
  siRNA target sequence for 1810036J22Rik (NM_026967.3,304-322).
cgctccgtagggaagacat

SEQ ID NO: 518088 - DNA, 19 bp, Mus musculus
  siRNA target sequence for 1810036J22Rik (NM_026967.3,323-341).
ctttggcacatcaatttgt

SEQ ID NO: 518089 - DNA, 19 bp, Mus musculus
  siRNA target sequence for 1810036J22Rik (NM_026967.3,370-388).
cctacagtggagaatactt

SEQ ID NO: 518090 - DNA, 19 bp, Mus musculus
  siRNA target sequence for 1810036J22Rik (NM_026967.3,371-389).
ctacagtggagaatactta

SEQ ID NO: 518091 - DNA, 19 bp, Mus musculus
  siRNA target sequence for 1810036J22Rik (NM_026967.3,489-507).
cggggtccatggttacgtt

SEQ ID NO: 518092 - DNA, 19 bp, Mus musculus
  siRNA target sequence for 1810036J22Rik (NM_026967.3,495-513).
ccatggttacgttcttgta

SEQ ID NO: 518093 - DNA, 19 bp, Mus musculus
  siRNA target sequence for 1810036J22Rik (NM_026967.3,496-514).
catggttacgttcttgtat

SEQ ID NO: 518094 - DNA, 19 bp, Mus musculus
  siRNA target sequence for 1810036J22Rik (NM_026967.3,499-517).
ggttacgttcttgtatact

SEQ ID NO: 518095 - DNA, 19 bp, Mus musculus
  siRNA target sequence for 1810036J22Rik (NM_026967.3,508-526).
cttgtatactcggttaact

SEQ ID NO: 518096 - DNA, 19 bp, Mus musculus
  siRNA target sequence for 1810036J22Rik (NM_026967.3,532-550).
cgcagctttcagatcgtta

SEQ ID NO: 518097 - DNA, 19 bp, Mus musculus
  siRNA target sequence for 1810036J22Rik (NM_026967.3,533-551).
gcagctttcagatcgttaa

SEQ ID NO: 518098 - DNA, 19 bp, Mus musculus
  siRNA target sequence for 1810036J22Rik (NM_026967.3,547-565).
gttaagaacctgtaccaaa

SEQ ID NO: 518099 - DNA, 19 bp, Mus musculus
  siRNA target sequence for 1810036J22Rik (NM_026967.3,678-696).
gtcctggggtgcgatgttt

SEQ ID NO: 518100 - DNA, 19 bp, Mus musculus
  siRNA target sequence for 1810036J22Rik (NM_026967.3,680-698).
cctggggtgcgatgtttat

SEQ ID NO: 518101 - DNA, 19 bp, Mus musculus
  siRNA target sequence for 1810036J22Rik (NM_026967.3,683-701).
ggggtgcgatgtttatgga

SEQ ID NO: 518102 - DNA, 19 bp, Mus musculus
  siRNA target sequence for 1810036J22Rik (NM_026967.3,702-720).
gtcgtctgctcgggataat

SEQ ID NO: 518103 - DNA, 19 bp, Mus musculus
  siRNA target sequence for 1810036J22Rik (NM_026967.3,704-722).
cgtctgctcgggataatca

SEQ ID NO: 518104 - DNA, 19 bp, Mus musculus
  siRNA target sequence for 1810036J22Rik (NM_026967.3,713-731).
gggataatcagctaactca

SEQ ID NO: 518105 - DNA, 19 bp, Mus musculus
  siRNA target sequence for 1810036J22Rik (NM_026967.3,714-732).
ggataatcagctaactcaa

SEQ ID NO: 518106 - DNA, 19 bp, Mus musculus
  siRNA target sequence for 1810036J22Rik (NM_026967.3,768-786).
ggtggagaattcttatgga

SEQ ID NO: 518107 - DNA, 19 bp, Mus musculus
  siRNA target sequence for 1810036J22Rik (NM_026967.3,793-811).
gaccgccgatgctatctta

SEQ ID NO: 518108 - DNA, 19 bp, Mus musculus
  siRNA target sequence for 1810036J22Rik (NM_026967.3,796-814).
cgccgatgctatcttatgt

SEQ ID NO: 518109 - DNA, 19 bp, Mus musculus
  siRNA target sequence for 1810048P08Rik (NM_133717.1,117-135).
caggctggaggccattgtt

SEQ ID NO: 518110 - DNA, 19 bp, Mus musculus
  siRNA target sequence for 1810048P08Rik (NM_133717.1,124-142).
gaggccattgttactgtta

SEQ ID NO: 518111 - DNA, 19 bp, Mus musculus
  siRNA target sequence for 1810048P08Rik (NM_133717.1,128-146).
ccattgttactgttacaga

SEQ ID NO: 518112 - DNA, 19 bp, Mus musculus
  siRNA target sequence for 1810048P08Rik (NM_133717.1,464-482).
gccacggagctcatcatga

SEQ ID NO: 518113 - DNA, 19 bp, Mus musculus
  siRNA target sequence for 2210403B10Rik (NM_145216.2,239-257).
catccgccaattcttgttt

SEQ ID NO: 518114 - DNA, 19 bp, Mus musculus
  siRNA target sequence for 2210403B10Rik (NM_145216.2,331-349).
cggtctacgacctgagtat

SEQ ID NO: 518115 - DNA, 19 bp, Mus musculus
  siRNA target sequence for 2210403B10Rik (NM_145216.2,467-485).
cagccccgacagtttcgat

SEQ ID NO: 518116 - DNA, 19 bp, Mus musculus
  siRNA target sequence for 2210403B10Rik (NM_145216.2,469-487).
gccccgacagtttcgatta

SEQ ID NO: 518117 - DNA, 19 bp, Mus musculus
  siRNA target sequence for 2210403B10Rik (NM_145216.2,470-488).
ccccgacagtttcgattat

SEQ ID NO: 518118 - DNA, 19 bp, Mus musculus
  siRNA target sequence for 2210403B10Rik (NM_145216.2,472-490).
ccgacagtttcgattatgt

SEQ ID NO: 518119 - DNA, 19 bp, Mus musculus
  siRNA target sequence for 2210403B10Rik (NM_145216.2,473-491).
cgacagtttcgattatgtt

SEQ ID NO: 518120 - DNA, 19 bp, Mus musculus
  siRNA target sequence for 2210403B10Rik (NM_145216.2,474-492).
gacagtttcgattatgtta

SEQ ID NO: 518121 - DNA, 19 bp, Mus musculus
  siRNA target sequence for 2210403B10Rik (NM_145216.2,476-494).
cagtttcgattatgttaaa

SEQ ID NO: 518122 - DNA, 19 bp, Mus musculus
  siRNA target sequence for 2310057H16Rik (NM_026473.2,263-281).
ggccttttgggcaactctt

SEQ ID NO: 518123 - DNA, 19 bp, Mus musculus
  siRNA target sequence for 2310057H16Rik (NM_026473.2,283-301).
cggcctgacaacttcatct

SEQ ID NO: 518124 - DNA, 19 bp, Mus musculus
  siRNA target sequence for 2310057H16Rik (NM_026473.2,1305-1323).
ggacgccacggtcaatgat

SEQ ID NO: 518125 - DNA, 19 bp, Mus musculus
  siRNA target sequence for 2310075M17Rik (NM_025535.1,203-221).
ctggtaaactggtattcct

SEQ ID NO: 518126 - DNA, 19 bp, Mus musculus
  siRNA target sequence for 2310075M17Rik (NM_025535.1,214-232).
gtattccttggattggata

SEQ ID NO: 518127 - DNA, 19 bp, Mus musculus
  siRNA target sequence for 2310075M17Rik (NM_025535.1,237-255).
cgggaaaacaactttgcta

SEQ ID NO: 518128 - DNA, 19 bp, Mus musculus
  siRNA target sequence for 2310075M17Rik (NM_025535.1,328-346).
gctggcatgacgtttacaa

SEQ ID NO: 518129 - DNA, 19 bp, Mus musculus
  siRNA target sequence for 2310075M17Rik (NM_025535.1,331-349).
ggcatgacgtttacaactt

SEQ ID NO: 518130 - DNA, 19 bp, Mus musculus
  siRNA target sequence for 2310075M17Rik (NM_025535.1,332-350).
gcatgacgtttacaacttt

SEQ ID NO: 518131 - DNA, 19 bp, Mus musculus
  siRNA target sequence for 2310075M17Rik (NM_025535.1,333-351).
catgacgtttacaactttt

SEQ ID NO: 518132 - DNA, 19 bp, Mus musculus
  siRNA target sequence for 2310075M17Rik (NM_025535.1,336-354).
gacgtttacaacttttgat

SEQ ID NO: 518133 - DNA, 19 bp, Mus musculus
  siRNA target sequence for 2310075M17Rik (NM_025535.1,338-356).
cgtttacaacttttgatct

SEQ ID NO: 518134 - DNA, 19 bp, Mus musculus
  siRNA target sequence for 2310075M17Rik (NM_025535.1,366-384).
cgtgcaagcccgaagagta

SEQ ID NO: 518135 - DNA, 19 bp, Mus musculus
  siRNA target sequence for 2310075M17Rik (NM_025535.1,367-385).
gtgcaagcccgaagagtat

SEQ ID NO: 518136 - DNA, 19 bp, Mus musculus
  siRNA target sequence for 2310075M17Rik (NM_025535.1,393-411).
ctaccttcctgctatcaat

SEQ ID NO: 518137 - DNA, 19 bp, Mus musculus
  siRNA target sequence for 2310075M17Rik (NM_025535.1,404-422).
ctatcaatggcattgtatt

SEQ ID NO: 518138 - DNA, 19 bp, Mus musculus
  siRNA target sequence for 2310075M17Rik (NM_025535.1,442-460).
catgaaaggctgttagaat

SEQ ID NO: 518139 - DNA, 19 bp, Mus musculus
  siRNA target sequence for 2310075M17Rik (NM_025535.1,502-520).
gccaacgtgcctattctaa

SEQ ID NO: 518140 - DNA, 19 bp, Mus musculus
  siRNA target sequence for 2310075M17Rik (NM_025535.1,507-525).
cgtgcctattctaattctt

SEQ ID NO: 518141 - DNA, 19 bp, Mus musculus
  siRNA target sequence for 2310075M17Rik (NM_025535.1,564-582).
gaggttacgagagatgttt

SEQ ID NO: 518142 - DNA, 19 bp, Mus musculus
  siRNA target sequence for 2310075M17Rik (NM_025535.1,571-589).
cgagagatgtttggtttat

SEQ ID NO: 518143 - DNA, 19 bp, Mus musculus
  siRNA target sequence for 2310075M17Rik (NM_025535.1,643-661).
cctctggaagtgttcatgt

SEQ ID NO: 518144 - DNA, 19 bp, Mus musculus
  siRNA target sequence for 2400004O09Rik (NM_023526.2,196-214).
gggttgcaaggttgtcatt

SEQ ID NO: 518145 - DNA, 19 bp, Mus musculus
  siRNA target sequence for 2400004O09Rik (NM_023526.2,234-252).
ggaaaactgcaattttgga

SEQ ID NO: 518146 - DNA, 19 bp, Mus musculus
  siRNA target sequence for 2400004O09Rik (NM_023526.2,257-275).
ctcctttatgggaatcaca

SEQ ID NO: 518147 - DNA, 19 bp, Mus musculus
  siRNA target sequence for 2400004O09Rik (NM_023526.2,300-318).
cgctggaagacgtgtacat

SEQ ID NO: 518148 - DNA, 19 bp, Mus musculus
  siRNA target sequence for 2400004O09Rik (NM_023526.2,353-371).
cagctgcacttgtatgaca

SEQ ID NO: 518149 - DNA, 19 bp, Mus musculus
  siRNA target sequence for 2400004O09Rik (NM_023526.2,391-409).
cgtggagctgccaaagcat

SEQ ID NO: 518150 - DNA, 19 bp, Mus musculus
  siRNA target sequence for 2400004O09Rik (NM_023526.2,392-410).
gtggagctgccaaagcatt

SEQ ID NO: 518151 - DNA, 19 bp, Mus musculus
  siRNA target sequence for 2400004O09Rik (NM_023526.2,395-413).
gagctgccaaagcattact

SEQ ID NO: 518152 - DNA, 19 bp, Mus musculus
  siRNA target sequence for 2400004O09Rik (NM_023526.2,398-416).
ctgccaaagcattacttct

SEQ ID NO: 518153 - DNA, 19 bp, Mus musculus
  siRNA target sequence for 2400004O09Rik (NM_023526.2,430-448).
ctttgttcttgtgtatagt

SEQ ID NO: 518154 - DNA, 19 bp, Mus musculus
  siRNA target sequence for 2400004O09Rik (NM_023526.2,437-455).
cttgtgtatagtgtgaata

SEQ ID NO: 518155 - DNA, 19 bp, Mus musculus
  siRNA target sequence for 2400004O09Rik (NM_023526.2,442-460).
gtatagtgtgaataacctt

SEQ ID NO: 518156 - DNA, 19 bp, Mus musculus
  siRNA target sequence for 2400004O09Rik (NM_023526.2,523-541).
ggtggcaatcgttgtgtta

SEQ ID NO: 518157 - DNA, 19 bp, Mus musculus
  siRNA target sequence for 2400004O09Rik (NM_023526.2,527-545).
gcaatcgttgtgttaggaa

SEQ ID NO: 518158 - DNA, 19 bp, Mus musculus
  siRNA target sequence for 2400004O09Rik (NM_023526.2,528-546).
caatcgttgtgttaggaaa

SEQ ID NO: 518159 - DNA, 19 bp, Mus musculus
  siRNA target sequence for 2400004O09Rik (NM_023526.2,600-618).
gggcaagaagtgagaaagt

SEQ ID NO: 518160 - DNA, 19 bp, Mus musculus
  siRNA target sequence for 2400004O09Rik (NM_023526.2,656-674).
ctgattgaacccttcactt

SEQ ID NO: 518161 - DNA, 19 bp, Mus musculus
  siRNA target sequence for 2410003M04Rik (NM_028024.1,104-122).
ggcatctgtgggcaaaact

SEQ ID NO: 518162 - DNA, 19 bp, Mus musculus
  siRNA target sequence for 2410003M04Rik (NM_028024.1,105-123).
gcatctgtgggcaaaactt

SEQ ID NO: 518163 - DNA, 19 bp, Mus musculus
  siRNA target sequence for 2410003M04Rik (NM_028024.1,113-131).
gggcaaaacttcaatcctt

SEQ ID NO: 518164 - DNA, 19 bp, Mus musculus
  siRNA target sequence for 2410003M04Rik (NM_028024.1,230-248).
ggagcaggtgcgtttctat

SEQ ID NO: 518165 - DNA, 19 bp, Mus musculus
  siRNA target sequence for 2410003M04Rik (NM_028024.1,234-252).
caggtgcgtttctatgata

SEQ ID NO: 518166 - DNA, 19 bp, Mus musculus
  siRNA target sequence for 2410003M04Rik (NM_028024.1,535-553).
ccctcctagagcctttcat

SEQ ID NO: 518167 - DNA, 19 bp, Mus musculus
  siRNA target sequence for 2410003M04Rik (NM_028024.1,600-618).
cccctcagccgcaagaaca

SEQ ID NO: 518168 - DNA, 19 bp, Mus musculus
  siRNA target sequence for 2410129E14Rik (NM_023716.1,728-746).
cgataatgaggctctgtat

SEQ ID NO: 518169 - DNA, 19 bp, Mus musculus
  siRNA target sequence for 2610313E07Rik (NM_026011.2,265-283).
cgcgtccggtcaattcagt

SEQ ID NO: 518170 - DNA, 19 bp, Mus musculus
  siRNA target sequence for 2610313E07Rik (NM_026011.2,310-328).
caacatgaggaaagtaact

SEQ ID NO: 518171 - DNA, 19 bp, Mus musculus
  siRNA target sequence for 2610313E07Rik (NM_026011.2,327-345).
ctaaaggcaacgtcacaat

SEQ ID NO: 518172 - DNA, 19 bp, Mus musculus
  siRNA target sequence for 2610313E07Rik (NM_026011.2,397-415).
gtactgccgaggagtcaat

SEQ ID NO: 518173 - DNA, 19 bp, Mus musculus
  siRNA target sequence for 2610313E07Rik (NM_026011.2,402-420).
gccgaggagtcaatgcaat

SEQ ID NO: 518174 - DNA, 19 bp, Mus musculus
  siRNA target sequence for 2610313E07Rik (NM_026011.2,405-423).
gaggagtcaatgcaattgt

SEQ ID NO: 518175 - DNA, 19 bp, Mus musculus
  siRNA target sequence for 2610313E07Rik (NM_026011.2,408-426).
gagtcaatgcaattgttta

SEQ ID NO: 518176 - DNA, 19 bp, Mus musculus
  siRNA target sequence for 2610313E07Rik (NM_026011.2,410-428).
gtcaatgcaattgtttaca

SEQ ID NO: 518177 - DNA, 19 bp, Mus musculus
  siRNA target sequence for 2610313E07Rik (NM_026011.2,437-455).
gctgcagatcgagaaaaga

SEQ ID NO: 518178 - DNA, 19 bp, Mus musculus
  siRNA target sequence for 2610313E07Rik (NM_026011.2,438-456).
ctgcagatcgagaaaagat

SEQ ID NO: 518179 - DNA, 19 bp, Mus musculus
  siRNA target sequence for 2610313E07Rik (NM_026011.2,454-472).
gatagaagcctctcgaaat

SEQ ID NO: 518180 - DNA, 19 bp, Mus musculus
  siRNA target sequence for 2610313E07Rik (NM_026011.2,465-483).
ctcgaaatgaactgcataa

SEQ ID NO: 518181 - DNA, 19 bp, Mus musculus
  siRNA target sequence for 2610313E07Rik (NM_026011.2,468-486).
gaaatgaactgcataatct

SEQ ID NO: 518182 - DNA, 19 bp, Mus musculus
  siRNA target sequence for 2610313E07Rik (NM_026011.2,476-494).
ctgcataatcttctagata

SEQ ID NO: 518183 - DNA, 19 bp, Mus musculus
  siRNA target sequence for 2610313E07Rik (NM_026011.2,478-496).
gcataatcttctagataaa

SEQ ID NO: 518184 - DNA, 19 bp, Mus musculus
  siRNA target sequence for 2610313E07Rik (NM_026011.2,602-620).
caggatagagaaatttgct

SEQ ID NO: 518185 - DNA, 19 bp, Mus musculus
  siRNA target sequence for 2810409H07Rik (NM_025942.1,244-262).
cgttggattgccaaatgtt

SEQ ID NO: 518186 - DNA, 19 bp, Mus musculus
  siRNA target sequence for 2810409H07Rik (NM_025942.1,263-281).
gggaagtctaccttcttca

SEQ ID NO: 518187 - DNA, 19 bp, Mus musculus
  siRNA target sequence for 2810409H07Rik (NM_025942.1,264-282).
ggaagtctaccttcttcaa

SEQ ID NO: 518188 - DNA, 19 bp, Mus musculus
  siRNA target sequence for 2810409H07Rik (NM_025942.1,265-283).
gaagtctaccttcttcaat

SEQ ID NO: 518189 - DNA, 19 bp, Mus musculus
  siRNA target sequence for 2810409H07Rik (NM_025942.1,268-286).
gtctaccttcttcaatgta

SEQ ID NO: 518190 - DNA, 19 bp, Mus musculus
  siRNA target sequence for 2810409H07Rik (NM_025942.1,319-337).
cccattctgcactattgat

SEQ ID NO: 518191 - DNA, 19 bp, Mus musculus
  siRNA target sequence for 2810409H07Rik (NM_025942.1,409-427).
caagattcctgctttccta

SEQ ID NO: 518192 - DNA, 19 bp, Mus musculus
  siRNA target sequence for 2810409H07Rik (NM_025942.1,424-442).
cctaaatgtagtggatatt

SEQ ID NO: 518193 - DNA, 19 bp, Mus musculus
  siRNA target sequence for 2810409H07Rik (NM_025942.1,477-495).
gcttggggaatgccttttt

SEQ ID NO: 518194 - DNA, 19 bp, Mus musculus
  siRNA target sequence for 2810409H07Rik (NM_025942.1,490-508).
ctttttatctcatattagt

SEQ ID NO: 518195 - DNA, 19 bp, Mus musculus
  siRNA target sequence for 2810409H07Rik (NM_025942.1,515-533).
gatgggatttttcatctaa

SEQ ID NO: 518196 - DNA, 19 bp, Mus musculus
  siRNA target sequence for 2810409H07Rik (NM_025942.1,584-602).
cccatccgagacatagaga

SEQ ID NO: 518197 - DNA, 19 bp, Mus musculus
  siRNA target sequence for 2810409H07Rik (NM_025942.1,586-604).
catccgagacatagagata

SEQ ID NO: 518198 - DNA, 19 bp, Mus musculus
  siRNA target sequence for 2810409H07Rik (NM_025942.1,591-609).
gagacatagagataattca

SEQ ID NO: 518199 - DNA, 19 bp, Mus musculus
  siRNA target sequence for 2810409H07Rik (NM_025942.1,637-655).
gatgattgggcccattcta

SEQ ID NO: 518200 - DNA, 19 bp, Mus musculus
  siRNA target sequence for 2810409H07Rik (NM_025942.1,704-722).
cccgagtatgacataatgt

SEQ ID NO: 518201 - DNA, 19 bp, Mus musculus
  siRNA target sequence for 2810409H07Rik (NM_025942.1,733-751).
gtcttgggttatagatcaa

SEQ ID NO: 518202 - DNA, 19 bp, Mus musculus
  siRNA target sequence for 2810409H07Rik (NM_025942.1,735-753).
cttgggttatagatcaaaa

SEQ ID NO: 518203 - DNA, 19 bp, Mus musculus
  siRNA target sequence for 2810409H07Rik (NM_025942.1,838-856).
ggtctacttggtgaatctt

SEQ ID NO: 518204 - DNA, 19 bp, Mus musculus
  siRNA target sequence for 2810409H07Rik (NM_025942.1,932-950).
ggcgccttggtcattcctt

SEQ ID NO: 518205 - DNA, 19 bp, Mus musculus
  siRNA target sequence for 2810409H07Rik (NM_025942.1,957-975).
gggccttggaactcaagtt

SEQ ID NO: 518206 - DNA, 19 bp, Mus musculus
  siRNA target sequence for 2810409H07Rik (NM_025942.1,965-983).
gaactcaagttgcaagaat

SEQ ID NO: 518207 - DNA, 19 bp, Mus musculus
  siRNA target sequence for 2810409H07Rik (NM_025942.1,968-986).
ctcaagttgcaagaattga

SEQ ID NO: 518208 - DNA, 19 bp, Mus musculus
  siRNA target sequence for 2810409H07Rik (NM_025942.1,1032-1050).
gtgctttgccaaagatcat

SEQ ID NO: 518209 - DNA, 19 bp, Mus musculus
  siRNA target sequence for 2810409H07Rik (NM_025942.1,1034-1052).
gctttgccaaagatcatta

SEQ ID NO: 518210 - DNA, 19 bp, Mus musculus
  siRNA target sequence for 2810409H07Rik (NM_025942.1,1035-1053).
ctttgccaaagatcattaa

SEQ ID NO: 518211 - DNA, 19 bp, Mus musculus
  siRNA target sequence for 2810409H07Rik (NM_025942.1,1064-1082).
gcagcactccaactagaat

SEQ ID NO: 518212 - DNA, 19 bp, Mus musculus
  siRNA target sequence for 2810409H07Rik (NM_025942.1,1065-1083).
cagcactccaactagaata

SEQ ID NO: 518213 - DNA, 19 bp, Mus musculus
  siRNA target sequence for 2810409H07Rik (NM_025942.1,1067-1085).
gcactccaactagaatact

SEQ ID NO: 518214 - DNA, 19 bp, Mus musculus
  siRNA target sequence for 2810409H07Rik (NM_025942.1,1073-1091).
caactagaatactttttca

SEQ ID NO: 518215 - DNA, 19 bp, Mus musculus
  siRNA target sequence for 2810409H07Rik (NM_025942.1,1151-1169).
gctgcaggaaagattcaca

SEQ ID NO: 518216 - DNA, 19 bp, Mus musculus
  siRNA target sequence for 2810409H07Rik (NM_025942.1,1278-1296).
gcaggaattatattgttga

SEQ ID NO: 518217 - DNA, 19 bp, Mus musculus
  siRNA target sequence for 2810409H07Rik (NM_025942.1,1279-1297).
caggaattatattgttgaa

SEQ ID NO: 518218 - DNA, 19 bp, Mus musculus
  siRNA target sequence for 2810409H07Rik (NM_025942.1,1301-1319).
ggagatattatcttcttca

SEQ ID NO: 518219 - DNA, 19 bp, Mus musculus
  siRNA target sequence for 2810409H07Rik (NM_025942.1,1302-1320).
gagatattatcttcttcaa

SEQ ID NO: 518220 - DNA, 19 bp, Mus musculus
  siRNA target sequence for 2810409H07Rik (NM_025942.1,1304-1322).
gatattatcttcttcaaat

SEQ ID NO: 518221 - DNA, 19 bp, Mus musculus
  siRNA target sequence for 2810409H07Rik (NM_025942.1,1331-1349).
cctcagcaaccaaaaaaga

SEQ ID NO: 518222 - DNA, 19 bp, Mus musculus
  siRNA target sequence for 4921515A04Rik (NM_172939.2,287-305).
cggatggtaccaagtatgt

SEQ ID NO: 518223 - DNA, 19 bp, Mus musculus
  siRNA target sequence for 4921515A04Rik (NM_172939.2,300-318).
gtatgtgcatctcaagaaa

SEQ ID NO: 518224 - DNA, 19 bp, Mus musculus
  siRNA target sequence for 4921515A04Rik (NM_172939.2,642-660).
ccctagtgggccaaacaca

SEQ ID NO: 518225 - DNA, 19 bp, Mus musculus
  siRNA target sequence for 4921515A04Rik (NM_172939.2,701-719).
gcagctccccgcaactaaa

SEQ ID NO: 518226 - DNA, 19 bp, Mus musculus
  siRNA target sequence for 4921515A04Rik (NM_172939.2,777-795).
ctccgataccgcatcgtta

SEQ ID NO: 518227 - DNA, 19 bp, Mus musculus
  siRNA target sequence for 4921515A04Rik (NM_172939.2,781-799).
gataccgcatcgttagctt

SEQ ID NO: 518228 - DNA, 19 bp, Mus musculus
  siRNA target sequence for 4921515A04Rik (NM_172939.2,1008-1026).
ggccatgttggtcaacttt

SEQ ID NO: 518229 - DNA, 19 bp, Mus musculus
  siRNA target sequence for 4921515A04Rik (NM_172939.2,1075-1093).
ggctacactgccctacatt

SEQ ID NO: 518230 - DNA, 19 bp, Mus musculus
  siRNA target sequence for 4921515A04Rik (NM_172939.2,1100-1118).
cgatgcatgggcatgtaga

SEQ ID NO: 518231 - DNA, 19 bp, Mus musculus
  siRNA target sequence for 4921515A04Rik (NM_172939.2,1140-1158).
ggcctacgacgcagatgta

SEQ ID NO: 518232 - DNA, 19 bp, Mus musculus
  siRNA target sequence for 4921515A04Rik (NM_172939.2,1142-1160).
cctacgacgcagatgtaga

SEQ ID NO: 518233 - DNA, 19 bp, Mus musculus
  siRNA target sequence for 4921515A04Rik (NM_172939.2,1285-1303).
gggcgctggagactttcaa

SEQ ID NO: 518234 - DNA, 19 bp, Mus musculus
  siRNA target sequence for 4921515A04Rik (NM_172939.2,1452-1470).
gaagccacgactcaacaaa

SEQ ID NO: 518235 - DNA, 19 bp, Mus musculus
  siRNA target sequence for 4921515A04Rik (NM_172939.2,1506-1524).
ctccttcagggatgctaaa

SEQ ID NO: 518236 - DNA, 19 bp, Mus musculus
  siRNA target sequence for 4921515A04Rik (NM_172939.2,1582-1600).
ggctactcatcttccttta

SEQ ID NO: 518237 - DNA, 19 bp, Mus musculus
  siRNA target sequence for 4921515A04Rik (NM_172939.2,1583-1601).
gctactcatcttcctttaa

SEQ ID NO: 518238 - DNA, 19 bp, Mus musculus
  siRNA target sequence for 4921515A04Rik (NM_172939.2,1605-1623).
gagaccgaagtccaatgta

SEQ ID NO: 518239 - DNA, 19 bp, Mus musculus
  siRNA target sequence for 4921515A04Rik (NM_172939.2,1607-1625).
gaccgaagtccaatgtatt

SEQ ID NO: 518240 - DNA, 19 bp, Mus musculus
  siRNA target sequence for 4930542G03Rik (NM_146116.1,645-663).
gacctattgtattgataat

SEQ ID NO: 518241 - DNA, 19 bp, Mus musculus
  siRNA target sequence for 4930542G03Rik (NM_146116.1,801-819).
gcggaaactggctgtaaat

SEQ ID NO: 518242 - DNA, 19 bp, Mus musculus
  siRNA target sequence for 4930542G03Rik (NM_146116.1,803-821).
ggaaactggctgtaaatat

SEQ ID NO: 518243 - DNA, 19 bp, Mus musculus
  siRNA target sequence for 4930542G03Rik (NM_146116.1,1027-1045).
gtggacgaacagatgctta

SEQ ID NO: 518244 - DNA, 19 bp, Mus musculus
  siRNA target sequence for 4930542G03Rik (NM_146116.1,1157-1175).
gcaacagcaccgctattca

SEQ ID NO: 518245 - DNA, 19 bp, Mus musculus
  siRNA target sequence for 4930544G11Rik (NM_026294.1,271-289).
gtttacgtgcccacagtat

SEQ ID NO: 518246 - DNA, 19 bp, Mus musculus
  siRNA target sequence for 4930544G11Rik (NM_026294.1,451-469).
gggaacatcccacataaat

SEQ ID NO: 518247 - DNA, 19 bp, Mus musculus
  siRNA target sequence for 4930544G11Rik (NM_026294.1,456-474).
catcccacataaatggatt

SEQ ID NO: 518248 - DNA, 19 bp, Mus musculus
  siRNA target sequence for 4930544G11Rik (NM_026294.1,535-553).
cttcggaatgacttctaca

SEQ ID NO: 518249 - DNA, 19 bp, Mus musculus
  siRNA target sequence for 4930544G11Rik (NM_026294.1,549-567).
ctacacgatacaagagtta

SEQ ID NO: 518250 - DNA, 19 bp, Mus musculus
  siRNA target sequence for 4930544G11Rik (NM_026294.1,701-719).
gggctgctctgcaaacgaa

SEQ ID NO: 518251 - DNA, 19 bp, Mus musculus
  siRNA target sequence for 4930544G11Rik (NM_026294.1,702-720).
ggctgctctgcaaacgaat

SEQ ID NO: 518252 - DNA, 19 bp, Mus musculus
  siRNA target sequence for 4930544G11Rik (NM_026294.1,716-734).
cgaatcgagtgaagaaaaa

SEQ ID NO: 518253 - DNA, 19 bp, Mus musculus
  siRNA target sequence for 4930544G11Rik (NM_026294.1,729-747).
gaaaaagactggttgcttt

SEQ ID NO: 518254 - DNA, 19 bp, Mus musculus
  siRNA target sequence for 4933413B09Rik (NM_027669.1,119-137).
ggaccccacccaatgagat

SEQ ID NO: 518255 - DNA, 19 bp, Mus musculus
  siRNA target sequence for 4933413B09Rik (NM_027669.1,122-140).
ccccacccaatgagatgtt

SEQ ID NO: 518256 - DNA, 19 bp, Mus musculus
  siRNA target sequence for 4933413B09Rik (NM_027669.1,199-217).
gggtttgagttcaatatca

SEQ ID NO: 518257 - DNA, 19 bp, Mus musculus
  siRNA target sequence for 4933413B09Rik (NM_027669.1,200-218).
ggtttgagttcaatatcat

SEQ ID NO: 518258 - DNA, 19 bp, Mus musculus
  siRNA target sequence for 4933413B09Rik (NM_027669.1,710-728).
ctcactgcatcgatgtgta

SEQ ID NO: 518259 - DNA, 19 bp, Mus musculus
  siRNA target sequence for 4933413B09Rik (NM_027669.1,724-742).
gtgtacccacagaagtgtt

SEQ ID NO: 518260 - DNA, 19 bp, Mus musculus
  siRNA target sequence for 4933413B09Rik (NM_027669.1,740-758).
gtttcgacgaggatgtcaa

SEQ ID NO: 518261 - DNA, 19 bp, Mus musculus
  siRNA target sequence for 4933413B09Rik (NM_027669.1,815-833).
ctgaccgagagcacatagt

SEQ ID NO: 518262 - DNA, 19 bp, Mus musculus
  siRNA target sequence for 4933413B09Rik (NM_027669.1,819-837).
ccgagagcacatagtgaat

SEQ ID NO: 518263 - DNA, 19 bp, Mus musculus
  siRNA target sequence for 4933413B09Rik (NM_027669.1,869-887).
ggggcatcatcgaaggtaa

SEQ ID NO: 518264 - DNA, 19 bp, Mus musculus
  siRNA target sequence for 4933413B09Rik (NM_027669.1,872-890).
gcatcatcgaaggtaagtt

SEQ ID NO: 518265 - DNA, 19 bp, Mus musculus
  siRNA target sequence for 4933413B09Rik (NM_027669.1,873-891).
catcatcgaaggtaagttt

SEQ ID NO: 518266 - DNA, 19 bp, Mus musculus
  siRNA target sequence for 4933413B09Rik (NM_027669.1,915-933).
ggtagggggttggaaatca

SEQ ID NO: 518267 - DNA, 19 bp, Mus musculus
  siRNA target sequence for 5033421K01Rik (NM_029494.2,205-223).
cgtgcctagtccgaagatt

SEQ ID NO: 518268 - DNA, 19 bp, Mus musculus
  siRNA target sequence for 5033421K01Rik (NM_029494.2,209-227).
cctagtccgaagattcact

SEQ ID NO: 518269 - DNA, 19 bp, Mus musculus
  siRNA target sequence for 5033421K01Rik (NM_029494.2,255-273).
gccacaattggagttgatt

SEQ ID NO: 518270 - DNA, 19 bp, Mus musculus
  siRNA target sequence for 5033421K01Rik (NM_029494.2,259-277).
caattggagttgattttat

SEQ ID NO: 518271 - DNA, 19 bp, Mus musculus
  siRNA target sequence for 5033421K01Rik (NM_029494.2,284-302).
gacagtggagattaatggt

SEQ ID NO: 518272 - DNA, 19 bp, Mus musculus
  siRNA target sequence for 5033421K01Rik (NM_029494.2,332-350).
cgcaggtcaagagagattt

SEQ ID NO: 518273 - DNA, 19 bp, Mus musculus
  siRNA target sequence for 5033421K01Rik (NM_029494.2,356-374).
catcactcaaagttactat

SEQ ID NO: 518274 - DNA, 19 bp, Mus musculus
  siRNA target sequence for 5033421K01Rik (NM_029494.2,381-399).
gccaatgccttgatcctta

SEQ ID NO: 518275 - DNA, 19 bp, Mus musculus
  siRNA target sequence for 5033421K01Rik (NM_029494.2,443-461).
gtggttgcgggagatagaa

SEQ ID NO: 518276 - DNA, 19 bp, Mus musculus
  siRNA target sequence for 5033421K01Rik (NM_029494.2,445-463).
ggttgcgggagatagaaca

SEQ ID NO: 518277 - DNA, 19 bp, Mus musculus
  siRNA target sequence for 5033421K01Rik (NM_029494.2,449-467).
gcgggagatagaacagtat

SEQ ID NO: 518278 - DNA, 19 bp, Mus musculus
  siRNA target sequence for 5033421K01Rik (NM_029494.2,559-577).
cagaggctcaggacatgta

SEQ ID NO: 518279 - DNA, 19 bp, Mus musculus
  siRNA target sequence for 5033421K01Rik (NM_029494.2,561-579).
gaggctcaggacatgtatt

SEQ ID NO: 518280 - DNA, 19 bp, Mus musculus
  siRNA target sequence for 5033421K01Rik (NM_029494.2,700-718).
ccggagaggggaaaagcat

SEQ ID NO: 518281 - DNA, 19 bp, Mus musculus
  siRNA target sequence for 5033421K01Rik (NM_029494.2,719-737).
cagctatttgacttgttgt

SEQ ID NO: 518282 - DNA, 19 bp, Mus musculus
  siRNA target sequence for 5430435G22Rik (NM_145509.1,145-163).
gtggacttgaaacttatca

SEQ ID NO: 518283 - DNA, 19 bp, Mus musculus
  siRNA target sequence for 5430435G22Rik (NM_145509.1,147-165).
ggacttgaaacttatcatt

SEQ ID NO: 518284 - DNA, 19 bp, Mus musculus
  siRNA target sequence for 5430435G22Rik (NM_145509.1,204-222).
ccaatatgtacacaaaaca

SEQ ID NO: 518285 - DNA, 19 bp, Mus musculus
  siRNA target sequence for 5430435G22Rik (NM_145509.1,221-239).
catttttcgaggaatacca

SEQ ID NO: 518286 - DNA, 19 bp, Mus musculus
  siRNA target sequence for 5430435G22Rik (NM_145509.1,330-348).
gcggttccgctcaatggta

SEQ ID NO: 518287 - DNA, 19 bp, Mus musculus
  siRNA target sequence for 5430435G22Rik (NM_145509.1,331-349).
cggttccgctcaatggtat

SEQ ID NO: 518288 - DNA, 19 bp, Mus musculus
  siRNA target sequence for 5430435G22Rik (NM_145509.1,337-355).
cgctcaatggtatcaacat

SEQ ID NO: 518289 - DNA, 19 bp, Mus musculus
  siRNA target sequence for 5430435G22Rik (NM_145509.1,338-356).
gctcaatggtatcaacatt

SEQ ID NO: 518290 - DNA, 19 bp, Mus musculus
  siRNA target sequence for 5430435G22Rik (NM_145509.1,341-359).
caatggtatcaacattcta

SEQ ID NO: 518291 - DNA, 19 bp, Mus musculus
  siRNA target sequence for 5430435G22Rik (NM_145509.1,375-393).
ctgtatcctggcatttgat

SEQ ID NO: 518292 - DNA, 19 bp, Mus musculus
  siRNA target sequence for 5430435G22Rik (NM_145509.1,384-402).
ggcatttgatgttactgat

SEQ ID NO: 518293 - DNA, 19 bp, Mus musculus
  siRNA target sequence for 5430435G22Rik (NM_145509.1,459-477).
ccctatggagcagtcatat

SEQ ID NO: 518294 - DNA, 19 bp, Mus musculus
  siRNA target sequence for 5430435G22Rik (NM_145509.1,489-507).
gctggggaacaaaatcgat

SEQ ID NO: 518295 - DNA, 19 bp, Mus musculus
  siRNA target sequence for 5430435G22Rik (NM_145509.1,541-559).
catggatggtgtaaagaga

SEQ ID NO: 518296 - DNA, 19 bp, Mus musculus
  siRNA target sequence for 5430435G22Rik (NM_145509.1,556-574).
gagaaggatatgccatatt

SEQ ID NO: 518297 - DNA, 19 bp, Mus musculus
  siRNA target sequence for 5430435G22Rik (NM_145509.1,558-576).
gaaggatatgccatatttt

SEQ ID NO: 518298 - DNA, 19 bp, Mus musculus
  siRNA target sequence for 5430435G22Rik (NM_145509.1,567-585).
gccatattttgaagttagt

SEQ ID NO: 518299 - DNA, 19 bp, Mus musculus
  siRNA target sequence for 5430435G22Rik (NM_145509.1,580-598).
gttagtgcgaagaatgaca

SEQ ID NO: 518300 - DNA, 19 bp, Mus musculus
  siRNA target sequence for 5430435G22Rik (NM_145509.1,587-605).
cgaagaatgacatcaatgt

SEQ ID NO: 518301 - DNA, 19 bp, Mus musculus
  siRNA target sequence for 5430435G22Rik (NM_145509.1,664-682).
gagaaccacctcatagact

SEQ ID NO: 518302 - DNA, 19 bp, Mus musculus
  siRNA target sequence for 5730596K20Rik (NM_146091.2,198-216).
ccatatccgagatcttgat

SEQ ID NO: 518303 - DNA, 19 bp, Mus musculus
  siRNA target sequence for 5730596K20Rik (NM_146091.2,232-250).
gtggctggtgcttttcgaa

SEQ ID NO: 518304 - DNA, 19 bp, Mus musculus
  siRNA target sequence for 5730596K20Rik (NM_146091.2,241-259).
gcttttcgaaagggtaaat

SEQ ID NO: 518305 - DNA, 19 bp, Mus musculus
  siRNA target sequence for 5730596K20Rik (NM_146091.2,273-291).
ctttatgctgcgatactta

SEQ ID NO: 518306 - DNA, 19 bp, Mus musculus
  siRNA target sequence for 5730596K20Rik (NM_146091.2,448-466).
gcagttgttctgatggata

SEQ ID NO: 518307 - DNA, 19 bp, Mus musculus
  siRNA target sequence for 5730596K20Rik (NM_146091.2,498-516).
gaaggattgtgctaccatt

SEQ ID NO: 518308 - DNA, 19 bp, Mus musculus
  siRNA target sequence for 5730596K20Rik (NM_146091.2,501-519).
ggattgtgctaccattttt

SEQ ID NO: 518309 - DNA, 19 bp, Mus musculus
  siRNA target sequence for 5730596K20Rik (NM_146091.2,523-541).
ctaagcactatgactagtt

SEQ ID NO: 518310 - DNA, 19 bp, Mus musculus
  siRNA target sequence for 5730596K20Rik (NM_146091.2,528-546).
cactatgactagttctgtt

SEQ ID NO: 518311 - DNA, 19 bp, Mus musculus
  siRNA target sequence for 5730596K20Rik (NM_146091.2,539-557).
gttctgttcagatttacaa

SEQ ID NO: 518312 - DNA, 19 bp, Mus musculus
  siRNA target sequence for 5730596K20Rik (NM_146091.2,555-573).
caatttgtcccagaatatt

SEQ ID NO: 518313 - DNA, 19 bp, Mus musculus
  siRNA target sequence for 5730596K20Rik (NM_146091.2,619-637).
cgcctggcaatggatgaaa

SEQ ID NO: 518314 - DNA, 19 bp, Mus musculus
  siRNA target sequence for 5730596K20Rik (NM_146091.2,690-708).
cccttatgaatataactat

SEQ ID NO: 518315 - DNA, 19 bp, Mus musculus
  siRNA target sequence for 5730596K20Rik (NM_146091.2,715-733).
caaggaggaatggcatttt

SEQ ID NO: 518316 - DNA, 19 bp, Mus musculus
  siRNA target sequence for 5730596K20Rik (NM_146091.2,722-740).
gaatggcatttttggataa

SEQ ID NO: 518317 - DNA, 19 bp, Mus musculus
  siRNA target sequence for 5730596K20Rik (NM_146091.2,810-828).
ctccgatgtcacctgtttt

SEQ ID NO: 518318 - DNA, 19 bp, Mus musculus
  siRNA target sequence for 5730596K20Rik (NM_146091.2,812-830).
ccgatgtcacctgttttct

SEQ ID NO: 518319 - DNA, 19 bp, Mus musculus
  siRNA target sequence for 5730596K20Rik (NM_146091.2,814-832).
gatgtcacctgttttctct

SEQ ID NO: 518320 - DNA, 19 bp, Mus musculus
  siRNA target sequence for 5730596K20Rik (NM_146091.2,855-873).
ggccacaagccccaacttt

SEQ ID NO: 518321 - DNA, 19 bp, Mus musculus
  siRNA target sequence for 5730596K20Rik (NM_146091.2,857-875).
ccacaagccccaactttga

SEQ ID NO: 518322 - DNA, 19 bp, Mus musculus
  siRNA target sequence for 5730596K20Rik (NM_146091.2,885-903).
gaaagatattgctagtgaa

SEQ ID NO: 518323 - DNA, 19 bp, Mus musculus
  siRNA target sequence for 5730596K20Rik (NM_146091.2,889-907).
gatattgctagtgaattca

SEQ ID NO: 518324 - DNA, 19 bp, Mus musculus
  siRNA target sequence for 5730596K20Rik (NM_146091.2,912-930).
gcagttacaggctctaata

SEQ ID NO: 518325 - DNA, 19 bp, Mus musculus
  siRNA target sequence for 5730596K20Rik (NM_146091.2,915-933).
gttacaggctctaatacca

SEQ ID NO: 518326 - DNA, 19 bp, Mus musculus
  siRNA target sequence for 5730596K20Rik (NM_146091.2,931-949).
ccatatgtactaaatccat

SEQ ID NO: 518327 - DNA, 19 bp, Mus musculus
  siRNA target sequence for 5730596K20Rik (NM_146091.2,937-955).
gtactaaatccatctaaat

SEQ ID NO: 518328 - DNA, 19 bp, Mus musculus
  siRNA target sequence for 5730596K20Rik (NM_146091.2,940-958).
ctaaatccatctaaattaa

SEQ ID NO: 518329 - DNA, 19 bp, Mus musculus
  siRNA target sequence for 5730596K20Rik (NM_146091.2,995-1013).
ggggattgttggaatattt

SEQ ID NO: 518330 - DNA, 19 bp, Mus musculus
  siRNA target sequence for 5730596K20Rik (NM_146091.2,996-1014).
gggattgttggaatatttt

SEQ ID NO: 518331 - DNA, 19 bp, Mus musculus
  siRNA target sequence for 5730596K20Rik (NM_146091.2,997-1015).
ggattgttggaatatttta

SEQ ID NO: 518332 - DNA, 19 bp, Mus musculus
  siRNA target sequence for 5730596K20Rik (NM_146091.2,998-1016).
gattgttggaatattttaa

SEQ ID NO: 518333 - DNA, 19 bp, Mus musculus
  siRNA target sequence for 5730596K20Rik (NM_146091.2,1108-1126).
gcctctgccaaagatattt

SEQ ID NO: 518334 - DNA, 19 bp, Mus musculus
  siRNA target sequence for 5730596K20Rik (NM_146091.2,1175-1193).
ctccagatattttagaaga

SEQ ID NO: 518335 - DNA, 19 bp, Mus musculus
  siRNA target sequence for 5730596K20Rik (NM_146091.2,1194-1212).
gaagcacctagaattcaaa

SEQ ID NO: 518336 - DNA, 19 bp, Mus musculus
  siRNA target sequence for 5730596K20Rik (NM_146091.2,1197-1215).
gcacctagaattcaaacaa

SEQ ID NO: 518337 - DNA, 19 bp, Mus musculus
  siRNA target sequence for 5730596K20Rik (NM_146091.2,1220-1238).
ctctggaccactttaagaa

SEQ ID NO: 518338 - DNA, 19 bp, Mus musculus
  siRNA target sequence for 5730596K20Rik (NM_146091.2,1228-1246).
cactttaagaagatcaaaa

SEQ ID NO: 518339 - DNA, 19 bp, Mus musculus
  siRNA target sequence for 5730596K20Rik (NM_146091.2,1329-1347).
gcacaacggcagcaagaat

SEQ ID NO: 518340 - DNA, 19 bp, Mus musculus
  siRNA target sequence for 5730596K20Rik (NM_146091.2,1387-1405).
ggcatagcagcattgtaca

SEQ ID NO: 518341 - DNA, 19 bp, Mus musculus
  siRNA target sequence for 5730596K20Rik (NM_146091.2,1413-1431).
gggcttcacgggcttcatt

SEQ ID NO: 518342 - DNA, 19 bp, Mus musculus
  siRNA target sequence for 5730596K20Rik (NM_146091.2,1444-1462).
gtggcccagctgttcaact

SEQ ID NO: 518343 - DNA, 19 bp, Mus musculus
  siRNA target sequence for 5730596K20Rik (NM_146091.2,1452-1470).
gctgttcaactgtatggtt

SEQ ID NO: 518344 - DNA, 19 bp, Mus musculus
  siRNA target sequence for 5730596K20Rik (NM_146091.2,1467-1485).
ggttggactgctcttaata

SEQ ID NO: 518345 - DNA, 19 bp, Mus musculus
  siRNA target sequence for 5730596K20Rik (NM_146091.2,1534-1552).
ctgggtggagccattgact

SEQ ID NO: 518346 - DNA, 19 bp, Mus musculus
  siRNA target sequence for 5730596K20Rik (NM_146091.2,1553-1571).
ccggtgcagcatatgtgtt

SEQ ID NO: 518347 - DNA, 19 bp, Mus musculus
  siRNA target sequence for 5730596K20Rik (NM_146091.2,1554-1572).
cggtgcagcatatgtgtta

SEQ ID NO: 518348 - DNA, 19 bp, Mus musculus
  siRNA target sequence for 5730596K20Rik (NM_146091.2,1556-1574).
gtgcagcatatgtgttaga

SEQ ID NO: 518349 - DNA, 19 bp, Mus musculus
  siRNA target sequence for 5730596K20Rik (NM_146091.2,1575-1593).
gcaggcttcttcgcatatt

SEQ ID NO: 518350 - DNA, 19 bp, Mus musculus
  siRNA target sequence for 5730596K20Rik (NM_146091.2,1579-1597).
gcttcttcgcatattggta

SEQ ID NO: 518351 - DNA, 19 bp, Mus musculus
  siRNA target sequence for 5730596K20Rik (NM_146091.2,1580-1598).
cttcttcgcatattggtaa

SEQ ID NO: 518352 - DNA, 19 bp, Mus musculus
  siRNA target sequence for 5730596K20Rik (NM_146091.2,1587-1605).
gcatattggtaattctact

SEQ ID NO: 518353 - DNA, 19 bp, Mus musculus
  siRNA target sequence for 5730596K20Rik (NM_146091.2,1635-1653).
gagaccacctgctgataaa

SEQ ID NO: 518354 - DNA, 19 bp, Mus musculus
  siRNA target sequence for 5830461H18Rik (NM_029519.2,335-353).
cgtgaccggcaccttcatt

SEQ ID NO: 518355 - DNA, 19 bp, Mus musculus
  siRNA target sequence for 5830461H18Rik (NM_029519.2,571-589).
gcgtgaagcggtatgagaa

SEQ ID NO: 518356 - DNA, 19 bp, Mus musculus
  siRNA target sequence for 6330580M05Rik (NM_175122.2,313-331).
cccaccgtgggggtagatt

SEQ ID NO: 518357 - DNA, 19 bp, Mus musculus
  siRNA target sequence for 6330580M05Rik (NM_175122.2,424-442).
cgcgcctactacaggaatt

SEQ ID NO: 518358 - DNA, 19 bp, Mus musculus
  siRNA target sequence for 6330580M05Rik (NM_175122.2,426-444).
cgcctactacaggaattca

SEQ ID NO: 518359 - DNA, 19 bp, Mus musculus
  siRNA target sequence for 6330580M05Rik (NM_175122.2,445-463).
gtaggtggtcttctcttat

SEQ ID NO: 518360 - DNA, 19 bp, Mus musculus
  siRNA target sequence for 6330580M05Rik (NM_175122.2,449-467).
gtggtcttctcttatttga

SEQ ID NO: 518361 - DNA, 19 bp, Mus musculus
  siRNA target sequence for 6330580M05Rik (NM_175122.2,451-469).
ggtcttctcttatttgaca

SEQ ID NO: 518362 - DNA, 19 bp, Mus musculus
  siRNA target sequence for 6330580M05Rik (NM_175122.2,526-544).
cacgttcagccctaccaaa

SEQ ID NO: 518363 - DNA, 19 bp, Mus musculus
  siRNA target sequence for 6330580M05Rik (NM_175122.2,528-546).
cgttcagccctaccaaatt

SEQ ID NO: 518364 - DNA, 19 bp, Mus musculus
  siRNA target sequence for 6330580M05Rik (NM_175122.2,536-554).
cctaccaaattgtatttgt

SEQ ID NO: 518365 - DNA, 19 bp, Mus musculus
  siRNA target sequence for 6330580M05Rik (NM_175122.2,602-620).
gccacgaggccgagaaact

SEQ ID NO: 518366 - DNA, 19 bp, Mus musculus
  siRNA target sequence for 6330580M05Rik (NM_175122.2,626-644).
ctgcatacggcatgaagta

SEQ ID NO: 518367 - DNA, 19 bp, Mus musculus
  siRNA target sequence for 6330580M05Rik (NM_175122.2,708-726).
catatatgagctggttaaa

SEQ ID NO: 518368 - DNA, 19 bp, Mus musculus
  siRNA target sequence for 6330580M05Rik (NM_175122.2,770-788).
gtggatttgtaccaaatgt

SEQ ID NO: 518369 - DNA, 19 bp, Mus musculus
  siRNA target sequence for 6330580M05Rik (NM_175122.2,797-815).
cttcagaagaggttatcaa

SEQ ID NO: 518370 - DNA, 19 bp, Mus musculus
  siRNA target sequence for 9030617O03Rik (NM_145448.2,536-554).
gagcactcagaacaactaa

SEQ ID NO: 518371 - DNA, 19 bp, Mus musculus
  siRNA target sequence for 9030617O03Rik (NM_145448.2,538-556).
gcactcagaacaactaaaa

SEQ ID NO: 518372 - DNA, 19 bp, Mus musculus
  siRNA target sequence for 9030617O03Rik (NM_145448.2,563-581).
gtgaccttcatcatagact

SEQ ID NO: 518373 - DNA, 19 bp, Mus musculus
  siRNA target sequence for 9030617O03Rik (NM_145448.2,648-666).
gccatgcaggagcatacaa

SEQ ID NO: 518374 - DNA, 19 bp, Mus musculus
  siRNA target sequence for 9030617O03Rik (NM_145448.2,650-668).
catgcaggagcatacaaga

SEQ ID NO: 518375 - DNA, 19 bp, Mus musculus
  siRNA target sequence for 9030617O03Rik (NM_145448.2,653-671).
gcaggagcatacaagacaa

SEQ ID NO: 518376 - DNA, 19 bp, Mus musculus
  siRNA target sequence for 9030617O03Rik (NM_145448.2,788-806).
caaggacaacccattcaca

SEQ ID NO: 518377 - DNA, 19 bp, Mus musculus
  siRNA target sequence for 9030617O03Rik (NM_145448.2,849-867).
ctgactacgggagttatgt

SEQ ID NO: 518378 - DNA, 19 bp, Mus musculus
  siRNA target sequence for 9030617O03Rik (NM_145448.2,1156-1174).
cgggcacctactacttaaa

SEQ ID NO: 518379 - DNA, 19 bp, Mus musculus
  siRNA target sequence for 9030617O03Rik (NM_145448.2,1159-1177).
gcacctactacttaaagat

SEQ ID NO: 518380 - DNA, 19 bp, Mus musculus
  siRNA target sequence for 9030617O03Rik (NM_145448.2,1231-1249).
cactggattcccaacacat

SEQ ID NO: 518381 - DNA, 19 bp, Mus musculus
  siRNA target sequence for 9030617O03Rik (NM_145448.2,1235-1253).
ggattcccaacacatttca

SEQ ID NO: 518382 - DNA, 19 bp, Mus musculus
  siRNA target sequence for 9030617O03Rik (NM_145448.2,1242-1260).
caacacatttcaatcatga

SEQ ID NO: 518383 - DNA, 19 bp, Mus musculus
  siRNA target sequence for 9030617O03Rik (NM_145448.2,1349-1367).
gaccagagagccttgaact

SEQ ID NO: 518384 - DNA, 19 bp, Mus musculus
  siRNA target sequence for 9030617O03Rik (NM_145448.2,1358-1376).
gccttgaacttgcatatga

SEQ ID NO: 518385 - DNA, 19 bp, Mus musculus
  siRNA target sequence for 9030617O03Rik (NM_145448.2,1366-1384).
cttgcatatgaggattgtt

SEQ ID NO: 518386 - DNA, 19 bp, Mus musculus
  siRNA target sequence for 9030617O03Rik (NM_145448.2,1399-1417).
gcaaggagttctaaagaca

SEQ ID NO: 518387 - DNA, 19 bp, Mus musculus
  siRNA target sequence for 9030617O03Rik (NM_145448.2,1414-1432).
gacaccgattcccatatta

SEQ ID NO: 518388 - DNA, 19 bp, Mus musculus
  siRNA target sequence for 9030617O03Rik (NM_145448.2,1418-1436).
ccgattcccatattaactt

SEQ ID NO: 518389 - DNA, 19 bp, Mus musculus
  siRNA target sequence for 9030617O03Rik (NM_145448.2,1419-1437).
cgattcccatattaactta

SEQ ID NO: 518390 - DNA, 19 bp, Mus musculus
  siRNA target sequence for 9030617O03Rik (NM_145448.2,1457-1475).
gatgctcgggcatttttgt

SEQ ID NO: 518391 - DNA, 19 bp, Mus musculus
  siRNA target sequence for 9030617O03Rik (NM_145448.2,1489-1507).
ccctaagtctcctagattt

SEQ ID NO: 518392 - DNA, 19 bp, Mus musculus
  siRNA target sequence for 9030617O03Rik (NM_145448.2,1545-1563).
ctgatggcaattactacaa

SEQ ID NO: 518393 - DNA, 19 bp, Mus musculus
  siRNA target sequence for 9030617O03Rik (NM_145448.2,1576-1594).
gaacatcaaacacttagtt

SEQ ID NO: 518394 - DNA, 19 bp, Mus musculus
  siRNA target sequence for 9030617O03Rik (NM_145448.2,1588-1606).
cttagttgaccccattgat

SEQ ID NO: 518395 - DNA, 19 bp, Mus musculus
  siRNA target sequence for 9030617O03Rik (NM_145448.2,1595-1613).
gaccccattgatgacattt

SEQ ID NO: 518396 - DNA, 19 bp, Mus musculus
  siRNA target sequence for 9030617O03Rik (NM_145448.2,1615-1633).
ccttgctgcacaaaagatt

SEQ ID NO: 518397 - DNA, 19 bp, Mus musculus
  siRNA target sequence for 9030617O03Rik (NM_145448.2,1665-1683).
gaggcaatgagcttggaat

SEQ ID NO: 518398 - DNA, 19 bp, Mus musculus
  siRNA target sequence for 9030617O03Rik (NM_145448.2,1675-1693).
gcttggaatgggcaaagta

SEQ ID NO: 518399 - DNA, 19 bp, Mus musculus
  siRNA target sequence for 9030617O03Rik (NM_145448.2,1702-1720).
cgtgaagaagcacattaga

SEQ ID NO: 518400 - DNA, 19 bp, Mus musculus
  siRNA target sequence for 9030617O03Rik (NM_145448.2,1799-1817).
ctggcctgtgcactgtata

SEQ ID NO: 518401 - DNA, 19 bp, Mus musculus
  siRNA target sequence for 9030617O03Rik (NM_145448.2,1806-1824).
gtgcactgtatattctgaa

SEQ ID NO: 518402 - DNA, 19 bp, Mus musculus
  siRNA target sequence for 9030617O03Rik (NM_145448.2,1811-1829).
ctgtatattctgaactcat

SEQ ID NO: 518403 - DNA, 19 bp, Mus musculus
  siRNA target sequence for 9130022B02Rik (NM_028994.1,287-305).
ccgtgccgtagcatccaaa

SEQ ID NO: 518404 - DNA, 19 bp, Mus musculus
  siRNA target sequence for 9130022B02Rik (NM_028994.1,314-332).
gtgctcagtggagatatga

SEQ ID NO: 518405 - DNA, 19 bp, Mus musculus
  siRNA target sequence for 9130022B02Rik (NM_028994.1,470-488).
cgcaaactccccaagtata

SEQ ID NO: 518406 - DNA, 19 bp, Mus musculus
  siRNA target sequence for 9130022B02Rik (NM_028994.1,471-489).
gcaaactccccaagtataa

SEQ ID NO: 518407 - DNA, 19 bp, Mus musculus
  siRNA target sequence for 9130022B02Rik (NM_028994.1,476-494).
ctccccaagtataagaact

SEQ ID NO: 518408 - DNA, 19 bp, Mus musculus
  siRNA target sequence for 9130022B02Rik (NM_028994.1,521-539).
gatgtggcacgggtagaaa

SEQ ID NO: 518409 - DNA, 19 bp, Mus musculus
  siRNA target sequence for 9130022B02Rik (NM_028994.1,621-639).
ggatgtccccagatgagtt

SEQ ID NO: 518410 - DNA, 19 bp, Mus musculus
  siRNA target sequence for 9130022B02Rik (NM_028994.1,773-791).
gtggccagtatgcgtatta

SEQ ID NO: 518411 - DNA, 19 bp, Mus musculus
  siRNA target sequence for 9130022B02Rik (NM_028994.1,776-794).
gccagtatgcgtattatga

SEQ ID NO: 518412 - DNA, 19 bp, Mus musculus
  siRNA target sequence for 9130022B02Rik (NM_028994.1,903-921).
ggccgtgcaatccagaaaa

SEQ ID NO: 518413 - DNA, 19 bp, Mus musculus
  siRNA target sequence for 9130022B02Rik (NM_028994.1,904-922).
gccgtgcaatccagaaaaa

SEQ ID NO: 518414 - DNA, 19 bp, Mus musculus
  siRNA target sequence for 9130022B02Rik (NM_028994.1,1211-1229).
gcctggatgaggtttgaca

SEQ ID NO: 518415 - DNA, 19 bp, Mus musculus
  siRNA target sequence for 9130022B02Rik (NM_028994.1,1309-1327).
caatgccatggccacaatt

SEQ ID NO: 518416 - DNA, 19 bp, Mus musculus
  siRNA target sequence for 9130022B02Rik (NM_028994.1,1319-1337).
gccacaattcagagtaata

SEQ ID NO: 518417 - DNA, 19 bp, Mus musculus
  siRNA target sequence for 9130022B02Rik (NM_028994.1,1321-1339).
cacaattcagagtaatact

SEQ ID NO: 518418 - DNA, 19 bp, Mus musculus
  siRNA target sequence for 9130022B02Rik (NM_028994.1,1323-1341).
caattcagagtaatactct

SEQ ID NO: 518419 - DNA, 19 bp, Mus musculus
  siRNA target sequence for 9130022B02Rik (NM_028994.1,1406-1424).
ccgcctggtgtcaccataa

SEQ ID NO: 518420 - DNA, 19 bp, Mus musculus
  siRNA target sequence for 9130022B02Rik (NM_028994.1,1409-1427).
cctggtgtcaccataacct

SEQ ID NO: 518421 - DNA, 19 bp, Mus musculus
  siRNA target sequence for 9130022B02Rik (NM_028994.1,1479-1497).
caaactcgcgcttttgtgt

SEQ ID NO: 518422 - DNA, 19 bp, Mus musculus
  siRNA target sequence for 9130022B02Rik (NM_028994.1,1542-1560).
cagaaggtgtccctattga

SEQ ID NO: 518423 - DNA, 19 bp, Mus musculus
  siRNA target sequence for 9130022B02Rik (NM_028994.1,1802-1820).
cgtatcttccatgtcaatt

SEQ ID NO: 518424 - DNA, 19 bp, Mus musculus
  siRNA target sequence for 9130022B02Rik (NM_028994.1,1935-1953).
ccattgggctagtaccaaa

SEQ ID NO: 518425 - DNA, 19 bp, Mus musculus
  siRNA target sequence for 9130022B02Rik (NM_028994.1,2032-2050).
gcaggaggttcgtgatatt

SEQ ID NO: 518426 - DNA, 19 bp, Mus musculus
  siRNA target sequence for 9130022B02Rik (NM_028994.1,2119-2137).
ggaaggacgtgtacaaaaa

SEQ ID NO: 518427 - DNA, 19 bp, Mus musculus
  siRNA target sequence for 9130022B02Rik (NM_028994.1,2123-2141).
ggacgtgtacaaaaaatgt

SEQ ID NO: 518428 - DNA, 19 bp, Mus musculus
  siRNA target sequence for 9330195C02Rik (NM_176971.1,270-288).
gggaaatcccttctcttaa

SEQ ID NO: 518429 - DNA, 19 bp, Mus musculus
  siRNA target sequence for 9330195C02Rik (NM_176971.1,315-333).
gttgggaaaagctcactta

SEQ ID NO: 518430 - DNA, 19 bp, Mus musculus
  siRNA target sequence for 9330195C02Rik (NM_176971.1,318-336).
gggaaaagctcacttatga

SEQ ID NO: 518431 - DNA, 19 bp, Mus musculus
  siRNA target sequence for 9330195C02Rik (NM_176971.1,328-346).
cacttatgaaccgttatgt

SEQ ID NO: 518432 - DNA, 19 bp, Mus musculus
  siRNA target sequence for 9330195C02Rik (NM_176971.1,360-378).
gactcccaggcttttcaca

SEQ ID NO: 518433 - DNA, 19 bp, Mus musculus
  siRNA target sequence for 9330195C02Rik (NM_176971.1,386-404).
ggtagagttcttaaatcga

SEQ ID NO: 518434 - DNA, 19 bp, Mus musculus
  siRNA target sequence for 9330195C02Rik (NM_176971.1,475-493).
gccttagaacaccattcta

SEQ ID NO: 518435 - DNA, 19 bp, Mus musculus
  siRNA target sequence for 9330195C02Rik (NM_176971.1,544-562).
gctttgagaaccttggtaa

SEQ ID NO: 518436 - DNA, 19 bp, Mus musculus
  siRNA target sequence for 9330195C02Rik (NM_176971.1,559-577).
gtaactggcaaaaagagtt

SEQ ID NO: 518437 - DNA, 19 bp, Mus musculus
  siRNA target sequence for 9330195C02Rik (NM_176971.1,565-583).
ggcaaaaagagttcatcta

SEQ ID NO: 518438 - DNA, 19 bp, Mus musculus
  siRNA target sequence for 9330195C02Rik (NM_176971.1,578-596).
catctactatgcagatgta

SEQ ID NO: 518439 - DNA, 19 bp, Mus musculus
  siRNA target sequence for 9330195C02Rik (NM_176971.1,594-612).
gtaaaggacccagatcatt

SEQ ID NO: 518440 - DNA, 19 bp, Mus musculus
  siRNA target sequence for 9330195C02Rik (NM_176971.1,631-649).
gtaacaaggtagacaaaga

SEQ ID NO: 518441 - DNA, 19 bp, Mus musculus
  siRNA target sequence for 9330195C02Rik (NM_176971.1,688-706).
gcatggagaatggaaatta

SEQ ID NO: 518442 - DNA, 19 bp, Mus musculus
  siRNA target sequence for 9330195C02Rik (NM_176971.1,707-725).
cccttatctagaaacaagt

SEQ ID NO: 518443 - DNA, 19 bp, Mus musculus
  siRNA target sequence for 9330195C02Rik (NM_176971.1,724-742).
gtgccaaagatgatactaa

SEQ ID NO: 518444 - DNA, 19 bp, Mus musculus
  siRNA target sequence for 9330195C02Rik (NM_176971.1,795-813).
cagctggaacattgtatgt

SEQ ID NO: 518445 - DNA, 19 bp, Mus musculus
  siRNA target sequence for 9330195C02Rik (NM_176971.1,816-834).
ggtcacaccattgatttga

SEQ ID NO: 518446 - DNA, 19 bp, Mus musculus
  siRNA target sequence for 9330195C02Rik (NM_176971.1,819-837).
cacaccattgatttgaaca

SEQ ID NO: 518447 - DNA, 19 bp, Mus musculus
  siRNA target sequence for 9330195C02Rik (NM_176971.1,845-863).
caaagcaagttcttcttgt

SEQ ID NO: 518448 - DNA, 19 bp, Mus musculus
  siRNA target sequence for 9630020E24Rik (NM_172646.1,406-424).
ccagacggcctcttgtact

SEQ ID NO: 518449 - DNA, 19 bp, Mus musculus
  siRNA target sequence for 9630020E24Rik (NM_172646.1,428-446).
gcttgtcacctctaaagca

SEQ ID NO: 518450 - DNA, 19 bp, Mus musculus
  siRNA target sequence for 9630020E24Rik (NM_172646.1,454-472).
ccgagtttctacattgcaa

SEQ ID NO: 518451 - DNA, 19 bp, Mus musculus
  siRNA target sequence for 9630020E24Rik (NM_172646.1,455-473).
cgagtttctacattgcaaa

SEQ ID NO: 518452 - DNA, 19 bp, Mus musculus
  siRNA target sequence for 9630020E24Rik (NM_172646.1,530-548).
ccgcgtaacaggaatgaat

SEQ ID NO: 518453 - DNA, 19 bp, Mus musculus
  siRNA target sequence for 9630020E24Rik (NM_172646.1,531-549).
cgcgtaacaggaatgaata

SEQ ID NO: 518454 - DNA, 19 bp, Mus musculus
  siRNA target sequence for 9630020E24Rik (NM_172646.1,532-550).
gcgtaacaggaatgaataa

SEQ ID NO: 518455 - DNA, 19 bp, Mus musculus
  siRNA target sequence for 9630020E24Rik (NM_172646.1,587-605).
ctctccccacgtgttaaat

SEQ ID NO: 518456 - DNA, 19 bp, Mus musculus
  siRNA target sequence for 9630020E24Rik (NM_172646.1,591-609).
ccccacgtgttaaatctaa

SEQ ID NO: 518457 - DNA, 19 bp, Mus musculus
  siRNA target sequence for 9630020E24Rik (NM_172646.1,618-636).
gacctacctggaataacga

SEQ ID NO: 518458 - DNA, 19 bp, Mus musculus
  siRNA target sequence for 9630020E24Rik (NM_172646.1,669-687).
gagtatcagatcagagata

SEQ ID NO: 518459 - DNA, 19 bp, Mus musculus
  siRNA target sequence for 9630020E24Rik (NM_172646.1,675-693).
cagatcagagatatgatta

SEQ ID NO: 518460 - DNA, 19 bp, Mus musculus
  siRNA target sequence for 9630020E24Rik (NM_172646.1,1009-1027).
gacacattgctgatcgtat

SEQ ID NO: 518461 - DNA, 19 bp, Mus musculus
  siRNA target sequence for 9630020E24Rik (NM_172646.1,1061-1079).
gcaacttaccaaccatatt

SEQ ID NO: 518462 - DNA, 19 bp, Mus musculus
  siRNA target sequence for 9630020E24Rik (NM_172646.1,1070-1088).
caaccatattcgagatact

SEQ ID NO: 518463 - DNA, 19 bp, Mus musculus
  siRNA target sequence for 9630020E24Rik (NM_172646.1,1282-1300).
ctggcggtgctaagatcaa

SEQ ID NO: 518464 - DNA, 19 bp, Mus musculus
  siRNA target sequence for 9630020E24Rik (NM_172646.1,1378-1396).
gctacgcaatcaaaaacat

SEQ ID NO: 518465 - DNA, 19 bp, Mus musculus
  siRNA target sequence for 9630020E24Rik (NM_172646.1,1379-1397).
ctacgcaatcaaaaacata

SEQ ID NO: 518466 - DNA, 19 bp, Mus musculus
  siRNA target sequence for 9630020E24Rik (NM_172646.1,1382-1400).
cgcaatcaaaaacatacat

SEQ ID NO: 518467 - DNA, 19 bp, Mus musculus
  siRNA target sequence for 9630020E24Rik (NM_172646.1,1403-1421).
gatcaggacagggttgttt

SEQ ID NO: 518468 - DNA, 19 bp, Mus musculus
  siRNA target sequence for 9630020E24Rik (NM_172646.1,1433-1451).
ggcgtttgaggcaatagtt

SEQ ID NO: 518469 - DNA, 19 bp, Mus musculus
  siRNA target sequence for 9630020E24Rik (NM_172646.1,1434-1452).
gcgtttgaggcaatagtta

SEQ ID NO: 518470 - DNA, 19 bp, Mus musculus
  siRNA target sequence for 9630020E24Rik (NM_172646.1,1435-1453).
cgtttgaggcaatagttaa

SEQ ID NO: 518471 - DNA, 19 bp, Mus musculus
  siRNA target sequence for 9630020E24Rik (NM_172646.1,1637-1655).
cctgctactgattgacatt

SEQ ID NO: 518472 - DNA, 19 bp, Mus musculus
  siRNA target sequence for 9630020E24Rik (NM_172646.1,1640-1658).
gctactgattgacattcaa

SEQ ID NO: 518473 - DNA, 19 bp, Mus musculus
  siRNA target sequence for 9630020E24Rik (NM_172646.1,1652-1670).
cattcaagtctcttacatt

SEQ ID NO: 518474 - DNA, 19 bp, Mus musculus
  siRNA target sequence for 9630020E24Rik (NM_172646.1,1656-1674).
caagtctcttacattaaca

SEQ ID NO: 518475 - DNA, 19 bp, Mus musculus
  siRNA target sequence for 9630020E24Rik (NM_172646.1,1717-1735).
ggagcagtcaggttcacaa

SEQ ID NO: 518476 - DNA, 19 bp, Mus musculus
  siRNA target sequence for 9630020E24Rik (NM_172646.1,1750-1768).
gaaatcaggtgattcgtaa

SEQ ID NO: 518477 - DNA, 19 bp, Mus musculus
  siRNA target sequence for 9630020E24Rik (NM_172646.1,1842-1860).
gaaagcctgtcctggtata

SEQ ID NO: 518478 - DNA, 19 bp, Mus musculus
  siRNA target sequence for 9630020E24Rik (NM_172646.1,2075-2093).
ctacccagataaatctgta

SEQ ID NO: 518479 - DNA, 19 bp, Mus musculus
  siRNA target sequence for 9630020E24Rik (NM_172646.1,2164-2182).
ccatacgcaacctagtaga

SEQ ID NO: 518480 - DNA, 19 bp, Mus musculus
  siRNA target sequence for 9630020E24Rik (NM_172646.1,2175-2193).
ctagtagactcctacatgt

SEQ ID NO: 518481 - DNA, 19 bp, Mus musculus
  siRNA target sequence for 9630020E24Rik (NM_172646.1,2178-2196).
gtagactcctacatgtcaa

SEQ ID NO: 518482 - DNA, 19 bp, Mus musculus
  siRNA target sequence for 9630020E24Rik (NM_172646.1,2185-2203).
cctacatgtcaataatcaa

SEQ ID NO: 518483 - DNA, 19 bp, Mus musculus
  siRNA target sequence for 9630020E24Rik (NM_172646.1,2189-2207).
catgtcaataatcaacaaa

SEQ ID NO: 518484 - DNA, 19 bp, Mus musculus
  siRNA target sequence for 9630020E24Rik (NM_172646.1,2194-2212).
caataatcaacaaatgcat

SEQ ID NO: 518485 - DNA, 19 bp, Mus musculus
  siRNA target sequence for 9630020E24Rik (NM_172646.1,2204-2222).
caaatgcatccgagactta

SEQ ID NO: 518486 - DNA, 19 bp, Mus musculus
  siRNA target sequence for 9630020E24Rik (NM_172646.1,2210-2228).
catccgagacttaattcca

SEQ ID NO: 518487 - DNA, 19 bp, Mus musculus
  siRNA target sequence for 9630020E24Rik (NM_172646.1,2214-2232).
cgagacttaattccaaaaa

SEQ ID NO: 518488 - DNA, 19 bp, Mus musculus
  siRNA target sequence for 9630020E24Rik (NM_172646.1,2233-2251).
caataatgcatcttatgat

SEQ ID NO: 518489 - DNA, 19 bp, Mus musculus
  siRNA target sequence for 9630020E24Rik (NM_172646.1,2244-2262).
cttatgatcaataacgtta

SEQ ID NO: 518490 - DNA, 19 bp, Mus musculus
  siRNA target sequence for 9630020E24Rik (NM_172646.1,2259-2277).
gttaaagacttcatcaact

SEQ ID NO: 518491 - DNA, 19 bp, Mus musculus
  siRNA target sequence for 9630020E24Rik (NM_172646.1,2286-2304).
ctagcacagctctactctt

SEQ ID NO: 518492 - DNA, 19 bp, Mus musculus
  siRNA target sequence for 9630020E24Rik (NM_172646.1,2347-2365).
ctcagcgccgagatgagat

SEQ ID NO: 518493 - DNA, 19 bp, Mus musculus
  siRNA target sequence for 9630020E24Rik (NM_172646.1,2375-2393).
gtaccaagccctgaaagaa

SEQ ID NO: 518494 - DNA, 19 bp, Mus musculus
  siRNA target sequence for 9630020E24Rik (NM_172646.1,2511-2529).
caacgaaggctgacgataa

SEQ ID NO: 518495 - DNA, 19 bp, Mus musculus
  siRNA target sequence for 9630020E24Rik (NM_172646.1,2743-2761).
caactcgccccactataat

SEQ ID NO: 518496 - DNA, 19 bp, Mus musculus
  siRNA target sequence for 9630020E24Rik (NM_172646.1,2772-2790).
gaatcctcactgttagact

SEQ ID NO: 518497 - DNA, 19 bp, Mus musculus
  siRNA target sequence for 9830147J24Rik (NM_145545.2,189-207).
gggtgaactccaaagcaat

SEQ ID NO: 518498 - DNA, 19 bp, Mus musculus
  siRNA target sequence for 9830147J24Rik (NM_145545.2,196-214).
ctccaaagcaataaacatt

SEQ ID NO: 518499 - DNA, 19 bp, Mus musculus
  siRNA target sequence for 9830147J24Rik (NM_145545.2,260-278).
ctataccgtacgggaaaat

SEQ ID NO: 518500 - DNA, 19 bp, Mus musculus
  siRNA target sequence for 9830147J24Rik (NM_145545.2,270-288).
cgggaaaatcctacttgat

SEQ ID NO: 518501 - DNA, 19 bp, Mus musculus
  siRNA target sequence for 9830147J24Rik (NM_145545.2,331-349).
cacagttaggtctgaaact

SEQ ID NO: 518502 - DNA, 19 bp, Mus musculus
  siRNA target sequence for 9830147J24Rik (NM_145545.2,333-351).
cagttaggtctgaaactaa

SEQ ID NO: 518503 - DNA, 19 bp, Mus musculus
  siRNA target sequence for 9830147J24Rik (NM_145545.2,592-610).
cacttcacggtctgaagaa

SEQ ID NO: 518504 - DNA, 19 bp, Mus musculus
  siRNA target sequence for 9830147J24Rik (NM_145545.2,658-676).
gactgttcgagatttcgtt

SEQ ID NO: 518505 - DNA, 19 bp, Mus musculus
  siRNA target sequence for 9830147J24Rik (NM_145545.2,829-847).
ctttgatcgacctacaaaa

SEQ ID NO: 518506 - DNA, 19 bp, Mus musculus
  siRNA target sequence for 9830147J24Rik (NM_145545.2,833-851).
gatcgacctacaaaagaca

SEQ ID NO: 518507 - DNA, 19 bp, Mus musculus
  siRNA target sequence for 9830147J24Rik (NM_145545.2,892-910).
gttggatcacagtttccaa

SEQ ID NO: 518508 - DNA, 19 bp, Mus musculus
  siRNA target sequence for 9830147J24Rik (NM_145545.2,974-992).
ggaatcgttgtcaatggaa

SEQ ID NO: 518509 - DNA, 19 bp, Mus musculus
  siRNA target sequence for 9830147J24Rik (NM_145545.2,975-993).
gaatcgttgtcaatggaaa

SEQ ID NO: 518510 - DNA, 19 bp, Mus musculus
  siRNA target sequence for 9830147J24Rik (NM_145545.2,1041-1059).
gagacgtgccgtgtttaga

SEQ ID NO: 518511 - DNA, 19 bp, Mus musculus
  siRNA target sequence for 9830147J24Rik (NM_145545.2,1043-1061).
gacgtgccgtgtttagaga

SEQ ID NO: 518512 - DNA, 19 bp, Mus musculus
  siRNA target sequence for 9830147J24Rik (NM_145545.2,1383-1401).
gcatctcacgtggagtttt

SEQ ID NO: 518513 - DNA, 19 bp, Mus musculus
  siRNA target sequence for 9830147J24Rik (NM_145545.2,1387-1405).
ctcacgtggagttttctct

SEQ ID NO: 518514 - DNA, 19 bp, Mus musculus
  siRNA target sequence for 9830147J24Rik (NM_145545.2,1777-1795).
caagttgaagattcaaaaa

SEQ ID NO: 518515 - DNA, 19 bp, Mus musculus
  siRNA target sequence for 9830147J24Rik (NM_145545.2,1802-1820).
cttaatgagggatttaaaa

SEQ ID NO: 518516 - DNA, 19 bp, Mus musculus
  siRNA target sequence for 9830147J24Rik (NM_145545.2,1827-1845).
gtgaagcaatggatttgga

SEQ ID NO: 518517 - DNA, 19 bp, Mus musculus
  siRNA target sequence for 9830147J24Rik (NM_145545.2,1896-1914).
cattgggtgcaaaaatcct

SEQ ID NO: 518518 - DNA, 19 bp, Mus musculus
  siRNA target sequence for 9830147J24Rik (NM_145545.2,1916-1934).
gatgggtttggagatgtat

SEQ ID NO: 518519 - DNA, 19 bp, Mus musculus
  siRNA target sequence for 9830147J24Rik (NM_145545.2,1926-1944).
gagatgtattaatttcagt

SEQ ID NO: 518520 - DNA, 19 bp, Mus musculus
  siRNA target sequence for 9830147J24Rik (NM_145545.2,1950-1968).
ctggttctggtaagtactt

SEQ ID NO: 518521 - DNA, 19 bp, Mus musculus
  siRNA target sequence for 9830147J24Rik (NM_145545.2,1966-1984).
ctttggtctagggttgaaa

SEQ ID NO: 518522 - DNA, 19 bp, Mus musculus
  siRNA target sequence for 9830147J24Rik (NM_145545.2,1970-1988).
ggtctagggttgaaaatat

SEQ ID NO: 518523 - DNA, 19 bp, Mus musculus
  siRNA target sequence for 9830147J24Rik (NM_145545.2,1971-1989).
gtctagggttgaaaatatt

SEQ ID NO: 518524 - DNA, 19 bp, Mus musculus
  siRNA target sequence for Adss (NM_007421.1,286-304).
cccagcggcatcatcaaca

SEQ ID NO: 518525 - DNA, 19 bp, Mus musculus
  siRNA target sequence for Adss (NM_007421.1,305-323).
ccaaggccgtgtcattcat

SEQ ID NO: 518526 - DNA, 19 bp, Mus musculus
  siRNA target sequence for Adss (NM_007421.1,306-324).
caaggccgtgtcattcatt

SEQ ID NO: 518527 - DNA, 19 bp, Mus musculus
  siRNA target sequence for Adss (NM_007421.1,403-421).
gagaagcgtctcatcatct

SEQ ID NO: 518528 - DNA, 19 bp, Mus musculus
  siRNA target sequence for Adss (NM_007421.1,526-544).
ggaatcggaccaacttact

SEQ ID NO: 518529 - DNA, 19 bp, Mus musculus
  siRNA target sequence for Adss (NM_007421.1,591-609).
ggattttgacgagttttct

SEQ ID NO: 518530 - DNA, 19 bp, Mus musculus
  siRNA target sequence for Adss (NM_007421.1,651-669).
ccccaccctggaaatagat

SEQ ID NO: 518531 - DNA, 19 bp, Mus musculus
  siRNA target sequence for Adss (NM_007421.1,670-688).
gtggaaggtcaactcaaaa

SEQ ID NO: 518532 - DNA, 19 bp, Mus musculus
  siRNA target sequence for Adss (NM_007421.1,727-745).
cgagatggtgtctacttca

SEQ ID NO: 518533 - DNA, 19 bp, Mus musculus
  siRNA target sequence for Adss (NM_007421.1,734-752).
gtgtctacttcatgtatga

SEQ ID NO: 518534 - DNA, 19 bp, Mus musculus
  siRNA target sequence for Adss (NM_007421.1,802-820).
gccctgctcgacatcgatt

SEQ ID NO: 518535 - DNA, 19 bp, Mus musculus
  siRNA target sequence for Adss (NM_007421.1,803-821).
ccctgctcgacatcgattt

SEQ ID NO: 518536 - DNA, 19 bp, Mus musculus
  siRNA target sequence for Adss (NM_007421.1,897-915).
gaacataggcgatgtgtat

SEQ ID NO: 518537 - DNA, 19 bp, Mus musculus
  siRNA target sequence for Adss (NM_007421.1,960-978).
ccccacggagcagatcaat

SEQ ID NO: 518538 - DNA, 19 bp, Mus musculus
  siRNA target sequence for Adss (NM_007421.1,1132-1150).
gatgtcctgagcgagatta

SEQ ID NO: 518539 - DNA, 19 bp, Mus musculus
  siRNA target sequence for Adss (NM_007421.1,1137-1155).
cctgagcgagattaaagtt

SEQ ID NO: 518540 - DNA, 19 bp, Mus musculus
  siRNA target sequence for Adss (NM_007421.1,1224-1242).
ggtggaggtcgagtatgaa

SEQ ID NO: 518541 - DNA, 19 bp, Mus musculus
  siRNA target sequence for Adss (NM_007421.1,1225-1243).
gtggaggtcgagtatgaaa

SEQ ID NO: 518542 - DNA, 19 bp, Mus musculus
  siRNA target sequence for Adss (NM_007421.1,1227-1245).
ggaggtcgagtatgaaaca

SEQ ID NO: 518543 - DNA, 19 bp, Mus musculus
  siRNA target sequence for Adss (NM_007421.1,1338-1356).
catgggtgttgcagtcaaa

SEQ ID NO: 518544 - DNA, 19 bp, Mus musculus
  siRNA target sequence for Adss2 (NM_007422.2,291-309).
gctgccagggagggaataa

SEQ ID NO: 518545 - DNA, 19 bp, Mus musculus
  siRNA target sequence for Adss2 (NM_007422.2,317-335).
cacacagttgtcgtagatt

SEQ ID NO: 518546 - DNA, 19 bp, Mus musculus
  siRNA target sequence for Adss2 (NM_007422.2,328-346).
cgtagattctgtggaatat

SEQ ID NO: 518547 - DNA, 19 bp, Mus musculus
  siRNA target sequence for Adss2 (NM_007422.2,347-365).
gactttcatcttttaccta

SEQ ID NO: 518548 - DNA, 19 bp, Mus musculus
  siRNA target sequence for Adss2 (NM_007422.2,402-420).
gaaatggagtggtaattca

SEQ ID NO: 518549 - DNA, 19 bp, Mus musculus
  siRNA target sequence for Adss2 (NM_007422.2,444-462).
cggagaaaaatgttcagaa

SEQ ID NO: 518550 - DNA, 19 bp, Mus musculus
  siRNA target sequence for Adss2 (NM_007422.2,460-478).
gaagggaaaaggtctagat

SEQ ID NO: 518551 - DNA, 19 bp, Mus musculus
  siRNA target sequence for Adss2 (NM_007422.2,485-503).
gagaaaaggcttatcatat

SEQ ID NO: 518552 - DNA, 19 bp, Mus musculus
  siRNA target sequence for Adss2 (NM_007422.2,504-522).
cggacagagctcatattgt

SEQ ID NO: 518553 - DNA, 19 bp, Mus musculus
  siRNA target sequence for Adss2 (NM_007422.2,508-526).
cagagctcatattgtgttt

SEQ ID NO: 518554 - DNA, 19 bp, Mus musculus
  siRNA target sequence for Adss2 (NM_007422.2,510-528).
gagctcatattgtgtttga

SEQ ID NO: 518555 - DNA, 19 bp, Mus musculus
  siRNA target sequence for Adss2 (NM_007422.2,512-530).
gctcatattgtgtttgact

SEQ ID NO: 518556 - DNA, 19 bp, Mus musculus
  siRNA target sequence for Adss2 (NM_007422.2,513-531).
ctcatattgtgtttgactt

SEQ ID NO: 518557 - DNA, 19 bp, Mus musculus
  siRNA target sequence for Adss2 (NM_007422.2,607-625).
ggggattggccctgtgtat

SEQ ID NO: 518558 - DNA, 19 bp, Mus musculus
  siRNA target sequence for Adss2 (NM_007422.2,685-703).
cttctctgagaggttcaaa

SEQ ID NO: 518559 - DNA, 19 bp, Mus musculus
  siRNA target sequence for Adss2 (NM_007422.2,696-714).
ggttcaaagttctagctaa

SEQ ID NO: 518560 - DNA, 19 bp, Mus musculus
  siRNA target sequence for Adss2 (NM_007422.2,707-725).
ctagctaaccagtataaat

SEQ ID NO: 518561 - DNA, 19 bp, Mus musculus
  siRNA target sequence for Adss2 (NM_007422.2,710-728).
gctaaccagtataaatcta

SEQ ID NO: 518562 - DNA, 19 bp, Mus musculus
  siRNA target sequence for Adss2 (NM_007422.2,734-752).
ccgactttggaaatagaca

SEQ ID NO: 518563 - DNA, 19 bp, Mus musculus
  siRNA target sequence for Adss2 (NM_007422.2,736-754).
gactttggaaatagacatt

SEQ ID NO: 518564 - DNA, 19 bp, Mus musculus
  siRNA target sequence for Adss2 (NM_007422.2,767-785).
cagcaactcaagggttata

SEQ ID NO: 518565 - DNA, 19 bp, Mus musculus
  siRNA target sequence for Adss2 (NM_007422.2,778-796).
gggttatatggaaaggatt

SEQ ID NO: 518566 - DNA, 19 bp, Mus musculus
  siRNA target sequence for Adss2 (NM_007422.2,779-797).
ggttatatggaaaggatta

SEQ ID NO: 518567 - DNA, 19 bp, Mus musculus
  siRNA target sequence for Adss2 (NM_007422.2,780-798).
gttatatggaaaggattaa

SEQ ID NO: 518568 - DNA, 19 bp, Mus musculus
  siRNA target sequence for Adss2 (NM_007422.2,812-830).
gatggagtttatttcctat

SEQ ID NO: 518569 - DNA, 19 bp, Mus musculus
  siRNA target sequence for Adss2 (NM_007422.2,845-863).
ggaccacccaagaaaatct

SEQ ID NO: 518570 - DNA, 19 bp, Mus musculus
  siRNA target sequence for Adss2 (NM_007422.2,846-864).
gaccacccaagaaaatctt

SEQ ID NO: 518571 - DNA, 19 bp, Mus musculus
  siRNA target sequence for Adss2 (NM_007422.2,882-900).
cagcattgttagatattga

SEQ ID NO: 518572 - DNA, 19 bp, Mus musculus
  siRNA target sequence for Adss2 (NM_007422.2,884-902).
gcattgttagatattgatt

SEQ ID NO: 518573 - DNA, 19 bp, Mus musculus
  siRNA target sequence for Adss2 (NM_007422.2,905-923).
ggaacttacccttttgtaa

SEQ ID NO: 518574 - DNA, 19 bp, Mus musculus
  siRNA target sequence for Adss2 (NM_007422.2,925-943).
ctcttcaaactgtactgtt

SEQ ID NO: 518575 - DNA, 19 bp, Mus musculus
  siRNA target sequence for Adss2 (NM_007422.2,964-982).
gggcatgccccctcaaaat

SEQ ID NO: 518576 - DNA, 19 bp, Mus musculus
  siRNA target sequence for Adss2 (NM_007422.2,966-984).
gcatgccccctcaaaatgt

SEQ ID NO: 518577 - DNA, 19 bp, Mus musculus
  siRNA target sequence for Adss2 (NM_007422.2,1015-1033).
caccactagagttggtatt

SEQ ID NO: 518578 - DNA, 19 bp, Mus musculus
  siRNA target sequence for Adss2 (NM_007422.2,1018-1036).
cactagagttggtattggt

SEQ ID NO: 518579 - DNA, 19 bp, Mus musculus
  siRNA target sequence for Adss2 (NM_007422.2,1057-1075).
caatgaaattggagaatta

SEQ ID NO: 518580 - DNA, 19 bp, Mus musculus
  siRNA target sequence for Adss2 (NM_007422.2,1079-1097).
caaacacggggtagagaat

SEQ ID NO: 518581 - DNA, 19 bp, Mus musculus
  siRNA target sequence for Adss2 (NM_007422.2,1103-1121).
gtaactactggaaggaaaa

SEQ ID NO: 518582 - DNA, 19 bp, Mus musculus
  siRNA target sequence for Adss2 (NM_007422.2,1130-1148).
ggctggttggaccttgttt

SEQ ID NO: 518583 - DNA, 19 bp, Mus musculus
  siRNA target sequence for Adss2 (NM_007422.2,1132-1150).
ctggttggaccttgtttca

SEQ ID NO: 518584 - DNA, 19 bp, Mus musculus
  siRNA target sequence for Adss2 (NM_007422.2,1138-1156).
ggaccttgtttcactcaaa

SEQ ID NO: 518585 - DNA, 19 bp, Mus musculus
  siRNA target sequence for Adss2 (NM_007422.2,1139-1157).
gaccttgtttcactcaaat

SEQ ID NO: 518586 - DNA, 19 bp, Mus musculus
  siRNA target sequence for Adss2 (NM_007422.2,1151-1169).
ctcaaatatgctcatatga

SEQ ID NO: 518587 - DNA, 19 bp, Mus musculus
  siRNA target sequence for Adss2 (NM_007422.2,1160-1178).
gctcatatgatcaatggat

SEQ ID NO: 518588 - DNA, 19 bp, Mus musculus
  siRNA target sequence for Adss2 (NM_007422.2,1161-1179).
ctcatatgatcaatggatt

SEQ ID NO: 518589 - DNA, 19 bp, Mus musculus
  siRNA target sequence for Adss2 (NM_007422.2,1191-1209).
cccttaccaagttggatat

SEQ ID NO: 518590 - DNA, 19 bp, Mus musculus
  siRNA target sequence for Adss2 (NM_007422.2,1214-1232).
gatatgtttacggaaatca

SEQ ID NO: 518591 - DNA, 19 bp, Mus musculus
  siRNA target sequence for Adss2 (NM_007422.2,1219-1237).
gtttacggaaatcaaagtt

SEQ ID NO: 518592 - DNA, 19 bp, Mus musculus
  siRNA target sequence for Adss2 (NM_007422.2,1239-1257).
gagttgcttacaaattaga

SEQ ID NO: 518593 - DNA, 19 bp, Mus musculus
  siRNA target sequence for Adss2 (NM_007422.2,1260-1278).
gggaaaccatacctcattt

SEQ ID NO: 518594 - DNA, 19 bp, Mus musculus
  siRNA target sequence for Adss2 (NM_007422.2,1307-1325).
gtggaagttcagtataaga

SEQ ID NO: 518595 - DNA, 19 bp, Mus musculus
  siRNA target sequence for Adss2 (NM_007422.2,1353-1371).
ctaatgcaaggacatttaa

SEQ ID NO: 518596 - DNA, 19 bp, Mus musculus
  siRNA target sequence for Adss2 (NM_007422.2,1379-1397).
cctgtcaacgcacaaaact

SEQ ID NO: 518597 - DNA, 19 bp, Mus musculus
  siRNA target sequence for Adss2 (NM_007422.2,1380-1398).
ctgtcaacgcacaaaacta

SEQ ID NO: 518598 - DNA, 19 bp, Mus musculus
  siRNA target sequence for Adss2 (NM_007422.2,1384-1402).
caacgcacaaaactatgtt

SEQ ID NO: 518599 - DNA, 19 bp, Mus musculus
  siRNA target sequence for Adss2 (NM_007422.2,1396-1414).
ctatgttcggtttattgaa

SEQ ID NO: 518600 - DNA, 19 bp, Mus musculus
  siRNA target sequence for Adss2 (NM_007422.2,1424-1442).
caaataccagttaaatgga

SEQ ID NO: 518601 - DNA, 19 bp, Mus musculus
  siRNA target sequence for Arf2 (NM_007477.2,533-551).
ggaatgtctttgaaaagct

SEQ ID NO: 518602 - DNA, 19 bp, Mus musculus
  siRNA target sequence for Arf2 (NM_007477.2,613-631).
ggcaaaacgacgatcttgt

SEQ ID NO: 518603 - DNA, 19 bp, Mus musculus
  siRNA target sequence for Arf2 (NM_007477.2,614-632).
gcaaaacgacgatcttgta

SEQ ID NO: 518604 - DNA, 19 bp, Mus musculus
  siRNA target sequence for Arf2 (NM_007477.2,620-638).
cgacgatcttgtacaaatt

SEQ ID NO: 518605 - DNA, 19 bp, Mus musculus
  siRNA target sequence for Arf2 (NM_007477.2,688-706).
gagacagtagagtacaaaa

SEQ ID NO: 518606 - DNA, 19 bp, Mus musculus
  siRNA target sequence for Arf2 (NM_007477.2,694-712).
gtagagtacaaaaacatca

SEQ ID NO: 518607 - DNA, 19 bp, Mus musculus
  siRNA target sequence for Arf2 (NM_007477.2,752-770).
gacctttgtggcgacatta

SEQ ID NO: 518608 - DNA, 19 bp, Mus musculus
  siRNA target sequence for Arf2 (NM_007477.2,754-772).
cctttgtggcgacattact

SEQ ID NO: 518609 - DNA, 19 bp, Mus musculus
  siRNA target sequence for Arf2 (NM_007477.2,777-795).
gaacactcaaggtctgatt

SEQ ID NO: 518610 - DNA, 19 bp, Mus musculus
  siRNA target sequence for Arf2 (NM_007477.2,852-870).
cagaatgctagcagaagat

SEQ ID NO: 518611 - DNA, 19 bp, Mus musculus
  siRNA target sequence for Arf2 (NM_007477.2,910-928).
caggatcttcctaatgcta

SEQ ID NO: 518612 - DNA, 19 bp, Mus musculus
  siRNA target sequence for Arf2 (NM_007477.2,1045-1063).
ctctccaaccagctcaaaa

SEQ ID NO: 518613 - DNA, 19 bp, Mus musculus
  siRNA target sequence for Arf3 (NM_007478.2,366-384).
cccgaccattgggtttaat

SEQ ID NO: 518614 - DNA, 19 bp, Mus musculus
  siRNA target sequence for Arf3 (NM_007478.2,455-473).
ccctctggagacactactt

SEQ ID NO: 518615 - DNA, 19 bp, Mus musculus
  siRNA target sequence for Arf3 (NM_007478.2,610-628).
caggatttgccgaatgcta

SEQ ID NO: 518616 - DNA, 19 bp, Mus musculus
  siRNA target sequence for Arf3 (NM_007478.2,670-688).
ctgcgtcaccgcaattggt

SEQ ID NO: 518617 - DNA, 19 bp, Mus musculus
  siRNA target sequence for Arf3 (NM_007478.2,745-763).
ctggccaatcagctcaaaa

SEQ ID NO: 518618 - DNA, 19 bp, Mus musculus
  siRNA target sequence for Arf4 (NM_007479.2,425-443).
gttggtggtcaagataaaa

SEQ ID NO: 518619 - DNA, 19 bp, Mus musculus
  siRNA target sequence for Arf4 (NM_007479.2,428-446).
ggtggtcaagataaaatta

SEQ ID NO: 518620 - DNA, 19 bp, Mus musculus
  siRNA target sequence for Arf4 (NM_007479.2,472-490).
gaatacccagggtctcatt

SEQ ID NO: 518621 - DNA, 19 bp, Mus musculus
  siRNA target sequence for Arf5 (NM_007480.1,100-118).
gatgcggatccttatggtt

SEQ ID NO: 518622 - DNA, 19 bp, Mus musculus
  siRNA target sequence for Arf5 (NM_007480.1,189-207).
ccactataggcttcaatgt

SEQ ID NO: 518623 - DNA, 19 bp, Mus musculus
  siRNA target sequence for Arf6 (NM_007481.1,566-584).
caacgatcctgtacaagtt

SEQ ID NO: 518624 - DNA, 19 bp, Mus musculus
  siRNA target sequence for Arf6 (NM_007481.1,701-719).
cgctctggcggcattacta

SEQ ID NO: 518625 - DNA, 19 bp, Mus musculus
  siRNA target sequence for Arf6 (NM_007481.1,703-721).
ctctggcggcattactaca

SEQ ID NO: 518626 - DNA, 19 bp, Mus musculus
  siRNA target sequence for Arf6 (NM_007481.1,790-808).
gagctgcaccgcattatca

SEQ ID NO: 518627 - DNA, 19 bp, Mus musculus
  siRNA target sequence for Arf6 (NM_007481.1,792-810).
gctgcaccgcattatcaat

SEQ ID NO: 518628 - DNA, 19 bp, Mus musculus
  siRNA target sequence for Arf6 (NM_007481.1,861-879).
cctgcccgatgccatgaaa

SEQ ID NO: 518629 - DNA, 19 bp, Mus musculus
  siRNA target sequence for Arf6 (NM_007481.1,957-975).
ctccggggacggactctat

SEQ ID NO: 518630 - DNA, 19 bp, Mus musculus
  siRNA target sequence for Arf6 (NM_007481.1,976-994).
gaggggctcacatggttaa

SEQ ID NO: 518631 - DNA, 19 bp, Mus musculus
  siRNA target sequence for Arf6 (NM_007481.1,979-997).
gggctcacatggttaacct

SEQ ID NO: 518632 - DNA, 19 bp, Mus musculus
  siRNA target sequence for Arf6 (NM_007481.1,986-1004).
catggttaacctctaacta

SEQ ID NO: 518633 - DNA, 19 bp, Mus musculus
  siRNA target sequence for Arf6 (NM_007481.1,990-1008).
gttaacctctaactacaaa

SEQ ID NO: 518634 - DNA, 19 bp, Mus musculus
  siRNA target sequence for Arfrp1 (NM_029702.2,166-184).
cgctgctttcgggattgta

SEQ ID NO: 518635 - DNA, 19 bp, Mus musculus
  siRNA target sequence for Arfrp1 (NM_029702.2,168-186).
ctgctttcgggattgtaca

SEQ ID NO: 518636 - DNA, 19 bp, Mus musculus
  siRNA target sequence for Arfrp1 (NM_029702.2,171-189).
ctttcgggattgtacaagt

SEQ ID NO: 518637 - DNA, 19 bp, Mus musculus
  siRNA target sequence for Arfrp1 (NM_029702.2,175-193).
cgggattgtacaagtacat

SEQ ID NO: 518638 - DNA, 19 bp, Mus musculus
  siRNA target sequence for Arfrp1 (NM_029702.2,296-314).
ggggatgagtctatccaaa

SEQ ID NO: 518639 - DNA, 19 bp, Mus musculus
  siRNA target sequence for Arfrp1 (NM_029702.2,322-340).
ctaccgtgggtctaaacat

SEQ ID NO: 518640 - DNA, 19 bp, Mus musculus
  siRNA target sequence for Arfrp1 (NM_029702.2,358-376).
gaaaggctcgtctcatgtt

SEQ ID NO: 518641 - DNA, 19 bp, Mus musculus
  siRNA target sequence for Arfrp1 (NM_029702.2,409-427).
ctttgtgggacaagtacta

SEQ ID NO: 518642 - DNA, 19 bp, Mus musculus
  siRNA target sequence for Arfrp1 (NM_029702.2,444-462).
gtcatctatgtaattgatt

SEQ ID NO: 518643 - DNA, 19 bp, Mus musculus
  siRNA target sequence for Arfrp1 (NM_029702.2,613-631).
gtgactgtacctgtaagat

SEQ ID NO: 518644 - DNA, 19 bp, Mus musculus
  siRNA target sequence for Arfrp1 (NM_029702.2,684-702).
gttcgagagggcatcgaat

SEQ ID NO: 518645 - DNA, 19 bp, Mus musculus
  siRNA target sequence for Arfrp1 (NM_029702.2,715-733).
gtgtcgtgcggaatgttca

SEQ ID NO: 518646 - DNA, 19 bp, Mus musculus
  siRNA target sequence for Arfrp1 (NM_029702.2,744-762).
cggcagagggacatcacat

SEQ ID NO: 518647 - DNA, 19 bp, Mus musculus
  siRNA target sequence for Arha (NM_016802.2,456-474).
ccagacaccgatgttatat

SEQ ID NO: 518648 - DNA, 19 bp, Mus musculus
  siRNA target sequence for Arha (NM_016802.2,459-477).
gacaccgatgttatattga

SEQ ID NO: 518649 - DNA, 19 bp, Mus musculus
  siRNA target sequence for Arhb (NM_007483.2,416-434).
gctgatcgtgttcagtaaa

SEQ ID NO: 518650 - DNA, 19 bp, Mus musculus
  siRNA target sequence for Arhb (NM_007483.2,542-560).
ggaggactacgatcgttta

SEQ ID NO: 518651 - DNA, 19 bp, Mus musculus
  siRNA target sequence for Arhb (NM_007483.2,619-637).
cggactctctcgagaacat

SEQ ID NO: 518652 - DNA, 19 bp, Mus musculus
  siRNA target sequence for Arhb (NM_007483.2,801-819).
cgcatccaagcctatgact

SEQ ID NO: 518653 - DNA, 19 bp, Mus musculus
  siRNA target sequence for Arhb (NM_007483.2,850-868).
gcgtgcgcgaggtttttga

SEQ ID NO: 518654 - DNA, 19 bp, Mus musculus
  siRNA target sequence for Arhc (NM_007484.1,151-169).
cgtctttgagaactatata

SEQ ID NO: 518655 - DNA, 19 bp, Mus musculus
  siRNA target sequence for Arhc (NM_007484.1,575-593).
ctacaggtccggaagaata

SEQ ID NO: 518656 - DNA, 19 bp, Mus musculus
  siRNA target sequence for Arhd (NM_007485.2,248-266).
gcagatgaagggtaaacct

SEQ ID NO: 518657 - DNA, 19 bp, Mus musculus
  siRNA target sequence for Arhd (NM_007485.2,411-429).
ccagaggtgacacatttct

SEQ ID NO: 518658 - DNA, 19 bp, Mus musculus
  siRNA target sequence for Arhd (NM_007485.2,494-512).
gaacaacctgcggaagaaa

SEQ ID NO: 518659 - DNA, 19 bp, Mus musculus
  siRNA target sequence for Arhd (NM_007485.2,563-581).
gggagcggtggcctatctt

SEQ ID NO: 518660 - DNA, 19 bp, Mus musculus
  siRNA target sequence for Arhd (NM_007485.2,589-607).
cagctcggctccatgacaa

SEQ ID NO: 518661 - DNA, 19 bp, Mus musculus
  siRNA target sequence for Arhd (NM_007485.2,645-663).
ctcagcagtcgcagacata

SEQ ID NO: 518662 - DNA, 19 bp, Mus musculus
  siRNA target sequence for Arhd (NM_007485.2,649-667).
gcagtcgcagacataactt

SEQ ID NO: 518663 - DNA, 19 bp, Mus musculus
  siRNA target sequence for Arhd (NM_007485.2,650-668).
cagtcgcagacataacttt

SEQ ID NO: 518664 - DNA, 19 bp, Mus musculus
  siRNA target sequence for Arhd (NM_007485.2,674-692).
gcggattactcagaattgt

SEQ ID NO: 518665 - DNA, 19 bp, Mus musculus
  siRNA target sequence for Arhe (NM_028810.1,276-294).
ctatcatggatcctaatca

SEQ ID NO: 518666 - DNA, 19 bp, Mus musculus
  siRNA target sequence for Arhe (NM_028810.1,287-305).
cctaatcagaacgtgaaat

SEQ ID NO: 518667 - DNA, 19 bp, Mus musculus
  siRNA target sequence for Arhe (NM_028810.1,298-316).
cgtgaaatgcaagatagta

SEQ ID NO: 518668 - DNA, 19 bp, Mus musculus
  siRNA target sequence for Arhe (NM_028810.1,428-446).
gaaatcgacacacaaagaa

SEQ ID NO: 518669 - DNA, 19 bp, Mus musculus
  siRNA target sequence for Arhe (NM_028810.1,566-584).
gacagtgtcttaaaaaagt

SEQ ID NO: 518670 - DNA, 19 bp, Mus musculus
  siRNA target sequence for Arhe (NM_028810.1,674-692).
gtggaactctcaaatcaca

SEQ ID NO: 518671 - DNA, 19 bp, Mus musculus
  siRNA target sequence for Arhe (NM_028810.1,742-760).
cggagcagccacttacata

SEQ ID NO: 518672 - DNA, 19 bp, Mus musculus
  siRNA target sequence for Arhe (NM_028810.1,744-762).
gagcagccacttacataga

SEQ ID NO: 518673 - DNA, 19 bp, Mus musculus
  siRNA target sequence for Arhe (NM_028810.1,746-764).
gcagccacttacatagaat

SEQ ID NO: 518674 - DNA, 19 bp, Mus musculus
  siRNA target sequence for Arhe (NM_028810.1,761-779).
gaatgctcagctttacagt

SEQ ID NO: 518675 - DNA, 19 bp, Mus musculus
  siRNA target sequence for Arhe (NM_028810.1,770-788).
gctttacagtcagaaaaca

SEQ ID NO: 518676 - DNA, 19 bp, Mus musculus
  siRNA target sequence for Arhe (NM_028810.1,789-807).
gcgtcagagacatttttca

SEQ ID NO: 518677 - DNA, 19 bp, Mus musculus
  siRNA target sequence for Arhe (NM_028810.1,812-830).
gccaccttggcgtgtgtaa

SEQ ID NO: 518678 - DNA, 19 bp, Mus musculus
  siRNA target sequence for Arhe (NM_028810.1,820-838).
ggcgtgtgtaaataagaca

SEQ ID NO: 518679 - DNA, 19 bp, Mus musculus
  siRNA target sequence for Arhe (NM_028810.1,823-841).
gtgtgtaaataagacaaat

SEQ ID NO: 518680 - DNA, 19 bp, Mus musculus
  siRNA target sequence for Arhe (NM_028810.1,920-938).
gttgctacggacttacgaa

SEQ ID NO: 518681 - DNA, 19 bp, Mus musculus
  siRNA target sequence for Arhf (NM_175092.2,139-157).
gtactgccaaggctcattt

SEQ ID NO: 518682 - DNA, 19 bp, Mus musculus
  siRNA target sequence for Arhf (NM_175092.2,344-362).
gacaacgtcctcatcaagt

SEQ ID NO: 518683 - DNA, 19 bp, Mus musculus
  siRNA target sequence for Arhf (NM_175092.2,467-485).
gctcagctggagcctatta

SEQ ID NO: 518684 - DNA, 19 bp, Mus musculus
  siRNA target sequence for Arhf (NM_175092.2,470-488).
cagctggagcctattacct

SEQ ID NO: 518685 - DNA, 19 bp, Mus musculus
  siRNA target sequence for Arhf (NM_175092.2,517-535).
gatgcgaggtgcactctat

SEQ ID NO: 518686 - DNA, 19 bp, Mus musculus
  siRNA target sequence for Arhgap5 (NM_009706.1,22-40).
cctcgacccccatcttata

SEQ ID NO: 518687 - DNA, 19 bp, Mus musculus
  siRNA target sequence for Arhgap5 (NM_009706.1,26-44).
gacccccatcttatactgt

SEQ ID NO: 518688 - DNA, 19 bp, Mus musculus
  siRNA target sequence for Arhgap5 (NM_009706.1,55-73).
ggactctctgggactgaaa

SEQ ID NO: 518689 - DNA, 19 bp, Mus musculus
  siRNA target sequence for Arhgap5 (NM_009706.1,127-145).
cgttcaaaagcagatgaat

SEQ ID NO: 518690 - DNA, 19 bp, Mus musculus
  siRNA target sequence for Arhgap5 (NM_009706.1,128-146).
gttcaaaagcagatgaata

SEQ ID NO: 518691 - DNA, 19 bp, Mus musculus
  siRNA target sequence for Arhgap5 (NM_009706.1,183-201).
ctttggaggccgagtagta

SEQ ID NO: 518692 - DNA, 19 bp, Mus musculus
  siRNA target sequence for Arhgap5 (NM_009706.1,187-205).
ggaggccgagtagtaaaca

SEQ ID NO: 518693 - DNA, 19 bp, Mus musculus
  siRNA target sequence for Arhgap5 (NM_009706.1,188-206).
gaggccgagtagtaaacaa

SEQ ID NO: 518694 - DNA, 19 bp, Mus musculus
  siRNA target sequence for Arhgap5 (NM_009706.1,254-272).
gtgtagaatgcaaaattca

SEQ ID NO: 518695 - DNA, 19 bp, Mus musculus
  siRNA target sequence for Arhgap5 (NM_009706.1,315-333).
gcctcatcgaagtacaaat

SEQ ID NO: 518696 - DNA, 19 bp, Mus musculus
  siRNA target sequence for Arhgap5 (NM_009706.1,316-334).
cctcatcgaagtacaaatt

SEQ ID NO: 518697 - DNA, 19 bp, Mus musculus
  siRNA target sequence for Arhgap5 (NM_009706.1,317-335).
ctcatcgaagtacaaattt

SEQ ID NO: 518698 - DNA, 19 bp, Mus musculus
  siRNA target sequence for Arhgap5 (NM_009706.1,373-391).
cagtcagcagaaaaactaa

SEQ ID NO: 518699 - DNA, 19 bp, Mus musculus
  siRNA target sequence for Arhgap5 (NM_009706.1,380-398).
cagaaaaactaatgtacat

SEQ ID NO: 518700 - DNA, 19 bp, Mus musculus
  siRNA target sequence for Arhgap5 (NM_009706.1,447-465).
gcctgaagggaaactcaat

SEQ ID NO: 518701 - DNA, 19 bp, Mus musculus
  siRNA target sequence for Arhgap5 (NM_009706.1,493-511).
gtgagtcaaggatgtaata

SEQ ID NO: 518702 - DNA, 19 bp, Mus musculus
  siRNA target sequence for Arhgap5 (NM_009706.1,503-521).
gatgtaataggaagtttga

SEQ ID NO: 518703 - DNA, 19 bp, Mus musculus
  siRNA target sequence for Arhgap5 (NM_009706.1,512-530).
ggaagtttgatgatcaact

SEQ ID NO: 518704 - DNA, 19 bp, Mus musculus
  siRNA target sequence for Arhgap5 (NM_009706.1,523-541).
gatcaacttaaatttgtga

SEQ ID NO: 518705 - DNA, 19 bp, Mus musculus
  siRNA target sequence for Arhgap5 (NM_009706.1,553-571).
gtccagctatcaaaatcca

SEQ ID NO: 518706 - DNA, 19 bp, Mus musculus
  siRNA target sequence for Arhgap5 (NM_009706.1,582-600).
gataatagcagcaactaaa

SEQ ID NO: 518707 - DNA, 19 bp, Mus musculus
  siRNA target sequence for Arhgap5 (NM_009706.1,654-672).
caaaaagaatcttctagta

SEQ ID NO: 518708 - DNA, 19 bp, Mus musculus
  siRNA target sequence for Arhgap5 (NM_009706.1,664-682).
cttctagtagtggaaacat

SEQ ID NO: 518709 - DNA, 19 bp, Mus musculus
  siRNA target sequence for Arhgap5 (NM_009706.1,675-693).
ggaaacatcagcacgattt

SEQ ID NO: 518710 - DNA, 19 bp, Mus musculus
  siRNA target sequence for Arhgap5 (NM_009706.1,676-694).
gaaacatcagcacgattta

SEQ ID NO: 518711 - DNA, 19 bp, Mus musculus
  siRNA target sequence for Arhgap5 (NM_009706.1,680-698).
catcagcacgatttaatgt

SEQ ID NO: 518712 - DNA, 19 bp, Mus musculus
  siRNA target sequence for Arhgap5 (NM_009706.1,686-704).
cacgatttaatgtcaacat

SEQ ID NO: 518713 - DNA, 19 bp, Mus musculus
  siRNA target sequence for Arhgap5 (NM_009706.1,689-707).
gatttaatgtcaacattga

SEQ ID NO: 518714 - DNA, 19 bp, Mus musculus
  siRNA target sequence for Arhgap5 (NM_009706.1,702-720).
cattgagacatgtttcact

SEQ ID NO: 518715 - DNA, 19 bp, Mus musculus
  siRNA target sequence for Arhgap5 (NM_009706.1,719-737).
ctgctttggtacaaatgtt

SEQ ID NO: 518716 - DNA, 19 bp, Mus musculus
  siRNA target sequence for Arhgap5 (NM_009706.1,746-764).
ctcgtggcaaacctaaaat

SEQ ID NO: 518717 - DNA, 19 bp, Mus musculus
  siRNA target sequence for Arhgap5 (NM_009706.1,843-861).
gactgtgagagattatcat

SEQ ID NO: 518718 - DNA, 19 bp, Mus musculus
  siRNA target sequence for Arhgap5 (NM_009706.1,866-884).
cttggaaaactgttagtaa

SEQ ID NO: 518719 - DNA, 19 bp, Mus musculus
  siRNA target sequence for Arhgap5 (NM_009706.1,875-893).
ctgttagtaataaattaaa

SEQ ID NO: 518720 - DNA, 19 bp, Mus musculus
  siRNA target sequence for Arhgap5 (NM_009706.1,921-939).
caacttagagggaacaaga

SEQ ID NO: 518721 - DNA, 19 bp, Mus musculus
  siRNA target sequence for Arhgap5 (NM_009706.1,963-981).
gcatatagagcaactcaaa

SEQ ID NO: 518722 - DNA, 19 bp, Mus musculus
  siRNA target sequence for Arhgap5 (NM_009706.1,976-994).
ctcaaacaggaacatataa

SEQ ID NO: 518723 - DNA, 19 bp, Mus musculus
  siRNA target sequence for Arhgap5 (NM_009706.1,1022-1040).
ccttaccaagggcttttaa

SEQ ID NO: 518724 - DNA, 19 bp, Mus musculus
  siRNA target sequence for Arhgap5 (NM_009706.1,1063-1081).
gagattgaacatttgaatt

SEQ ID NO: 518725 - DNA, 19 bp, Mus musculus
  siRNA target sequence for Arhgap5 (NM_009706.1,1114-1132).
gcagatttccagttatgtt

SEQ ID NO: 518726 - DNA, 19 bp, Mus musculus
  siRNA target sequence for Arhgap5 (NM_009706.1,1151-1169).
caccttgggatgaaactga

SEQ ID NO: 518727 - DNA, 19 bp, Mus musculus
  siRNA target sequence for Arhgap5 (NM_009706.1,1157-1175).
gggatgaaactgaccatat

SEQ ID NO: 518728 - DNA, 19 bp, Mus musculus
  siRNA target sequence for Arhgap5 (NM_009706.1,1158-1176).
ggatgaaactgaccatata

SEQ ID NO: 518729 - DNA, 19 bp, Mus musculus
  siRNA target sequence for Arhgap5 (NM_009706.1,1168-1186).
gaccatatagacaaaatta

SEQ ID NO: 518730 - DNA, 19 bp, Mus musculus
  siRNA target sequence for Arhgap5 (NM_009706.1,1206-1224).
cgaccttctgagcacttta

SEQ ID NO: 518731 - DNA, 19 bp, Mus musculus
  siRNA target sequence for Arhgap5 (NM_009706.1,1249-1267).
catgtacaacatctgatat

SEQ ID NO: 518732 - DNA, 19 bp, Mus musculus
  siRNA target sequence for Arhgap5 (NM_009706.1,1345-1363).
ccatgggaggaagttatgt

SEQ ID NO: 518733 - DNA, 19 bp, Mus musculus
  siRNA target sequence for Arhgap5 (NM_009706.1,1465-1483).
gagtttcaggaaatgcttt

SEQ ID NO: 518734 - DNA, 19 bp, Mus musculus
  siRNA target sequence for Arhgap5 (NM_009706.1,1479-1497).
gctttttgagcattctgaa

SEQ ID NO: 518735 - DNA, 19 bp, Mus musculus
  siRNA target sequence for Arhgap5 (NM_009706.1,1522-1540).
gcaacaccaagttctgata

SEQ ID NO: 518736 - DNA, 19 bp, Mus musculus
  siRNA target sequence for Arhgap5 (NM_009706.1,1549-1567).
gaaattcataccgttctaa

SEQ ID NO: 518737 - DNA, 19 bp, Mus musculus
  siRNA target sequence for Arhgap5 (NM_009706.1,1600-1618).
cttgcacctgatagagaat

SEQ ID NO: 518738 - DNA, 19 bp, Mus musculus
  siRNA target sequence for Arhgap5 (NM_009706.1,1604-1622).
cacctgatagagaatctct

SEQ ID NO: 518739 - DNA, 19 bp, Mus musculus
  siRNA target sequence for Arhgap5 (NM_009706.1,1651-1669).
catcccactaaagaaacat

SEQ ID NO: 518740 - DNA, 19 bp, Mus musculus
  siRNA target sequence for Arhgap5 (NM_009706.1,1671-1689).
cctcagtggccaatattgt

SEQ ID NO: 518741 - DNA, 19 bp, Mus musculus
  siRNA target sequence for Arhgap5 (NM_009706.1,1672-1690).
ctcagtggccaatattgta

SEQ ID NO: 518742 - DNA, 19 bp, Mus musculus
  siRNA target sequence for Arhgap5 (NM_009706.1,1681-1699).
caatattgtacagacatta

SEQ ID NO: 518743 - DNA, 19 bp, Mus musculus
  siRNA target sequence for Arhgap5 (NM_009706.1,1695-1713).
cattaaagtggaaaattta

SEQ ID NO: 518744 - DNA, 19 bp, Mus musculus
  siRNA target sequence for Arhgap5 (NM_009706.1,1717-1735).
gccactagtctattagaga

SEQ ID NO: 518745 - DNA, 19 bp, Mus musculus
  siRNA target sequence for Arhgap5 (NM_009706.1,1718-1736).
ccactagtctattagagat

SEQ ID NO: 518746 - DNA, 19 bp, Mus musculus
  siRNA target sequence for Arhgap5 (NM_009706.1,1726-1744).
ctattagagatggatcata

SEQ ID NO: 518747 - DNA, 19 bp, Mus musculus
  siRNA target sequence for Arhgap5 (NM_009706.1,1746-1764).
ccgcgtacgcttgtatcat

SEQ ID NO: 518748 - DNA, 19 bp, Mus musculus
  siRNA target sequence for Arhgap5 (NM_009706.1,1748-1766).
gcgtacgcttgtatcatga

SEQ ID NO: 518749 - DNA, 19 bp, Mus musculus
  siRNA target sequence for Arhgap5 (NM_009706.1,1749-1767).
cgtacgcttgtatcatgat

SEQ ID NO: 518750 - DNA, 19 bp, Mus musculus
  siRNA target sequence for Arhgap5 (NM_009706.1,1750-1768).
gtacgcttgtatcatgata

SEQ ID NO: 518751 - DNA, 19 bp, Mus musculus
  siRNA target sequence for Arhgap5 (NM_009706.1,1753-1771).
cgcttgtatcatgatagta

SEQ ID NO: 518752 - DNA, 19 bp, Mus musculus
  siRNA target sequence for Arhgap5 (NM_009706.1,1758-1776).
gtatcatgatagtaccaat

SEQ ID NO: 518753 - DNA, 19 bp, Mus musculus
  siRNA target sequence for Arhgap5 (NM_009706.1,1765-1783).
gatagtaccaatatagaca

SEQ ID NO: 518754 - DNA, 19 bp, Mus musculus
  siRNA target sequence for Arhgap5 (NM_009706.1,1780-1798).
gacaaagttaatcttttca

SEQ ID NO: 518755 - DNA, 19 bp, Mus musculus
  siRNA target sequence for Arhgap5 (NM_009706.1,1825-1843).
gaactagcaaatgagataa

SEQ ID NO: 518756 - DNA, 19 bp, Mus musculus
  siRNA target sequence for Arhgap5 (NM_009706.1,1866-1884).
gtatgccttagatggaaaa

SEQ ID NO: 518757 - DNA, 19 bp, Mus musculus
  siRNA target sequence for Arhgap5 (NM_009706.1,1915-1933).
gccaaatcgccttacattt

SEQ ID NO: 518758 - DNA, 19 bp, Mus musculus
  siRNA target sequence for Arhgap5 (NM_009706.1,1916-1934).
ccaaatcgccttacatttt

SEQ ID NO: 518759 - DNA, 19 bp, Mus musculus
  siRNA target sequence for Arhgap5 (NM_009706.1,1970-1988).
ggtgcttctgtgtattcaa

SEQ ID NO: 518760 - DNA, 19 bp, Mus musculus
  siRNA target sequence for Arhgap5 (NM_009706.1,1991-2009).
ccatcgagtcactgagttt

SEQ ID NO: 518761 - DNA, 19 bp, Mus musculus
  siRNA target sequence for Arhgap5 (NM_009706.1,2070-2088).
gactaatcttccatttaca

SEQ ID NO: 518762 - DNA, 19 bp, Mus musculus
  siRNA target sequence for Arhgap5 (NM_009706.1,2072-2090).
ctaatcttccatttacatt

SEQ ID NO: 518763 - DNA, 19 bp, Mus musculus
  siRNA target sequence for Arhgap5 (NM_009706.1,2099-2117).
ctaatcagagggattccat

SEQ ID NO: 518764 - DNA, 19 bp, Mus musculus
  siRNA target sequence for Arhgap5 (NM_009706.1,2106-2124).
gagggattccattagtaaa

SEQ ID NO: 518765 - DNA, 19 bp, Mus musculus
  siRNA target sequence for Arhgap5 (NM_009706.1,2120-2138).
gtaaaaatctaccaattct

SEQ ID NO: 518766 - DNA, 19 bp, Mus musculus
  siRNA target sequence for Arhgap5 (NM_009706.1,2152-2170).
cagcagttggccaacaaat

SEQ ID NO: 518767 - DNA, 19 bp, Mus musculus
  siRNA target sequence for Arhgap5 (NM_009706.1,2200-2218).
ggtacatatcctcgtaaat

SEQ ID NO: 518768 - DNA, 19 bp, Mus musculus
  siRNA target sequence for Arhgap5 (NM_009706.1,2201-2219).
gtacatatcctcgtaaatt

SEQ ID NO: 518769 - DNA, 19 bp, Mus musculus
  siRNA target sequence for Arhgap5 (NM_009706.1,2209-2227).
cctcgtaaatttaatgaat

SEQ ID NO: 518770 - DNA, 19 bp, Mus musculus
  siRNA target sequence for Arhgap5 (NM_009706.1,2245-2263).
ctaagaggagtattggaat

SEQ ID NO: 518771 - DNA, 19 bp, Mus musculus
  siRNA target sequence for Arhgap5 (NM_009706.1,2249-2267).
gaggagtattggaatcagt

SEQ ID NO: 518772 - DNA, 19 bp, Mus musculus
  siRNA target sequence for Arhgap5 (NM_009706.1,2259-2277).
ggaatcagttaaacacaat

SEQ ID NO: 518773 - DNA, 19 bp, Mus musculus
  siRNA target sequence for Arhgap5 (NM_009706.1,2289-2307).
gagcccagttcctatcaat

SEQ ID NO: 518774 - DNA, 19 bp, Mus musculus
  siRNA target sequence for Arhgap5 (NM_009706.1,2294-2312).
cagttcctatcaataagga

SEQ ID NO: 518775 - DNA, 19 bp, Mus musculus
  siRNA target sequence for Arhgap5 (NM_009706.1,2323-2341).
gctgacttgagaattgtca

SEQ ID NO: 518776 - DNA, 19 bp, Mus musculus
  siRNA target sequence for Arhgap5 (NM_009706.1,2324-2342).
ctgacttgagaattgtcat

SEQ ID NO: 518777 - DNA, 19 bp, Mus musculus
  siRNA target sequence for Arhgap5 (NM_009706.1,2419-2437).
gctcaagctggacagaata

SEQ ID NO: 518778 - DNA, 19 bp, Mus musculus
  siRNA target sequence for Arhgap5 (NM_009706.1,2420-2438).
ctcaagctggacagaataa

SEQ ID NO: 518779 - DNA, 19 bp, Mus musculus
  siRNA target sequence for Arhgap5 (NM_009706.1,2425-2443).
gctggacagaataattctt

SEQ ID NO: 518780 - DNA, 19 bp, Mus musculus
  siRNA target sequence for Arhgap5 (NM_009706.1,2433-2451).
gaataattctttaatgctt

SEQ ID NO: 518781 - DNA, 19 bp, Mus musculus
  siRNA target sequence for Arhgap5 (NM_009706.1,2441-2459).
ctttaatgcttgacaaaat

SEQ ID NO: 518782 - DNA, 19 bp, Mus musculus
  siRNA target sequence for Arhgap5 (NM_009706.1,2478-2496).
gcgaatacagatcacaata

SEQ ID NO: 518783 - DNA, 19 bp, Mus musculus
  siRNA target sequence for Arhgap5 (NM_009706.1,2479-2497).
cgaatacagatcacaatat

SEQ ID NO: 518784 - DNA, 19 bp, Mus musculus
  siRNA target sequence for Arhgap5 (NM_009706.1,2480-2498).
gaatacagatcacaatatt

SEQ ID NO: 518785 - DNA, 19 bp, Mus musculus
  siRNA target sequence for Arhgap5 (NM_009706.1,2510-2528).
cctcaattggagtaagaaa

SEQ ID NO: 518786 - DNA, 19 bp, Mus musculus
  siRNA target sequence for Arhgap5 (NM_009706.1,2511-2529).
ctcaattggagtaagaaaa

SEQ ID NO: 518787 - DNA, 19 bp, Mus musculus
  siRNA target sequence for Arhgap5 (NM_009706.1,2519-2537).
gagtaagaaaagatgaact

SEQ ID NO: 518788 - DNA, 19 bp, Mus musculus
  siRNA target sequence for Arhgap5 (NM_009706.1,2588-2606).
gaatgcttcgtgcatttct

SEQ ID NO: 518789 - DNA, 19 bp, Mus musculus
  siRNA target sequence for Arhgap5 (NM_009706.1,2592-2610).
gcttcgtgcatttctatca

SEQ ID NO: 518790 - DNA, 19 bp, Mus musculus
  siRNA target sequence for Arhgap5 (NM_009706.1,2651-2669).
ctgacagtcaagctgattt

SEQ ID NO: 518791 - DNA, 19 bp, Mus musculus
  siRNA target sequence for Arhgap5 (NM_009706.1,2680-2698).
gaggctatcaaggagttaa

SEQ ID NO: 518792 - DNA, 19 bp, Mus musculus
  siRNA target sequence for Arhgap5 (NM_009706.1,2723-2741).
ctgagataaccgctaaatt

SEQ ID NO: 518793 - DNA, 19 bp, Mus musculus
  siRNA target sequence for Arhgap5 (NM_009706.1,2727-2745).
gataaccgctaaatttaca

SEQ ID NO: 518794 - DNA, 19 bp, Mus musculus
  siRNA target sequence for Arhgap5 (NM_009706.1,2733-2751).
cgctaaatttacagcatta

SEQ ID NO: 518795 - DNA, 19 bp, Mus musculus
  siRNA target sequence for Arhgap5 (NM_009706.1,2734-2752).
gctaaatttacagcattat

SEQ ID NO: 518796 - DNA, 19 bp, Mus musculus
  siRNA target sequence for Arhgap5 (NM_009706.1,2735-2753).
ctaaatttacagcattata

SEQ ID NO: 518797 - DNA, 19 bp, Mus musculus
  siRNA target sequence for Arhgap5 (NM_009706.1,2868-2886).
cactcatcagagtgaagat

SEQ ID NO: 518798 - DNA, 19 bp, Mus musculus
  siRNA target sequence for Arhgap5 (NM_009706.1,2897-2915).
cgtctccaagagactgttt

SEQ ID NO: 518799 - DNA, 19 bp, Mus musculus
  siRNA target sequence for Arhgap5 (NM_009706.1,2898-2916).
gtctccaagagactgtttt

SEQ ID NO: 518800 - DNA, 19 bp, Mus musculus
  siRNA target sequence for Arhgap5 (NM_009706.1,2906-2924).
gagactgttttccctataa

SEQ ID NO: 518801 - DNA, 19 bp, Mus musculus
  siRNA target sequence for Arhgap5 (NM_009706.1,2925-2943).
caactaccctgattcagat

SEQ ID NO: 518802 - DNA, 19 bp, Mus musculus
  siRNA target sequence for Arhgap5 (NM_009706.1,2975-2993).
caattggagatgatgtaca

SEQ ID NO: 518803 - DNA, 19 bp, Mus musculus
  siRNA target sequence for Arhgap5 (NM_009706.1,3029-3047).
ggttagatttggaaggaaa

SEQ ID NO: 518804 - DNA, 19 bp, Mus musculus
  siRNA target sequence for Arhgap5 (NM_009706.1,3071-3089).
caaattgtcacgatcatga

SEQ ID NO: 518805 - DNA, 19 bp, Mus musculus
  siRNA target sequence for Arhgap5 (NM_009706.1,3077-3095).
gtcacgatcatgaacgtaa

SEQ ID NO: 518806 - DNA, 19 bp, Mus musculus
  siRNA target sequence for Arhgap5 (NM_009706.1,3081-3099).
cgatcatgaacgtaaccat

SEQ ID NO: 518807 - DNA, 19 bp, Mus musculus
  siRNA target sequence for Arhgap5 (NM_009706.1,3082-3100).
gatcatgaacgtaaccata

SEQ ID NO: 518808 - DNA, 19 bp, Mus musculus
  siRNA target sequence for Arhgap5 (NM_009706.1,3105-3123).
gcctccacctattaaacct

SEQ ID NO: 518809 - DNA, 19 bp, Mus musculus
  siRNA target sequence for Arhgap5 (NM_009706.1,3106-3124).
cctccacctattaaaccta

SEQ ID NO: 518810 - DNA, 19 bp, Mus musculus
  siRNA target sequence for Arhgap5 (NM_009706.1,3107-3125).
ctccacctattaaacctaa

SEQ ID NO: 518811 - DNA, 19 bp, Mus musculus
  siRNA target sequence for Arhgap5 (NM_009706.1,3122-3140).
ctaaaccagttgtacctaa

SEQ ID NO: 518812 - DNA, 19 bp, Mus musculus
  siRNA target sequence for Arhgap5 (NM_009706.1,3127-3145).
ccagttgtacctaaaacaa

SEQ ID NO: 518813 - DNA, 19 bp, Mus musculus
  siRNA target sequence for Arhgap5 (NM_009706.1,3133-3151).
gtacctaaaacaaatgtga

SEQ ID NO: 518814 - DNA, 19 bp, Mus musculus
  siRNA target sequence for Arhgap5 (NM_009706.1,3190-3208).
ggtattggtaaaaatccaa

SEQ ID NO: 518815 - DNA, 19 bp, Mus musculus
  siRNA target sequence for Arhgap5 (NM_009706.1,3271-3289).
gaaccccttgacacaattt

SEQ ID NO: 518816 - DNA, 19 bp, Mus musculus
  siRNA target sequence for Arhgap5 (NM_009706.1,3300-3318).
gggctattctgatgagatt

SEQ ID NO: 518817 - DNA, 19 bp, Mus musculus
  siRNA target sequence for Arhgap5 (NM_009706.1,3331-3349).
gatgatagtcagaatcgaa

SEQ ID NO: 518818 - DNA, 19 bp, Mus musculus
  siRNA target sequence for Arhgap5 (NM_009706.1,3334-3352).
gatagtcagaatcgaatta

SEQ ID NO: 518819 - DNA, 19 bp, Mus musculus
  siRNA target sequence for Arhgap5 (NM_009706.1,3338-3356).
gtcagaatcgaattattaa

SEQ ID NO: 518820 - DNA, 19 bp, Mus musculus
  siRNA target sequence for Arhgap5 (NM_009706.1,3346-3364).
cgaattattaaaattcgaa

SEQ ID NO: 518821 - DNA, 19 bp, Mus musculus
  siRNA target sequence for Arhgap5 (NM_009706.1,3366-3384).
ctcatttgtaaataacact

SEQ ID NO: 518822 - DNA, 19 bp, Mus musculus
  siRNA target sequence for Arhgap5 (NM_009706.1,3433-3451).
gagagcgtaggccttcaaa

SEQ ID NO: 518823 - DNA, 19 bp, Mus musculus
  siRNA target sequence for Arhgap5 (NM_009706.1,3435-3453).
gagcgtaggccttcaaaat

SEQ ID NO: 518824 - DNA, 19 bp, Mus musculus
  siRNA target sequence for Arhgap5 (NM_009706.1,3481-3499).
gtaaagccaagtcatacta

SEQ ID NO: 518825 - DNA, 19 bp, Mus musculus
  siRNA target sequence for Arhgap5 (NM_009706.1,3524-3542).
cgatgatgaggctttcact

SEQ ID NO: 518826 - DNA, 19 bp, Mus musculus
  siRNA target sequence for Arhgap5 (NM_009706.1,3525-3543).
gatgatgaggctttcacta

SEQ ID NO: 518827 - DNA, 19 bp, Mus musculus
  siRNA target sequence for Arhgap5 (NM_009706.1,3534-3552).
gctttcactacttccaaaa

SEQ ID NO: 518828 - DNA, 19 bp, Mus musculus
  siRNA target sequence for Arhgap5 (NM_009706.1,3618-3636).
gaaaggtggtattgataat

SEQ ID NO: 518829 - DNA, 19 bp, Mus musculus
  siRNA target sequence for Arhgap5 (NM_009706.1,3631-3649).
gataatcctgcaatcacat

SEQ ID NO: 518830 - DNA, 19 bp, Mus musculus
  siRNA target sequence for Arhgap5 (NM_009706.1,3652-3670).
gaccaggaggtagatgata

SEQ ID NO: 518831 - DNA, 19 bp, Mus musculus
  siRNA target sequence for Arhgap5 (NM_009706.1,3660-3678).
ggtagatgataagaagata

SEQ ID NO: 518832 - DNA, 19 bp, Mus musculus
  siRNA target sequence for Arhgap5 (NM_009706.1,3661-3679).
gtagatgataagaagataa

SEQ ID NO: 518833 - DNA, 19 bp, Mus musculus
  siRNA target sequence for Arhgap5 (NM_009706.1,3755-3773).
gaaattgggaaagtaatta

SEQ ID NO: 518834 - DNA, 19 bp, Mus musculus
  siRNA target sequence for Arhgap5 (NM_009706.1,3810-3828).
gaagcctataccactattt

SEQ ID NO: 518835 - DNA, 19 bp, Mus musculus
  siRNA target sequence for Arhgap5 (NM_009706.1,3813-3831).
gcctataccactatttgtt

SEQ ID NO: 518836 - DNA, 19 bp, Mus musculus
  siRNA target sequence for Arhgap5 (NM_009706.1,3815-3833).
ctataccactatttgttga

SEQ ID NO: 518837 - DNA, 19 bp, Mus musculus
  siRNA target sequence for Arhgap5 (NM_009706.1,3858-3876).
cacaggattatgtactgaa

SEQ ID NO: 518838 - DNA, 19 bp, Mus musculus
  siRNA target sequence for Arhgap5 (NM_009706.1,3885-3903).
ccgtgttagtggaaataaa

SEQ ID NO: 518839 - DNA, 19 bp, Mus musculus
  siRNA target sequence for Arhgap5 (NM_009706.1,3934-3952).
gatcaagatcataatatca

SEQ ID NO: 518840 - DNA, 19 bp, Mus musculus
  siRNA target sequence for Arhgap5 (NM_009706.1,3988-4006).
gctggagctctcaaagctt

SEQ ID NO: 518841 - DNA, 19 bp, Mus musculus
  siRNA target sequence for Arhgap5 (NM_009706.1,3989-4007).
ctggagctctcaaagcttt

SEQ ID NO: 518842 - DNA, 19 bp, Mus musculus
  siRNA target sequence for Arhgap5 (NM_009706.1,4043-4061).
cactccacccagagctatt

SEQ ID NO: 518843 - DNA, 19 bp, Mus musculus
  siRNA target sequence for Arhgap5 (NM_009706.1,4102-4120).
gccttgaaagaaattgtta

SEQ ID NO: 518844 - DNA, 19 bp, Mus musculus
  siRNA target sequence for Arhgap5 (NM_009706.1,4132-4150).
cctgtaaactatgatgtat

SEQ ID NO: 518845 - DNA, 19 bp, Mus musculus
  siRNA target sequence for Arhgap5 (NM_009706.1,4135-4153).
gtaaactatgatgtattca

SEQ ID NO: 518846 - DNA, 19 bp, Mus musculus
  siRNA target sequence for Arhgap5 (NM_009706.1,4144-4162).
gatgtattcagatatgtga

SEQ ID NO: 518847 - DNA, 19 bp, Mus musculus
  siRNA target sequence for Arhgap5 (NM_009706.1,4147-4165).
gtattcagatatgtgataa

SEQ ID NO: 518848 - DNA, 19 bp, Mus musculus
  siRNA target sequence for Arhgap5 (NM_009706.1,4152-4170).
cagatatgtgataacacat

SEQ ID NO: 518849 - DNA, 19 bp, Mus musculus
  siRNA target sequence for Arhgap5 (NM_009706.1,4176-4194).
cagggttagtcagcaaaat

SEQ ID NO: 518850 - DNA, 19 bp, Mus musculus
  siRNA target sequence for Arhgap5 (NM_009706.1,4179-4197).
ggttagtcagcaaaataaa

SEQ ID NO: 518851 - DNA, 19 bp, Mus musculus
  siRNA target sequence for Arhgap5 (NM_009706.1,4216-4234).
gacaacttatccatctgtt

SEQ ID NO: 518852 - DNA, 19 bp, Mus musculus
  siRNA target sequence for Arhgap5 (NM_009706.1,4264-4282).
gaaaatcgagagtttctgt

SEQ ID NO: 518853 - DNA, 19 bp, Mus musculus
  siRNA target sequence for Arhgap5 (NM_009706.1,4275-4293).
gtttctgtctaccactaaa

SEQ ID NO: 518854 - DNA, 19 bp, Mus musculus
  siRNA target sequence for Arhgap5 (NM_009706.1,4281-4299).
gtctaccactaaaatccat

SEQ ID NO: 518855 - DNA, 19 bp, Mus musculus
  siRNA target sequence for Arhgap5 (NM_009706.1,4287-4305).
cactaaaatccatcaatct

SEQ ID NO: 518856 - DNA, 19 bp, Mus musculus
  siRNA target sequence for Arhgap5 (NM_009706.1,4297-4315).
catcaatctgtcgttgaaa

SEQ ID NO: 518857 - DNA, 19 bp, Mus musculus
  siRNA target sequence for Arhgap5 (NM_009706.1,4300-4318).
caatctgtcgttgaaacat

SEQ ID NO: 518858 - DNA, 19 bp, Mus musculus
  siRNA target sequence for Arhgap5 (NM_009706.1,4394-4412).
cttcaaatccaggacaatt

SEQ ID NO: 518859 - DNA, 19 bp, Mus musculus
  siRNA target sequence for Arhgap5 (NM_009706.1,4397-4415).
caaatccaggacaattggt

SEQ ID NO: 518860 - DNA, 19 bp, Mus musculus
  siRNA target sequence for Arhgap5 (NM_009706.1,4406-4424).
gacaattggtagaatcaat

SEQ ID NO: 518861 - DNA, 19 bp, Mus musculus
  siRNA target sequence for Arhgap5 (NM_009706.1,4421-4439).
caatggtaccacttcagtt

SEQ ID NO: 518862 - DNA, 19 bp, Mus musculus
  siRNA target sequence for Arhgap5 (NM_009706.1,4486-4504).
gatcctcttggtattatat

SEQ ID NO: 518863 - DNA, 19 bp, Mus musculus
  siRNA target sequence for Arhj (NM_023275.1,789-807).
catcggaacccagattgat

SEQ ID NO: 518864 - DNA, 19 bp, Mus musculus
  siRNA target sequence for Arhj (NM_023275.1,832-850).
gcgcgtctgctgtacatga

SEQ ID NO: 518865 - DNA, 19 bp, Mus musculus
  siRNA target sequence for Arhj (NM_023275.1,833-851).
cgcgtctgctgtacatgaa

SEQ ID NO: 518866 - DNA, 19 bp, Mus musculus
  siRNA target sequence for Arhj (NM_023275.1,904-922).
gcgcagtgctacttggaat

SEQ ID NO: 518867 - DNA, 19 bp, Mus musculus
  siRNA target sequence for Arhj (NM_023275.1,907-925).
cagtgctacttggaatgtt

SEQ ID NO: 518868 - DNA, 19 bp, Mus musculus
  siRNA target sequence for Arhj (NM_023275.1,948-966).
caaagcagtttttgatgaa

SEQ ID NO: 518869 - DNA, 19 bp, Mus musculus
  siRNA target sequence for Arhj (NM_023275.1,1024-1042).
ggctgctgtgcaattatct

SEQ ID NO: 518870 - DNA, 19 bp, Mus musculus
  siRNA target sequence for Arhn (NM_009708.1,466-484).
gtgtcctacgttgaatgtt

SEQ ID NO: 518871 - DNA, 19 bp, Mus musculus
  siRNA target sequence for Arhq (NM_145491.2,663-681).
gtacctcttgggactctat

SEQ ID NO: 518872 - DNA, 19 bp, Mus musculus
  siRNA target sequence for Arhq (NM_145491.2,739-757).
gacgtcttcctcatatgct

SEQ ID NO: 518873 - DNA, 19 bp, Mus musculus
  siRNA target sequence for Arhq (NM_145491.2,756-774).
cttctccgtggtaaatcca

SEQ ID NO: 518874 - DNA, 19 bp, Mus musculus
  siRNA target sequence for Arhq (NM_145491.2,834-852).
cgtccccttcttgttaata

SEQ ID NO: 518875 - DNA, 19 bp, Mus musculus
  siRNA target sequence for Arhq (NM_145491.2,838-856).
cccttcttgttaataggaa

SEQ ID NO: 518876 - DNA, 19 bp, Mus musculus
  siRNA target sequence for Arhq (NM_145491.2,846-864).
gttaataggaactcagatt

SEQ ID NO: 518877 - DNA, 19 bp, Mus musculus
  siRNA target sequence for Arhq (NM_145491.2,877-895).
gaccccaaaactttagcaa

SEQ ID NO: 518878 - DNA, 19 bp, Mus musculus
  siRNA target sequence for Arhq (NM_145491.2,887-905).
ctttagcaagactgaatga

SEQ ID NO: 518879 - DNA, 19 bp, Mus musculus
  siRNA target sequence for Arhq (NM_145491.2,1002-1020).
gggtttgaagactgtgttt

SEQ ID NO: 518880 - DNA, 19 bp, Mus musculus
  siRNA target sequence for Arhq (NM_145491.2,1078-1096).
ggatcaagatgtataaact

SEQ ID NO: 518881 - DNA, 19 bp, Mus musculus
  siRNA target sequence for Arht1 (NM_021536.5,192-210).
cgagcctccgacatgaaga

SEQ ID NO: 518882 - DNA, 19 bp, Mus musculus
  siRNA target sequence for Arht1 (NM_021536.5,269-287).
gtcgctggtcagtgaagaa

SEQ ID NO: 518883 - DNA, 19 bp, Mus musculus
  siRNA target sequence for Arht1 (NM_021536.5,271-289).
cgctggtcagtgaagaatt

SEQ ID NO: 518884 - DNA, 19 bp, Mus musculus
  siRNA target sequence for Arht1 (NM_021536.5,304-322).
ctccccgagcagaagaaat

SEQ ID NO: 518885 - DNA, 19 bp, Mus musculus
  siRNA target sequence for Arht1 (NM_021536.5,306-324).
ccccgagcagaagaaatca

SEQ ID NO: 518886 - DNA, 19 bp, Mus musculus
  siRNA target sequence for Arht1 (NM_021536.5,338-356).
cgtcacccctgaaagagtt

SEQ ID NO: 518887 - DNA, 19 bp, Mus musculus
  siRNA target sequence for Arht1 (NM_021536.5,352-370).
gagttccaacacacattgt

SEQ ID NO: 518888 - DNA, 19 bp, Mus musculus
  siRNA target sequence for Arht1 (NM_021536.5,358-376).
caacacacattgtcgatta

SEQ ID NO: 518889 - DNA, 19 bp, Mus musculus
  siRNA target sequence for Arht1 (NM_021536.5,365-383).
cattgtcgattattcagaa

SEQ ID NO: 518890 - DNA, 19 bp, Mus musculus
  siRNA target sequence for Arht1 (NM_021536.5,392-410).
gagtgatgaacaacttcat

SEQ ID NO: 518891 - DNA, 19 bp, Mus musculus
  siRNA target sequence for Arht1 (NM_021536.5,439-457).
gcatagtttatgctgttaa

SEQ ID NO: 518892 - DNA, 19 bp, Mus musculus
  siRNA target sequence for Arht1 (NM_021536.5,453-471).
gttaacaacaaacattcta

SEQ ID NO: 518893 - DNA, 19 bp, Mus musculus
  siRNA target sequence for Arht1 (NM_021536.5,465-483).
cattctattgataaggtaa

SEQ ID NO: 518894 - DNA, 19 bp, Mus musculus
  siRNA target sequence for Arht1 (NM_021536.5,479-497).
ggtaacaagccgatggatt

SEQ ID NO: 518895 - DNA, 19 bp, Mus musculus
  siRNA target sequence for Arht1 (NM_021536.5,488-506).
ccgatggattcctctcata

SEQ ID NO: 518896 - DNA, 19 bp, Mus musculus
  siRNA target sequence for Arht1 (NM_021536.5,489-507).
cgatggattcctctcataa

SEQ ID NO: 518897 - DNA, 19 bp, Mus musculus
  siRNA target sequence for Arht1 (NM_021536.5,490-508).
gatggattcctctcataaa

SEQ ID NO: 518898 - DNA, 19 bp, Mus musculus
  siRNA target sequence for Arht1 (NM_021536.5,493-511).
ggattcctctcataaatga

SEQ ID NO: 518899 - DNA, 19 bp, Mus musculus
  siRNA target sequence for Arht1 (NM_021536.5,548-566).
ggttgggaacaaatctgat

SEQ ID NO: 518900 - DNA, 19 bp, Mus musculus
  siRNA target sequence for Arht1 (NM_021536.5,564-582).
gatctggtggaatatagta

SEQ ID NO: 518901 - DNA, 19 bp, Mus musculus
  siRNA target sequence for Arht1 (NM_021536.5,587-605).
ggagaccatccttccaatt

SEQ ID NO: 518902 - DNA, 19 bp, Mus musculus
  siRNA target sequence for Arht1 (NM_021536.5,588-606).
gagaccatccttccaatta

SEQ ID NO: 518903 - DNA, 19 bp, Mus musculus
  siRNA target sequence for Arht1 (NM_021536.5,600-618).
ccaattatgaaccagtata

SEQ ID NO: 518904 - DNA, 19 bp, Mus musculus
  siRNA target sequence for Arht1 (NM_021536.5,608-626).
gaaccagtatacagagata

SEQ ID NO: 518905 - DNA, 19 bp, Mus musculus
  siRNA target sequence for Arht1 (NM_021536.5,612-630).
cagtatacagagatagaga

SEQ ID NO: 518906 - DNA, 19 bp, Mus musculus
  siRNA target sequence for Arht1 (NM_021536.5,648-666).
gcaaaaaacctaaagaata

SEQ ID NO: 518907 - DNA, 19 bp, Mus musculus
  siRNA target sequence for Arht1 (NM_021536.5,743-761).
gatgaaaccggcttgtata

SEQ ID NO: 518908 - DNA, 19 bp, Mus musculus
  siRNA target sequence for Arht1 (NM_021536.5,764-782).
ggccctcactcgtatattt

SEQ ID NO: 518909 - DNA, 19 bp, Mus musculus
  siRNA target sequence for Arht1 (NM_021536.5,765-783).
gccctcactcgtatattta

SEQ ID NO: 518910 - DNA, 19 bp, Mus musculus
  siRNA target sequence for Arht1 (NM_021536.5,766-784).
ccctcactcgtatatttaa

SEQ ID NO: 518911 - DNA, 19 bp, Mus musculus
  siRNA target sequence for Arht1 (NM_021536.5,767-785).
cctcactcgtatatttaaa

SEQ ID NO: 518912 - DNA, 19 bp, Mus musculus
  siRNA target sequence for Arht1 (NM_021536.5,768-786).
ctcactcgtatatttaaaa

SEQ ID NO: 518913 - DNA, 19 bp, Mus musculus
  siRNA target sequence for Arht1 (NM_021536.5,957-975).
ctctttttacatacacttt

SEQ ID NO: 518914 - DNA, 19 bp, Mus musculus
  siRNA target sequence for Arht1 (NM_021536.5,1007-1025).
gactgtgcttcgacgattt

SEQ ID NO: 518915 - DNA, 19 bp, Mus musculus
  siRNA target sequence for Arht1 (NM_021536.5,1011-1029).
gtgcttcgacgatttggtt

SEQ ID NO: 518916 - DNA, 19 bp, Mus musculus
  siRNA target sequence for Arht1 (NM_021536.5,1046-1064).
cctgacgcctgagtattta

SEQ ID NO: 518917 - DNA, 19 bp, Mus musculus
  siRNA target sequence for Arht1 (NM_021536.5,1047-1065).
ctgacgcctgagtatttat

SEQ ID NO: 518918 - DNA, 19 bp, Mus musculus
  siRNA target sequence for Arht1 (NM_021536.5,1067-1085).
ccccctgctaaaaatacct

SEQ ID NO: 518919 - DNA, 19 bp, Mus musculus
  siRNA target sequence for Arht1 (NM_021536.5,1175-1193).
gtcgcctgatgaacttaaa

SEQ ID NO: 518920 - DNA, 19 bp, Mus musculus
  siRNA target sequence for Arht1 (NM_021536.5,1225-1243).
ggggaccagatgtaaataa

SEQ ID NO: 518921 - DNA, 19 bp, Mus musculus
  siRNA target sequence for Arht1 (NM_021536.5,1260-1278).
gaaagaggctggataacct

SEQ ID NO: 518922 - DNA, 19 bp, Mus musculus
  siRNA target sequence for Arht1 (NM_021536.5,1301-1319).
gacgctcaccacctactta

SEQ ID NO: 518923 - DNA, 19 bp, Mus musculus
  siRNA target sequence for Arht1 (NM_021536.5,1303-1321).
cgctcaccacctacttaga

SEQ ID NO: 518924 - DNA, 19 bp, Mus musculus
  siRNA target sequence for Arht1 (NM_021536.5,1347-1365).
ggatatctaggctattcca

SEQ ID NO: 518925 - DNA, 19 bp, Mus musculus
  siRNA target sequence for Arht1 (NM_021536.5,1348-1366).
gatatctaggctattccat

SEQ ID NO: 518926 - DNA, 19 bp, Mus musculus
  siRNA target sequence for Arht1 (NM_021536.5,1353-1371).
ctaggctattccatactga

SEQ ID NO: 518927 - DNA, 19 bp, Mus musculus
  siRNA target sequence for Arht1 (NM_021536.5,1455-1473).
gtgttcaggtgtaatgtaa

SEQ ID NO: 518928 - DNA, 19 bp, Mus musculus
  siRNA target sequence for Arht1 (NM_021536.5,1457-1475).
gttcaggtgtaatgtaatt

SEQ ID NO: 518929 - DNA, 19 bp, Mus musculus
  siRNA target sequence for Arht1 (NM_021536.5,1460-1478).
caggtgtaatgtaattgga

SEQ ID NO: 518930 - DNA, 19 bp, Mus musculus
  siRNA target sequence for Arht1 (NM_021536.5,1544-1562).
gaaaattcgtgatgatcat

SEQ ID NO: 518931 - DNA, 19 bp, Mus musculus
  siRNA target sequence for Arht1 (NM_021536.5,1554-1572).
gatgatcataagtcctatt

SEQ ID NO: 518932 - DNA, 19 bp, Mus musculus
  siRNA target sequence for Arht1 (NM_021536.5,1576-1594).
caattaacactgtctatgt

SEQ ID NO: 518933 - DNA, 19 bp, Mus musculus
  siRNA target sequence for Arht1 (NM_021536.5,1616-1634).
gttgctgcacgatatctca

SEQ ID NO: 518934 - DNA, 19 bp, Mus musculus
  siRNA target sequence for Arht1 (NM_021536.5,1631-1649).
ctcagagtcggaatttcta

SEQ ID NO: 518935 - DNA, 19 bp, Mus musculus
  siRNA target sequence for Arht1 (NM_021536.5,1704-1722).
cccaaatcctttgaatact

SEQ ID NO: 518936 - DNA, 19 bp, Mus musculus
  siRNA target sequence for Arht1 (NM_021536.5,1716-1734).
gaatactgtgccaggattt

SEQ ID NO: 518937 - DNA, 19 bp, Mus musculus
  siRNA target sequence for Arht1 (NM_021536.5,1772-1790).
gattgtagctgcaaagtca

SEQ ID NO: 518938 - DNA, 19 bp, Mus musculus
  siRNA target sequence for Arht1 (NM_021536.5,1819-1837).
gcatctcacctactgattt

SEQ ID NO: 518939 - DNA, 19 bp, Mus musculus
  siRNA target sequence for Arht1 (NM_021536.5,1866-1884).
caagccttcacttgcaata

SEQ ID NO: 518940 - DNA, 19 bp, Mus musculus
  siRNA target sequence for Arht1 (NM_021536.5,1890-1908).
gatgcccccagtaaggata

SEQ ID NO: 518941 - DNA, 19 bp, Mus musculus
  siRNA target sequence for Arht1 (NM_021536.5,1894-1912).
cccccagtaaggatatctt

SEQ ID NO: 518942 - DNA, 19 bp, Mus musculus
  siRNA target sequence for Arht1 (NM_021536.5,2013-2031).
gcagtcgtgggctttgcta

SEQ ID NO: 518943 - DNA, 19 bp, Mus musculus
  siRNA target sequence for Arht1 (NM_021536.5,2014-2032).
cagtcgtgggctttgctat

SEQ ID NO: 518944 - DNA, 19 bp, Mus musculus
  siRNA target sequence for Arht1 (NM_021536.5,2033-2051).
gtacagagcactactgaaa

SEQ ID NO: 518945 - DNA, 19 bp, Mus musculus
  siRNA target sequence for Arht2 (NM_145999.2,560-578).
gagaaggtgcccactcata

SEQ ID NO: 518946 - DNA, 19 bp, Mus musculus
  siRNA target sequence for Arht2 (NM_145999.2,570-588).
ccactcatatcgtggatta

SEQ ID NO: 518947 - DNA, 19 bp, Mus musculus
  siRNA target sequence for Arht2 (NM_145999.2,860-878).
gccaagcacttgaggaata

SEQ ID NO: 518948 - DNA, 19 bp, Mus musculus
  siRNA target sequence for Arht2 (NM_145999.2,977-995).
gcgctcacacgcatcttca

SEQ ID NO: 518949 - DNA, 19 bp, Mus musculus
  siRNA target sequence for Arht2 (NM_145999.2,1027-1045).
gagcgacgaggaactcaat

SEQ ID NO: 518950 - DNA, 19 bp, Mus musculus
  siRNA target sequence for Arht2 (NM_145999.2,1390-1408).
gcccacggaactacagaat

SEQ ID NO: 518951 - DNA, 19 bp, Mus musculus
  siRNA target sequence for Arht2 (NM_145999.2,1392-1410).
ccacggaactacagaatct

SEQ ID NO: 518952 - DNA, 19 bp, Mus musculus
  siRNA target sequence for Arht2 (NM_145999.2,1395-1413).
cggaactacagaatctctt

SEQ ID NO: 518953 - DNA, 19 bp, Mus musculus
  siRNA target sequence for Arht2 (NM_145999.2,1598-1616).
gcacaggctatcacagtta

SEQ ID NO: 518954 - DNA, 19 bp, Mus musculus
  siRNA target sequence for Arht2 (NM_145999.2,1611-1629).
cagttacccgcgagaagaa

SEQ ID NO: 518955 - DNA, 19 bp, Mus musculus
  siRNA target sequence for Arht2 (NM_145999.2,1658-1676).
cgcagcgttctcatgtgta

SEQ ID NO: 518956 - DNA, 19 bp, Mus musculus
  siRNA target sequence for Arht2 (NM_145999.2,1752-1770).
gggacccccctgagaaatt

SEQ ID NO: 518957 - DNA, 19 bp, Mus musculus
  siRNA target sequence for Arht2 (NM_145999.2,1771-1789).
ccccctgcataccatcaat

SEQ ID NO: 518958 - DNA, 19 bp, Mus musculus
  siRNA target sequence for Arht2 (NM_145999.2,1772-1790).
cccctgcataccatcaata

SEQ ID NO: 518959 - DNA, 19 bp, Mus musculus
  siRNA target sequence for Arht2 (NM_145999.2,1774-1792).
cctgcataccatcaataca

SEQ ID NO: 518960 - DNA, 19 bp, Mus musculus
  siRNA target sequence for Arht2 (NM_145999.2,1822-1840).
gattctgtgtgaagtgaat

SEQ ID NO: 518961 - DNA, 19 bp, Mus musculus
  siRNA target sequence for Arht2 (NM_145999.2,1878-1896).
gtgatgtcgcctgcttaat

SEQ ID NO: 518962 - DNA, 19 bp, Mus musculus
  siRNA target sequence for Arht2 (NM_145999.2,1880-1898).
gatgtcgcctgcttaatgt

SEQ ID NO: 518963 - DNA, 19 bp, Mus musculus
  siRNA target sequence for Arht2 (NM_145999.2,1886-1904).
gcctgcttaatgtttgaca

SEQ ID NO: 518964 - DNA, 19 bp, Mus musculus
  siRNA target sequence for Arht2 (NM_145999.2,1925-1943).
gtacactgtgctaccatat

SEQ ID NO: 518965 - DNA, 19 bp, Mus musculus
  siRNA target sequence for Arht2 (NM_145999.2,1928-1946).
cactgtgctaccatataca

SEQ ID NO: 518966 - DNA, 19 bp, Mus musculus
  siRNA target sequence for Arht2 (NM_145999.2,1967-1985).
cagaccccctgcctcttta

SEQ ID NO: 518967 - DNA, 19 bp, Mus musculus
  siRNA target sequence for Arht2 (NM_145999.2,2234-2252).
gtccttagcttctcactat

SEQ ID NO: 518968 - DNA, 19 bp, Mus musculus
  siRNA target sequence for Arhu (NM_133955.1,265-283).
ctacggccttcgacaactt

SEQ ID NO: 518969 - DNA, 19 bp, Mus musculus
  siRNA target sequence for Arhu (NM_133955.1,530-548).
cgtcaaagtgctcatagaa

SEQ ID NO: 518970 - DNA, 19 bp, Mus musculus
  siRNA target sequence for Arhu (NM_133955.1,596-614).
gtgcgcggaggaagtcaaa

SEQ ID NO: 518971 - DNA, 19 bp, Mus musculus
  siRNA target sequence for Arhu (NM_133955.1,714-732).
ctacagccaaagaagtcta

SEQ ID NO: 518972 - DNA, 19 bp, Mus musculus
  siRNA target sequence for Arhu (NM_133955.1,736-754).
gcaggaccccggataaggt

SEQ ID NO: 518973 - DNA, 19 bp, Mus musculus
  siRNA target sequence for Arhv (NM_145530.1,408-426).
cccggacaccgatgtcttt

SEQ ID NO: 518974 - DNA, 19 bp, Mus musculus
  siRNA target sequence for Arhv (NM_145530.1,410-428).
cggacaccgatgtctttct

SEQ ID NO: 518975 - DNA, 19 bp, Mus musculus
  siRNA target sequence for Arhv (NM_145530.1,456-474).
ctccttccaaaacataaca

SEQ ID NO: 518976 - DNA, 19 bp, Mus musculus
  siRNA target sequence for Arhv (NM_145530.1,551-569).
gggacgatgtcaatgtact

SEQ ID NO: 518977 - DNA, 19 bp, Mus musculus
  siRNA target sequence for Arhv (NM_145530.1,555-573).
cgatgtcaatgtactaatt

SEQ ID NO: 518978 - DNA, 19 bp, Mus musculus
  siRNA target sequence for Arhv (NM_145530.1,671-689).
ccttgacgcagaagaactt

SEQ ID NO: 518979 - DNA, 19 bp, Mus musculus
  siRNA target sequence for Arhv (NM_145530.1,784-802).
cgctgtcgctggaagaagt

SEQ ID NO: 518980 - DNA, 19 bp, Mus musculus
  siRNA target sequence for Arhv (NM_145530.1,785-803).
gctgtcgctggaagaagtt

SEQ ID NO: 518981 - DNA, 19 bp, Mus musculus
  siRNA target sequence for Arl1 (NM_025859.1,275-293).
gttacaggttggagaagtt

SEQ ID NO: 518982 - DNA, 19 bp, Mus musculus
  siRNA target sequence for Arl2 (NM_019722.3,40-58).
gggcttctgaccattctga

SEQ ID NO: 518983 - DNA, 19 bp, Mus musculus
  siRNA target sequence for Arl2 (NM_019722.3,41-59).
ggcttctgaccattctgaa

SEQ ID NO: 518984 - DNA, 19 bp, Mus musculus
  siRNA target sequence for Arl2 (NM_019722.3,430-448).
gcactgtcctgtaatgcta

SEQ ID NO: 518985 - DNA, 19 bp, Mus musculus
  siRNA target sequence for Arl2 (NM_019722.3,561-579).
catttccagtcgtgtcttt

SEQ ID NO: 518986 - DNA, 19 bp, Mus musculus
  siRNA target sequence for Arl3 (NM_019718.2,145-163).
gaagcaactcgcatctgaa

SEQ ID NO: 518987 - DNA, 19 bp, Mus musculus
  siRNA target sequence for Arl3 (NM_019718.2,207-225).
gcgtgcagtcacaaggttt

SEQ ID NO: 518988 - DNA, 19 bp, Mus musculus
  siRNA target sequence for Arl3 (NM_019718.2,208-226).
cgtgcagtcacaaggtttt

SEQ ID NO: 518989 - DNA, 19 bp, Mus musculus
  siRNA target sequence for Arl3 (NM_019718.2,221-239).
ggttttaagctgaatgtat

SEQ ID NO: 518990 - DNA, 19 bp, Mus musculus
  siRNA target sequence for Arl3 (NM_019718.2,305-323).
ctcatctatgtaattgaca

SEQ ID NO: 518991 - DNA, 19 bp, Mus musculus
  siRNA target sequence for Arl3 (NM_019718.2,320-338).
gacagtgccgacagaaaga

SEQ ID NO: 518992 - DNA, 19 bp, Mus musculus
  siRNA target sequence for Arl3 (NM_019718.2,324-342).
gtgccgacagaaagagatt

SEQ ID NO: 518993 - DNA, 19 bp, Mus musculus
  siRNA target sequence for Arl3 (NM_019718.2,553-571).
gaactgggtctgcaagaat

SEQ ID NO: 518994 - DNA, 19 bp, Mus musculus
  siRNA target sequence for Arl3 (NM_019718.2,558-576).
gggtctgcaagaatgtcaa

SEQ ID NO: 518995 - DNA, 19 bp, Mus musculus
  siRNA target sequence for Arl4 (NM_007487.2,281-299).
gcagttcaacgaatttgta

SEQ ID NO: 518996 - DNA, 19 bp, Mus musculus
  siRNA target sequence for Arl4 (NM_007487.2,282-300).
cagttcaacgaatttgtaa

SEQ ID NO: 518997 - DNA, 19 bp, Mus musculus
  siRNA target sequence for Arl4 (NM_007487.2,284-302).
gttcaacgaatttgtaaat

SEQ ID NO: 518998 - DNA, 19 bp, Mus musculus
  siRNA target sequence for Arl4 (NM_007487.2,304-322).
ccgtacctaccaaaggatt

SEQ ID NO: 518999 - DNA, 19 bp, Mus musculus
  siRNA target sequence for Arl4 (NM_007487.2,305-323).
cgtacctaccaaaggattt

SEQ ID NO: 519000 - DNA, 19 bp, Mus musculus
  siRNA target sequence for Arl4 (NM_007487.2,306-324).
gtacctaccaaaggattta

SEQ ID NO: 519001 - DNA, 19 bp, Mus musculus
  siRNA target sequence for Arl4 (NM_007487.2,347-365).
cttgggcaattccaaaaca

SEQ ID NO: 519002 - DNA, 19 bp, Mus musculus
  siRNA target sequence for Arl4 (NM_007487.2,358-376).
ccaaaacagtcacttttca

SEQ ID NO: 519003 - DNA, 19 bp, Mus musculus
  siRNA target sequence for Arl4 (NM_007487.2,390-408).
ggtggtcaagagaagttaa

SEQ ID NO: 519004 - DNA, 19 bp, Mus musculus
  siRNA target sequence for Arl4 (NM_007487.2,430-448).
cccgatgcacagatggtat

SEQ ID NO: 519005 - DNA, 19 bp, Mus musculus
  siRNA target sequence for Arl4 (NM_007487.2,466-484).
ctgtcgatgttgagagaat

SEQ ID NO: 519006 - DNA, 19 bp, Mus musculus
  siRNA target sequence for Arl4 (NM_007487.2,493-511).
ccaaaactgaacttcataa

SEQ ID NO: 519007 - DNA, 19 bp, Mus musculus
  siRNA target sequence for Arl4 (NM_007487.2,507-525).
cataaaataactaggatat

SEQ ID NO: 519008 - DNA, 19 bp, Mus musculus
  siRNA target sequence for Arl4 (NM_007487.2,517-535).
ctaggatatccgaaaatca

SEQ ID NO: 519009 - DNA, 19 bp, Mus musculus
  siRNA target sequence for Arl4 (NM_007487.2,536-554).
gggagtccctgtgcttata

SEQ ID NO: 519010 - DNA, 19 bp, Mus musculus
  siRNA target sequence for Arl4 (NM_007487.2,538-556).
gagtccctgtgcttatagt

SEQ ID NO: 519011 - DNA, 19 bp, Mus musculus
  siRNA target sequence for Arl4 (NM_007487.2,637-655).
cgactccttggcatttgca

SEQ ID NO: 519012 - DNA, 19 bp, Mus musculus
  siRNA target sequence for Arl4 (NM_007487.2,656-674).
gcccacctgtgcaatcata

SEQ ID NO: 519013 - DNA, 19 bp, Mus musculus
  siRNA target sequence for Arl4 (NM_007487.2,694-712).
gactcgagaaactacatga

SEQ ID NO: 519014 - DNA, 19 bp, Mus musculus
  siRNA target sequence for Arl4 (NM_007487.2,696-714).
ctcgagaaactacatgata

SEQ ID NO: 519015 - DNA, 19 bp, Mus musculus
  siRNA target sequence for Arl4 (NM_007487.2,699-717).
gagaaactacatgatatga

SEQ ID NO: 519016 - DNA, 19 bp, Mus musculus
  siRNA target sequence for Arl6ip2 (NM_019717.1,128-146).
ctgaaatcgaagaaaccta

SEQ ID NO: 519017 - DNA, 19 bp, Mus musculus
  siRNA target sequence for Arl6ip2 (NM_019717.1,139-157).
gaaacctatgcaaatttta

SEQ ID NO: 519018 - DNA, 19 bp, Mus musculus
  siRNA target sequence for Arl6ip2 (NM_019717.1,220-238).
gtcatgtttgctatgtata

SEQ ID NO: 519019 - DNA, 19 bp, Mus musculus
  siRNA target sequence for Arl6ip2 (NM_019717.1,275-293).
ctatagctgtcttatgcaa

SEQ ID NO: 519020 - DNA, 19 bp, Mus musculus
  siRNA target sequence for Arl6ip2 (NM_019717.1,329-347).
cttgggcatatgttaagta

SEQ ID NO: 519021 - DNA, 19 bp, Mus musculus
  siRNA target sequence for Arl6ip2 (NM_019717.1,371-389).
gaacaatgattgatcagat

SEQ ID NO: 519022 - DNA, 19 bp, Mus musculus
  siRNA target sequence for Arl6ip2 (NM_178050.2,1577-1595).
gcaacagctgaggctaata

SEQ ID NO: 519023 - DNA, 19 bp, Mus musculus
  siRNA target sequence for Arl6ip2 (NM_178050.2,1578-1596).
caacagctgaggctaataa

SEQ ID NO: 519024 - DNA, 19 bp, Mus musculus
  siRNA target sequence for Arl6ip2 (NM_178050.2,1616-1634).
gcaagagatgtctattgta

SEQ ID NO: 519025 - DNA, 19 bp, Mus musculus
  siRNA target sequence for Arl6ip2 (NM_178050.2,1622-1640).
gatgtctattgtaaaagta

SEQ ID NO: 519026 - DNA, 19 bp, Mus musculus
  siRNA target sequence for Arl6ip2 (NM_178050.2,1669-1687).
gtacattgcaccttcagat

SEQ ID NO: 519027 - DNA, 19 bp, Mus musculus
  siRNA target sequence for Arl6ip2 (NM_178050.2,2086-2104).
gaagcccctgggtgataat

SEQ ID NO: 519028 - DNA, 19 bp, Mus musculus
  siRNA target sequence for Arl6ip2 (NM_178050.2,2091-2109).
ccctgggtgataatttgat

SEQ ID NO: 519029 - DNA, 19 bp, Mus musculus
  siRNA target sequence for Arl6ip2 (NM_178050.2,2119-2137).
cataaggcagtctgtaaca

SEQ ID NO: 519030 - DNA, 19 bp, Mus musculus
  siRNA target sequence for Arl6ip2 (NM_178050.2,2126-2144).
cagtctgtaacaaactcta

SEQ ID NO: 519031 - DNA, 19 bp, Mus musculus
  siRNA target sequence for Arl6ip2 (NM_178050.2,2174-2192).
catcatgcccgattaaaga

SEQ ID NO: 519032 - DNA, 19 bp, Mus musculus
  siRNA target sequence for Arl8 (NM_029466.2,173-191).
ggctgatcttcgctaaact

SEQ ID NO: 519033 - DNA, 19 bp, Mus musculus
  siRNA target sequence for Arl8 (NM_029466.2,175-193).
ctgatcttcgctaaactgt

SEQ ID NO: 519034 - DNA, 19 bp, Mus musculus
  siRNA target sequence for Arl8 (NM_029466.2,195-213).
gagccttttttgtaaccaa

SEQ ID NO: 519035 - DNA, 19 bp, Mus musculus
  siRNA target sequence for Arl8 (NM_029466.2,265-283).
ctgtatcagttcttaatga

SEQ ID NO: 519036 - DNA, 19 bp, Mus musculus
  siRNA target sequence for Arl8 (NM_029466.2,273-291).
gttcttaatgaatgaagta

SEQ ID NO: 519037 - DNA, 19 bp, Mus musculus
  siRNA target sequence for Arl8 (NM_029466.2,317-335).
gcaatgttgaagaaatcgt

SEQ ID NO: 519038 - DNA, 19 bp, Mus musculus
  siRNA target sequence for Arl8 (NM_029466.2,318-336).
caatgttgaagaaatcgtt

SEQ ID NO: 519039 - DNA, 19 bp, Mus musculus
  siRNA target sequence for Arl8 (NM_029466.2,334-352).
gttgtgaagaacactcatt

SEQ ID NO: 519040 - DNA, 19 bp, Mus musculus
  siRNA target sequence for Arl8 (NM_029466.2,396-414).
ctggaacacctattactca

SEQ ID NO: 519041 - DNA, 19 bp, Mus musculus
  siRNA target sequence for Arl8 (NM_029466.2,402-420).
cacctattactcaaacaca

SEQ ID NO: 519042 - DNA, 19 bp, Mus musculus
  siRNA target sequence for Arl8 (NM_029466.2,457-475).
gaacgcctggctattacga

SEQ ID NO: 519043 - DNA, 19 bp, Mus musculus
  siRNA target sequence for Arl8 (NM_029466.2,462-480).
cctggctattacgaaagaa

SEQ ID NO: 519044 - DNA, 19 bp, Mus musculus
  siRNA target sequence for Arl8 (NM_029466.2,465-483).
ggctattacgaaagaagaa

SEQ ID NO: 519045 - DNA, 19 bp, Mus musculus
  siRNA target sequence for Arl8 (NM_029466.2,495-513).
gttggcccatgaggattta

SEQ ID NO: 519046 - DNA, 19 bp, Mus musculus
  siRNA target sequence for Arl8 (NM_029466.2,499-517).
gcccatgaggatttaagga

SEQ ID NO: 519047 - DNA, 19 bp, Mus musculus
  siRNA target sequence for Arl8 (NM_029466.2,501-519).
ccatgaggatttaaggaaa

SEQ ID NO: 519048 - DNA, 19 bp, Mus musculus
  siRNA target sequence for Arl8 (NM_029466.2,515-533).
ggaaagctgcagtccttat

SEQ ID NO: 519049 - DNA, 19 bp, Mus musculus
  siRNA target sequence for Arl8 (NM_029466.2,524-542).
cagtccttatctttgcaaa

SEQ ID NO: 519050 - DNA, 19 bp, Mus musculus
  siRNA target sequence for Arl8 (NM_029466.2,538-556).
gcaaataaacaggatatga

SEQ ID NO: 519051 - DNA, 19 bp, Mus musculus
  siRNA target sequence for Arl8 (NM_029466.2,572-590).
cagctgaaatctccaaata

SEQ ID NO: 519052 - DNA, 19 bp, Mus musculus
  siRNA target sequence for Arl8 (NM_029466.2,592-610).
ctcaccctaagttcaatca

SEQ ID NO: 519053 - DNA, 19 bp, Mus musculus
  siRNA target sequence for C230094F14Rik (NM_175562.2,120-138).
ggagactatttggatctat

SEQ ID NO: 519054 - DNA, 19 bp, Mus musculus
  siRNA target sequence for C230094F14Rik (NM_175562.2,135-153).
ctatcagttccgccttatt

SEQ ID NO: 519055 - DNA, 19 bp, Mus musculus
  siRNA target sequence for C230094F14Rik (NM_175562.2,139-157).
cagttccgccttattgtga

SEQ ID NO: 519056 - DNA, 19 bp, Mus musculus
  siRNA target sequence for C230094F14Rik (NM_175562.2,248-266).
cagtcggcgtggacttctt

SEQ ID NO: 519057 - DNA, 19 bp, Mus musculus
  siRNA target sequence for C230094F14Rik (NM_175562.2,331-349).
caggagcgcttcagatcaa

SEQ ID NO: 519058 - DNA, 19 bp, Mus musculus
  siRNA target sequence for C230094F14Rik (NM_175562.2,333-351).
ggagcgcttcagatcaata

SEQ ID NO: 519059 - DNA, 19 bp, Mus musculus
  siRNA target sequence for C230094F14Rik (NM_175562.2,334-352).
gagcgcttcagatcaataa

SEQ ID NO: 519060 - DNA, 19 bp, Mus musculus
  siRNA target sequence for C230094F14Rik (NM_175562.2,336-354).
gcgcttcagatcaataact

SEQ ID NO: 519061 - DNA, 19 bp, Mus musculus
  siRNA target sequence for C230094F14Rik (NM_175562.2,347-365).
caataactcgatcctatta

SEQ ID NO: 519062 - DNA, 19 bp, Mus musculus
  siRNA target sequence for C230094F14Rik (NM_175562.2,369-387).
caactcagttggaggattt

SEQ ID NO: 519063 - DNA, 19 bp, Mus musculus
  siRNA target sequence for C230094F14Rik (NM_175562.2,372-390).
ctcagttggaggattttta

SEQ ID NO: 519064 - DNA, 19 bp, Mus musculus
  siRNA target sequence for C230094F14Rik (NM_175562.2,376-394).
gttggaggatttttagtgt

SEQ ID NO: 519065 - DNA, 19 bp, Mus musculus
  siRNA target sequence for C230094F14Rik (NM_175562.2,404-422).
ctaaccgacggtcttttga

SEQ ID NO: 519066 - DNA, 19 bp, Mus musculus
  siRNA target sequence for C230094F14Rik (NM_175562.2,408-426).
ccgacggtcttttgaacat

SEQ ID NO: 519067 - DNA, 19 bp, Mus musculus
  siRNA target sequence for C230094F14Rik (NM_175562.2,410-428).
gacggtcttttgaacatgt

SEQ ID NO: 519068 - DNA, 19 bp, Mus musculus
  siRNA target sequence for C230094F14Rik (NM_175562.2,414-432).
gtcttttgaacatgtgaaa

SEQ ID NO: 519069 - DNA, 19 bp, Mus musculus
  siRNA target sequence for C230094F14Rik (NM_175562.2,484-502).
ctactggtgggacataaat

SEQ ID NO: 519070 - DNA, 19 bp, Mus musculus
  siRNA target sequence for C230094F14Rik (NM_175562.2,559-577).
gactgtggaatgaagtaca

SEQ ID NO: 519071 - DNA, 19 bp, Mus musculus
  siRNA target sequence for C230094F14Rik (NM_175562.2,561-579).
ctgtggaatgaagtacata

SEQ ID NO: 519072 - DNA, 19 bp, Mus musculus
  siRNA target sequence for C230094F14Rik (NM_175562.2,591-609).
caaggacgcgacaaacgtt

SEQ ID NO: 519073 - DNA, 19 bp, Mus musculus
  siRNA target sequence for C230094F14Rik (NM_175562.2,607-625).
gttgaagagtcctttacaa

SEQ ID NO: 519074 - DNA, 19 bp, Mus musculus
  siRNA target sequence for C230094F14Rik (NM_175562.2,637-655).
gacatatatgagcttatca

SEQ ID NO: 519075 - DNA, 19 bp, Mus musculus
  siRNA target sequence for C230094F14Rik (NM_175562.2,693-711).
ggttaaaagtggtttcgtt

SEQ ID NO: 519076 - DNA, 19 bp, Mus musculus
  siRNA target sequence for C230094F14Rik (NM_175562.2,742-760).
gtcaagcccagaaaagagt

SEQ ID NO: 519077 - DNA, 19 bp, Mus musculus
  siRNA target sequence for C330021A05Rik (NM_153082.1,73-91).
gccgaagtggggaaaagct

SEQ ID NO: 519078 - DNA, 19 bp, Mus musculus
  siRNA target sequence for C330021A05Rik (NM_153082.1,188-206).
gagagatcaaagttaacat

SEQ ID NO: 519079 - DNA, 19 bp, Mus musculus
  siRNA target sequence for C330021A05Rik (NM_153082.1,190-208).
gagatcaaagttaacatct

SEQ ID NO: 519080 - DNA, 19 bp, Mus musculus
  siRNA target sequence for C330021A05Rik (NM_153082.1,238-256).
gaggtccgaaatgagtttt

SEQ ID NO: 519081 - DNA, 19 bp, Mus musculus
  siRNA target sequence for C330021A05Rik (NM_153082.1,266-284).
cacaaggtgtgatactagt

SEQ ID NO: 519082 - DNA, 19 bp, Mus musculus
  siRNA target sequence for C330021A05Rik (NM_153082.1,272-290).
gtgtgatactagtctatga

SEQ ID NO: 519083 - DNA, 19 bp, Mus musculus
  siRNA target sequence for C330021A05Rik (NM_153082.1,276-294).
gatactagtctatgatgtt

SEQ ID NO: 519084 - DNA, 19 bp, Mus musculus
  siRNA target sequence for C330021A05Rik (NM_153082.1,296-314).
gacagaaagactcatttga

SEQ ID NO: 519085 - DNA, 19 bp, Mus musculus
  siRNA target sequence for C330021A05Rik (NM_153082.1,372-390).
ggacaacattgtctttgtt

SEQ ID NO: 519086 - DNA, 19 bp, Mus musculus
  siRNA target sequence for C330021A05Rik (NM_153082.1,425-443).
gctgcatcgatgaaagtga

SEQ ID NO: 519087 - DNA, 19 bp, Mus musculus
  siRNA target sequence for C330021A05Rik (NM_153082.1,464-482).
gcaaagggttcctgtactt

SEQ ID NO: 519088 - DNA, 19 bp, Mus musculus
  siRNA target sequence for C330021A05Rik (NM_153082.1,465-483).
caaagggttcctgtacttt

SEQ ID NO: 519089 - DNA, 19 bp, Mus musculus
  siRNA target sequence for C330021A05Rik (NM_153082.1,469-487).
gggttcctgtactttgaaa

SEQ ID NO: 519090 - DNA, 19 bp, Mus musculus
  siRNA target sequence for C330021A05Rik (NM_153082.1,584-602).
caagtagcagtgctagttt

SEQ ID NO: 519091 - DNA, 19 bp, Mus musculus
  siRNA target sequence for C330021A05Rik (NM_153082.1,596-614).
ctagtttcaccaaagaaca

SEQ ID NO: 519092 - DNA, 19 bp, Mus musculus
  siRNA target sequence for C330021A05Rik (NM_153082.1,628-646).
cgcagaatccgaaatagta

SEQ ID NO: 519093 - DNA, 19 bp, Mus musculus
  siRNA target sequence for C730007L20Rik (NM_177337.2,438-456).
gcatcgacctccttgtgta

SEQ ID NO: 519094 - DNA, 19 bp, Mus musculus
  siRNA target sequence for C730007L20Rik (NM_177337.2,587-605).
ctgccgttgcttgaaatca

SEQ ID NO: 519095 - DNA, 19 bp, Mus musculus
  siRNA target sequence for C730007L20Rik (NM_177337.2,589-607).
gccgttgcttgaaatcaga

SEQ ID NO: 519096 - DNA, 19 bp, Mus musculus
  siRNA target sequence for C730007L20Rik (NM_177337.2,590-608).
ccgttgcttgaaatcagaa

SEQ ID NO: 519097 - DNA, 19 bp, Mus musculus
  siRNA target sequence for C730007L20Rik (NM_177337.2,591-609).
cgttgcttgaaatcagaaa

SEQ ID NO: 519098 - DNA, 19 bp, Mus musculus
  siRNA target sequence for Cdc42 (NM_009861.1,163-181).
gaatatgtaccaactgttt

SEQ ID NO: 519099 - DNA, 19 bp, Mus musculus
  siRNA target sequence for Cdc42 (NM_009861.1,221-239).
catacactcttggactttt

SEQ ID NO: 519100 - DNA, 19 bp, Mus musculus
  siRNA target sequence for Cdc42 (NM_009861.1,269-287).
gactacgaccgctaagtta

SEQ ID NO: 519101 - DNA, 19 bp, Mus musculus
  siRNA target sequence for Diras1 (NM_145217.2,387-405).
gccccatctacaagttgat

SEQ ID NO: 519102 - DNA, 19 bp, Mus musculus
  siRNA target sequence for Dnclic1 (NM_146229.1,72-90).
cggctcgttcggttcatct

SEQ ID NO: 519103 - DNA, 19 bp, Mus musculus
  siRNA target sequence for Dnclic1 (NM_146229.1,178-196).
gaggacgggcagaaccttt

SEQ ID NO: 519104 - DNA, 19 bp, Mus musculus
  siRNA target sequence for Dnclic1 (NM_146229.1,375-393).
cgaagacagggatgatcaa

SEQ ID NO: 519105 - DNA, 19 bp, Mus musculus
  siRNA target sequence for Dnclic1 (NM_146229.1,379-397).
gacagggatgatcaaacaa

SEQ ID NO: 519106 - DNA, 19 bp, Mus musculus
  siRNA target sequence for Dnclic1 (NM_146229.1,476-494).
gggacactctggtcatgtt

SEQ ID NO: 519107 - DNA, 19 bp, Mus musculus
  siRNA target sequence for Dnclic1 (NM_146229.1,513-531).
gccttggactgctttggat

SEQ ID NO: 519108 - DNA, 19 bp, Mus musculus
  siRNA target sequence for Dnclic1 (NM_146229.1,514-532).
ccttggactgctttggatt

SEQ ID NO: 519109 - DNA, 19 bp, Mus musculus
  siRNA target sequence for Dnclic1 (NM_146229.1,789-807).
gtgtgatgccattagtgta

SEQ ID NO: 519110 - DNA, 19 bp, Mus musculus
  siRNA target sequence for Dnclic1 (NM_146229.1,886-904).
ggcgcagcgctgatttaca

SEQ ID NO: 519111 - DNA, 19 bp, Mus musculus
  siRNA target sequence for Dnclic1 (NM_146229.1,888-906).
cgcagcgctgatttacact

SEQ ID NO: 519112 - DNA, 19 bp, Mus musculus
  siRNA target sequence for Dnclic1 (NM_146229.1,894-912).
gctgatttacacttcagta

SEQ ID NO: 519113 - DNA, 19 bp, Mus musculus
  siRNA target sequence for Dnclic1 (NM_146229.1,895-913).
ctgatttacacttcagtaa

SEQ ID NO: 519114 - DNA, 19 bp, Mus musculus
  siRNA target sequence for Dnclic1 (NM_146229.1,897-915).
gatttacacttcagtaaaa

SEQ ID NO: 519115 - DNA, 19 bp, Mus musculus
  siRNA target sequence for Dnclic1 (NM_146229.1,921-939).
caagaacatagacttagtt

SEQ ID NO: 519116 - DNA, 19 bp, Mus musculus
  siRNA target sequence for Dnclic1 (NM_146229.1,924-942).
gaacatagacttagtttat

SEQ ID NO: 519117 - DNA, 19 bp, Mus musculus
  siRNA target sequence for Dnclic1 (NM_146229.1,1005-1023).
ggacgcagtgtttattcca

SEQ ID NO: 519118 - DNA, 19 bp, Mus musculus
  siRNA target sequence for Dnclic1 (NM_146229.1,1024-1042).
gcagggtgggataatgata

SEQ ID NO: 519119 - DNA, 19 bp, Mus musculus
  siRNA target sequence for Dnclic1 (NM_146229.1,1027-1045).
gggtgggataatgataaga

SEQ ID NO: 519120 - DNA, 19 bp, Mus musculus
  siRNA target sequence for Dnclic1 (NM_146229.1,1185-1203).
gctacagtctcttttagca

SEQ ID NO: 519121 - DNA, 19 bp, Mus musculus
  siRNA target sequence for Dnclic1 (NM_146229.1,1331-1349).
ccaaaaaaattgatccaaa

SEQ ID NO: 519122 - DNA, 19 bp, Mus musculus
  siRNA target sequence for Dnclic1 (NM_146229.1,1375-1393).
ggggtcctggcgaatttct

SEQ ID NO: 519123 - DNA, 19 bp, Mus musculus
  siRNA target sequence for Dnclic1 (NM_146229.1,1376-1394).
gggtcctggcgaatttctt

SEQ ID NO: 519124 - DNA, 19 bp, Mus musculus
  siRNA target sequence for Dnclic1 (NM_146229.1,1540-1558).
gcagagctagacagaatca

SEQ ID NO: 519125 - DNA, 19 bp, Mus musculus
  siRNA target sequence for Dnm (NM_010065.1,280-298).
ggtcctgcagctggttaat

SEQ ID NO: 519126 - DNA, 19 bp, Mus musculus
  siRNA target sequence for Dnm (NM_010065.1,281-299).
gtcctgcagctggttaatt

SEQ ID NO: 519127 - DNA, 19 bp, Mus musculus
  siRNA target sequence for Dnm (NM_010065.1,283-301).
cctgcagctggttaattct

SEQ ID NO: 519128 - DNA, 19 bp, Mus musculus
  siRNA target sequence for Dnm (NM_010065.1,293-311).
gttaattctaccacagaat

SEQ ID NO: 519129 - DNA, 19 bp, Mus musculus
  siRNA target sequence for Dnm (NM_010065.1,325-343).
gcactgcaaggggaagaaa

SEQ ID NO: 519130 - DNA, 19 bp, Mus musculus
  siRNA target sequence for Dnm (NM_010065.1,326-344).
cactgcaaggggaagaaat

SEQ ID NO: 519131 - DNA, 19 bp, Mus musculus
  siRNA target sequence for Dnm (NM_010065.1,510-528).
gggaccaacctcctgatat

SEQ ID NO: 519132 - DNA, 19 bp, Mus musculus
  siRNA target sequence for Dnm (NM_010065.1,831-849).
ctgcagagcgcaaattctt

SEQ ID NO: 519133 - DNA, 19 bp, Mus musculus
  siRNA target sequence for Dnm (NM_010065.1,911-929).
gtcctcaatcagcaattga

SEQ ID NO: 519134 - DNA, 19 bp, Mus musculus
  siRNA target sequence for Dnm (NM_010065.1,1116-1134).
gagaccagattgacactta

SEQ ID NO: 519135 - DNA, 19 bp, Mus musculus
  siRNA target sequence for Dnm (NM_010065.1,1291-1309).
catggcctttgaaaccatt

SEQ ID NO: 519136 - DNA, 19 bp, Mus musculus
  siRNA target sequence for Dnm (NM_010065.1,1296-1314).
cctttgaaaccattgtgaa

SEQ ID NO: 519137 - DNA, 19 bp, Mus musculus
  siRNA target sequence for Dnm (NM_010065.1,1610-1628).
gggaaccaggtcattcgaa

SEQ ID NO: 519138 - DNA, 19 bp, Mus musculus
  siRNA target sequence for Dnm (NM_010065.1,1611-1629).
ggaaccaggtcattcgaaa

SEQ ID NO: 519139 - DNA, 19 bp, Mus musculus
  siRNA target sequence for Dnm (NM_010065.1,1842-1860).
ggaatgtctacaaggatta

SEQ ID NO: 519140 - DNA, 19 bp, Mus musculus
  siRNA target sequence for Dnm (NM_010065.1,2280-2298).
gtattatcggcgacatcaa

SEQ ID NO: 519141 - DNA, 19 bp, Mus musculus
  siRNA target sequence for Dnm1l (NM_152816.1,8-26).
cgctgatcccggtcatcaa

SEQ ID NO: 519142 - DNA, 19 bp, Mus musculus
  siRNA target sequence for Dnm1l (NM_152816.1,9-27).
gctgatcccggtcatcaat

SEQ ID NO: 519143 - DNA, 19 bp, Mus musculus
  siRNA target sequence for Dnm1l (NM_152816.1,50-68).
cagtgggtgcggacatcat

SEQ ID NO: 519144 - DNA, 19 bp, Mus musculus
  siRNA target sequence for Dnm1l (NM_152816.1,205-223).
cacgtttcaccagaagata

SEQ ID NO: 519145 - DNA, 19 bp, Mus musculus
  siRNA target sequence for Dnm1l (NM_152816.1,403-421).
ccaatccatctcaaggttt

SEQ ID NO: 519146 - DNA, 19 bp, Mus musculus
  siRNA target sequence for Dnm1l (NM_152816.1,404-422).
caatccatctcaaggtttt

SEQ ID NO: 519147 - DNA, 19 bp, Mus musculus
  siRNA target sequence for Dnm1l (NM_152816.1,523-541).
cttattcttcggttcatca

SEQ ID NO: 519148 - DNA, 19 bp, Mus musculus
  siRNA target sequence for Dnm1l (NM_152816.1,565-583).
gccgtcactgctgcaaata

SEQ ID NO: 519149 - DNA, 19 bp, Mus musculus
  siRNA target sequence for Dnm1l (NM_152816.1,567-585).
cgtcactgctgcaaataca

SEQ ID NO: 519150 - DNA, 19 bp, Mus musculus
  siRNA target sequence for Dnm1l (NM_152816.1,596-614).
catcagaagcactcaagat

SEQ ID NO: 519151 - DNA, 19 bp, Mus musculus
  siRNA target sequence for Dnm1l (NM_152816.1,641-659).
gcagaactctagctgtaat

SEQ ID NO: 519152 - DNA, 19 bp, Mus musculus
  siRNA target sequence for Dnm1l (NM_152816.1,647-665).
ctctagctgtaatcactaa

SEQ ID NO: 519153 - DNA, 19 bp, Mus musculus
  siRNA target sequence for Dnm1l (NM_152816.1,689-707).
ctgatgccatggatgtatt

SEQ ID NO: 519154 - DNA, 19 bp, Mus musculus
  siRNA target sequence for Dnm1l (NM_152816.1,725-743).
cagtcaagcttggaataat

SEQ ID NO: 519155 - DNA, 19 bp, Mus musculus
  siRNA target sequence for Dnm1l (NM_152816.1,729-747).
caagcttggaataattgga

SEQ ID NO: 519156 - DNA, 19 bp, Mus musculus
  siRNA target sequence for Dnm1l (NM_152816.1,756-774).
cagaagccaactggatatt

SEQ ID NO: 519157 - DNA, 19 bp, Mus musculus
  siRNA target sequence for Dnm1l (NM_152816.1,758-776).
gaagccaactggatattaa

SEQ ID NO: 519158 - DNA, 19 bp, Mus musculus
  siRNA target sequence for Dnm1l (NM_152816.1,761-779).
gccaactggatattaacaa

SEQ ID NO: 519159 - DNA, 19 bp, Mus musculus
  siRNA target sequence for Dnm1l (NM_152816.1,762-780).
ccaactggatattaacaat

SEQ ID NO: 519160 - DNA, 19 bp, Mus musculus
  siRNA target sequence for Dnm1l (NM_152816.1,766-784).
ctggatattaacaataaga

SEQ ID NO: 519161 - DNA, 19 bp, Mus musculus
  siRNA target sequence for Dnm1l (NM_152816.1,874-892).
gctaggaccctgaataggt

SEQ ID NO: 519162 - DNA, 19 bp, Mus musculus
  siRNA target sequence for Dnm1l (NM_152816.1,875-893).
ctaggaccctgaataggtt

SEQ ID NO: 519163 - DNA, 19 bp, Mus musculus
  siRNA target sequence for Dnm1l (NM_152816.1,900-918).
gcatcatatcagagattgt

SEQ ID NO: 519164 - DNA, 19 bp, Mus musculus
  siRNA target sequence for Dnm1l (NM_152816.1,960-978).
gtatcagtctcttctaaat

SEQ ID NO: 519165 - DNA, 19 bp, Mus musculus
  siRNA target sequence for Dnm1l (NM_152816.1,985-1003).
ggtgaaccggtggatgata

SEQ ID NO: 519166 - DNA, 19 bp, Mus musculus
  siRNA target sequence for Dnm1l (NM_152816.1,986-1004).
gtgaaccggtggatgataa

SEQ ID NO: 519167 - DNA, 19 bp, Mus musculus
  siRNA target sequence for Dnm1l (NM_152816.1,988-1006).
gaaccggtggatgataaaa

SEQ ID NO: 519168 - DNA, 19 bp, Mus musculus
  siRNA target sequence for Dnm1l (NM_152816.1,1010-1028).
ctactttactccagcttat

SEQ ID NO: 519169 - DNA, 19 bp, Mus musculus
  siRNA target sequence for Dnm1l (NM_152816.1,1018-1036).
ctccagcttattaccaaat

SEQ ID NO: 519170 - DNA, 19 bp, Mus musculus
  siRNA target sequence for Dnm1l (NM_152816.1,1020-1038).
ccagcttattaccaaattt

SEQ ID NO: 519171 - DNA, 19 bp, Mus musculus
  siRNA target sequence for Dnm1l (NM_152816.1,1039-1057).
gccacagagtattgtaaca

SEQ ID NO: 519172 - DNA, 19 bp, Mus musculus
  siRNA target sequence for Dnm1l (NM_152816.1,1047-1065).
gtattgtaacacgattgaa

SEQ ID NO: 519173 - DNA, 19 bp, Mus musculus
  siRNA target sequence for Dnm1l (NM_152816.1,1067-1085).
gaaccgcaaagtacattga

SEQ ID NO: 519174 - DNA, 19 bp, Mus musculus
  siRNA target sequence for Dnm1l (NM_152816.1,1101-1119).
cggtggtgctaggatttgt

SEQ ID NO: 519175 - DNA, 19 bp, Mus musculus
  siRNA target sequence for Dnm1l (NM_152816.1,1102-1120).
ggtggtgctaggatttgtt

SEQ ID NO: 519176 - DNA, 19 bp, Mus musculus
  siRNA target sequence for Dnm1l (NM_152816.1,1134-1152).
gactttcgggcgaacctta

SEQ ID NO: 519177 - DNA, 19 bp, Mus musculus
  siRNA target sequence for Dnm1l (NM_152816.1,1140-1158).
cgggcgaaccttagaatct

SEQ ID NO: 519178 - DNA, 19 bp, Mus musculus
  siRNA target sequence for Dnm1l (NM_152816.1,1165-1183).
ccactaggtggccttaaca

SEQ ID NO: 519179 - DNA, 19 bp, Mus musculus
  siRNA target sequence for Dnm1l (NM_152816.1,1168-1186).
ctaggtggccttaacacta

SEQ ID NO: 519180 - DNA, 19 bp, Mus musculus
  siRNA target sequence for Dnm1l (NM_152816.1,1172-1190).
gtggccttaacactattga

SEQ ID NO: 519181 - DNA, 19 bp, Mus musculus
  siRNA target sequence for Dnm1l (NM_152816.1,1174-1192).
ggccttaacactattgaca

SEQ ID NO: 519182 - DNA, 19 bp, Mus musculus
  siRNA target sequence for Dnm1l (NM_152816.1,1197-1215).
gactgccatcagaaatgct

SEQ ID NO: 519183 - DNA, 19 bp, Mus musculus
  siRNA target sequence for Dnm1l (NM_152816.1,1264-1282).
ctggtcaaacgtcagatta

SEQ ID NO: 519184 - DNA, 19 bp, Mus musculus
  siRNA target sequence for Dnm1l (NM_152816.1,1344-1362).
cattcagcattgtagcaat

SEQ ID NO: 519185 - DNA, 19 bp, Mus musculus
  siRNA target sequence for Dnm1l (NM_152816.1,1401-1419).
cgatgccatagttgaagta

SEQ ID NO: 519186 - DNA, 19 bp, Mus musculus
  siRNA target sequence for Dnm1l (NM_152816.1,1442-1460).
ggttgcccgtgacaaatga

SEQ ID NO: 519187 - DNA, 19 bp, Mus musculus
  siRNA target sequence for Dnm1l (NM_152816.1,1481-1499).
caattgagctagcgtatat

SEQ ID NO: 519188 - DNA, 19 bp, Mus musculus
  siRNA target sequence for Dnm1l (NM_152816.1,1486-1504).
gagctagcgtatatcaaca

SEQ ID NO: 519189 - DNA, 19 bp, Mus musculus
  siRNA target sequence for Dnm1l (NM_152816.1,1489-1507).
ctagcgtatatcaacacaa

SEQ ID NO: 519190 - DNA, 19 bp, Mus musculus
  siRNA target sequence for Dnm1l (NM_152816.1,1530-1548).
ctgtgggctaatgaacaat

SEQ ID NO: 519191 - DNA, 19 bp, Mus musculus
  siRNA target sequence for Dnm1l (NM_152816.1,1532-1550).
gtgggctaatgaacaataa

SEQ ID NO: 519192 - DNA, 19 bp, Mus musculus
  siRNA target sequence for Dnm1l (NM_152816.1,1534-1552).
gggctaatgaacaataata

SEQ ID NO: 519193 - DNA, 19 bp, Mus musculus
  siRNA target sequence for Dnm1l (NM_152816.1,1598-1616).
ctggatcacgggacaagtt

SEQ ID NO: 519194 - DNA, 19 bp, Mus musculus
  siRNA target sequence for Dnm1l (NM_152816.1,1600-1618).
ggatcacgggacaagttaa

SEQ ID NO: 519195 - DNA, 19 bp, Mus musculus
  siRNA target sequence for Dnm1l (NM_152816.1,1601-1619).
gatcacgggacaagttaat

SEQ ID NO: 519196 - DNA, 19 bp, Mus musculus
  siRNA target sequence for Dnm1l (NM_152816.1,1604-1622).
cacgggacaagttaattca

SEQ ID NO: 519197 - DNA, 19 bp, Mus musculus
  siRNA target sequence for Dnm1l (NM_152816.1,1800-1818).
ccatgctgtcaatttgcta

SEQ ID NO: 519198 - DNA, 19 bp, Mus musculus
  siRNA target sequence for Dnm1l (NM_152816.1,1854-1872).
ccgagaacagcgagattgt

SEQ ID NO: 519199 - DNA, 19 bp, Mus musculus
  siRNA target sequence for Dnm1l (NM_152816.1,1863-1881).
gcgagattgtgaggttatt

SEQ ID NO: 519200 - DNA, 19 bp, Mus musculus
  siRNA target sequence for Dnm1l (NM_152816.1,1871-1889).
gtgaggttattgaaagact

SEQ ID NO: 519201 - DNA, 19 bp, Mus musculus
  siRNA target sequence for Dnm1l (NM_152816.1,1882-1900).
gaaagacttatcaaatcat

SEQ ID NO: 519202 - DNA, 19 bp, Mus musculus
  siRNA target sequence for Dnm1l (NM_152816.1,1906-1924).
ctaattgtcagaaagaata

SEQ ID NO: 519203 - DNA, 19 bp, Mus musculus
  siRNA target sequence for Dnm1l (NM_152816.1,1938-1956).
cccaaaggcagtaatgcat

SEQ ID NO: 519204 - DNA, 19 bp, Mus musculus
  siRNA target sequence for Dnm1l (NM_152816.1,1939-1957).
ccaaaggcagtaatgcatt

SEQ ID NO: 519205 - DNA, 19 bp, Mus musculus
  siRNA target sequence for Dnm1l (NM_152816.1,1963-1981).
gttaatcatgtgaaagata

SEQ ID NO: 519206 - DNA, 19 bp, Mus musculus
  siRNA target sequence for Dnm1l (NM_152816.1,1996-2014).
ctggtagggcagctgtata

SEQ ID NO: 519207 - DNA, 19 bp, Mus musculus
  siRNA target sequence for Dnm1l (NM_152816.1,2002-2020).
gggcagctgtataagtcat

SEQ ID NO: 519208 - DNA, 19 bp, Mus musculus
  siRNA target sequence for Dnm1l (NM_152816.1,2055-2073).
catggcccaacgaagaaaa

SEQ ID NO: 519209 - DNA, 19 bp, Mus musculus
  siRNA target sequence for Dnm1l (NM_152816.1,2101-2119).
caaggagccagtcaaatta

SEQ ID NO: 519210 - DNA, 19 bp, Mus musculus
  siRNA target sequence for Dnm1l (NM_152816.1,2111-2129).
gtcaaattattgctgaaat

SEQ ID NO: 519211 - DNA, 19 bp, Mus musculus
  siRNA target sequence for Dnm2 (NM_007871.1,361-379).
cagaatatgcggaattttt

SEQ ID NO: 519212 - DNA, 19 bp, Mus musculus
  siRNA target sequence for Dnm2 (NM_007871.1,505-523).
caccacacgtgttgaactt

SEQ ID NO: 519213 - DNA, 19 bp, Mus musculus
  siRNA target sequence for Dnm2 (NM_007871.1,507-525).
ccacacgtgttgaacttga

SEQ ID NO: 519214 - DNA, 19 bp, Mus musculus
  siRNA target sequence for Dnm2 (NM_007871.1,534-552).
gacctcccaggcatcacta

SEQ ID NO: 519215 - DNA, 19 bp, Mus musculus
  siRNA target sequence for Dnm2 (NM_007871.1,626-644).
cgagagcagcctcattctt

SEQ ID NO: 519216 - DNA, 19 bp, Mus musculus
  siRNA target sequence for Dnm2 (NM_007871.1,805-823).
ccttgagaagaggctatat

SEQ ID NO: 519217 - DNA, 19 bp, Mus musculus
  siRNA target sequence for Dnm2 (NM_007871.1,817-835).
gctatatcggcgtggttaa

SEQ ID NO: 519218 - DNA, 19 bp, Mus musculus
  siRNA target sequence for Dnm2 (NM_007871.1,886-904).
cagccgagaggaaattctt

SEQ ID NO: 519219 - DNA, 19 bp, Mus musculus
  siRNA target sequence for Dnm2 (NM_007871.1,1203-1221).
ggagcccgcatcaatcgta

SEQ ID NO: 519220 - DNA, 19 bp, Mus musculus
  siRNA target sequence for Dnm2 (NM_007871.1,1204-1222).
gagcccgcatcaatcgtat

SEQ ID NO: 519221 - DNA, 19 bp, Mus musculus
  siRNA target sequence for Dnm2 (NM_007871.1,1207-1225).
cccgcatcaatcgtatctt

SEQ ID NO: 519222 - DNA, 19 bp, Mus musculus
  siRNA target sequence for Dnm2 (NM_007871.1,1208-1226).
ccgcatcaatcgtatcttt

SEQ ID NO: 519223 - DNA, 19 bp, Mus musculus
  siRNA target sequence for Dnm2 (NM_007871.1,1211-1229).
catcaatcgtatctttcat

SEQ ID NO: 519224 - DNA, 19 bp, Mus musculus
  siRNA target sequence for Dnm2 (NM_007871.1,1262-1280).
gtttgatgagaaagatcta

SEQ ID NO: 519225 - DNA, 19 bp, Mus musculus
  siRNA target sequence for Dnm2 (NM_007871.1,1350-1368).
gcgttcgaggccattgtga

SEQ ID NO: 519226 - DNA, 19 bp, Mus musculus
  siRNA target sequence for Dnm2 (NM_007871.1,1351-1369).
cgttcgaggccattgtgaa

SEQ ID NO: 519227 - DNA, 19 bp, Mus musculus
  siRNA target sequence for Dnm2 (NM_007871.1,1491-1509).
gagaccgagcgaattgtca

SEQ ID NO: 519228 - DNA, 19 bp, Mus musculus
  siRNA target sequence for Dnm2 (NM_007871.1,1749-1767).
ctgacagctgagtcattgt

SEQ ID NO: 519229 - DNA, 19 bp, Mus musculus
  siRNA target sequence for Dnm2 (NM_007871.1,1751-1769).
gacagctgagtcattgtct

SEQ ID NO: 519230 - DNA, 19 bp, Mus musculus
  siRNA target sequence for Dnm2 (NM_007871.1,1907-1925).
caaggaccttcgacagatt

SEQ ID NO: 519231 - DNA, 19 bp, Mus musculus
  siRNA target sequence for Dnm2 (NM_007871.1,2199-2217).
ctgctggcttacctgtatt

SEQ ID NO: 519232 - DNA, 19 bp, Mus musculus
  siRNA target sequence for Dnm2 (NM_007871.1,2204-2222).
ggcttacctgtattcatca

SEQ ID NO: 519233 - DNA, 19 bp, Mus musculus
  siRNA target sequence for Dnm2 (NM_007871.1,2376-2394).
gacacgtggctccaaaaca

SEQ ID NO: 519234 - DNA, 19 bp, Mus musculus
  siRNA target sequence for Dnm2 (NM_007871.1,2591-2609).
ctctgcgccacctcagata

SEQ ID NO: 519235 - DNA, 19 bp, Mus musculus
  siRNA target sequence for Drg1 (NM_007879.1,172-190).
ggctcgccttgctaaactt

SEQ ID NO: 519236 - DNA, 19 bp, Mus musculus
  siRNA target sequence for Drg1 (NM_007879.1,259-277).
gacaggtgatgctcgaatt

SEQ ID NO: 519237 - DNA, 19 bp, Mus musculus
  siRNA target sequence for Drg1 (NM_007879.1,325-343).
cttagcaggagtgtattct

SEQ ID NO: 519238 - DNA, 19 bp, Mus musculus
  siRNA target sequence for Drg1 (NM_007879.1,350-368).
gcagcctatgaattcacta

SEQ ID NO: 519239 - DNA, 19 bp, Mus musculus
  siRNA target sequence for Drg1 (NM_007879.1,380-398).
gtgcctggtgtcatcagat

SEQ ID NO: 519240 - DNA, 19 bp, Mus musculus
  siRNA target sequence for Drg1 (NM_007879.1,422-440).
ctggatctcccgggtatta

SEQ ID NO: 519241 - DNA, 19 bp, Mus musculus
  siRNA target sequence for Drg1 (NM_007879.1,424-442).
ggatctcccgggtattatt

SEQ ID NO: 519242 - DNA, 19 bp, Mus musculus
  siRNA target sequence for Drg1 (NM_007879.1,449-467).
gccaaggatgggaaaggta

SEQ ID NO: 519243 - DNA, 19 bp, Mus musculus
  siRNA target sequence for Drg1 (NM_007879.1,465-483).
gtagaggtcgtcaagtcat

SEQ ID NO: 519244 - DNA, 19 bp, Mus musculus
  siRNA target sequence for Drg1 (NM_007879.1,488-506).
gtggcccgaacgtgtaatt

SEQ ID NO: 519245 - DNA, 19 bp, Mus musculus
  siRNA target sequence for Drg1 (NM_007879.1,491-509).
gcccgaacgtgtaatttga

SEQ ID NO: 519246 - DNA, 19 bp, Mus musculus
  siRNA target sequence for Drg1 (NM_007879.1,492-510).
cccgaacgtgtaatttgat

SEQ ID NO: 519247 - DNA, 19 bp, Mus musculus
  siRNA target sequence for Drg1 (NM_007879.1,493-511).
ccgaacgtgtaatttgatt

SEQ ID NO: 519248 - DNA, 19 bp, Mus musculus
  siRNA target sequence for Drg1 (NM_007879.1,494-512).
cgaacgtgtaatttgattt

SEQ ID NO: 519249 - DNA, 19 bp, Mus musculus
  siRNA target sequence for Drg1 (NM_007879.1,537-555).
ccttgggacataagaagat

SEQ ID NO: 519250 - DNA, 19 bp, Mus musculus
  siRNA target sequence for Drg1 (NM_007879.1,538-556).
cttgggacataagaagata

SEQ ID NO: 519251 - DNA, 19 bp, Mus musculus
  siRNA target sequence for Drg1 (NM_007879.1,595-613).
cagcaaaccccccaacatt

SEQ ID NO: 519252 - DNA, 19 bp, Mus musculus
  siRNA target sequence for Drg1 (NM_007879.1,605-623).
cccaacattggctttaaga

SEQ ID NO: 519253 - DNA, 19 bp, Mus musculus
  siRNA target sequence for Drg1 (NM_007879.1,606-624).
ccaacattggctttaagaa

SEQ ID NO: 519254 - DNA, 19 bp, Mus musculus
  siRNA target sequence for Drg1 (NM_007879.1,694-712).
gagcattctggctgaatat

SEQ ID NO: 519255 - DNA, 19 bp, Mus musculus
  siRNA target sequence for Drg1 (NM_007879.1,696-714).
gcattctggctgaatataa

SEQ ID NO: 519256 - DNA, 19 bp, Mus musculus
  siRNA target sequence for Drg1 (NM_007879.1,703-721).
ggctgaatataagattcat

SEQ ID NO: 519257 - DNA, 19 bp, Mus musculus
  siRNA target sequence for Drg1 (NM_007879.1,704-722).
gctgaatataagattcata

SEQ ID NO: 519258 - DNA, 19 bp, Mus musculus
  siRNA target sequence for Drg1 (NM_007879.1,776-794).
gtcgaagggaacagagttt

SEQ ID NO: 519259 - DNA, 19 bp, Mus musculus
  siRNA target sequence for Drg1 (NM_007879.1,778-796).
cgaagggaacagagtttat

SEQ ID NO: 519260 - DNA, 19 bp, Mus musculus
  siRNA target sequence for Drg1 (NM_007879.1,779-797).
gaagggaacagagtttata

SEQ ID NO: 519261 - DNA, 19 bp, Mus musculus
  siRNA target sequence for Drg1 (NM_007879.1,842-860).
gaggagttggatattatct

SEQ ID NO: 519262 - DNA, 19 bp, Mus musculus
  siRNA target sequence for Drg1 (NM_007879.1,976-994).
ccagttaccagattacaca

SEQ ID NO: 519263 - DNA, 19 bp, Mus musculus
  siRNA target sequence for Drg1 (NM_007879.1,998-1016).
ccagtagtgctgccttatt

SEQ ID NO: 519264 - DNA, 19 bp, Mus musculus
  siRNA target sequence for Drg1 (NM_007879.1,1001-1019).
gtagtgctgccttattcta

SEQ ID NO: 519265 - DNA, 19 bp, Mus musculus
  siRNA target sequence for Drg1 (NM_007879.1,1092-1110).
ggggtctgtctgtgaaaca

SEQ ID NO: 519266 - DNA, 19 bp, Mus musculus
  siRNA target sequence for Drg1 (NM_007879.1,1099-1117).
gtctgtgaaacataatcct

SEQ ID NO: 519267 - DNA, 19 bp, Mus musculus
  siRNA target sequence for Drg1 (NM_007879.1,1135-1153).
ccacacattggaagatgaa

SEQ ID NO: 519268 - DNA, 19 bp, Mus musculus
  siRNA target sequence for Drg2 (NM_021354.1,198-216).
caaatccgcctcatccaaa

SEQ ID NO: 519269 - DNA, 19 bp, Mus musculus
  siRNA target sequence for Drg2 (NM_021354.1,218-236).
gagagggctttgatgtcat

SEQ ID NO: 519270 - DNA, 19 bp, Mus musculus
  siRNA target sequence for Drg2 (NM_021354.1,325-343).
gaagctgcgtcctatgagt

SEQ ID NO: 519271 - DNA, 19 bp, Mus musculus
  siRNA target sequence for Drg2 (NM_021354.1,331-349).
gcgtcctatgagtttacca

SEQ ID NO: 519272 - DNA, 19 bp, Mus musculus
  siRNA target sequence for Drg2 (NM_021354.1,482-500).
ctgatgtcgtcgtcatgat

SEQ ID NO: 519273 - DNA, 19 bp, Mus musculus
  siRNA target sequence for Drg2 (NM_021354.1,613-631).
ggtggtggcatctccttta

SEQ ID NO: 519274 - DNA, 19 bp, Mus musculus
  siRNA target sequence for Drg2 (NM_021354.1,673-691).
cagctcatcctacatgaat

SEQ ID NO: 519275 - DNA, 19 bp, Mus musculus
  siRNA target sequence for Drg2 (NM_021354.1,676-694).
ctcatcctacatgaataca

SEQ ID NO: 519276 - DNA, 19 bp, Mus musculus
  siRNA target sequence for Drg2 (NM_021354.1,682-700).
ctacatgaatacaagatct

SEQ ID NO: 519277 - DNA, 19 bp, Mus musculus
  siRNA target sequence for Drg2 (NM_021354.1,731-749).
gctctccagacgacttcat

SEQ ID NO: 519278 - DNA, 19 bp, Mus musculus
  siRNA target sequence for Drg2 (NM_021354.1,741-759).
cgacttcatcgatgtgatt

SEQ ID NO: 519279 - DNA, 19 bp, Mus musculus
  siRNA target sequence for Drg2 (NM_021354.1,782-800).
cctgcctctatgtgtataa

SEQ ID NO: 519280 - DNA, 19 bp, Mus musculus
  siRNA target sequence for Drg2 (NM_021354.1,786-804).
cctctatgtgtataacaaa

SEQ ID NO: 519281 - DNA, 19 bp, Mus musculus
  siRNA target sequence for Drg2 (NM_021354.1,850-868).
cccaacagtgtagttatca

SEQ ID NO: 519282 - DNA, 19 bp, Mus musculus
  siRNA target sequence for Drg2 (NM_021354.1,852-870).
caacagtgtagttatcagt

SEQ ID NO: 519283 - DNA, 19 bp, Mus musculus
  siRNA target sequence for Drg2 (NM_021354.1,1039-1057).
ctggccagccagttcaagt

SEQ ID NO: 519284 - DNA, 19 bp, Mus musculus
  siRNA target sequence for Gbp1 (NM_010259.1,599-617).
ctgactgatctcatcaaat

SEQ ID NO: 519285 - DNA, 19 bp, Mus musculus
  siRNA target sequence for Gbp1 (NM_010259.1,601-619).
gactgatctcatcaaatca

SEQ ID NO: 519286 - DNA, 19 bp, Mus musculus
  siRNA target sequence for Gbp1 (NM_010259.1,709-727).
cctggatctggaatttgat

SEQ ID NO: 519287 - DNA, 19 bp, Mus musculus
  siRNA target sequence for Gbp1 (NM_010259.1,782-800).
ggaactgatgagaacacta

SEQ ID NO: 519288 - DNA, 19 bp, Mus musculus
  siRNA target sequence for Gbp1 (NM_010259.1,783-801).
gaactgatgagaacactaa

SEQ ID NO: 519289 - DNA, 19 bp, Mus musculus
  siRNA target sequence for Gbp1 (NM_010259.1,1415-1433).
gtgaagcaggggacatttt

SEQ ID NO: 519290 - DNA, 19 bp, Mus musculus
  siRNA target sequence for Gbp1 (NM_010259.1,1420-1438).
gcaggggacattttataaa

SEQ ID NO: 519291 - DNA, 19 bp, Mus musculus
  siRNA target sequence for Gbp1 (NM_010259.1,1526-1544).
gtgatgctgagaaaatact

SEQ ID NO: 519292 - DNA, 19 bp, Mus musculus
  siRNA target sequence for Gbp1 (NM_010259.1,1531-1549).
gctgagaaaatactttgaa

SEQ ID NO: 519293 - DNA, 19 bp, Mus musculus
  siRNA target sequence for Gbp1 (NM_010259.1,1615-1633).
gattgaaatggaacgtata

SEQ ID NO: 519294 - DNA, 19 bp, Mus musculus
  siRNA target sequence for Gbp1 (NM_010259.1,1662-1680).
gagcattggcagaaatgca

SEQ ID NO: 519295 - DNA, 19 bp, Mus musculus
  siRNA target sequence for Gbp1 (NM_010259.1,1757-1775).
gagcaggaacggaaagagt

SEQ ID NO: 519296 - DNA, 19 bp, Mus musculus
  siRNA target sequence for Gbp1 (NM_010259.1,1794-1812).
gaatcatatcccttaaact

SEQ ID NO: 519297 - DNA, 19 bp, Mus musculus
  siRNA target sequence for Gbp1 (NM_010259.1,1865-1883).
ctacgtcaagagatagaga

SEQ ID NO: 519298 - DNA, 19 bp, Mus musculus
  siRNA target sequence for Gbp1 (NM_010259.1,1868-1886).
cgtcaagagatagagaaaa

SEQ ID NO: 519299 - DNA, 19 bp, Mus musculus
  siRNA target sequence for Gbp1 (NM_010259.1,1907-1925).
cgatcatgcaccatacttt

SEQ ID NO: 519300 - DNA, 19 bp, Mus musculus
  siRNA target sequence for Gbp2 (NM_010260.1,605-623).
gacggagctaactgatctt

SEQ ID NO: 519301 - DNA, 19 bp, Mus musculus
  siRNA target sequence for Gbp2 (NM_010260.1,607-625).
cggagctaactgatcttat

SEQ ID NO: 519302 - DNA, 19 bp, Mus musculus
  siRNA target sequence for Gbp2 (NM_010260.1,609-627).
gagctaactgatcttatca

SEQ ID NO: 519303 - DNA, 19 bp, Mus musculus
  siRNA target sequence for Gbp2 (NM_010260.1,612-630).
ctaactgatcttatcaagt

SEQ ID NO: 519304 - DNA, 19 bp, Mus musculus
  siRNA target sequence for Gbp2 (NM_010260.1,721-739).
ccctcgagctggaggttaa

SEQ ID NO: 519305 - DNA, 19 bp, Mus musculus
  siRNA target sequence for Gbp2 (NM_010260.1,935-953).
gctgtgtggtgaatttgta

SEQ ID NO: 519306 - DNA, 19 bp, Mus musculus
  siRNA target sequence for Gbp2 (NM_010260.1,1012-1030).
gtggtggcatcatagtcaa

SEQ ID NO: 519307 - DNA, 19 bp, Mus musculus
  siRNA target sequence for Gbp2 (NM_010260.1,1230-1248).
ctgcacaggccaattgaga

SEQ ID NO: 519308 - DNA, 19 bp, Mus musculus
  siRNA target sequence for Gbp2 (NM_010260.1,1539-1557).
gcgatgctgaaaaactact

SEQ ID NO: 519309 - DNA, 19 bp, Mus musculus
  siRNA target sequence for Gbp2 (NM_010260.1,1540-1558).
cgatgctgaaaaactactt

SEQ ID NO: 519310 - DNA, 19 bp, Mus musculus
  siRNA target sequence for Gbp2 (NM_010260.1,1544-1562).
gctgaaaaactactttgat

SEQ ID NO: 519311 - DNA, 19 bp, Mus musculus
  siRNA target sequence for Gbp2 (NM_010260.1,1545-1563).
ctgaaaaactactttgatt

SEQ ID NO: 519312 - DNA, 19 bp, Mus musculus
  siRNA target sequence for Gbp2 (NM_010260.1,1732-1750).
gttaccaggagcatgtgaa

SEQ ID NO: 519313 - DNA, 19 bp, Mus musculus
  siRNA target sequence for Gbp2 (NM_010260.1,1773-1791).
gacgaacagaaacagttat

SEQ ID NO: 519314 - DNA, 19 bp, Mus musculus
  siRNA target sequence for Gbp2 (NM_010260.1,1775-1793).
cgaacagaaacagttatta

SEQ ID NO: 519315 - DNA, 19 bp, Mus musculus
  siRNA target sequence for Gbp2 (NM_010260.1,1808-1826).
catcatagctgctaaactt

SEQ ID NO: 519316 - DNA, 19 bp, Mus musculus
  siRNA target sequence for Gbp2 (NM_010260.1,1862-1880).
gaatgagagcaaaaaactt

SEQ ID NO: 519317 - DNA, 19 bp, Mus musculus
  siRNA target sequence for Gbp2 (NM_010260.1,1868-1886).
gagcaaaaaacttattcga

SEQ ID NO: 519318 - DNA, 19 bp, Mus musculus
  siRNA target sequence for Gbp2 (NM_010260.1,1916-1934).
gtctgggaagtgcactata

SEQ ID NO: 519319 - DNA, 19 bp, Mus musculus
  siRNA target sequence for Gbp2 (NM_010260.1,1918-1936).
ctgggaagtgcactatact

SEQ ID NO: 519320 - DNA, 19 bp, Mus musculus
  siRNA target sequence for Gbp2 (NM_010260.1,1920-1938).
gggaagtgcactatactct

SEQ ID NO: 519321 - DNA, 19 bp, Mus musculus
  siRNA target sequence for Gbp3 (NM_018734.2,410-428).
ggccattgttggtttatat

SEQ ID NO: 519322 - DNA, 19 bp, Mus musculus
  siRNA target sequence for Gbp3 (NM_018734.2,413-431).
cattgttggtttatatcgt

SEQ ID NO: 519323 - DNA, 19 bp, Mus musculus
  siRNA target sequence for Gbp3 (NM_018734.2,724-742).
ctgaattaacacagctaat

SEQ ID NO: 519324 - DNA, 19 bp, Mus musculus
  siRNA target sequence for Gbp3 (NM_018734.2,735-753).
cagctaatccgggcaaaat

SEQ ID NO: 519325 - DNA, 19 bp, Mus musculus
  siRNA target sequence for Gbp3 (NM_018734.2,738-756).
ctaatccgggcaaaatcga

SEQ ID NO: 519326 - DNA, 19 bp, Mus musculus
  siRNA target sequence for Gbp3 (NM_018734.2,784-802).
ccagtgagtttgtaggttt

SEQ ID NO: 519327 - DNA, 19 bp, Mus musculus
  siRNA target sequence for Gbp3 (NM_018734.2,927-945).
gtccaacagtccaacatga

SEQ ID NO: 519328 - DNA, 19 bp, Mus musculus
  siRNA target sequence for Gbp3 (NM_018734.2,938-956).
caacatgaccagagaatgt

SEQ ID NO: 519329 - DNA, 19 bp, Mus musculus
  siRNA target sequence for Gbp3 (NM_018734.2,1002-1020).
cccacaagcgacaaacgtt

SEQ ID NO: 519330 - DNA, 19 bp, Mus musculus
  siRNA target sequence for Gbp3 (NM_018734.2,1003-1021).
ccacaagcgacaaacgttt

SEQ ID NO: 519331 - DNA, 19 bp, Mus musculus
  siRNA target sequence for Gbp3 (NM_018734.2,1004-1022).
cacaagcgacaaacgttta

SEQ ID NO: 519332 - DNA, 19 bp, Mus musculus
  siRNA target sequence for Gbp3 (NM_018734.2,1006-1024).
caagcgacaaacgtttatt

SEQ ID NO: 519333 - DNA, 19 bp, Mus musculus
  siRNA target sequence for Gbp3 (NM_018734.2,1009-1027).
gcgacaaacgtttattgct

SEQ ID NO: 519334 - DNA, 19 bp, Mus musculus
  siRNA target sequence for Gbp3 (NM_018734.2,1478-1496).
gaacgaagcagcatctatt

SEQ ID NO: 519335 - DNA, 19 bp, Mus musculus
  siRNA target sequence for Gbp3 (NM_018734.2,1481-1499).
cgaagcagcatctattcgt

SEQ ID NO: 519336 - DNA, 19 bp, Mus musculus
  siRNA target sequence for Gbp3 (NM_018734.2,1661-1679).
ggttctcaagagtttccta

SEQ ID NO: 519337 - DNA, 19 bp, Mus musculus
  siRNA target sequence for Gbp3 (NM_018734.2,1856-1874).
ccgagaaaacattgctaaa

SEQ ID NO: 519338 - DNA, 19 bp, Mus musculus
  siRNA target sequence for Gbp3 (NM_018734.2,1975-1993).
gattcagagagaaatctga

SEQ ID NO: 519339 - DNA, 19 bp, Mus musculus
  siRNA target sequence for Gbp3 (NM_018734.2,1983-2001).
gagaaatctgatatgttaa

SEQ ID NO: 519340 - DNA, 19 bp, Mus musculus
  siRNA target sequence for Gbp3 (NM_018734.2,2053-2071).
cctcactgtttggtcaaat

SEQ ID NO: 519341 - DNA, 19 bp, Mus musculus
  siRNA target sequence for Gbp3 (NM_018734.2,2087-2105).
caatgcgttcattatgatt

SEQ ID NO: 519342 - DNA, 19 bp, Mus musculus
  siRNA target sequence for Gbp3 (NM_018734.2,2093-2111).
gttcattatgattttacca

SEQ ID NO: 519343 - DNA, 19 bp, Mus musculus
  siRNA target sequence for Gbp3 (NM_018734.2,2131-2149).
gtgtggggctgaaattcct

SEQ ID NO: 519344 - DNA, 19 bp, Mus musculus
  siRNA target sequence for Gbp5 (NM_153564.1,99-117).
cgagggacacctagtaact

SEQ ID NO: 519345 - DNA, 19 bp, Mus musculus
  siRNA target sequence for Gbp5 (NM_153564.1,100-118).
gagggacacctagtaacta

SEQ ID NO: 519346 - DNA, 19 bp, Mus musculus
  siRNA target sequence for Gbp5 (NM_153564.1,312-330).
gccagaccacactttggtt

SEQ ID NO: 519347 - DNA, 19 bp, Mus musculus
  siRNA target sequence for Gbp5 (NM_153564.1,412-430).
ctcagtagcacctttgtat

SEQ ID NO: 519348 - DNA, 19 bp, Mus musculus
  siRNA target sequence for Gbp5 (NM_153564.1,422-440).
cctttgtatacaacactat

SEQ ID NO: 519349 - DNA, 19 bp, Mus musculus
  siRNA target sequence for Gbp5 (NM_153564.1,458-476).
gggctatcgacctattgca

SEQ ID NO: 519350 - DNA, 19 bp, Mus musculus
  siRNA target sequence for Gbp5 (NM_153564.1,466-484).
gacctattgcacaatgtga

SEQ ID NO: 519351 - DNA, 19 bp, Mus musculus
  siRNA target sequence for Gbp5 (NM_153564.1,496-514).
gacttgctccggacaagaa

SEQ ID NO: 519352 - DNA, 19 bp, Mus musculus
  siRNA target sequence for Gbp5 (NM_153564.1,512-530).
gaaactcctctgattctaa

SEQ ID NO: 519353 - DNA, 19 bp, Mus musculus
  siRNA target sequence for Gbp5 (NM_153564.1,516-534).
ctcctctgattctaatcaa

SEQ ID NO: 519354 - DNA, 19 bp, Mus musculus
  siRNA target sequence for Gbp5 (NM_153564.1,629-647).
ccatcacatcagatgaata

SEQ ID NO: 519355 - DNA, 19 bp, Mus musculus
  siRNA target sequence for Gbp5 (NM_153564.1,689-707).
gaactcaaacattcaatct

SEQ ID NO: 519356 - DNA, 19 bp, Mus musculus
  siRNA target sequence for Gbp5 (NM_153564.1,764-782).
ctcctgcgcttggaagtaa

SEQ ID NO: 519357 - DNA, 19 bp, Mus musculus
  siRNA target sequence for Gbp5 (NM_153564.1,769-787).
gcgcttggaagtaagcttt

SEQ ID NO: 519358 - DNA, 19 bp, Mus musculus
  siRNA target sequence for Gbp5 (NM_153564.1,832-850).
gtgcaggacctttcagaat

SEQ ID NO: 519359 - DNA, 19 bp, Mus musculus
  siRNA target sequence for Gbp5 (NM_153564.1,859-877).
cacatcttcacccaatcta

SEQ ID NO: 519360 - DNA, 19 bp, Mus musculus
  siRNA target sequence for Gbp5 (NM_153564.1,1129-1147).
cgagaggccatagaaatct

SEQ ID NO: 519361 - DNA, 19 bp, Mus musculus
  siRNA target sequence for Gbp5 (NM_153564.1,1132-1150).
gaggccatagaaatcttca

SEQ ID NO: 519362 - DNA, 19 bp, Mus musculus
  siRNA target sequence for Gbp5 (NM_153564.1,1211-1229).
gtgcaaagcaggatgagat

SEQ ID NO: 519363 - DNA, 19 bp, Mus musculus
  siRNA target sequence for Gbp5 (NM_153564.1,1312-1330).
gcgcaggagttctatcata

SEQ ID NO: 519364 - DNA, 19 bp, Mus musculus
  siRNA target sequence for Gbp5 (NM_153564.1,1313-1331).
cgcaggagttctatcataa

SEQ ID NO: 519365 - DNA, 19 bp, Mus musculus
  siRNA target sequence for Gbp5 (NM_153564.1,1434-1452).
ctatttgaacgccaaagaa

SEQ ID NO: 519366 - DNA, 19 bp, Mus musculus
  siRNA target sequence for Gbp5 (NM_153564.1,1454-1472).
cagtgagccgtacaattct

SEQ ID NO: 519367 - DNA, 19 bp, Mus musculus
  siRNA target sequence for Gbp5 (NM_153564.1,1458-1476).
gagccgtacaattctacaa

SEQ ID NO: 519368 - DNA, 19 bp, Mus musculus
  siRNA target sequence for Gbp5 (NM_153564.1,1461-1479).
ccgtacaattctacaaaca

SEQ ID NO: 519369 - DNA, 19 bp, Mus musculus
  siRNA target sequence for Gbp5 (NM_153564.1,1623-1641).
gcaattgaggcaaatagca

SEQ ID NO: 519370 - DNA, 19 bp, Mus musculus
  siRNA target sequence for Gbp5 (NM_153564.1,1699-1717).
gaagaggctgatagaatca

SEQ ID NO: 519371 - DNA, 19 bp, Mus musculus
  siRNA target sequence for Gbp5 (NM_153564.1,1782-1800).
ccaccaccgtagacatcat

SEQ ID NO: 519372 - DNA, 19 bp, Mus musculus
  siRNA target sequence for Gem (NM_010276.1,342-360).
ctaccgagtagtgcttata

SEQ ID NO: 519373 - DNA, 19 bp, Mus musculus
  siRNA target sequence for Gem (NM_010276.1,562-580).
gtcggggatgcctatctga

SEQ ID NO: 519374 - DNA, 19 bp, Mus musculus
  siRNA target sequence for Gem (NM_010276.1,579-597).
gatcgtctactctatcaca

SEQ ID NO: 519375 - DNA, 19 bp, Mus musculus
  siRNA target sequence for Gem (NM_010276.1,918-936).
gcgcttctggggcaaaatt

SEQ ID NO: 519376 - DNA, 19 bp, Mus musculus
  siRNA target sequence for Gem (NM_010276.1,961-979).
gctttcaagctcaagtcaa

SEQ ID NO: 519377 - DNA, 19 bp, Mus musculus
  siRNA target sequence for Gna-rs1 (NM_008136.1,401-419).
cagctgtggcggtgttaga

SEQ ID NO: 519378 - DNA, 19 bp, Mus musculus
  siRNA target sequence for Gna-rs1 (NM_008136.1,429-447).
catcgtcctgctcattact

SEQ ID NO: 519379 - DNA, 19 bp, Mus musculus
  siRNA target sequence for Gna-rs1 (NM_008136.1,479-497).
cagcactttacgagtatgt

SEQ ID NO: 519380 - DNA, 19 bp, Mus musculus
  siRNA target sequence for Gna-rs1 (NM_008136.1,481-499).
gcactttacgagtatgtaa

SEQ ID NO: 519381 - DNA, 19 bp, Mus musculus
  siRNA target sequence for Gna-rs1 (NM_008136.1,572-590).
cctggaagcattattttca

SEQ ID NO: 519382 - DNA, 19 bp, Mus musculus
  siRNA target sequence for Gna-rs1 (NM_008136.1,661-679).
cctggtggtgtcttgaaga

SEQ ID NO: 519383 - DNA, 19 bp, Mus musculus
  siRNA target sequence for Gna-rs1 (NM_008136.1,665-683).
gtggtgtcttgaagaagaa

SEQ ID NO: 519384 - DNA, 19 bp, Mus musculus
  siRNA target sequence for Gna-rs1 (NM_008136.1,685-703).
cggagacgggggaaaggat

SEQ ID NO: 519385 - DNA, 19 bp, Mus musculus
  siRNA target sequence for Gna-rs1 (NM_008136.1,942-960).
ggtgactattggctgtata

SEQ ID NO: 519386 - DNA, 19 bp, Mus musculus
  siRNA target sequence for Gna-rs1 (NM_008136.1,945-963).
gactattggctgtataggt

SEQ ID NO: 519387 - DNA, 19 bp, Mus musculus
  siRNA target sequence for Gna-rs1 (NM_008136.1,1332-1350).
gcgcaaggcagctcgaaat

SEQ ID NO: 519388 - DNA, 19 bp, Mus musculus
  siRNA target sequence for Gna-rs1 (NM_008136.1,1334-1352).
gcaaggcagctcgaaatga

SEQ ID NO: 519389 - DNA, 19 bp, Mus musculus
  siRNA target sequence for Gna-rs1 (NM_008136.1,1608-1626).
ggacaccccaacttcagat

SEQ ID NO: 519390 - DNA, 19 bp, Mus musculus
  siRNA target sequence for Gna11 (NM_010301.1,408-426).
gtggagaaggtcacaactt

SEQ ID NO: 519391 - DNA, 19 bp, Mus musculus
  siRNA target sequence for Gna11 (NM_010301.1,424-442).
cttttgagcaccagtatgt

SEQ ID NO: 519392 - DNA, 19 bp, Mus musculus
  siRNA target sequence for Gna11 (NM_010301.1,502-520).
gggagttccagctatctga

SEQ ID NO: 519393 - DNA, 19 bp, Mus musculus
  siRNA target sequence for Gna11 (NM_010301.1,517-535).
ctgactcggctaagtacta

SEQ ID NO: 519394 - DNA, 19 bp, Mus musculus
  siRNA target sequence for Gna11 (NM_010301.1,634-652).
cgtttgacctggagaacat

SEQ ID NO: 519395 - DNA, 19 bp, Mus musculus
  siRNA target sequence for Gna11 (NM_010301.1,813-831).
gccctgttccgcacaatca

SEQ ID NO: 519396 - DNA, 19 bp, Mus musculus
  siRNA target sequence for Gna11 (NM_010301.1,814-832).
ccctgttccgcacaatcat

SEQ ID NO: 519397 - DNA, 19 bp, Mus musculus
  siRNA target sequence for Gna11 (NM_010301.1,913-931).
cacacttggtcgattactt

SEQ ID NO: 519398 - DNA, 19 bp, Mus musculus
  siRNA target sequence for Gna11 (NM_010301.1,965-983).
ggccgcacgcgagttcatt

SEQ ID NO: 519399 - DNA, 19 bp, Mus musculus
  siRNA target sequence for Gna11 (NM_010301.1,967-985).
ccgcacgcgagttcattct

SEQ ID NO: 519400 - DNA, 19 bp, Mus musculus
  siRNA target sequence for Gna11 (NM_010301.1,970-988).
cacgcgagttcattctgaa

SEQ ID NO: 519401 - DNA, 19 bp, Mus musculus
  siRNA target sequence for Gna11 (NM_010301.1,973-991).
gcgagttcattctgaagat

SEQ ID NO: 519402 - DNA, 19 bp, Mus musculus
  siRNA target sequence for Gna12 (NM_010302.1,501-519).
cgagaagcacgggatgttt

SEQ ID NO: 519403 - DNA, 19 bp, Mus musculus
  siRNA target sequence for Gna12 (NM_010302.1,645-663).
gttccagctgggtgaatca

SEQ ID NO: 519404 - DNA, 19 bp, Mus musculus
  siRNA target sequence for Gna12 (NM_010302.1,763-781).
gtggaacatgacttcgtta

SEQ ID NO: 519405 - DNA, 19 bp, Mus musculus
  siRNA target sequence for Gna12 (NM_010302.1,765-783).
ggaacatgacttcgttata

SEQ ID NO: 519406 - DNA, 19 bp, Mus musculus
  siRNA target sequence for Gna12 (NM_010302.1,940-958).
gtggagtccatgaacatct

SEQ ID NO: 519407 - DNA, 19 bp, Mus musculus
  siRNA target sequence for Gna13 (NM_010303.2,303-321).
gcaacgtgatcaaaggtat

SEQ ID NO: 519408 - DNA, 19 bp, Mus musculus
  siRNA target sequence for Gna13 (NM_010303.2,339-357).
cccgagagaagcttcatat

SEQ ID NO: 519409 - DNA, 19 bp, Mus musculus
  siRNA target sequence for Gna13 (NM_010303.2,340-358).
ccgagagaagcttcatatt

SEQ ID NO: 519410 - DNA, 19 bp, Mus musculus
  siRNA target sequence for Gna13 (NM_010303.2,359-377).
ccctggggagataacaaaa

SEQ ID NO: 519411 - DNA, 19 bp, Mus musculus
  siRNA target sequence for Gna13 (NM_010303.2,453-471).
gagtgttcctgcagtatct

SEQ ID NO: 519412 - DNA, 19 bp, Mus musculus
  siRNA target sequence for Gna13 (NM_010303.2,492-510).
gggaggacagtggtataca

SEQ ID NO: 519413 - DNA, 19 bp, Mus musculus
  siRNA target sequence for Gna13 (NM_010303.2,542-560).
ctgggtgagtctgtaaagt

SEQ ID NO: 519414 - DNA, 19 bp, Mus musculus
  siRNA target sequence for Gna13 (NM_010303.2,590-608).
gtaccggattacattccat

SEQ ID NO: 519415 - DNA, 19 bp, Mus musculus
  siRNA target sequence for Gna13 (NM_010303.2,606-624).
catcacagcaagatatcct

SEQ ID NO: 519416 - DNA, 19 bp, Mus musculus
  siRNA target sequence for Gna13 (NM_010303.2,684-702).
ctttcaaaatggttgatgt

SEQ ID NO: 519417 - DNA, 19 bp, Mus musculus
  siRNA target sequence for Gna13 (NM_010303.2,750-768).
gtgtgacgtcgatactttt

SEQ ID NO: 519418 - DNA, 19 bp, Mus musculus
  siRNA target sequence for Gna13 (NM_010303.2,754-772).
gacgtcgatacttttcctt

SEQ ID NO: 519419 - DNA, 19 bp, Mus musculus
  siRNA target sequence for Gna13 (NM_010303.2,817-835).
gaccaatcgccttacagaa

SEQ ID NO: 519420 - DNA, 19 bp, Mus musculus
  siRNA target sequence for Gna13 (NM_010303.2,860-878).
gtcaacaatcgggttttca

SEQ ID NO: 519421 - DNA, 19 bp, Mus musculus
  siRNA target sequence for Gna13 (NM_010303.2,926-944).
gagaaagtgcaagttgtta

SEQ ID NO: 519422 - DNA, 19 bp, Mus musculus
  siRNA target sequence for Gna13 (NM_010303.2,938-956).
gttgttagcatcaaagact

SEQ ID NO: 519423 - DNA, 19 bp, Mus musculus
  siRNA target sequence for Gna13 (NM_010303.2,974-992).
ggggacccccactgcttaa

SEQ ID NO: 519424 - DNA, 19 bp, Mus musculus
  siRNA target sequence for Gna13 (NM_010303.2,1080-1098).
cgatcaacacagagaacat

SEQ ID NO: 519425 - DNA, 19 bp, Mus musculus
  siRNA target sequence for Gna14 (NM_008137.2,1070-1088).
gtgggaaaagcacctttat

SEQ ID NO: 519426 - DNA, 19 bp, Mus musculus
  siRNA target sequence for Gna14 (NM_008137.2,1072-1090).
gggaaaagcacctttatca

SEQ ID NO: 519427 - DNA, 19 bp, Mus musculus
  siRNA target sequence for Gna14 (NM_008137.2,1146-1164).
cacgaagctggtttaccaa

SEQ ID NO: 519428 - DNA, 19 bp, Mus musculus
  siRNA target sequence for Gna14 (NM_008137.2,1148-1166).
cgaagctggtttaccaaaa

SEQ ID NO: 519429 - DNA, 19 bp, Mus musculus
  siRNA target sequence for Gna14 (NM_008137.2,1152-1170).
gctggtttaccaaaacata

SEQ ID NO: 519430 - DNA, 19 bp, Mus musculus
  siRNA target sequence for Gna14 (NM_008137.2,1203-1221).
ggataccctgaggatacaa

SEQ ID NO: 519431 - DNA, 19 bp, Mus musculus
  siRNA target sequence for Gna14 (NM_008137.2,1204-1222).
gataccctgaggatacaat

SEQ ID NO: 519432 - DNA, 19 bp, Mus musculus
  siRNA target sequence for Gna14 (NM_008137.2,1210-1228).
ctgaggatacaatacatgt

SEQ ID NO: 519433 - DNA, 19 bp, Mus musculus
  siRNA target sequence for Gna14 (NM_008137.2,1380-1398).
gtcagactctgccaaatat

SEQ ID NO: 519434 - DNA, 19 bp, Mus musculus
  siRNA target sequence for Gna14 (NM_008137.2,1382-1400).
cagactctgccaaatatta

SEQ ID NO: 519435 - DNA, 19 bp, Mus musculus
  siRNA target sequence for Gna14 (NM_008137.2,1484-1502).
gcatcatagaatatccatt

SEQ ID NO: 519436 - DNA, 19 bp, Mus musculus
  siRNA target sequence for Gna14 (NM_008137.2,1553-1571).
ctgaacgacggaaatggat

SEQ ID NO: 519437 - DNA, 19 bp, Mus musculus
  siRNA target sequence for Gna14 (NM_008137.2,1584-1602).
gagtgtcacctccatcatt

SEQ ID NO: 519438 - DNA, 19 bp, Mus musculus
  siRNA target sequence for Gna14 (NM_008137.2,1608-1626).
ggttgctctgagtgaatat

SEQ ID NO: 519439 - DNA, 19 bp, Mus musculus
  siRNA target sequence for Gna14 (NM_008137.2,1681-1699).
ctgtttagaaccatcatca

SEQ ID NO: 519440 - DNA, 19 bp, Mus musculus
  siRNA target sequence for Gna14 (NM_008137.2,1770-1788).
catgtactctcatctaatt

SEQ ID NO: 519441 - DNA, 19 bp, Mus musculus
  siRNA target sequence for Gna14 (NM_008137.2,1832-1850).
cggccagggactttatcct

SEQ ID NO: 519442 - DNA, 19 bp, Mus musculus
  siRNA target sequence for Gna14 (NM_008137.2,1912-1930).
gctacagacaccgagaata

SEQ ID NO: 519443 - DNA, 19 bp, Mus musculus
  siRNA target sequence for Gna14 (NM_008137.2,1961-1979).
caatcctacagctaaacct

SEQ ID NO: 519444 - DNA, 19 bp, Mus musculus
  siRNA target sequence for Gna15 (NM_010304.3,350-368).
gagatcaacaggattttgt

SEQ ID NO: 519445 - DNA, 19 bp, Mus musculus
  siRNA target sequence for Gna15 (NM_010304.3,383-401).
caagagcgcgaggaattga

SEQ ID NO: 519446 - DNA, 19 bp, Mus musculus
  siRNA target sequence for Gna15 (NM_010304.3,537-555).
ccatgcaggccatgataga

SEQ ID NO: 519447 - DNA, 19 bp, Mus musculus
  siRNA target sequence for Gna15 (NM_010304.3,622-640).
gacccaggacccctataaa

SEQ ID NO: 519448 - DNA, 19 bp, Mus musculus
  siRNA target sequence for Gna15 (NM_010304.3,624-642).
cccaggacccctataaagt

SEQ ID NO: 519449 - DNA, 19 bp, Mus musculus
  siRNA target sequence for Gna15 (NM_010304.3,626-644).
caggacccctataaagtga

SEQ ID NO: 519450 - DNA, 19 bp, Mus musculus
  siRNA target sequence for Gna15 (NM_010304.3,740-758).
ctggactccgcggtgtatt

SEQ ID NO: 519451 - DNA, 19 bp, Mus musculus
  siRNA target sequence for Gna15 (NM_010304.3,969-987).
cctccctgagcgagtatga

SEQ ID NO: 519452 - DNA, 19 bp, Mus musculus
  siRNA target sequence for Gna15 (NM_010304.3,1109-1127).
gacatcctggaagataaga

SEQ ID NO: 519453 - DNA, 19 bp, Mus musculus
  siRNA target sequence for Gna15 (NM_010304.3,1115-1133).
ctggaagataagattcaca

SEQ ID NO: 519454 - DNA, 19 bp, Mus musculus
  siRNA target sequence for Gna15 (NM_010304.3,1137-1155).
cccacctggccacatactt

SEQ ID NO: 519455 - DNA, 19 bp, Mus musculus
  siRNA target sequence for Gna15 (NM_010304.3,1323-1341).
gcgtccgcagcgtgttcaa

SEQ ID NO: 519456 - DNA, 19 bp, Mus musculus
  siRNA target sequence for Gnai2 (NM_008138.1,130-148).
ggcagccgagcgctctaaa

SEQ ID NO: 519457 - DNA, 19 bp, Mus musculus
  siRNA target sequence for Gnai2 (NM_008138.1,131-149).
gcagccgagcgctctaaaa

SEQ ID NO: 519458 - DNA, 19 bp, Mus musculus
  siRNA target sequence for Gnai2 (NM_008138.1,134-152).
gccgagcgctctaaaatga

SEQ ID NO: 519459 - DNA, 19 bp, Mus musculus
  siRNA target sequence for Gnai2 (NM_008138.1,135-153).
ccgagcgctctaaaatgat

SEQ ID NO: 519460 - DNA, 19 bp, Mus musculus
  siRNA target sequence for Gnai2 (NM_008138.1,522-540).
gccgctcacgagaatacca

SEQ ID NO: 519461 - DNA, 19 bp, Mus musculus
  siRNA target sequence for Gnai2 (NM_008138.1,556-574).
cgcttactacctgaatgat

SEQ ID NO: 519462 - DNA, 19 bp, Mus musculus
  siRNA target sequence for Gnai2 (NM_008138.1,645-663).
cgggcatcgtggaaacaca

SEQ ID NO: 519463 - DNA, 19 bp, Mus musculus
  siRNA target sequence for Gnai2 (NM_008138.1,669-687).
ccttcaaggacttacactt

SEQ ID NO: 519464 - DNA, 19 bp, Mus musculus
  siRNA target sequence for Gnai2 (NM_008138.1,677-695).
gacttacacttcaagatgt

SEQ ID NO: 519465 - DNA, 19 bp, Mus musculus
  siRNA target sequence for Gnai2 (NM_008138.1,1028-1046).
ctaaataagcgcaaagaca

SEQ ID NO: 519466 - DNA, 19 bp, Mus musculus
  siRNA target sequence for Gnai3 (NM_010306.1,301-319).
cgaatgtaaacagtataaa

SEQ ID NO: 519467 - DNA, 19 bp, Mus musculus
  siRNA target sequence for Gnai3 (NM_010306.1,306-324).
gtaaacagtataaagtagt

SEQ ID NO: 519468 - DNA, 19 bp, Mus musculus
  siRNA target sequence for Gnai3 (NM_010306.1,413-431).
gatgatgcccgacagttat

SEQ ID NO: 519469 - DNA, 19 bp, Mus musculus
  siRNA target sequence for Gnai3 (NM_010306.1,419-437).
gcccgacagttatttgttt

SEQ ID NO: 519470 - DNA, 19 bp, Mus musculus
  siRNA target sequence for Gnai3 (NM_010306.1,421-439).
ccgacagttatttgtttta

SEQ ID NO: 519471 - DNA, 19 bp, Mus musculus
  siRNA target sequence for Gnai3 (NM_010306.1,473-491).
gaactagcaggcgtgatta

SEQ ID NO: 519472 - DNA, 19 bp, Mus musculus
  siRNA target sequence for Gnai3 (NM_010306.1,479-497).
gcaggcgtgattaaacgtt

SEQ ID NO: 519473 - DNA, 19 bp, Mus musculus
  siRNA target sequence for Gnai3 (NM_010306.1,480-498).
caggcgtgattaaacgttt

SEQ ID NO: 519474 - DNA, 19 bp, Mus musculus
  siRNA target sequence for Gnai3 (NM_010306.1,482-500).
ggcgtgattaaacgtttat

SEQ ID NO: 519475 - DNA, 19 bp, Mus musculus
  siRNA target sequence for Gnai3 (NM_010306.1,515-533).
gtacaggcatgctttagca

SEQ ID NO: 519476 - DNA, 19 bp, Mus musculus
  siRNA target sequence for Gnai3 (NM_010306.1,531-549).
gcaggtccagggaatatca

SEQ ID NO: 519477 - DNA, 19 bp, Mus musculus
  siRNA target sequence for Gnai3 (NM_010306.1,575-593).
ctaaatgatttggatagaa

SEQ ID NO: 519478 - DNA, 19 bp, Mus musculus
  siRNA target sequence for Gnai3 (NM_010306.1,635-653).
cggacaagagtgaagacta

SEQ ID NO: 519479 - DNA, 19 bp, Mus musculus
  siRNA target sequence for Gnai3 (NM_010306.1,717-735).
gccaaagatccgaacgaaa

SEQ ID NO: 519480 - DNA, 19 bp, Mus musculus
  siRNA target sequence for Gnai3 (NM_010306.1,718-736).
ccaaagatccgaacgaaaa

SEQ ID NO: 519481 - DNA, 19 bp, Mus musculus
  siRNA target sequence for Gnai3 (NM_010306.1,719-737).
caaagatccgaacgaaaaa

SEQ ID NO: 519482 - DNA, 19 bp, Mus musculus
  siRNA target sequence for Gnai3 (NM_010306.1,761-779).
gtgacagcaattatctttt

SEQ ID NO: 519483 - DNA, 19 bp, Mus musculus
  siRNA target sequence for Gnai3 (NM_010306.1,792-810).
gtgattacgaccttgttct

SEQ ID NO: 519484 - DNA, 19 bp, Mus musculus
  siRNA target sequence for Gnai3 (NM_010306.1,888-906).
cagacacttcaatcattct

SEQ ID NO: 519485 - DNA, 19 bp, Mus musculus
  siRNA target sequence for Gnai3 (NM_010306.1,894-912).
cttcaatcattctctttct

SEQ ID NO: 519486 - DNA, 19 bp, Mus musculus
  siRNA target sequence for Gnai3 (NM_010306.1,949-967).
gagtccattaacaatctgt

SEQ ID NO: 519487 - DNA, 19 bp, Mus musculus
  siRNA target sequence for Gnai3 (NM_010306.1,960-978).
caatctgttatccagaata

SEQ ID NO: 519488 - DNA, 19 bp, Mus musculus
  siRNA target sequence for Gnai3 (NM_010306.1,974-992).
gaatacacaggttccaata

SEQ ID NO: 519489 - DNA, 19 bp, Mus musculus
  siRNA target sequence for Gnai3 (NM_010306.1,1004-1022).
gcagctgcttacattcagt

SEQ ID NO: 519490 - DNA, 19 bp, Mus musculus
  siRNA target sequence for Gnai3 (NM_010306.1,1037-1055).
ctgaaccgaagaaaagata

SEQ ID NO: 519491 - DNA, 19 bp, Mus musculus
  siRNA target sequence for Gnai3 (NM_010306.1,1122-1140).
ctgttacggatgtcatcat

SEQ ID NO: 519492 - DNA, 19 bp, Mus musculus
  siRNA target sequence for Gnai3 (NM_010306.1,1128-1146).
cggatgtcatcattaaaaa

SEQ ID NO: 519493 - DNA, 19 bp, Mus musculus
  siRNA target sequence for Gnao (NM_010308.2,546-564).
ggagcaaggcgattgagaa

SEQ ID NO: 519494 - DNA, 19 bp, Mus musculus
  siRNA target sequence for Gnao (NM_010308.2,592-610).
cgccaaagacgtgaaatta

SEQ ID NO: 519495 - DNA, 19 bp, Mus musculus
  siRNA target sequence for Gnao (NM_010308.2,594-612).
ccaaagacgtgaaattact

SEQ ID NO: 519496 - DNA, 19 bp, Mus musculus
  siRNA target sequence for Gnao (NM_010308.2,829-847).
cgtggtgagtcgtatggaa

SEQ ID NO: 519497 - DNA, 19 bp, Mus musculus
  siRNA target sequence for Gnao (NM_010308.2,1028-1046).
ctccgaaccagagtcaaaa

SEQ ID NO: 519498 - DNA, 19 bp, Mus musculus
  siRNA target sequence for Gnao (NM_010308.2,1381-1399).
ctccaacacctatgaagat

SEQ ID NO: 519499 - DNA, 19 bp, Mus musculus
  siRNA target sequence for Gnao (NM_010308.2,1400-1418).
gcagctgcctacatccaaa

SEQ ID NO: 519500 - DNA, 19 bp, Mus musculus
  siRNA target sequence for Gnao (NM_010308.2,1438-1456).
ccgctcacccaacaaagaa

SEQ ID NO: 519501 - DNA, 19 bp, Mus musculus
  siRNA target sequence for Gnao (NM_010308.2,1440-1458).
gctcacccaacaaagaaat

SEQ ID NO: 519502 - DNA, 19 bp, Mus musculus
  siRNA target sequence for Gnao (NM_010308.2,1441-1459).
ctcacccaacaaagaaatt

SEQ ID NO: 519503 - DNA, 19 bp, Mus musculus
  siRNA target sequence for Gnao (NM_010308.2,1478-1496).
gccacagacacgaataata

SEQ ID NO: 519504 - DNA, 19 bp, Mus musculus
  siRNA target sequence for Gnao (NM_010308.2,1479-1497).
ccacagacacgaataatat

SEQ ID NO: 519505 - DNA, 19 bp, Mus musculus
  siRNA target sequence for Gnao (NM_010308.2,1482-1500).
cagacacgaataatatcca

SEQ ID NO: 519506 - DNA, 19 bp, Mus musculus
  siRNA target sequence for Gnaq (NM_008139.2,432-450).
gctactctgacgaagacaa

SEQ ID NO: 519507 - DNA, 19 bp, Mus musculus
  siRNA target sequence for Gnaq (NM_008139.2,556-574).
ggctcatgcacaattggtt

SEQ ID NO: 519508 - DNA, 19 bp, Mus musculus
  siRNA target sequence for Gnaq (NM_008139.2,603-621).
cttttgagaatccatatgt

SEQ ID NO: 519509 - DNA, 19 bp, Mus musculus
  siRNA target sequence for Gnaq (NM_008139.2,614-632).
ccatatgtagatgcaataa

SEQ ID NO: 519510 - DNA, 19 bp, Mus musculus
  siRNA target sequence for Gnaq (NM_008139.2,670-688).
cgacagacgacgggaatat

SEQ ID NO: 519511 - DNA, 19 bp, Mus musculus
  siRNA target sequence for Gnaq (NM_008139.2,675-693).
gacgacgggaatatcagtt

SEQ ID NO: 519512 - DNA, 19 bp, Mus musculus
  siRNA target sequence for Gnaq (NM_008139.2,677-695).
cgacgggaatatcagttat

SEQ ID NO: 519513 - DNA, 19 bp, Mus musculus
  siRNA target sequence for Gnaq (NM_008139.2,681-699).
gggaatatcagttatctga

SEQ ID NO: 519514 - DNA, 19 bp, Mus musculus
  siRNA target sequence for Gnaq (NM_008139.2,691-709).
gttatctgactctaccaaa

SEQ ID NO: 519515 - DNA, 19 bp, Mus musculus
  siRNA target sequence for Gnaq (NM_008139.2,805-823).
cgaatacccctttgactta

SEQ ID NO: 519516 - DNA, 19 bp, Mus musculus
  siRNA target sequence for Gnaq (NM_008139.2,811-829).
cccctttgacttacaaagt

SEQ ID NO: 519517 - DNA, 19 bp, Mus musculus
  siRNA target sequence for Gnaq (NM_008139.2,813-831).
cctttgacttacaaagtgt

SEQ ID NO: 519518 - DNA, 19 bp, Mus musculus
  siRNA target sequence for Gnaq (NM_008139.2,882-900).
ggatacactgctttgaaaa

SEQ ID NO: 519519 - DNA, 19 bp, Mus musculus
  siRNA target sequence for Gnaq (NM_008139.2,904-922).
cacctccatcatgtttcta

SEQ ID NO: 519520 - DNA, 19 bp, Mus musculus
  siRNA target sequence for Gnaq (NM_008139.2,906-924).
cctccatcatgtttctagt

SEQ ID NO: 519521 - DNA, 19 bp, Mus musculus
  siRNA target sequence for Gnaq (NM_008139.2,907-925).
ctccatcatgtttctagta

SEQ ID NO: 519522 - DNA, 19 bp, Mus musculus
  siRNA target sequence for Gnaq (NM_008139.2,927-945).
cgcttagcgaatatgatca

SEQ ID NO: 519523 - DNA, 19 bp, Mus musculus
  siRNA target sequence for Gnaq (NM_008139.2,928-946).
gcttagcgaatatgatcaa

SEQ ID NO: 519524 - DNA, 19 bp, Mus musculus
  siRNA target sequence for Gnaq (NM_008139.2,933-951).
gcgaatatgatcaagttct

SEQ ID NO: 519525 - DNA, 19 bp, Mus musculus
  siRNA target sequence for Gnaq (NM_008139.2,934-952).
cgaatatgatcaagttctt

SEQ ID NO: 519526 - DNA, 19 bp, Mus musculus
  siRNA target sequence for Gnaq (NM_008139.2,988-1006).
caaagcactctttagaaca

SEQ ID NO: 519527 - DNA, 19 bp, Mus musculus
  siRNA target sequence for Gnaq (NM_008139.2,993-1011).
cactctttagaacaattat

SEQ ID NO: 519528 - DNA, 19 bp, Mus musculus
  siRNA target sequence for Gnaq (NM_008139.2,1092-1110).
cccacctagtcgactactt

SEQ ID NO: 519529 - DNA, 19 bp, Mus musculus
  siRNA target sequence for Gnaq (NM_008139.2,1102-1120).
cgactacttcccagaatat

SEQ ID NO: 519530 - DNA, 19 bp, Mus musculus
  siRNA target sequence for Gnaq (NM_008139.2,1151-1169).
cgagaattcatcctgaaaa

SEQ ID NO: 519531 - DNA, 19 bp, Mus musculus
  siRNA target sequence for Gnas (NM_010309.1,23-41).
ggctgcctcggcaacagta

SEQ ID NO: 519532 - DNA, 19 bp, Mus musculus
  siRNA target sequence for Gnas (NM_010309.1,920-938).
gtcctcgctggcaaatcga

SEQ ID NO: 519533 - DNA, 19 bp, Mus musculus
  siRNA target sequence for Gnas (NM_010309.1,925-943).
cgctggcaaatcgaagatt

SEQ ID NO: 519534 - DNA, 19 bp, Mus musculus
  siRNA target sequence for Gnat1 (NM_008140.2,224-242).
ggaatgcctcgagttcatt

SEQ ID NO: 519535 - DNA, 19 bp, Mus musculus
  siRNA target sequence for Gnat1 (NM_008140.2,298-316).
ccacgctcaacattcagta

SEQ ID NO: 519536 - DNA, 19 bp, Mus musculus
  siRNA target sequence for Gnat1 (NM_008140.2,308-326).
cattcagtatggagattca

SEQ ID NO: 519537 - DNA, 19 bp, Mus musculus
  siRNA target sequence for Gnat1 (NM_008140.2,356-374).
gcacatggcagatactatt

SEQ ID NO: 519538 - DNA, 19 bp, Mus musculus
  siRNA target sequence for Gnat1 (NM_008140.2,425-443).
gaaggactcgggtatccaa

SEQ ID NO: 519539 - DNA, 19 bp, Mus musculus
  siRNA target sequence for Gnat1 (NM_008140.2,554-572).
gttgcgttctcgtgtcaaa

SEQ ID NO: 519540 - DNA, 19 bp, Mus musculus
  siRNA target sequence for Gnat1 (NM_008140.2,558-576).
cgttctcgtgtcaaaacca

SEQ ID NO: 519541 - DNA, 19 bp, Mus musculus
  siRNA target sequence for Gnat1 (NM_008140.2,579-597).
ggtattatcgagactcaat

SEQ ID NO: 519542 - DNA, 19 bp, Mus musculus
  siRNA target sequence for Gnat1 (NM_008140.2,580-598).
gtattatcgagactcaatt

SEQ ID NO: 519543 - DNA, 19 bp, Mus musculus
  siRNA target sequence for Gnat1 (NM_008140.2,645-663).
cgttccgagcgcaaaaagt

SEQ ID NO: 519544 - DNA, 19 bp, Mus musculus
  siRNA target sequence for Gnat1 (NM_008140.2,684-702).
gtgacgtgcatcattttca

SEQ ID NO: 519545 - DNA, 19 bp, Mus musculus
  siRNA target sequence for Gnat1 (NM_008140.2,848-866).
cgttttctccgagaagata

SEQ ID NO: 519546 - DNA, 19 bp, Mus musculus
  siRNA target sequence for Gnat1 (NM_008140.2,849-867).
gttttctccgagaagataa

SEQ ID NO: 519547 - DNA, 19 bp, Mus musculus
  siRNA target sequence for Gnat1 (NM_008140.2,899-917).
ctacgatggacctaacact

SEQ ID NO: 519548 - DNA, 19 bp, Mus musculus
  siRNA target sequence for Gnat1 (NM_008140.2,948-966).
cagttcctggagcttaaca

SEQ ID NO: 519549 - DNA, 19 bp, Mus musculus
  siRNA target sequence for Gnat1 (NM_008140.2,1022-1040).
gaacgtcaagtttgtcttt

SEQ ID NO: 519550 - DNA, 19 bp, Mus musculus
  siRNA target sequence for Gnat2 (NM_008141.2,389-407).
ccgggagacagctcaacaa

SEQ ID NO: 519551 - DNA, 19 bp, Mus musculus
  siRNA target sequence for Gnat2 (NM_008141.2,454-472).
gacgtcatcaggaagttgt

SEQ ID NO: 519552 - DNA, 19 bp, Mus musculus
  siRNA target sequence for Gnat2 (NM_008141.2,552-570).
ccagctggaccggattaca

SEQ ID NO: 519553 - DNA, 19 bp, Mus musculus
  siRNA target sequence for Gnat2 (NM_008141.2,863-881).
ctacgtccatcgttctctt

SEQ ID NO: 519554 - DNA, 19 bp, Mus musculus
  siRNA target sequence for Gnat2 (NM_008141.2,944-962).
cggagtatgacggaaacaa

SEQ ID NO: 519555 - DNA, 19 bp, Mus musculus
  siRNA target sequence for Gnat2 (NM_008141.2,946-964).
gagtatgacggaaacaact

SEQ ID NO: 519556 - DNA, 19 bp, Mus musculus
  siRNA target sequence for Gnat2 (NM_008141.2,976-994).
gccgggaattatatcaaga

SEQ ID NO: 519557 - DNA, 19 bp, Mus musculus
  siRNA target sequence for Gnat2 (NM_008141.2,1100-1118).
cagacatcatcatcaaaga

SEQ ID NO: 519558 - DNA, 19 bp, Mus musculus
  siRNA target sequence for Gnaz (NM_010311.2,741-759).
gaggcggtcccggagaatt

SEQ ID NO: 519559 - DNA, 19 bp, Mus musculus
  siRNA target sequence for Gnaz (NM_010311.2,743-761).
ggcggtcccggagaattga

SEQ ID NO: 519560 - DNA, 19 bp, Mus musculus
  siRNA target sequence for Gnaz (NM_010311.2,787-805).
cggcagcgccgtgaaatca

SEQ ID NO: 519561 - DNA, 19 bp, Mus musculus
  siRNA target sequence for Gnaz (NM_010311.2,788-806).
ggcagcgccgtgaaatcaa

SEQ ID NO: 519562 - DNA, 19 bp, Mus musculus
  siRNA target sequence for Gnaz (NM_010311.2,789-807).
gcagcgccgtgaaatcaaa

SEQ ID NO: 519563 - DNA, 19 bp, Mus musculus
  siRNA target sequence for Gnaz (NM_010311.2,792-810).
gcgccgtgaaatcaaactt

SEQ ID NO: 519564 - DNA, 19 bp, Mus musculus
  siRNA target sequence for Gnaz (NM_010311.2,967-985).
gctgccctcaagatcgatt

SEQ ID NO: 519565 - DNA, 19 bp, Mus musculus
  siRNA target sequence for Gnaz (NM_010311.2,1682-1700).
ccaccgacaccagtaacat

SEQ ID NO: 519566 - DNA, 19 bp, Mus musculus
  siRNA target sequence for Gtpbp4 (NM_027000.2,25-43).
gcgcattacaacttcaaga

SEQ ID NO: 519567 - DNA, 19 bp, Mus musculus
  siRNA target sequence for Gtpbp4 (NM_027000.2,26-44).
cgcattacaacttcaagaa

SEQ ID NO: 519568 - DNA, 19 bp, Mus musculus
  siRNA target sequence for Gtpbp4 (NM_027000.2,58-76).
ccgtctgccaaggacttta

SEQ ID NO: 519569 - DNA, 19 bp, Mus musculus
  siRNA target sequence for Gtpbp4 (NM_027000.2,59-77).
cgtctgccaaggactttat

SEQ ID NO: 519570 - DNA, 19 bp, Mus musculus
  siRNA target sequence for Gtpbp4 (NM_027000.2,108-126).
gactccaacggttattcat

SEQ ID NO: 519571 - DNA, 19 bp, Mus musculus
  siRNA target sequence for Gtpbp4 (NM_027000.2,110-128).
ctccaacggttattcataa

SEQ ID NO: 519572 - DNA, 19 bp, Mus musculus
  siRNA target sequence for Gtpbp4 (NM_027000.2,116-134).
cggttattcataaacatta

SEQ ID NO: 519573 - DNA, 19 bp, Mus musculus
  siRNA target sequence for Gtpbp4 (NM_027000.2,142-160).
catcggattcgacattttt

SEQ ID NO: 519574 - DNA, 19 bp, Mus musculus
  siRNA target sequence for Gtpbp4 (NM_027000.2,145-163).
cggattcgacatttttata

SEQ ID NO: 519575 - DNA, 19 bp, Mus musculus
  siRNA target sequence for Gtpbp4 (NM_027000.2,151-169).
cgacatttttatatgagaa

SEQ ID NO: 519576 - DNA, 19 bp, Mus musculus
  siRNA target sequence for Gtpbp4 (NM_027000.2,221-239).
cggatttccccaaattgga

SEQ ID NO: 519577 - DNA, 19 bp, Mus musculus
  siRNA target sequence for Gtpbp4 (NM_027000.2,222-240).
ggatttccccaaattggat

SEQ ID NO: 519578 - DNA, 19 bp, Mus musculus
  siRNA target sequence for Gtpbp4 (NM_027000.2,231-249).
caaattggatgatatccat

SEQ ID NO: 519579 - DNA, 19 bp, Mus musculus
  siRNA target sequence for Gtpbp4 (NM_027000.2,283-301).
gacaaggatcactacaagt

SEQ ID NO: 519580 - DNA, 19 bp, Mus musculus
  siRNA target sequence for Gtpbp4 (NM_027000.2,300-318).
gttggctctaggtcaaata

SEQ ID NO: 519581 - DNA, 19 bp, Mus musculus
  siRNA target sequence for Gtpbp4 (NM_027000.2,303-321).
ggctctaggtcaaataaat

SEQ ID NO: 519582 - DNA, 19 bp, Mus musculus
  siRNA target sequence for Gtpbp4 (NM_027000.2,304-322).
gctctaggtcaaataaata

SEQ ID NO: 519583 - DNA, 19 bp, Mus musculus
  siRNA target sequence for Gtpbp4 (NM_027000.2,339-357).
ggacaatgttgctaaagat

SEQ ID NO: 519584 - DNA, 19 bp, Mus musculus
  siRNA target sequence for Gtpbp4 (NM_027000.2,340-358).
gacaatgttgctaaagatt

SEQ ID NO: 519585 - DNA, 19 bp, Mus musculus
  siRNA target sequence for Gtpbp4 (NM_027000.2,355-373).
gattatgtgcgtcttatga

SEQ ID NO: 519586 - DNA, 19 bp, Mus musculus
  siRNA target sequence for Gtpbp4 (NM_027000.2,363-381).
gcgtcttatgaaatatggt

SEQ ID NO: 519587 - DNA, 19 bp, Mus musculus
  siRNA target sequence for Gtpbp4 (NM_027000.2,418-436).
gcccttggacgaatgtgta

SEQ ID NO: 519588 - DNA, 19 bp, Mus musculus
  siRNA target sequence for Gtpbp4 (NM_027000.2,421-439).
cttggacgaatgtgtacta

SEQ ID NO: 519589 - DNA, 19 bp, Mus musculus
  siRNA target sequence for Gtpbp4 (NM_027000.2,424-442).
ggacgaatgtgtactatta

SEQ ID NO: 519590 - DNA, 19 bp, Mus musculus
  siRNA target sequence for Gtpbp4 (NM_027000.2,425-443).
gacgaatgtgtactattat

SEQ ID NO: 519591 - DNA, 19 bp, Mus musculus
  siRNA target sequence for Gtpbp4 (NM_027000.2,427-445).
cgaatgtgtactattatca

SEQ ID NO: 519592 - DNA, 19 bp, Mus musculus
  siRNA target sequence for Gtpbp4 (NM_027000.2,428-446).
gaatgtgtactattatcaa

SEQ ID NO: 519593 - DNA, 19 bp, Mus musculus
  siRNA target sequence for Gtpbp4 (NM_027000.2,475-493).
gaacaagtacgtcaacatt

SEQ ID NO: 519594 - DNA, 19 bp, Mus musculus
  siRNA target sequence for Gtpbp4 (NM_027000.2,478-496).
caagtacgtcaacatttat

SEQ ID NO: 519595 - DNA, 19 bp, Mus musculus
  siRNA target sequence for Gtpbp4 (NM_027000.2,498-516).
ccgcttgccaaccattgat

SEQ ID NO: 519596 - DNA, 19 bp, Mus musculus
  siRNA target sequence for Gtpbp4 (NM_027000.2,504-522).
gccaaccattgatccaaat

SEQ ID NO: 519597 - DNA, 19 bp, Mus musculus
  siRNA target sequence for Gtpbp4 (NM_027000.2,505-523).
ccaaccattgatccaaata

SEQ ID NO: 519598 - DNA, 19 bp, Mus musculus
  siRNA target sequence for Gtpbp4 (NM_027000.2,623-641).
ccaccaaatctctgtttgt

SEQ ID NO: 519599 - DNA, 19 bp, Mus musculus
  siRNA target sequence for Gtpbp4 (NM_027000.2,640-658).
gttgggcacatggattata

SEQ ID NO: 519600 - DNA, 19 bp, Mus musculus
  siRNA target sequence for Gtpbp4 (NM_027000.2,644-662).
ggcacatggattataagta

SEQ ID NO: 519601 - DNA, 19 bp, Mus musculus
  siRNA target sequence for Gtpbp4 (NM_027000.2,645-663).
gcacatggattataagtat

SEQ ID NO: 519602 - DNA, 19 bp, Mus musculus
  siRNA target sequence for Gtpbp4 (NM_027000.2,666-684).
gcgctggcaggttgtagat

SEQ ID NO: 519603 - DNA, 19 bp, Mus musculus
  siRNA target sequence for Gtpbp4 (NM_027000.2,667-685).
cgctggcaggttgtagata

SEQ ID NO: 519604 - DNA, 19 bp, Mus musculus
  siRNA target sequence for Gtpbp4 (NM_027000.2,767-785).
ctgcagttctgtatgtgat

SEQ ID NO: 519605 - DNA, 19 bp, Mus musculus
  siRNA target sequence for Gtpbp4 (NM_027000.2,848-866).
gacctctgtttatcaacaa

SEQ ID NO: 519606 - DNA, 19 bp, Mus musculus
  siRNA target sequence for Gtpbp4 (NM_027000.2,864-882).
caagcctcttattgttgta

SEQ ID NO: 519607 - DNA, 19 bp, Mus musculus
  siRNA target sequence for Gtpbp4 (NM_027000.2,903-921).
gagaatagctgaactttct

SEQ ID NO: 519608 - DNA, 19 bp, Mus musculus
  siRNA target sequence for Gtpbp4 (NM_027000.2,997-1015).
gaaggtgtcattcaagtta

SEQ ID NO: 519609 - DNA, 19 bp, Mus musculus
  siRNA target sequence for Gtpbp4 (NM_027000.2,1000-1018).
ggtgtcattcaagttaaaa

SEQ ID NO: 519610 - DNA, 19 bp, Mus musculus
  siRNA target sequence for Gtpbp4 (NM_027000.2,1043-1061).
ctcaccgagtagaaacgaa

SEQ ID NO: 519611 - DNA, 19 bp, Mus musculus
  siRNA target sequence for Gtpbp4 (NM_027000.2,1048-1066).
cgagtagaaacgaaaatga

SEQ ID NO: 519612 - DNA, 19 bp, Mus musculus
  siRNA target sequence for Gtpbp4 (NM_027000.2,1114-1132).
cccaacaagagagatgata

SEQ ID NO: 519613 - DNA, 19 bp, Mus musculus
  siRNA target sequence for Gtpbp4 (NM_027000.2,1176-1194).
gaagagaatggagattgaa

SEQ ID NO: 519614 - DNA, 19 bp, Mus musculus
  siRNA target sequence for Gtpbp4 (NM_027000.2,1227-1245).
gctggaaatgggagatgat

SEQ ID NO: 519615 - DNA, 19 bp, Mus musculus
  siRNA target sequence for Gtpbp4 (NM_027000.2,1272-1290).
ggacttaatgaattcatct

SEQ ID NO: 519616 - DNA, 19 bp, Mus musculus
  siRNA target sequence for Gtpbp4 (NM_027000.2,1289-1307).
ctgagaaatatgataagat

SEQ ID NO: 519617 - DNA, 19 bp, Mus musculus
  siRNA target sequence for Gtpbp4 (NM_027000.2,1348-1366).
gatcctgctatcatgaaga

SEQ ID NO: 519618 - DNA, 19 bp, Mus musculus
  siRNA target sequence for Gtpbp4 (NM_027000.2,1403-1421).
cagctgctggggagtatga

SEQ ID NO: 519619 - DNA, 19 bp, Mus musculus
  siRNA target sequence for Gtpbp4 (NM_027000.2,1463-1481).
gacagctggcaaagcaaat

SEQ ID NO: 519620 - DNA, 19 bp, Mus musculus
  siRNA target sequence for Gtpbp4 (NM_027000.2,1465-1483).
cagctggcaaagcaaatta

SEQ ID NO: 519621 - DNA, 19 bp, Mus musculus
  siRNA target sequence for Gtpbp4 (NM_027000.2,1470-1488).
ggcaaagcaaattagagaa

SEQ ID NO: 519622 - DNA, 19 bp, Mus musculus
  siRNA target sequence for Gtpbp4 (NM_027000.2,1471-1489).
gcaaagcaaattagagaaa

SEQ ID NO: 519623 - DNA, 19 bp, Mus musculus
  siRNA target sequence for Gtpbp4 (NM_027000.2,1491-1509).
gaagaagttgaaaattcta

SEQ ID NO: 519624 - DNA, 19 bp, Mus musculus
  siRNA target sequence for Gtpbp4 (NM_027000.2,1563-1581).
ggttcaacgggcagattta

SEQ ID NO: 519625 - DNA, 19 bp, Mus musculus
  siRNA target sequence for Gtpbp4 (NM_027000.2,1567-1585).
caacgggcagatttagaga

SEQ ID NO: 519626 - DNA, 19 bp, Mus musculus
  siRNA target sequence for Gtpbp4 (NM_027000.2,1604-1622).
gtgtggacatggatgataa

SEQ ID NO: 519627 - DNA, 19 bp, Mus musculus
  siRNA target sequence for Gtpbp4 (NM_027000.2,1660-1678).
cggagtgtcacgaggaaaa

SEQ ID NO: 519628 - DNA, 19 bp, Mus musculus
  siRNA target sequence for Gtpbp4 (NM_027000.2,1714-1732).
gcgcggagtcgcagttgtt

SEQ ID NO: 519629 - DNA, 19 bp, Mus musculus
  siRNA target sequence for Gtpbp4 (NM_027000.2,1719-1737).
gagtcgcagttgttctaga

SEQ ID NO: 519630 - DNA, 19 bp, Mus musculus
  siRNA target sequence for Hras1 (NM_008284.1,90-108).
cgagtatgatcccactata

SEQ ID NO: 519631 - DNA, 19 bp, Mus musculus
  siRNA target sequence for Hras1 (NM_008284.1,297-315).
gatcaagcgggtgaaagat

SEQ ID NO: 519632 - DNA, 19 bp, Mus musculus
  siRNA target sequence for Hras1 (NM_008284.1,412-430).
ggcatcccctacattgaaa

SEQ ID NO: 519633 - DNA, 19 bp, Mus musculus
  siRNA target sequence for Hras1 (NM_008284.1,414-432).
catcccctacattgaaaca

SEQ ID NO: 519634 - DNA, 19 bp, Mus musculus
  siRNA target sequence for Hras1 (NM_008284.1,482-500).
gtgagattcggcagcataa

SEQ ID NO: 519635 - DNA, 19 bp, Mus musculus
  siRNA target sequence for Hras1 (NM_008284.1,484-502).
gagattcggcagcataaat

SEQ ID NO: 519636 - DNA, 19 bp, Mus musculus
  siRNA target sequence for Hras1 (NM_008284.1,496-514).
cataaattgcggaaactga

SEQ ID NO: 519637 - DNA, 19 bp, Mus musculus
  siRNA target sequence for Hras1 (NM_008284.1,542-560).
gcatgagctgcaaatgtgt

SEQ ID NO: 519638 - DNA, 19 bp, Mus musculus
  siRNA target sequence for Hsd17b7 (NM_010476.2,449-467).
gtgtttgaaaccaatctct

SEQ ID NO: 519639 - DNA, 19 bp, Mus musculus
  siRNA target sequence for Hsd17b7 (NM_010476.2,451-469).
gtttgaaaccaatctcttt

SEQ ID NO: 519640 - DNA, 19 bp, Mus musculus
  siRNA target sequence for Hsd17b7 (NM_010476.2,557-575).
gcaaagaaggctaacttca

SEQ ID NO: 519641 - DNA, 19 bp, Mus musculus
  siRNA target sequence for Hsd17b7 (NM_010476.2,633-651).
ctaccgacctcctgaatgt

SEQ ID NO: 519642 - DNA, 19 bp, Mus musculus
  siRNA target sequence for Hsd17b7 (NM_010476.2,708-726).
gcgtcgtgatgaccaatat

SEQ ID NO: 519643 - DNA, 19 bp, Mus musculus
  siRNA target sequence for Hsd17b7 (NM_010476.2,710-728).
gtcgtgatgaccaatatga

SEQ ID NO: 519644 - DNA, 19 bp, Mus musculus
  siRNA target sequence for Hsd17b7 (NM_010476.2,720-738).
ccaatatgacgtatggaat

SEQ ID NO: 519645 - DNA, 19 bp, Mus musculus
  siRNA target sequence for Hsd17b7 (NM_010476.2,735-753).
gaattttgcctccctttat

SEQ ID NO: 519646 - DNA, 19 bp, Mus musculus
  siRNA target sequence for Hsd17b7 (NM_010476.2,781-799).
gctccttcgcttttttgta

SEQ ID NO: 519647 - DNA, 19 bp, Mus musculus
  siRNA target sequence for Hsd17b7 (NM_010476.2,782-800).
ctccttcgcttttttgtaa

SEQ ID NO: 519648 - DNA, 19 bp, Mus musculus
  siRNA target sequence for Hsd17b7 (NM_010476.2,784-802).
ccttcgcttttttgtaaat

SEQ ID NO: 519649 - DNA, 19 bp, Mus musculus
  siRNA target sequence for Hsd17b7 (NM_010476.2,857-875).
caaaaaccggagtctctta

SEQ ID NO: 519650 - DNA, 19 bp, Mus musculus
  siRNA target sequence for Hsd17b7 (NM_010476.2,909-927).
gatttgggactaattacgt

SEQ ID NO: 519651 - DNA, 19 bp, Mus musculus
  siRNA target sequence for Hsd17b7 (NM_010476.2,934-952).
ccaaaagatggacatagat

SEQ ID NO: 519652 - DNA, 19 bp, Mus musculus
  siRNA target sequence for Hsd17b7 (NM_010476.2,1006-1024).
caggaccaccgttcagaaa

SEQ ID NO: 519653 - DNA, 19 bp, Mus musculus
  siRNA target sequence for Ian4 (NM_031247.2,1413-1431).
ctccccataggcaaaaagt

SEQ ID NO: 519654 - DNA, 19 bp, Mus musculus
  siRNA target sequence for Ian4 (NM_031247.2,1467-1485).
gtgttggccatattaatct

SEQ ID NO: 519655 - DNA, 19 bp, Mus musculus
  siRNA target sequence for Kras2 (NM_021284.2,242-260).
gatacagctaattcagaat

SEQ ID NO: 519656 - DNA, 19 bp, Mus musculus
  siRNA target sequence for Kras2 (NM_021284.2,296-314).
ctcctacaggaaacaagta

SEQ ID NO: 519657 - DNA, 19 bp, Mus musculus
  siRNA target sequence for Kras2 (NM_021284.2,331-349).
cctgtctcttggatattct

SEQ ID NO: 519658 - DNA, 19 bp, Mus musculus
  siRNA target sequence for Kras2 (NM_021284.2,442-460).
ctaaatcatttgaagatat

SEQ ID NO: 519659 - DNA, 19 bp, Mus musculus
  siRNA target sequence for Kras2 (NM_021284.2,453-471).
gaagatattcaccattata

SEQ ID NO: 519660 - DNA, 19 bp, Mus musculus
  siRNA target sequence for Kras2 (NM_021284.2,464-482).
ccattatagagaacaaatt

SEQ ID NO: 519661 - DNA, 19 bp, Mus musculus
  siRNA target sequence for Kras2 (NM_021284.2,662-680).
ccgagaaattcgaaaacat

SEQ ID NO: 519662 - DNA, 19 bp, Mus musculus
  siRNA target sequence for Kras2 (NM_021284.2,664-682).
gagaaattcgaaaacataa

SEQ ID NO: 519663 - DNA, 19 bp, Mus musculus
  siRNA target sequence for Mras (NM_008624.2,484-502).
gtgcgctcactattcagtt

SEQ ID NO: 519664 - DNA, 19 bp, Mus musculus
  siRNA target sequence for Mras (NM_008624.2,486-504).
gcgctcactattcagtttt

SEQ ID NO: 519665 - DNA, 19 bp, Mus musculus
  siRNA target sequence for Mras (NM_008624.2,487-505).
cgctcactattcagttttt

SEQ ID NO: 519666 - DNA, 19 bp, Mus musculus
  siRNA target sequence for Mras (NM_008624.2,560-578).
gcatacagagattgacaat

SEQ ID NO: 519667 - DNA, 19 bp, Mus musculus
  siRNA target sequence for Mras (NM_008624.2,883-901).
cgcctctcaacgtggataa

SEQ ID NO: 519668 - DNA, 19 bp, Mus musculus
  siRNA target sequence for Mras (NM_008624.2,884-902).
gcctctcaacgtggataaa

SEQ ID NO: 519669 - DNA, 19 bp, Mus musculus
  siRNA target sequence for Mras (NM_008624.2,885-903).
cctctcaacgtggataaaa

SEQ ID NO: 519670 - DNA, 19 bp, Mus musculus
  siRNA target sequence for Mras (NM_008624.2,888-906).
ctcaacgtggataaaacct

SEQ ID NO: 519671 - DNA, 19 bp, Mus musculus
  siRNA target sequence for Mras (NM_008624.2,912-930).
gacctagttagagtaatta

SEQ ID NO: 519672 - DNA, 19 bp, Mus musculus
  siRNA target sequence for Mras (NM_008624.2,992-1010).
ggccaccggcactcacaaa

SEQ ID NO: 519673 - DNA, 19 bp, Mus musculus
  siRNA target sequence for Mras (NM_008624.2,994-1012).
ccaccggcactcacaaact

SEQ ID NO: 519674 - DNA, 19 bp, Mus musculus
  siRNA target sequence for Mx1 (NM_010846.1,1118-1136).
gtaaatcactgccactatt

SEQ ID NO: 519675 - DNA, 19 bp, Mus musculus
  siRNA target sequence for Mx1 (NM_010846.1,1227-1245).
gtcctttctggtgaataaa

SEQ ID NO: 519676 - DNA, 19 bp, Mus musculus
  siRNA target sequence for Mx1 (NM_010846.1,1248-1266).
cagtgccttcaataggaat

SEQ ID NO: 519677 - DNA, 19 bp, Mus musculus
  siRNA target sequence for Mx1 (NM_010846.1,1286-1304).
cacaggaaaccgtatcaga

SEQ ID NO: 519678 - DNA, 19 bp, Mus musculus
  siRNA target sequence for Mx1 (NM_010846.1,1305-1323).
gggagacagccggttgttt

SEQ ID NO: 519679 - DNA, 19 bp, Mus musculus
  siRNA target sequence for Mx1 (NM_010846.1,1306-1324).
ggagacagccggttgttta

SEQ ID NO: 519680 - DNA, 19 bp, Mus musculus
  siRNA target sequence for Mx1 (NM_010846.1,1309-1327).
gacagccggttgtttacca

SEQ ID NO: 519681 - DNA, 19 bp, Mus musculus
  siRNA target sequence for Mx1 (NM_010846.1,1325-1343).
ccaaactgcgaaatgagtt

SEQ ID NO: 519682 - DNA, 19 bp, Mus musculus
  siRNA target sequence for Mx1 (NM_010846.1,1326-1344).
caaactgcgaaatgagttt

SEQ ID NO: 519683 - DNA, 19 bp, Mus musculus
  siRNA target sequence for Mx1 (NM_010846.1,1345-1363).
cttgcttgggatgatcata

SEQ ID NO: 519684 - DNA, 19 bp, Mus musculus
  siRNA target sequence for Mx1 (NM_010846.1,1384-1402).
gattctcctgaggtacaaa

SEQ ID NO: 519685 - DNA, 19 bp, Mus musculus
  siRNA target sequence for Mx1 (NM_010846.1,1469-1487).
catttgagagcatcatcaa

SEQ ID NO: 519686 - DNA, 19 bp, Mus musculus
  siRNA target sequence for Mx1 (NM_010846.1,1528-1546).
ctgcgcagggtcactaaga

SEQ ID NO: 519687 - DNA, 19 bp, Mus musculus
  siRNA target sequence for Mx1 (NM_010846.1,1549-1567).
gtccaaactgccttcgtaa

SEQ ID NO: 519688 - DNA, 19 bp, Mus musculus
  siRNA target sequence for Mx1 (NM_010846.1,1556-1574).
ctgccttcgtaaagatttt

SEQ ID NO: 519689 - DNA, 19 bp, Mus musculus
  siRNA target sequence for Mx1 (NM_010846.1,1558-1576).
gccttcgtaaagattttat

SEQ ID NO: 519690 - DNA, 19 bp, Mus musculus
  siRNA target sequence for Mx1 (NM_010846.1,1563-1581).
cgtaaagattttatcaaat

SEQ ID NO: 519691 - DNA, 19 bp, Mus musculus
  siRNA target sequence for Mx1 (NM_010846.1,1791-1809).
ccctgctacctttcaaaat

SEQ ID NO: 519692 - DNA, 19 bp, Mus musculus
  siRNA target sequence for Mx1 (NM_010846.1,1792-1810).
cctgctacctttcaaaata

SEQ ID NO: 519693 - DNA, 19 bp, Mus musculus
  siRNA target sequence for Mx1 (NM_010846.1,1822-1840).
cctcaaaaggggttgacta

SEQ ID NO: 519694 - DNA, 19 bp, Mus musculus
  siRNA target sequence for Mx1 (NM_010846.1,1912-1930).
ctgattatccagtacttca

SEQ ID NO: 519695 - DNA, 19 bp, Mus musculus
  siRNA target sequence for Mx1 (NM_010846.1,2081-2099).
ggcagaagcttgccaaatt

SEQ ID NO: 519696 - DNA, 19 bp, Mus musculus
  siRNA target sequence for Mx2 (NM_013606.1,148-166).
gcgttgattcagtcaactt

SEQ ID NO: 519697 - DNA, 19 bp, Mus musculus
  siRNA target sequence for Mx2 (NM_013606.1,149-167).
cgttgattcagtcaactta

SEQ ID NO: 519698 - DNA, 19 bp, Mus musculus
  siRNA target sequence for Mx2 (NM_013606.1,215-233).
caatctctgcagtcagtat

SEQ ID NO: 519699 - DNA, 19 bp, Mus musculus
  siRNA target sequence for Mx2 (NM_013606.1,1010-1028).
ggaacaccctcatttcaga

SEQ ID NO: 519700 - DNA, 19 bp, Mus musculus
  siRNA target sequence for Mx2 (NM_013606.1,1111-1129).
ctcttcctctgctagaaaa

SEQ ID NO: 519701 - DNA, 19 bp, Mus musculus
  siRNA target sequence for Mx2 (NM_013606.1,1312-1330).
ccaggctccgaaaagagtt

SEQ ID NO: 519702 - DNA, 19 bp, Mus musculus
  siRNA target sequence for Mx2 (NM_013606.1,1315-1333).
ggctccgaaaagagttctt

SEQ ID NO: 519703 - DNA, 19 bp, Mus musculus
  siRNA target sequence for Mx2 (NM_013606.1,1317-1335).
ctccgaaaagagttcttgt

SEQ ID NO: 519704 - DNA, 19 bp, Mus musculus
  siRNA target sequence for Mx2 (NM_013606.1,1358-1376).
gaatttcgcaaaaggttat

SEQ ID NO: 519705 - DNA, 19 bp, Mus musculus
  siRNA target sequence for Mx2 (NM_013606.1,1366-1384).
caaaaggttatgctgtttt

SEQ ID NO: 519706 - DNA, 19 bp, Mus musculus
  siRNA target sequence for Mx2 (NM_013606.1,1520-1538).
cacggtcactgaaattgta

SEQ ID NO: 519707 - DNA, 19 bp, Mus musculus
  siRNA target sequence for Mx2 (NM_013606.1,1786-1804).
cctctcagtcccaagattt

SEQ ID NO: 519708 - DNA, 19 bp, Mus musculus
  siRNA target sequence for Mx2 (NM_013606.1,1787-1805).
ctctcagtcccaagattta

SEQ ID NO: 519709 - DNA, 19 bp, Mus musculus
  siRNA target sequence for Nras (NM_010937.1,317-335).
cccaccatagaggattctt

SEQ ID NO: 519710 - DNA, 19 bp, Mus musculus
  siRNA target sequence for Nras (NM_010937.1,608-626).
cacgaactggccaagagtt

SEQ ID NO: 519711 - DNA, 19 bp, Mus musculus
  siRNA target sequence for Opa1 (NM_133752.1,230-248).
gtgaagtctgccaatcctt

SEQ ID NO: 519712 - DNA, 19 bp, Mus musculus
  siRNA target sequence for Opa1 (NM_133752.1,235-253).
gtctgccaatccttagtga

SEQ ID NO: 519713 - DNA, 19 bp, Mus musculus
  siRNA target sequence for Opa1 (NM_133752.1,239-257).
gccaatccttagtgaaaca

SEQ ID NO: 519714 - DNA, 19 bp, Mus musculus
  siRNA target sequence for Opa1 (NM_133752.1,241-259).
caatccttagtgaaacaca

SEQ ID NO: 519715 - DNA, 19 bp, Mus musculus
  siRNA target sequence for Opa1 (NM_133752.1,275-293).
gaaacgtaccgctccaaaa

SEQ ID NO: 519716 - DNA, 19 bp, Mus musculus
  siRNA target sequence for Opa1 (NM_133752.1,346-364).
cttcaaagaccccaactaa

SEQ ID NO: 519717 - DNA, 19 bp, Mus musculus
  siRNA target sequence for Opa1 (NM_133752.1,378-396).
gcagttctcttctctaact

SEQ ID NO: 519718 - DNA, 19 bp, Mus musculus
  siRNA target sequence for Opa1 (NM_133752.1,389-407).
ctctaactcacctttcatt

SEQ ID NO: 519719 - DNA, 19 bp, Mus musculus
  siRNA target sequence for Opa1 (NM_133752.1,397-415).
cacctttcattacataaat

SEQ ID NO: 519720 - DNA, 19 bp, Mus musculus
  siRNA target sequence for Opa1 (NM_133752.1,417-435).
gaaactttctccaattaaa

SEQ ID NO: 519721 - DNA, 19 bp, Mus musculus
  siRNA target sequence for Opa1 (NM_133752.1,459-477).
cttttggccagcaaggtta

SEQ ID NO: 519722 - DNA, 19 bp, Mus musculus
  siRNA target sequence for Opa1 (NM_133752.1,485-503).
gactcttaaaacttcgata

SEQ ID NO: 519723 - DNA, 19 bp, Mus musculus
  siRNA target sequence for Opa1 (NM_133752.1,487-505).
ctcttaaaacttcgatata

SEQ ID NO: 519724 - DNA, 19 bp, Mus musculus
  siRNA target sequence for Opa1 (NM_133752.1,530-548).
gtggctatacagccaaaaa

SEQ ID NO: 519725 - DNA, 19 bp, Mus musculus
  siRNA target sequence for Opa1 (NM_133752.1,577-595).
ccagaccttagtgactata

SEQ ID NO: 519726 - DNA, 19 bp, Mus musculus
  siRNA target sequence for Opa1 (NM_133752.1,600-618).
gattgtgcctgactttata

SEQ ID NO: 519727 - DNA, 19 bp, Mus musculus
  siRNA target sequence for Opa1 (NM_133752.1,718-736).
gagagcctcagcttgttga

SEQ ID NO: 519728 - DNA, 19 bp, Mus musculus
  siRNA target sequence for Opa1 (NM_133752.1,797-815).
ctgaaagtgacaagcatta

SEQ ID NO: 519729 - DNA, 19 bp, Mus musculus
  siRNA target sequence for Opa1 (NM_133752.1,867-885).
gcatactcagttaaagtat

SEQ ID NO: 519730 - DNA, 19 bp, Mus musculus
  siRNA target sequence for Opa1 (NM_133752.1,1038-1056).
cagttacaatacacaagat

SEQ ID NO: 519731 - DNA, 19 bp, Mus musculus
  siRNA target sequence for Opa1 (NM_133752.1,1040-1058).
gttacaatacacaagatca

SEQ ID NO: 519732 - DNA, 19 bp, Mus musculus
  siRNA target sequence for Opa1 (NM_133752.1,1145-1163).
gagggtccggcgagatgat

SEQ ID NO: 519733 - DNA, 19 bp, Mus musculus
  siRNA target sequence for Opa1 (NM_133752.1,1147-1165).
gggtccggcgagatgatga

SEQ ID NO: 519734 - DNA, 19 bp, Mus musculus
  siRNA target sequence for Opa1 (NM_133752.1,1210-1228).
gtggccttgtttaaagata

SEQ ID NO: 519735 - DNA, 19 bp, Mus musculus
  siRNA target sequence for Opa1 (NM_133752.1,1229-1247).
gctctcgggaatttgatct

SEQ ID NO: 519736 - DNA, 19 bp, Mus musculus
  siRNA target sequence for Opa1 (NM_133752.1,1288-1306).
gaactccgaatgaggaaaa

SEQ ID NO: 519737 - DNA, 19 bp, Mus musculus
  siRNA target sequence for Opa1 (NM_133752.1,1327-1345).
gttagccccgagaccatat

SEQ ID NO: 519738 - DNA, 19 bp, Mus musculus
  siRNA target sequence for Opa1 (NM_133752.1,1331-1349).
gccccgagaccatatctct

SEQ ID NO: 519739 - DNA, 19 bp, Mus musculus
  siRNA target sequence for Opa1 (NM_133752.1,1332-1350).
ccccgagaccatatctcta

SEQ ID NO: 519740 - DNA, 19 bp, Mus musculus
  siRNA target sequence for Opa1 (NM_133752.1,1333-1351).
cccgagaccatatctctaa

SEQ ID NO: 519741 - DNA, 19 bp, Mus musculus
  siRNA target sequence for Opa1 (NM_133752.1,1334-1352).
ccgagaccatatctctaaa

SEQ ID NO: 519742 - DNA, 19 bp, Mus musculus
  siRNA target sequence for Opa1 (NM_133752.1,1340-1358).
ccatatctctaaatgtcaa

SEQ ID NO: 519743 - DNA, 19 bp, Mus musculus
  siRNA target sequence for Opa1 (NM_133752.1,1424-1442).
gcatggctcccgacacaaa

SEQ ID NO: 519744 - DNA, 19 bp, Mus musculus
  siRNA target sequence for Opa1 (NM_133752.1,1429-1447).
gctcccgacacaaaggaaa

SEQ ID NO: 519745 - DNA, 19 bp, Mus musculus
  siRNA target sequence for Opa1 (NM_133752.1,1432-1450).
cccgacacaaaggaaacta

SEQ ID NO: 519746 - DNA, 19 bp, Mus musculus
  siRNA target sequence for Opa1 (NM_133752.1,1433-1451).
ccgacacaaaggaaactat

SEQ ID NO: 519747 - DNA, 19 bp, Mus musculus
  siRNA target sequence for Opa1 (NM_133752.1,1434-1452).
cgacacaaaggaaactatt

SEQ ID NO: 519748 - DNA, 19 bp, Mus musculus
  siRNA target sequence for Opa1 (NM_133752.1,1444-1462).
gaaactattttcagtatca

SEQ ID NO: 519749 - DNA, 19 bp, Mus musculus
  siRNA target sequence for Opa1 (NM_133752.1,1457-1475).
gtatcagcaaagcttacat

SEQ ID NO: 519750 - DNA, 19 bp, Mus musculus
  siRNA target sequence for Opa1 (NM_133752.1,1469-1487).
cttacatgcagaatcctaa

SEQ ID NO: 519751 - DNA, 19 bp, Mus musculus
  siRNA target sequence for Opa1 (NM_133752.1,1525-1543).
gctgagcgcagtattgtta

SEQ ID NO: 519752 - DNA, 19 bp, Mus musculus
  siRNA target sequence for Opa1 (NM_133752.1,1548-1566).
cttggtcagtcaaatggat

SEQ ID NO: 519753 - DNA, 19 bp, Mus musculus
  siRNA target sequence for Opa1 (NM_133752.1,1574-1592).
gaagaagaaccatatttgt

SEQ ID NO: 519754 - DNA, 19 bp, Mus musculus
  siRNA target sequence for Opa1 (NM_133752.1,1603-1621).
gtagacctggcagaaaaaa

SEQ ID NO: 519755 - DNA, 19 bp, Mus musculus
  siRNA target sequence for Opa1 (NM_133752.1,1634-1652).
caagcaggatacaacagat

SEQ ID NO: 519756 - DNA, 19 bp, Mus musculus
  siRNA target sequence for Opa1 (NM_133752.1,1638-1656).
caggatacaacagataatt

SEQ ID NO: 519757 - DNA, 19 bp, Mus musculus
  siRNA target sequence for Opa1 (NM_133752.1,1640-1658).
ggatacaacagataattga

SEQ ID NO: 519758 - DNA, 19 bp, Mus musculus
  siRNA target sequence for Opa1 (NM_133752.1,1641-1659).
gatacaacagataattgaa

SEQ ID NO: 519759 - DNA, 19 bp, Mus musculus
  siRNA target sequence for Opa1 (NM_133752.1,1661-1679).
gcaagctcttcccaatgaa

SEQ ID NO: 519760 - DNA, 19 bp, Mus musculus
  siRNA target sequence for Opa1 (NM_133752.1,1662-1680).
caagctcttcccaatgaaa

SEQ ID NO: 519761 - DNA, 19 bp, Mus musculus
  siRNA target sequence for Opa1 (NM_133752.1,1783-1801).
ctaaagacaagcatgctaa

SEQ ID NO: 519762 - DNA, 19 bp, Mus musculus
  siRNA target sequence for Opa1 (NM_133752.1,1809-1827).
ccaggtcaccacgagaaat

SEQ ID NO: 519763 - DNA, 19 bp, Mus musculus
  siRNA target sequence for Opa1 (NM_133752.1,1813-1831).
gtcaccacgagaaatctca

SEQ ID NO: 519764 - DNA, 19 bp, Mus musculus
  siRNA target sequence for Opa1 (NM_133752.1,1863-1881).
ggttcgagagtcagttgaa

SEQ ID NO: 519765 - DNA, 19 bp, Mus musculus
  siRNA target sequence for Opa1 (NM_133752.1,1868-1886).
gagagtcagttgaacaaca

SEQ ID NO: 519766 - DNA, 19 bp, Mus musculus
  siRNA target sequence for Opa1 (NM_133752.1,1925-1943).
cggaatggaagaataacta

SEQ ID NO: 519767 - DNA, 19 bp, Mus musculus
  siRNA target sequence for Opa1 (NM_133752.1,2073-2091).
ggaacgagtgtcaacacat

SEQ ID NO: 519768 - DNA, 19 bp, Mus musculus
  siRNA target sequence for Opa1 (NM_133752.1,2126-2144).
ccatgaattcgggaacatt

SEQ ID NO: 519769 - DNA, 19 bp, Mus musculus
  siRNA target sequence for Opa1 (NM_133752.1,2127-2145).
catgaattcgggaacattt

SEQ ID NO: 519770 - DNA, 19 bp, Mus musculus
  siRNA target sequence for Opa1 (NM_133752.1,2158-2176).
gacatcaagcttaaacagt

SEQ ID NO: 519771 - DNA, 19 bp, Mus musculus
  siRNA target sequence for Opa1 (NM_133752.1,2271-2289).
ggaacacgacgacatattt

SEQ ID NO: 519772 - DNA, 19 bp, Mus musculus
  siRNA target sequence for Opa1 (NM_133752.1,2355-2373).
ggatagcttgagggttatt

SEQ ID NO: 519773 - DNA, 19 bp, Mus musculus
  siRNA target sequence for Opa1 (NM_133752.1,2388-2406).
ggaagaccggtccatatca

SEQ ID NO: 519774 - DNA, 19 bp, Mus musculus
  siRNA target sequence for Opa1 (NM_133752.1,2392-2410).
gaccggtccatatcagata

SEQ ID NO: 519775 - DNA, 19 bp, Mus musculus
  siRNA target sequence for Opa1 (NM_133752.1,2396-2414).
ggtccatatcagataagca

SEQ ID NO: 519776 - DNA, 19 bp, Mus musculus
  siRNA target sequence for Opa1 (NM_133752.1,2420-2438).
gggatgcagccatttactt

SEQ ID NO: 519777 - DNA, 19 bp, Mus musculus
  siRNA target sequence for Opa1 (NM_133752.1,2455-2473).
caaggtcgtctcaaggata

SEQ ID NO: 519778 - DNA, 19 bp, Mus musculus
  siRNA target sequence for Opa1 (NM_133752.1,2462-2480).
gtctcaaggatactgaaaa

SEQ ID NO: 519779 - DNA, 19 bp, Mus musculus
  siRNA target sequence for Opa1 (NM_133752.1,2520-2538).
gtggatgtactggaagaat

SEQ ID NO: 519780 - DNA, 19 bp, Mus musculus
  siRNA target sequence for Opa1 (NM_133752.1,2555-2573).
gtgttcacaacgaaaccaa

SEQ ID NO: 519781 - DNA, 19 bp, Mus musculus
  siRNA target sequence for Opa1 (NM_133752.1,2589-2607).
gatgctgaaggttaatgat

SEQ ID NO: 519782 - DNA, 19 bp, Mus musculus
  siRNA target sequence for Opa1 (NM_133752.1,2626-2644).
gcaagtgatgagattacca

SEQ ID NO: 519783 - DNA, 19 bp, Mus musculus
  siRNA target sequence for Opa1 (NM_133752.1,2680-2698).
gtcgatccaagcttgatta

SEQ ID NO: 519784 - DNA, 19 bp, Mus musculus
  siRNA target sequence for Opa1 (NM_133752.1,2686-2704).
ccaagcttgattaaggata

SEQ ID NO: 519785 - DNA, 19 bp, Mus musculus
  siRNA target sequence for Opa1 (NM_133752.1,2761-2779).
ctttgtcgcagaggttttt

SEQ ID NO: 519786 - DNA, 19 bp, Mus musculus
  siRNA target sequence for Opa1 (NM_133752.1,2765-2783).
gtcgcagaggtttttatta

SEQ ID NO: 519787 - DNA, 19 bp, Mus musculus
  siRNA target sequence for Opa1 (NM_133752.1,2767-2785).
cgcagaggtttttattact

SEQ ID NO: 519788 - DNA, 19 bp, Mus musculus
  siRNA target sequence for Opa1 (NM_133752.1,2850-2868).
gcgcatgctcgctatcact

SEQ ID NO: 519789 - DNA, 19 bp, Mus musculus
  siRNA target sequence for Opa1 (NM_133752.1,2859-2877).
cgctatcactgccaataca

SEQ ID NO: 519790 - DNA, 19 bp, Mus musculus
  siRNA target sequence for Opa1 (NM_133752.1,2860-2878).
gctatcactgccaatacat

SEQ ID NO: 519791 - DNA, 19 bp, Mus musculus
  siRNA target sequence for Opa1 (NM_133752.1,2861-2879).
ctatcactgccaatacatt

SEQ ID NO: 519792 - DNA, 19 bp, Mus musculus
  siRNA target sequence for Opa1 (NM_133752.1,2909-2927).
ggcgactagagaaaaacgt

SEQ ID NO: 519793 - DNA, 19 bp, Mus musculus
  siRNA target sequence for Opa1 (NM_133752.1,2910-2928).
gcgactagagaaaaacgtt

SEQ ID NO: 519794 - DNA, 19 bp, Mus musculus
  siRNA target sequence for Opa1 (NM_133752.1,2911-2929).
cgactagagaaaaacgtta

SEQ ID NO: 519795 - DNA, 19 bp, Mus musculus
  siRNA target sequence for Opa1 (NM_133752.1,3015-3033).
caagaaagttagagaaatt

SEQ ID NO: 519796 - DNA, 19 bp, Mus musculus
  siRNA target sequence for Opa1 (NM_133752.1,3018-3036).
gaaagttagagaaattcaa

SEQ ID NO: 519797 - DNA, 19 bp, Mus musculus
  siRNA target sequence for Pck1 (NM_011044.1,253-271).
gccagccggagtatatcca

SEQ ID NO: 519798 - DNA, 19 bp, Mus musculus
  siRNA target sequence for Pck1 (NM_011044.1,390-408).
gatgtggccaggatcgaaa

SEQ ID NO: 519799 - DNA, 19 bp, Mus musculus
  siRNA target sequence for Pck1 (NM_011044.1,542-560).
gaaaggccgcaccatgtat

SEQ ID NO: 519800 - DNA, 19 bp, Mus musculus
  siRNA target sequence for Pck1 (NM_011044.1,546-564).
ggccgcaccatgtatgtca

SEQ ID NO: 519801 - DNA, 19 bp, Mus musculus
  siRNA target sequence for Pck1 (NM_011044.1,547-565).
gccgcaccatgtatgtcat

SEQ ID NO: 519802 - DNA, 19 bp, Mus musculus
  siRNA target sequence for Pck1 (NM_011044.1,590-608).
ctcgccgctggccaagatt

SEQ ID NO: 519803 - DNA, 19 bp, Mus musculus
  siRNA target sequence for Pck1 (NM_011044.1,594-612).
ccgctggccaagattggta

SEQ ID NO: 519804 - DNA, 19 bp, Mus musculus
  siRNA target sequence for Pck1 (NM_011044.1,595-613).
cgctggccaagattggtat

SEQ ID NO: 519805 - DNA, 19 bp, Mus musculus
  siRNA target sequence for Pck1 (NM_011044.1,599-617).
ggccaagattggtattgaa

SEQ ID NO: 519806 - DNA, 19 bp, Mus musculus
  siRNA target sequence for Pck1 (NM_011044.1,661-679).
ctcggatgggcatatctgt

SEQ ID NO: 519807 - DNA, 19 bp, Mus musculus
  siRNA target sequence for Pck1 (NM_011044.1,819-837).
gagatcatctcctttggaa

SEQ ID NO: 519808 - DNA, 19 bp, Mus musculus
  siRNA target sequence for Pck1 (NM_011044.1,916-934).
ggtggctggcggagcatat

SEQ ID NO: 519809 - DNA, 19 bp, Mus musculus
  siRNA target sequence for Pck1 (NM_011044.1,1045-1063).
ggtggaaggtcgaatgtgt

SEQ ID NO: 519810 - DNA, 19 bp, Mus musculus
  siRNA target sequence for Pck1 (NM_011044.1,1102-1120).
gcaacttaagggctatcaa

SEQ ID NO: 519811 - DNA, 19 bp, Mus musculus
  siRNA target sequence for Pck1 (NM_011044.1,1111-1129).
gggctatcaacccagaaaa

SEQ ID NO: 519812 - DNA, 19 bp, Mus musculus
  siRNA target sequence for Pck1 (NM_011044.1,1154-1172).
cacctcagtgaagacaaat

SEQ ID NO: 519813 - DNA, 19 bp, Mus musculus
  siRNA target sequence for Pck1 (NM_011044.1,1228-1246).
ctagcgatgggggtgttta

SEQ ID NO: 519814 - DNA, 19 bp, Mus musculus
  siRNA target sequence for Pck1 (NM_011044.1,1341-1359).
catcccaactcgagattct

SEQ ID NO: 519815 - DNA, 19 bp, Mus musculus
  siRNA target sequence for Pck1 (NM_011044.1,1370-1388).
cagccagtgccccattatt

SEQ ID NO: 519816 - DNA, 19 bp, Mus musculus
  siRNA target sequence for Pck1 (NM_011044.1,1688-1706).
gttccggaaggacaaagat

SEQ ID NO: 519817 - DNA, 19 bp, Mus musculus
  siRNA target sequence for Pck1 (NM_011044.1,1866-1884).
gagctgtttgggatctcta

SEQ ID NO: 519818 - DNA, 19 bp, Mus musculus
  siRNA target sequence for Pumag (NM_030701.1,61-79).
gagcaagtcagaccatttt

SEQ ID NO: 519819 - DNA, 19 bp, Mus musculus
  siRNA target sequence for Pumag (NM_030701.1,64-82).
caagtcagaccattttcta

SEQ ID NO: 519820 - DNA, 19 bp, Mus musculus
  siRNA target sequence for Pumag (NM_030701.1,83-101).
gtgataaacggcaagaact

SEQ ID NO: 519821 - DNA, 19 bp, Mus musculus
  siRNA target sequence for Pumag (NM_030701.1,105-123).
gtgtgttccgagatgaaaa

SEQ ID NO: 519822 - DNA, 19 bp, Mus musculus
  siRNA target sequence for Pumag (NM_030701.1,185-203).
ggccttgccttgtggattt

SEQ ID NO: 519823 - DNA, 19 bp, Mus musculus
  siRNA target sequence for Pumag (NM_030701.1,186-204).
gccttgccttgtggatttt

SEQ ID NO: 519824 - DNA, 19 bp, Mus musculus
  siRNA target sequence for Pumag (NM_030701.1,215-233).
ctcaagtcctggaaatcca

SEQ ID NO: 519825 - DNA, 19 bp, Mus musculus
  siRNA target sequence for Pumag (NM_030701.1,234-252).
gccggattttcttgttcaa

SEQ ID NO: 519826 - DNA, 19 bp, Mus musculus
  siRNA target sequence for Pumag (NM_030701.1,236-254).
cggattttcttgttcaact

SEQ ID NO: 519827 - DNA, 19 bp, Mus musculus
  siRNA target sequence for Pumag (NM_030701.1,292-310).
gttcctgacggacaactat

SEQ ID NO: 519828 - DNA, 19 bp, Mus musculus
  siRNA target sequence for Pumag (NM_030701.1,300-318).
cggacaactatgtccataa

SEQ ID NO: 519829 - DNA, 19 bp, Mus musculus
  siRNA target sequence for Pumag (NM_030701.1,302-320).
gacaactatgtccataact

SEQ ID NO: 519830 - DNA, 19 bp, Mus musculus
  siRNA target sequence for Pumag (NM_030701.1,380-398).
cgacagggcagcatcatct

SEQ ID NO: 519831 - DNA, 19 bp, Mus musculus
  siRNA target sequence for Pumag (NM_030701.1,381-399).
gacagggcagcatcatctt

SEQ ID NO: 519832 - DNA, 19 bp, Mus musculus
  siRNA target sequence for Pumag (NM_030701.1,443-461).
ccacaccacttcttgaaca

SEQ ID NO: 519833 - DNA, 19 bp, Mus musculus
  siRNA target sequence for Pumag (NM_030701.1,444-462).
cacaccacttcttgaacaa

SEQ ID NO: 519834 - DNA, 19 bp, Mus musculus
  siRNA target sequence for Pumag (NM_030701.1,449-467).
cacttcttgaacaagatct

SEQ ID NO: 519835 - DNA, 19 bp, Mus musculus
  siRNA target sequence for Pumag (NM_030701.1,527-545).
gtccacctcctctatacaa

SEQ ID NO: 519836 - DNA, 19 bp, Mus musculus
  siRNA target sequence for Pumag (NM_030701.1,582-600).
gcagcttcagcatctgtta

SEQ ID NO: 519837 - DNA, 19 bp, Mus musculus
  siRNA target sequence for Pumag (NM_030701.1,757-775).
ggctattgtattcatcatt

SEQ ID NO: 519838 - DNA, 19 bp, Mus musculus
  siRNA target sequence for Pumag (NM_030701.1,797-815).
gtgcgcatccgcatcttct

SEQ ID NO: 519839 - DNA, 19 bp, Mus musculus
  siRNA target sequence for Pumag (NM_030701.1,816-834).
ggcttctctacaaatataa

SEQ ID NO: 519840 - DNA, 19 bp, Mus musculus
  siRNA target sequence for Pumag (NM_030701.1,839-857).
cgcaactgtgacatctact

SEQ ID NO: 519841 - DNA, 19 bp, Mus musculus
  siRNA target sequence for Pumag (NM_030701.1,882-900).
ccacccttagctttaccta

SEQ ID NO: 519842 - DNA, 19 bp, Mus musculus
  siRNA target sequence for Rab10 (NM_016676.2,536-554).
cgtacgacctgcttttcaa

SEQ ID NO: 519843 - DNA, 19 bp, Mus musculus
  siRNA target sequence for Rab10 (NM_016676.2,585-603).
caagacctgcgtccttttt

SEQ ID NO: 519844 - DNA, 19 bp, Mus musculus
  siRNA target sequence for Rab10 (NM_016676.2,588-606).
gacctgcgtcctttttcgt

SEQ ID NO: 519845 - DNA, 19 bp, Mus musculus
  siRNA target sequence for Rab10 (NM_016676.2,590-608).
cctgcgtcctttttcgttt

SEQ ID NO: 519846 - DNA, 19 bp, Mus musculus
  siRNA target sequence for Rab10 (NM_016676.2,649-667).
ggaatagactttaagatca

SEQ ID NO: 519847 - DNA, 19 bp, Mus musculus
  siRNA target sequence for Rab10 (NM_016676.2,721-739).
ggccaggagcgatttcaca

SEQ ID NO: 519848 - DNA, 19 bp, Mus musculus
  siRNA target sequence for Rab10 (NM_016676.2,730-748).
cgatttcacaccatcacaa

SEQ ID NO: 519849 - DNA, 19 bp, Mus musculus
  siRNA target sequence for Rab10 (NM_016676.2,773-791).
gcatcatgctagtgtatga

SEQ ID NO: 519850 - DNA, 19 bp, Mus musculus
  siRNA target sequence for Rab10 (NM_016676.2,900-918).
ggacgacaagagagttgta

SEQ ID NO: 519851 - DNA, 19 bp, Mus musculus
  siRNA target sequence for Rab10 (NM_016676.2,943-961).
gcaagggagcatggtatta

SEQ ID NO: 519852 - DNA, 19 bp, Mus musculus
  siRNA target sequence for Rab10 (NM_016676.2,970-988).
gagactagtgcaaaagcaa

SEQ ID NO: 519853 - DNA, 19 bp, Mus musculus
  siRNA target sequence for Rab10 (NM_016676.2,972-990).
gactagtgcaaaagcaaat

SEQ ID NO: 519854 - DNA, 19 bp, Mus musculus
  siRNA target sequence for Rab10 (NM_016676.2,974-992).
ctagtgcaaaagcaaatat

SEQ ID NO: 519855 - DNA, 19 bp, Mus musculus
  siRNA target sequence for Rab10 (NM_016676.2,985-1003).
gcaaatataaacatcgaaa

SEQ ID NO: 519856 - DNA, 19 bp, Mus musculus
  siRNA target sequence for Rab10 (NM_016676.2,1005-1023).
ggcgttcctcacattagct

SEQ ID NO: 519857 - DNA, 19 bp, Mus musculus
  siRNA target sequence for Rab10 (NM_016676.2,1035-1053).
ccgaaagacccctgtaaaa

SEQ ID NO: 519858 - DNA, 19 bp, Mus musculus
  siRNA target sequence for Rab11a (NM_017382.2,153-171).
gagtacgactacctcttta

SEQ ID NO: 519859 - DNA, 19 bp, Mus musculus
  siRNA target sequence for Rab11a (NM_017382.2,155-173).
gtacgactacctctttaaa

SEQ ID NO: 519860 - DNA, 19 bp, Mus musculus
  siRNA target sequence for Rab11a (NM_017382.2,212-230).
cctcctgtctcgatttact

SEQ ID NO: 519861 - DNA, 19 bp, Mus musculus
  siRNA target sequence for Rab11a (NM_017382.2,218-236).
gtctcgatttactcgaaat

SEQ ID NO: 519862 - DNA, 19 bp, Mus musculus
  siRNA target sequence for Rab11a (NM_017382.2,222-240).
cgatttactcgaaatgagt

SEQ ID NO: 519863 - DNA, 19 bp, Mus musculus
  siRNA target sequence for Rab11a (NM_017382.2,223-241).
gatttactcgaaatgagtt

SEQ ID NO: 519864 - DNA, 19 bp, Mus musculus
  siRNA target sequence for Rab11a (NM_017382.2,229-247).
ctcgaaatgagtttaatct

SEQ ID NO: 519865 - DNA, 19 bp, Mus musculus
  siRNA target sequence for Rab11a (NM_017382.2,345-363).
gagcggtacagggctataa

SEQ ID NO: 519866 - DNA, 19 bp, Mus musculus
  siRNA target sequence for Rab11a (NM_017382.2,348-366).
cggtacagggctataacgt

SEQ ID NO: 519867 - DNA, 19 bp, Mus musculus
  siRNA target sequence for Rab11a (NM_017382.2,358-376).
ctataacgtctgcatacta

SEQ ID NO: 519868 - DNA, 19 bp, Mus musculus
  siRNA target sequence for Rab11a (NM_017382.2,382-400).
gagcagtaggtgccttatt

SEQ ID NO: 519869 - DNA, 19 bp, Mus musculus
  siRNA target sequence for Rab11a (NM_017382.2,385-403).
cagtaggtgccttattggt

SEQ ID NO: 519870 - DNA, 19 bp, Mus musculus
  siRNA target sequence for Rab11a (NM_017382.2,387-405).
gtaggtgccttattggttt

SEQ ID NO: 519871 - DNA, 19 bp, Mus musculus
  siRNA target sequence for Rab11a (NM_017382.2,393-411).
gccttattggtttatgaca

SEQ ID NO: 519872 - DNA, 19 bp, Mus musculus
  siRNA target sequence for Rab11a (NM_017382.2,394-412).
ccttattggtttatgacat

SEQ ID NO: 519873 - DNA, 19 bp, Mus musculus
  siRNA target sequence for Rab11a (NM_017382.2,500-518).
gggcaataagagtgattta

SEQ ID NO: 519874 - DNA, 19 bp, Mus musculus
  siRNA target sequence for Rab11a (NM_017382.2,503-521).
caataagagtgatttacgt

SEQ ID NO: 519875 - DNA, 19 bp, Mus musculus
  siRNA target sequence for Rab11a (NM_017382.2,569-587).
gaatggtttgtcattcatt

SEQ ID NO: 519876 - DNA, 19 bp, Mus musculus
  siRNA target sequence for Rab11a (NM_017382.2,595-613).
ctgctctagattctacaaa

SEQ ID NO: 519877 - DNA, 19 bp, Mus musculus
  siRNA target sequence for Rab11a (NM_017382.2,647-665).
gatataccgcattgtttct

SEQ ID NO: 519878 - DNA, 19 bp, Mus musculus
  siRNA target sequence for Rab11a (NM_017382.2,677-695).
gtcagacagacgtgaaaat

SEQ ID NO: 519879 - DNA, 19 bp, Mus musculus
  siRNA target sequence for Rab11a (NM_017382.2,709-727).
gcaacaatgtggttcctat

SEQ ID NO: 519880 - DNA, 19 bp, Mus musculus
  siRNA target sequence for Rab11b (NM_008997.1,470-488).
gaacaacttgtccttcatt

SEQ ID NO: 519881 - DNA, 19 bp, Mus musculus
  siRNA target sequence for Rab11b (NM_008997.1,500-518).
cttggattccaccaatgta

SEQ ID NO: 519882 - DNA, 19 bp, Mus musculus
  siRNA target sequence for Rab12 (NM_024448.1,66-84).
gtgcagggaaagtccttta

SEQ ID NO: 519883 - DNA, 19 bp, Mus musculus
  siRNA target sequence for Rab12 (NM_024448.1,68-86).
gcagggaaagtcctttaaa

SEQ ID NO: 519884 - DNA, 19 bp, Mus musculus
  siRNA target sequence for Rab12 (NM_024448.1,115-133).
gtaatgcagatgtgagtaa

SEQ ID NO: 519885 - DNA, 19 bp, Mus musculus
  siRNA target sequence for Rab12 (NM_024448.1,126-144).
gtgagtaaggagatcacaa

SEQ ID NO: 519886 - DNA, 19 bp, Mus musculus
  siRNA target sequence for Rab12 (NM_024448.1,130-148).
gtaaggagatcacaaagat

SEQ ID NO: 519887 - DNA, 19 bp, Mus musculus
  siRNA target sequence for Rab12 (NM_024448.1,174-192).
ggtgctgaacagtcacaaa

SEQ ID NO: 519888 - DNA, 19 bp, Mus musculus
  siRNA target sequence for Rab12 (NM_024448.1,175-193).
gtgctgaacagtcacaaaa

SEQ ID NO: 519889 - DNA, 19 bp, Mus musculus
  siRNA target sequence for Rab12 (NM_024448.1,251-269).
gggtgatgggactagagta

SEQ ID NO: 519890 - DNA, 19 bp, Mus musculus
  siRNA target sequence for Rab12 (NM_024448.1,279-297).
cctccagtatgcttcagaa

SEQ ID NO: 519891 - DNA, 19 bp, Mus musculus
  siRNA target sequence for Rab14 (NM_026697.2,56-74).
gcaactgcaccgtacaact

SEQ ID NO: 519892 - DNA, 19 bp, Mus musculus
  siRNA target sequence for Rab14 (NM_026697.2,57-75).
caactgcaccgtacaacta

SEQ ID NO: 519893 - DNA, 19 bp, Mus musculus
  siRNA target sequence for Rab14 (NM_026697.2,62-80).
gcaccgtacaactactctt

SEQ ID NO: 519894 - DNA, 19 bp, Mus musculus
  siRNA target sequence for Rab14 (NM_026697.2,63-81).
caccgtacaactactctta

SEQ ID NO: 519895 - DNA, 19 bp, Mus musculus
  siRNA target sequence for Rab14 (NM_026697.2,65-83).
ccgtacaactactcttaca

SEQ ID NO: 519896 - DNA, 19 bp, Mus musculus
  siRNA target sequence for Rab14 (NM_026697.2,66-84).
cgtacaactactcttacat

SEQ ID NO: 519897 - DNA, 19 bp, Mus musculus
  siRNA target sequence for Rab14 (NM_026697.2,70-88).
caactactcttacatcttt

SEQ ID NO: 519898 - DNA, 19 bp, Mus musculus
  siRNA target sequence for Rab14 (NM_026697.2,165-183).
ctgattgtcctcacacaat

SEQ ID NO: 519899 - DNA, 19 bp, Mus musculus
  siRNA target sequence for Rab14 (NM_026697.2,215-233).
gttagtggtcaaaaaatca

SEQ ID NO: 519900 - DNA, 19 bp, Mus musculus
  siRNA target sequence for Rab14 (NM_026697.2,219-237).
gtggtcaaaaaatcaaact

SEQ ID NO: 519901 - DNA, 19 bp, Mus musculus
  siRNA target sequence for Rab14 (NM_026697.2,277-295).
ggttacacggagctactat

SEQ ID NO: 519902 - DNA, 19 bp, Mus musculus
  siRNA target sequence for Rab14 (NM_026697.2,278-296).
gttacacggagctactata

SEQ ID NO: 519903 - DNA, 19 bp, Mus musculus
  siRNA target sequence for Rab14 (NM_026697.2,333-351).
ccagaagaagtacatataa

SEQ ID NO: 519904 - DNA, 19 bp, Mus musculus
  siRNA target sequence for Rab14 (NM_026697.2,390-408).
ccaatccaaacactgtaat

SEQ ID NO: 519905 - DNA, 19 bp, Mus musculus
  siRNA target sequence for Rab14 (NM_026697.2,400-418).
cactgtaataattctcata

SEQ ID NO: 519906 - DNA, 19 bp, Mus musculus
  siRNA target sequence for Rab14 (NM_026697.2,445-463).
gagagatgttacctatgaa

SEQ ID NO: 519907 - DNA, 19 bp, Mus musculus
  siRNA target sequence for Rab14 (NM_026697.2,447-465).
gagatgttacctatgaaga

SEQ ID NO: 519908 - DNA, 19 bp, Mus musculus
  siRNA target sequence for Rab14 (NM_026697.2,480-498).
ctgaggaaaacggcttatt

SEQ ID NO: 519909 - DNA, 19 bp, Mus musculus
  siRNA target sequence for Rab14 (NM_026697.2,482-500).
gaggaaaacggcttattgt

SEQ ID NO: 519910 - DNA, 19 bp, Mus musculus
  siRNA target sequence for Rab14 (NM_026697.2,503-521).
cttgaagcaagcgcaaaaa

SEQ ID NO: 519911 - DNA, 19 bp, Mus musculus
  siRNA target sequence for Rab14 (NM_026697.2,514-532).
cgcaaaaacgggagagaat

SEQ ID NO: 519912 - DNA, 19 bp, Mus musculus
  siRNA target sequence for Rab14 (NM_026697.2,557-575).
gccaagaaaatctatcaga

SEQ ID NO: 519913 - DNA, 19 bp, Mus musculus
  siRNA target sequence for Rab14 (NM_026697.2,609-627).
ccgagtctggtgtacaaca

SEQ ID NO: 519914 - DNA, 19 bp, Mus musculus
  siRNA target sequence for Rab14 (NM_026697.2,613-631).
gtctggtgtacaacacaaa

SEQ ID NO: 519915 - DNA, 19 bp, Mus musculus
  siRNA target sequence for Rab17 (NM_008998.2,546-564).
gtggggtgtgccttcttca

SEQ ID NO: 519916 - DNA, 19 bp, Mus musculus
  siRNA target sequence for Rab17 (NM_008998.2,589-607).
catctctgaagcttgagat

SEQ ID NO: 519917 - DNA, 19 bp, Mus musculus
  siRNA target sequence for Rab18 (NM_011225.1,19-37).
gctgaccactctgaagata

SEQ ID NO: 519918 - DNA, 19 bp, Mus musculus
  siRNA target sequence for Rab18 (NM_011225.1,108-126).
cagaacttgcagcaacaat

SEQ ID NO: 519919 - DNA, 19 bp, Mus musculus
  siRNA target sequence for Rab18 (NM_011225.1,120-138).
caacaataggtgttgactt

SEQ ID NO: 519920 - DNA, 19 bp, Mus musculus
  siRNA target sequence for Rab18 (NM_011225.1,136-154).
ctttaaggtgaaaacgatt

SEQ ID NO: 519921 - DNA, 19 bp, Mus musculus
  siRNA target sequence for Rab18 (NM_011225.1,219-237).
cattaactcccagctatta

SEQ ID NO: 519922 - DNA, 19 bp, Mus musculus
  siRNA target sequence for Rab18 (NM_011225.1,242-260).
ggtgcacagggagttatat

SEQ ID NO: 519923 - DNA, 19 bp, Mus musculus
  siRNA target sequence for Rab18 (NM_011225.1,243-261).
gtgcacagggagttatatt

SEQ ID NO: 519924 - DNA, 19 bp, Mus musculus
  siRNA target sequence for Rab18 (NM_011225.1,248-266).
cagggagttatattagtct

SEQ ID NO: 519925 - DNA, 19 bp, Mus musculus
  siRNA target sequence for Rab18 (NM_011225.1,252-270).
gagttatattagtctatga

SEQ ID NO: 519926 - DNA, 19 bp, Mus musculus
  siRNA target sequence for Rab18 (NM_011225.1,263-281).
gtctatgatgtcacaagaa

SEQ ID NO: 519927 - DNA, 19 bp, Mus musculus
  siRNA target sequence for Rab18 (NM_011225.1,282-300).
gagacacctttgttaaact

SEQ ID NO: 519928 - DNA, 19 bp, Mus musculus
  siRNA target sequence for Rab18 (NM_011225.1,302-320).
gataactggttaaatgaat

SEQ ID NO: 519929 - DNA, 19 bp, Mus musculus
  siRNA target sequence for Rab18 (NM_011225.1,307-325).
ctggttaaatgaattggaa

SEQ ID NO: 519930 - DNA, 19 bp, Mus musculus
  siRNA target sequence for Rab18 (NM_011225.1,327-345).
catactgtacaagaaatga

SEQ ID NO: 519931 - DNA, 19 bp, Mus musculus
  siRNA target sequence for Rab18 (NM_011225.1,333-351).
gtacaagaaatgacatagt

SEQ ID NO: 519932 - DNA, 19 bp, Mus musculus
  siRNA target sequence for Rab18 (NM_011225.1,339-357).
gaaatgacatagtaaacat

SEQ ID NO: 519933 - DNA, 19 bp, Mus musculus
  siRNA target sequence for Rab18 (NM_011225.1,388-406).
ccgtgaagtcgatagaaat

SEQ ID NO: 519934 - DNA, 19 bp, Mus musculus
  siRNA target sequence for Rab18 (NM_011225.1,390-408).
gtgaagtcgatagaaatga

SEQ ID NO: 519935 - DNA, 19 bp, Mus musculus
  siRNA target sequence for Rab18 (NM_011225.1,423-441).
cacgcaagcattctatgtt

SEQ ID NO: 519936 - DNA, 19 bp, Mus musculus
  siRNA target sequence for Rab18 (NM_011225.1,426-444).
gcaagcattctatgttgtt

SEQ ID NO: 519937 - DNA, 19 bp, Mus musculus
  siRNA target sequence for Rab18 (NM_011225.1,430-448).
gcattctatgttgttcata

SEQ ID NO: 519938 - DNA, 19 bp, Mus musculus
  siRNA target sequence for Rab19 (NM_011226.1,128-146).
gagaatgtggactatttgt

SEQ ID NO: 519939 - DNA, 19 bp, Mus musculus
  siRNA target sequence for Rab19 (NM_011226.1,360-378).
gtgcccacgcagctatcat

SEQ ID NO: 519940 - DNA, 19 bp, Mus musculus
  siRNA target sequence for Rab19 (NM_011226.1,369-387).
cagctatcatcgcttatga

SEQ ID NO: 519941 - DNA, 19 bp, Mus musculus
  siRNA target sequence for Rab19 (NM_011226.1,372-390).
ctatcatcgcttatgatct

SEQ ID NO: 519942 - DNA, 19 bp, Mus musculus
  siRNA target sequence for Rab19 (NM_011226.1,395-413).
cggcggtccacattcgaat

SEQ ID NO: 519943 - DNA, 19 bp, Mus musculus
  siRNA target sequence for Rab19 (NM_011226.1,399-417).
ggtccacattcgaatctgt

SEQ ID NO: 519944 - DNA, 19 bp, Mus musculus
  siRNA target sequence for Rab19 (NM_011226.1,426-444).
ggatccacgagatagaaaa

SEQ ID NO: 519945 - DNA, 19 bp, Mus musculus
  siRNA target sequence for Rab19 (NM_011226.1,430-448).
ccacgagatagaaaaatat

SEQ ID NO: 519946 - DNA, 19 bp, Mus musculus
  siRNA target sequence for Rab19 (NM_011226.1,591-609).
ggaacatagatgaagtctt

SEQ ID NO: 519947 - DNA, 19 bp, Mus musculus
  siRNA target sequence for Rab19 (NM_011226.1,614-632).
ctcatggcgaaggagttaa

SEQ ID NO: 519948 - DNA, 19 bp, Mus musculus
  siRNA target sequence for Rab19 (NM_011226.1,616-634).
catggcgaaggagttaatt

SEQ ID NO: 519949 - DNA, 19 bp, Mus musculus
  siRNA target sequence for Rab19 (NM_011226.1,688-706).
ggattccagcccagttctt

SEQ ID NO: 519950 - DNA, 19 bp, Mus musculus
  siRNA target sequence for Rab21 (NM_024454.1,483-501).
cacgcactgggcccaattt

SEQ ID NO: 519951 - DNA, 19 bp, Mus musculus
  siRNA target sequence for Rab21 (NM_024454.1,510-528).
gattcgaacggagctattt

SEQ ID NO: 519952 - DNA, 19 bp, Mus musculus
  siRNA target sequence for Rab21 (NM_024454.1,514-532).
cgaacggagctattttagt

SEQ ID NO: 519953 - DNA, 19 bp, Mus musculus
  siRNA target sequence for Rab21 (NM_024454.1,577-595).
gggtcaaagaattacgaaa

SEQ ID NO: 519954 - DNA, 19 bp, Mus musculus
  siRNA target sequence for Rab21 (NM_024454.1,578-596).
ggtcaaagaattacgaaaa

SEQ ID NO: 519955 - DNA, 19 bp, Mus musculus
  siRNA target sequence for Rab21 (NM_024454.1,579-597).
gtcaaagaattacgaaaaa

SEQ ID NO: 519956 - DNA, 19 bp, Mus musculus
  siRNA target sequence for Rab21 (NM_024454.1,656-674).
gaggcacgtctctattcaa

SEQ ID NO: 519957 - DNA, 19 bp, Mus musculus
  siRNA target sequence for Rab21 (NM_024454.1,658-676).
ggcacgtctctattcaaga

SEQ ID NO: 519958 - DNA, 19 bp, Mus musculus
  siRNA target sequence for Rab21 (NM_024454.1,705-723).
gccaagcattaccatactt

SEQ ID NO: 519959 - DNA, 19 bp, Mus musculus
  siRNA target sequence for Rab21 (NM_024454.1,717-735).
catacttccgctaaacaga

SEQ ID NO: 519960 - DNA, 19 bp, Mus musculus
  siRNA target sequence for Rab21 (NM_024454.1,753-771).
ctctttctcgacctttgta

SEQ ID NO: 519961 - DNA, 19 bp, Mus musculus
  siRNA target sequence for Rab21 (NM_024454.1,762-780).
gacctttgtaaaagaatga

SEQ ID NO: 519962 - DNA, 19 bp, Mus musculus
  siRNA target sequence for Rab21 (NM_024454.1,794-812).
ggtggatgagagagcaaaa

SEQ ID NO: 519963 - DNA, 19 bp, Mus musculus
  siRNA target sequence for Rab23 (NM_008999.2,498-516).
gaaagtcgagcatgattca

SEQ ID NO: 519964 - DNA, 19 bp, Mus musculus
  siRNA target sequence for Rab23 (NM_008999.2,530-548).
ggcattttcacaaaagact

SEQ ID NO: 519965 - DNA, 19 bp, Mus musculus
  siRNA target sequence for Rab23 (NM_008999.2,558-576).
ccatcggcgtagacttttt

SEQ ID NO: 519966 - DNA, 19 bp, Mus musculus
  siRNA target sequence for Rab23 (NM_008999.2,571-589).
ctttttggagcgacagatt

SEQ ID NO: 519967 - DNA, 19 bp, Mus musculus
  siRNA target sequence for Rab23 (NM_008999.2,582-600).
gacagattcaggttaacga

SEQ ID NO: 519968 - DNA, 19 bp, Mus musculus
  siRNA target sequence for Rab23 (NM_008999.2,593-611).
gttaacgatgaagatgtaa

SEQ ID NO: 519969 - DNA, 19 bp, Mus musculus
  siRNA target sequence for Rab23 (NM_008999.2,602-620).
gaagatgtaaggctaatgt

SEQ ID NO: 519970 - DNA, 19 bp, Mus musculus
  siRNA target sequence for Rab23 (NM_008999.2,605-623).
gatgtaaggctaatgttat

SEQ ID NO: 519971 - DNA, 19 bp, Mus musculus
  siRNA target sequence for Rab23 (NM_008999.2,780-798).
caaccgcactggtgcaaaa

SEQ ID NO: 519972 - DNA, 19 bp, Mus musculus
  siRNA target sequence for Rab23 (NM_008999.2,783-801).
ccgcactggtgcaaaacaa

SEQ ID NO: 519973 - DNA, 19 bp, Mus musculus
  siRNA target sequence for Rab23 (NM_008999.2,805-823).
cgatctgctggatgattca

SEQ ID NO: 519974 - DNA, 19 bp, Mus musculus
  siRNA target sequence for Rab23 (NM_008999.2,814-832).
ggatgattcatgcatcaaa

SEQ ID NO: 519975 - DNA, 19 bp, Mus musculus
  siRNA target sequence for Rab23 (NM_008999.2,904-922).
caacgtgagtgaagttttt

SEQ ID NO: 519976 - DNA, 19 bp, Mus musculus
  siRNA target sequence for Rab23 (NM_008999.2,989-1007).
cactcaagtagtaacaaga

SEQ ID NO: 519977 - DNA, 19 bp, Mus musculus
  siRNA target sequence for Rab23 (NM_008999.2,991-1009).
ctcaagtagtaacaagatt

SEQ ID NO: 519978 - DNA, 19 bp, Mus musculus
  siRNA target sequence for Rab23 (NM_008999.2,1039-1057).
cttgggccagaattcaagt

SEQ ID NO: 519979 - DNA, 19 bp, Mus musculus
  siRNA target sequence for Rab23 (NM_008999.2,1070-1088).
ggcgatgtcatcaacctta

SEQ ID NO: 519980 - DNA, 19 bp, Mus musculus
  siRNA target sequence for Rab23 (NM_008999.2,1084-1102).
ccttagacctaacaaacaa

SEQ ID NO: 519981 - DNA, 19 bp, Mus musculus
  siRNA target sequence for Rab24 (NM_009000.2,288-306).
ggcagcgcgtggacgttaa

SEQ ID NO: 519982 - DNA, 19 bp, Mus musculus
  siRNA target sequence for Rab24 (NM_009000.2,342-360).
cgagcctggtggaacgata

SEQ ID NO: 519983 - DNA, 19 bp, Mus musculus
  siRNA target sequence for Rab24 (NM_009000.2,508-526).
ctattaccggggtgctaaa

SEQ ID NO: 519984 - DNA, 19 bp, Mus musculus
  siRNA target sequence for Rab24 (NM_009000.2,517-535).
gggtgctaaagctgcaatt

SEQ ID NO: 519985 - DNA, 19 bp, Mus musculus
  siRNA target sequence for Rab24 (NM_009000.2,519-537).
gtgctaaagctgcaattgt

SEQ ID NO: 519986 - DNA, 19 bp, Mus musculus
  siRNA target sequence for Rab24 (NM_009000.2,608-626).
gaagagggctgtcaaatct

SEQ ID NO: 519987 - DNA, 19 bp, Mus musculus
  siRNA target sequence for Rab24 (NM_009000.2,698-716).
caggactatgccgataata

SEQ ID NO: 519988 - DNA, 19 bp, Mus musculus
  siRNA target sequence for Rab24 (NM_009000.2,701-719).
gactatgccgataatatca

SEQ ID NO: 519989 - DNA, 19 bp, Mus musculus
  siRNA target sequence for Rab24 (NM_009000.2,703-721).
ctatgccgataatatcaaa

SEQ ID NO: 519990 - DNA, 19 bp, Mus musculus
  siRNA target sequence for Rab24 (NM_009000.2,830-848).
gacaaaggtgtggatttga

SEQ ID NO: 519991 - DNA, 19 bp, Mus musculus
  siRNA target sequence for Rab27a (NM_023635.2,174-192).
gtcggatggagattacgat

SEQ ID NO: 519992 - DNA, 19 bp, Mus musculus
  siRNA target sequence for Rab27a (NM_023635.2,400-418).
gggcaggagaggtttcgta

SEQ ID NO: 519993 - DNA, 19 bp, Mus musculus
  siRNA target sequence for Rab27a (NM_023635.2,405-423).
ggagaggtttcgtagctta

SEQ ID NO: 519994 - DNA, 19 bp, Mus musculus
  siRNA target sequence for Rab27a (NM_023635.2,419-437).
gcttaaccactgcattctt

SEQ ID NO: 519995 - DNA, 19 bp, Mus musculus
  siRNA target sequence for Rab27a (NM_023635.2,509-527).
ggataagccagctacagat

SEQ ID NO: 519996 - DNA, 19 bp, Mus musculus
  siRNA target sequence for Rab27a (NM_023635.2,558-576).
gctgtgtggaaataagagt

SEQ ID NO: 519997 - DNA, 19 bp, Mus musculus
  siRNA target sequence for Rab27a (NM_023635.2,633-651).
gtacggaatcccctatttt

SEQ ID NO: 519998 - DNA, 19 bp, Mus musculus
  siRNA target sequence for Rab27a (NM_023635.2,636-654).
cggaatcccctattttgaa

SEQ ID NO: 519999 - DNA, 19 bp, Mus musculus
  siRNA target sequence for Rab27a (NM_023635.2,661-679).
gctgccaacgggacaaaca

SEQ ID NO: 520000 - DNA, 19 bp, Mus musculus
  siRNA target sequence for Rab27a (NM_023635.2,662-680).
ctgccaacgggacaaacat

SEQ ID NO: 520001 - DNA, 19 bp, Mus musculus
  siRNA target sequence for Rab27a (NM_023635.2,664-682).
gccaacgggacaaacataa

SEQ ID NO: 520002 - DNA, 19 bp, Mus musculus
  siRNA target sequence for Rab27a (NM_023635.2,788-806).
ctgcggatcagctaagtga

SEQ ID NO: 520003 - DNA, 19 bp, Mus musculus
  siRNA target sequence for Rab27b (NM_030554.1,337-355).
caacatttctctatagata

SEQ ID NO: 520004 - DNA, 19 bp, Mus musculus
  siRNA target sequence for Rab27b (NM_030554.1,451-469).
cgtcaggaaaagcgtttaa

SEQ ID NO: 520005 - DNA, 19 bp, Mus musculus
  siRNA target sequence for Rab27b (NM_030554.1,454-472).
caggaaaagcgtttaaggt

SEQ ID NO: 520006 - DNA, 19 bp, Mus musculus
  siRNA target sequence for Rab27b (NM_030554.1,543-561).
gccatgggcttcttactga

SEQ ID NO: 520007 - DNA, 19 bp, Mus musculus
  siRNA target sequence for Rab27b (NM_030554.1,544-562).
ccatgggcttcttactgat

SEQ ID NO: 520008 - DNA, 19 bp, Mus musculus
  siRNA target sequence for Rab27b (NM_030554.1,577-595).
gtcaacagagcttcttgaa

SEQ ID NO: 520009 - DNA, 19 bp, Mus musculus
  siRNA target sequence for Rab27b (NM_030554.1,639-657).
gaaaacccagacatagtat

SEQ ID NO: 520010 - DNA, 19 bp, Mus musculus
  siRNA target sequence for Rab27b (NM_030554.1,644-662).
cccagacatagtattaatt

SEQ ID NO: 520011 - DNA, 19 bp, Mus musculus
  siRNA target sequence for Rab27b (NM_030554.1,715-733).
gggagctggctgaaaaata

SEQ ID NO: 520012 - DNA, 19 bp, Mus musculus
  siRNA target sequence for Rab27b (NM_030554.1,726-744).
gaaaaatatggcataccat

SEQ ID NO: 520013 - DNA, 19 bp, Mus musculus
  siRNA target sequence for Rab27b (NM_030554.1,758-776).
cgcagctacaggacagaat

SEQ ID NO: 520014 - DNA, 19 bp, Mus musculus
  siRNA target sequence for Rab27b (NM_030554.1,792-810).
gaaacgcttctggacttaa

SEQ ID NO: 520015 - DNA, 19 bp, Mus musculus
  siRNA target sequence for Rab27b (NM_030554.1,796-814).
cgcttctggacttaatcat

SEQ ID NO: 520016 - DNA, 19 bp, Mus musculus
  siRNA target sequence for Rab27b (NM_030554.1,801-819).
ctggacttaatcatgaaga

SEQ ID NO: 520017 - DNA, 19 bp, Mus musculus
  siRNA target sequence for Rab27b (NM_030554.1,848-866).
ggttccggacactgtcaat

SEQ ID NO: 520018 - DNA, 19 bp, Mus musculus
  siRNA target sequence for Rab33a (NM_011228.1,227-245).
gcagattcgcattttcaaa

SEQ ID NO: 520019 - DNA, 19 bp, Mus musculus
  siRNA target sequence for Rab33a (NM_011228.1,414-432).
caagaacgcttccgtaaaa

SEQ ID NO: 520020 - DNA, 19 bp, Mus musculus
  siRNA target sequence for Rab33a (NM_011228.1,417-435).
gaacgcttccgtaaaagca

SEQ ID NO: 520021 - DNA, 19 bp, Mus musculus
  siRNA target sequence for Rab33a (NM_011228.1,433-451).
gcatggttgagcattacta

SEQ ID NO: 520022 - DNA, 19 bp, Mus musculus
  siRNA target sequence for Rab33a (NM_011228.1,499-517).
cctccttcaccaacttaaa

SEQ ID NO: 520023 - DNA, 19 bp, Mus musculus
  siRNA target sequence for Rab33a (NM_011228.1,608-626).
ccaggtaccctccaactta

SEQ ID NO: 520024 - DNA, 19 bp, Mus musculus
  siRNA target sequence for Rab33a (NM_011228.1,619-637).
ccaacttagccctgaaatt

SEQ ID NO: 520025 - DNA, 19 bp, Mus musculus
  siRNA target sequence for Rab33a (NM_011228.1,646-664).
ctcataacatgctcttgtt

SEQ ID NO: 520026 - DNA, 19 bp, Mus musculus
  siRNA target sequence for Rab33a (NM_011228.1,721-739).
gcctggcttgccgacttaa

SEQ ID NO: 520027 - DNA, 19 bp, Mus musculus
  siRNA target sequence for Rab33a (NM_011228.1,742-760).
cccagaaatccctcttgta

SEQ ID NO: 520028 - DNA, 19 bp, Mus musculus
  siRNA target sequence for Rab33b (NM_016858.1,408-426).
cccgcatcttcaagatcat

SEQ ID NO: 520029 - DNA, 19 bp, Mus musculus
  siRNA target sequence for Rab33b (NM_016858.1,450-468).
gcaagacgtgcctgactta

SEQ ID NO: 520030 - DNA, 19 bp, Mus musculus
  siRNA target sequence for Rab33b (NM_016858.1,532-550).
gcgagccgtggatattgat

SEQ ID NO: 520031 - DNA, 19 bp, Mus musculus
  siRNA target sequence for Rab33b (NM_016858.1,548-566).
gatggagagcgcatcaaga

SEQ ID NO: 520032 - DNA, 19 bp, Mus musculus
  siRNA target sequence for Rab33b (NM_016858.1,609-627).
gcatggtccagcactacta

SEQ ID NO: 520033 - DNA, 19 bp, Mus musculus
  siRNA target sequence for Rab33b (NM_016858.1,638-656).
catgctgtcgtctttgtgt

SEQ ID NO: 520034 - DNA, 19 bp, Mus musculus
  siRNA target sequence for Rab33b (NM_016858.1,696-714).
cttggatagaggaatgcaa

SEQ ID NO: 520035 - DNA, 19 bp, Mus musculus
  siRNA target sequence for Rab33b (NM_016858.1,730-748).
gaacgacatacctcgaatt

SEQ ID NO: 520036 - DNA, 19 bp, Mus musculus
  siRNA target sequence for Rab33b (NM_016858.1,743-761).
cgaattctggtgggaaata

SEQ ID NO: 520037 - DNA, 19 bp, Mus musculus
  siRNA target sequence for Rab33b (NM_016858.1,838-856).
gtttgagacctctgctaaa

SEQ ID NO: 520038 - DNA, 19 bp, Mus musculus
  siRNA target sequence for Rab33b (NM_016858.1,851-869).
gctaaaaaccccaatgata

SEQ ID NO: 520039 - DNA, 19 bp, Mus musculus
  siRNA target sequence for Rab33b (NM_016858.1,852-870).
ctaaaaaccccaatgataa

SEQ ID NO: 520040 - DNA, 19 bp, Mus musculus
  siRNA target sequence for Rab33b (NM_016858.1,875-893).
cacgtagaagctatattca

SEQ ID NO: 520041 - DNA, 19 bp, Mus musculus
  siRNA target sequence for Rab33b (NM_016858.1,878-896).
gtagaagctatattcatga

SEQ ID NO: 520042 - DNA, 19 bp, Mus musculus
  siRNA target sequence for Rab33b (NM_016858.1,895-913).
gaccttagctcataagcta

SEQ ID NO: 520043 - DNA, 19 bp, Mus musculus
  siRNA target sequence for Rab33b (NM_016858.1,941-959).
cagctgcctgataacagaa

SEQ ID NO: 520044 - DNA, 19 bp, Mus musculus
  siRNA target sequence for Rab33b (NM_016858.1,943-961).
gctgcctgataacagaatt

SEQ ID NO: 520045 - DNA, 19 bp, Mus musculus
  siRNA target sequence for Rab33b (NM_016858.1,944-962).
ctgcctgataacagaatta

SEQ ID NO: 520046 - DNA, 19 bp, Mus musculus
  siRNA target sequence for Rab34 (NM_033475.2,639-657).
gcaccgtgggatttaagat

SEQ ID NO: 520047 - DNA, 19 bp, Mus musculus
  siRNA target sequence for Rab34 (NM_033475.2,644-662).
gtgggatttaagatatcca

SEQ ID NO: 520048 - DNA, 19 bp, Mus musculus
  siRNA target sequence for Rab34 (NM_033475.2,692-710).
gggaagacctgtctcatta

SEQ ID NO: 520049 - DNA, 19 bp, Mus musculus
  siRNA target sequence for Rab34 (NM_033475.2,694-712).
gaagacctgtctcattaat

SEQ ID NO: 520050 - DNA, 19 bp, Mus musculus
  siRNA target sequence for Rab34 (NM_033475.2,699-717).
cctgtctcattaataggtt

SEQ ID NO: 520051 - DNA, 19 bp, Mus musculus
  siRNA target sequence for Rab34 (NM_033475.2,720-738).
gcaaagacaccttcgataa

SEQ ID NO: 520052 - DNA, 19 bp, Mus musculus
  siRNA target sequence for Rab34 (NM_033475.2,800-818).
cccttcagtctccaacttt

SEQ ID NO: 520053 - DNA, 19 bp, Mus musculus
  siRNA target sequence for Rab34 (NM_033475.2,825-843).
cggctggtcaggaaaggtt

SEQ ID NO: 520054 - DNA, 19 bp, Mus musculus
  siRNA target sequence for Rab34 (NM_033475.2,830-848).
ggtcaggaaaggttcaagt

SEQ ID NO: 520055 - DNA, 19 bp, Mus musculus
  siRNA target sequence for Rab34 (NM_033475.2,872-890).
ggagctcaagccatcatca

SEQ ID NO: 520056 - DNA, 19 bp, Mus musculus
  siRNA target sequence for Rab34 (NM_033475.2,873-891).
gagctcaagccatcatcat

SEQ ID NO: 520057 - DNA, 19 bp, Mus musculus
  siRNA target sequence for Rab34 (NM_033475.2,876-894).
ctcaagccatcatcattgt

SEQ ID NO: 520058 - DNA, 19 bp, Mus musculus
  siRNA target sequence for Rab34 (NM_033475.2,878-896).
caagccatcatcattgtct

SEQ ID NO: 520059 - DNA, 19 bp, Mus musculus
  siRNA target sequence for Rab34 (NM_033475.2,1023-1041).
ctcagtattccctaatgga

SEQ ID NO: 520060 - DNA, 19 bp, Mus musculus
  siRNA target sequence for Rab34 (NM_033475.2,1134-1152).
gtgtggcagcactaacctt

SEQ ID NO: 520061 - DNA, 19 bp, Mus musculus
  siRNA target sequence for Rab3a (NM_009001.2,459-477).
caccaatgaggagtcattt

SEQ ID NO: 520062 - DNA, 19 bp, Mus musculus
  siRNA target sequence for Rab3a (NM_009001.2,642-660).
cgccaaggacaacattaat

SEQ ID NO: 520063 - DNA, 19 bp, Mus musculus
  siRNA target sequence for Rab3b (NM_023537.4,169-187).
gtaagactggaatcaaaga

SEQ ID NO: 520064 - DNA, 19 bp, Mus musculus
  siRNA target sequence for Rab3b (NM_023537.4,215-233).
gttcaaactgctcatcatt

SEQ ID NO: 520065 - DNA, 19 bp, Mus musculus
  siRNA target sequence for Rab3b (NM_023537.4,316-334).
gtatcgacttcaaagtgaa

SEQ ID NO: 520066 - DNA, 19 bp, Mus musculus
  siRNA target sequence for Rab3b (NM_023537.4,337-355).
cagtctaccgccatgagaa

SEQ ID NO: 520067 - DNA, 19 bp, Mus musculus
  siRNA target sequence for Rab3b (NM_023537.4,464-482).
caacgaggagtccttcaat

SEQ ID NO: 520068 - DNA, 19 bp, Mus musculus
  siRNA target sequence for Rab3b (NM_023537.4,537-555).
gtcattctcgtgggaaata

SEQ ID NO: 520069 - DNA, 19 bp, Mus musculus
  siRNA target sequence for Rab3c (NM_023852.2,129-147).
ccaggtttggtcagaaaga

SEQ ID NO: 520070 - DNA, 19 bp, Mus musculus
  siRNA target sequence for Rab3c (NM_023852.2,231-249).
gttatgccgacgattcctt

SEQ ID NO: 520071 - DNA, 19 bp, Mus musculus
  siRNA target sequence for Rab3c (NM_023852.2,267-285).
gcacggttggcatcgattt

SEQ ID NO: 520072 - DNA, 19 bp, Mus musculus
  siRNA target sequence for Rab3c (NM_023852.2,276-294).
gcatcgatttcaaagtaaa

SEQ ID NO: 520073 - DNA, 19 bp, Mus musculus
  siRNA target sequence for Rab3c (NM_023852.2,277-295).
catcgatttcaaagtaaaa

SEQ ID NO: 520074 - DNA, 19 bp, Mus musculus
  siRNA target sequence for Rab3c (NM_023852.2,435-453).
ccttcaacgctgtacaaga

SEQ ID NO: 520075 - DNA, 19 bp, Mus musculus
  siRNA target sequence for Rab3c (NM_023852.2,436-454).
cttcaacgctgtacaagat

SEQ ID NO: 520076 - DNA, 19 bp, Mus musculus
  siRNA target sequence for Rab3c (NM_023852.2,502-520).
cctggctggaaacaaatgt

SEQ ID NO: 520077 - DNA, 19 bp, Mus musculus
  siRNA target sequence for Rab3c (NM_023852.2,580-598).
cgggtttgagttttttgaa

SEQ ID NO: 520078 - DNA, 19 bp, Mus musculus
  siRNA target sequence for Rab3c (NM_023852.2,638-656).
gagcgcctcgtagatatca

SEQ ID NO: 520079 - DNA, 19 bp, Mus musculus
  siRNA target sequence for Rab3c (NM_023852.2,640-658).
gcgcctcgtagatatcatt

SEQ ID NO: 520080 - DNA, 19 bp, Mus musculus
  siRNA target sequence for Rab3c (NM_023852.2,641-659).
cgcctcgtagatatcattt

SEQ ID NO: 520081 - DNA, 19 bp, Mus musculus
  siRNA target sequence for Rab3c (NM_023852.2,643-661).
cctcgtagatatcatttgt

SEQ ID NO: 520082 - DNA, 19 bp, Mus musculus
  siRNA target sequence for Rab3d (NM_031874.3,273-291).
cgctgctgaccagaacttt

SEQ ID NO: 520083 - DNA, 19 bp, Mus musculus
  siRNA target sequence for Rab3d (NM_031874.3,422-440).
cggtctaccgacatgacaa

SEQ ID NO: 520084 - DNA, 19 bp, Mus musculus
  siRNA target sequence for Rab3d (NM_031874.3,583-601).
gctacgcagatcaaaacct

SEQ ID NO: 520085 - DNA, 19 bp, Mus musculus
  siRNA target sequence for Rab3d (NM_031874.3,584-602).
ctacgcagatcaaaaccta

SEQ ID NO: 520086 - DNA, 19 bp, Mus musculus
  siRNA target sequence for Rab3d (NM_031874.3,589-607).
cagatcaaaacctattcct

SEQ ID NO: 520087 - DNA, 19 bp, Mus musculus
  siRNA target sequence for Rab3d (NM_031874.3,686-704).
ggaggctcgccgatgatct

SEQ ID NO: 520088 - DNA, 19 bp, Mus musculus
  siRNA target sequence for Rab3d (NM_031874.3,687-705).
gaggctcgccgatgatctt

SEQ ID NO: 520089 - DNA, 19 bp, Mus musculus
  siRNA target sequence for Rab3d (NM_031874.3,693-711).
cgccgatgatcttggtttt

SEQ ID NO: 520090 - DNA, 19 bp, Mus musculus
  siRNA target sequence for Rab3d (NM_031874.3,695-713).
ccgatgatcttggttttga

SEQ ID NO: 520091 - DNA, 19 bp, Mus musculus
  siRNA target sequence for Rab40b (NM_139147.1,210-228).
ctcggggcaggggagattt

SEQ ID NO: 520092 - DNA, 19 bp, Mus musculus
  siRNA target sequence for Rab40b (NM_139147.1,214-232).
gggcaggggagattttgta

SEQ ID NO: 520093 - DNA, 19 bp, Mus musculus
  siRNA target sequence for Rab40b (NM_139147.1,219-237).
ggggagattttgtaccata

SEQ ID NO: 520094 - DNA, 19 bp, Mus musculus
  siRNA target sequence for Rab40b (NM_139147.1,266-284).
gtgtggtcctggtctatga

SEQ ID NO: 520095 - DNA, 19 bp, Mus musculus
  siRNA target sequence for Rab40b (NM_139147.1,268-286).
gtggtcctggtctatgaca

SEQ ID NO: 520096 - DNA, 19 bp, Mus musculus
  siRNA target sequence for Rab40b (NM_139147.1,303-321).
ctttgatggcattaatcga

SEQ ID NO: 520097 - DNA, 19 bp, Mus musculus
  siRNA target sequence for Rab40b (NM_139147.1,310-328).
ggcattaatcgatggatta

SEQ ID NO: 520098 - DNA, 19 bp, Mus musculus
  siRNA target sequence for Rab40b (NM_139147.1,474-492).
gtgcaacttcaacattaca

SEQ ID NO: 520099 - DNA, 19 bp, Mus musculus
  siRNA target sequence for Rab40b (NM_139147.1,639-657).
cctccctgtcgccttaaga

SEQ ID NO: 520100 - DNA, 19 bp, Mus musculus
  siRNA target sequence for Rab40b (NM_139147.1,640-658).
ctccctgtcgccttaagaa

SEQ ID NO: 520101 - DNA, 19 bp, Mus musculus
  siRNA target sequence for Rab40c (NM_139154.1,229-247).
cagcaacgggatagactat

SEQ ID NO: 520102 - DNA, 19 bp, Mus musculus
  siRNA target sequence for Rab40c (NM_139154.1,235-253).
cgggatagactataagact

SEQ ID NO: 520103 - DNA, 19 bp, Mus musculus
  siRNA target sequence for Rab40c (NM_139154.1,308-326).
ggccagggaaggttctgta

SEQ ID NO: 520104 - DNA, 19 bp, Mus musculus
  siRNA target sequence for Rab40c (NM_139154.1,349-367).
gggtgcacagggaatcctt

SEQ ID NO: 520105 - DNA, 19 bp, Mus musculus
  siRNA target sequence for Rab40c (NM_139154.1,521-539).
gcctatgcagagaagaact

SEQ ID NO: 520106 - DNA, 19 bp, Mus musculus
  siRNA target sequence for Rab40c (NM_139154.1,538-556).
ctgcatgaccttctttgaa

SEQ ID NO: 520107 - DNA, 19 bp, Mus musculus
  siRNA target sequence for Rab40c (NM_139154.1,570-588).
gcaacttcaacgtcattga

SEQ ID NO: 520108 - DNA, 19 bp, Mus musculus
  siRNA target sequence for Rab40c (NM_139154.1,645-663).
ggagacccaatcgagtttt

SEQ ID NO: 520109 - DNA, 19 bp, Mus musculus
  siRNA target sequence for Rab40c (NM_139154.1,734-752).
ctacctgtcaccatcaaaa

SEQ ID NO: 520110 - DNA, 19 bp, Mus musculus
  siRNA target sequence for Rab40c (NM_139154.1,917-935).
cggagcaactgcaagatct

SEQ ID NO: 520111 - DNA, 19 bp, Mus musculus
  siRNA target sequence for Rab4a (NM_009003.1,134-152).
ccgagacttacgatttctt

SEQ ID NO: 520112 - DNA, 19 bp, Mus musculus
  siRNA target sequence for Rab4a (NM_009003.1,136-154).
gagacttacgatttcttgt

SEQ ID NO: 520113 - DNA, 19 bp, Mus musculus
  siRNA target sequence for Rab4a (NM_009003.1,197-215).
gcttgcttcatcagttcat

SEQ ID NO: 520114 - DNA, 19 bp, Mus musculus
  siRNA target sequence for Rab4a (NM_009003.1,266-284).
gctcaaagataataaatgt

SEQ ID NO: 520115 - DNA, 19 bp, Mus musculus
  siRNA target sequence for Rab4a (NM_009003.1,283-301).
gtcggtggtaaatatgtaa

SEQ ID NO: 520116 - DNA, 19 bp, Mus musculus
  siRNA target sequence for Rab4a (NM_009003.1,346-364).
gtgacgagaagctactaca

SEQ ID NO: 520117 - DNA, 19 bp, Mus musculus
  siRNA target sequence for Rab4a (NM_009003.1,377-395).
gggcactccttgtctatga

SEQ ID NO: 520118 - DNA, 19 bp, Mus musculus
  siRNA target sequence for Rab4a (NM_009003.1,379-397).
gcactccttgtctatgaca

SEQ ID NO: 520119 - DNA, 19 bp, Mus musculus
  siRNA target sequence for Rab4a (NM_009003.1,380-398).
cactccttgtctatgacat

SEQ ID NO: 520120 - DNA, 19 bp, Mus musculus
  siRNA target sequence for Rab4a (NM_009003.1,402-420).
cagccgagaaacctacaat

SEQ ID NO: 520121 - DNA, 19 bp, Mus musculus
  siRNA target sequence for Rab4a (NM_009003.1,413-431).
cctacaatgcgcttactaa

SEQ ID NO: 520122 - DNA, 19 bp, Mus musculus
  siRNA target sequence for Rab4a (NM_009003.1,414-432).
ctacaatgcgcttactaat

SEQ ID NO: 520123 - DNA, 19 bp, Mus musculus
  siRNA target sequence for Rab4a (NM_009003.1,421-439).
gcgcttactaattggttaa

SEQ ID NO: 520124 - DNA, 19 bp, Mus musculus
  siRNA target sequence for Rab4a (NM_009003.1,423-441).
gcttactaattggttaaca

SEQ ID NO: 520125 - DNA, 19 bp, Mus musculus
  siRNA target sequence for Rab4a (NM_009003.1,539-557).
ccaggttcgcacaagagaa

SEQ ID NO: 520126 - DNA, 19 bp, Mus musculus
  siRNA target sequence for Rab4a (NM_009003.1,540-558).
caggttcgcacaagagaat

SEQ ID NO: 520127 - DNA, 19 bp, Mus musculus
  siRNA target sequence for Rab4a (NM_009003.1,623-641).
gtgcaaggaaaatacttaa

SEQ ID NO: 520128 - DNA, 19 bp, Mus musculus
  siRNA target sequence for Rab5a (NM_025887.2,499-517).
gggccaaatactggaaata

SEQ ID NO: 520129 - DNA, 19 bp, Mus musculus
  siRNA target sequence for Rab5a (NM_025887.2,552-570).
gtctgctgttggcaaatca

SEQ ID NO: 520130 - DNA, 19 bp, Mus musculus
  siRNA target sequence for Rab5a (NM_025887.2,574-592).
ctggttcttcgctttgtga

SEQ ID NO: 520131 - DNA, 19 bp, Mus musculus
  siRNA target sequence for Rab5a (NM_025887.2,585-603).
ctttgtgaaaggccaattt

SEQ ID NO: 520132 - DNA, 19 bp, Mus musculus
  siRNA target sequence for Rab5a (NM_025887.2,591-609).
gaaaggccaatttcatgaa

SEQ ID NO: 520133 - DNA, 19 bp, Mus musculus
  siRNA target sequence for Rab5a (NM_025887.2,635-653).
cctttctaacccaaactgt

SEQ ID NO: 520134 - DNA, 19 bp, Mus musculus
  siRNA target sequence for Rab5a (NM_025887.2,700-718).
ggtcaagaacggtatcata

SEQ ID NO: 520135 - DNA, 19 bp, Mus musculus
  siRNA target sequence for Rab5a (NM_025887.2,719-737).
gcttagcaccaatgtacta

SEQ ID NO: 520136 - DNA, 19 bp, Mus musculus
  siRNA target sequence for Rab5a (NM_025887.2,807-825).
ctgggttaaagaacttcaa

SEQ ID NO: 520137 - DNA, 19 bp, Mus musculus
  siRNA target sequence for Rab5a (NM_025887.2,832-850).
gcaagtcctaatattgtga

SEQ ID NO: 520138 - DNA, 19 bp, Mus musculus
  siRNA target sequence for Rab5a (NM_025887.2,833-851).
caagtcctaatattgtgat

SEQ ID NO: 520139 - DNA, 19 bp, Mus musculus
  siRNA target sequence for Rab5c (NM_024456.1,242-260).
gctgctggcaacaagatct

SEQ ID NO: 520140 - DNA, 19 bp, Mus musculus
  siRNA target sequence for Rab5c (NM_024456.1,250-268).
caacaagatctgtcagttt

SEQ ID NO: 520141 - DNA, 19 bp, Mus musculus
  siRNA target sequence for Rab5c (NM_024456.1,346-364).
gtaccaggagagcacaatt

SEQ ID NO: 520142 - DNA, 19 bp, Mus musculus
  siRNA target sequence for Rab5c (NM_024456.1,389-407).
gtctgcttagacgatacaa

SEQ ID NO: 520143 - DNA, 19 bp, Mus musculus
  siRNA target sequence for Rab5c (NM_024456.1,491-509).
gccattgtggtctatgaca

SEQ ID NO: 520144 - DNA, 19 bp, Mus musculus
  siRNA target sequence for Rab5c (NM_024456.1,492-510).
ccattgtggtctatgacat

SEQ ID NO: 520145 - DNA, 19 bp, Mus musculus
  siRNA target sequence for Rab5c (NM_024456.1,525-543).
catttgcacgggctaagaa

SEQ ID NO: 520146 - DNA, 19 bp, Mus musculus
  siRNA target sequence for Rab6 (NM_024287.2,484-502).
gggaatccgctgaggaaat

SEQ ID NO: 520147 - DNA, 19 bp, Mus musculus
  siRNA target sequence for Rab6 (NM_024287.2,535-553).
ggaaagacgtccttgatca

SEQ ID NO: 520148 - DNA, 19 bp, Mus musculus
  siRNA target sequence for Rab7l1 (NM_144875.1,260-278).
gccgagatcacctgtttaa

SEQ ID NO: 520149 - DNA, 19 bp, Mus musculus
  siRNA target sequence for Rab7l1 (NM_144875.1,261-279).
ccgagatcacctgtttaaa

SEQ ID NO: 520150 - DNA, 19 bp, Mus musculus
  siRNA target sequence for Rab7l1 (NM_144875.1,263-281).
gagatcacctgtttaaagt

SEQ ID NO: 520151 - DNA, 19 bp, Mus musculus
  siRNA target sequence for Rab7l1 (NM_144875.1,467-485).
ccatgacacgactctacta

SEQ ID NO: 520152 - DNA, 19 bp, Mus musculus
  siRNA target sequence for Rab7l1 (NM_144875.1,468-486).
catgacacgactctactat

SEQ ID NO: 520153 - DNA, 19 bp, Mus musculus
  siRNA target sequence for Rab7l1 (NM_144875.1,473-491).
cacgactctactatagaga

SEQ ID NO: 520154 - DNA, 19 bp, Mus musculus
  siRNA target sequence for Rab7l1 (NM_144875.1,757-775).
ctcgttgaaaagatgatga

SEQ ID NO: 520155 - DNA, 19 bp, Mus musculus
  siRNA target sequence for Rab9 (NM_019773.1,219-237).
gcaggaaaatcgtctcttt

SEQ ID NO: 520156 - DNA, 19 bp, Mus musculus
  siRNA target sequence for Rab9 (NM_019773.1,220-238).
caggaaaatcgtctctttt

SEQ ID NO: 520157 - DNA, 19 bp, Mus musculus
  siRNA target sequence for Rab9 (NM_019773.1,222-240).
ggaaaatcgtctcttttta

SEQ ID NO: 520158 - DNA, 19 bp, Mus musculus
  siRNA target sequence for Rab9 (NM_019773.1,270-288).
ggcaagagttctcttatga

SEQ ID NO: 520159 - DNA, 19 bp, Mus musculus
  siRNA target sequence for Rab9 (NM_019773.1,290-308).
cagatatgtaaccaataaa

SEQ ID NO: 520160 - DNA, 19 bp, Mus musculus
  siRNA target sequence for Rab9 (NM_019773.1,365-383).
ggtggacggacattttgtt

SEQ ID NO: 520161 - DNA, 19 bp, Mus musculus
  siRNA target sequence for Rab9 (NM_019773.1,463-481).
gcctgcttacatttagtgt

SEQ ID NO: 520162 - DNA, 19 bp, Mus musculus
  siRNA target sequence for Rab9 (NM_019773.1,515-533).
ctggaagaaagagttcata

SEQ ID NO: 520163 - DNA, 19 bp, Mus musculus
  siRNA target sequence for Rab9 (NM_019773.1,518-536).
gaagaaagagttcatatat

SEQ ID NO: 520164 - DNA, 19 bp, Mus musculus
  siRNA target sequence for Rab9 (NM_019773.1,645-663).
gacaacggcgactatcctt

SEQ ID NO: 520165 - DNA, 19 bp, Mus musculus
  siRNA target sequence for Rab9 (NM_019773.1,650-668).
cggcgactatccttacttt

SEQ ID NO: 520166 - DNA, 19 bp, Mus musculus
  siRNA target sequence for Rab9 (NM_019773.1,652-670).
gcgactatccttactttga

SEQ ID NO: 520167 - DNA, 19 bp, Mus musculus
  siRNA target sequence for Rab9 (NM_019773.1,653-671).
cgactatccttactttgaa

SEQ ID NO: 520168 - DNA, 19 bp, Mus musculus
  siRNA target sequence for Rab9 (NM_019773.1,656-674).
ctatccttactttgaaaca

SEQ ID NO: 520169 - DNA, 19 bp, Mus musculus
  siRNA target sequence for Rab9 (NM_019773.1,713-731).
ggaggcagttcgaagaatt

SEQ ID NO: 520170 - DNA, 19 bp, Mus musculus
  siRNA target sequence for Rab9 (NM_019773.1,748-766).
ggtcagaacacctgattca

SEQ ID NO: 520171 - DNA, 19 bp, Mus musculus
  siRNA target sequence for Rabac1 (NM_010261.1,282-300).
gtacgcaacgtggagtatt

SEQ ID NO: 520172 - DNA, 19 bp, Mus musculus
  siRNA target sequence for Rabac1 (NM_010261.1,286-304).
gcaacgtggagtattatca

SEQ ID NO: 520173 - DNA, 19 bp, Mus musculus
  siRNA target sequence for Rabac1 (NM_010261.1,287-305).
caacgtggagtattatcaa

SEQ ID NO: 520174 - DNA, 19 bp, Mus musculus
  siRNA target sequence for Rabac1 (NM_010261.1,389-407).
ctttggcgcctgttacatt

SEQ ID NO: 520175 - DNA, 19 bp, Mus musculus
  siRNA target sequence for Rabac1 (NM_010261.1,393-411).
ggcgcctgttacattctct

SEQ ID NO: 520176 - DNA, 19 bp, Mus musculus
  siRNA target sequence for Rabac1 (NM_010261.1,394-412).
gcgcctgttacattctcta

SEQ ID NO: 520177 - DNA, 19 bp, Mus musculus
  siRNA target sequence for Rabac1 (NM_010261.1,395-413).
cgcctgttacattctctat

SEQ ID NO: 520178 - DNA, 19 bp, Mus musculus
  siRNA target sequence for Rabac1 (NM_010261.1,419-437).
cacgttgcagtctaagctt

SEQ ID NO: 520179 - DNA, 19 bp, Mus musculus
  siRNA target sequence for Rabac1 (NM_010261.1,428-446).
gtctaagcttgtactcttt

SEQ ID NO: 520180 - DNA, 19 bp, Mus musculus
  siRNA target sequence for Rac2 (NM_009008.2,267-285).
ctacccacagacagatgta

SEQ ID NO: 520181 - DNA, 19 bp, Mus musculus
  siRNA target sequence for Rac2 (NM_009008.2,489-507).
ggccaaggatattgattca

SEQ ID NO: 520182 - DNA, 19 bp, Mus musculus
  siRNA target sequence for Rac2 (NM_009008.2,510-528).
caagtacttggaatgttct

SEQ ID NO: 520183 - DNA, 19 bp, Mus musculus
  siRNA target sequence for Rac3 (NM_133223.2,231-249).
gaatatatccccacagttt

SEQ ID NO: 520184 - DNA, 19 bp, Mus musculus
  siRNA target sequence for Rac3 (NM_133223.2,241-259).
ccacagttttcgacaacta

SEQ ID NO: 520185 - DNA, 19 bp, Mus musculus
  siRNA target sequence for Rac3 (NM_133223.2,495-513).
ctccgtgatgacaaggata

SEQ ID NO: 520186 - DNA, 19 bp, Mus musculus
  siRNA target sequence for Rac3 (NM_133223.2,499-517).
gtgatgacaaggatacgat

SEQ ID NO: 520187 - DNA, 19 bp, Mus musculus
  siRNA target sequence for Rac3 (NM_133223.2,569-587).
ggccatggcccgagagatt

SEQ ID NO: 520188 - DNA, 19 bp, Mus musculus
  siRNA target sequence for Rac3 (NM_133223.2,696-714).
ggcaagaagtgcactgtat

SEQ ID NO: 520189 - DNA, 19 bp, Mus musculus
  siRNA target sequence for Rac3 (NM_133223.2,697-715).
gcaagaagtgcactgtatt

SEQ ID NO: 520190 - DNA, 19 bp, Mus musculus
  siRNA target sequence for Rala (NM_019491.4,249-267).
caagcccaagggtcagaat

SEQ ID NO: 520191 - DNA, 19 bp, Mus musculus
  siRNA target sequence for Rala (NM_019491.4,424-442).
cagatcgacatcttagata

SEQ ID NO: 520192 - DNA, 19 bp, Mus musculus
  siRNA target sequence for Rala (NM_019491.4,456-474).
ggactatgctgcaattaga

SEQ ID NO: 520193 - DNA, 19 bp, Mus musculus
  siRNA target sequence for Rala (NM_019491.4,464-482).
ctgcaattagagacaacta

SEQ ID NO: 520194 - DNA, 19 bp, Mus musculus
  siRNA target sequence for Rala (NM_019491.4,466-484).
gcaattagagacaactact

SEQ ID NO: 520195 - DNA, 19 bp, Mus musculus
  siRNA target sequence for Rala (NM_019491.4,553-571).
gacttcagggagcagattt

SEQ ID NO: 520196 - DNA, 19 bp, Mus musculus
  siRNA target sequence for Rala (NM_019491.4,599-617).
catttctcctggttggtaa

SEQ ID NO: 520197 - DNA, 19 bp, Mus musculus
  siRNA target sequence for Rala (NM_019491.4,604-622).
ctcctggttggtaacaagt

SEQ ID NO: 520198 - DNA, 19 bp, Mus musculus
  siRNA target sequence for Rala (NM_019491.4,673-691).
gctgaccagtggaacgtta

SEQ ID NO: 520199 - DNA, 19 bp, Mus musculus
  siRNA target sequence for Rala (NM_019491.4,674-692).
ctgaccagtggaacgttaa

SEQ ID NO: 520200 - DNA, 19 bp, Mus musculus
  siRNA target sequence for Rala (NM_019491.4,676-694).
gaccagtggaacgttaact

SEQ ID NO: 520201 - DNA, 19 bp, Mus musculus
  siRNA target sequence for Rala (NM_019491.4,697-715).
gtggagacgtctgctaaaa

SEQ ID NO: 520202 - DNA, 19 bp, Mus musculus
  siRNA target sequence for Rala (NM_019491.4,723-741).
caacgttgacaaggtattt

SEQ ID NO: 520203 - DNA, 19 bp, Mus musculus
  siRNA target sequence for Rala (NM_019491.4,726-744).
cgttgacaaggtatttttt

SEQ ID NO: 520204 - DNA, 19 bp, Mus musculus
  siRNA target sequence for Ralb (NM_022327.3,130-148).
gctccctggtacttcacaa

SEQ ID NO: 520205 - DNA, 19 bp, Mus musculus
  siRNA target sequence for Ralb (NM_022327.3,191-209).
gacgcttcagttcatgtat

SEQ ID NO: 520206 - DNA, 19 bp, Mus musculus
  siRNA target sequence for Ralb (NM_022327.3,206-224).
gtatgatgagtttgtagaa

SEQ ID NO: 520207 - DNA, 19 bp, Mus musculus
  siRNA target sequence for Ralb (NM_022327.3,277-295).
gagaagaggtccagataga

SEQ ID NO: 520208 - DNA, 19 bp, Mus musculus
  siRNA target sequence for Ralb (NM_022327.3,279-297).
gaagaggtccagatagaca

SEQ ID NO: 520209 - DNA, 19 bp, Mus musculus
  siRNA target sequence for Ralb (NM_022327.3,415-433).
ccgagttcagggaacagat

SEQ ID NO: 520210 - DNA, 19 bp, Mus musculus
  siRNA target sequence for Ralb (NM_022327.3,471-489).
ctggtcgtgggcaacaagt

SEQ ID NO: 520211 - DNA, 19 bp, Mus musculus
  siRNA target sequence for Rap1a (NM_145541.2,220-238).
cagcaatgagggatttgta

SEQ ID NO: 520212 - DNA, 19 bp, Mus musculus
  siRNA target sequence for Rap1a (NM_145541.2,251-269).
ccaagggtttgcactagtt

SEQ ID NO: 520213 - DNA, 19 bp, Mus musculus
  siRNA target sequence for Rap1a (NM_145541.2,255-273).
gggtttgcactagtttatt

SEQ ID NO: 520214 - DNA, 19 bp, Mus musculus
  siRNA target sequence for Rap1a (NM_145541.2,261-279).
gcactagtttattcaatta

SEQ ID NO: 520215 - DNA, 19 bp, Mus musculus
  siRNA target sequence for Rap1a (NM_145541.2,280-298).
cagctcagtctacgtttaa

SEQ ID NO: 520216 - DNA, 19 bp, Mus musculus
  siRNA target sequence for Rap1a (NM_145541.2,283-301).
ctcagtctacgtttaatga

SEQ ID NO: 520217 - DNA, 19 bp, Mus musculus
  siRNA target sequence for Rap1a (NM_145541.2,285-303).
cagtctacgtttaatgatt

SEQ ID NO: 520218 - DNA, 19 bp, Mus musculus
  siRNA target sequence for Rap1b (NM_024457.1,222-240).
cctgactgtacagtttgtt

SEQ ID NO: 520219 - DNA, 19 bp, Mus musculus
  siRNA target sequence for Rap1b (NM_024457.1,225-243).
gactgtacagtttgttcaa

SEQ ID NO: 520220 - DNA, 19 bp, Mus musculus
  siRNA target sequence for Rap1b (NM_024457.1,397-415).
ggcttcgctctggtttact

SEQ ID NO: 520221 - DNA, 19 bp, Mus musculus
  siRNA target sequence for Rap1b (NM_024457.1,422-440).
cagcacagtcgacatttaa

SEQ ID NO: 520222 - DNA, 19 bp, Mus musculus
  siRNA target sequence for Rap1b (NM_024457.1,425-443).
cacagtcgacatttaacga

SEQ ID NO: 520223 - DNA, 19 bp, Mus musculus
  siRNA target sequence for Rap1b (NM_024457.1,431-449).
cgacatttaacgacttaca

SEQ ID NO: 520224 - DNA, 19 bp, Mus musculus
  siRNA target sequence for Rap1b (NM_024457.1,432-450).
gacatttaacgacttacaa

SEQ ID NO: 520225 - DNA, 19 bp, Mus musculus
  siRNA target sequence for Rap1b (NM_024457.1,441-459).
cgacttacaagatctaaga

SEQ ID NO: 520226 - DNA, 19 bp, Mus musculus
  siRNA target sequence for Rap1b (NM_024457.1,462-480).
gcagattctgcgggttaaa

SEQ ID NO: 520227 - DNA, 19 bp, Mus musculus
  siRNA target sequence for Rap1b (NM_024457.1,581-599).
ggaacaactgtgcattctt

SEQ ID NO: 520228 - DNA, 19 bp, Mus musculus
  siRNA target sequence for Rap1b (NM_024457.1,582-600).
gaacaactgtgcattctta

SEQ ID NO: 520229 - DNA, 19 bp, Mus musculus
  siRNA target sequence for Rap1b (NM_024457.1,605-623).
cctctgcaaagtccaaaat

SEQ ID NO: 520230 - DNA, 19 bp, Mus musculus
  siRNA target sequence for Rap1b (NM_024457.1,646-664).
gacctagtgcggcaaatta

SEQ ID NO: 520231 - DNA, 19 bp, Mus musculus
  siRNA target sequence for Rap1b (NM_024457.1,655-673).
cggcaaattaacagaaaaa

SEQ ID NO: 520232 - DNA, 19 bp, Mus musculus
  siRNA target sequence for Rap2b (NM_028712.3,896-914).
gacatcggccaaaaacaaa

SEQ ID NO: 520233 - DNA, 19 bp, Mus musculus
  siRNA target sequence for Rap2c (NM_172413.1,100-118).
cggaggggttggcaaatct

SEQ ID NO: 520234 - DNA, 19 bp, Mus musculus
  siRNA target sequence for Rap2c (NM_172413.1,213-231).
ccccgtcagtactggaaat

SEQ ID NO: 520235 - DNA, 19 bp, Mus musculus
  siRNA target sequence for Rap2c (NM_172413.1,305-323).
ctggtgtatagtttggtta

SEQ ID NO: 520236 - DNA, 19 bp, Mus musculus
  siRNA target sequence for Rap2c (NM_172413.1,307-325).
ggtgtatagtttggttaat

SEQ ID NO: 520237 - DNA, 19 bp, Mus musculus
  siRNA target sequence for Rap2c (NM_172413.1,310-328).
gtatagtttggttaatcaa

SEQ ID NO: 520238 - DNA, 19 bp, Mus musculus
  siRNA target sequence for Rap2c (NM_172413.1,319-337).
ggttaatcaacagtctttt

SEQ ID NO: 520239 - DNA, 19 bp, Mus musculus
  siRNA target sequence for Rap2c (NM_172413.1,340-358).
ggatatcaagccaatgaga

SEQ ID NO: 520240 - DNA, 19 bp, Mus musculus
  siRNA target sequence for Rap2c (NM_172413.1,434-452).
gagagagaggttatgtctt

SEQ ID NO: 520241 - DNA, 19 bp, Mus musculus
  siRNA target sequence for Rap2c (NM_172413.1,482-500).
ggctgtcctttcatggaaa

SEQ ID NO: 520242 - DNA, 19 bp, Mus musculus
  siRNA target sequence for Rap2c (NM_172413.1,493-511).
catggaaacgtcagcaaaa

SEQ ID NO: 520243 - DNA, 19 bp, Mus musculus
  siRNA target sequence for Rap2c (NM_172413.1,496-514).
ggaaacgtcagcaaaaagt

SEQ ID NO: 520244 - DNA, 19 bp, Mus musculus
  siRNA target sequence for Rap2c (NM_172413.1,504-522).
cagcaaaaagtaaatcaat

SEQ ID NO: 520245 - DNA, 19 bp, Mus musculus
  siRNA target sequence for Rap2c (NM_172413.1,523-541).
ggtggatgaactttttgct

SEQ ID NO: 520246 - DNA, 19 bp, Mus musculus
  siRNA target sequence for Rap2c (NM_172413.1,547-565).
cgtcaggcaaatgaactat

SEQ ID NO: 520247 - DNA, 19 bp, Mus musculus
  siRNA target sequence for Rap2c (NM_172413.1,548-566).
gtcaggcaaatgaactatt

SEQ ID NO: 520248 - DNA, 19 bp, Mus musculus
  siRNA target sequence for Rap2c (NM_172413.1,550-568).
caggcaaatgaactattca

SEQ ID NO: 520249 - DNA, 19 bp, Mus musculus
  siRNA target sequence for Rap2c (NM_172413.1,583-601).
gcaagatcagtgttgtaca

SEQ ID NO: 520250 - DNA, 19 bp, Mus musculus
  siRNA target sequence for Rap2c (NM_172413.1,592-610).
gtgttgtacaacttgtgtt

SEQ ID NO: 520251 - DNA, 19 bp, Mus musculus
  siRNA target sequence for Rasd1 (NM_009026.1,154-172).
gcgatgatcaagaagatgt

SEQ ID NO: 520252 - DNA, 19 bp, Mus musculus
  siRNA target sequence for Rasd1 (NM_009026.1,247-265).
ggcaagacggccattgtgt

SEQ ID NO: 520253 - DNA, 19 bp, Mus musculus
  siRNA target sequence for Rasd1 (NM_009026.1,281-299).
gccgtttcgaggatgctta

SEQ ID NO: 520254 - DNA, 19 bp, Mus musculus
  siRNA target sequence for Rasd1 (NM_009026.1,315-333).
ggacttccaccgaaagttt

SEQ ID NO: 520255 - DNA, 19 bp, Mus musculus
  siRNA target sequence for Rasd1 (NM_009026.1,316-334).
gacttccaccgaaagtttt

SEQ ID NO: 520256 - DNA, 19 bp, Mus musculus
  siRNA target sequence for Rasd1 (NM_009026.1,425-443).
caggagacgttttcattct

SEQ ID NO: 520257 - DNA, 19 bp, Mus musculus
  siRNA target sequence for Rasd1 (NM_009026.1,459-477).
caaccgcgactcattcgaa

SEQ ID NO: 520258 - DNA, 19 bp, Mus musculus
  siRNA target sequence for Rasd1 (NM_009026.1,550-568).
gacgtgccgctggtcattt

SEQ ID NO: 520259 - DNA, 19 bp, Mus musculus
  siRNA target sequence for Rasd1 (NM_009026.1,561-579).
ggtcatttgcggtaacaaa

SEQ ID NO: 520260 - DNA, 19 bp, Mus musculus
  siRNA target sequence for Rasd1 (NM_009026.1,686-704).
gcagcttggaccagatgtt

SEQ ID NO: 520261 - DNA, 19 bp, Mus musculus
  siRNA target sequence for Rasd1 (NM_009026.1,751-769).
gacttgcaccgcaaggtat

SEQ ID NO: 520262 - DNA, 19 bp, Mus musculus
  siRNA target sequence for Rasd1 (NM_009026.1,782-800).
gcgacgtactgcacaagaa

SEQ ID NO: 520263 - DNA, 19 bp, Mus musculus
  siRNA target sequence for Rasd1 (NM_009026.1,904-922).
cacagcgacctcatgtaca

SEQ ID NO: 520264 - DNA, 19 bp, Mus musculus
  siRNA target sequence for Rasl2-9 (NM_009028.1,173-191).
gaggtgcacacattagtct

SEQ ID NO: 520265 - DNA, 19 bp, Mus musculus
  siRNA target sequence for Rasl2-9 (NM_009028.1,183-201).
cattagtcttccataccaa

SEQ ID NO: 520266 - DNA, 19 bp, Mus musculus
  siRNA target sequence for Rasl2-9 (NM_009028.1,340-358).
gcctagctggcataaagat

SEQ ID NO: 520267 - DNA, 19 bp, Mus musculus
  siRNA target sequence for Rem (NM_009047.4,501-519).
cctggtgttgggaagacta

SEQ ID NO: 520268 - DNA, 19 bp, Mus musculus
  siRNA target sequence for Rem (NM_009047.4,530-548).
cctcttcgcagagaaacaa

SEQ ID NO: 520269 - DNA, 19 bp, Mus musculus
  siRNA target sequence for Rem (NM_009047.4,841-859).
gggaagtctcggtagaaga

SEQ ID NO: 520270 - DNA, 19 bp, Mus musculus
  siRNA target sequence for Rerg (NM_181988.1,200-218).
caagctggccatatttgga

SEQ ID NO: 520271 - DNA, 19 bp, Mus musculus
  siRNA target sequence for Rerg (NM_181988.1,230-248).
gggcaagtcagcgattgta

SEQ ID NO: 520272 - DNA, 19 bp, Mus musculus
  siRNA target sequence for Rerg (NM_181988.1,232-250).
gcaagtcagcgattgtagt

SEQ ID NO: 520273 - DNA, 19 bp, Mus musculus
  siRNA target sequence for Rerg (NM_181988.1,238-256).
cagcgattgtagtgagatt

SEQ ID NO: 520274 - DNA, 19 bp, Mus musculus
  siRNA target sequence for Rerg (NM_181988.1,258-276).
ctgaccaaacggttcatct

SEQ ID NO: 520275 - DNA, 19 bp, Mus musculus
  siRNA target sequence for Rerg (NM_181988.1,285-303).
gatccaaccctcgaatcaa

SEQ ID NO: 520276 - DNA, 19 bp, Mus musculus
  siRNA target sequence for Rerg (NM_181988.1,308-326).
ccgacaccaggcaaccata

SEQ ID NO: 520277 - DNA, 19 bp, Mus musculus
  siRNA target sequence for Rerg (NM_181988.1,322-340).
ccatagacgatgaagttgt

SEQ ID NO: 520278 - DNA, 19 bp, Mus musculus
  siRNA target sequence for Rerg (NM_181988.1,323-341).
catagacgatgaagttgtt

SEQ ID NO: 520279 - DNA, 19 bp, Mus musculus
  siRNA target sequence for Rerg (NM_181988.1,327-345).
gacgatgaagttgtttcta

SEQ ID NO: 520280 - DNA, 19 bp, Mus musculus
  siRNA target sequence for Rerg (NM_181988.1,415-433).
gcttcgtgttggtttacga

SEQ ID NO: 520281 - DNA, 19 bp, Mus musculus
  siRNA target sequence for Rerg (NM_181988.1,445-463).
gagggagcttcgaagaagt

SEQ ID NO: 520282 - DNA, 19 bp, Mus musculus
  siRNA target sequence for Rerg (NM_181988.1,467-485).
gccgctgaagaacatctta

SEQ ID NO: 520283 - DNA, 19 bp, Mus musculus
  siRNA target sequence for Rerg (NM_181988.1,469-487).
cgctgaagaacatcttaga

SEQ ID NO: 520284 - DNA, 19 bp, Mus musculus
  siRNA target sequence for Rerg (NM_181988.1,599-617).
ggcgtgtgcgttttacgaa

SEQ ID NO: 520285 - DNA, 19 bp, Mus musculus
  siRNA target sequence for Rerg (NM_181988.1,600-618).
gcgtgtgcgttttacgaat

SEQ ID NO: 520286 - DNA, 19 bp, Mus musculus
  siRNA target sequence for Rerg (NM_181988.1,644-662).
catcacggaggtgttctat

SEQ ID NO: 520287 - DNA, 19 bp, Mus musculus
  siRNA target sequence for Rerg (NM_181988.1,735-753).
gtcaagcaagcgattaaca

SEQ ID NO: 520288 - DNA, 19 bp, Mus musculus
  siRNA target sequence for Rheb (NM_053075.2,187-205).
cattgacaattcagtttgt

SEQ ID NO: 520289 - DNA, 19 bp, Mus musculus
  siRNA target sequence for Rheb (NM_053075.2,200-218).
gtttgttgaaggccaattt

SEQ ID NO: 520290 - DNA, 19 bp, Mus musculus
  siRNA target sequence for Rheb (NM_053075.2,257-275).
caagttgatcacggtaaat

SEQ ID NO: 520291 - DNA, 19 bp, Mus musculus
  siRNA target sequence for Rheb (NM_053075.2,260-278).
gttgatcacggtaaatggt

SEQ ID NO: 520292 - DNA, 19 bp, Mus musculus
  siRNA target sequence for Rheb (NM_053075.2,268-286).
cggtaaatggtcaagagta

SEQ ID NO: 520293 - DNA, 19 bp, Mus musculus
  siRNA target sequence for Rheb (NM_053075.2,269-287).
ggtaaatggtcaagagtat

SEQ ID NO: 520294 - DNA, 19 bp, Mus musculus
  siRNA target sequence for Rheb (NM_053075.2,341-359).
gacatactccatagatatt

SEQ ID NO: 520295 - DNA, 19 bp, Mus musculus
  siRNA target sequence for Rheb (NM_053075.2,343-361).
catactccatagatattaa

SEQ ID NO: 520296 - DNA, 19 bp, Mus musculus
  siRNA target sequence for Rheb (NM_053075.2,349-367).
ccatagatattaatggtta

SEQ ID NO: 520297 - DNA, 19 bp, Mus musculus
  siRNA target sequence for Rheb (NM_053075.2,417-435).
gttatccatggcaagttgt

SEQ ID NO: 520298 - DNA, 19 bp, Mus musculus
  siRNA target sequence for Rheb (NM_053075.2,427-445).
gcaagttgttggatatggt

SEQ ID NO: 520299 - DNA, 19 bp, Mus musculus
  siRNA target sequence for Rheb (NM_053075.2,447-465).
gggaaagtgcagataccta

SEQ ID NO: 520300 - DNA, 19 bp, Mus musculus
  siRNA target sequence for Rheb (NM_053075.2,448-466).
ggaaagtgcagatacctat

SEQ ID NO: 520301 - DNA, 19 bp, Mus musculus
  siRNA target sequence for Rheb (NM_053075.2,645-663).
gcttcacaaggaaagtctt

SEQ ID NO: 520302 - DNA, 19 bp, Mus musculus
  siRNA target sequence for Rhobtb2 (NM_153514.3,654-672).
cccgagatgtggtagatga

SEQ ID NO: 520303 - DNA, 19 bp, Mus musculus
  siRNA target sequence for Rhobtb2 (NM_153514.3,718-736).
caaagaccggcgttttgct

SEQ ID NO: 520304 - DNA, 19 bp, Mus musculus
  siRNA target sequence for Rhobtb2 (NM_153514.3,724-742).
ccggcgttttgcttatgga

SEQ ID NO: 520305 - DNA, 19 bp, Mus musculus
  siRNA target sequence for Rhobtb2 (NM_153514.3,744-762).
gatccgacgtggtggtttt

SEQ ID NO: 520306 - DNA, 19 bp, Mus musculus
  siRNA target sequence for Rhobtb2 (NM_153514.3,748-766).
cgacgtggtggttttgtgt

SEQ ID NO: 520307 - DNA, 19 bp, Mus musculus
  siRNA target sequence for Rhobtb2 (NM_153514.3,1267-1285).
ggagcgcgtgcgcatcttt

SEQ ID NO: 520308 - DNA, 19 bp, Mus musculus
  siRNA target sequence for Rhobtb2 (NM_153514.3,1277-1295).
cgcatctttgcccacaaaa

SEQ ID NO: 520309 - DNA, 19 bp, Mus musculus
  siRNA target sequence for Rhobtb2 (NM_153514.3,1311-1329).
cctcctccaaattctatga

SEQ ID NO: 520310 - DNA, 19 bp, Mus musculus
  siRNA target sequence for Rhobtb2 (NM_153514.3,1315-1333).
ctccaaattctatgactta

SEQ ID NO: 520311 - DNA, 19 bp, Mus musculus
  siRNA target sequence for Rhobtb2 (NM_153514.3,1405-1423).
ccggagccaccctgaacaa

SEQ ID NO: 520312 - DNA, 19 bp, Mus musculus
  siRNA target sequence for Rhobtb2 (NM_153514.3,1611-1629).
cctggagccgagcttttgt

SEQ ID NO: 520313 - DNA, 19 bp, Mus musculus
  siRNA target sequence for Rhobtb2 (NM_153514.3,1617-1635).
gccgagcttttgtgagtat

SEQ ID NO: 520314 - DNA, 19 bp, Mus musculus
  siRNA target sequence for Rhobtb2 (NM_153514.3,1655-1673).
gatcctctgaccttcaaat

SEQ ID NO: 520315 - DNA, 19 bp, Mus musculus
  siRNA target sequence for Rhobtb2 (NM_153514.3,1783-1801).
catgcacattgctcacatt

SEQ ID NO: 520316 - DNA, 19 bp, Mus musculus
  siRNA target sequence for Rhobtb2 (NM_153514.3,1855-1873).
caacgaagccttcatgaat

SEQ ID NO: 520317 - DNA, 19 bp, Mus musculus
  siRNA target sequence for Rhobtb2 (NM_153514.3,1905-1923).
ggaccaaccgggttaagga

SEQ ID NO: 520318 - DNA, 19 bp, Mus musculus
  siRNA target sequence for Rhobtb2 (NM_153514.3,2042-2060).
ccatttgtggagagttcta

SEQ ID NO: 520319 - DNA, 19 bp, Mus musculus
  siRNA target sequence for Rhobtb2 (NM_153514.3,2068-2086).
ggtggtgtttccatacaca

SEQ ID NO: 520320 - DNA, 19 bp, Mus musculus
  siRNA target sequence for Rhobtb2 (NM_153514.3,2110-2128).
gttggagtacctctataca

SEQ ID NO: 520321 - DNA, 19 bp, Mus musculus
  siRNA target sequence for Rhobtb2 (NM_153514.3,2277-2295).
gggatgtccttgtattctt

SEQ ID NO: 520322 - DNA, 19 bp, Mus musculus
  siRNA target sequence for Rhobtb2 (NM_153514.3,2501-2519).
cgagagaaagaggactatt

SEQ ID NO: 520323 - DNA, 19 bp, Mus musculus
  siRNA target sequence for Rit1 (NM_009069.2,144-162).
ggagctcgccccattggta

SEQ ID NO: 520324 - DNA, 19 bp, Mus musculus
  siRNA target sequence for Rit1 (NM_009069.2,188-206).
ctcccgggaatacaaacta

SEQ ID NO: 520325 - DNA, 19 bp, Mus musculus
  siRNA target sequence for Rit1 (NM_009069.2,190-208).
cccgggaatacaaactagt

SEQ ID NO: 520326 - DNA, 19 bp, Mus musculus
  siRNA target sequence for Rit1 (NM_009069.2,193-211).
gggaatacaaactagtgat

SEQ ID NO: 520327 - DNA, 19 bp, Mus musculus
  siRNA target sequence for Rit1 (NM_009069.2,314-332).
ccggatccgcattgatgat

SEQ ID NO: 520328 - DNA, 19 bp, Mus musculus
  siRNA target sequence for Rit1 (NM_009069.2,414-432).
gaaggattcatcatctgtt

SEQ ID NO: 520329 - DNA, 19 bp, Mus musculus
  siRNA target sequence for Rit1 (NM_009069.2,459-477).
cacgaagttcgggagttta

SEQ ID NO: 520330 - DNA, 19 bp, Mus musculus
  siRNA target sequence for Rit1 (NM_009069.2,495-513).
gtccgacgcaccgatgata

SEQ ID NO: 520331 - DNA, 19 bp, Mus musculus
  siRNA target sequence for Rit1 (NM_009069.2,497-515).
ccgacgcaccgatgataca

SEQ ID NO: 520332 - DNA, 19 bp, Mus musculus
  siRNA target sequence for Rit1 (NM_009069.2,532-550).
ggaacaagtctgacctaaa

SEQ ID NO: 520333 - DNA, 19 bp, Mus musculus
  siRNA target sequence for Rit1 (NM_009069.2,588-606).
ctggctcgagaattcagtt

SEQ ID NO: 520334 - DNA, 19 bp, Mus musculus
  siRNA target sequence for Rit1 (NM_009069.2,627-645).
gctgcctaccgttactaca

SEQ ID NO: 520335 - DNA, 19 bp, Mus musculus
  siRNA target sequence for Rit1 (NM_009069.2,628-646).
ctgcctaccgttactacat

SEQ ID NO: 520336 - DNA, 19 bp, Mus musculus
  siRNA target sequence for Rit1 (NM_009069.2,673-691).
gggagatccgtaagaaaga

SEQ ID NO: 520337 - DNA, 19 bp, Mus musculus
  siRNA target sequence for Rit2 (NM_009065.2,232-250).
gcgggtccagagagtacaa

SEQ ID NO: 520338 - DNA, 19 bp, Mus musculus
  siRNA target sequence for Rit2 (NM_009065.2,280-298).
gtaaaagcgcagtcacaat

SEQ ID NO: 520339 - DNA, 19 bp, Mus musculus
  siRNA target sequence for Rit2 (NM_009065.2,600-618).
cagttccgtcaggtatcta

SEQ ID NO: 520340 - DNA, 19 bp, Mus musculus
  siRNA target sequence for Rit2 (NM_009065.2,636-654).
cttgctcgagactacaact

SEQ ID NO: 520341 - DNA, 19 bp, Mus musculus
  siRNA target sequence for Rit2 (NM_009065.2,680-698).
cctgcgattcggtatcgat

SEQ ID NO: 520342 - DNA, 19 bp, Mus musculus
  siRNA target sequence for Rit2 (NM_009065.2,689-707).
cggtatcgatgatgctttt

SEQ ID NO: 520343 - DNA, 19 bp, Mus musculus
  siRNA target sequence for Rit2 (NM_009065.2,691-709).
gtatcgatgatgcttttca

SEQ ID NO: 520344 - DNA, 19 bp, Mus musculus
  siRNA target sequence for Rit2 (NM_009065.2,702-720).
gcttttcaaggcttagtga

SEQ ID NO: 520345 - DNA, 19 bp, Mus musculus
  siRNA target sequence for Rit2 (NM_009065.2,708-726).
caaggcttagtgagagaaa

SEQ ID NO: 520346 - DNA, 19 bp, Mus musculus
  siRNA target sequence for Rrad (NM_019662.1,266-284).
cagaggagggcgtttacaa

SEQ ID NO: 520347 - DNA, 19 bp, Mus musculus
  siRNA target sequence for Rrad (NM_019662.1,330-348).
gcgcatctttggtggtata

SEQ ID NO: 520348 - DNA, 19 bp, Mus musculus
  siRNA target sequence for Rrad (NM_019662.1,332-350).
gcatctttggtggtataga

SEQ ID NO: 520349 - DNA, 19 bp, Mus musculus
  siRNA target sequence for Rrad (NM_019662.1,409-427).
ggagaagaagcgtcactat

SEQ ID NO: 520350 - DNA, 19 bp, Mus musculus
  siRNA target sequence for Rrad (NM_019662.1,419-437).
cgtcactattggtctatga

SEQ ID NO: 520351 - DNA, 19 bp, Mus musculus
  siRNA target sequence for Rrad (NM_019662.1,422-440).
cactattggtctatgacat

SEQ ID NO: 520352 - DNA, 19 bp, Mus musculus
  siRNA target sequence for Rrad (NM_019662.1,424-442).
ctattggtctatgacattt

SEQ ID NO: 520353 - DNA, 19 bp, Mus musculus
  siRNA target sequence for Rrad (NM_019662.1,707-725).
cagcactgcatcacaatgt

SEQ ID NO: 520354 - DNA, 19 bp, Mus musculus
  siRNA target sequence for Rras (NM_009101.1,201-219).
gattcctacacaaagatct

SEQ ID NO: 520355 - DNA, 19 bp, Mus musculus
  siRNA target sequence for Rras (NM_009101.1,344-362).
cgacaggcagagtttcaat

SEQ ID NO: 520356 - DNA, 19 bp, Mus musculus
  siRNA target sequence for Rras (NM_009101.1,529-547).
ccaaactgcgtctgaatgt

SEQ ID NO: 520357 - DNA, 19 bp, Mus musculus
  siRNA target sequence for Rras2 (NM_025846.1,304-322).
gctccggccaggagaagta

SEQ ID NO: 520358 - DNA, 19 bp, Mus musculus
  siRNA target sequence for Rras2 (NM_025846.1,423-441).
gactcatacacaaagcaat

SEQ ID NO: 520359 - DNA, 19 bp, Mus musculus
  siRNA target sequence for Rras2 (NM_025846.1,741-759).
gaggcatcggcaaagatca

SEQ ID NO: 520360 - DNA, 19 bp, Mus musculus
  siRNA target sequence for Rras2 (NM_025846.1,785-803).
cgaacttgtccgggttata

SEQ ID NO: 520361 - DNA, 19 bp, Mus musculus
  siRNA target sequence for Rras2 (NM_025846.1,786-804).
gaacttgtccgggttataa

SEQ ID NO: 520362 - DNA, 19 bp, Mus musculus
  siRNA target sequence for Rras2 (NM_025846.1,789-807).
cttgtccgggttataagga

SEQ ID NO: 520363 - DNA, 19 bp, Mus musculus
  siRNA target sequence for Rras2 (NM_025846.1,792-810).
gtccgggttataaggaaat

SEQ ID NO: 520364 - DNA, 19 bp, Mus musculus
  siRNA target sequence for Rras2 (NM_025846.1,796-814).
gggttataaggaaatttca

SEQ ID NO: 520365 - DNA, 19 bp, Mus musculus
  siRNA target sequence for Rras2 (NM_025846.1,797-815).
ggttataaggaaatttcaa

SEQ ID NO: 520366 - DNA, 19 bp, Mus musculus
  siRNA target sequence for Rras2 (NM_025846.1,870-888).
ggctgccattgtgtcattt

SEQ ID NO: 520367 - DNA, 19 bp, Mus musculus
  siRNA target sequence for Sara1 (NM_009120.1,122-140).
ctttgagtggatctacaat

SEQ ID NO: 520368 - DNA, 19 bp, Mus musculus
  siRNA target sequence for Sara1 (NM_009120.1,164-182).
cctaggactctacaagaaa

SEQ ID NO: 520369 - DNA, 19 bp, Mus musculus
  siRNA target sequence for Sara1 (NM_009120.1,210-228).
gacaatgcgggcaaaacca

SEQ ID NO: 520370 - DNA, 19 bp, Mus musculus
  siRNA target sequence for Sara1 (NM_009120.1,317-335).
gactttcaccacttttgat

SEQ ID NO: 520371 - DNA, 19 bp, Mus musculus
  siRNA target sequence for Sara1 (NM_009120.1,354-372).
gcacgtcgcgtttggaaaa

SEQ ID NO: 520372 - DNA, 19 bp, Mus musculus
  siRNA target sequence for Sara1 (NM_009120.1,355-373).
cacgtcgcgtttggaaaaa

SEQ ID NO: 520373 - DNA, 19 bp, Mus musculus
  siRNA target sequence for Sara1 (NM_009120.1,357-375).
cgtcgcgtttggaaaaatt

SEQ ID NO: 520374 - DNA, 19 bp, Mus musculus
  siRNA target sequence for Sara1 (NM_009120.1,358-376).
gtcgcgtttggaaaaatta

SEQ ID NO: 520375 - DNA, 19 bp, Mus musculus
  siRNA target sequence for Sara1 (NM_009120.1,384-402).
gcgattaatggcatagttt

SEQ ID NO: 520376 - DNA, 19 bp, Mus musculus
  siRNA target sequence for Sara1 (NM_009120.1,385-403).
cgattaatggcatagtttt

SEQ ID NO: 520377 - DNA, 19 bp, Mus musculus
  siRNA target sequence for Sara1 (NM_009120.1,386-404).
gattaatggcatagttttt

SEQ ID NO: 520378 - DNA, 19 bp, Mus musculus
  siRNA target sequence for Sara1 (NM_009120.1,408-426).
gtggactgtgcggatcatt

SEQ ID NO: 520379 - DNA, 19 bp, Mus musculus
  siRNA target sequence for Sara1 (NM_009120.1,443-461).
caaagttgagcttaatgct

SEQ ID NO: 520380 - DNA, 19 bp, Mus musculus
  siRNA target sequence for Sara1 (NM_009120.1,447-465).
gttgagcttaatgctttaa

SEQ ID NO: 520381 - DNA, 19 bp, Mus musculus
  siRNA target sequence for Sara1 (NM_009120.1,450-468).
gagcttaatgctttaatga

SEQ ID NO: 520382 - DNA, 19 bp, Mus musculus
  siRNA target sequence for Sara1 (NM_009120.1,452-470).
gcttaatgctttaatgact

SEQ ID NO: 520383 - DNA, 19 bp, Mus musculus
  siRNA target sequence for Sara1 (NM_009120.1,521-539).
caggacagatgcaatcagt

SEQ ID NO: 520384 - DNA, 19 bp, Mus musculus
  siRNA target sequence for Sara1 (NM_009120.1,532-550).
caatcagtgaagaaaaact

SEQ ID NO: 520385 - DNA, 19 bp, Mus musculus
  siRNA target sequence for Sara1 (NM_009120.1,624-642).
cccatggaagtattcatgt

SEQ ID NO: 520386 - DNA, 19 bp, Mus musculus
  siRNA target sequence for Sara1 (NM_009120.1,685-703).
ggctttcccagtatattga

SEQ ID NO: 520387 - DNA, 19 bp, Mus musculus
  siRNA target sequence for Sept1 (NM_017461.1,101-119).
gtcaagaaggggtttgact

SEQ ID NO: 520388 - DNA, 19 bp, Mus musculus
  siRNA target sequence for Sept1 (NM_017461.1,225-243).
ctcgcacggcacaaactct

SEQ ID NO: 520389 - DNA, 19 bp, Mus musculus
  siRNA target sequence for Sept1 (NM_017461.1,355-373).
gcctgtggttcgcttcatt

SEQ ID NO: 520390 - DNA, 19 bp, Mus musculus
  siRNA target sequence for Sept1 (NM_017461.1,510-528).
gggcagtgcacgagaaagt

SEQ ID NO: 520391 - DNA, 19 bp, Mus musculus
  siRNA target sequence for Sept1 (NM_017461.1,513-531).
cagtgcacgagaaagtcaa

SEQ ID NO: 520392 - DNA, 19 bp, Mus musculus
  siRNA target sequence for Sept1 (NM_017461.1,515-533).
gtgcacgagaaagtcaata

SEQ ID NO: 520393 - DNA, 19 bp, Mus musculus
  siRNA target sequence for Sept1 (NM_017461.1,538-556).
cccggtcatcggtaaagca

SEQ ID NO: 520394 - DNA, 19 bp, Mus musculus
  siRNA target sequence for Sept1 (NM_017461.1,598-616).
gatccgggaccagttgaaa

SEQ ID NO: 520395 - DNA, 19 bp, Mus musculus
  siRNA target sequence for Sept1 (NM_017461.1,953-971).
gccagccgcagcaagcttt

SEQ ID NO: 520396 - DNA, 19 bp, Mus musculus
  siRNA target sequence for Sept1 (NM_017461.1,1016-1034).
gctgacactgaaaagttga

SEQ ID NO: 520397 - DNA, 19 bp, Mus musculus
  siRNA target sequence for Sept1 (NM_017461.1,1113-1131).
ctcagggcgagcaatcaga

SEQ ID NO: 520398 - DNA, 19 bp, Mus musculus
  siRNA target sequence for Sept2 (NM_010891.1,62-80).
gcaacaaccaactcagttt

SEQ ID NO: 520399 - DNA, 19 bp, Mus musculus
  siRNA target sequence for Sept2 (NM_010891.1,63-81).
caacaaccaactcagttta

SEQ ID NO: 520400 - DNA, 19 bp, Mus musculus
  siRNA target sequence for Sept2 (NM_010891.1,94-112).
ctcctggctatgttggatt

SEQ ID NO: 520401 - DNA, 19 bp, Mus musculus
  siRNA target sequence for Sept2 (NM_010891.1,100-118).
gctatgttggatttgcaaa

SEQ ID NO: 520402 - DNA, 19 bp, Mus musculus
  siRNA target sequence for Sept2 (NM_010891.1,242-260).
cccagaaagaattattcct

SEQ ID NO: 520403 - DNA, 19 bp, Mus musculus
  siRNA target sequence for Sept2 (NM_010891.1,299-317).
ggcttcgactgttgagatt

SEQ ID NO: 520404 - DNA, 19 bp, Mus musculus
  siRNA target sequence for Sept2 (NM_010891.1,301-319).
cttcgactgttgagattga

SEQ ID NO: 520405 - DNA, 19 bp, Mus musculus
  siRNA target sequence for Sept2 (NM_010891.1,401-419).
gacaattatctcctacatt

SEQ ID NO: 520406 - DNA, 19 bp, Mus musculus
  siRNA target sequence for Sept2 (NM_010891.1,466-484).
ggcgtcacatcattgataa

SEQ ID NO: 520407 - DNA, 19 bp, Mus musculus
  siRNA target sequence for Sept2 (NM_010891.1,468-486).
cgtcacatcattgataaca

SEQ ID NO: 520408 - DNA, 19 bp, Mus musculus
  siRNA target sequence for Sept2 (NM_010891.1,529-547).
gactgaagcccttagatgt

SEQ ID NO: 520409 - DNA, 19 bp, Mus musculus
  siRNA target sequence for Sept2 (NM_010891.1,536-554).
gcccttagatgttgcattt

SEQ ID NO: 520410 - DNA, 19 bp, Mus musculus
  siRNA target sequence for Sept2 (NM_010891.1,537-555).
cccttagatgttgcattta

SEQ ID NO: 520411 - DNA, 19 bp, Mus musculus
  siRNA target sequence for Sept2 (NM_010891.1,538-556).
ccttagatgttgcatttat

SEQ ID NO: 520412 - DNA, 19 bp, Mus musculus
  siRNA target sequence for Sept2 (NM_010891.1,624-642).
gagcgtgagcggcttaaga

SEQ ID NO: 520413 - DNA, 19 bp, Mus musculus
  siRNA target sequence for Sept2 (NM_010891.1,626-644).
gcgtgagcggcttaagaaa

SEQ ID NO: 520414 - DNA, 19 bp, Mus musculus
  siRNA target sequence for Sept2 (NM_010891.1,627-645).
cgtgagcggcttaagaaaa

SEQ ID NO: 520415 - DNA, 19 bp, Mus musculus
  siRNA target sequence for Sept2 (NM_010891.1,630-648).
gagcggcttaagaaaagga

SEQ ID NO: 520416 - DNA, 19 bp, Mus musculus
  siRNA target sequence for Sept2 (NM_010891.1,632-650).
gcggcttaagaaaaggatt

SEQ ID NO: 520417 - DNA, 19 bp, Mus musculus
  siRNA target sequence for Sept2 (NM_010891.1,633-651).
cggcttaagaaaaggattt

SEQ ID NO: 520418 - DNA, 19 bp, Mus musculus
  siRNA target sequence for Sept2 (NM_010891.1,663-681).
gaagagcatagcattaaaa

SEQ ID NO: 520419 - DNA, 19 bp, Mus musculus
  siRNA target sequence for Sept2 (NM_010891.1,666-684).
gagcatagcattaaaatct

SEQ ID NO: 520420 - DNA, 19 bp, Mus musculus
  siRNA target sequence for Sept2 (NM_010891.1,668-686).
gcatagcattaaaatctat

SEQ ID NO: 520421 - DNA, 19 bp, Mus musculus
  siRNA target sequence for Sept2 (NM_010891.1,775-793).
gctccaaccagttgattga

SEQ ID NO: 520422 - DNA, 19 bp, Mus musculus
  siRNA target sequence for Sept2 (NM_010891.1,776-794).
ctccaaccagttgattgaa

SEQ ID NO: 520423 - DNA, 19 bp, Mus musculus
  siRNA target sequence for Sept2 (NM_010891.1,824-842).
ctacccatggggtgttgta

SEQ ID NO: 520424 - DNA, 19 bp, Mus musculus
  siRNA target sequence for Sept2 (NM_010891.1,858-876).
gaacacaatgactttctga

SEQ ID NO: 520425 - DNA, 19 bp, Mus musculus
  siRNA target sequence for Sept2 (NM_010891.1,923-941).
gacccaagaccttcactat

SEQ ID NO: 520426 - DNA, 19 bp, Mus musculus
  siRNA target sequence for Sept2 (NM_010891.1,970-988).
gaggcggcaggaaagtaga

SEQ ID NO: 520427 - DNA, 19 bp, Mus musculus
  siRNA target sequence for Sept2 (NM_010891.1,1008-1026).
gaccagatcttgcttgaaa

SEQ ID NO: 520428 - DNA, 19 bp, Mus musculus
  siRNA target sequence for Sept2 (NM_010891.1,1043-1061).
ccgcatgcaagagatgatt

SEQ ID NO: 520429 - DNA, 19 bp, Mus musculus
  siRNA target sequence for Sept4 (NM_011129.1,139-157).
gcaagttcgtgaaggattt

SEQ ID NO: 520430 - DNA, 19 bp, Mus musculus
  siRNA target sequence for Sept4 (NM_011129.1,295-313).
ctgacagtcagcagtactt

SEQ ID NO: 520431 - DNA, 19 bp, Mus musculus
  siRNA target sequence for Sept4 (NM_011129.1,297-315).
gacagtcagcagtacttca

SEQ ID NO: 520432 - DNA, 19 bp, Mus musculus
  siRNA target sequence for Sept4 (NM_011129.1,361-379).
ggggcaagcttgatcctta

SEQ ID NO: 520433 - DNA, 19 bp, Mus musculus
  siRNA target sequence for Sept4 (NM_011129.1,362-380).
gggcaagcttgatccttat

SEQ ID NO: 520434 - DNA, 19 bp, Mus musculus
  siRNA target sequence for Sept4 (NM_011129.1,364-382).
gcaagcttgatccttatga

SEQ ID NO: 520435 - DNA, 19 bp, Mus musculus
  siRNA target sequence for Sept4 (NM_011129.1,402-420).
gagtatgtgggctttgcaa

SEQ ID NO: 520436 - DNA, 19 bp, Mus musculus
  siRNA target sequence for Sept4 (NM_011129.1,502-520).
gtaaatccactcttgtcaa

SEQ ID NO: 520437 - DNA, 19 bp, Mus musculus
  siRNA target sequence for Sept4 (NM_011129.1,570-588).
gaagagcggatcatgcaaa

SEQ ID NO: 520438 - DNA, 19 bp, Mus musculus
  siRNA target sequence for Sept4 (NM_011129.1,584-602).
gcaaaccgtggagattact

SEQ ID NO: 520439 - DNA, 19 bp, Mus musculus
  siRNA target sequence for Sept4 (NM_011129.1,585-603).
caaaccgtggagattacta

SEQ ID NO: 520440 - DNA, 19 bp, Mus musculus
  siRNA target sequence for Sept4 (NM_011129.1,601-619).
ctaagcacgcagtggatat

SEQ ID NO: 520441 - DNA, 19 bp, Mus musculus
  siRNA target sequence for Sept4 (NM_011129.1,605-623).
gcacgcagtggatatagaa

SEQ ID NO: 520442 - DNA, 19 bp, Mus musculus
  siRNA target sequence for Sept4 (NM_011129.1,836-854).
ccggccattggatgttgaa

SEQ ID NO: 520443 - DNA, 19 bp, Mus musculus
  siRNA target sequence for Sept4 (NM_011129.1,838-856).
ggccattggatgttgaatt

SEQ ID NO: 520444 - DNA, 19 bp, Mus musculus
  siRNA target sequence for Sept4 (NM_011129.1,930-948).
gtggaccgaaagaaatgca

SEQ ID NO: 520445 - DNA, 19 bp, Mus musculus
  siRNA target sequence for Sept4 (NM_011129.1,932-950).
ggaccgaaagaaatgcaaa

SEQ ID NO: 520446 - DNA, 19 bp, Mus musculus
  siRNA target sequence for Sept4 (NM_011129.1,966-984).
gagcactttggaatcaaga

SEQ ID NO: 520447 - DNA, 19 bp, Mus musculus
  siRNA target sequence for Sept4 (NM_011129.1,1016-1034).
ggacgaggacttcaaatta

SEQ ID NO: 520448 - DNA, 19 bp, Mus musculus
  siRNA target sequence for Sept4 (NM_011129.1,1159-1177).
caggtcactgcgactttgt

SEQ ID NO: 520449 - DNA, 19 bp, Mus musculus
  siRNA target sequence for Sept4 (NM_011129.1,1276-1294).
gcatgacccggctagtagt

SEQ ID NO: 520450 - DNA, 19 bp, Mus musculus
  siRNA target sequence for Sept4 (NM_011129.1,1298-1316).
ggaacggaatcgcaacaaa

SEQ ID NO: 520451 - DNA, 19 bp, Mus musculus
  siRNA target sequence for Sept4 (NM_011129.1,1302-1320).
cggaatcgcaacaaactga

SEQ ID NO: 520452 - DNA, 19 bp, Mus musculus
  siRNA target sequence for Sept4 (NM_011129.1,1424-1442).
gcaggagatgttacacaaa

SEQ ID NO: 520453 - DNA, 19 bp, Mus musculus
  siRNA target sequence for Sept4 (NM_011129.1,1430-1448).
gatgttacacaaaatccaa

SEQ ID NO: 520454 - DNA, 19 bp, Mus musculus
  siRNA target sequence for Sept6 (NM_019942.2,72-90).
cgccaggtgggcgaagatt

SEQ ID NO: 520455 - DNA, 19 bp, Mus musculus
  siRNA target sequence for Sept6 (NM_019942.2,74-92).
ccaggtgggcgaagattgt

SEQ ID NO: 520456 - DNA, 19 bp, Mus musculus
  siRNA target sequence for Sept6 (NM_019942.2,140-158).
ccagctggtgaataagtca

SEQ ID NO: 520457 - DNA, 19 bp, Mus musculus
  siRNA target sequence for Sept6 (NM_019942.2,233-251).
cctgtttaacaccaagttt

SEQ ID NO: 520458 - DNA, 19 bp, Mus musculus
  siRNA target sequence for Sept6 (NM_019942.2,285-303).
gttcagctccagtccaata

SEQ ID NO: 520459 - DNA, 19 bp, Mus musculus
  siRNA target sequence for Sept6 (NM_019942.2,320-338).
gagcaacgtggggttgaaa

SEQ ID NO: 520460 - DNA, 19 bp, Mus musculus
  siRNA target sequence for Sept6 (NM_019942.2,329-347).
ggggttgaaactcacaatt

SEQ ID NO: 520461 - DNA, 19 bp, Mus musculus
  siRNA target sequence for Sept6 (NM_019942.2,449-467).
gctgaagatccgaagagta

SEQ ID NO: 520462 - DNA, 19 bp, Mus musculus
  siRNA target sequence for Sept6 (NM_019942.2,479-497).
ccatgactcccgaatccat

SEQ ID NO: 520463 - DNA, 19 bp, Mus musculus
  siRNA target sequence for Sept6 (NM_019942.2,625-643).
gtgagctggcaaagttcaa

SEQ ID NO: 520464 - DNA, 19 bp, Mus musculus
  siRNA target sequence for Sept6 (NM_019942.2,632-650).
ggcaaagttcaagatcaaa

SEQ ID NO: 520465 - DNA, 19 bp, Mus musculus
  siRNA target sequence for Sept6 (NM_019942.2,633-651).
gcaaagttcaagatcaaaa

SEQ ID NO: 520466 - DNA, 19 bp, Mus musculus
  siRNA target sequence for Sept6 (NM_019942.2,710-728).
gtcggtgagcgagatcaat

SEQ ID NO: 520467 - DNA, 19 bp, Mus musculus
  siRNA target sequence for Sept6 (NM_019942.2,825-843).
gggactgtgcaggttgaaa

SEQ ID NO: 520468 - DNA, 19 bp, Mus musculus
  siRNA target sequence for Sept6 (NM_019942.2,826-844).
ggactgtgcaggttgaaaa

SEQ ID NO: 520469 - DNA, 19 bp, Mus musculus
  siRNA target sequence for Sept6 (NM_019942.2,829-847).
ctgtgcaggttgaaaacga

SEQ ID NO: 520470 - DNA, 19 bp, Mus musculus
  siRNA target sequence for Sept6 (NM_019942.2,1004-1022).
cagtttgcaggagacatat

SEQ ID NO: 520471 - DNA, 19 bp, Mus musculus
  siRNA target sequence for Sept6 (NM_019942.2,1006-1024).
gtttgcaggagacatatga

SEQ ID NO: 520472 - DNA, 19 bp, Mus musculus
  siRNA target sequence for Sept6 (NM_019942.2,1085-1103).
gtttgtccagagagtcaaa

SEQ ID NO: 520473 - DNA, 19 bp, Mus musculus
  siRNA target sequence for Sept7 (NM_009859.2,202-220).
ccgtgaaaagaggatttga

SEQ ID NO: 520474 - DNA, 19 bp, Mus musculus
  siRNA target sequence for Sept7 (NM_009859.2,203-221).
cgtgaaaagaggatttgaa

SEQ ID NO: 520475 - DNA, 19 bp, Mus musculus
  siRNA target sequence for Sept7 (NM_009859.2,256-274).
gaaagtcgacattaatcaa

SEQ ID NO: 520476 - DNA, 19 bp, Mus musculus
  siRNA target sequence for Sept7 (NM_009859.2,262-280).
cgacattaatcaactcatt

SEQ ID NO: 520477 - DNA, 19 bp, Mus musculus
  siRNA target sequence for Sept7 (NM_009859.2,265-283).
cattaatcaactcattatt

SEQ ID NO: 520478 - DNA, 19 bp, Mus musculus
  siRNA target sequence for Sept7 (NM_009859.2,313-331).
caggaccttctcatagaat

SEQ ID NO: 520479 - DNA, 19 bp, Mus musculus
  siRNA target sequence for Sept7 (NM_009859.2,348-366).
gtggagcaatccaaagttt

SEQ ID NO: 520480 - DNA, 19 bp, Mus musculus
  siRNA target sequence for Sept7 (NM_009859.2,350-368).
ggagcaatccaaagtttta

SEQ ID NO: 520481 - DNA, 19 bp, Mus musculus
  siRNA target sequence for Sept7 (NM_009859.2,351-369).
gagcaatccaaagttttaa

SEQ ID NO: 520482 - DNA, 19 bp, Mus musculus
  siRNA target sequence for Sept7 (NM_009859.2,392-410).
gctgctgacaatagttgat

SEQ ID NO: 520483 - DNA, 19 bp, Mus musculus
  siRNA target sequence for Sept7 (NM_009859.2,393-411).
ctgctgacaatagttgata

SEQ ID NO: 520484 - DNA, 19 bp, Mus musculus
  siRNA target sequence for Sept7 (NM_009859.2,395-413).
gctgacaatagttgatact

SEQ ID NO: 520485 - DNA, 19 bp, Mus musculus
  siRNA target sequence for Sept7 (NM_009859.2,426-444).
gatgcagtggataatagta

SEQ ID NO: 520486 - DNA, 19 bp, Mus musculus
  siRNA target sequence for Sept7 (NM_009859.2,429-447).
gcagtggataatagtaatt

SEQ ID NO: 520487 - DNA, 19 bp, Mus musculus
  siRNA target sequence for Sept7 (NM_009859.2,455-473).
gcctgttatcgactacatt

SEQ ID NO: 520488 - DNA, 19 bp, Mus musculus
  siRNA target sequence for Sept7 (NM_009859.2,457-475).
ctgttatcgactacattga

SEQ ID NO: 520489 - DNA, 19 bp, Mus musculus
  siRNA target sequence for Sept7 (NM_009859.2,459-477).
gttatcgactacattgata

SEQ ID NO: 520490 - DNA, 19 bp, Mus musculus
  siRNA target sequence for Sept7 (NM_009859.2,464-482).
cgactacattgatagtaaa

SEQ ID NO: 520491 - DNA, 19 bp, Mus musculus
  siRNA target sequence for Sept7 (NM_009859.2,465-483).
gactacattgatagtaaat

SEQ ID NO: 520492 - DNA, 19 bp, Mus musculus
  siRNA target sequence for Sept7 (NM_009859.2,467-485).
ctacattgatagtaaattt

SEQ ID NO: 520493 - DNA, 19 bp, Mus musculus
  siRNA target sequence for Sept7 (NM_009859.2,520-538).
gacgtcagatgcctgataa

SEQ ID NO: 520494 - DNA, 19 bp, Mus musculus
  siRNA target sequence for Sept7 (NM_009859.2,522-540).
cgtcagatgcctgataaca

SEQ ID NO: 520495 - DNA, 19 bp, Mus musculus
  siRNA target sequence for Sept7 (NM_009859.2,539-557).
cagggtgcagtgttgttta

SEQ ID NO: 520496 - DNA, 19 bp, Mus musculus
  siRNA target sequence for Sept7 (NM_009859.2,541-559).
gggtgcagtgttgtttata

SEQ ID NO: 520497 - DNA, 19 bp, Mus musculus
  siRNA target sequence for Sept7 (NM_009859.2,543-561).
gtgcagtgttgtttatact

SEQ ID NO: 520498 - DNA, 19 bp, Mus musculus
  siRNA target sequence for Sept7 (NM_009859.2,548-566).
gtgttgtttatacttcatt

SEQ ID NO: 520499 - DNA, 19 bp, Mus musculus
  siRNA target sequence for Sept7 (NM_009859.2,591-609).
ccattggacattgagttta

SEQ ID NO: 520500 - DNA, 19 bp, Mus musculus
  siRNA target sequence for Sept7 (NM_009859.2,592-610).
cattggacattgagtttat

SEQ ID NO: 520501 - DNA, 19 bp, Mus musculus
  siRNA target sequence for Sept7 (NM_009859.2,611-629).
gaaacgtttgcatgaaaaa

SEQ ID NO: 520502 - DNA, 19 bp, Mus musculus
  siRNA target sequence for Sept7 (NM_009859.2,630-648).
gtgaatatcatcccattaa

SEQ ID NO: 520503 - DNA, 19 bp, Mus musculus
  siRNA target sequence for Sept7 (NM_009859.2,768-786).
gagaataaactggttaaga

SEQ ID NO: 520504 - DNA, 19 bp, Mus musculus
  siRNA target sequence for Sept7 (NM_009859.2,813-831).
gtggtaggtagtaatacta

SEQ ID NO: 520505 - DNA, 19 bp, Mus musculus
  siRNA target sequence for Sept7 (NM_009859.2,816-834).
gtaggtagtaatactatca

SEQ ID NO: 520506 - DNA, 19 bp, Mus musculus
  siRNA target sequence for Sept7 (NM_009859.2,823-841).
gtaatactatcattgaagt

SEQ ID NO: 520507 - DNA, 19 bp, Mus musculus
  siRNA target sequence for Sept7 (NM_009859.2,891-909).
gttgaaaatggtgaacatt

SEQ ID NO: 520508 - DNA, 19 bp, Mus musculus
  siRNA target sequence for Sept7 (NM_009859.2,953-971).
gcaggacttgaaagatgtt

SEQ ID NO: 520509 - DNA, 19 bp, Mus musculus
  siRNA target sequence for Sept7 (NM_009859.2,959-977).
cttgaaagatgttaccaat

SEQ ID NO: 520510 - DNA, 19 bp, Mus musculus
  siRNA target sequence for Sept7 (NM_009859.2,973-991).
ccaataacgtacactatga

SEQ ID NO: 520511 - DNA, 19 bp, Mus musculus
  siRNA target sequence for Sept7 (NM_009859.2,1032-1050).
ggagtggataacaacaaga

SEQ ID NO: 520512 - DNA, 19 bp, Mus musculus
  siRNA target sequence for Sept7 (NM_009859.2,1033-1051).
gagtggataacaacaagaa

SEQ ID NO: 520513 - DNA, 19 bp, Mus musculus
  siRNA target sequence for Sept7 (NM_009859.2,1265-1283).
ggaaaaacgtcgtcagttt

SEQ ID NO: 520514 - DNA, 19 bp, Mus musculus
  siRNA target sequence for Sept7 (NM_009859.2,1309-1327).
ctcaacagcgtattttaga

SEQ ID NO: 520515 - DNA, 19 bp, Mus musculus
  siRNA target sequence for Sept8 (NM_033144.1,477-495).
cctccaagagagtaacgtt

SEQ ID NO: 520516 - DNA, 19 bp, Mus musculus
  siRNA target sequence for Sept8 (NM_033144.1,534-552).
cgatcagatcaataaggat

SEQ ID NO: 520517 - DNA, 19 bp, Mus musculus
  siRNA target sequence for Sept8 (NM_033144.1,557-575).
gttacaggcccatagttga

SEQ ID NO: 520518 - DNA, 19 bp, Mus musculus
  siRNA target sequence for Sept8 (NM_033144.1,585-603).
cgcgcagtttgaaaactat

SEQ ID NO: 520519 - DNA, 19 bp, Mus musculus
  siRNA target sequence for Sept8 (NM_033144.1,625-643).
cgccgttccctctttgact

SEQ ID NO: 520520 - DNA, 19 bp, Mus musculus
  siRNA target sequence for Sept8 (NM_033144.1,626-644).
gccgttccctctttgacta

SEQ ID NO: 520521 - DNA, 19 bp, Mus musculus
  siRNA target sequence for Sept8 (NM_033144.1,627-645).
ccgttccctctttgactat

SEQ ID NO: 520522 - DNA, 19 bp, Mus musculus
  siRNA target sequence for Sept8 (NM_033144.1,629-647).
gttccctctttgactatca

SEQ ID NO: 520523 - DNA, 19 bp, Mus musculus
  siRNA target sequence for Sept8 (NM_033144.1,649-667).
gacacgaggatccatgttt

SEQ ID NO: 520524 - DNA, 19 bp, Mus musculus
  siRNA target sequence for Sept8 (NM_033144.1,733-751).
ctagatagcaaggtgaata

SEQ ID NO: 520525 - DNA, 19 bp, Mus musculus
  siRNA target sequence for Sept8 (NM_033144.1,736-754).
gatagcaaggtgaatataa

SEQ ID NO: 520526 - DNA, 19 bp, Mus musculus
  siRNA target sequence for Sept8 (NM_033144.1,793-811).
gagctccacaagttcaaaa

SEQ ID NO: 520527 - DNA, 19 bp, Mus musculus
  siRNA target sequence for Sept8 (NM_033144.1,876-894).
ggctgtcgccgagattaat

SEQ ID NO: 520528 - DNA, 19 bp, Mus musculus
  siRNA target sequence for Sept8 (NM_033144.1,1390-1408).
gagaccaacgccttcaact

SEQ ID NO: 520529 - DNA, 19 bp, Mus musculus
  siRNA target sequence for Srprb (NM_009275.2,271-289).
ctgtttgtcaggttgctaa

SEQ ID NO: 520530 - DNA, 19 bp, Mus musculus
  siRNA target sequence for Srprb (NM_009275.2,323-341).
ccgatagttctgccatata

SEQ ID NO: 520531 - DNA, 19 bp, Mus musculus
  siRNA target sequence for Srprb (NM_009275.2,325-343).
gatagttctgccatataca

SEQ ID NO: 520532 - DNA, 19 bp, Mus musculus
  siRNA target sequence for Srprb (NM_009275.2,329-347).
gttctgccatatacaaagt

SEQ ID NO: 520533 - DNA, 19 bp, Mus musculus
  siRNA target sequence for Srprb (NM_009275.2,405-423).
gaggtttcagctcttagat

SEQ ID NO: 520534 - DNA, 19 bp, Mus musculus
  siRNA target sequence for Srprb (NM_009275.2,415-433).
ctcttagatcgctttaagt

SEQ ID NO: 520535 - DNA, 19 bp, Mus musculus
  siRNA target sequence for Srprb (NM_009275.2,417-435).
cttagatcgctttaagtct

SEQ ID NO: 520536 - DNA, 19 bp, Mus musculus
  siRNA target sequence for Srprb (NM_009275.2,477-495).
ccagcgggaggtgaaagat

SEQ ID NO: 520537 - DNA, 19 bp, Mus musculus
  siRNA target sequence for Srprb (NM_009275.2,489-507).
gaaagatgtggccgaattt

SEQ ID NO: 520538 - DNA, 19 bp, Mus musculus
  siRNA target sequence for Srprb (NM_009275.2,543-561).
gaactcaccgtccttatta

SEQ ID NO: 520539 - DNA, 19 bp, Mus musculus
  siRNA target sequence for Srprb (NM_009275.2,546-564).
ctcaccgtccttattaata

SEQ ID NO: 520540 - DNA, 19 bp, Mus musculus
  siRNA target sequence for Srprb (NM_009275.2,565-583).
gcctgcaataagcaagata

SEQ ID NO: 520541 - DNA, 19 bp, Mus musculus
  siRNA target sequence for Srprb (NM_009275.2,566-584).
cctgcaataagcaagatat

SEQ ID NO: 520542 - DNA, 19 bp, Mus musculus
  siRNA target sequence for Srprb (NM_009275.2,580-598).
gatatcgcaatggcaaaat

SEQ ID NO: 520543 - DNA, 19 bp, Mus musculus
  siRNA target sequence for Srprb (NM_009275.2,592-610).
gcaaaatcagcgaagttga

SEQ ID NO: 520544 - DNA, 19 bp, Mus musculus
  siRNA target sequence for Srprb (NM_009275.2,593-611).
caaaatcagcgaagttgat

SEQ ID NO: 520545 - DNA, 19 bp, Mus musculus
  siRNA target sequence for Srprb (NM_009275.2,737-755).
cccagttgccactcaaagt

SEQ ID NO: 520546 - DNA, 19 bp, Mus musculus
  siRNA target sequence for Srprb (NM_009275.2,825-843).
gaagtggctggccaagatt

SEQ ID NO: 520547 - DNA, 19 bp, Mus musculus
  siRNA target sequence for Suclg1 (NM_019879.1,118-136).
gcctctcggaaacatatct

SEQ ID NO: 520548 - DNA, 19 bp, Mus musculus
  siRNA target sequence for Suclg1 (NM_019879.1,119-137).
cctctcggaaacatatcta

SEQ ID NO: 520549 - DNA, 19 bp, Mus musculus
  siRNA target sequence for Suclg1 (NM_019879.1,120-138).
ctctcggaaacatatctat

SEQ ID NO: 520550 - DNA, 19 bp, Mus musculus
  siRNA target sequence for Suclg1 (NM_019879.1,122-140).
ctcggaaacatatctatat

SEQ ID NO: 520551 - DNA, 19 bp, Mus musculus
  siRNA target sequence for Suclg1 (NM_019879.1,126-144).
gaaacatatctatattgat

SEQ ID NO: 520552 - DNA, 19 bp, Mus musculus
  siRNA target sequence for Suclg1 (NM_019879.1,273-291).
gggcttgcccgtctttaat

SEQ ID NO: 520553 - DNA, 19 bp, Mus musculus
  siRNA target sequence for Suclg1 (NM_019879.1,274-292).
ggcttgcccgtctttaata

SEQ ID NO: 520554 - DNA, 19 bp, Mus musculus
  siRNA target sequence for Suclg1 (NM_019879.1,422-440).
gtattccgcagcaggatat

SEQ ID NO: 520555 - DNA, 19 bp, Mus musculus
  siRNA target sequence for Suclg1 (NM_019879.1,588-606).
gtccggtactctgacttat

SEQ ID NO: 520556 - DNA, 19 bp, Mus musculus
  siRNA target sequence for Suclg1 (NM_019879.1,590-608).
ccggtactctgacttatga

SEQ ID NO: 520557 - DNA, 19 bp, Mus musculus
  siRNA target sequence for Suclg1 (NM_019879.1,591-609).
cggtactctgacttatgaa

SEQ ID NO: 520558 - DNA, 19 bp, Mus musculus
  siRNA target sequence for Suclg1 (NM_019879.1,607-625).
gaagcagttcaccaaacaa

SEQ ID NO: 520559 - DNA, 19 bp, Mus musculus
  siRNA target sequence for Suclg1 (NM_019879.1,673-691).
ccttttaatgggactgatt

SEQ ID NO: 520560 - DNA, 19 bp, Mus musculus
  siRNA target sequence for Suclg1 (NM_019879.1,674-692).
cttttaatgggactgattt

SEQ ID NO: 520561 - DNA, 19 bp, Mus musculus
  siRNA target sequence for Suclg1 (NM_019879.1,728-746).
ccacagaaggcatcatact

SEQ ID NO: 520562 - DNA, 19 bp, Mus musculus
  siRNA target sequence for Suclg1 (NM_019879.1,760-778).
ggtggtcacgctgaagaaa

SEQ ID NO: 520563 - DNA, 19 bp, Mus musculus
  siRNA target sequence for Suclg1 (NM_019879.1,761-779).
gtggtcacgctgaagaaaa

SEQ ID NO: 520564 - DNA, 19 bp, Mus musculus
  siRNA target sequence for Suclg1 (NM_019879.1,788-806).
cgtttctgaaggagcataa

SEQ ID NO: 520565 - DNA, 19 bp, Mus musculus
  siRNA target sequence for Suclg1 (NM_019879.1,825-843).
gcctgtagtgtccttcatt

SEQ ID NO: 520566 - DNA, 19 bp, Mus musculus
  siRNA target sequence for Suclg1 (NM_019879.1,877-895).
ggccatgcaggggcaatta

SEQ ID NO: 520567 - DNA, 19 bp, Mus musculus
  siRNA target sequence for Suclg1 (NM_019879.1,913-931).
ggcgctaaagagaagatct

SEQ ID NO: 520568 - DNA, 19 bp, Mus musculus
  siRNA target sequence for Suclg1 (NM_019879.1,979-997).
ctgggaactaccatttata

SEQ ID NO: 520569 - DNA, 19 bp, Mus musculus
  siRNA target sequence for Trim23 (NM_030731.1,2012-2030).
ctttgcaaggagataaagt

SEQ ID NO: 520570 - DNA, 19 bp, Mus musculus
  siRNA target sequence for Trim23 (NM_030731.1,2091-2109).
gcatggaagagcaatacgt

SEQ ID NO: 520571 - DNA, 19 bp, Mus musculus
  siRNA target sequence for Trim23 (NM_030731.1,2092-2110).
catggaagagcaatacgtt

SEQ ID NO: 520572 - DNA, 19 bp, Mus musculus
  siRNA target sequence for Trim23 (NM_030731.1,2187-2205).
gcttttagaacgtttgcaa

SEQ ID NO: 520573 - DNA, 19 bp, Mus musculus
  siRNA target sequence for Trim23 (NM_030731.1,2265-2283).
catcattcgctgtgatgaa

SEQ ID NO: 520574 - DNA, 19 bp, Mus musculus
  siRNA target sequence for Trim23 (NM_030731.1,2296-2314).
gttgcatctgtatattgca

SEQ ID NO: 520575 - DNA, 19 bp, Mus musculus
  siRNA target sequence for Trim23 (NM_030731.1,2334-2352).
gtgctcagactgttctcaa

SEQ ID NO: 520576 - DNA, 19 bp, Mus musculus
  siRNA target sequence for Trim23 (NM_030731.1,2394-2412).
gcctctagctgataaacct

SEQ ID NO: 520577 - DNA, 19 bp, Mus musculus
  siRNA target sequence for Trim23 (NM_030731.1,2502-2520).
ctgtgtctgcaaagaatat

SEQ ID NO: 520578 - DNA, 19 bp, Mus musculus
  siRNA target sequence for Trim23 (NM_030731.1,2527-2545).
caccaaggtcacaagcatt

SEQ ID NO: 520579 - DNA, 19 bp, Mus musculus
  siRNA target sequence for Trim23 (NM_030731.1,2571-2589).
gatccgagcatcaatttta

SEQ ID NO: 520580 - DNA, 19 bp, Mus musculus
  siRNA target sequence for Trim23 (NM_030731.1,2620-2638).
gaggaaatctcagattatt

SEQ ID NO: 520581 - DNA, 19 bp, Mus musculus
  siRNA target sequence for Trim23 (NM_030731.1,2765-2783).
cttatttttctgatttaca

SEQ ID NO: 520582 - DNA, 19 bp, Mus musculus
  siRNA target sequence for Trim23 (NM_030731.1,2811-2829).
ggctctaagtgttgttgat

SEQ ID NO: 520583 - DNA, 19 bp, Mus musculus
  siRNA target sequence for Trim23 (NM_030731.1,2872-2890).
gaggatatgactattctct

SEQ ID NO: 520584 - DNA, 19 bp, Mus musculus
  siRNA target sequence for Trim23 (NM_030731.1,2978-2996).
caagattactagaaacact

SEQ ID NO: 520585 - DNA, 19 bp, Mus musculus
  siRNA target sequence for Trim23 (NM_030731.1,3112-3130).
cgagtagtcacattaggat

SEQ ID NO: 520586 - DNA, 19 bp, Mus musculus
  siRNA target sequence for Trim23 (NM_030731.1,3162-3180).
caagttaaaacaagatgaa

SEQ ID NO: 520587 - DNA, 19 bp, Mus musculus
  siRNA target sequence for Trim23 (NM_030731.1,3165-3183).
gttaaaacaagatgaattt

SEQ ID NO: 520588 - DNA, 19 bp, Mus musculus
  siRNA target sequence for Trim23 (NM_030731.1,3186-3204).
gcaacctattccaacaatt

SEQ ID NO: 520589 - DNA, 19 bp, Mus musculus
  siRNA target sequence for Trim23 (NM_030731.1,3191-3209).
ctattccaacaattggttt

SEQ ID NO: 520590 - DNA, 19 bp, Mus musculus
  siRNA target sequence for Trim23 (NM_030731.1,3259-3277).
gtgggtggaaaacacaaat

SEQ ID NO: 520591 - DNA, 19 bp, Mus musculus
  siRNA target sequence for Trim23 (NM_030731.1,3283-3301).
ccattgtggaaacattatt

SEQ ID NO: 520592 - DNA, 19 bp, Mus musculus
  siRNA target sequence for Trim23 (NM_030731.1,3306-3324).
caatacacaagctgttgta

SEQ ID NO: 520593 - DNA, 19 bp, Mus musculus
  siRNA target sequence for Trim23 (NM_030731.1,3322-3340).
gtatttgttgttgatagta

SEQ ID NO: 520594 - DNA, 19 bp, Mus musculus
  siRNA target sequence for Trim23 (NM_030731.1,3338-3356).
gtagtcatagagacagaat

SEQ ID NO: 520595 - DNA, 19 bp, Mus musculus
  siRNA target sequence for Trim23 (NM_030731.1,3371-3389).
gtgaacttgcaaagttgtt

SEQ ID NO: 520596 - DNA, 19 bp, Mus musculus
  siRNA target sequence for Trim23 (NM_030731.1,3403-3421).
ctccgagatgccttactct

SEQ ID NO: 520597 - DNA, 19 bp, Mus musculus
  siRNA target sequence for Trim23 (NM_030731.1,3504-3522).
ctgtggaaggagttggtat

SEQ ID NO: 520598 - DNA, 19 bp, Mus musculus
  siRNA target sequence for Trim23 (NM_030731.1,3509-3527).
gaaggagttggtatattca

SEQ ID NO: 520599 - DNA, 19 bp, Mus musculus
  siRNA target sequence for Tuba4 (NM_009447.2,162-180).
cagatgcccagcgataaga

SEQ ID NO: 520600 - DNA, 19 bp, Mus musculus
  siRNA target sequence for Tuba4 (NM_009447.2,269-287).
ggagcctactgtaatcgat

SEQ ID NO: 520601 - DNA, 19 bp, Mus musculus
  siRNA target sequence for Tuba4 (NM_009447.2,671-689).
ggacaacgaagccatttat

SEQ ID NO: 520602 - DNA, 19 bp, Mus musculus
  siRNA target sequence for Tuba4 (NM_009447.2,700-718).
gccgtaacctagatattga

SEQ ID NO: 520603 - DNA, 19 bp, Mus musculus
  siRNA target sequence for Tuba7 (NM_009449.2,358-376).
gccagaggtcattatacca

SEQ ID NO: 520604 - DNA, 19 bp, Mus musculus
  siRNA target sequence for Tuba7 (NM_009449.2,360-378).
cagaggtcattataccatt

SEQ ID NO: 520605 - DNA, 19 bp, Mus musculus
  siRNA target sequence for Tuba8 (NM_017379.1,394-412).
gggcaaggagagtatcgat

SEQ ID NO: 520606 - DNA, 19 bp, Mus musculus
  siRNA target sequence for Tuba8 (NM_017379.1,422-440).
gaccgaatccgtaaactga

SEQ ID NO: 520607 - DNA, 19 bp, Mus musculus
  siRNA target sequence for Tuba8 (NM_017379.1,702-720).
gccgcaggaacctggatat

SEQ ID NO: 520608 - DNA, 19 bp, Mus musculus
  siRNA target sequence for Tuba8 (NM_017379.1,705-723).
gcaggaacctggatattga

SEQ ID NO: 520609 - DNA, 19 bp, Mus musculus
  siRNA target sequence for Tuba8 (NM_017379.1,706-724).
caggaacctggatattgaa

SEQ ID NO: 520610 - DNA, 19 bp, Mus musculus
  siRNA target sequence for Tuba8 (NM_017379.1,722-740).
gaacgccccacctatacca

SEQ ID NO: 520611 - DNA, 19 bp, Mus musculus
  siRNA target sequence for Tuba8 (NM_017379.1,1074-1092).
ccaagagaactattcagtt

SEQ ID NO: 520612 - DNA, 19 bp, Mus musculus
  siRNA target sequence for Tuba8 (NM_017379.1,1078-1096).
gagaactattcagtttgtt

SEQ ID NO: 520613 - DNA, 19 bp, Mus musculus
  siRNA target sequence for Tuba8 (NM_017379.1,1369-1387).
ggggactgattcgtttgaa

SEQ ID NO: 520614 - DNA, 19 bp, Mus musculus
  siRNA target sequence for Tubb4 (NM_009451.3,428-446).
ggccacaggtggaaactat

SEQ ID NO: 520615 - DNA, 19 bp, Mus musculus
  siRNA target sequence for Tubb4 (NM_009451.3,431-449).
cacaggtggaaactatgtt

SEQ ID NO: 520616 - DNA, 19 bp, Mus musculus
  siRNA target sequence for Tubb4 (NM_009451.3,525-543).
cggccagacaactttgtat

SEQ ID NO: 520617 - DNA, 19 bp, Mus musculus
  siRNA target sequence for Tubb4 (NM_009451.3,750-768).
gacaggatcatgaatacgt

SEQ ID NO: 520618 - DNA, 19 bp, Mus musculus
  siRNA target sequence for Tubb4 (NM_009451.3,1245-1263).
gtagacgagcagatgttaa

SEQ ID NO: 520619 - DNA, 19 bp, Mus musculus
  siRNA target sequence for Tubb5 (NM_011655.2,220-238).
ggtgataagcgatgaacat

SEQ ID NO: 520620 - DNA, 19 bp, Mus musculus
  siRNA target sequence for Tubb5 (NM_011655.2,289-307).
ccgaatctctgtgtactat

SEQ ID NO: 520621 - DNA, 19 bp, Mus musculus
  siRNA target sequence for Tubb5 (NM_011655.2,290-308).
cgaatctctgtgtactata

SEQ ID NO: 520622 - DNA, 19 bp, Mus musculus
  siRNA target sequence for Tubb5 (NM_011655.2,342-360).
ctatcttggtggatctaga

SEQ ID NO: 520623 - DNA, 19 bp, Mus musculus
  siRNA target sequence for Tubb5 (NM_011655.2,379-397).
cgttcgctcaggtcctttt

SEQ ID NO: 520624 - DNA, 19 bp, Mus musculus
  siRNA target sequence for Tubb5 (NM_011655.2,632-650).
cctgaccgtatcatgaata

SEQ ID NO: 520625 - DNA, 19 bp, Mus musculus
  siRNA target sequence for Tubb5 (NM_011655.2,1004-1022).
ctcactgtgcctgaactta

SEQ ID NO: 520626 - DNA, 19 bp, Mus musculus
  siRNA target sequence for Tubd1 (NM_019756.1,238-256).
gggacaacgaggcatatca

SEQ ID NO: 520627 - DNA, 19 bp, Mus musculus
  siRNA target sequence for Tubd1 (NM_019756.1,239-257).
ggacaacgaggcatatcaa

SEQ ID NO: 520628 - DNA, 19 bp, Mus musculus
  siRNA target sequence for Tubd1 (NM_019756.1,327-345).
gacatggaacctaaagtta

SEQ ID NO: 520629 - DNA, 19 bp, Mus musculus
  siRNA target sequence for Tubd1 (NM_019756.1,332-350).
ggaacctaaagttatcaat

SEQ ID NO: 520630 - DNA, 19 bp, Mus musculus
  siRNA target sequence for Tubd1 (NM_019756.1,371-389).
ccagtctggccgatggaat

SEQ ID NO: 520631 - DNA, 19 bp, Mus musculus
  siRNA target sequence for Tubd1 (NM_019756.1,372-390).
cagtctggccgatggaatt

SEQ ID NO: 520632 - DNA, 19 bp, Mus musculus
  siRNA target sequence for Tubd1 (NM_019756.1,374-392).
gtctggccgatggaattat

SEQ ID NO: 520633 - DNA, 19 bp, Mus musculus
  siRNA target sequence for Tubd1 (NM_019756.1,393-411).
ggtcagcacacgagttttt

SEQ ID NO: 520634 - DNA, 19 bp, Mus musculus
  siRNA target sequence for Tubd1 (NM_019756.1,420-438).
caaggatctgggaacaact

SEQ ID NO: 520635 - DNA, 19 bp, Mus musculus
  siRNA target sequence for Tubd1 (NM_019756.1,437-455).
ctgggcatacggttactct

SEQ ID NO: 520636 - DNA, 19 bp, Mus musculus
  siRNA target sequence for Tubd1 (NM_019756.1,462-480).
ggaccgaagcatgaagaat

SEQ ID NO: 520637 - DNA, 19 bp, Mus musculus
  siRNA target sequence for Tubd1 (NM_019756.1,465-483).
ccgaagcatgaagaatcta

SEQ ID NO: 520638 - DNA, 19 bp, Mus musculus
  siRNA target sequence for Tubd1 (NM_019756.1,481-499).
ctataatgaacttaatcca

SEQ ID NO: 520639 - DNA, 19 bp, Mus musculus
  siRNA target sequence for Tubd1 (NM_019756.1,510-528).
gagaaatgtgactctttga

SEQ ID NO: 520640 - DNA, 19 bp, Mus musculus
  siRNA target sequence for Tubd1 (NM_019756.1,512-530).
gaaatgtgactctttgagt

SEQ ID NO: 520641 - DNA, 19 bp, Mus musculus
  siRNA target sequence for Tubd1 (NM_019756.1,529-547).
gtggatttttcatcataat

SEQ ID NO: 520642 - DNA, 19 bp, Mus musculus
  siRNA target sequence for Tubd1 (NM_019756.1,531-549).
ggatttttcatcataatga

SEQ ID NO: 520643 - DNA, 19 bp, Mus musculus
  siRNA target sequence for Tubd1 (NM_019756.1,573-591).
gggctgggagccttcgtta

SEQ ID NO: 520644 - DNA, 19 bp, Mus musculus
  siRNA target sequence for Tubd1 (NM_019756.1,638-656).
gattatatggccttatgga

SEQ ID NO: 520645 - DNA, 19 bp, Mus musculus
  siRNA target sequence for Tubd1 (NM_019756.1,718-736).
cttcagatgcccttctcat

SEQ ID NO: 520646 - DNA, 19 bp, Mus musculus
  siRNA target sequence for Tubd1 (NM_019756.1,766-784).
gtgccaaacggatgaacat

SEQ ID NO: 520647 - DNA, 19 bp, Mus musculus
  siRNA target sequence for Tubd1 (NM_019756.1,796-814).
ccttcagagacttaaatca

SEQ ID NO: 520648 - DNA, 19 bp, Mus musculus
  siRNA target sequence for Tubd1 (NM_019756.1,802-820).
gagacttaaatcaagttct

SEQ ID NO: 520649 - DNA, 19 bp, Mus musculus
  siRNA target sequence for Tubd1 (NM_019756.1,838-856).
gtgtgttccagcctacata

SEQ ID NO: 520650 - DNA, 19 bp, Mus musculus
  siRNA target sequence for Tubd1 (NM_019756.1,857-875).
ctctgaggacagctcattt

SEQ ID NO: 520651 - DNA, 19 bp, Mus musculus
  siRNA target sequence for Tubd1 (NM_019756.1,861-879).
gaggacagctcatttcact

SEQ ID NO: 520652 - DNA, 19 bp, Mus musculus
  siRNA target sequence for Tubd1 (NM_019756.1,902-920).
cttaatggagcatttagtt

SEQ ID NO: 520653 - DNA, 19 bp, Mus musculus
  siRNA target sequence for Tubd1 (NM_019756.1,918-936).
gttcctcaccctgaattta

SEQ ID NO: 520654 - DNA, 19 bp, Mus musculus
  siRNA target sequence for Tubd1 (NM_019756.1,922-940).
ctcaccctgaatttaagat

SEQ ID NO: 520655 - DNA, 19 bp, Mus musculus
  siRNA target sequence for Tubd1 (NM_019756.1,941-959).
gctgggtgtccgtaacatt

SEQ ID NO: 520656 - DNA, 19 bp, Mus musculus
  siRNA target sequence for Tubd1 (NM_019756.1,984-1002).
gcgtacagcgcgtttacct

SEQ ID NO: 520657 - DNA, 19 bp, Mus musculus
  siRNA target sequence for Tubd1 (NM_019756.1,1020-1038).
cacttaagacagatgctta

SEQ ID NO: 520658 - DNA, 19 bp, Mus musculus
  siRNA target sequence for Tubd1 (NM_019756.1,1034-1052).
gcttatttccagtgcaaaa

SEQ ID NO: 520659 - DNA, 19 bp, Mus musculus
  siRNA target sequence for Tubd1 (NM_019756.1,1124-1142).
ccacaaggagcatcatttt

SEQ ID NO: 520660 - DNA, 19 bp, Mus musculus
  siRNA target sequence for Tubd1 (NM_019756.1,1125-1143).
cacaaggagcatcatttta

SEQ ID NO: 520661 - DNA, 19 bp, Mus musculus
  siRNA target sequence for Tubd1 (NM_019756.1,1130-1148).
ggagcatcattttaacact

SEQ ID NO: 520662 - DNA, 19 bp, Mus musculus
  siRNA target sequence for Tubd1 (NM_019756.1,1195-1213).
cagacgtagagggatttaa

SEQ ID NO: 520663 - DNA, 19 bp, Mus musculus
  siRNA target sequence for Tubd1 (NM_019756.1,1244-1262).
gcctgttgatgctttcagt

SEQ ID NO: 520664 - DNA, 19 bp, Mus musculus
  siRNA target sequence for Tubd1 (NM_019756.1,1248-1266).
gttgatgctttcagtgtat

SEQ ID NO: 520665 - DNA, 19 bp, Mus musculus
  siRNA target sequence for Tubd1 (NM_019756.1,1273-1291).
cccagcgagcctttgacaa

SEQ ID NO: 520666 - DNA, 19 bp, Mus musculus
  siRNA target sequence for Tubd1 (NM_019756.1,1335-1353).
gtaaagccactggatatga

SEQ ID NO: 520667 - DNA, 19 bp, Mus musculus
  siRNA target sequence for Tubd1 (NM_019756.1,1356-1374).
gtgggcaaggcgtggaata

SEQ ID NO: 520668 - DNA, 19 bp, Mus musculus
  siRNA target sequence for Tubd1 (NM_019756.1,1359-1377).
ggcaaggcgtggaatatgt

SEQ ID NO: 520669 - DNA, 19 bp, Mus musculus
  siRNA target sequence for Tubd1 (NM_019756.1,1360-1378).
gcaaggcgtggaatatgtt

SEQ ID NO: 520670 - DNA, 19 bp, Mus musculus
  siRNA target sequence for Tubd1 (NM_019756.1,1365-1383).
gcgtggaatatgttctcat

SEQ ID NO: 520671 - DNA, 19 bp, Mus musculus
  siRNA target sequence for Tubd1 (NM_019756.1,1401-1419).
cagtacacaaaatttggaa

SEQ ID NO: 520672 - DNA, 19 bp, Mus musculus
  siRNA target sequence for Tubd1 (NM_019756.1,1450-1468).
cattgttggagcaagttgt

SEQ ID NO: 520673 - DNA, 19 bp, Mus musculus
  siRNA target sequence for Tubd1 (NM_019756.1,1460-1478).
gcaagttgttgccagttat

SEQ ID NO: 520674 - DNA, 19 bp, Mus musculus
  siRNA target sequence for Tubd1 (NM_019756.1,1464-1482).
gttgttgccagttatggta

SEQ ID NO: 520675 - DNA, 19 bp, Mus musculus
  siRNA target sequence for Tubg1 (NM_134024.1,463-481).
ggatttgtactgtgtcatt

SEQ ID NO: 520676 - DNA, 19 bp, Mus musculus
  siRNA target sequence for Tubg1 (NM_134024.1,523-541).
ctggaacggctaaatgaca

SEQ ID NO: 520677 - DNA, 19 bp, Mus musculus
  siRNA target sequence for Tubg1 (NM_134024.1,540-558).
caggtaccccaaaaaacta

SEQ ID NO: 520678 - DNA, 19 bp, Mus musculus
  siRNA target sequence for Tubg1 (NM_134024.1,542-560).
ggtaccccaaaaaactagt

SEQ ID NO: 520679 - DNA, 19 bp, Mus musculus
  siRNA target sequence for Tubg1 (NM_134024.1,1232-1250).
ggacctgtcgccagtttga

SEQ ID NO: 520680 - DNA, 19 bp, Mus musculus
  siRNA target sequence for Tubg1 (NM_134024.1,1235-1253).
cctgtcgccagtttgacaa

SEQ ID NO: 520681 - DNA, 19 bp, Mus musculus
  siRNA target sequence for Tubg2 (NM_134028.1,695-713).
ggtaccccaagaaattggt

SEQ ID NO: 520682 - DNA, 19 bp, Mus musculus
  siRNA target sequence for Tubg2 (NM_134028.1,1368-1386).
ctcctcgctttttgaaagt

SEQ ID NO: 520683 - DNA, 19 bp, Mus musculus
  siRNA target sequence for Tubg2 (NM_134028.1,1385-1403).
gttcctgccagcagtatga

SEQ ID NO: 520684 - DNA, 19 bp, Mus musculus
  siRNA target sequence for Zfp179 (NM_009548.2,389-407).
cctgaatgccggaagatct

SEQ ID NO: 520685 - DNA, 19 bp, Mus musculus
  siRNA target sequence for Zfp179 (NM_009548.2,392-410).
gaatgccggaagatctgta

SEQ ID NO: 520686 - DNA, 19 bp, Mus musculus
  siRNA target sequence for Zfp179 (NM_009548.2,397-415).
ccggaagatctgtaagcaa

SEQ ID NO: 520687 - DNA, 19 bp, Mus musculus
  siRNA target sequence for Zfp179 (NM_009548.2,398-416).
cggaagatctgtaagcaaa

SEQ ID NO: 520688 - DNA, 19 bp, Mus musculus
  siRNA target sequence for Zfp179 (NM_009548.2,513-531).
gtctgctgttggtacgaat

SEQ ID NO: 520689 - DNA, 19 bp, Mus musculus
  siRNA target sequence for Zfp179 (NM_009548.2,517-535).
gctgttggtacgaatcaat

SEQ ID NO: 520690 - DNA, 19 bp, Mus musculus
  siRNA target sequence for Zfp179 (NM_009548.2,602-620).
gacacacccgtctgcttat

SEQ ID NO: 520691 - DNA, 19 bp, Mus musculus
  siRNA target sequence for Zfp179 (NM_009548.2,645-663).
caggaaagtccttcctttt

SEQ ID NO: 520692 - DNA, 19 bp, Mus musculus
  siRNA target sequence for Zfp179 (NM_009548.2,960-978).
ccgatctgggctatctaga

SEQ ID NO: 520693 - DNA, 19 bp, Mus musculus
  siRNA target sequence for Zfp179 (NM_009548.2,998-1016).
gaggtgatgggcaaacatt

SEQ ID NO: 520694 - DNA, 19 bp, Mus musculus
  siRNA target sequence for Zfp179 (NM_009548.2,1033-1051).
ccagcatctggatctctta

SEQ ID NO: 520695 - DNA, 19 bp, Mus musculus
  siRNA target sequence for Zfp179 (NM_009548.2,1055-1073).
cgagactcttcccatcata

SEQ ID NO: 520696 - DNA, 19 bp, Mus musculus
  siRNA target sequence for Zfp179 (NM_009548.2,1056-1074).
gagactcttcccatcataa

SEQ ID NO: 520697 - DNA, 19 bp, Mus musculus
  siRNA target sequence for Zfp179 (NM_009548.2,1058-1076).
gactcttcccatcataata

SEQ ID NO: 520698 - DNA, 19 bp, Mus musculus
  siRNA target sequence for Zfp179 (NM_009548.2,1089-1107).
ggcacgtgggtgacatact

SEQ ID NO: 520699 - DNA, 19 bp, Mus musculus
  siRNA target sequence for Cnga1 (NM_007723.1,349-367).
gagcaaggccgatgataaa

SEQ ID NO: 520700 - DNA, 19 bp, Mus musculus
  siRNA target sequence for Cnga1 (NM_007723.1,352-370).
caaggccgatgataaaaat

SEQ ID NO: 520701 - DNA, 19 bp, Mus musculus
  siRNA target sequence for Cnga1 (NM_007723.1,494-512).
ggaaacacatactacaact

SEQ ID NO: 520702 - DNA, 19 bp, Mus musculus
  siRNA target sequence for Cnga1 (NM_007723.1,541-559).
gtacaactggacgatgatt

SEQ ID NO: 520703 - DNA, 19 bp, Mus musculus
  siRNA target sequence for Cnga1 (NM_007723.1,544-562).
caactggacgatgattatt

SEQ ID NO: 520704 - DNA, 19 bp, Mus musculus
  siRNA target sequence for Cnga1 (NM_007723.1,547-565).
ctggacgatgattattgca

SEQ ID NO: 520705 - DNA, 19 bp, Mus musculus
  siRNA target sequence for Cnga1 (NM_007723.1,564-582).
caagagcatgttttgatga

SEQ ID NO: 520706 - DNA, 19 bp, Mus musculus
  siRNA target sequence for Cnga1 (NM_007723.1,578-596).
gatgaactccagtctgatt

SEQ ID NO: 520707 - DNA, 19 bp, Mus musculus
  siRNA target sequence for Cnga1 (NM_007723.1,599-617).
ctagaatactggctcattt

SEQ ID NO: 520708 - DNA, 19 bp, Mus musculus
  siRNA target sequence for Cnga1 (NM_007723.1,611-629).
ctcatttttgattacgtat

SEQ ID NO: 520709 - DNA, 19 bp, Mus musculus
  siRNA target sequence for Cnga1 (NM_007723.1,735-753).
caaacctgcagtttaaact

SEQ ID NO: 520710 - DNA, 19 bp, Mus musculus
  siRNA target sequence for Cnga1 (NM_007723.1,774-792).
cgaccgatctgctgtacat

SEQ ID NO: 520711 - DNA, 19 bp, Mus musculus
  siRNA target sequence for Cnga1 (NM_007723.1,801-819).
ggtggaactatccagaaat

SEQ ID NO: 520712 - DNA, 19 bp, Mus musculus
  siRNA target sequence for Cnga1 (NM_007723.1,912-930).
cgaaccttgtgatgtacat

SEQ ID NO: 520713 - DNA, 19 bp, Mus musculus
  siRNA target sequence for Cnga1 (NM_007723.1,948-966).
ggaacgcttgtgtgtatta

SEQ ID NO: 520714 - DNA, 19 bp, Mus musculus
  siRNA target sequence for Cnga1 (NM_007723.1,949-967).
gaacgcttgtgtgtattat

SEQ ID NO: 520715 - DNA, 19 bp, Mus musculus
  siRNA target sequence for Cnga1 (NM_007723.1,970-988).
catctcaaaagctattgga

SEQ ID NO: 520716 - DNA, 19 bp, Mus musculus
  siRNA target sequence for Cnga1 (NM_007723.1,1005-1023).
gggtctaccctgatgttaa

SEQ ID NO: 520717 - DNA, 19 bp, Mus musculus
  siRNA target sequence for Cnga1 (NM_007723.1,1006-1024).
ggtctaccctgatgttaat

SEQ ID NO: 520718 - DNA, 19 bp, Mus musculus
  siRNA target sequence for Cnga1 (NM_007723.1,1031-1049).
gaattcggccgtttagcta

SEQ ID NO: 520719 - DNA, 19 bp, Mus musculus
  siRNA target sequence for Cnga1 (NM_007723.1,1036-1054).
cggccgtttagctagaaaa

SEQ ID NO: 520720 - DNA, 19 bp, Mus musculus
  siRNA target sequence for Cnga1 (NM_007723.1,1037-1055).
ggccgtttagctagaaaat

SEQ ID NO: 520721 - DNA, 19 bp, Mus musculus
  siRNA target sequence for Cnga1 (NM_007723.1,1038-1056).
gccgtttagctagaaaata

SEQ ID NO: 520722 - DNA, 19 bp, Mus musculus
  siRNA target sequence for Cnga1 (NM_007723.1,1039-1057).
ccgtttagctagaaaatat

SEQ ID NO: 520723 - DNA, 19 bp, Mus musculus
  siRNA target sequence for Cnga1 (NM_007723.1,1058-1076).
gtctacagcctttattggt

SEQ ID NO: 520724 - DNA, 19 bp, Mus musculus
  siRNA target sequence for Cnga1 (NM_007723.1,1067-1085).
ctttattggtctactttga

SEQ ID NO: 520725 - DNA, 19 bp, Mus musculus
  siRNA target sequence for Cnga1 (NM_007723.1,1090-1108).
gacaaccattggtgaaact

SEQ ID NO: 520726 - DNA, 19 bp, Mus musculus
  siRNA target sequence for Cnga1 (NM_007723.1,1142-1160).
gtggtggtagacttcttaa

SEQ ID NO: 520727 - DNA, 19 bp, Mus musculus
  siRNA target sequence for Cnga1 (NM_007723.1,1144-1162).
ggtggtagacttcttaatt

SEQ ID NO: 520728 - DNA, 19 bp, Mus musculus
  siRNA target sequence for Cnga1 (NM_007723.1,1147-1165).
ggtagacttcttaattgga

SEQ ID NO: 520729 - DNA, 19 bp, Mus musculus
  siRNA target sequence for Cnga1 (NM_007723.1,1180-1198).
caccattgtcggtaacata

SEQ ID NO: 520730 - DNA, 19 bp, Mus musculus
  siRNA target sequence for Cnga1 (NM_007723.1,1231-1249).
ggcagaatttcaatcaaga

SEQ ID NO: 520731 - DNA, 19 bp, Mus musculus
  siRNA target sequence for Cnga1 (NM_007723.1,1245-1263).
caagagttgatgctatcaa

SEQ ID NO: 520732 - DNA, 19 bp, Mus musculus
  siRNA target sequence for Cnga1 (NM_007723.1,1248-1266).
gagttgatgctatcaaaca

SEQ ID NO: 520733 - DNA, 19 bp, Mus musculus
  siRNA target sequence for Cnga1 (NM_007723.1,1250-1268).
gttgatgctatcaaacagt

SEQ ID NO: 520734 - DNA, 19 bp, Mus musculus
  siRNA target sequence for Cnga1 (NM_007723.1,1256-1274).
gctatcaaacagtacatga

SEQ ID NO: 520735 - DNA, 19 bp, Mus musculus
  siRNA target sequence for Cnga1 (NM_007723.1,1257-1275).
ctatcaaacagtacatgaa

SEQ ID NO: 520736 - DNA, 19 bp, Mus musculus
  siRNA target sequence for Cnga1 (NM_007723.1,1265-1283).
cagtacatgaattttcgaa

SEQ ID NO: 520737 - DNA, 19 bp, Mus musculus
  siRNA target sequence for Cnga1 (NM_007723.1,1327-1345).
ctacctgtggaccaacaaa

SEQ ID NO: 520738 - DNA, 19 bp, Mus musculus
  siRNA target sequence for Cnga1 (NM_007723.1,1372-1390).
gagatacctccctgacaaa

SEQ ID NO: 520739 - DNA, 19 bp, Mus musculus
  siRNA target sequence for Cnga1 (NM_007723.1,1374-1392).
gatacctccctgacaaact

SEQ ID NO: 520740 - DNA, 19 bp, Mus musculus
  siRNA target sequence for Cnga1 (NM_007723.1,1407-1425).
ccatcaacgttcatctaga

SEQ ID NO: 520741 - DNA, 19 bp, Mus musculus
  siRNA target sequence for Cnga1 (NM_007723.1,1415-1433).
gttcatctagacacgttaa

SEQ ID NO: 520742 - DNA, 19 bp, Mus musculus
  siRNA target sequence for Cnga1 (NM_007723.1,1418-1436).
catctagacacgttaaaaa

SEQ ID NO: 520743 - DNA, 19 bp, Mus musculus
  siRNA target sequence for Cnga1 (NM_007723.1,1474-1492).
ggtggagttggtgttgaaa

SEQ ID NO: 520744 - DNA, 19 bp, Mus musculus
  siRNA target sequence for Cnga1 (NM_007723.1,1480-1498).
gttggtgttgaaactacaa

SEQ ID NO: 520745 - DNA, 19 bp, Mus musculus
  siRNA target sequence for Cnga1 (NM_007723.1,1589-1607).
gtggcagatgacggaatta

SEQ ID NO: 520746 - DNA, 19 bp, Mus musculus
  siRNA target sequence for Cnga1 (NM_007723.1,1643-1661).
ggtgagatcagcattctta

SEQ ID NO: 520747 - DNA, 19 bp, Mus musculus
  siRNA target sequence for Cnga1 (NM_007723.1,1644-1662).
gtgagatcagcattcttaa

SEQ ID NO: 520748 - DNA, 19 bp, Mus musculus
  siRNA target sequence for Cnga1 (NM_007723.1,1687-1705).
ccgaagaacagccaacatt

SEQ ID NO: 520749 - DNA, 19 bp, Mus musculus
  siRNA target sequence for Cnga1 (NM_007723.1,1688-1706).
cgaagaacagccaacatta

SEQ ID NO: 520750 - DNA, 19 bp, Mus musculus
  siRNA target sequence for Cnga1 (NM_007723.1,1689-1707).
gaagaacagccaacattaa

SEQ ID NO: 520751 - DNA, 19 bp, Mus musculus
  siRNA target sequence for Cnga1 (NM_007723.1,1771-1789).
gtacccagatgccaaaact

SEQ ID NO: 520752 - DNA, 19 bp, Mus musculus
  siRNA target sequence for Cnga1 (NM_007723.1,1801-1819).
gaaagggaggcagatctta

SEQ ID NO: 520753 - DNA, 19 bp, Mus musculus
  siRNA target sequence for Cnga1 (NM_007723.1,1806-1824).
ggaggcagatcttaatgaa

SEQ ID NO: 520754 - DNA, 19 bp, Mus musculus
  siRNA target sequence for Cnga1 (NM_007723.1,1809-1827).
ggcagatcttaatgaaaga

SEQ ID NO: 520755 - DNA, 19 bp, Mus musculus
  siRNA target sequence for Cnga1 (NM_007723.1,1810-1828).
gcagatcttaatgaaagat

SEQ ID NO: 520756 - DNA, 19 bp, Mus musculus
  siRNA target sequence for Cnga1 (NM_007723.1,1826-1844).
gatggtctgctggatataa

SEQ ID NO: 520757 - DNA, 19 bp, Mus musculus
  siRNA target sequence for Cnga1 (NM_007723.1,1959-1977).
cgatgcagcagaaactcaa

SEQ ID NO: 520758 - DNA, 19 bp, Mus musculus
  siRNA target sequence for Cnga1 (NM_007723.1,1989-2007).
ccaaggtcgagaaatttct

SEQ ID NO: 520759 - DNA, 19 bp, Mus musculus
  siRNA target sequence for Cnga1 (NM_007723.1,1993-2011).
ggtcgagaaatttctgaaa

SEQ ID NO: 520760 - DNA, 19 bp, Mus musculus
  siRNA target sequence for Cnga1 (NM_007723.1,2008-2026).
gaaaccgcttattgaaaca

SEQ ID NO: 520761 - DNA, 19 bp, Mus musculus
  siRNA target sequence for Cnga1 (NM_007723.1,2012-2030).
ccgcttattgaaacagaat

SEQ ID NO: 520762 - DNA, 19 bp, Mus musculus
  siRNA target sequence for Cngb3 (NM_013927.1,94-112).
cactgacagtaaaattcaa

SEQ ID NO: 520763 - DNA, 19 bp, Mus musculus
  siRNA target sequence for Cngb3 (NM_013927.1,232-250).
ggacaccaatcacatttga

SEQ ID NO: 520764 - DNA, 19 bp, Mus musculus
  siRNA target sequence for Cngb3 (NM_013927.1,233-251).
gacaccaatcacatttgaa

SEQ ID NO: 520765 - DNA, 19 bp, Mus musculus
  siRNA target sequence for Cngb3 (NM_013927.1,411-429).
gtgcttgaaacctcaatta

SEQ ID NO: 520766 - DNA, 19 bp, Mus musculus
  siRNA target sequence for Cngb3 (NM_013927.1,484-502).
ggactgctctctacaagaa

SEQ ID NO: 520767 - DNA, 19 bp, Mus musculus
  siRNA target sequence for Cngb3 (NM_013927.1,489-507).
gctctctacaagaaaacat

SEQ ID NO: 520768 - DNA, 19 bp, Mus musculus
  siRNA target sequence for Cngb3 (NM_013927.1,565-583).
caaatatatcaccaaaaca

SEQ ID NO: 520769 - DNA, 19 bp, Mus musculus
  siRNA target sequence for Cngb3 (NM_013927.1,585-603).
gagaacaattccaagctaa

SEQ ID NO: 520770 - DNA, 19 bp, Mus musculus
  siRNA target sequence for Cngb3 (NM_013927.1,587-605).
gaacaattccaagctaaaa

SEQ ID NO: 520771 - DNA, 19 bp, Mus musculus
  siRNA target sequence for Cngb3 (NM_013927.1,590-608).
caattccaagctaaaagaa

SEQ ID NO: 520772 - DNA, 19 bp, Mus musculus
  siRNA target sequence for Cngb3 (NM_013927.1,609-627).
caccaagacacgttttctt

SEQ ID NO: 520773 - DNA, 19 bp, Mus musculus
  siRNA target sequence for Cngb3 (NM_013927.1,634-652).
cccagagagtcccagtaaa

SEQ ID NO: 520774 - DNA, 19 bp, Mus musculus
  siRNA target sequence for Cngb3 (NM_013927.1,635-653).
ccagagagtcccagtaaaa

SEQ ID NO: 520775 - DNA, 19 bp, Mus musculus
  siRNA target sequence for Cngb3 (NM_013927.1,732-750).
gtcaccattgcgtataact

SEQ ID NO: 520776 - DNA, 19 bp, Mus musculus
  siRNA target sequence for Cngb3 (NM_013927.1,741-759).
gcgtataactggaactgtt

SEQ ID NO: 520777 - DNA, 19 bp, Mus musculus
  siRNA target sequence for Cngb3 (NM_013927.1,771-789).
gtgcgcctcgtctttccat

SEQ ID NO: 520778 - DNA, 19 bp, Mus musculus
  siRNA target sequence for Cngb3 (NM_013927.1,826-844).
ctgacatcgtatgtgatat

SEQ ID NO: 520779 - DNA, 19 bp, Mus musculus
  siRNA target sequence for Cngb3 (NM_013927.1,828-846).
gacatcgtatgtgatatca

SEQ ID NO: 520780 - DNA, 19 bp, Mus musculus
  siRNA target sequence for Cngb3 (NM_013927.1,875-893).
gccaagactccaatttgta

SEQ ID NO: 520781 - DNA, 19 bp, Mus musculus
  siRNA target sequence for Cngb3 (NM_013927.1,935-953).
gaactaccggagttctaca

SEQ ID NO: 520782 - DNA, 19 bp, Mus musculus
  siRNA target sequence for Cngb3 (NM_013927.1,962-980).
gatggatgtggcatctcta

SEQ ID NO: 520783 - DNA, 19 bp, Mus musculus
  siRNA target sequence for Cngb3 (NM_013927.1,985-1003).
cattcgaagttctctacat

SEQ ID NO: 520784 - DNA, 19 bp, Mus musculus
  siRNA target sequence for Cngb3 (NM_013927.1,1011-1029).
ggagttaatccaatattca

SEQ ID NO: 520785 - DNA, 19 bp, Mus musculus
  siRNA target sequence for Cngb3 (NM_013927.1,1028-1046).
cagagcaaatcggatatta

SEQ ID NO: 520786 - DNA, 19 bp, Mus musculus
  siRNA target sequence for Cngb3 (NM_013927.1,1030-1048).
gagcaaatcggatattaaa

SEQ ID NO: 520787 - DNA, 19 bp, Mus musculus
  siRNA target sequence for Cngb3 (NM_013927.1,1032-1050).
gcaaatcggatattaaagt

SEQ ID NO: 520788 - DNA, 19 bp, Mus musculus
  siRNA target sequence for Cngb3 (NM_013927.1,1033-1051).
caaatcggatattaaagta

SEQ ID NO: 520789 - DNA, 19 bp, Mus musculus
  siRNA target sequence for Cngb3 (NM_013927.1,1038-1056).
cggatattaaagtatactt

SEQ ID NO: 520790 - DNA, 19 bp, Mus musculus
  siRNA target sequence for Cngb3 (NM_013927.1,1112-1130).
cagagtcatccgaacaact

SEQ ID NO: 520791 - DNA, 19 bp, Mus musculus
  siRNA target sequence for Cngb3 (NM_013927.1,1191-1209).
gaaggaattggctcaacta

SEQ ID NO: 520792 - DNA, 19 bp, Mus musculus
  siRNA target sequence for Cngb3 (NM_013927.1,1194-1212).
ggaattggctcaactaaat

SEQ ID NO: 520793 - DNA, 19 bp, Mus musculus
  siRNA target sequence for Cngb3 (NM_013927.1,1258-1276).
gggcagttcgaactttaat

SEQ ID NO: 520794 - DNA, 19 bp, Mus musculus
  siRNA target sequence for Cngb3 (NM_013927.1,1259-1277).
ggcagttcgaactttaatt

SEQ ID NO: 520795 - DNA, 19 bp, Mus musculus
  siRNA target sequence for Cngb3 (NM_013927.1,1260-1278).
gcagttcgaactttaatta

SEQ ID NO: 520796 - DNA, 19 bp, Mus musculus
  siRNA target sequence for Cngb3 (NM_013927.1,1263-1281).
gttcgaactttaattacta

SEQ ID NO: 520797 - DNA, 19 bp, Mus musculus
  siRNA target sequence for Cngb3 (NM_013927.1,1375-1393).
gtcagatgcgtgatgtgat

SEQ ID NO: 520798 - DNA, 19 bp, Mus musculus
  siRNA target sequence for Cngb3 (NM_013927.1,1402-1420).
caacagccaatcagaacta

SEQ ID NO: 520799 - DNA, 19 bp, Mus musculus
  siRNA target sequence for Cngb3 (NM_013927.1,1428-1446).
gcctgcatggaccatatca

SEQ ID NO: 520800 - DNA, 19 bp, Mus musculus
  siRNA target sequence for Cngb3 (NM_013927.1,1429-1447).
cctgcatggaccatatcat

SEQ ID NO: 520801 - DNA, 19 bp, Mus musculus
  siRNA target sequence for Cngb3 (NM_013927.1,1454-1472).
catgaacaaatactctatt

SEQ ID NO: 520802 - DNA, 19 bp, Mus musculus
  siRNA target sequence for Cngb3 (NM_013927.1,1457-1475).
gaacaaatactctattcct

SEQ ID NO: 520803 - DNA, 19 bp, Mus musculus
  siRNA target sequence for Cngb3 (NM_013927.1,1497-1515).
cggacttggctggaatata

SEQ ID NO: 520804 - DNA, 19 bp, Mus musculus
  siRNA target sequence for Cngb3 (NM_013927.1,1520-1538).
gaactcacaaagaatccta

SEQ ID NO: 520805 - DNA, 19 bp, Mus musculus
  siRNA target sequence for Cngb3 (NM_013927.1,1525-1543).
cacaaagaatcctagatga

SEQ ID NO: 520806 - DNA, 19 bp, Mus musculus
  siRNA target sequence for Cngb3 (NM_013927.1,1570-1588).
cagcaatgcagttgtctat

SEQ ID NO: 520807 - DNA, 19 bp, Mus musculus
  siRNA target sequence for Cngb3 (NM_013927.1,1583-1601).
gtctattgcccttgacata

SEQ ID NO: 520808 - DNA, 19 bp, Mus musculus
  siRNA target sequence for Cngb3 (NM_013927.1,1590-1608).
gcccttgacataaacttca

SEQ ID NO: 520809 - DNA, 19 bp, Mus musculus
  siRNA target sequence for Cngb3 (NM_013927.1,1675-1693).
gattgaaatccactattta

SEQ ID NO: 520810 - DNA, 19 bp, Mus musculus
  siRNA target sequence for Cngb3 (NM_013927.1,1712-1730).
ctgcaaaaagggagaaatt

SEQ ID NO: 520811 - DNA, 19 bp, Mus musculus
  siRNA target sequence for Cngb3 (NM_013927.1,1889-1907).
ccacggatttgccaatctt

SEQ ID NO: 520812 - DNA, 19 bp, Mus musculus
  siRNA target sequence for Cngb3 (NM_013927.1,1890-1908).
cacggatttgccaatcttt

SEQ ID NO: 520813 - DNA, 19 bp, Mus musculus
  siRNA target sequence for Cngb3 (NM_013927.1,1892-1910).
cggatttgccaatctttta

SEQ ID NO: 520814 - DNA, 19 bp, Mus musculus
  siRNA target sequence for Cngb3 (NM_013927.1,1946-1964).
gcattatccaacttctaaa

SEQ ID NO: 520815 - DNA, 19 bp, Mus musculus
  siRNA target sequence for Cngb3 (NM_013927.1,1960-1978).
ctaaaaagctcctcatgaa

SEQ ID NO: 520816 - DNA, 19 bp, Mus musculus
  siRNA target sequence for Cngb3 (NM_013927.1,2077-2095).
cccgaatgcttaaagttct

SEQ ID NO: 520817 - DNA, 19 bp, Mus musculus
  siRNA target sequence for Pde5a (NM_153422.1,141-159).
cgggactttaccttctctt

SEQ ID NO: 520818 - DNA, 19 bp, Mus musculus
  siRNA target sequence for Pde5a (NM_153422.1,142-160).
gggactttaccttctctta

SEQ ID NO: 520819 - DNA, 19 bp, Mus musculus
  siRNA target sequence for Pde5a (NM_153422.1,1015-1033).
gaaatcaggtgttacttga

SEQ ID NO: 520820 - DNA, 19 bp, Mus musculus
  siRNA target sequence for Pde5a (NM_153422.1,1029-1047).
cttgaccttgccagcttaa

SEQ ID NO: 520821 - DNA, 19 bp, Mus musculus
  siRNA target sequence for Pde5a (NM_153422.1,1061-1079).
gcagtcactggaagtcatt

SEQ ID NO: 520822 - DNA, 19 bp, Mus musculus
  siRNA target sequence for Pde5a (NM_153422.1,1066-1084).
cactggaagtcattctgaa

SEQ ID NO: 520823 - DNA, 19 bp, Mus musculus
  siRNA target sequence for Pde5a (NM_153422.1,1124-1142).
gaagtgcaccatcttcatt

SEQ ID NO: 520824 - DNA, 19 bp, Mus musculus
  siRNA target sequence for Pde5a (NM_153422.1,1204-1222).
gaaaaccctctgatccttt

SEQ ID NO: 520825 - DNA, 19 bp, Mus musculus
  siRNA target sequence for Pde5a (NM_153422.1,1209-1227).
ccctctgatcctttaacga

SEQ ID NO: 520826 - DNA, 19 bp, Mus musculus
  siRNA target sequence for Pde5a (NM_153422.1,1280-1298).
cacgatggagccacttaat

SEQ ID NO: 520827 - DNA, 19 bp, Mus musculus
  siRNA target sequence for Pde5a (NM_153422.1,1282-1300).
cgatggagccacttaatat

SEQ ID NO: 520828 - DNA, 19 bp, Mus musculus
  siRNA target sequence for Pde5a (NM_153422.1,1305-1323).
gatgtcaccaaggacaaaa

SEQ ID NO: 520829 - DNA, 19 bp, Mus musculus
  siRNA target sequence for Pde5a (NM_153422.1,1363-1381).
cgccctgcattggaagttt

SEQ ID NO: 520830 - DNA, 19 bp, Mus musculus
  siRNA target sequence for Pde5a (NM_153422.1,1367-1385).
ctgcattggaagtttgctt

SEQ ID NO: 520831 - DNA, 19 bp, Mus musculus
  siRNA target sequence for Pde5a (NM_153422.1,2069-2087).
catggaacaccatcatttt

SEQ ID NO: 520832 - DNA, 19 bp, Mus musculus
  siRNA target sequence for Pde5a (NM_153422.1,2113-2131).
gcccaggcaaccagattct

SEQ ID NO: 520833 - DNA, 19 bp, Mus musculus
  siRNA target sequence for Pde5a (NM_153422.1,2137-2155).
gcctctccattgacgaata

SEQ ID NO: 520834 - DNA, 19 bp, Mus musculus
  siRNA target sequence for Pde5a (NM_153422.1,2138-2156).
cctctccattgacgaatat

SEQ ID NO: 520835 - DNA, 19 bp, Mus musculus
  siRNA target sequence for Pde5a (NM_153422.1,2139-2157).
ctctccattgacgaatata

SEQ ID NO: 520836 - DNA, 19 bp, Mus musculus
  siRNA target sequence for Pde5a (NM_153422.1,2197-2215).
cagacctagcactgtacat

SEQ ID NO: 520837 - DNA, 19 bp, Mus musculus
  siRNA target sequence for Pde5a (NM_153422.1,2199-2217).
gacctagcactgtacatta

SEQ ID NO: 520838 - DNA, 19 bp, Mus musculus
  siRNA target sequence for Pde5a (NM_153422.1,2202-2220).
ctagcactgtacattaaga

SEQ ID NO: 520839 - DNA, 19 bp, Mus musculus
  siRNA target sequence for Pde5a (NM_153422.1,2219-2237).
gagacgaggagaatttttt

SEQ ID NO: 520840 - DNA, 19 bp, Mus musculus
  siRNA target sequence for Pde5a (NM_153422.1,2241-2259).
cttatacgaaaaaatcaat

SEQ ID NO: 520841 - DNA, 19 bp, Mus musculus
  siRNA target sequence for Pde5a (NM_153422.1,2318-2336).
cgacctctctgcgattact

SEQ ID NO: 520842 - DNA, 19 bp, Mus musculus
  siRNA target sequence for Pde5a (NM_153422.1,2319-2337).
gacctctctgcgattacta

SEQ ID NO: 520843 - DNA, 19 bp, Mus musculus
  siRNA target sequence for Pde5a (NM_153422.1,2377-2395).
cagctgaattctttgatca

SEQ ID NO: 520844 - DNA, 19 bp, Mus musculus
  siRNA target sequence for Pde5a (NM_153422.1,2406-2424).
gagagaaaagaacttaaca

SEQ ID NO: 520845 - DNA, 19 bp, Mus musculus
  siRNA target sequence for Pde5a (NM_153422.1,2423-2441).
catggagccggctgatcta

SEQ ID NO: 520846 - DNA, 19 bp, Mus musculus
  siRNA target sequence for Pde5a (NM_153422.1,2427-2445).
gagccggctgatctaatga

SEQ ID NO: 520847 - DNA, 19 bp, Mus musculus
  siRNA target sequence for Pde5a (NM_153422.1,2430-2448).
ccggctgatctaatgaaca

SEQ ID NO: 520848 - DNA, 19 bp, Mus musculus
  siRNA target sequence for Pde5a (NM_153422.1,2477-2495).
gcaagttgggttcatagat

SEQ ID NO: 520849 - DNA, 19 bp, Mus musculus
  siRNA target sequence for Birc1a (NM_008670.1,1206-1224).
caagagcacaacaagtttt

SEQ ID NO: 520850 - DNA, 19 bp, Mus musculus
  siRNA target sequence for Birc1a (NM_008670.1,2018-2036).
cttgtccaatactgtctat

SEQ ID NO: 520851 - DNA, 19 bp, Mus musculus
  siRNA target sequence for Birc1a (NM_008670.1,2054-2072).
ctcccataatataaaacgt

SEQ ID NO: 520852 - DNA, 19 bp, Mus musculus
  siRNA target sequence for Birc1a (NM_008670.1,2071-2089).
gtctactagagtttatggt

SEQ ID NO: 520853 - DNA, 19 bp, Mus musculus
  siRNA target sequence for Birc1a (NM_008670.1,2468-2486).
catgagactgactgaactt

SEQ ID NO: 520854 - DNA, 19 bp, Mus musculus
  siRNA target sequence for Birc1a (NM_008670.1,2666-2684).
gttgctggagaatacctat

SEQ ID NO: 520855 - DNA, 19 bp, Mus musculus
  siRNA target sequence for Birc1a (NM_008670.1,2669-2687).
gctggagaatacctataaa

SEQ ID NO: 520856 - DNA, 19 bp, Mus musculus
  siRNA target sequence for Birc1a (NM_008670.1,2713-2731).
caggaacttcccgaataat

SEQ ID NO: 520857 - DNA, 19 bp, Mus musculus
  siRNA target sequence for Birc1a (NM_008670.1,2715-2733).
ggaacttcccgaataatga

SEQ ID NO: 520858 - DNA, 19 bp, Mus musculus
  siRNA target sequence for Birc1a (NM_008670.1,2716-2734).
gaacttcccgaataatgaa

SEQ ID NO: 520859 - DNA, 19 bp, Mus musculus
  siRNA target sequence for Birc1a (NM_008670.1,2953-2971).
gtttagaagtctcgataaa

SEQ ID NO: 520860 - DNA, 19 bp, Mus musculus
  siRNA target sequence for Birc1a (NM_008670.1,2958-2976).
gaagtctcgataaatggaa

SEQ ID NO: 520861 - DNA, 19 bp, Mus musculus
  siRNA target sequence for Birc1a (NM_008670.1,2974-2992).
gaaataaagtgccaaaagt

SEQ ID NO: 520862 - DNA, 19 bp, Mus musculus
  siRNA target sequence for Birc1a (NM_008670.1,2984-3002).
gccaaaagttgtagattat

SEQ ID NO: 520863 - DNA, 19 bp, Mus musculus
  siRNA target sequence for Birc1a (NM_008670.1,2985-3003).
ccaaaagttgtagattatt

SEQ ID NO: 520864 - DNA, 19 bp, Mus musculus
  siRNA target sequence for Birc1a (NM_008670.1,3056-3074).
ctatgcatccgcctttgaa

SEQ ID NO: 520865 - DNA, 19 bp, Mus musculus
  siRNA target sequence for Birc1a (NM_008670.1,3060-3078).
gcatccgcctttgaacaaa

SEQ ID NO: 520866 - DNA, 19 bp, Mus musculus
  siRNA target sequence for Birc1a (NM_008670.1,3061-3079).
catccgcctttgaacaaat

SEQ ID NO: 520867 - DNA, 19 bp, Mus musculus
  siRNA target sequence for Birc1a (NM_008670.1,3064-3082).
ccgcctttgaacaaatgaa

SEQ ID NO: 520868 - DNA, 19 bp, Mus musculus
  siRNA target sequence for Birc1a (NM_008670.1,3143-3161).
ccccttacagccacctaaa

SEQ ID NO: 520869 - DNA, 19 bp, Mus musculus
  siRNA target sequence for Birc1b (NM_010872.1,274-292).
gcactttcagtcttgaaga

SEQ ID NO: 520870 - DNA, 19 bp, Mus musculus
  siRNA target sequence for Birc1b (NM_010872.1,501-519).
caccagactcaggaaactt

SEQ ID NO: 520871 - DNA, 19 bp, Mus musculus
  siRNA target sequence for Birc1b (NM_010872.1,528-546).
gaaccacaagaaattacga

SEQ ID NO: 520872 - DNA, 19 bp, Mus musculus
  siRNA target sequence for Birc1b (NM_010872.1,885-903).
ggaaattacccaatatgta

SEQ ID NO: 520873 - DNA, 19 bp, Mus musculus
  siRNA target sequence for Birc1b (NM_010872.1,893-911).
cccaatatgtacaaagcta

SEQ ID NO: 520874 - DNA, 19 bp, Mus musculus
  siRNA target sequence for Birc1b (NM_010872.1,894-912).
ccaatatgtacaaagctat

SEQ ID NO: 520875 - DNA, 19 bp, Mus musculus
  siRNA target sequence for Birc1b (NM_010872.1,1544-1562).
cctacaccaaagctacttt

SEQ ID NO: 520876 - DNA, 19 bp, Mus musculus
  siRNA target sequence for Birc1b (NM_010872.1,2169-2187).
cataatgcgtgtacgaaaa

SEQ ID NO: 520877 - DNA, 19 bp, Mus musculus
  siRNA target sequence for Birc1b (NM_010872.1,2175-2193).
gcgtgtacgaaaatttata

SEQ ID NO: 520878 - DNA, 19 bp, Mus musculus
  siRNA target sequence for Birc1b (NM_010872.1,2176-2194).
cgtgtacgaaaatttataa

SEQ ID NO: 520879 - DNA, 19 bp, Mus musculus
  siRNA target sequence for Birc1b (NM_010872.1,2177-2195).
gtgtacgaaaatttataaa

SEQ ID NO: 520880 - DNA, 19 bp, Mus musculus
  siRNA target sequence for Birc1b (NM_010872.1,2182-2200).
cgaaaatttataaattact

SEQ ID NO: 520881 - DNA, 19 bp, Mus musculus
  siRNA target sequence for Birc1b (NM_010872.1,2320-2338).
gcctatatgcaatacttgt

SEQ ID NO: 520882 - DNA, 19 bp, Mus musculus
  siRNA target sequence for Birc1b (NM_010872.1,2670-2688).
gagcatctaccacactttt

SEQ ID NO: 520883 - DNA, 19 bp, Mus musculus
  siRNA target sequence for Birc1b (NM_010872.1,2672-2690).
gcatctaccacactttttt

SEQ ID NO: 520884 - DNA, 19 bp, Mus musculus
  siRNA target sequence for Birc1b (NM_010872.1,2901-2919).
cttattgcgcatttgtcta

SEQ ID NO: 520885 - DNA, 19 bp, Mus musculus
  siRNA target sequence for Birc1b (NM_010872.1,3037-3055).
gaaaccttgttgttattga

SEQ ID NO: 520886 - DNA, 19 bp, Mus musculus
  siRNA target sequence for Birc1b (NM_010872.1,3057-3075).
gagtattaagatctcatta

SEQ ID NO: 520887 - DNA, 19 bp, Mus musculus
  siRNA target sequence for Birc1b (NM_010872.1,3089-3107).
gggtacagagaatcgattt

SEQ ID NO: 520888 - DNA, 19 bp, Mus musculus
  siRNA target sequence for Birc1b (NM_010872.1,3090-3108).
ggtacagagaatcgatttt

SEQ ID NO: 520889 - DNA, 19 bp, Mus musculus
  siRNA target sequence for Birc1b (NM_010872.1,3091-3109).
gtacagagaatcgattttt

SEQ ID NO: 520890 - DNA, 19 bp, Mus musculus
  siRNA target sequence for Birc1b (NM_010872.1,3102-3120).
cgatttttcactcatagaa

SEQ ID NO: 520891 - DNA, 19 bp, Mus musculus
  siRNA target sequence for Birc1b (NM_010872.1,3162-3180).
ctatgccattgcctttcaa

SEQ ID NO: 520892 - DNA, 19 bp, Mus musculus
  siRNA target sequence for Birc1b (NM_010872.1,3168-3186).
cattgcctttcaacctata

SEQ ID NO: 520893 - DNA, 19 bp, Mus musculus
  siRNA target sequence for Birc1b (NM_010872.1,3253-3271).
cagatcccactaaatatta

SEQ ID NO: 520894 - DNA, 19 bp, Mus musculus
  siRNA target sequence for Birc1b (NM_010872.1,3255-3273).
gatcccactaaatattagt

SEQ ID NO: 520895 - DNA, 19 bp, Mus musculus
  siRNA target sequence for Birc1b (NM_010872.1,3258-3276).
cccactaaatattagtact

SEQ ID NO: 520896 - DNA, 19 bp, Mus musculus
  siRNA target sequence for Birc1b (NM_010872.1,4143-4161).
cgacagtgtactggaaatt

SEQ ID NO: 520897 - DNA, 19 bp, Mus musculus
  siRNA target sequence for Birc1b (NM_010872.1,4178-4196).
ggggaggcttccaaaaact

SEQ ID NO: 520898 - DNA, 19 bp, Mus musculus
  siRNA target sequence for Birc1b (NM_010872.1,4179-4197).
gggaggcttccaaaaactt

SEQ ID NO: 520899 - DNA, 19 bp, Mus musculus
  siRNA target sequence for Birc1b (NM_010872.1,4207-4225).
gaccttacactgaatcaca

SEQ ID NO: 520900 - DNA, 19 bp, Mus musculus
  siRNA target sequence for Mic2l1 (NM_138309.1,82-100).
ctcgtttgcctcgttttct

SEQ ID NO: 520901 - DNA, 19 bp, Mus musculus
  siRNA target sequence for Mic2l1 (NM_138309.1,111-129).
ccttgtccagagaggatat

SEQ ID NO: 520902 - DNA, 19 bp, Mus musculus
  siRNA target sequence for Mic2l1 (NM_138309.1,196-214).
gaccatgttgccactacta

SEQ ID NO: 520903 - DNA, 19 bp, Mus musculus
  siRNA target sequence for Mic2l1 (NM_138309.1,199-217).
catgttgccactactacaa

SEQ ID NO: 520904 - DNA, 19 bp, Mus musculus
  siRNA target sequence for Mic2l1 (NM_138309.1,202-220).
gttgccactactacaacta

SEQ ID NO: 520905 - DNA, 19 bp, Mus musculus
  siRNA target sequence for Mic2l1 (NM_138309.1,205-223).
gccactactacaactagaa

SEQ ID NO: 520906 - DNA, 19 bp, Mus musculus
  siRNA target sequence for Mic2l1 (NM_138309.1,233-251).
caactagagcaccatcaaa

SEQ ID NO: 520907 - DNA, 19 bp, Mus musculus
  siRNA target sequence for Mic2l1 (NM_138309.1,259-277).
gaactagatgggtttgact

SEQ ID NO: 520908 - DNA, 19 bp, Mus musculus
  siRNA target sequence for Mic2l1 (NM_138309.1,291-309).
ggatgatcgaaatgatcta

SEQ ID NO: 520909 - DNA, 19 bp, Mus musculus
  siRNA target sequence for Mic2l1 (NM_138309.1,442-460).
cctggatctggcatatcga

SEQ ID NO: 520910 - DNA, 19 bp, Mus musculus
  siRNA target sequence for Mic2l1 (NM_138309.1,517-535).
gctgtatccagctacatct

SEQ ID NO: 520911 - DNA, 19 bp, Mus musculus
  siRNA target sequence for Mic2l1 (NM_138309.1,632-650).
cccaagtgacatactcaaa

SEQ ID NO: 520912 - DNA, 19 bp, Mus musculus
  siRNA target sequence for Mic2l1 (NM_138309.1,633-651).
ccaagtgacatactcaaaa

SEQ ID NO: 520913 - DNA, 19 bp, Mus musculus
  siRNA target sequence for Nav1 (NM_173437.1,589-607).
cggagctgaaggtcttcaa

SEQ ID NO: 520914 - DNA, 19 bp, Mus musculus
  siRNA target sequence for Nav1 (NM_173437.1,697-715).
cggactccgagaaaaagct

SEQ ID NO: 520915 - DNA, 19 bp, Mus musculus
  siRNA target sequence for Nav1 (NM_173437.1,730-748).
ctgagtggagtgatgatat

SEQ ID NO: 520916 - DNA, 19 bp, Mus musculus
  siRNA target sequence for Nav1 (NM_173437.1,1557-1575).
ctcaaatccggctacatga

SEQ ID NO: 520917 - DNA, 19 bp, Mus musculus
  siRNA target sequence for Nav1 (NM_173437.1,1638-1656).
gaaagcagctccattagca

SEQ ID NO: 520918 - DNA, 19 bp, Mus musculus
  siRNA target sequence for Nav1 (NM_173437.1,1750-1768).
gcaggagctccactatagt

SEQ ID NO: 520919 - DNA, 19 bp, Mus musculus
  siRNA target sequence for Nav1 (NM_173437.1,1753-1771).
ggagctccactatagtgtt

SEQ ID NO: 520920 - DNA, 19 bp, Mus musculus
  siRNA target sequence for Nav1 (NM_173437.1,1833-1851).
gaggagaagacccctaaaa

SEQ ID NO: 520921 - DNA, 19 bp, Mus musculus
  siRNA target sequence for Nav1 (NM_173437.1,1939-1957).
ccaagggcggagaactgaa

SEQ ID NO: 520922 - DNA, 19 bp, Mus musculus
  siRNA target sequence for Nav1 (NM_173437.1,2206-2224).
cttcaggatcctttggtta

SEQ ID NO: 520923 - DNA, 19 bp, Mus musculus
  siRNA target sequence for Nav1 (NM_173437.1,2209-2227).
caggatcctttggttataa

SEQ ID NO: 520924 - DNA, 19 bp, Mus musculus
  siRNA target sequence for Nav1 (NM_173437.1,2211-2229).
ggatcctttggttataaga

SEQ ID NO: 520925 - DNA, 19 bp, Mus musculus
  siRNA target sequence for Nav1 (NM_173437.1,2430-2448).
ccagccaagtccagttcta

SEQ ID NO: 520926 - DNA, 19 bp, Mus musculus
  siRNA target sequence for Nav1 (NM_173437.1,2433-2451).
gccaagtccagttctatga

SEQ ID NO: 520927 - DNA, 19 bp, Mus musculus
  siRNA target sequence for Nav1 (NM_173437.1,2583-2601).
ccagcccctgtcaatcaga

SEQ ID NO: 520928 - DNA, 19 bp, Mus musculus
  siRNA target sequence for Nav1 (NM_173437.1,2764-2782).
cagctaaaagctttgtcaa

SEQ ID NO: 520929 - DNA, 19 bp, Mus musculus
  siRNA target sequence for Nav1 (NM_173437.1,2788-2806).
cctcgctagccaatctaga

SEQ ID NO: 520930 - DNA, 19 bp, Mus musculus
  siRNA target sequence for Nav1 (NM_173437.1,2791-2809).
cgctagccaatctagacaa

SEQ ID NO: 520931 - DNA, 19 bp, Mus musculus
  siRNA target sequence for Nav1 (NM_173437.1,2792-2810).
gctagccaatctagacaaa

SEQ ID NO: 520932 - DNA, 19 bp, Mus musculus
  siRNA target sequence for Nav1 (NM_173437.1,2796-2814).
gccaatctagacaaagtca

SEQ ID NO: 520933 - DNA, 19 bp, Mus musculus
  siRNA target sequence for Nav1 (NM_173437.1,2877-2895).
catgctccgagctcatcaa

SEQ ID NO: 520934 - DNA, 19 bp, Mus musculus
  siRNA target sequence for Nav1 (NM_173437.1,2932-2950).
cagcacccatcctcaatat

SEQ ID NO: 520935 - DNA, 19 bp, Mus musculus
  siRNA target sequence for Nav1 (NM_173437.1,2934-2952).
gcacccatcctcaatatta

SEQ ID NO: 520936 - DNA, 19 bp, Mus musculus
  siRNA target sequence for Nav1 (NM_173437.1,2935-2953).
cacccatcctcaatattaa

SEQ ID NO: 520937 - DNA, 19 bp, Mus musculus
  siRNA target sequence for Nav1 (NM_173437.1,2937-2955).
cccatcctcaatattaact

SEQ ID NO: 520938 - DNA, 19 bp, Mus musculus
  siRNA target sequence for Nav1 (NM_173437.1,2981-2999).
gctaatgagtggtttcagt

SEQ ID NO: 520939 - DNA, 19 bp, Mus musculus
  siRNA target sequence for Nav1 (NM_173437.1,3169-3187).
gccccagggctggacaatt

SEQ ID NO: 520940 - DNA, 19 bp, Mus musculus
  siRNA target sequence for Nav1 (NM_173437.1,3172-3190).
ccagggctggacaattgga

SEQ ID NO: 520941 - DNA, 19 bp, Mus musculus
  siRNA target sequence for Nav1 (NM_173437.1,3209-3227).
gaataccctccccaagaaa

SEQ ID NO: 520942 - DNA, 19 bp, Mus musculus
  siRNA target sequence for Nav1 (NM_173437.1,3361-3379).
caaagggccagcttaccaa

SEQ ID NO: 520943 - DNA, 19 bp, Mus musculus
  siRNA target sequence for Nav1 (NM_173437.1,3365-3383).
gggccagcttaccaacata

SEQ ID NO: 520944 - DNA, 19 bp, Mus musculus
  siRNA target sequence for Nav1 (NM_173437.1,3367-3385).
gccagcttaccaacatagt

SEQ ID NO: 520945 - DNA, 19 bp, Mus musculus
  siRNA target sequence for Nav1 (NM_173437.1,3542-3560).
ccccacggatgatgttcat

SEQ ID NO: 520946 - DNA, 19 bp, Mus musculus
  siRNA target sequence for Nav1 (NM_173437.1,3701-3719).
gtctgccaacgctaaccta

SEQ ID NO: 520947 - DNA, 19 bp, Mus musculus
  siRNA target sequence for Nav1 (NM_173437.1,3795-3813).
gacaccgagctgttggatt

SEQ ID NO: 520948 - DNA, 19 bp, Mus musculus
  siRNA target sequence for Nav1 (NM_173437.1,3806-3824).
gttggatttgcgagaaact

SEQ ID NO: 520949 - DNA, 19 bp, Mus musculus
  siRNA target sequence for Nav1 (NM_173437.1,3809-3827).
ggatttgcgagaaactata

SEQ ID NO: 520950 - DNA, 19 bp, Mus musculus
  siRNA target sequence for Nav1 (NM_173437.1,3866-3884).
catccagggagcgttaaat

SEQ ID NO: 520951 - DNA, 19 bp, Mus musculus
  siRNA target sequence for Nav1 (NM_173437.1,4179-4197).
gcctccccctccatcaagt

SEQ ID NO: 520952 - DNA, 19 bp, Mus musculus
  siRNA target sequence for Nav1 (NM_173437.1,4232-4250).
cgagacccctgctcattca

SEQ ID NO: 520953 - DNA, 19 bp, Mus musculus
  siRNA target sequence for Nav1 (NM_173437.1,4404-4422).
cgggagaccatgcacaata

SEQ ID NO: 520954 - DNA, 19 bp, Mus musculus
  siRNA target sequence for Nav1 (NM_173437.1,4763-4781).
ggatgaagccgttttccaa

SEQ ID NO: 520955 - DNA, 19 bp, Mus musculus
  siRNA target sequence for Nav1 (NM_173437.1,4787-4805).
caaggactacatttctaaa

SEQ ID NO: 520956 - DNA, 19 bp, Mus musculus
  siRNA target sequence for Nav1 (NM_173437.1,4832-4850).
gagcactgagtccatacat

SEQ ID NO: 520957 - DNA, 19 bp, Mus musculus
  siRNA target sequence for Nav1 (NM_173437.1,4915-4933).
gccgaggtgtcaataacat

SEQ ID NO: 520958 - DNA, 19 bp, Mus musculus
  siRNA target sequence for Nav1 (NM_173437.1,4916-4934).
ccgaggtgtcaataacata

SEQ ID NO: 520959 - DNA, 19 bp, Mus musculus
  siRNA target sequence for Nav1 (NM_173437.1,4917-4935).
cgaggtgtcaataacatat

SEQ ID NO: 520960 - DNA, 19 bp, Mus musculus
  siRNA target sequence for Nav1 (NM_173437.1,4931-4949).
catatcagtcgctctcaaa

SEQ ID NO: 520961 - DNA, 19 bp, Mus musculus
  siRNA target sequence for Nav1 (NM_173437.1,5145-5163).
ggcatcgtcagcactttca

SEQ ID NO: 520962 - DNA, 19 bp, Mus musculus
  siRNA target sequence for Nav1 (NM_173437.1,5317-5335).
ccctcacctgcaagtatca

SEQ ID NO: 520963 - DNA, 19 bp, Mus musculus
  siRNA target sequence for Nav1 (NM_173437.1,5334-5352).
cacaaatgtccctacatta

SEQ ID NO: 520964 - DNA, 19 bp, Mus musculus
  siRNA target sequence for Nav1 (NM_173437.1,5336-5354).
caaatgtccctacattata

SEQ ID NO: 520965 - DNA, 19 bp, Mus musculus
  siRNA target sequence for Nav1 (NM_173437.1,5359-5377).
ccaccaatcagcctgtaaa

SEQ ID NO: 520966 - DNA, 19 bp, Mus musculus
  siRNA target sequence for Nav1 (NM_173437.1,5360-5378).
caccaatcagcctgtaaaa

SEQ ID NO: 520967 - DNA, 19 bp, Mus musculus
  siRNA target sequence for Nav1 (NM_173437.1,5493-5511).
gacagtgacgtcaatgcta

SEQ ID NO: 520968 - DNA, 19 bp, Mus musculus
  siRNA target sequence for Nav1 (NM_173437.1,5497-5515).
gtgacgtcaatgctaacaa

SEQ ID NO: 520969 - DNA, 19 bp, Mus musculus
  siRNA target sequence for Nav1 (NM_173437.1,5651-5669).
cttccggacctggttcatt

SEQ ID NO: 520970 - DNA, 19 bp, Mus musculus
  siRNA target sequence for Nav1 (NM_173437.1,5791-5809).
ggccgtcggcccaacaaga

SEQ ID NO: 520971 - DNA, 19 bp, Mus musculus
  siRNA target sequence for Nav1 (NM_173437.1,5949-5967).
caagaagctgccaactaca

SEQ ID NO: 520972 - DNA, 19 bp, Mus musculus
  siRNA target sequence for Nav1 (NM_173437.1,5974-5992).
caccagatcgagagactat

SEQ ID NO: 520973 - DNA, 19 bp, Mus musculus
  siRNA target sequence for 4933400A11Rik (NM_025743.1,268-286).
ggccaaccgcaaagataaa

SEQ ID NO: 520974 - DNA, 19 bp, Mus musculus
  siRNA target sequence for 4933400A11Rik (NM_025743.1,271-289).
caaccgcaaagataaagca

SEQ ID NO: 520975 - DNA, 19 bp, Mus musculus
  siRNA target sequence for 4933400A11Rik (NM_025743.1,308-326).
gacatcgcttcaaaattca

SEQ ID NO: 520976 - DNA, 19 bp, Mus musculus
  siRNA target sequence for 4933400A11Rik (NM_025743.1,339-357).
ctccaggcgagtttaagga

SEQ ID NO: 520977 - DNA, 19 bp, Mus musculus
  siRNA target sequence for 4933400A11Rik (NM_025743.1,375-393).
ggcagctggttaataatga

SEQ ID NO: 520978 - DNA, 19 bp, Mus musculus
  siRNA target sequence for 4933400A11Rik (NM_025743.1,377-395).
cagctggttaataatgaca

SEQ ID NO: 520979 - DNA, 19 bp, Mus musculus
  siRNA target sequence for 4933400A11Rik (NM_025743.1,412-430).
gataggacaagcaattgct

SEQ ID NO: 520980 - DNA, 19 bp, Mus musculus
  siRNA target sequence for 4933400A11Rik (NM_025743.1,419-437).
caagcaattgctcagtata

SEQ ID NO: 520981 - DNA, 19 bp, Mus musculus
  siRNA target sequence for 4933400A11Rik (NM_025743.1,471-489).
ggtatgacgatcatgtgtt

SEQ ID NO: 520982 - DNA, 19 bp, Mus musculus
  siRNA target sequence for 4933400A11Rik (NM_025743.1,472-490).
gtatgacgatcatgtgtta

SEQ ID NO: 520983 - DNA, 19 bp, Mus musculus
  siRNA target sequence for 4933400A11Rik (NM_025743.1,476-494).
gacgatcatgtgttagtta

SEQ ID NO: 520984 - DNA, 19 bp, Mus musculus
  siRNA target sequence for 4933400A11Rik (NM_025743.1,478-496).
cgatcatgtgttagttaca

SEQ ID NO: 520985 - DNA, 19 bp, Mus musculus
  siRNA target sequence for 4933400A11Rik (NM_025743.1,534-552).
caagaaacagagtttcttt

SEQ ID NO: 520986 - DNA, 19 bp, Mus musculus
  siRNA target sequence for 4933400A11Rik (NM_025743.1,596-614).
gggcttacagatggaaatt

SEQ ID NO: 520987 - DNA, 19 bp, Mus musculus
  siRNA target sequence for 4933400A11Rik (NM_025743.1,597-615).
ggcttacagatggaaattt

SEQ ID NO: 520988 - DNA, 19 bp, Mus musculus
  siRNA target sequence for 4933400A11Rik (NM_025743.1,598-616).
gcttacagatggaaattta

SEQ ID NO: 520989 - DNA, 19 bp, Mus musculus
  siRNA target sequence for 4933400A11Rik (NM_025743.1,678-696).
ctggctttagtactgttta

SEQ ID NO: 520990 - DNA, 19 bp, Mus musculus
  siRNA target sequence for 4933400A11Rik (NM_025743.1,682-700).
ctttagtactgtttatggt

SEQ ID NO: 520991 - DNA, 19 bp, Mus musculus
  siRNA target sequence for 4933400A11Rik (NM_025743.1,749-767).
cagtttcagccccaaacat

SEQ ID NO: 520992 - DNA, 19 bp, Mus musculus
  siRNA target sequence for 4933400A11Rik (NM_025743.1,789-807).
cacagtggaaattaaccat

SEQ ID NO: 520993 - DNA, 19 bp, Mus musculus
  siRNA target sequence for 4933400A11Rik (NM_025743.1,839-857).
ctcaagtctcacgttcatt

SEQ ID NO: 520994 - DNA, 19 bp, Mus musculus
  siRNA target sequence for 4933400A11Rik (NM_025743.1,841-859).
caagtctcacgttcattat

SEQ ID NO: 520995 - DNA, 19 bp, Mus musculus
  siRNA target sequence for 4933400A11Rik (NM_025743.1,844-862).
gtctcacgttcattattat

SEQ ID NO: 520996 - DNA, 19 bp, Mus musculus
  siRNA target sequence for 4933400A11Rik (NM_025743.1,870-888).
gaaatatccagctagttgt

SEQ ID NO: 520997 - DNA, 19 bp, Mus musculus
  siRNA target sequence for 4933400A11Rik (NM_025743.1,877-895).
ccagctagttgtccataaa

SEQ ID NO: 520998 - DNA, 19 bp, Mus musculus
  siRNA target sequence for 4933400A11Rik (NM_025743.1,880-898).
gctagttgtccataaagat

SEQ ID NO: 520999 - DNA, 19 bp, Mus musculus
  siRNA target sequence for 4933400A11Rik (NM_025743.1,896-914).
gatgtacatgagtcattaa

SEQ ID NO: 521000 - DNA, 19 bp, Mus musculus
  siRNA target sequence for 4933400A11Rik (NM_025743.1,915-933).
ctgttatcaatgaagatca

SEQ ID NO: 521001 - DNA, 19 bp, Mus musculus
  siRNA target sequence for 4933400A11Rik (NM_025743.1,932-950).
caaactgcgaaggtgttta

SEQ ID NO: 521002 - DNA, 19 bp, Mus musculus
  siRNA target sequence for 4933400A11Rik (NM_025743.1,936-954).
ctgcgaaggtgtttattaa

SEQ ID NO: 521003 - DNA, 19 bp, Mus musculus
  siRNA target sequence for 4933400A11Rik (NM_025743.1,978-996).
ggtatcaggcagcacttaa

SEQ ID NO: 521004 - DNA, 19 bp, Mus musculus
  siRNA target sequence for 4933400A11Rik (NM_025743.1,983-1001).
caggcagcacttaatgaaa

SEQ ID NO: 521005 - DNA, 19 bp, Mus musculus
  siRNA target sequence for 4933400A11Rik (NM_025743.1,987-1005).
cagcacttaatgaaaacta

SEQ ID NO: 521006 - DNA, 19 bp, Mus musculus
  siRNA target sequence for 4933400A11Rik (NM_025743.1,1003-1021).
ctaccacacaatttcatgt

SEQ ID NO: 521007 - DNA, 19 bp, Mus musculus
  siRNA target sequence for 4933400A11Rik (NM_025743.1,1039-1057).
gcgcagacagcttccaatt

SEQ ID NO: 521008 - DNA, 19 bp, Mus musculus
  siRNA target sequence for 4933400A11Rik (NM_025743.1,1040-1058).
cgcagacagcttccaatta

SEQ ID NO: 521009 - DNA, 19 bp, Mus musculus
  siRNA target sequence for 4933400A11Rik (NM_025743.1,1052-1070).
ccaattacctaccacaaaa

SEQ ID NO: 521010 - DNA, 19 bp, Mus musculus
  siRNA target sequence for 4933400A11Rik (NM_025743.1,1053-1071).
caattacctaccacaaaat

SEQ ID NO: 521011 - DNA, 19 bp, Mus musculus
  siRNA target sequence for Capza2 (NM_007604.1,138-156).
ggagaaggttcgtatagca

SEQ ID NO: 521012 - DNA, 19 bp, Mus musculus
  siRNA target sequence for Capza2 (NM_007604.1,144-162).
ggttcgtatagcagcaaaa

SEQ ID NO: 521013 - DNA, 19 bp, Mus musculus
  siRNA target sequence for Capza2 (NM_007604.1,145-163).
gttcgtatagcagcaaaat

SEQ ID NO: 521014 - DNA, 19 bp, Mus musculus
  siRNA target sequence for Capza2 (NM_007604.1,148-166).
cgtatagcagcaaaattca

SEQ ID NO: 521015 - DNA, 19 bp, Mus musculus
  siRNA target sequence for Capza2 (NM_007604.1,155-173).
cagcaaaattcatcattca

SEQ ID NO: 521016 - DNA, 19 bp, Mus musculus
  siRNA target sequence for Capza2 (NM_007604.1,174-192).
cgcccctcctggagaattt

SEQ ID NO: 521017 - DNA, 19 bp, Mus musculus
  siRNA target sequence for Capza2 (NM_007604.1,179-197).
ctcctggagaatttaatga

SEQ ID NO: 521018 - DNA, 19 bp, Mus musculus
  siRNA target sequence for Capza2 (NM_007604.1,187-205).
gaatttaatgaggttttta

SEQ ID NO: 521019 - DNA, 19 bp, Mus musculus
  siRNA target sequence for Capza2 (NM_007604.1,324-342).
ggttttgataacagaacat

SEQ ID NO: 521020 - DNA, 19 bp, Mus musculus
  siRNA target sequence for Capza2 (NM_007604.1,383-401).
gaatctgtttcaaatttga

SEQ ID NO: 521021 - DNA, 19 bp, Mus musculus
  siRNA target sequence for Capza2 (NM_007604.1,432-450).
gccctacgaagcagaaaat

SEQ ID NO: 521022 - DNA, 19 bp, Mus musculus
  siRNA target sequence for Capza2 (NM_007604.1,484-502).
gcactgcgagcttatgtaa

SEQ ID NO: 521023 - DNA, 19 bp, Mus musculus
  siRNA target sequence for Capza2 (NM_007604.1,485-503).
cactgcgagcttatgtaaa

SEQ ID NO: 521024 - DNA, 19 bp, Mus musculus
  siRNA target sequence for Capza2 (NM_007604.1,534-552).
gtatggcaaaaaagtagat

SEQ ID NO: 521025 - DNA, 19 bp, Mus musculus
  siRNA target sequence for Capza2 (NM_007604.1,726-744).
gagtcataaagatatacaa

SEQ ID NO: 521026 - DNA, 19 bp, Mus musculus
  siRNA target sequence for Capza2 (NM_007604.1,728-746).
gtcataaagatatacaaga

SEQ ID NO: 521027 - DNA, 19 bp, Mus musculus
  siRNA target sequence for Capza2 (NM_007604.1,745-763).
gattccctcacagtatcta

SEQ ID NO: 521028 - DNA, 19 bp, Mus musculus
  siRNA target sequence for Capza2 (NM_007604.1,749-767).
ccctcacagtatctaatga

SEQ ID NO: 521029 - DNA, 19 bp, Mus musculus
  siRNA target sequence for Capza2 (NM_007604.1,855-873).
gtcggacactaccttcaaa

SEQ ID NO: 521030 - DNA, 19 bp, Mus musculus
  siRNA target sequence for Capza2 (NM_007604.1,892-910).
ccagtgacacgtactaaga

SEQ ID NO: 521031 - DNA, 19 bp, Mus musculus
  siRNA target sequence for Capza2 (NM_007604.1,893-911).
cagtgacacgtactaagat

SEQ ID NO: 521032 - DNA, 19 bp, Mus musculus
  siRNA target sequence for Capzb (NM_009798.1,67-85).
cctccacagcagattgaga

SEQ ID NO: 521033 - DNA, 19 bp, Mus musculus
  siRNA target sequence for Capzb (NM_009798.1,180-198).
ggtgggcaaggattacctt

SEQ ID NO: 521034 - DNA, 19 bp, Mus musculus
  siRNA target sequence for Capzb (NM_009798.1,184-202).
ggcaaggattaccttttgt

SEQ ID NO: 521035 - DNA, 19 bp, Mus musculus
  siRNA target sequence for Capzb (NM_009798.1,217-235).
gacggggactcctataggt

SEQ ID NO: 521036 - DNA, 19 bp, Mus musculus
  siRNA target sequence for Capzb (NM_009798.1,233-251).
ggtcaccgtggagtaacaa

SEQ ID NO: 521037 - DNA, 19 bp, Mus musculus
  siRNA target sequence for Capzb (NM_009798.1,236-254).
caccgtggagtaacaagta

SEQ ID NO: 521038 - DNA, 19 bp, Mus musculus
  siRNA target sequence for Capzb (NM_009798.1,239-257).
cgtggagtaacaagtatga

SEQ ID NO: 521039 - DNA, 19 bp, Mus musculus
  siRNA target sequence for Capzb (NM_009798.1,252-270).
gtatgaccctcctttggaa

SEQ ID NO: 521040 - DNA, 19 bp, Mus musculus
  siRNA target sequence for Capzb (NM_009798.1,339-357).
ccgagacctgtattttgaa

SEQ ID NO: 521041 - DNA, 19 bp, Mus musculus
  siRNA target sequence for Capzb (NM_009798.1,404-422).
ctggagtgatcctcataaa

SEQ ID NO: 521042 - DNA, 19 bp, Mus musculus
  siRNA target sequence for Capzb (NM_009798.1,407-425).
gagtgatcctcataaagaa

SEQ ID NO: 521043 - DNA, 19 bp, Mus musculus
  siRNA target sequence for Capzb (NM_009798.1,503-521).
gccgtactgcccattacaa

SEQ ID NO: 521044 - DNA, 19 bp, Mus musculus
  siRNA target sequence for Capzb (NM_009798.1,505-523).
cgtactgcccattacaagt

SEQ ID NO: 521045 - DNA, 19 bp, Mus musculus
  siRNA target sequence for Capzb (NM_009798.1,506-524).
gtactgcccattacaagtt

SEQ ID NO: 521046 - DNA, 19 bp, Mus musculus
  siRNA target sequence for Capzb (NM_009798.1,691-709).
cgaagcacgctgaatgaga

SEQ ID NO: 521047 - DNA, 19 bp, Mus musculus
  siRNA target sequence for Capzb (NM_009798.1,692-710).
gaagcacgctgaatgagat

SEQ ID NO: 521048 - DNA, 19 bp, Mus musculus
  siRNA target sequence for Capzb (NM_009798.1,698-716).
cgctgaatgagatctactt

SEQ ID NO: 521049 - DNA, 19 bp, Mus musculus
  siRNA target sequence for Capzb (NM_009798.1,699-717).
gctgaatgagatctacttt

SEQ ID NO: 521050 - DNA, 19 bp, Mus musculus
  siRNA target sequence for Capzb (NM_009798.1,706-724).
gagatctactttggaaaaa

SEQ ID NO: 521051 - DNA, 19 bp, Mus musculus
  siRNA target sequence for Capzb (NM_009798.1,708-726).
gatctactttggaaaaaca

SEQ ID NO: 521052 - DNA, 19 bp, Mus musculus
  siRNA target sequence for Capzb (NM_009798.1,757-775).
cagacgtttgcagacaaat

SEQ ID NO: 521053 - DNA, 19 bp, Mus musculus
  siRNA target sequence for Capzb (NM_009798.1,759-777).
gacgtttgcagacaaatca

SEQ ID NO: 521054 - DNA, 19 bp, Mus musculus
  siRNA target sequence for Evl (NM_007965.2,658-676).
cagcaggttgtgatcaatt

SEQ ID NO: 521055 - DNA, 19 bp, Mus musculus
  siRNA target sequence for Evl (NM_007965.2,664-682).
gttgtgatcaattattcaa

SEQ ID NO: 521056 - DNA, 19 bp, Mus musculus
  siRNA target sequence for Evl (NM_007965.2,743-761).
gtcaggtctatggcttaaa

SEQ ID NO: 521057 - DNA, 19 bp, Mus musculus
  siRNA target sequence for Evl (NM_007965.2,747-765).
ggtctatggcttaaacttt

SEQ ID NO: 521058 - DNA, 19 bp, Mus musculus
  siRNA target sequence for Evl (NM_007965.2,755-773).
gcttaaactttgcaagtaa

SEQ ID NO: 521059 - DNA, 19 bp, Mus musculus
  siRNA target sequence for Evl (NM_007965.2,811-829).
gccctgaacatcatgaatt

SEQ ID NO: 521060 - DNA, 19 bp, Mus musculus
  siRNA target sequence for Evl (NM_007965.2,894-912).
catccagagaagacaagta

SEQ ID NO: 521061 - DNA, 19 bp, Mus musculus
  siRNA target sequence for Evl (NM_007965.2,1162-1180).
ctggcgggagccaagctaa

SEQ ID NO: 521062 - DNA, 19 bp, Mus musculus
  siRNA target sequence for Evl (NM_007965.2,1220-1238).
gtcctagtgggacttcaaa

SEQ ID NO: 521063 - DNA, 19 bp, Mus musculus
  siRNA target sequence for Evl (NM_007965.2,1222-1240).
cctagtgggacttcaaagt

SEQ ID NO: 521064 - DNA, 19 bp, Mus musculus
  siRNA target sequence for Evl (NM_007965.2,1276-1294).
ggaggcctcatggaagaaa

SEQ ID NO: 521065 - DNA, 19 bp, Mus musculus
  siRNA target sequence for Evl (NM_007965.2,1539-1557).
gggcctggatgccttagat

SEQ ID NO: 521066 - DNA, 19 bp, Mus musculus
  siRNA target sequence for Sdcbp (NM_016807.1,103-121).
caggctcaaactgcttatt

SEQ ID NO: 521067 - DNA, 19 bp, Mus musculus
  siRNA target sequence for Sdcbp (NM_016807.1,131-149).
ccgccagccaagcatttgt

SEQ ID NO: 521068 - DNA, 19 bp, Mus musculus
  siRNA target sequence for Sdcbp (NM_016807.1,132-150).
cgccagccaagcatttgtt

SEQ ID NO: 521069 - DNA, 19 bp, Mus musculus
  siRNA target sequence for Sdcbp (NM_016807.1,134-152).
ccagccaagcatttgttct

SEQ ID NO: 521070 - DNA, 19 bp, Mus musculus
  siRNA target sequence for Sdcbp (NM_016807.1,176-194).
ctccagatggaaatctgta

SEQ ID NO: 521071 - DNA, 19 bp, Mus musculus
  siRNA target sequence for Sdcbp (NM_016807.1,181-199).
gatggaaatctgtatccta

SEQ ID NO: 521072 - DNA, 19 bp, Mus musculus
  siRNA target sequence for Sdcbp (NM_016807.1,359-377).
gaattcggagagcagaaat

SEQ ID NO: 521073 - DNA, 19 bp, Mus musculus
  siRNA target sequence for Sdcbp (NM_016807.1,381-399).
gcaagggatccgtgaagtt

SEQ ID NO: 521074 - DNA, 19 bp, Mus musculus
  siRNA target sequence for Sdcbp (NM_016807.1,382-400).
caagggatccgtgaagtta

SEQ ID NO: 521075 - DNA, 19 bp, Mus musculus
  siRNA target sequence for Sdcbp (NM_016807.1,385-403).
gggatccgtgaagttattt

SEQ ID NO: 521076 - DNA, 19 bp, Mus musculus
  siRNA target sequence for Sdcbp (NM_016807.1,386-404).
ggatccgtgaagttatttt

SEQ ID NO: 521077 - DNA, 19 bp, Mus musculus
  siRNA target sequence for Sdcbp (NM_016807.1,391-409).
cgtgaagttattttgtgta

SEQ ID NO: 521078 - DNA, 19 bp, Mus musculus
  siRNA target sequence for Sdcbp (NM_016807.1,435-453).
cagacttaagtcaatagat

SEQ ID NO: 521079 - DNA, 19 bp, Mus musculus
  siRNA target sequence for Sdcbp (NM_016807.1,437-455).
gacttaagtcaatagataa

SEQ ID NO: 521080 - DNA, 19 bp, Mus musculus
  siRNA target sequence for Sdcbp (NM_016807.1,469-487).
caactcgtccaggctaatt

SEQ ID NO: 521081 - DNA, 19 bp, Mus musculus
  siRNA target sequence for Sdcbp (NM_016807.1,553-571).
gcgggctggagctctgata

SEQ ID NO: 521082 - DNA, 19 bp, Mus musculus
  siRNA target sequence for Sdcbp (NM_016807.1,554-572).
cgggctggagctctgataa

SEQ ID NO: 521083 - DNA, 19 bp, Mus musculus
  siRNA target sequence for Sdcbp (NM_016807.1,634-652).
ccctttgaacggacagtta

SEQ ID NO: 521084 - DNA, 19 bp, Mus musculus
  siRNA target sequence for Sdcbp (NM_016807.1,671-689).
gtggacatgttggctttat

SEQ ID NO: 521085 - DNA, 19 bp, Mus musculus
  siRNA target sequence for Sdcbp (NM_016807.1,674-692).
gacatgttggctttatctt

SEQ ID NO: 521086 - DNA, 19 bp, Mus musculus
  siRNA target sequence for Sdcbp (NM_016807.1,714-732).
catagtaaaagatagttct

SEQ ID NO: 521087 - DNA, 19 bp, Mus musculus
  siRNA target sequence for Sdcbp (NM_016807.1,798-816).
cttgaaggatgctcagatt

SEQ ID NO: 521088 - DNA, 19 bp, Mus musculus
  siRNA target sequence for Sdcbp (NM_016807.1,809-827).
ctcagattgcagatatact

SEQ ID NO: 521089 - DNA, 19 bp, Mus musculus
  siRNA target sequence for Sdcbp (NM_016807.1,811-829).
cagattgcagatatactgt

SEQ ID NO: 521090 - DNA, 19 bp, Mus musculus
  siRNA target sequence for Sdcbp (NM_016807.1,876-894).
cttcgaacacattattaaa

SEQ ID NO: 521091 - DNA, 19 bp, Mus musculus
  siRNA target sequence for Sdcbp (NM_016807.1,900-918).
ggctcccagcattatgaaa

SEQ ID NO: 521092 - DNA, 19 bp, Mus musculus
  siRNA target sequence for Espn (NM_019585.1,37-55).
cccagcaccaaatctttca

SEQ ID NO: 521093 - DNA, 19 bp, Mus musculus
  siRNA target sequence for Espn (NM_019585.1,38-56).
ccagcaccaaatctttcaa

SEQ ID NO: 521094 - DNA, 19 bp, Mus musculus
  siRNA target sequence for Espn (NM_019585.1,41-59).
gcaccaaatctttcaacat

SEQ ID NO: 521095 - DNA, 19 bp, Mus musculus
  siRNA target sequence for Espn (NM_019585.1,44-62).
ccaaatctttcaacatgat

SEQ ID NO: 521096 - DNA, 19 bp, Mus musculus
  siRNA target sequence for Espn (NM_019585.1,414-432).
cctcattcccactcttgat

SEQ ID NO: 521097 - DNA, 19 bp, Mus musculus
  siRNA target sequence for Espn (NM_019585.1,719-737).
ggcagcgacaggtcatctt

SEQ ID NO: 521098 - DNA, 19 bp, Mus musculus
  siRNA target sequence for Espn (NM_019585.1,721-739).
cagcgacaggtcatcttga

SEQ ID NO: 521099 - DNA, 19 bp, Mus musculus
  siRNA target sequence for Espn (NM_019585.1,724-742).
cgacaggtcatcttgaaga

SEQ ID NO: 521100 - DNA, 19 bp, Mus musculus
  siRNA target sequence for Espn (NM_019585.1,725-743).
gacaggtcatcttgaagaa

SEQ ID NO: 521101 - DNA, 19 bp, Mus musculus
  siRNA target sequence for Was (NM_009515.1,77-95).
cagccgttcagcagaacat

SEQ ID NO: 521102 - DNA, 19 bp, Mus musculus
  siRNA target sequence for Was (NM_009515.1,139-157).
gagcttcttggccgaaaat

SEQ ID NO: 521103 - DNA, 19 bp, Mus musculus
  siRNA target sequence for Was (NM_009515.1,142-160).
cttcttggccgaaaatgct

SEQ ID NO: 521104 - DNA, 19 bp, Mus musculus
  siRNA target sequence for Was (NM_009515.1,363-381).
cccgttcttccacactttt

SEQ ID NO: 521105 - DNA, 19 bp, Mus musculus
  siRNA target sequence for Was (NM_009515.1,395-413).
gtcaagtaggactgaactt

SEQ ID NO: 521106 - DNA, 19 bp, Mus musculus
  siRNA target sequence for Was (NM_009515.1,596-614).
caggtggtccactatctct

SEQ ID NO: 521107 - DNA, 19 bp, Mus musculus
  siRNA target sequence for Was (NM_009515.1,642-660).
ccctgacatcacaagttca

SEQ ID NO: 521108 - DNA, 19 bp, Mus musculus
  siRNA target sequence for Was (NM_009515.1,685-703).
ggccctggcccaactgata

SEQ ID NO: 521109 - DNA, 19 bp, Mus musculus
  siRNA target sequence for Was (NM_009515.1,749-767).
caccgagtggattcaaaca

SEQ ID NO: 521110 - DNA, 19 bp, Mus musculus
  siRNA target sequence for Was (NM_009515.1,785-803).
gggatccccagaatggatt

SEQ ID NO: 521111 - DNA, 19 bp, Mus musculus
  siRNA target sequence for Was (NM_009515.1,791-809).
cccagaatggatttgatgt

SEQ ID NO: 521112 - DNA, 19 bp, Mus musculus
  siRNA target sequence for Was (NM_009515.1,826-844).
gatctgcggagcttgttct

SEQ ID NO: 521113 - DNA, 19 bp, Mus musculus
  siRNA target sequence for Was (NM_009515.1,890-908).
ccaagctcatctacgattt

SEQ ID NO: 521114 - DNA, 19 bp, Mus musculus
  siRNA target sequence for Was (NM_009515.1,891-909).
caagctcatctacgatttt

SEQ ID NO: 521115 - DNA, 19 bp, Mus musculus
  siRNA target sequence for Was (NM_009515.1,1063-1081).
cctgttgtggggagtaata

SEQ ID NO: 521116 - DNA, 19 bp, Mus musculus
  siRNA target sequence for Was (NM_009515.1,1064-1082).
ctgttgtggggagtaataa

SEQ ID NO: 521117 - DNA, 19 bp, Mus musculus
  siRNA target sequence for Was (NM_009515.1,1481-1499).
gtgccctgatgcatgtcat

SEQ ID NO: 521118 - DNA, 19 bp, Mus musculus
  siRNA target sequence for Ablim1 (NM_178688.2,233-251).
ggcgtggcacagtcataca

SEQ ID NO: 521119 - DNA, 19 bp, Mus musculus
  siRNA target sequence for Ablim1 (NM_178688.2,234-252).
gcgtggcacagtcatacat

SEQ ID NO: 521120 - DNA, 19 bp, Mus musculus
  siRNA target sequence for Ablim1 (NM_178688.2,236-254).
gtggcacagtcatacatct

SEQ ID NO: 521121 - DNA, 19 bp, Mus musculus
  siRNA target sequence for Ablim1 (NM_178688.2,283-301).
ccaccagagctcaggttta

SEQ ID NO: 521122 - DNA, 19 bp, Mus musculus
  siRNA target sequence for Ablim1 (NM_178688.2,294-312).
caggtttagcagctatgat

SEQ ID NO: 521123 - DNA, 19 bp, Mus musculus
  siRNA target sequence for Ablim1 (NM_178688.2,348-366).
gtcggagaaacctgtcatt

SEQ ID NO: 521124 - DNA, 19 bp, Mus musculus
  siRNA target sequence for Ablim1 (NM_178688.2,409-427).
cgggtgcagaccaagcatt

SEQ ID NO: 521125 - DNA, 19 bp, Mus musculus
  siRNA target sequence for Ablim1 (NM_178688.2,653-671).
ccggagaccgagtcacatt

SEQ ID NO: 521126 - DNA, 19 bp, Mus musculus
  siRNA target sequence for Ablim1 (NM_178688.2,714-732).
gtcttccagccctaaagaa

SEQ ID NO: 521127 - DNA, 19 bp, Mus musculus
  siRNA target sequence for Ablim1 (NM_178688.2,757-775).
ggctgtggaagggacatta

SEQ ID NO: 521128 - DNA, 19 bp, Mus musculus
  siRNA target sequence for Ablim1 (NM_178688.2,814-832).
catttgggctgcttcaagt

SEQ ID NO: 521129 - DNA, 19 bp, Mus musculus
  siRNA target sequence for Ablim1 (NM_178688.2,853-871).
ctcaccggcgagtacatca

SEQ ID NO: 521130 - DNA, 19 bp, Mus musculus
  siRNA target sequence for Ablim1 (NM_178688.2,876-894).
ggatggctccccatactgt

SEQ ID NO: 521131 - DNA, 19 bp, Mus musculus
  siRNA target sequence for Ablim1 (NM_178688.2,882-900).
ctccccatactgtgagaaa

SEQ ID NO: 521132 - DNA, 19 bp, Mus musculus
  siRNA target sequence for Ablim1 (NM_178688.2,931-949).
gaagcctgtcaccagttta

SEQ ID NO: 521133 - DNA, 19 bp, Mus musculus
  siRNA target sequence for Ablim1 (NM_178688.2,936-954).
ctgtcaccagtttatcaca

SEQ ID NO: 521134 - DNA, 19 bp, Mus musculus
  siRNA target sequence for Ablim1 (NM_178688.2,969-987).
ggcaggcgacaagcattat

SEQ ID NO: 521135 - DNA, 19 bp, Mus musculus
  siRNA target sequence for Ablim1 (NM_178688.2,1007-1025).
gcagcagatgcaatcagat

SEQ ID NO: 521136 - DNA, 19 bp, Mus musculus
  siRNA target sequence for Ablim1 (NM_178688.2,1132-1150).
cgctcttcatccgatttct

SEQ ID NO: 521137 - DNA, 19 bp, Mus musculus
  siRNA target sequence for Ablim1 (NM_178688.2,1133-1151).
gctcttcatccgatttctt

SEQ ID NO: 521138 - DNA, 19 bp, Mus musculus
  siRNA target sequence for Ablim1 (NM_178688.2,1134-1152).
ctcttcatccgatttcttt

SEQ ID NO: 521139 - DNA, 19 bp, Mus musculus
  siRNA target sequence for Ablim1 (NM_178688.2,1256-1274).
ggacctcctctgaaagtat

SEQ ID NO: 521140 - DNA, 19 bp, Mus musculus
  siRNA target sequence for Ablim1 (NM_178688.2,1259-1277).
cctcctctgaaagtatcta

SEQ ID NO: 521141 - DNA, 19 bp, Mus musculus
  siRNA target sequence for Ablim1 (NM_178688.2,1304-1322).
gttcaccaggccatactat

SEQ ID NO: 521142 - DNA, 19 bp, Mus musculus
  siRNA target sequence for Ablim1 (NM_178688.2,1307-1325).
caccaggccatactatcta

SEQ ID NO: 521143 - DNA, 19 bp, Mus musculus
  siRNA target sequence for Ablim1 (NM_178688.2,1312-1330).
ggccatactatctatgcaa

SEQ ID NO: 521144 - DNA, 19 bp, Mus musculus
  siRNA target sequence for Ablim1 (NM_178688.2,1314-1332).
ccatactatctatgcaaaa

SEQ ID NO: 521145 - DNA, 19 bp, Mus musculus
  siRNA target sequence for Ablim1 (NM_178688.2,1323-1341).
ctatgcaaaagtagacaat

SEQ ID NO: 521146 - DNA, 19 bp, Mus musculus
  siRNA target sequence for Ablim1 (NM_178688.2,1347-1365).
cctggattacaaggattta

SEQ ID NO: 521147 - DNA, 19 bp, Mus musculus
  siRNA target sequence for Ablim1 (NM_178688.2,1401-1419).
cgagcgtccagatctcatt

SEQ ID NO: 521148 - DNA, 19 bp, Mus musculus
  siRNA target sequence for Ablim1 (NM_178688.2,1405-1423).
cgtccagatctcattacct

SEQ ID NO: 521149 - DNA, 19 bp, Mus musculus
  siRNA target sequence for Ablim1 (NM_178688.2,1406-1424).
gtccagatctcattaccta

SEQ ID NO: 521150 - DNA, 19 bp, Mus musculus
  siRNA target sequence for Ablim1 (NM_178688.2,1480-1498).
gagtctccaaggactttgt

SEQ ID NO: 521151 - DNA, 19 bp, Mus musculus
  siRNA target sequence for Ablim1 (NM_178688.2,1844-1862).
ctcaggcccctaaacattt

SEQ ID NO: 521152 - DNA, 19 bp, Mus musculus
  siRNA target sequence for Ablim1 (NM_178688.2,1884-1902).
caacatttaccgaaaacca

SEQ ID NO: 521153 - DNA, 19 bp, Mus musculus
  siRNA target sequence for Ablim1 (NM_178688.2,1940-1958).
gcaaggcttcagaagatat

SEQ ID NO: 521154 - DNA, 19 bp, Mus musculus
  siRNA target sequence for Ablim1 (NM_178688.2,1996-2014).
gatcccaacgagataccaa

SEQ ID NO: 521155 - DNA, 19 bp, Mus musculus
  siRNA target sequence for Ablim1 (NM_178688.2,2005-2023).
gagataccaaagattgaga

SEQ ID NO: 521156 - DNA, 19 bp, Mus musculus
  siRNA target sequence for Ablim1 (NM_178688.2,2261-2279).
cccatgctccatcatctaa

SEQ ID NO: 521157 - DNA, 19 bp, Mus musculus
  siRNA target sequence for Ablim1 (NM_178688.2,2262-2280).
ccatgctccatcatctaaa

SEQ ID NO: 521158 - DNA, 19 bp, Mus musculus
  siRNA target sequence for Ablim1 (NM_178688.2,2288-2306).
ctctccctggttatggaaa

SEQ ID NO: 521159 - DNA, 19 bp, Mus musculus
  siRNA target sequence for Ablim1 (NM_178688.2,2451-2469).
catgttggaaccaaagata

SEQ ID NO: 521160 - DNA, 19 bp, Mus musculus
  siRNA target sequence for Ablim1 (NM_178688.2,2496-2514).
caacagagggcgcaacaaa

SEQ ID NO: 521161 - DNA, 19 bp, Mus musculus
  siRNA target sequence for Ablim1 (NM_178688.2,2501-2519).
gagggcgcaacaaaatcct

SEQ ID NO: 521162 - DNA, 19 bp, Mus musculus
  siRNA target sequence for Ablim1 (NM_178688.2,2518-2536).
ctgagagatgtggatagaa

SEQ ID NO: 521163 - DNA, 19 bp, Mus musculus
  siRNA target sequence for Ablim1 (NM_178688.2,2550-2568).
ccacttagccccagaagta

SEQ ID NO: 521164 - DNA, 19 bp, Mus musculus
  siRNA target sequence for Ablim1 (NM_178688.2,2551-2569).
cacttagccccagaagtat

SEQ ID NO: 521165 - DNA, 19 bp, Mus musculus
  siRNA target sequence for Ablim1 (NM_178688.2,2553-2571).
cttagccccagaagtattt

SEQ ID NO: 521166 - DNA, 19 bp, Mus musculus
  siRNA target sequence for Ablim2 (NM_177678.3,159-177).
gcgatcctgtgtaatacct

SEQ ID NO: 521167 - DNA, 19 bp, Mus musculus
  siRNA target sequence for Ablim2 (NM_177678.3,207-225).
cgtgtgcagaacaagtact

SEQ ID NO: 521168 - DNA, 19 bp, Mus musculus
  siRNA target sequence for Ablim2 (NM_177678.3,352-370).
gctgtgaccgcttcattga

SEQ ID NO: 521169 - DNA, 19 bp, Mus musculus
  siRNA target sequence for Ablim2 (NM_177678.3,691-709).
cctactgcgaggctgatta

SEQ ID NO: 521170 - DNA, 19 bp, Mus musculus
  siRNA target sequence for Ablim2 (NM_177678.3,692-710).
ctactgcgaggctgattat

SEQ ID NO: 521171 - DNA, 19 bp, Mus musculus
  siRNA target sequence for Ablim2 (NM_177678.3,733-751).
gcgacggctgtgagaagta

SEQ ID NO: 521172 - DNA, 19 bp, Mus musculus
  siRNA target sequence for Ablim2 (NM_177678.3,735-753).
gacggctgtgagaagtaca

SEQ ID NO: 521173 - DNA, 19 bp, Mus musculus
  siRNA target sequence for Ablim2 (NM_177678.3,738-756).
ggctgtgagaagtacatca

SEQ ID NO: 521174 - DNA, 19 bp, Mus musculus
  siRNA target sequence for Ablim2 (NM_177678.3,1091-1109).
ctcctattcgccctacatt

SEQ ID NO: 521175 - DNA, 19 bp, Mus musculus
  siRNA target sequence for Ablim2 (NM_177678.3,1333-1351).
ccgtgttcagacatcatta

SEQ ID NO: 521176 - DNA, 19 bp, Mus musculus
  siRNA target sequence for Ablim2 (NM_177678.3,1466-1484).
cccagacactggcgtaaaa

SEQ ID NO: 521177 - DNA, 19 bp, Mus musculus
  siRNA target sequence for Ablim2 (NM_177678.3,1476-1494).
ggcgtaaaagataacatct

SEQ ID NO: 521178 - DNA, 19 bp, Mus musculus
  siRNA target sequence for Ablim2 (NM_177678.3,1477-1495).
gcgtaaaagataacatcta

SEQ ID NO: 521179 - DNA, 19 bp, Mus musculus
  siRNA target sequence for Ablim2 (NM_177678.3,1608-1626).
gcagacaccagaactaact

SEQ ID NO: 521180 - DNA, 19 bp, Mus musculus
  siRNA target sequence for Ablim2 (NM_177678.3,1674-1692).
caggaacctctccaaagaa

SEQ ID NO: 521181 - DNA, 19 bp, Mus musculus
  siRNA target sequence for Ablim2 (NM_177678.3,1737-1755).
gattccctcatcgtaacaa

SEQ ID NO: 521182 - DNA, 19 bp, Mus musculus
  siRNA target sequence for Ablim2 (NM_177678.3,1748-1766).
cgtaacaaaccgaattcgt

SEQ ID NO: 521183 - DNA, 19 bp, Mus musculus
  siRNA target sequence for Actn2 (NM_033268.2,196-214).
gcgtgcagtacaactatgt

SEQ ID NO: 521184 - DNA, 19 bp, Mus musculus
  siRNA target sequence for Actn2 (NM_033268.2,215-233).
ctacgacgaagatgagtat

SEQ ID NO: 521185 - DNA, 19 bp, Mus musculus
  siRNA target sequence for Actn2 (NM_033268.2,219-237).
gacgaagatgagtatatga

SEQ ID NO: 521186 - DNA, 19 bp, Mus musculus
  siRNA target sequence for Actn2 (NM_033268.2,386-404).
caagctcatgctacttcta

SEQ ID NO: 521187 - DNA, 19 bp, Mus musculus
  siRNA target sequence for Actn2 (NM_033268.2,389-407).
gctcatgctacttctagaa

SEQ ID NO: 521188 - DNA, 19 bp, Mus musculus
  siRNA target sequence for Actn2 (NM_033268.2,507-525).
ggagtgaagctggtatcta

SEQ ID NO: 521189 - DNA, 19 bp, Mus musculus
  siRNA target sequence for Actn2 (NM_033268.2,508-526).
gagtgaagctggtatctat

SEQ ID NO: 521190 - DNA, 19 bp, Mus musculus
  siRNA target sequence for Actn2 (NM_033268.2,512-530).
gaagctggtatctattgga

SEQ ID NO: 521191 - DNA, 19 bp, Mus musculus
  siRNA target sequence for Actn2 (NM_033268.2,670-688).
cagctccatacagaaatgt

SEQ ID NO: 521192 - DNA, 19 bp, Mus musculus
  siRNA target sequence for Actn2 (NM_033268.2,673-691).
ctccatacagaaatgtgaa

SEQ ID NO: 521193 - DNA, 19 bp, Mus musculus
  siRNA target sequence for Actn2 (NM_033268.2,762-780).
gacctcattgactactcaa

SEQ ID NO: 521194 - DNA, 19 bp, Mus musculus
  siRNA target sequence for Actn2 (NM_033268.2,795-813).
gaccccataggaaacatta

SEQ ID NO: 521195 - DNA, 19 bp, Mus musculus
  siRNA target sequence for Actn2 (NM_033268.2,815-833).
cctggccatggaaatagca

SEQ ID NO: 521196 - DNA, 19 bp, Mus musculus
  siRNA target sequence for Actn2 (NM_033268.2,900-918).
gaaagagccatcatgactt

SEQ ID NO: 521197 - DNA, 19 bp, Mus musculus
  siRNA target sequence for Actn2 (NM_033268.2,962-980).
cgagacagcagctaacaga

SEQ ID NO: 521198 - DNA, 19 bp, Mus musculus
  siRNA target sequence for Actn2 (NM_033268.2,969-987).
gcagctaacagaatatgta

SEQ ID NO: 521199 - DNA, 19 bp, Mus musculus
  siRNA target sequence for Actn2 (NM_033268.2,970-988).
cagctaacagaatatgtaa

SEQ ID NO: 521200 - DNA, 19 bp, Mus musculus
  siRNA target sequence for Actn2 (NM_033268.2,999-1017).
gtgaatcaagagaatgaga

SEQ ID NO: 521201 - DNA, 19 bp, Mus musculus
  siRNA target sequence for Actn2 (NM_033268.2,1018-1036).
ggctgatggaagaatatga

SEQ ID NO: 521202 - DNA, 19 bp, Mus musculus
  siRNA target sequence for Actn2 (NM_033268.2,1148-1166).
ggattaccgtcgtaagcat

SEQ ID NO: 521203 - DNA, 19 bp, Mus musculus
  siRNA target sequence for Actn2 (NM_033268.2,1149-1167).
gattaccgtcgtaagcata

SEQ ID NO: 521204 - DNA, 19 bp, Mus musculus
  siRNA target sequence for Actn2 (NM_033268.2,1337-1355).
gtggctattgaatgagatt

SEQ ID NO: 521205 - DNA, 19 bp, Mus musculus
  siRNA target sequence for Actn2 (NM_033268.2,1341-1359).
ctattgaatgagattcgaa

SEQ ID NO: 521206 - DNA, 19 bp, Mus musculus
  siRNA target sequence for Actn2 (NM_033268.2,1570-1588).
cgcaggagctcaatgaact

SEQ ID NO: 521207 - DNA, 19 bp, Mus musculus
  siRNA target sequence for Actn2 (NM_033268.2,1617-1635).
gatcggtgccagaaaattt

SEQ ID NO: 521208 - DNA, 19 bp, Mus musculus
  siRNA target sequence for Actn2 (NM_033268.2,1636-1654).
gcgaccagtgggatagatt

SEQ ID NO: 521209 - DNA, 19 bp, Mus musculus
  siRNA target sequence for Actn2 (NM_033268.2,2063-2081).
ggctcgccaacatgctaat

SEQ ID NO: 521210 - DNA, 19 bp, Mus musculus
  siRNA target sequence for Actn2 (NM_033268.2,2065-2083).
ctcgccaacatgctaatga

SEQ ID NO: 521211 - DNA, 19 bp, Mus musculus
  siRNA target sequence for Actn2 (NM_033268.2,2540-2558).
cttgggtgaagctgaattt

SEQ ID NO: 521212 - DNA, 19 bp, Mus musculus
  siRNA target sequence for Actn2 (NM_033268.2,2551-2569).
ctgaatttgcccgcattat

SEQ ID NO: 521213 - DNA, 19 bp, Mus musculus
  siRNA target sequence for Actn2 (NM_033268.2,2553-2571).
gaatttgcccgcattatga

SEQ ID NO: 521214 - DNA, 19 bp, Mus musculus
  siRNA target sequence for Actn2 (NM_033268.2,2692-2710).
cttctgataagccttacat

SEQ ID NO: 521215 - DNA, 19 bp, Mus musculus
  siRNA target sequence for Actn2 (NM_033268.2,2695-2713).
ctgataagccttacatctt

SEQ ID NO: 521216 - DNA, 19 bp, Mus musculus
  siRNA target sequence for Actn2 (NM_033268.2,2751-2769).
gcccagtactgcatcaaga

SEQ ID NO: 521217 - DNA, 19 bp, Mus musculus
  siRNA target sequence for Actn2 (NM_033268.2,2768-2786).
gagaatgcccccatactca

SEQ ID NO: 521218 - DNA, 19 bp, Mus musculus
  siRNA target sequence for Actn3 (NM_013456.1,331-349).
cacaaaatcgccaatgtca

SEQ ID NO: 521219 - DNA, 19 bp, Mus musculus
  siRNA target sequence for Actn3 (NM_013456.1,395-413).
ccatcggtgctgaagaaat

SEQ ID NO: 521220 - DNA, 19 bp, Mus musculus
  siRNA target sequence for Actn3 (NM_013456.1,418-436).
gacgggaacctgaagatga

SEQ ID NO: 521221 - DNA, 19 bp, Mus musculus
  siRNA target sequence for Actn3 (NM_013456.1,544-562).
gcaccgtaccgcaatgtca

SEQ ID NO: 521222 - DNA, 19 bp, Mus musculus
  siRNA target sequence for Actn3 (NM_013456.1,545-563).
caccgtaccgcaatgtcaa

SEQ ID NO: 521223 - DNA, 19 bp, Mus musculus
  siRNA target sequence for Actn3 (NM_013456.1,1112-1130).
gccaccgacccgctttcat

SEQ ID NO: 521224 - DNA, 19 bp, Mus musculus
  siRNA target sequence for Actn3 (NM_013456.1,1619-1637).
gggcagcccccttcaataa

SEQ ID NO: 521225 - DNA, 19 bp, Mus musculus
  siRNA target sequence for Actn3 (NM_013456.1,1621-1639).
gcagcccccttcaataact

SEQ ID NO: 521226 - DNA, 19 bp, Mus musculus
  siRNA target sequence for Actn3 (NM_013456.1,1715-1733).
cagcacacgaacagttcaa

SEQ ID NO: 521227 - DNA, 19 bp, Mus musculus
  siRNA target sequence for Actn3 (NM_013456.1,1856-1874).
gttcgcaggacatcaacaa

SEQ ID NO: 521228 - DNA, 19 bp, Mus musculus
  siRNA target sequence for Actn3 (NM_013456.1,1859-1877).
cgcaggacatcaacaataa

SEQ ID NO: 521229 - DNA, 19 bp, Mus musculus
  siRNA target sequence for Actn3 (NM_013456.1,2394-2412).
catctccatgggttacgat

SEQ ID NO: 521230 - DNA, 19 bp, Mus musculus
  siRNA target sequence for Actn3 (NM_013456.1,2425-2443).
gagtttgctcgaatcatga

SEQ ID NO: 521231 - DNA, 19 bp, Mus musculus
  siRNA target sequence for Actn3 (NM_013456.1,2520-2538).
gacagacacggctgaacaa

SEQ ID NO: 521232 - DNA, 19 bp, Mus musculus
  siRNA target sequence for Actn3 (NM_013456.1,2522-2540).
cagacacggctgaacaagt

SEQ ID NO: 521233 - DNA, 19 bp, Mus musculus
  siRNA target sequence for Actn3 (NM_013456.1,2685-2703).
ggactacgtggctttctct

SEQ ID NO: 521234 - DNA, 19 bp, Mus musculus
  siRNA target sequence for Actn3 (NM_013456.1,2686-2704).
gactacgtggctttctcta

SEQ ID NO: 521235 - DNA, 19 bp, Mus musculus
  siRNA target sequence for Actn4 (NM_021895.2,177-195).
gaagcatgggcgactacat

SEQ ID NO: 521236 - DNA, 19 bp, Mus musculus
  siRNA target sequence for Actn4 (NM_021895.2,334-352).
cagggatgggctcaaactt

SEQ ID NO: 521237 - DNA, 19 bp, Mus musculus
  siRNA target sequence for Actn4 (NM_021895.2,414-432).
gagtgcacaagatcaacaa

SEQ ID NO: 521238 - DNA, 19 bp, Mus musculus
  siRNA target sequence for Actn4 (NM_021895.2,484-502).
catcggggcagaagagatt

SEQ ID NO: 521239 - DNA, 19 bp, Mus musculus
  siRNA target sequence for Actn4 (NM_021895.2,624-642).
gaaagacagccccatataa

SEQ ID NO: 521240 - DNA, 19 bp, Mus musculus
  siRNA target sequence for Actn4 (NM_021895.2,755-773).
gatccagtcaccaacctaa

SEQ ID NO: 521241 - DNA, 19 bp, Mus musculus
  siRNA target sequence for Actn4 (NM_021895.2,758-776).
ccagtcaccaacctaaaca

SEQ ID NO: 521242 - DNA, 19 bp, Mus musculus
  siRNA target sequence for Actn4 (NM_021895.2,765-783).
ccaacctaaacaatgcatt

SEQ ID NO: 521243 - DNA, 19 bp, Mus musculus
  siRNA target sequence for Actn4 (NM_021895.2,769-787).
cctaaacaatgcatttgaa

SEQ ID NO: 521244 - DNA, 19 bp, Mus musculus
  siRNA target sequence for Actn4 (NM_021895.2,792-810).
ctgagaaatacctcgatat

SEQ ID NO: 521245 - DNA, 19 bp, Mus musculus
  siRNA target sequence for Actn4 (NM_021895.2,803-821).
ctcgatatccccaagatgt

SEQ ID NO: 521246 - DNA, 19 bp, Mus musculus
  siRNA target sequence for Actn4 (NM_021895.2,855-873).
ccgacgagaaggccataat

SEQ ID NO: 521247 - DNA, 19 bp, Mus musculus
  siRNA target sequence for Actn4 (NM_021895.2,857-875).
gacgagaaggccataatga

SEQ ID NO: 521248 - DNA, 19 bp, Mus musculus
  siRNA target sequence for Actn4 (NM_021895.2,859-877).
cgagaaggccataatgaca

SEQ ID NO: 521249 - DNA, 19 bp, Mus musculus
  siRNA target sequence for Actn4 (NM_021895.2,860-878).
gagaaggccataatgacat

SEQ ID NO: 521250 - DNA, 19 bp, Mus musculus
  siRNA target sequence for Actn4 (NM_021895.2,866-884).
gccataatgacatatgtgt

SEQ ID NO: 521251 - DNA, 19 bp, Mus musculus
  siRNA target sequence for Actn4 (NM_021895.2,999-1017).
gcctggccagtgatcttct

SEQ ID NO: 521252 - DNA, 19 bp, Mus musculus
  siRNA target sequence for Actn4 (NM_021895.2,1938-1956).
ctgttaccccccagatcat

SEQ ID NO: 521253 - DNA, 19 bp, Mus musculus
  siRNA target sequence for Actn4 (NM_021895.2,1940-1958).
gttaccccccagatcatca

SEQ ID NO: 521254 - DNA, 19 bp, Mus musculus
  siRNA target sequence for Actn4 (NM_021895.2,2528-2546).
gagttcaaccggatcatga

SEQ ID NO: 521255 - DNA, 19 bp, Mus musculus
  siRNA target sequence for Avil (NM_009635.2,157-175).
gatcatcacatggagaatt

SEQ ID NO: 521256 - DNA, 19 bp, Mus musculus
  siRNA target sequence for Avil (NM_009635.2,270-288).
gccttctctcccagaacat

SEQ ID NO: 521257 - DNA, 19 bp, Mus musculus
  siRNA target sequence for Avil (NM_009635.2,439-457).
gcagggcatcatctataaa

SEQ ID NO: 521258 - DNA, 19 bp, Mus musculus
  siRNA target sequence for Avil (NM_009635.2,440-458).
cagggcatcatctataaaa

SEQ ID NO: 521259 - DNA, 19 bp, Mus musculus
  siRNA target sequence for Avil (NM_009635.2,720-738).
ctgaaattggggtgattga

SEQ ID NO: 521260 - DNA, 19 bp, Mus musculus
  siRNA target sequence for Avil (NM_009635.2,794-812).
ggtcgacgctccatgataa

SEQ ID NO: 521261 - DNA, 19 bp, Mus musculus
  siRNA target sequence for Avil (NM_009635.2,795-813).
gtcgacgctccatgataaa

SEQ ID NO: 521262 - DNA, 19 bp, Mus musculus
  siRNA target sequence for Avil (NM_009635.2,819-837).
cagtttctgatgagatcat

SEQ ID NO: 521263 - DNA, 19 bp, Mus musculus
  siRNA target sequence for Avil (NM_009635.2,835-853).
catggaccaacaacagaaa

SEQ ID NO: 521264 - DNA, 19 bp, Mus musculus
  siRNA target sequence for Avil (NM_009635.2,855-873).
caagtatcatgttatatca

SEQ ID NO: 521265 - DNA, 19 bp, Mus musculus
  siRNA target sequence for Avil (NM_009635.2,1170-1188).
cgggcttggggaaaatatt

SEQ ID NO: 521266 - DNA, 19 bp, Mus musculus
  siRNA target sequence for Avil (NM_009635.2,1194-1212).
ctggtaaaatcgctaaaat

SEQ ID NO: 521267 - DNA, 19 bp, Mus musculus
  siRNA target sequence for Avil (NM_009635.2,1196-1214).
ggtaaaatcgctaaaatct

SEQ ID NO: 521268 - DNA, 19 bp, Mus musculus
  siRNA target sequence for Avil (NM_009635.2,1197-1215).
gtaaaatcgctaaaatctt

SEQ ID NO: 521269 - DNA, 19 bp, Mus musculus
  siRNA target sequence for Avil (NM_009635.2,1418-1436).
ccccattacatcttgtaca

SEQ ID NO: 521270 - DNA, 19 bp, Mus musculus
  siRNA target sequence for Avil (NM_009635.2,1908-1926).
cagcctacgctaatgacaa

SEQ ID NO: 521271 - DNA, 19 bp, Mus musculus
  siRNA target sequence for Avil (NM_009635.2,1955-1973).
caggtccggctctttgagt

SEQ ID NO: 521272 - DNA, 19 bp, Mus musculus
  siRNA target sequence for Avil (NM_009635.2,1963-1981).
gctctttgagtgttccaat

SEQ ID NO: 521273 - DNA, 19 bp, Mus musculus
  siRNA target sequence for Avil (NM_009635.2,1964-1982).
ctctttgagtgttccaata

SEQ ID NO: 521274 - DNA, 19 bp, Mus musculus
  siRNA target sequence for Avil (NM_009635.2,2184-2202).
cgattctgatcatcaaaca

SEQ ID NO: 521275 - DNA, 19 bp, Mus musculus
  siRNA target sequence for Avil (NM_009635.2,2262-2280).
gcgaaggaaaatcatatga

SEQ ID NO: 521276 - DNA, 19 bp, Mus musculus
  siRNA target sequence for Avil (NM_009635.2,2274-2292).
catatgagcagctaaagaa

SEQ ID NO: 521277 - DNA, 19 bp, Mus musculus
  siRNA target sequence for Avil (NM_009635.2,2322-2340).
gaatcaccgctgacatgaa

SEQ ID NO: 521278 - DNA, 19 bp, Mus musculus
  siRNA target sequence for Avil (NM_009635.2,2367-2385).
gtgacggtgagccaaagta

SEQ ID NO: 521279 - DNA, 19 bp, Mus musculus
  siRNA target sequence for Cald1 (NM_145575.1,490-508).
gcgtcagaaggagtttgat

SEQ ID NO: 521280 - DNA, 19 bp, Mus musculus
  siRNA target sequence for Cald1 (NM_145575.1,500-518).
gagtttgatccgaccataa

SEQ ID NO: 521281 - DNA, 19 bp, Mus musculus
  siRNA target sequence for Cald1 (NM_145575.1,502-520).
gtttgatccgaccataaca

SEQ ID NO: 521282 - DNA, 19 bp, Mus musculus
  siRNA target sequence for Cald1 (NM_145575.1,534-552).
caggcccaagccgaagaat

SEQ ID NO: 521283 - DNA, 19 bp, Mus musculus
  siRNA target sequence for Cald1 (NM_145575.1,545-563).
cgaagaatgcaaaatgact

SEQ ID NO: 521284 - DNA, 19 bp, Mus musculus
  siRNA target sequence for Cald1 (NM_145575.1,560-578).
gactccgccgaaaatgaga

SEQ ID NO: 521285 - DNA, 19 bp, Mus musculus
  siRNA target sequence for Cald1 (NM_145575.1,617-635).
cggtatgaggtggaagaaa

SEQ ID NO: 521286 - DNA, 19 bp, Mus musculus
  siRNA target sequence for Cald1 (NM_145575.1,738-756).
ggagccttggcgaaaatca

SEQ ID NO: 521287 - DNA, 19 bp, Mus musculus
  siRNA target sequence for Cald1 (NM_145575.1,747-765).
gcgaaaatcagatcaaaga

SEQ ID NO: 521288 - DNA, 19 bp, Mus musculus
  siRNA target sequence for Cald1 (NM_145575.1,748-766).
cgaaaatcagatcaaagat

SEQ ID NO: 521289 - DNA, 19 bp, Mus musculus
  siRNA target sequence for Cald1 (NM_145575.1,848-866).
gcgcagaatggagaattca

SEQ ID NO: 521290 - DNA, 19 bp, Mus musculus
  siRNA target sequence for Cald1 (NM_145575.1,865-883).
catgacccacaaacttaaa

SEQ ID NO: 521291 - DNA, 19 bp, Mus musculus
  siRNA target sequence for Cald1 (NM_145575.1,1141-1159).
ggaggctgatcgaaaagct

SEQ ID NO: 521292 - DNA, 19 bp, Mus musculus
  siRNA target sequence for Cald1 (NM_145575.1,1296-1314).
gctcgtctctcaagataga

SEQ ID NO: 521293 - DNA, 19 bp, Mus musculus
  siRNA target sequence for Cald1 (NM_145575.1,1313-1331).
gaggaacgagcagagtttt

SEQ ID NO: 521294 - DNA, 19 bp, Mus musculus
  siRNA target sequence for Cald1 (NM_145575.1,1316-1334).
gaacgagcagagtttttga

SEQ ID NO: 521295 - DNA, 19 bp, Mus musculus
  siRNA target sequence for Cald1 (NM_145575.1,1319-1337).
cgagcagagtttttgaata

SEQ ID NO: 521296 - DNA, 19 bp, Mus musculus
  siRNA target sequence for Cald1 (NM_145575.1,1320-1338).
gagcagagtttttgaataa

SEQ ID NO: 521297 - DNA, 19 bp, Mus musculus
  siRNA target sequence for Cald1 (NM_145575.1,1432-1450).
gggaacaaaggcttcgaaa

SEQ ID NO: 521298 - DNA, 19 bp, Mus musculus
  siRNA target sequence for Cald1 (NM_145575.1,1437-1455).
caaaggcttcgaaacctat

SEQ ID NO: 521299 - DNA, 19 bp, Mus musculus
  siRNA target sequence for Cald1 (NM_145575.1,1488-1506).
ccgagggcgtccgcaatat

SEQ ID NO: 521300 - DNA, 19 bp, Mus musculus
  siRNA target sequence for Cald1 (NM_145575.1,1490-1508).
gagggcgtccgcaatatca

SEQ ID NO: 521301 - DNA, 19 bp, Mus musculus
  siRNA target sequence for Cald1 (NM_145575.1,1493-1511).
ggcgtccgcaatatcaaga

SEQ ID NO: 521302 - DNA, 19 bp, Mus musculus
  siRNA target sequence for Cald1 (NM_145575.1,1612-1630).
cgaatggctaactaaatca

SEQ ID NO: 521303 - DNA, 19 bp, Mus musculus
  siRNA target sequence for Cald1 (NM_145575.1,1669-1687).
cttgaggccaggagatgta

SEQ ID NO: 521304 - DNA, 19 bp, Mus musculus
  siRNA target sequence for Capg (NM_007599.1,1097-1115).
ggctgtgtggcaaaatcta

SEQ ID NO: 521305 - DNA, 19 bp, Mus musculus
  siRNA target sequence for Capg (NM_007599.1,1099-1117).
ctgtgtggcaaaatctaca

SEQ ID NO: 521306 - DNA, 19 bp, Mus musculus
  siRNA target sequence for Capg (NM_007599.1,1237-1255).
cgagagagtcccatcttca

SEQ ID NO: 521307 - DNA, 19 bp, Mus musculus
  siRNA target sequence for Capg (NM_007599.1,1246-1264).
cccatcttcaagcaattct

SEQ ID NO: 521308 - DNA, 19 bp, Mus musculus
  siRNA target sequence for Capg (NM_007599.1,1247-1265).
ccatcttcaagcaattctt

SEQ ID NO: 521309 - DNA, 19 bp, Mus musculus
  siRNA target sequence for Cfl1 (NM_007687.2,536-554).
ggtggcagcgccgtcattt

SEQ ID NO: 521310 - DNA, 19 bp, Mus musculus
  siRNA target sequence for Cfl2 (NM_007688.1,152-170).
gaatgatgaagtcatcaaa

SEQ ID NO: 521311 - DNA, 19 bp, Mus musculus
  siRNA target sequence for Cfl2 (NM_007688.1,245-263).
ctgtttgagcgatgacaaa

SEQ ID NO: 521312 - DNA, 19 bp, Mus musculus
  siRNA target sequence for Cfl2 (NM_007688.1,251-269).
gagcgatgacaaaagacaa

SEQ ID NO: 521313 - DNA, 19 bp, Mus musculus
  siRNA target sequence for Cfl2 (NM_007688.1,253-271).
gcgatgacaaaagacaaat

SEQ ID NO: 521314 - DNA, 19 bp, Mus musculus
  siRNA target sequence for Cfl2 (NM_007688.1,330-348).
ccctacacatcttttgtga

SEQ ID NO: 521315 - DNA, 19 bp, Mus musculus
  siRNA target sequence for Cfl2 (NM_007688.1,362-380).
gaatgattgccgatatgct

SEQ ID NO: 521316 - DNA, 19 bp, Mus musculus
  siRNA target sequence for Cfl2 (NM_007688.1,387-405).
gatgccacgtacgaaacaa

SEQ ID NO: 521317 - DNA, 19 bp, Mus musculus
  siRNA target sequence for Cfl2 (NM_007688.1,391-409).
ccacgtacgaaacaaaaga

SEQ ID NO: 521318 - DNA, 19 bp, Mus musculus
  siRNA target sequence for Cfl2 (NM_007688.1,450-468).
gaaagtgcaccgttaaaaa

SEQ ID NO: 521319 - DNA, 19 bp, Mus musculus
  siRNA target sequence for Cfl2 (NM_007688.1,460-478).
cgttaaaaagcaagatgat

SEQ ID NO: 521320 - DNA, 19 bp, Mus musculus
  siRNA target sequence for Cfl2 (NM_007688.1,476-494).
gatttatgctagctctaaa

SEQ ID NO: 521321 - DNA, 19 bp, Mus musculus
  siRNA target sequence for Cfl2 (NM_007688.1,569-587).
ctcgacgctgggagagaaa

SEQ ID NO: 521322 - DNA, 19 bp, Mus musculus
  siRNA target sequence for Cfl2 (NM_007688.1,571-589).
cgacgctgggagagaaact

SEQ ID NO: 521323 - DNA, 19 bp, Mus musculus
  siRNA target sequence for Cnn1 (NM_009922.2,112-130).
cggcttgtctgctgaagta

SEQ ID NO: 521324 - DNA, 19 bp, Mus musculus
  siRNA target sequence for Cnn1 (NM_009922.2,209-227).
cgcatcgggaacaacttca

SEQ ID NO: 521325 - DNA, 19 bp, Mus musculus
  siRNA target sequence for Cnn1 (NM_009922.2,238-256).
caaagacgggatcattctt

SEQ ID NO: 521326 - DNA, 19 bp, Mus musculus
  siRNA target sequence for Cnn1 (NM_009922.2,326-344).
cagctggagaacataggta

SEQ ID NO: 521327 - DNA, 19 bp, Mus musculus
  siRNA target sequence for Cnn1 (NM_009922.2,329-347).
ctggagaacataggtaatt

SEQ ID NO: 521328 - DNA, 19 bp, Mus musculus
  siRNA target sequence for Cnn1 (NM_009922.2,332-350).
gagaacataggtaatttca

SEQ ID NO: 521329 - DNA, 19 bp, Mus musculus
  siRNA target sequence for Cnn1 (NM_009922.2,418-436).
caccaaccatacacaagtt

SEQ ID NO: 521330 - DNA, 19 bp, Mus musculus
  siRNA target sequence for Cnn1 (NM_009922.2,420-438).
ccaaccatacacaagttca

SEQ ID NO: 521331 - DNA, 19 bp, Mus musculus
  siRNA target sequence for Cnn1 (NM_009922.2,490-508).
caatgtgggagtcaagtat

SEQ ID NO: 521332 - DNA, 19 bp, Mus musculus
  siRNA target sequence for Cnn1 (NM_009922.2,528-546).
gatttgagccggagaagtt

SEQ ID NO: 521333 - DNA, 19 bp, Mus musculus
  siRNA target sequence for Cnn1 (NM_009922.2,627-645).
cacggcgtcacctctatga

SEQ ID NO: 521334 - DNA, 19 bp, Mus musculus
  siRNA target sequence for Cnn1 (NM_009922.2,744-762).
gcaccaagcggcagatctt

SEQ ID NO: 521335 - DNA, 19 bp, Mus musculus
  siRNA target sequence for Cnn1 (NM_009922.2,938-956).
caccacccgcacaactact

SEQ ID NO: 521336 - DNA, 19 bp, Mus musculus
  siRNA target sequence for Cnn2 (NM_007725.1,164-182).
ggctcctgtccaaatatga

SEQ ID NO: 521337 - DNA, 19 bp, Mus musculus
  siRNA target sequence for Cnn2 (NM_007725.1,310-328).
ggctccgtccctaaaatca

SEQ ID NO: 521338 - DNA, 19 bp, Mus musculus
  siRNA target sequence for Cnn2 (NM_007725.1,311-329).
gctccgtccctaaaatcaa

SEQ ID NO: 521339 - DNA, 19 bp, Mus musculus
  siRNA target sequence for Cnn2 (NM_007725.1,349-367).
caccagctagaaaatctct

SEQ ID NO: 521340 - DNA, 19 bp, Mus musculus
  siRNA target sequence for Cnn2 (NM_007725.1,518-536).
gtgtggacattggagttaa

SEQ ID NO: 521341 - DNA, 19 bp, Mus musculus
  siRNA target sequence for Cnn2 (NM_007725.1,520-538).
gtggacattggagttaagt

SEQ ID NO: 521342 - DNA, 19 bp, Mus musculus
  siRNA target sequence for Cnn2 (NM_007725.1,656-674).
gtaccaggagacatctcta

SEQ ID NO: 521343 - DNA, 19 bp, Mus musculus
  siRNA target sequence for Cnn2 (NM_007725.1,776-794).
ggacccggaggcacatcta

SEQ ID NO: 521344 - DNA, 19 bp, Mus musculus
  siRNA target sequence for Cnn2 (NM_007725.1,777-795).
gacccggaggcacatctat

SEQ ID NO: 521345 - DNA, 19 bp, Mus musculus
  siRNA target sequence for Cnn2 (NM_007725.1,814-832).
gacaagtgcgacaactctt

SEQ ID NO: 521346 - DNA, 19 bp, Mus musculus
  siRNA target sequence for Cnn2 (NM_007725.1,903-921).
gatctacgatcccaagtat

SEQ ID NO: 521347 - DNA, 19 bp, Mus musculus
  siRNA target sequence for Coro1a (NM_009898.2,117-135).
gtggttcgctccagcaaat

SEQ ID NO: 521348 - DNA, 19 bp, Mus musculus
  siRNA target sequence for Coro1a (NM_009898.2,624-642).
gtgcacccggacacaatct

SEQ ID NO: 521349 - DNA, 19 bp, Mus musculus
  siRNA target sequence for Coro1a (NM_009898.2,770-788).
gccagtgcacgctgtgttt

SEQ ID NO: 521350 - DNA, 19 bp, Mus musculus
  siRNA target sequence for Coro1a (NM_009898.2,791-809).
gtcagaagggaagattcta

SEQ ID NO: 521351 - DNA, 19 bp, Mus musculus
  siRNA target sequence for Coro1a (NM_009898.2,909-927).
ggagtcctgctaccttttt

SEQ ID NO: 521352 - DNA, 19 bp, Mus musculus
  siRNA target sequence for Coro1a (NM_009898.2,910-928).
gagtcctgctacctttttt

SEQ ID NO: 521353 - DNA, 19 bp, Mus musculus
  siRNA target sequence for Coro1a (NM_009898.2,934-952).
ctgataccaacattgtcta

SEQ ID NO: 521354 - DNA, 19 bp, Mus musculus
  siRNA target sequence for Coro1a (NM_009898.2,971-989).
cagctctatccggtatttt

SEQ ID NO: 521355 - DNA, 19 bp, Mus musculus
  siRNA target sequence for Coro1a (NM_009898.2,973-991).
gctctatccggtattttga

SEQ ID NO: 521356 - DNA, 19 bp, Mus musculus
  siRNA target sequence for Coro1a (NM_009898.2,981-999).
cggtattttgagatcactt

SEQ ID NO: 521357 - DNA, 19 bp, Mus musculus
  siRNA target sequence for Coro1a (NM_009898.2,1004-1022).
ggctccgttcctgcattat

SEQ ID NO: 521358 - DNA, 19 bp, Mus musculus
  siRNA target sequence for Coro1a (NM_009898.2,1017-1035).
cattatctttccatgttca

SEQ ID NO: 521359 - DNA, 19 bp, Mus musculus
  siRNA target sequence for Coro1a (NM_009898.2,1077-1095).
cgtggcctggaagtgaata

SEQ ID NO: 521360 - DNA, 19 bp, Mus musculus
  siRNA target sequence for Coro1a (NM_009898.2,1150-1168).
ccatgacagtgcctagaaa

SEQ ID NO: 521361 - DNA, 19 bp, Mus musculus
  siRNA target sequence for Coro1a (NM_009898.2,1427-1445).
cgccatagtgcaaaagcta

SEQ ID NO: 521362 - DNA, 19 bp, Mus musculus
  siRNA target sequence for Coro1b (NM_011778.1,112-130).
gcaaattccggcatgtatt

SEQ ID NO: 521363 - DNA, 19 bp, Mus musculus
  siRNA target sequence for Coro1b (NM_011778.1,131-149).
cggtcagccggtcaagaat

SEQ ID NO: 521364 - DNA, 19 bp, Mus musculus
  siRNA target sequence for Coro1b (NM_011778.1,133-151).
gtcagccggtcaagaatga

SEQ ID NO: 521365 - DNA, 19 bp, Mus musculus
  siRNA target sequence for Coro1b (NM_011778.1,247-265).
gtggtggaggcgcctttat

SEQ ID NO: 521366 - DNA, 19 bp, Mus musculus
  siRNA target sequence for Coro1b (NM_011778.1,250-268).
gtggaggcgcctttatggt

SEQ ID NO: 521367 - DNA, 19 bp, Mus musculus
  siRNA target sequence for Coro1b (NM_011778.1,267-285).
gtgcttcctctaaacaaga

SEQ ID NO: 521368 - DNA, 19 bp, Mus musculus
  siRNA target sequence for Coro1b (NM_011778.1,331-349).
ggcctgttctggatattga

SEQ ID NO: 521369 - DNA, 19 bp, Mus musculus
  siRNA target sequence for Coro1b (NM_011778.1,353-371).
gtgtccccacaatgatgaa

SEQ ID NO: 521370 - DNA, 19 bp, Mus musculus
  siRNA target sequence for Coro1b (NM_011778.1,478-496).
ccaagcgcgtgggcattat

SEQ ID NO: 521371 - DNA, 19 bp, Mus musculus
  siRNA target sequence for Coro1b (NM_011778.1,606-624).
caccccgacctcatctaca

SEQ ID NO: 521372 - DNA, 19 bp, Mus musculus
  siRNA target sequence for Coro1b (NM_011778.1,889-907).
gggctctactgccctttta

SEQ ID NO: 521373 - DNA, 19 bp, Mus musculus
  siRNA target sequence for Coro1b (NM_011778.1,890-908).
ggctctactgcccttttat

SEQ ID NO: 521374 - DNA, 19 bp, Mus musculus
  siRNA target sequence for Coro1b (NM_011778.1,1226-1244).
cggtcaggatgctaatcca

SEQ ID NO: 521375 - DNA, 19 bp, Mus musculus
  siRNA target sequence for Coro1b (NM_011778.1,1227-1245).
ggtcaggatgctaatccaa

SEQ ID NO: 521376 - DNA, 19 bp, Mus musculus
  siRNA target sequence for Coro1b (NM_011778.1,1228-1246).
gtcaggatgctaatccaat

SEQ ID NO: 521377 - DNA, 19 bp, Mus musculus
  siRNA target sequence for Coro1b (NM_011778.1,1267-1285).
cctatgtgcccagtaaaca

SEQ ID NO: 521378 - DNA, 19 bp, Mus musculus
  siRNA target sequence for Coro1b (NM_011778.1,1268-1286).
ctatgtgcccagtaaacaa

SEQ ID NO: 521379 - DNA, 19 bp, Mus musculus
  siRNA target sequence for Coro1c (NM_011779.2,298-316).
gacgggacgaattgacaaa

SEQ ID NO: 521380 - DNA, 19 bp, Mus musculus
  siRNA target sequence for Coro1c (NM_011779.2,303-321).
gacgaattgacaaatccta

SEQ ID NO: 521381 - DNA, 19 bp, Mus musculus
  siRNA target sequence for Coro1c (NM_011779.2,345-363).
gaccagtgctggacataga

SEQ ID NO: 521382 - DNA, 19 bp, Mus musculus
  siRNA target sequence for Coro1c (NM_011779.2,427-445).
gcagatcccggaaaatgga

SEQ ID NO: 521383 - DNA, 19 bp, Mus musculus
  siRNA target sequence for Coro1c (NM_011779.2,466-484).
gcctgtggtgattctagaa

SEQ ID NO: 521384 - DNA, 19 bp, Mus musculus
  siRNA target sequence for Coro1c (NM_011779.2,479-497).
ctagaagggcactcaaaaa

SEQ ID NO: 521385 - DNA, 19 bp, Mus musculus
  siRNA target sequence for Coro1c (NM_011779.2,552-570).
gctgtgataatgccattat

SEQ ID NO: 521386 - DNA, 19 bp, Mus musculus
  siRNA target sequence for Coro1c (NM_011779.2,555-573).
gtgataatgccattatcat

SEQ ID NO: 521387 - DNA, 19 bp, Mus musculus
  siRNA target sequence for Coro1c (NM_011779.2,590-608).
ggggaagccctcatcaact

SEQ ID NO: 521388 - DNA, 19 bp, Mus musculus
  siRNA target sequence for Coro1c (NM_011779.2,591-609).
gggaagccctcatcaactt

SEQ ID NO: 521389 - DNA, 19 bp, Mus musculus
  siRNA target sequence for Coro1c (NM_011779.2,604-622).
caacttggacgatatgcat

SEQ ID NO: 521390 - DNA, 19 bp, Mus musculus
  siRNA target sequence for Coro1c (NM_011779.2,620-638).
cattcagacatgatttaca

SEQ ID NO: 521391 - DNA, 19 bp, Mus musculus
  siRNA target sequence for Coro1c (NM_011779.2,624-642).
cagacatgatttacaatgt

SEQ ID NO: 521392 - DNA, 19 bp, Mus musculus
  siRNA target sequence for Coro1c (NM_011779.2,672-690).
gcaccgcatccaaagacaa

SEQ ID NO: 521393 - DNA, 19 bp, Mus musculus
  siRNA target sequence for Coro1c (NM_011779.2,788-806).
gacggcaacgtcttcacta

SEQ ID NO: 521394 - DNA, 19 bp, Mus musculus
  siRNA target sequence for Coro1c (NM_011779.2,870-888).
caattgctctccatgaaat

SEQ ID NO: 521395 - DNA, 19 bp, Mus musculus
  siRNA target sequence for Coro1c (NM_011779.2,1007-1025).
gtccactacctcaacacat

SEQ ID NO: 521396 - DNA, 19 bp, Mus musculus
  siRNA target sequence for Coro1c (NM_011779.2,1010-1028).
cactacctcaacacattca

SEQ ID NO: 521397 - DNA, 19 bp, Mus musculus
  siRNA target sequence for Coro1c (NM_011779.2,1073-1091).
ggccttgacgtcaacaagt

SEQ ID NO: 521398 - DNA, 19 bp, Mus musculus
  siRNA target sequence for Coro1c (NM_011779.2,1125-1143).
gaaagtgcgagcccattat

SEQ ID NO: 521399 - DNA, 19 bp, Mus musculus
  siRNA target sequence for Coro1c (NM_011779.2,1250-1268).
gcggaccccatcctcatat

SEQ ID NO: 521400 - DNA, 19 bp, Mus musculus
  siRNA target sequence for Coro1c (NM_011779.2,1253-1271).
gaccccatcctcatatcgt

SEQ ID NO: 521401 - DNA, 19 bp, Mus musculus
  siRNA target sequence for Coro1c (NM_011779.2,1398-1416).
cggccagtgtgcaaaacga

SEQ ID NO: 521402 - DNA, 19 bp, Mus musculus
  siRNA target sequence for Coro1c (NM_011779.2,1399-1417).
ggccagtgtgcaaaacgaa

SEQ ID NO: 521403 - DNA, 19 bp, Mus musculus
  siRNA target sequence for Coro1c (NM_011779.2,1475-1493).
caagacgagcgcatttcca

SEQ ID NO: 521404 - DNA, 19 bp, Mus musculus
  siRNA target sequence for Cotl1 (NM_028071.1,257-275).
gcgatcagggagcagatta

SEQ ID NO: 521405 - DNA, 19 bp, Mus musculus
  siRNA target sequence for Cotl1 (NM_028071.1,269-287).
cagattaccagcacttcat

SEQ ID NO: 521406 - DNA, 19 bp, Mus musculus
  siRNA target sequence for Cotl1 (NM_028071.1,340-358).
ggcgacgccatgagcaaaa

SEQ ID NO: 521407 - DNA, 19 bp, Mus musculus
  siRNA target sequence for Cotl1 (NM_028071.1,351-369).
gagcaaaagatccaagttt

SEQ ID NO: 521408 - DNA, 19 bp, Mus musculus
  siRNA target sequence for D030056L22 (NM_177640.2,545-563).
gaatgaaggagttgagatt

SEQ ID NO: 521409 - DNA, 19 bp, Mus musculus
  siRNA target sequence for Daam1 (NM_172464.1,269-287).
gctgtttccgaaacaatga

SEQ ID NO: 521410 - DNA, 19 bp, Mus musculus
  siRNA target sequence for Daam1 (NM_172464.1,286-304).
gaccatccagaaatcacat

SEQ ID NO: 521411 - DNA, 19 bp, Mus musculus
  siRNA target sequence for Daam1 (NM_172464.1,300-318).
cacatatcggcttaggaat

SEQ ID NO: 521412 - DNA, 19 bp, Mus musculus
  siRNA target sequence for Daam1 (NM_172464.1,530-548).
ccgagttctacattgatca

SEQ ID NO: 521413 - DNA, 19 bp, Mus musculus
  siRNA target sequence for Daam1 (NM_172464.1,558-576).
catggctgctaggaaatct

SEQ ID NO: 521414 - DNA, 19 bp, Mus musculus
  siRNA target sequence for Daam1 (NM_172464.1,651-669).
caagcccatgaggtttgta

SEQ ID NO: 521415 - DNA, 19 bp, Mus musculus
  siRNA target sequence for Daam1 (NM_172464.1,687-705).
ggatggcctgtcatgtatt

SEQ ID NO: 521416 - DNA, 19 bp, Mus musculus
  siRNA target sequence for Daam1 (NM_172464.1,698-716).
catgtattctcaactttct

SEQ ID NO: 521417 - DNA, 19 bp, Mus musculus
  siRNA target sequence for Daam1 (NM_172464.1,773-791).
gtataaaggcactaatgaa

SEQ ID NO: 521418 - DNA, 19 bp, Mus musculus
  siRNA target sequence for Daam1 (NM_172464.1,820-838).
gctcattctgagagtatca

SEQ ID NO: 521419 - DNA, 19 bp, Mus musculus
  siRNA target sequence for Daam1 (NM_172464.1,827-845).
ctgagagtatcaatgtaat

SEQ ID NO: 521420 - DNA, 19 bp, Mus musculus
  siRNA target sequence for Daam1 (NM_172464.1,954-972).
gctgcactaccagaagtat

SEQ ID NO: 521421 - DNA, 19 bp, Mus musculus
  siRNA target sequence for Daam1 (NM_172464.1,994-1012).
cagacgttaattaatgact

SEQ ID NO: 521422 - DNA, 19 bp, Mus musculus
  siRNA target sequence for Daam1 (NM_172464.1,1028-1046).
ggcgttatcgggatgaagt

SEQ ID NO: 521423 - DNA, 19 bp, Mus musculus
  siRNA target sequence for Daam1 (NM_172464.1,1029-1047).
gcgttatcgggatgaagta

SEQ ID NO: 521424 - DNA, 19 bp, Mus musculus
  siRNA target sequence for Daam1 (NM_172464.1,1030-1048).
cgttatcgggatgaagtaa

SEQ ID NO: 521425 - DNA, 19 bp, Mus musculus
  siRNA target sequence for Daam1 (NM_172464.1,1097-1115).
gagccggagtggagagttt

SEQ ID NO: 521426 - DNA, 19 bp, Mus musculus
  siRNA target sequence for Daam1 (NM_172464.1,1125-1143).
gctccatcttcgctatgaa

SEQ ID NO: 521427 - DNA, 19 bp, Mus musculus
  siRNA target sequence for Daam1 (NM_172464.1,1128-1146).
ccatcttcgctatgaattt

SEQ ID NO: 521428 - DNA, 19 bp, Mus musculus
  siRNA target sequence for Daam1 (NM_172464.1,1132-1150).
cttcgctatgaatttctga

SEQ ID NO: 521429 - DNA, 19 bp, Mus musculus
  siRNA target sequence for Daam1 (NM_172464.1,1157-1175).
gaattcaacctgttataga

SEQ ID NO: 521430 - DNA, 19 bp, Mus musculus
  siRNA target sequence for Daam1 (NM_172464.1,1202-1220).
cactagacaggcatttaga

SEQ ID NO: 521431 - DNA, 19 bp, Mus musculus
  siRNA target sequence for Daam1 (NM_172464.1,1298-1316).
gcgccactcagatgtttga

SEQ ID NO: 521432 - DNA, 19 bp, Mus musculus
  siRNA target sequence for Daam1 (NM_172464.1,1398-1416).
caagaggagtggtaacaca

SEQ ID NO: 521433 - DNA, 19 bp, Mus musculus
  siRNA target sequence for Daam1 (NM_172464.1,1431-1449).
gctgttagacagaatcata

SEQ ID NO: 521434 - DNA, 19 bp, Mus musculus
  siRNA target sequence for Daam1 (NM_172464.1,1525-1543).
gtcgtaagaatgttggtta

SEQ ID NO: 521435 - DNA, 19 bp, Mus musculus
  siRNA target sequence for Daam1 (NM_172464.1,1527-1545).
cgtaagaatgttggttaat

SEQ ID NO: 521436 - DNA, 19 bp, Mus musculus
  siRNA target sequence for Daam1 (NM_172464.1,1993-2011).
ggtgctccagtgagtctaa

SEQ ID NO: 521437 - DNA, 19 bp, Mus musculus
  siRNA target sequence for Daam1 (NM_172464.1,2006-2024).
gtctaacactcaagaagaa

SEQ ID NO: 521438 - DNA, 19 bp, Mus musculus
  siRNA target sequence for Daam1 (NM_172464.1,2038-2056).
cccaccaatgccctgaaat

SEQ ID NO: 521439 - DNA, 19 bp, Mus musculus
  siRNA target sequence for Daam1 (NM_172464.1,2069-2087).
ccaagttgcctgagaacaa

SEQ ID NO: 521440 - DNA, 19 bp, Mus musculus
  siRNA target sequence for Daam1 (NM_172464.1,2095-2113).
ggaacagtatggactgaaa

SEQ ID NO: 521441 - DNA, 19 bp, Mus musculus
  siRNA target sequence for Daam1 (NM_172464.1,2096-2114).
gaacagtatggactgaaat

SEQ ID NO: 521442 - DNA, 19 bp, Mus musculus
  siRNA target sequence for Daam1 (NM_172464.1,2108-2126).
ctgaaattgatgataccaa

SEQ ID NO: 521443 - DNA, 19 bp, Mus musculus
  siRNA target sequence for Dbn1 (NM_019813.2,300-318).
ctgccctgccaaaatatgt

SEQ ID NO: 521444 - DNA, 19 bp, Mus musculus
  siRNA target sequence for Dbn1 (NM_019813.2,309-327).
caaaatatgtgctcatcaa

SEQ ID NO: 521445 - DNA, 19 bp, Mus musculus
  siRNA target sequence for Dbn1 (NM_019813.2,344-362).
gtgcctgatgcccgaaaat

SEQ ID NO: 521446 - DNA, 19 bp, Mus musculus
  siRNA target sequence for Dbn1 (NM_019813.2,346-364).
gcctgatgcccgaaaatgt

SEQ ID NO: 521447 - DNA, 19 bp, Mus musculus
  siRNA target sequence for Dbn1 (NM_019813.2,383-401).
gccaaggtggctgaattct

SEQ ID NO: 521448 - DNA, 19 bp, Mus musculus
  siRNA target sequence for Dbn1 (NM_019813.2,522-540).
gccttcgggaggatgaaaa

SEQ ID NO: 521449 - DNA, 19 bp, Mus musculus
  siRNA target sequence for Dbn1 (NM_019813.2,681-699).
ccaggctcaggtttgaaca

SEQ ID NO: 521450 - DNA, 19 bp, Mus musculus
  siRNA target sequence for Dbn1 (NM_019813.2,907-925).
ggaggcggctgccatcatt

SEQ ID NO: 521451 - DNA, 19 bp, Mus musculus
  siRNA target sequence for Dbn1 (NM_019813.2,1063-1081).
gatggcacccactcctatt

SEQ ID NO: 521452 - DNA, 19 bp, Mus musculus
  siRNA target sequence for Dbn1 (NM_019813.2,1249-1267).
caaggaggccaaagtaaca

SEQ ID NO: 521453 - DNA, 19 bp, Mus musculus
  siRNA target sequence for Dbn1 (NM_019813.2,1352-1370).
gactcgatgtgcacagaat

SEQ ID NO: 521454 - DNA, 19 bp, Mus musculus
  siRNA target sequence for Dbn1 (NM_019813.2,1509-1527).
ccgctgccagcctcattga

SEQ ID NO: 521455 - DNA, 19 bp, Mus musculus
  siRNA target sequence for Dbn1 (NM_019813.2,1510-1528).
cgctgccagcctcattgat

SEQ ID NO: 521456 - DNA, 19 bp, Mus musculus
  siRNA target sequence for Dbn1 (NM_019813.2,1512-1530).
ctgccagcctcattgatct

SEQ ID NO: 521457 - DNA, 19 bp, Mus musculus
  siRNA target sequence for Dbn1 (NM_019813.2,1514-1532).
gccagcctcattgatctat

SEQ ID NO: 521458 - DNA, 19 bp, Mus musculus
  siRNA target sequence for Dbn1 (NM_019813.2,1546-1564).
ggaagaggcctcaacactt

SEQ ID NO: 521459 - DNA, 19 bp, Mus musculus
  siRNA target sequence for Dbn1 (NM_019813.2,1669-1687).
cgaaggctgtgctaacctt

SEQ ID NO: 521460 - DNA, 19 bp, Mus musculus
  siRNA target sequence for Dbn1 (NM_019813.2,1673-1691).
ggctgtgctaaccttctta

SEQ ID NO: 521461 - DNA, 19 bp, Mus musculus
  siRNA target sequence for Dbn1 (NM_019813.2,1857-1875).
gagagaccactcaaaagga

SEQ ID NO: 521462 - DNA, 19 bp, Mus musculus
  siRNA target sequence for Dbnl (NM_013810.1,82-100).
cgcgtagtcaccgagaaat

SEQ ID NO: 521463 - DNA, 19 bp, Mus musculus
  siRNA target sequence for Dbnl (NM_013810.1,104-122).
cgaccgactgggctctttt

SEQ ID NO: 521464 - DNA, 19 bp, Mus musculus
  siRNA target sequence for Dbnl (NM_013810.1,105-123).
gaccgactgggctcttttt

SEQ ID NO: 521465 - DNA, 19 bp, Mus musculus
  siRNA target sequence for Dbnl (NM_013810.1,114-132).
ggctctttttacctatgaa

SEQ ID NO: 521466 - DNA, 19 bp, Mus musculus
  siRNA target sequence for Dbnl (NM_013810.1,249-267).
ctccggcctgcccaagttt

SEQ ID NO: 521467 - DNA, 19 bp, Mus musculus
  siRNA target sequence for Dbnl (NM_013810.1,251-269).
ccggcctgcccaagtttgt

SEQ ID NO: 521468 - DNA, 19 bp, Mus musculus
  siRNA target sequence for Dbnl (NM_013810.1,447-465).
ctacagcttccataaggaa

SEQ ID NO: 521469 - DNA, 19 bp, Mus musculus
  siRNA target sequence for Dbnl (NM_013810.1,519-537).
gaagaccaatgccatatct

SEQ ID NO: 521470 - DNA, 19 bp, Mus musculus
  siRNA target sequence for Dbnl (NM_013810.1,548-566).
gagtcggcaaggataactt

SEQ ID NO: 521471 - DNA, 19 bp, Mus musculus
  siRNA target sequence for Dbnl (NM_013810.1,550-568).
gtcggcaaggataacttct

SEQ ID NO: 521472 - DNA, 19 bp, Mus musculus
  siRNA target sequence for Dbnl (NM_013810.1,751-769).
gagcaggaagccgtttcaa

SEQ ID NO: 521473 - DNA, 19 bp, Mus musculus
  siRNA target sequence for Dbnl (NM_013810.1,807-825).
cccacacccacgagagatt

SEQ ID NO: 521474 - DNA, 19 bp, Mus musculus
  siRNA target sequence for Dbnl (NM_013810.1,809-827).
cacacccacgagagatttt

SEQ ID NO: 521475 - DNA, 19 bp, Mus musculus
  siRNA target sequence for Dbnl (NM_013810.1,811-829).
cacccacgagagattttca

SEQ ID NO: 521476 - DNA, 19 bp, Mus musculus
  siRNA target sequence for Dbnl (NM_013810.1,1100-1118).
gggctggctccgaacacat

SEQ ID NO: 521477 - DNA, 19 bp, Mus musculus
  siRNA target sequence for Dbnl (NM_013810.1,1101-1119).
ggctggctccgaacacatt

SEQ ID NO: 521478 - DNA, 19 bp, Mus musculus
  siRNA target sequence for Dbnl (NM_013810.1,1103-1121).
ctggctccgaacacattga

SEQ ID NO: 521479 - DNA, 19 bp, Mus musculus
  siRNA target sequence for Dbnl (NM_013810.1,1105-1123).
ggctccgaacacattgaca

SEQ ID NO: 521480 - DNA, 19 bp, Mus musculus
  siRNA target sequence for Dbnl (NM_013810.1,1106-1124).
gctccgaacacattgacaa

SEQ ID NO: 521481 - DNA, 19 bp, Mus musculus
  siRNA target sequence for Dbnl (NM_013810.1,1109-1127).
ccgaacacattgacaacta

SEQ ID NO: 521482 - DNA, 19 bp, Mus musculus
  siRNA target sequence for Dbnl (NM_013810.1,1218-1236).
ccctgagaacctaatcaca

SEQ ID NO: 521483 - DNA, 19 bp, Mus musculus
  siRNA target sequence for Dbnl (NM_013810.1,1235-1253).
caggcatcgaggtgattga

SEQ ID NO: 521484 - DNA, 19 bp, Mus musculus
  siRNA target sequence for Diap1 (NM_007858.1,128-146).
gcggtacccgggacaagaa

SEQ ID NO: 521485 - DNA, 19 bp, Mus musculus
  siRNA target sequence for Diap1 (NM_007858.1,194-212).
gcaaacataagaaatttct

SEQ ID NO: 521486 - DNA, 19 bp, Mus musculus
  siRNA target sequence for Diap1 (NM_007858.1,224-242).
ccagcatgaggattaagaa

SEQ ID NO: 521487 - DNA, 19 bp, Mus musculus
  siRNA target sequence for Diap1 (NM_007858.1,255-273).
gcccaattctgctcataga

SEQ ID NO: 521488 - DNA, 19 bp, Mus musculus
  siRNA target sequence for Diap1 (NM_007858.1,256-274).
cccaattctgctcatagaa

SEQ ID NO: 521489 - DNA, 19 bp, Mus musculus
  siRNA target sequence for Diap1 (NM_007858.1,257-275).
ccaattctgctcatagaaa

SEQ ID NO: 521490 - DNA, 19 bp, Mus musculus
  siRNA target sequence for Diap1 (NM_007858.1,327-345).
ctcagacgagcaagttctt

SEQ ID NO: 521491 - DNA, 19 bp, Mus musculus
  siRNA target sequence for Diap1 (NM_007858.1,432-450).
ggagatggtgtcgcaatat

SEQ ID NO: 521492 - DNA, 19 bp, Mus musculus
  siRNA target sequence for Diap1 (NM_007858.1,467-485).
ctggcatgaaccagaaaga

SEQ ID NO: 521493 - DNA, 19 bp, Mus musculus
  siRNA target sequence for Diap1 (NM_007858.1,491-509).
ctaggtctgccatgatgta

SEQ ID NO: 521494 - DNA, 19 bp, Mus musculus
  siRNA target sequence for Diap1 (NM_007858.1,527-545).
cgggcttgcgggatatgca

SEQ ID NO: 521495 - DNA, 19 bp, Mus musculus
  siRNA target sequence for Diap1 (NM_007858.1,571-589).
cgagtctctctcaacaata

SEQ ID NO: 521496 - DNA, 19 bp, Mus musculus
  siRNA target sequence for Diap1 (NM_007858.1,656-674).
gactccatgatgagaaaga

SEQ ID NO: 521497 - DNA, 19 bp, Mus musculus
  siRNA target sequence for Diap1 (NM_007858.1,698-716).
gccgaaaccagcatgagat

SEQ ID NO: 521498 - DNA, 19 bp, Mus musculus
  siRNA target sequence for Diap1 (NM_007858.1,701-719).
gaaaccagcatgagattat

SEQ ID NO: 521499 - DNA, 19 bp, Mus musculus
  siRNA target sequence for Diap1 (NM_007858.1,722-740).
gctgtttgaaggctttcat

SEQ ID NO: 521500 - DNA, 19 bp, Mus musculus
  siRNA target sequence for Diap1 (NM_007858.1,774-792).
gacggaagaaggaatccta

SEQ ID NO: 521501 - DNA, 19 bp, Mus musculus
  siRNA target sequence for Diap1 (NM_007858.1,879-897).
gccggaggacatgaatgaa

SEQ ID NO: 521502 - DNA, 19 bp, Mus musculus
  siRNA target sequence for Diap1 (NM_007858.1,888-906).
catgaatgaacgagttcta

SEQ ID NO: 521503 - DNA, 19 bp, Mus musculus
  siRNA target sequence for Diap1 (NM_007858.1,955-973).
ccacttctggacggattaa

SEQ ID NO: 521504 - DNA, 19 bp, Mus musculus
  siRNA target sequence for Diap1 (NM_007858.1,956-974).
cacttctggacggattaaa

SEQ ID NO: 521505 - DNA, 19 bp, Mus musculus
  siRNA target sequence for Diap1 (NM_007858.1,1004-1022).
gatgcctacagctcatcaa

SEQ ID NO: 521506 - DNA, 19 bp, Mus musculus
  siRNA target sequence for Diap1 (NM_007858.1,1149-1167).
gctgtgcgtgtttgatgaa

SEQ ID NO: 521507 - DNA, 19 bp, Mus musculus
  siRNA target sequence for Diap1 (NM_007858.1,1152-1170).
gtgcgtgtttgatgaacaa

SEQ ID NO: 521508 - DNA, 19 bp, Mus musculus
  siRNA target sequence for Diap1 (NM_007858.1,1227-1245).
ggatgactttggtgaagtt

SEQ ID NO: 521509 - DNA, 19 bp, Mus musculus
  siRNA target sequence for Diap1 (NM_007858.1,1228-1246).
gatgactttggtgaagttt

SEQ ID NO: 521510 - DNA, 19 bp, Mus musculus
  siRNA target sequence for Diap1 (NM_007858.1,1237-1255).
ggtgaagtttttcagatta

SEQ ID NO: 521511 - DNA, 19 bp, Mus musculus
  siRNA target sequence for Diap1 (NM_007858.1,1317-1335).
cctgttggtccgaaatgat

SEQ ID NO: 521512 - DNA, 19 bp, Mus musculus
  siRNA target sequence for Diap1 (NM_007858.1,1318-1336).
ctgttggtccgaaatgatt

SEQ ID NO: 521513 - DNA, 19 bp, Mus musculus
  siRNA target sequence for Diap1 (NM_007858.1,1320-1338).
gttggtccgaaatgattat

SEQ ID NO: 521514 - DNA, 19 bp, Mus musculus
  siRNA target sequence for Diap1 (NM_007858.1,1323-1341).
ggtccgaaatgattatgaa

SEQ ID NO: 521515 - DNA, 19 bp, Mus musculus
  siRNA target sequence for Diap1 (NM_007858.1,1382-1400).
ctcagatagttctacacaa

SEQ ID NO: 521516 - DNA, 19 bp, Mus musculus
  siRNA target sequence for Diap1 (NM_007858.1,1384-1402).
cagatagttctacacaaaa

SEQ ID NO: 521517 - DNA, 19 bp, Mus musculus
  siRNA target sequence for Diap1 (NM_007858.1,1386-1404).
gatagttctacacaaaaat

SEQ ID NO: 521518 - DNA, 19 bp, Mus musculus
  siRNA target sequence for Diap1 (NM_007858.1,1427-1445).
gccgacacctgcagattga

SEQ ID NO: 521519 - DNA, 19 bp, Mus musculus
  siRNA target sequence for Diap1 (NM_007858.1,1429-1447).
cgacacctgcagattgata

SEQ ID NO: 521520 - DNA, 19 bp, Mus musculus
  siRNA target sequence for Diap1 (NM_007858.1,1430-1448).
gacacctgcagattgatat

SEQ ID NO: 521521 - DNA, 19 bp, Mus musculus
  siRNA target sequence for Diap1 (NM_007858.1,1435-1453).
ctgcagattgatattgaga

SEQ ID NO: 521522 - DNA, 19 bp, Mus musculus
  siRNA target sequence for Diap1 (NM_007858.1,1450-1468).
gagagattggttgatcaaa

SEQ ID NO: 521523 - DNA, 19 bp, Mus musculus
  siRNA target sequence for Diap1 (NM_007858.1,1459-1477).
gttgatcaaatgattgata

SEQ ID NO: 521524 - DNA, 19 bp, Mus musculus
  siRNA target sequence for Diap1 (NM_007858.1,1770-1788).
ggttgttgcaccttctgtt

SEQ ID NO: 521525 - DNA, 19 bp, Mus musculus
  siRNA target sequence for Diap1 (NM_007858.1,1774-1792).
gttgcaccttctgtttcta

SEQ ID NO: 521526 - DNA, 19 bp, Mus musculus
  siRNA target sequence for Diap1 (NM_007858.1,1828-1846).
ggtgactctggcactgtta

SEQ ID NO: 521527 - DNA, 19 bp, Mus musculus
  siRNA target sequence for Diap1 (NM_007858.1,1829-1847).
gtgactctggcactgttat

SEQ ID NO: 521528 - DNA, 19 bp, Mus musculus
  siRNA target sequence for Diap1 (NM_007858.1,2124-2142).
gcctggaggtacaggtata

SEQ ID NO: 521529 - DNA, 19 bp, Mus musculus
  siRNA target sequence for Diap1 (NM_007858.1,2339-2357).
gattaacccccaaaaaagt

SEQ ID NO: 521530 - DNA, 19 bp, Mus musculus
  siRNA target sequence for Diap1 (NM_007858.1,2385-2403).
gccaaactggtccaagttt

SEQ ID NO: 521531 - DNA, 19 bp, Mus musculus
  siRNA target sequence for Diap1 (NM_007858.1,2451-2469).
ggaccgctttgagaacaat

SEQ ID NO: 521532 - DNA, 19 bp, Mus musculus
  siRNA target sequence for Diap1 (NM_007858.1,2456-2474).
gctttgagaacaatgaact

SEQ ID NO: 521533 - DNA, 19 bp, Mus musculus
  siRNA target sequence for Diap1 (NM_007858.1,2609-2627).
cagcgcagaatctctcaat

SEQ ID NO: 521534 - DNA, 19 bp, Mus musculus
  siRNA target sequence for Diap1 (NM_007858.1,2611-2629).
gcgcagaatctctcaatct

SEQ ID NO: 521535 - DNA, 19 bp, Mus musculus
  siRNA target sequence for Diap1 (NM_007858.1,2612-2630).
cgcagaatctctcaatctt

SEQ ID NO: 521536 - DNA, 19 bp, Mus musculus
  siRNA target sequence for Diap1 (NM_007858.1,2613-2631).
gcagaatctctcaatcttt

SEQ ID NO: 521537 - DNA, 19 bp, Mus musculus
  siRNA target sequence for Diap1 (NM_007858.1,2656-2674).
caagagataaagaacgtta

SEQ ID NO: 521538 - DNA, 19 bp, Mus musculus
  siRNA target sequence for Diap1 (NM_007858.1,2934-2952).
cgaagagctgcgtaagagt

SEQ ID NO: 521539 - DNA, 19 bp, Mus musculus
  siRNA target sequence for Diap1 (NM_007858.1,2944-2962).
cgtaagagtgagaacttct

SEQ ID NO: 521540 - DNA, 19 bp, Mus musculus
  siRNA target sequence for Diap1 (NM_007858.1,2983-3001).
ctgctggtcggaaactata

SEQ ID NO: 521541 - DNA, 19 bp, Mus musculus
  siRNA target sequence for Diap1 (NM_007858.1,2988-3006).
ggtcggaaactatatgaat

SEQ ID NO: 521542 - DNA, 19 bp, Mus musculus
  siRNA target sequence for Diap1 (NM_007858.1,3025-3043).
ggtgctttcggcttcaata

SEQ ID NO: 521543 - DNA, 19 bp, Mus musculus
  siRNA target sequence for Diap1 (NM_007858.1,3026-3044).
gtgctttcggcttcaatat

SEQ ID NO: 521544 - DNA, 19 bp, Mus musculus
  siRNA target sequence for Diap1 (NM_007858.1,3028-3046).
gctttcggcttcaatatca

SEQ ID NO: 521545 - DNA, 19 bp, Mus musculus
  siRNA target sequence for Diap1 (NM_007858.1,3102-3120).
gcatttcttggctgagtta

SEQ ID NO: 521546 - DNA, 19 bp, Mus musculus
  siRNA target sequence for Diap1 (NM_007858.1,3111-3129).
ggctgagttatgtgagaat

SEQ ID NO: 521547 - DNA, 19 bp, Mus musculus
  siRNA target sequence for Diap1 (NM_007858.1,3250-3268).
gagcgcgatgttcagaatt

SEQ ID NO: 521548 - DNA, 19 bp, Mus musculus
  siRNA target sequence for Diap1 (NM_007858.1,3451-3469).
gatctgcacaactttagga

SEQ ID NO: 521549 - DNA, 19 bp, Mus musculus
  siRNA target sequence for Diap1 (NM_007858.1,3454-3472).
ctgcacaactttaggaata

SEQ ID NO: 521550 - DNA, 19 bp, Mus musculus
  siRNA target sequence for Diap1 (NM_007858.1,3457-3475).
cacaactttaggaatatgt

SEQ ID NO: 521551 - DNA, 19 bp, Mus musculus
  siRNA target sequence for Diap1 (NM_007858.1,3525-3543).
gatgcggagagcaaaatta

SEQ ID NO: 521552 - DNA, 19 bp, Mus musculus
  siRNA target sequence for Diap1 (NM_007858.1,3789-3807).
ggtacccaagaaaagtgaa

SEQ ID NO: 521553 - DNA, 19 bp, Mus musculus
  siRNA target sequence for Diap2 (NM_017398.1,319-337).
ctgcgtgaccgaattacaa

SEQ ID NO: 521554 - DNA, 19 bp, Mus musculus
  siRNA target sequence for Diap2 (NM_017398.1,321-339).
gcgtgaccgaattacaagt

SEQ ID NO: 521555 - DNA, 19 bp, Mus musculus
  siRNA target sequence for Diap2 (NM_017398.1,322-340).
cgtgaccgaattacaagtt

SEQ ID NO: 521556 - DNA, 19 bp, Mus musculus
  siRNA target sequence for Diap2 (NM_017398.1,323-341).
gtgaccgaattacaagttt

SEQ ID NO: 521557 - DNA, 19 bp, Mus musculus
  siRNA target sequence for Diap2 (NM_017398.1,325-343).
gaccgaattacaagtttca

SEQ ID NO: 521558 - DNA, 19 bp, Mus musculus
  siRNA target sequence for Diap2 (NM_017398.1,436-454).
catgatgaccgatctttga

SEQ ID NO: 521559 - DNA, 19 bp, Mus musculus
  siRNA target sequence for Diap2 (NM_017398.1,439-457).
gatgaccgatctttgattt

SEQ ID NO: 521560 - DNA, 19 bp, Mus musculus
  siRNA target sequence for Diap2 (NM_017398.1,442-460).
gaccgatctttgattttgt

SEQ ID NO: 521561 - DNA, 19 bp, Mus musculus
  siRNA target sequence for Diap2 (NM_017398.1,444-462).
ccgatctttgattttgtct

SEQ ID NO: 521562 - DNA, 19 bp, Mus musculus
  siRNA target sequence for Diap2 (NM_017398.1,472-490).
gttctggacctctttgaga

SEQ ID NO: 521563 - DNA, 19 bp, Mus musculus
  siRNA target sequence for Diap2 (NM_017398.1,532-550).
cctttgcgaaagaaggatt

SEQ ID NO: 521564 - DNA, 19 bp, Mus musculus
  siRNA target sequence for Diap2 (NM_017398.1,538-556).
cgaaagaaggattttagca

SEQ ID NO: 521565 - DNA, 19 bp, Mus musculus
  siRNA target sequence for Diap2 (NM_017398.1,565-583).
gagatggttgtccagtata

SEQ ID NO: 521566 - DNA, 19 bp, Mus musculus
  siRNA target sequence for Diap2 (NM_017398.1,570-588).
ggttgtccagtatatttct

SEQ ID NO: 521567 - DNA, 19 bp, Mus musculus
  siRNA target sequence for Diap2 (NM_017398.1,646-664).
catgagttcaccctttctt

SEQ ID NO: 521568 - DNA, 19 bp, Mus musculus
  siRNA target sequence for Diap2 (NM_017398.1,665-683).
cacaagaatatgttcatga

SEQ ID NO: 521569 - DNA, 19 bp, Mus musculus
  siRNA target sequence for Diap2 (NM_017398.1,720-738).
ctgcctggaatctttgaga

SEQ ID NO: 521570 - DNA, 19 bp, Mus musculus
  siRNA target sequence for Diap2 (NM_017398.1,762-780).
cagctgggtcaacaacttt

SEQ ID NO: 521571 - DNA, 19 bp, Mus musculus
  siRNA target sequence for Diap2 (NM_017398.1,861-879).
gaatcagtacaaagtcatt

SEQ ID NO: 521572 - DNA, 19 bp, Mus musculus
  siRNA target sequence for Diap2 (NM_017398.1,886-904).
ctgaaagcatttatgaata

SEQ ID NO: 521573 - DNA, 19 bp, Mus musculus
  siRNA target sequence for Diap2 (NM_017398.1,909-927).
gtttggactacaaagaatt

SEQ ID NO: 521574 - DNA, 19 bp, Mus musculus
  siRNA target sequence for Diap2 (NM_017398.1,965-983).
caattgacccgaaacaaca

SEQ ID NO: 521575 - DNA, 19 bp, Mus musculus
  siRNA target sequence for Diap2 (NM_017398.1,970-988).
gacccgaaacaacagaata

SEQ ID NO: 521576 - DNA, 19 bp, Mus musculus
  siRNA target sequence for Diap2 (NM_017398.1,973-991).
ccgaaacaacagaatatga

SEQ ID NO: 521577 - DNA, 19 bp, Mus musculus
  siRNA target sequence for Diap2 (NM_017398.1,974-992).
cgaaacaacagaatatgat

SEQ ID NO: 521578 - DNA, 19 bp, Mus musculus
  siRNA target sequence for Diap2 (NM_017398.1,1011-1029).
cctttctgctatttgcatt

SEQ ID NO: 521579 - DNA, 19 bp, Mus musculus
  siRNA target sequence for Diap2 (NM_017398.1,1188-1206).
cacctctccatatgatctt

SEQ ID NO: 521580 - DNA, 19 bp, Mus musculus
  siRNA target sequence for Diap2 (NM_017398.1,1193-1211).
ctccatatgatcttgattt

SEQ ID NO: 521581 - DNA, 19 bp, Mus musculus
  siRNA target sequence for Diap2 (NM_017398.1,1204-1222).
cttgattttcgaattcatt

SEQ ID NO: 521582 - DNA, 19 bp, Mus musculus
  siRNA target sequence for Diap2 (NM_017398.1,1207-1225).
gattttcgaattcatttga

SEQ ID NO: 521583 - DNA, 19 bp, Mus musculus
  siRNA target sequence for Diap2 (NM_017398.1,1240-1258).
cgttgtggattaaaagcaa

SEQ ID NO: 521584 - DNA, 19 bp, Mus musculus
  siRNA target sequence for Diap2 (NM_017398.1,1241-1259).
gttgtggattaaaagcaat

SEQ ID NO: 521585 - DNA, 19 bp, Mus musculus
  siRNA target sequence for Diap2 (NM_017398.1,1255-1273).
gcaatgctccctactctta

SEQ ID NO: 521586 - DNA, 19 bp, Mus musculus
  siRNA target sequence for Diap2 (NM_017398.1,1256-1274).
caatgctccctactcttaa

SEQ ID NO: 521587 - DNA, 19 bp, Mus musculus
  siRNA target sequence for Diap2 (NM_017398.1,1263-1281).
ccctactcttaaagagata

SEQ ID NO: 521588 - DNA, 19 bp, Mus musculus
  siRNA target sequence for Diap2 (NM_017398.1,1284-1302).
gaatgaagggcttgatatt

SEQ ID NO: 521589 - DNA, 19 bp, Mus musculus
  siRNA target sequence for Diap2 (NM_017398.1,1330-1348).
gaagatgacctaagtgaat

SEQ ID NO: 521590 - DNA, 19 bp, Mus musculus
  siRNA target sequence for Diap2 (NM_017398.1,1333-1351).
gatgacctaagtgaattat

SEQ ID NO: 521591 - DNA, 19 bp, Mus musculus
  siRNA target sequence for Diap2 (NM_017398.1,1352-1370).
cccaccgtctcaatgacat

SEQ ID NO: 521592 - DNA, 19 bp, Mus musculus
  siRNA target sequence for Diap2 (NM_017398.1,1353-1371).
ccaccgtctcaatgacatt

SEQ ID NO: 521593 - DNA, 19 bp, Mus musculus
  siRNA target sequence for Diap2 (NM_017398.1,1368-1386).
cattcgagctgaaatggat

SEQ ID NO: 521594 - DNA, 19 bp, Mus musculus
  siRNA target sequence for Diap2 (NM_017398.1,1399-1417).
gtctaccatctgctgtata

SEQ ID NO: 521595 - DNA, 19 bp, Mus musculus
  siRNA target sequence for Diap2 (NM_017398.1,1401-1419).
ctaccatctgctgtataat

SEQ ID NO: 521596 - DNA, 19 bp, Mus musculus
  siRNA target sequence for Diap2 (NM_017398.1,1435-1453).
gctgcggaaccttacttat

SEQ ID NO: 521597 - DNA, 19 bp, Mus musculus
  siRNA target sequence for Diap2 (NM_017398.1,1436-1454).
ctgcggaaccttacttatt

SEQ ID NO: 521598 - DNA, 19 bp, Mus musculus
  siRNA target sequence for Diap2 (NM_017398.1,1438-1456).
gcggaaccttacttattat

SEQ ID NO: 521599 - DNA, 19 bp, Mus musculus
  siRNA target sequence for Diap2 (NM_017398.1,1441-1459).
gaaccttacttattatcca

SEQ ID NO: 521600 - DNA, 19 bp, Mus musculus
  siRNA target sequence for Diap2 (NM_017398.1,1477-1495).
ctcatcagaaatgattact

SEQ ID NO: 521601 - DNA, 19 bp, Mus musculus
  siRNA target sequence for Diap2 (NM_017398.1,1494-1512).
ctacatcaggccacagtat

SEQ ID NO: 521602 - DNA, 19 bp, Mus musculus
  siRNA target sequence for Diap2 (NM_017398.1,1504-1522).
ccacagtattataaaatca

SEQ ID NO: 521603 - DNA, 19 bp, Mus musculus
  siRNA target sequence for Diap2 (NM_017398.1,1615-1633).
ctcctagatgcttgtgtaa

SEQ ID NO: 521604 - DNA, 19 bp, Mus musculus
  siRNA target sequence for Diap2 (NM_017398.1,1686-1704).
gttcgatgaagaattcaca

SEQ ID NO: 521605 - DNA, 19 bp, Mus musculus
  siRNA target sequence for Diap2 (NM_017398.1,2024-2042).
gaccaattgagctaccata

SEQ ID NO: 521606 - DNA, 19 bp, Mus musculus
  siRNA target sequence for Diap2 (NM_017398.1,2074-2092).
gacatacctatgaaaagaa

SEQ ID NO: 521607 - DNA, 19 bp, Mus musculus
  siRNA target sequence for Diap2 (NM_017398.1,2106-2124).
gattgagcctaaagaatta

SEQ ID NO: 521608 - DNA, 19 bp, Mus musculus
  siRNA target sequence for Diap2 (NM_017398.1,2133-2151).
ctgtgtttggctaaaactt

SEQ ID NO: 521609 - DNA, 19 bp, Mus musculus
  siRNA target sequence for Diap2 (NM_017398.1,2239-2257).
gctgcagaagaaaatagga

SEQ ID NO: 521610 - DNA, 19 bp, Mus musculus
  siRNA target sequence for Diap2 (NM_017398.1,2303-2321).
ccaaaacagcccagaatct

SEQ ID NO: 521611 - DNA, 19 bp, Mus musculus
  siRNA target sequence for Diap2 (NM_017398.1,2304-2322).
caaaacagcccagaatcta

SEQ ID NO: 521612 - DNA, 19 bp, Mus musculus
  siRNA target sequence for Diap2 (NM_017398.1,2324-2342).
ctatcttccttggatctta

SEQ ID NO: 521613 - DNA, 19 bp, Mus musculus
  siRNA target sequence for Diap2 (NM_017398.1,2345-2363).
gcatgccatacgaggaaat

SEQ ID NO: 521614 - DNA, 19 bp, Mus musculus
  siRNA target sequence for Diap2 (NM_017398.1,2346-2364).
catgccatacgaggaaata

SEQ ID NO: 521615 - DNA, 19 bp, Mus musculus
  siRNA target sequence for Diap2 (NM_017398.1,2350-2368).
ccatacgaggaaataaaga

SEQ ID NO: 521616 - DNA, 19 bp, Mus musculus
  siRNA target sequence for Diap2 (NM_017398.1,2370-2388).
cattattttggaggttaat

SEQ ID NO: 521617 - DNA, 19 bp, Mus musculus
  siRNA target sequence for Diap2 (NM_017398.1,2406-2424).
ggccctaatccagaatctt

SEQ ID NO: 521618 - DNA, 19 bp, Mus musculus
  siRNA target sequence for Diap2 (NM_017398.1,2408-2426).
ccctaatccagaatcttgt

SEQ ID NO: 521619 - DNA, 19 bp, Mus musculus
  siRNA target sequence for Diap2 (NM_017398.1,2410-2428).
ctaatccagaatcttgtaa

SEQ ID NO: 521620 - DNA, 19 bp, Mus musculus
  siRNA target sequence for Diap2 (NM_017398.1,2464-2482).
gcccagcttaagagtgaat

SEQ ID NO: 521621 - DNA, 19 bp, Mus musculus
  siRNA target sequence for Diap2 (NM_017398.1,2465-2483).
cccagcttaagagtgaata

SEQ ID NO: 521622 - DNA, 19 bp, Mus musculus
  siRNA target sequence for Diap2 (NM_017398.1,2548-2566).
cgtctcacgagcatccttt

SEQ ID NO: 521623 - DNA, 19 bp, Mus musculus
  siRNA target sequence for Diap2 (NM_017398.1,2549-2567).
gtctcacgagcatcctttt

SEQ ID NO: 521624 - DNA, 19 bp, Mus musculus
  siRNA target sequence for Diap2 (NM_017398.1,2555-2573).
cgagcatccttttcaaact

SEQ ID NO: 521625 - DNA, 19 bp, Mus musculus
  siRNA target sequence for Diap2 (NM_017398.1,2683-2701).
cttctggttggaaactaca

SEQ ID NO: 521626 - DNA, 19 bp, Mus musculus
  siRNA target sequence for Diap2 (NM_017398.1,2722-2740).
gcccagtctctaggtttta

SEQ ID NO: 521627 - DNA, 19 bp, Mus musculus
  siRNA target sequence for Diap2 (NM_017398.1,2723-2741).
cccagtctctaggttttaa

SEQ ID NO: 521628 - DNA, 19 bp, Mus musculus
  siRNA target sequence for Diap2 (NM_017398.1,2885-2903).
gcaaagtttcagctcaaat

SEQ ID NO: 521629 - DNA, 19 bp, Mus musculus
  siRNA target sequence for Diap2 (NM_017398.1,2913-2931).
caaccttgtagcaatggaa

SEQ ID NO: 521630 - DNA, 19 bp, Mus musculus
  siRNA target sequence for Diap2 (NM_017398.1,2928-2946).
ggaacaaagcattcttcat

SEQ ID NO: 521631 - DNA, 19 bp, Mus musculus
  siRNA target sequence for Diap2 (NM_017398.1,2980-2998).
gaatcgcaccatgataagt

SEQ ID NO: 521632 - DNA, 19 bp, Mus musculus
  siRNA target sequence for Diap2 (NM_017398.1,2984-3002).
cgcaccatgataagtttgt

SEQ ID NO: 521633 - DNA, 19 bp, Mus musculus
  siRNA target sequence for Diap2 (NM_017398.1,3056-3074).
ccaccatgcacagcaatat

SEQ ID NO: 521634 - DNA, 19 bp, Mus musculus
  siRNA target sequence for Diap2 (NM_017398.1,3330-3348).
gggagtgatggataatctt

SEQ ID NO: 521635 - DNA, 19 bp, Mus musculus
  siRNA target sequence for Diap2 (NM_017398.1,3384-3402).
ccgcagaaagcgaattcca

SEQ ID NO: 521636 - DNA, 19 bp, Mus musculus
  siRNA target sequence for Diap2 (NM_017398.1,3385-3403).
cgcagaaagcgaattccaa

SEQ ID NO: 521637 - DNA, 19 bp, Mus musculus
  siRNA target sequence for Diap2 (NM_017398.1,3420-3438).
ccactgtagcttacatagt

SEQ ID NO: 521638 - DNA, 19 bp, Mus musculus
  siRNA target sequence for Diap2 (NM_017398.1,3442-3460).
gtgatatgtgaatattcta

SEQ ID NO: 521639 - DNA, 19 bp, Mus musculus
  siRNA target sequence for Diap2 (NM_017398.1,3464-3482).
caaatccctcttccataaa

SEQ ID NO: 521640 - DNA, 19 bp, Mus musculus
  siRNA target sequence for Dmd (NM_007868.1,815-833).
gccttcaacattgcaaaat

SEQ ID NO: 521641 - DNA, 19 bp, Mus musculus
  siRNA target sequence for Dmd (NM_007868.1,834-852).
gccagttaggcatagaaaa

SEQ ID NO: 521642 - DNA, 19 bp, Mus musculus
  siRNA target sequence for Dmd (NM_007868.1,835-853).
ccagttaggcatagaaaaa

SEQ ID NO: 521643 - DNA, 19 bp, Mus musculus
  siRNA target sequence for Dmd (NM_007868.1,879-897).
ccacttatccagacaagaa

SEQ ID NO: 521644 - DNA, 19 bp, Mus musculus
  siRNA target sequence for Dmd (NM_007868.1,890-908).
gacaagaagtccatcttaa

SEQ ID NO: 521645 - DNA, 19 bp, Mus musculus
  siRNA target sequence for Dmd (NM_007868.1,910-928).
gtacatcacatcactcttt

SEQ ID NO: 521646 - DNA, 19 bp, Mus musculus
  siRNA target sequence for Dmd (NM_007868.1,913-931).
catcacatcactctttcaa

SEQ ID NO: 521647 - DNA, 19 bp, Mus musculus
  siRNA target sequence for Dmd (NM_007868.1,949-967).
gagcattgaagccattcaa

SEQ ID NO: 521648 - DNA, 19 bp, Mus musculus
  siRNA target sequence for Dmd (NM_007868.1,988-1006).
gacatcttcaaaagtaact

SEQ ID NO: 521649 - DNA, 19 bp, Mus musculus
  siRNA target sequence for Dmd (NM_007868.1,1028-1046).
catcaccagatgcattact

SEQ ID NO: 521650 - DNA, 19 bp, Mus musculus
  siRNA target sequence for Dmd (NM_007868.1,1070-1088).
gcacagggctatgaacaaa

SEQ ID NO: 521651 - DNA, 19 bp, Mus musculus
  siRNA target sequence for Dmd (NM_007868.1,1075-1093).
gggctatgaacaaacttct

SEQ ID NO: 521652 - DNA, 19 bp, Mus musculus
  siRNA target sequence for Dmd (NM_007868.1,1076-1094).
ggctatgaacaaacttctt

SEQ ID NO: 521653 - DNA, 19 bp, Mus musculus
  siRNA target sequence for Dmd (NM_007868.1,1078-1096).
ctatgaacaaacttcttca

SEQ ID NO: 521654 - DNA, 19 bp, Mus musculus
  siRNA target sequence for Dmd (NM_007868.1,1098-1116).
ctcctaagcctcgattcaa

SEQ ID NO: 521655 - DNA, 19 bp, Mus musculus
  siRNA target sequence for Dmd (NM_007868.1,1100-1118).
cctaagcctcgattcaaga

SEQ ID NO: 521656 - DNA, 19 bp, Mus musculus
  siRNA target sequence for Dmd (NM_007868.1,1105-1123).
gcctcgattcaagagttat

SEQ ID NO: 521657 - DNA, 19 bp, Mus musculus
  siRNA target sequence for Dmd (NM_007868.1,1212-1230).
cacttgacagttcattgat

SEQ ID NO: 521658 - DNA, 19 bp, Mus musculus
  siRNA target sequence for Dmd (NM_007868.1,1228-1246).
gatggagacggaagtaaat

SEQ ID NO: 521659 - DNA, 19 bp, Mus musculus
  siRNA target sequence for Dmd (NM_007868.1,1238-1256).
gaagtaaatctggatagtt

SEQ ID NO: 521660 - DNA, 19 bp, Mus musculus
  siRNA target sequence for Dmd (NM_007868.1,1254-1272).
gttaccaaactgctttaga

SEQ ID NO: 521661 - DNA, 19 bp, Mus musculus
  siRNA target sequence for Dmd (NM_007868.1,1312-1330).
gcgagcacaaggagagatt

SEQ ID NO: 521662 - DNA, 19 bp, Mus musculus
  siRNA target sequence for Dmd (NM_007868.1,1313-1331).
cgagcacaaggagagattt

SEQ ID NO: 521663 - DNA, 19 bp, Mus musculus
  siRNA target sequence for Dmd (NM_007868.1,1367-1385).
gctcatgagggattcatga

SEQ ID NO: 521664 - DNA, 19 bp, Mus musculus
  siRNA target sequence for Dmd (NM_007868.1,1368-1386).
ctcatgagggattcatgat

SEQ ID NO: 521665 - DNA, 19 bp, Mus musculus
  siRNA target sequence for Dmd (NM_007868.1,1384-1402).
gatggatctgacatctcat

SEQ ID NO: 521666 - DNA, 19 bp, Mus musculus
  siRNA target sequence for Dmd (NM_007868.1,1387-1405).
ggatctgacatctcatcaa

SEQ ID NO: 521667 - DNA, 19 bp, Mus musculus
  siRNA target sequence for Dmd (NM_007868.1,1407-1425).
gacttgttggtaatgttct

SEQ ID NO: 521668 - DNA, 19 bp, Mus musculus
  siRNA target sequence for Dmd (NM_007868.1,1429-1447).
gttaggaagtcaactagtt

SEQ ID NO: 521669 - DNA, 19 bp, Mus musculus
  siRNA target sequence for Dmd (NM_007868.1,1498-1516).
gaatctcctaaattcaaga

SEQ ID NO: 521670 - DNA, 19 bp, Mus musculus
  siRNA target sequence for Dmd (NM_007868.1,1530-1548).
gggtagctagcatggaaaa

SEQ ID NO: 521671 - DNA, 19 bp, Mus musculus
  siRNA target sequence for Dmd (NM_007868.1,1601-1619).
gaactagatgactggttaa

SEQ ID NO: 521672 - DNA, 19 bp, Mus musculus
  siRNA target sequence for Dmd (NM_007868.1,1808-1826).
gctttggaagaacaactta

SEQ ID NO: 521673 - DNA, 19 bp, Mus musculus
  siRNA target sequence for Dmd (NM_007868.1,1809-1827).
ctttggaagaacaacttaa

SEQ ID NO: 521674 - DNA, 19 bp, Mus musculus
  siRNA target sequence for Dmd (NM_007868.1,1838-1856).
gatcgatgggcaaatatct

SEQ ID NO: 521675 - DNA, 19 bp, Mus musculus
  siRNA target sequence for Dmd (NM_007868.1,1868-1886).
gaagaccgctggattgttt

SEQ ID NO: 521676 - DNA, 19 bp, Mus musculus
  siRNA target sequence for Dmd (NM_007868.1,1878-1896).
ggattgttttacaagatat

SEQ ID NO: 521677 - DNA, 19 bp, Mus musculus
  siRNA target sequence for Dmd (NM_007868.1,1948-1966).
gctttcagaaaaagaagat

SEQ ID NO: 521678 - DNA, 19 bp, Mus musculus
  siRNA target sequence for Dmd (NM_007868.1,2091-2109).
cactcaatcaagatctact

SEQ ID NO: 521679 - DNA, 19 bp, Mus musculus
  siRNA target sequence for Dmd (NM_007868.1,2105-2123).
ctactttcggcactgaaaa

SEQ ID NO: 521680 - DNA, 19 bp, Mus musculus
  siRNA target sequence for Dmd (NM_007868.1,2147-2165).
gaaatctggatggaaaact

SEQ ID NO: 521681 - DNA, 19 bp, Mus musculus
  siRNA target sequence for Dmd (NM_007868.1,2168-2186).
gcacaacgttgggacaatt

SEQ ID NO: 521682 - DNA, 19 bp, Mus musculus
  siRNA target sequence for Dmd (NM_007868.1,2169-2187).
cacaacgttgggacaattt

SEQ ID NO: 521683 - DNA, 19 bp, Mus musculus
  siRNA target sequence for Dmd (NM_007868.1,2182-2200).
caatttaacccaaaaactt

SEQ ID NO: 521684 - DNA, 19 bp, Mus musculus
  siRNA target sequence for Dmd (NM_007868.1,2206-2224).
gagttcagcacaaatttca

SEQ ID NO: 521685 - DNA, 19 bp, Mus musculus
  siRNA target sequence for Dmd (NM_007868.1,2251-2269).
cctaacacagacaactgta

SEQ ID NO: 521686 - DNA, 19 bp, Mus musculus
  siRNA target sequence for Dmd (NM_007868.1,2298-2316).
gggaacaaatcatggtaaa

SEQ ID NO: 521687 - DNA, 19 bp, Mus musculus
  siRNA target sequence for Dmd (NM_007868.1,2299-2317).
ggaacaaatcatggtaaaa

SEQ ID NO: 521688 - DNA, 19 bp, Mus musculus
  siRNA target sequence for Dmd (NM_007868.1,2395-2413).
gttggatgtcgatataact

SEQ ID NO: 521689 - DNA, 19 bp, Mus musculus
  siRNA target sequence for Dmd (NM_007868.1,2398-2416).
ggatgtcgatataactgaa

SEQ ID NO: 521690 - DNA, 19 bp, Mus musculus
  siRNA target sequence for Dmd (NM_007868.1,2433-2451).
ctcgttcagaagctgtatt

SEQ ID NO: 521691 - DNA, 19 bp, Mus musculus
  siRNA target sequence for Dmd (NM_007868.1,2462-2480).
gaatttgcagtctatcgaa

SEQ ID NO: 521692 - DNA, 19 bp, Mus musculus
  siRNA target sequence for Dmd (NM_007868.1,2477-2495).
cgaaaagaaggcaacatct

SEQ ID NO: 521693 - DNA, 19 bp, Mus musculus
  siRNA target sequence for Dmd (NM_007868.1,2610-2628).
gtgttaatgctgaaagtat

SEQ ID NO: 521694 - DNA, 19 bp, Mus musculus
  siRNA target sequence for Dmd (NM_007868.1,2612-2630).
gttaatgctgaaagtatca

SEQ ID NO: 521695 - DNA, 19 bp, Mus musculus
  siRNA target sequence for Dmd (NM_007868.1,2691-2709).
gagttaactggctagagta

SEQ ID NO: 521696 - DNA, 19 bp, Mus musculus
  siRNA target sequence for Dmd (NM_007868.1,2705-2723).
gagtatcaaaccaacatca

SEQ ID NO: 521697 - DNA, 19 bp, Mus musculus
  siRNA target sequence for Dmd (NM_007868.1,2707-2725).
gtatcaaaccaacatcatt

SEQ ID NO: 521698 - DNA, 19 bp, Mus musculus
  siRNA target sequence for Dmd (NM_007868.1,2763-2781).
caactactgccgaaaactt

SEQ ID NO: 521699 - DNA, 19 bp, Mus musculus
  siRNA target sequence for Dmd (NM_007868.1,2766-2784).
ctactgccgaaaacttgtt

SEQ ID NO: 521700 - DNA, 19 bp, Mus musculus
  siRNA target sequence for Dmd (NM_007868.1,2771-2789).
gccgaaaacttgttgaaaa

SEQ ID NO: 521701 - DNA, 19 bp, Mus musculus
  siRNA target sequence for Dmd (NM_007868.1,2810-2828).
gagccaacagcaattaaaa

SEQ ID NO: 521702 - DNA, 19 bp, Mus musculus
  siRNA target sequence for Dmd (NM_007868.1,2819-2837).
gcaattaaaagccagttaa

SEQ ID NO: 521703 - DNA, 19 bp, Mus musculus
  siRNA target sequence for Dmd (NM_007868.1,2829-2847).
gccagttaaaaatttgtaa

SEQ ID NO: 521704 - DNA, 19 bp, Mus musculus
  siRNA target sequence for Dmd (NM_007868.1,2833-2851).
gttaaaaatttgtaaggat

SEQ ID NO: 521705 - DNA, 19 bp, Mus musculus
  siRNA target sequence for Dmd (NM_007868.1,2849-2867).
gatgaagtcaacagattgt

SEQ ID NO: 521706 - DNA, 19 bp, Mus musculus
  siRNA target sequence for Dmd (NM_007868.1,2880-2898).
ctcaaattgagcaattaaa

SEQ ID NO: 521707 - DNA, 19 bp, Mus musculus
  siRNA target sequence for Dmd (NM_007868.1,2905-2923).
gagtctacaactgaaagaa

SEQ ID NO: 521708 - DNA, 19 bp, Mus musculus
  siRNA target sequence for Dmd (NM_007868.1,2926-2944).
gggacaggggccaatgttt

SEQ ID NO: 521709 - DNA, 19 bp, Mus musculus
  siRNA target sequence for Dmd (NM_007868.1,2941-2959).
gtttctggatgcagacttt

SEQ ID NO: 521710 - DNA, 19 bp, Mus musculus
  siRNA target sequence for Dmd (NM_007868.1,3020-3038).
ctacagacaatttttgaca

SEQ ID NO: 521711 - DNA, 19 bp, Mus musculus
  siRNA target sequence for Dmd (NM_007868.1,3053-3071).
cgctatcaggagacaatga

SEQ ID NO: 521712 - DNA, 19 bp, Mus musculus
  siRNA target sequence for Dmd (NM_007868.1,3105-3123).
gcaaactctctgtacctta

SEQ ID NO: 521713 - DNA, 19 bp, Mus musculus
  siRNA target sequence for Dmd (NM_007868.1,3112-3130).
ctctgtaccttatcttagt

SEQ ID NO: 521714 - DNA, 19 bp, Mus musculus
  siRNA target sequence for Dmd (NM_007868.1,3114-3132).
ctgtaccttatcttagtgt

SEQ ID NO: 521715 - DNA, 19 bp, Mus musculus
  siRNA target sequence for Dmd (NM_007868.1,3342-3360).
gctgccaaaagctagaaga

SEQ ID NO: 521716 - DNA, 19 bp, Mus musculus
  siRNA target sequence for Dmd (NM_007868.1,3509-3527).
gttggtgatattcaaacaa

SEQ ID NO: 521717 - DNA, 19 bp, Mus musculus
  siRNA target sequence for Dmd (NM_007868.1,3525-3543).
caattcagcccagtttaaa

SEQ ID NO: 521718 - DNA, 19 bp, Mus musculus
  siRNA target sequence for Dmd (NM_007868.1,3532-3550).
gcccagtttaaatagtgtt

SEQ ID NO: 521719 - DNA, 19 bp, Mus musculus
  siRNA target sequence for Dmd (NM_007868.1,3533-3551).
cccagtttaaatagtgtta

SEQ ID NO: 521720 - DNA, 19 bp, Mus musculus
  siRNA target sequence for Dmd (NM_007868.1,3534-3552).
ccagtttaaatagtgttaa

SEQ ID NO: 521721 - DNA, 19 bp, Mus musculus
  siRNA target sequence for Dmd (NM_007868.1,3612-3630).
cagaacttagagagcttaa

SEQ ID NO: 521722 - DNA, 19 bp, Mus musculus
  siRNA target sequence for Dmd (NM_007868.1,3614-3632).
gaacttagagagcttaaca

SEQ ID NO: 521723 - DNA, 19 bp, Mus musculus
  siRNA target sequence for Dmd (NM_007868.1,3631-3649).
cactcagtgggatcacata

SEQ ID NO: 521724 - DNA, 19 bp, Mus musculus
  siRNA target sequence for Dmd (NM_007868.1,3703-3721).
cgtaagcctccaaaaagat

SEQ ID NO: 521725 - DNA, 19 bp, Mus musculus
  siRNA target sequence for Dmd (NM_007868.1,3709-3727).
cctccaaaaagatctatca

SEQ ID NO: 521726 - DNA, 19 bp, Mus musculus
  siRNA target sequence for Dmd (NM_007868.1,3883-3901).
gactgtaaatagtgtaata

SEQ ID NO: 521727 - DNA, 19 bp, Mus musculus
  siRNA target sequence for Dmd (NM_007868.1,3953-3971).
ctgaccaccaactaccaat

SEQ ID NO: 521728 - DNA, 19 bp, Mus musculus
  siRNA target sequence for Dmd (NM_007868.1,4020-4038).
gggcatgttggcatgagtt

SEQ ID NO: 521729 - DNA, 19 bp, Mus musculus
  siRNA target sequence for Dmd (NM_007868.1,4021-4039).
ggcatgttggcatgagtta

SEQ ID NO: 521730 - DNA, 19 bp, Mus musculus
  siRNA target sequence for Dmd (NM_007868.1,4022-4040).
gcatgttggcatgagttat

SEQ ID NO: 521731 - DNA, 19 bp, Mus musculus
  siRNA target sequence for Dmd (NM_007868.1,4030-4048).
gcatgagttattgtcatat

SEQ ID NO: 521732 - DNA, 19 bp, Mus musculus
  siRNA target sequence for Dmd (NM_007868.1,4031-4049).
catgagttattgtcatatt

SEQ ID NO: 521733 - DNA, 19 bp, Mus musculus
  siRNA target sequence for Dmd (NM_007868.1,4063-4081).
caagtggctcaatgaagta

SEQ ID NO: 521734 - DNA, 19 bp, Mus musculus
  siRNA target sequence for Dmd (NM_007868.1,4185-4203).
caaatcagattcgtctatt

SEQ ID NO: 521735 - DNA, 19 bp, Mus musculus
  siRNA target sequence for Dmd (NM_007868.1,4199-4217).
ctattggcacagactctta

SEQ ID NO: 521736 - DNA, 19 bp, Mus musculus
  siRNA target sequence for Dmd (NM_007868.1,4252-4270).
ggagcttgagacgtttaat

SEQ ID NO: 521737 - DNA, 19 bp, Mus musculus
  siRNA target sequence for Dmd (NM_007868.1,4253-4271).
gagcttgagacgtttaatt

SEQ ID NO: 521738 - DNA, 19 bp, Mus musculus
  siRNA target sequence for Dmd (NM_007868.1,4255-4273).
gcttgagacgtttaattct

SEQ ID NO: 521739 - DNA, 19 bp, Mus musculus
  siRNA target sequence for Dmd (NM_007868.1,4272-4290).
ctcgttggagggaactaca

SEQ ID NO: 521740 - DNA, 19 bp, Mus musculus
  siRNA target sequence for Dmd (NM_007868.1,4275-4293).
gttggagggaactacatga

SEQ ID NO: 521741 - DNA, 19 bp, Mus musculus
  siRNA target sequence for Dmd (NM_007868.1,4352-4370).
gaaaagtccttgcacttaa

SEQ ID NO: 521742 - DNA, 19 bp, Mus musculus
  siRNA target sequence for Dmd (NM_007868.1,4373-4391).
caggagtcgcttgaattca

SEQ ID NO: 521743 - DNA, 19 bp, Mus musculus
  siRNA target sequence for Dmd (NM_007868.1,4375-4393).
ggagtcgcttgaattcatt

SEQ ID NO: 521744 - DNA, 19 bp, Mus musculus
  siRNA target sequence for Dmd (NM_007868.1,4380-4398).
cgcttgaattcattgacaa

SEQ ID NO: 521745 - DNA, 19 bp, Mus musculus
  siRNA target sequence for Dmd (NM_007868.1,4451-4469).
gaagcccagaaaatccaat

SEQ ID NO: 521746 - DNA, 19 bp, Mus musculus
  siRNA target sequence for Dmd (NM_007868.1,4477-4495).
gacaagtcatgagataagt

SEQ ID NO: 521747 - DNA, 19 bp, Mus musculus
  siRNA target sequence for Dmd (NM_007868.1,4479-4497).
caagtcatgagataagttt

SEQ ID NO: 521748 - DNA, 19 bp, Mus musculus
  siRNA target sequence for Dmd (NM_007868.1,4537-4555).
ccaaagggttctttcacaa

SEQ ID NO: 521749 - DNA, 19 bp, Mus musculus
  siRNA target sequence for Dmd (NM_007868.1,4588-4606).
ctccatgaaatttcgatta

SEQ ID NO: 521750 - DNA, 19 bp, Mus musculus
  siRNA target sequence for Dmd (NM_007868.1,4590-4608).
ccatgaaatttcgattatt

SEQ ID NO: 521751 - DNA, 19 bp, Mus musculus
  siRNA target sequence for Dmd (NM_007868.1,4594-4612).
gaaatttcgattattccaa

SEQ ID NO: 521752 - DNA, 19 bp, Mus musculus
  siRNA target sequence for Dmd (NM_007868.1,4609-4627).
ccaaaaaccagccaatttt

SEQ ID NO: 521753 - DNA, 19 bp, Mus musculus
  siRNA target sequence for Dmd (NM_007868.1,4631-4649).
caacgtctagaggaaagta

SEQ ID NO: 521754 - DNA, 19 bp, Mus musculus
  siRNA target sequence for Dmd (NM_007868.1,4634-4652).
cgtctagaggaaagtaaga

SEQ ID NO: 521755 - DNA, 19 bp, Mus musculus
  siRNA target sequence for Dmd (NM_007868.1,4635-4653).
gtctagaggaaagtaagat

SEQ ID NO: 521756 - DNA, 19 bp, Mus musculus
  siRNA target sequence for Dmd (NM_007868.1,4676-4694).
catttgcctgcattggaaa

SEQ ID NO: 521757 - DNA, 19 bp, Mus musculus
  siRNA target sequence for Dmd (NM_007868.1,4715-4733).
gtaattcagtcacaactaa

SEQ ID NO: 521758 - DNA, 19 bp, Mus musculus
  siRNA target sequence for Dmd (NM_007868.1,4721-4739).
cagtcacaactaagtcatt

SEQ ID NO: 521759 - DNA, 19 bp, Mus musculus
  siRNA target sequence for Dmd (NM_007868.1,4723-4741).
gtcacaactaagtcattgt

SEQ ID NO: 521760 - DNA, 19 bp, Mus musculus
  siRNA target sequence for Dmd (NM_007868.1,4725-4743).
cacaactaagtcattgtgt

SEQ ID NO: 521761 - DNA, 19 bp, Mus musculus
  siRNA target sequence for Dmd (NM_007868.1,4803-4821).
gacgtcaaattgtacagaa

SEQ ID NO: 521762 - DNA, 19 bp, Mus musculus
  siRNA target sequence for Dmd (NM_007868.1,4805-4823).
cgtcaaattgtacagaaaa

SEQ ID NO: 521763 - DNA, 19 bp, Mus musculus
  siRNA target sequence for Dmd (NM_007868.1,4806-4824).
gtcaaattgtacagaaaaa

SEQ ID NO: 521764 - DNA, 19 bp, Mus musculus
  siRNA target sequence for Dmd (NM_007868.1,4846-4864).
gcttgatgaacgagtaaca

SEQ ID NO: 521765 - DNA, 19 bp, Mus musculus
  siRNA target sequence for Dmd (NM_007868.1,4856-4874).
cgagtaacagctttgaaat

SEQ ID NO: 521766 - DNA, 19 bp, Mus musculus
  siRNA target sequence for Dmd (NM_007868.1,4866-4884).
ctttgaaattgcattacaa

SEQ ID NO: 521767 - DNA, 19 bp, Mus musculus
  siRNA target sequence for Dmd (NM_007868.1,4886-4904).
gagttgggtgcgaaggtaa

SEQ ID NO: 521768 - DNA, 19 bp, Mus musculus
  siRNA target sequence for Dmd (NM_007868.1,4925-4943).
gagaaatgcttgaagttgt

SEQ ID NO: 521769 - DNA, 19 bp, Mus musculus
  siRNA target sequence for Dmd (NM_007868.1,4945-4963).
ccgtaagatgagaaaggaa

SEQ ID NO: 521770 - DNA, 19 bp, Mus musculus
  siRNA target sequence for Dmd (NM_007868.1,4946-4964).
cgtaagatgagaaaggaaa

SEQ ID NO: 521771 - DNA, 19 bp, Mus musculus
  siRNA target sequence for Dmd (NM_007868.1,5016-5034).
gatcagcagttgaaggaat

SEQ ID NO: 521772 - DNA, 19 bp, Mus musculus
  siRNA target sequence for Dmd (NM_007868.1,5031-5049).
gaatgccaagtaatttgga

SEQ ID NO: 521773 - DNA, 19 bp, Mus musculus
  siRNA target sequence for Dmd (NM_007868.1,5062-5080).
ctggggaaaggctactcaa

SEQ ID NO: 521774 - DNA, 19 bp, Mus musculus
  siRNA target sequence for Dmd (NM_007868.1,5067-5085).
gaaaggctactcaaaaaga

SEQ ID NO: 521775 - DNA, 19 bp, Mus musculus
  siRNA target sequence for Dmd (NM_007868.1,5071-5089).
ggctactcaaaaagagatt

SEQ ID NO: 521776 - DNA, 19 bp, Mus musculus
  siRNA target sequence for Dmd (NM_007868.1,5076-5094).
ctcaaaaagagattgagaa

SEQ ID NO: 521777 - DNA, 19 bp, Mus musculus
  siRNA target sequence for Dmd (NM_007868.1,5113-5131).
gagtgttacagaattagga

SEQ ID NO: 521778 - DNA, 19 bp, Mus musculus
  siRNA target sequence for Dmd (NM_007868.1,5121-5139).
cagaattaggagagtcttt

SEQ ID NO: 521779 - DNA, 19 bp, Mus musculus
  siRNA target sequence for Dmd (NM_007868.1,5123-5141).
gaattaggagagtctttga

SEQ ID NO: 521780 - DNA, 19 bp, Mus musculus
  siRNA target sequence for Dmd (NM_007868.1,5215-5233).
cacctccagagtagaagaa

SEQ ID NO: 521781 - DNA, 19 bp, Mus musculus
  siRNA target sequence for Dmd (NM_007868.1,5274-5292).
cctttgatcagaacataga

SEQ ID NO: 521782 - DNA, 19 bp, Mus musculus
  siRNA target sequence for Dmd (NM_007868.1,5275-5293).
ctttgatcagaacatagaa

SEQ ID NO: 521783 - DNA, 19 bp, Mus musculus
  siRNA target sequence for Dmd (NM_007868.1,5279-5297).
gatcagaacatagaacaaa

SEQ ID NO: 521784 - DNA, 19 bp, Mus musculus
  siRNA target sequence for Dmd (NM_007868.1,5299-5317).
cacaaagtggatcattcat

SEQ ID NO: 521785 - DNA, 19 bp, Mus musculus
  siRNA target sequence for Dmd (NM_007868.1,5381-5399).
cgtttaaaggctgaaatga

SEQ ID NO: 521786 - DNA, 19 bp, Mus musculus
  siRNA target sequence for Dmd (NM_007868.1,5382-5400).
gtttaaaggctgaaatgaa

SEQ ID NO: 521787 - DNA, 19 bp, Mus musculus
  siRNA target sequence for Dmd (NM_007868.1,5503-5521).
gctcaaccgtcgatttgca

SEQ ID NO: 521788 - DNA, 19 bp, Mus musculus
  siRNA target sequence for Dmd (NM_007868.1,5509-5527).
ccgtcgatttgcagctatt

SEQ ID NO: 521789 - DNA, 19 bp, Mus musculus
  siRNA target sequence for Dmd (NM_007868.1,5510-5528).
cgtcgatttgcagctattt

SEQ ID NO: 521790 - DNA, 19 bp, Mus musculus
  siRNA target sequence for Dmd (NM_007868.1,5514-5532).
gatttgcagctatttctca

SEQ ID NO: 521791 - DNA, 19 bp, Mus musculus
  siRNA target sequence for Dmd (NM_007868.1,5576-5594).
gagcagtttaactcagata

SEQ ID NO: 521792 - DNA, 19 bp, Mus musculus
  siRNA target sequence for Dmd (NM_007868.1,5681-5699).
gacaatgagggtactgtaa

SEQ ID NO: 521793 - DNA, 19 bp, Mus musculus
  siRNA target sequence for Dmd (NM_007868.1,5690-5708).
ggtactgtaaatgaattgt

SEQ ID NO: 521794 - DNA, 19 bp, Mus musculus
  siRNA target sequence for Dmd (NM_007868.1,5691-5709).
gtactgtaaatgaattgtt

SEQ ID NO: 521795 - DNA, 19 bp, Mus musculus
  siRNA target sequence for Dmd (NM_007868.1,5710-5728).
gcaaagaggagacaactta

SEQ ID NO: 521796 - DNA, 19 bp, Mus musculus
  siRNA target sequence for Dmd (NM_007868.1,5725-5743).
cttacaacaaagaatcaca

SEQ ID NO: 521797 - DNA, 19 bp, Mus musculus
  siRNA target sequence for Dmd (NM_007868.1,5755-5773).
gcgagaggaaataaagata

SEQ ID NO: 521798 - DNA, 19 bp, Mus musculus
  siRNA target sequence for Dmd (NM_007868.1,5812-5830).
ggatttgaggtctcaaaga

SEQ ID NO: 521799 - DNA, 19 bp, Mus musculus
  siRNA target sequence for Dmd (NM_007868.1,5813-5831).
gatttgaggtctcaaagaa

SEQ ID NO: 521800 - DNA, 19 bp, Mus musculus
  siRNA target sequence for Dmd (NM_007868.1,5832-5850).
gaaaaaaggccctagaaat

SEQ ID NO: 521801 - DNA, 19 bp, Mus musculus
  siRNA target sequence for Dmd (NM_007868.1,5853-5871).
ctcaccagtggtatcagta

SEQ ID NO: 521802 - DNA, 19 bp, Mus musculus
  siRNA target sequence for Dmd (NM_007868.1,5858-5876).
cagtggtatcagtacaaga

SEQ ID NO: 521803 - DNA, 19 bp, Mus musculus
  siRNA target sequence for Dmd (NM_007868.1,5975-5993).
cgtgaattgcagaagaaga

SEQ ID NO: 521804 - DNA, 19 bp, Mus musculus
  siRNA target sequence for Dmd (NM_007868.1,6085-6103).
caagcgctggcggcaaatt

SEQ ID NO: 521805 - DNA, 19 bp, Mus musculus
  siRNA target sequence for Dmd (NM_007868.1,6089-6107).
cgctggcggcaaattgaga

SEQ ID NO: 521806 - DNA, 19 bp, Mus musculus
  siRNA target sequence for Dmd (NM_007868.1,6095-6113).
cggcaaattgagagcaatt

SEQ ID NO: 521807 - DNA, 19 bp, Mus musculus
  siRNA target sequence for Dmd (NM_007868.1,6096-6114).
ggcaaattgagagcaattt

SEQ ID NO: 521808 - DNA, 19 bp, Mus musculus
  siRNA target sequence for Dmd (NM_007868.1,6097-6115).
gcaaattgagagcaatttt

SEQ ID NO: 521809 - DNA, 19 bp, Mus musculus
  siRNA target sequence for Dmd (NM_007868.1,6121-6139).
gtttcgaagactcaacttt

SEQ ID NO: 521810 - DNA, 19 bp, Mus musculus
  siRNA target sequence for Dmd (NM_007868.1,6151-6169).
cactctccatgaagaaact

SEQ ID NO: 521811 - DNA, 19 bp, Mus musculus
  siRNA target sequence for Dmd (NM_007868.1,6172-6190).
ggtagtgacgactgaagat

SEQ ID NO: 521812 - DNA, 19 bp, Mus musculus
  siRNA target sequence for Dmd (NM_007868.1,6173-6191).
gtagtgacgactgaagata

SEQ ID NO: 521813 - DNA, 19 bp, Mus musculus
  siRNA target sequence for Dmd (NM_007868.1,6263-6281).
gaagttgatcatcttctaa

SEQ ID NO: 521814 - DNA, 19 bp, Mus musculus
  siRNA target sequence for Dmd (NM_007868.1,6266-6284).
gttgatcatcttctaaata

SEQ ID NO: 521815 - DNA, 19 bp, Mus musculus
  siRNA target sequence for Dmd (NM_007868.1,6326-6344).
caagaggagtctcttaaga

SEQ ID NO: 521816 - DNA, 19 bp, Mus musculus
  siRNA target sequence for Dmd (NM_007868.1,6329-6347).
gaggagtctcttaagaata

SEQ ID NO: 521817 - DNA, 19 bp, Mus musculus
  siRNA target sequence for Dmd (NM_007868.1,6331-6349).
ggagtctcttaagaatata

SEQ ID NO: 521818 - DNA, 19 bp, Mus musculus
  siRNA target sequence for Dmd (NM_007868.1,6355-6373).
caatttgcaacaaatctca

SEQ ID NO: 521819 - DNA, 19 bp, Mus musculus
  siRNA target sequence for Dmd (NM_007868.1,6370-6388).
ctcaggtcggattgatatt

SEQ ID NO: 521820 - DNA, 19 bp, Mus musculus
  siRNA target sequence for Dmd (NM_007868.1,6372-6390).
caggtcggattgatattat

SEQ ID NO: 521821 - DNA, 19 bp, Mus musculus
  siRNA target sequence for Dmd (NM_007868.1,6375-6393).
gtcggattgatattattca

SEQ ID NO: 521822 - DNA, 19 bp, Mus musculus
  siRNA target sequence for Dmd (NM_007868.1,6420-6438).
gtgccacctccatggaaaa

SEQ ID NO: 521823 - DNA, 19 bp, Mus musculus
  siRNA target sequence for Dmd (NM_007868.1,6476-6494).
cagggggaaaaacttcata

SEQ ID NO: 521824 - DNA, 19 bp, Mus musculus
  siRNA target sequence for Dmd (NM_007868.1,6517-6535).
gcgattcgacagatcagtt

SEQ ID NO: 521825 - DNA, 19 bp, Mus musculus
  siRNA target sequence for Dmd (NM_007868.1,6543-6561).
ggcgacactttcattatga

SEQ ID NO: 521826 - DNA, 19 bp, Mus musculus
  siRNA target sequence for Dmd (NM_007868.1,6544-6562).
gcgacactttcattatgat

SEQ ID NO: 521827 - DNA, 19 bp, Mus musculus
  siRNA target sequence for Dmd (NM_007868.1,6545-6563).
cgacactttcattatgata

SEQ ID NO: 521828 - DNA, 19 bp, Mus musculus
  siRNA target sequence for Dmd (NM_007868.1,6582-6600).
ggctgaatgaagttgaaca

SEQ ID NO: 521829 - DNA, 19 bp, Mus musculus
  siRNA target sequence for Dmd (NM_007868.1,6633-6651).
gggaacatgctaaatacaa

SEQ ID NO: 521830 - DNA, 19 bp, Mus musculus
  siRNA target sequence for Dmd (NM_007868.1,6634-6652).
ggaacatgctaaatacaaa

SEQ ID NO: 521831 - DNA, 19 bp, Mus musculus
  siRNA target sequence for Dmd (NM_007868.1,6649-6667).
caaatggtatcttaaggaa

SEQ ID NO: 521832 - DNA, 19 bp, Mus musculus
  siRNA target sequence for Dmd (NM_007868.1,6860-6878).
gtcttgtcagaatttcaaa

SEQ ID NO: 521833 - DNA, 19 bp, Mus musculus
  siRNA target sequence for Dmd (NM_007868.1,6911-6929).
gaagcagataacattgcta

SEQ ID NO: 521834 - DNA, 19 bp, Mus musculus
  siRNA target sequence for Dmd (NM_007868.1,7003-7021).
cctgcgccagggaattcta

SEQ ID NO: 521835 - DNA, 19 bp, Mus musculus
  siRNA target sequence for Dmd (NM_007868.1,7004-7022).
ctgcgccagggaattctaa

SEQ ID NO: 521836 - DNA, 19 bp, Mus musculus
  siRNA target sequence for Dmd (NM_007868.1,7006-7024).
gcgccagggaattctaaaa

SEQ ID NO: 521837 - DNA, 19 bp, Mus musculus
  siRNA target sequence for Dmd (NM_007868.1,7169-7187).
gaggttcacttaaaagatt

SEQ ID NO: 521838 - DNA, 19 bp, Mus musculus
  siRNA target sequence for Dmd (NM_007868.1,7223-7241).
ctgtggctctctcctatta

SEQ ID NO: 521839 - DNA, 19 bp, Mus musculus
  siRNA target sequence for Dmd (NM_007868.1,7249-7267).
gttggaaatttataaccaa

SEQ ID NO: 521840 - DNA, 19 bp, Mus musculus
  siRNA target sequence for Dmd (NM_007868.1,7277-7295).
gcaggaccgtttgacataa

SEQ ID NO: 521841 - DNA, 19 bp, Mus musculus
  siRNA target sequence for Dmd (NM_007868.1,7278-7296).
caggaccgtttgacataaa

SEQ ID NO: 521842 - DNA, 19 bp, Mus musculus
  siRNA target sequence for Dmd (NM_007868.1,7281-7299).
gaccgtttgacataaagga

SEQ ID NO: 521843 - DNA, 19 bp, Mus musculus
  siRNA target sequence for Dmd (NM_007868.1,7297-7315).
ggagattgaagtaacagtt

SEQ ID NO: 521844 - DNA, 19 bp, Mus musculus
  siRNA target sequence for Dmd (NM_007868.1,7350-7368).
cgaaagggcagcatttgta

SEQ ID NO: 521845 - DNA, 19 bp, Mus musculus
  siRNA target sequence for Dmd (NM_007868.1,7422-7440).
ctgagtgggaggctgtaaa

SEQ ID NO: 521846 - DNA, 19 bp, Mus musculus
  siRNA target sequence for Dmd (NM_007868.1,7426-7444).
gtgggaggctgtaaaccat

SEQ ID NO: 521847 - DNA, 19 bp, Mus musculus
  siRNA target sequence for Dmd (NM_007868.1,7428-7446).
gggaggctgtaaaccattt

SEQ ID NO: 521848 - DNA, 19 bp, Mus musculus
  siRNA target sequence for Dmd (NM_007868.1,7429-7447).
ggaggctgtaaaccattta

SEQ ID NO: 521849 - DNA, 19 bp, Mus musculus
  siRNA target sequence for Dmd (NM_007868.1,7512-7530).
ccagtcagactgttactct

SEQ ID NO: 521850 - DNA, 19 bp, Mus musculus
  siRNA target sequence for Dmd (NM_007868.1,7513-7531).
cagtcagactgttactcta

SEQ ID NO: 521851 - DNA, 19 bp, Mus musculus
  siRNA target sequence for Dmd (NM_007868.1,7523-7541).
gttactctagtgacacaat

SEQ ID NO: 521852 - DNA, 19 bp, Mus musculus
  siRNA target sequence for Dmd (NM_007868.1,7628-7646).
cgagcttggacagaactta

SEQ ID NO: 521853 - DNA, 19 bp, Mus musculus
  siRNA target sequence for Dmd (NM_007868.1,7659-7677).
ctctgcttgatcgagttat

SEQ ID NO: 521854 - DNA, 19 bp, Mus musculus
  siRNA target sequence for Dmd (NM_007868.1,7661-7679).
ctgcttgatcgagttataa

SEQ ID NO: 521855 - DNA, 19 bp, Mus musculus
  siRNA target sequence for Dmd (NM_007868.1,7663-7681).
gcttgatcgagttataaaa

SEQ ID NO: 521856 - DNA, 19 bp, Mus musculus
  siRNA target sequence for Dmd (NM_007868.1,7664-7682).
cttgatcgagttataaaat

SEQ ID NO: 521857 - DNA, 19 bp, Mus musculus
  siRNA target sequence for Dmd (NM_007868.1,7701-7719).
gtgatctggaagacatcaa

SEQ ID NO: 521858 - DNA, 19 bp, Mus musculus
  siRNA target sequence for Dmd (NM_007868.1,7743-7761).
caacactgcaagatttgga

SEQ ID NO: 521859 - DNA, 19 bp, Mus musculus
  siRNA target sequence for Dmd (NM_007868.1,7842-7860).
caatcattactgatcgaat

SEQ ID NO: 521860 - DNA, 19 bp, Mus musculus
  siRNA target sequence for Dmd (NM_007868.1,7857-7875).
gaattgaaagaattcagat

SEQ ID NO: 521861 - DNA, 19 bp, Mus musculus
  siRNA target sequence for Dmd (NM_007868.1,7881-7899).
gggatgaggttcaagaaca

SEQ ID NO: 521862 - DNA, 19 bp, Mus musculus
  siRNA target sequence for Dmd (NM_007868.1,7919-7937).
cagttgaatgaaatgttaa

SEQ ID NO: 521863 - DNA, 19 bp, Mus musculus
  siRNA target sequence for Dmd (NM_007868.1,7947-7965).
cacaatggctggaagctaa

SEQ ID NO: 521864 - DNA, 19 bp, Mus musculus
  siRNA target sequence for Dmd (NM_007868.1,8039-8057).
gatgcaatccaaaagaaga

SEQ ID NO: 521865 - DNA, 19 bp, Mus musculus
  siRNA target sequence for Dmd (NM_007868.1,8089-8107).
ccgtcaacggcagataagt

SEQ ID NO: 521866 - DNA, 19 bp, Mus musculus
  siRNA target sequence for Dmd (NM_007868.1,8108-8126).
gtagacgtggcaaatgatt

SEQ ID NO: 521867 - DNA, 19 bp, Mus musculus
  siRNA target sequence for Dmd (NM_007868.1,8211-8229).
gaaacattcataaaagagt

SEQ ID NO: 521868 - DNA, 19 bp, Mus musculus
  siRNA target sequence for Dmd (NM_007868.1,8445-8463).
cagatatctatcacaatct

SEQ ID NO: 521869 - DNA, 19 bp, Mus musculus
  siRNA target sequence for Dmd (NM_007868.1,8510-8528).
gaagcacccctgttacaaa

SEQ ID NO: 521870 - DNA, 19 bp, Mus musculus
  siRNA target sequence for Dmd (NM_007868.1,8521-8539).
gttacaaagacgtttggat

SEQ ID NO: 521871 - DNA, 19 bp, Mus musculus
  siRNA target sequence for Dmd (NM_007868.1,8529-8547).
gacgtttggataacatgaa

SEQ ID NO: 521872 - DNA, 19 bp, Mus musculus
  siRNA target sequence for Dmd (NM_007868.1,8569-8587).
gaaaaagtctctcaacatt

SEQ ID NO: 521873 - DNA, 19 bp, Mus musculus
  siRNA target sequence for Dmd (NM_007868.1,8614-8632).
ccagtggaagcgtttgcat

SEQ ID NO: 521874 - DNA, 19 bp, Mus musculus
  siRNA target sequence for Dmd (NM_007868.1,8623-8641).
gcgtttgcatctttctctt

SEQ ID NO: 521875 - DNA, 19 bp, Mus musculus
  siRNA target sequence for Dmd (NM_007868.1,8659-8677).
gctacagctgaaagatgat

SEQ ID NO: 521876 - DNA, 19 bp, Mus musculus
  siRNA target sequence for Dmd (NM_007868.1,8694-8712).
cacccatcggtggtgattt

SEQ ID NO: 521877 - DNA, 19 bp, Mus musculus
  siRNA target sequence for Dmd (NM_007868.1,8769-8787).
ctaaagaacctgtaatcat

SEQ ID NO: 521878 - DNA, 19 bp, Mus musculus
  siRNA target sequence for Dmd (NM_007868.1,9110-9128).
ctgcaagatcaccttgaaa

SEQ ID NO: 521879 - DNA, 19 bp, Mus musculus
  siRNA target sequence for Dmd (NM_007868.1,9112-9130).
gcaagatcaccttgaaaaa

SEQ ID NO: 521880 - DNA, 19 bp, Mus musculus
  siRNA target sequence for Dmd (NM_007868.1,9147-9165).
gagaaattgcacctcttaa

SEQ ID NO: 521881 - DNA, 19 bp, Mus musculus
  siRNA target sequence for Dmd (NM_007868.1,9169-9187).
gaatgtcaatcgtgtcaat

SEQ ID NO: 521882 - DNA, 19 bp, Mus musculus
  siRNA target sequence for Dmd (NM_007868.1,9428-9446).
gagacccaaaccacttgtt

SEQ ID NO: 521883 - DNA, 19 bp, Mus musculus
  siRNA target sequence for Dmd (NM_007868.1,9444-9462).
gttgggaccaccccaaaat

SEQ ID NO: 521884 - DNA, 19 bp, Mus musculus
  siRNA target sequence for Dmd (NM_007868.1,9469-9487).
gctctaccagtctttagct

SEQ ID NO: 521885 - DNA, 19 bp, Mus musculus
  siRNA target sequence for Dmd (NM_007868.1,9777-9795).
ggatccgtgtcctgtcttt

SEQ ID NO: 521886 - DNA, 19 bp, Mus musculus
  siRNA target sequence for Dmd (NM_007868.1,9778-9796).
gatccgtgtcctgtctttt

SEQ ID NO: 521887 - DNA, 19 bp, Mus musculus
  siRNA target sequence for Dmd (NM_007868.1,9781-9799).
ccgtgtcctgtcttttaaa

SEQ ID NO: 521888 - DNA, 19 bp, Mus musculus
  siRNA target sequence for Dmd (NM_007868.1,9825-9843).
cacacttggaagacaagta

SEQ ID NO: 521889 - DNA, 19 bp, Mus musculus
  siRNA target sequence for Dmd (NM_007868.1,9836-9854).
gacaagtacagataccttt

SEQ ID NO: 521890 - DNA, 19 bp, Mus musculus
  siRNA target sequence for Dmd (NM_007868.1,9870-9888).
gttcaactggcttttgtga

SEQ ID NO: 521891 - DNA, 19 bp, Mus musculus
  siRNA target sequence for Dmd (NM_007868.1,9892-9910).
gcgtaggctgggtcttctt

SEQ ID NO: 521892 - DNA, 19 bp, Mus musculus
  siRNA target sequence for Dmd (NM_007868.1,9902-9920).
ggtcttcttctgcatgatt

SEQ ID NO: 521893 - DNA, 19 bp, Mus musculus
  siRNA target sequence for Dmd (NM_007868.1,9911-9929).
ctgcatgattctattcaaa

SEQ ID NO: 521894 - DNA, 19 bp, Mus musculus
  siRNA target sequence for Dmd (NM_007868.1,9996-10014).
gcttccaatttgccaataa

SEQ ID NO: 521895 - DNA, 19 bp, Mus musculus
  siRNA target sequence for Dmd (NM_007868.1,9997-10015).
cttccaatttgccaataat

SEQ ID NO: 521896 - DNA, 19 bp, Mus musculus
  siRNA target sequence for Dmd (NM_007868.1,10000-10018).
ccaatttgccaataataaa

SEQ ID NO: 521897 - DNA, 19 bp, Mus musculus
  siRNA target sequence for Dmd (NM_007868.1,10056-10074).
gcctggaaccccagtctat

SEQ ID NO: 521898 - DNA, 19 bp, Mus musculus
  siRNA target sequence for Dmd (NM_007868.1,10127-10145).
caagccaagtgtaacatct

SEQ ID NO: 521899 - DNA, 19 bp, Mus musculus
  siRNA target sequence for Dmd (NM_007868.1,10146-10164).
gtaaggagtgtccaatcat

SEQ ID NO: 521900 - DNA, 19 bp, Mus musculus
  siRNA target sequence for Dmd (NM_007868.1,10151-10169).
gagtgtccaatcattggat

SEQ ID NO: 521901 - DNA, 19 bp, Mus musculus
  siRNA target sequence for Dmd (NM_007868.1,10235-10253).
gttgcaaagggccataaaa

SEQ ID NO: 521902 - DNA, 19 bp, Mus musculus
  siRNA target sequence for Dmd (NM_007868.1,10258-10276).
ctaccccatggtagagtat

SEQ ID NO: 521903 - DNA, 19 bp, Mus musculus
  siRNA target sequence for Dmd (NM_007868.1,10262-10280).
cccatggtagagtattgca

SEQ ID NO: 521904 - DNA, 19 bp, Mus musculus
  siRNA target sequence for Dmd (NM_007868.1,10285-10303).
gactacatccggagaagat

SEQ ID NO: 521905 - DNA, 19 bp, Mus musculus
  siRNA target sequence for Dmd (NM_007868.1,10287-10305).
ctacatccggagaagatgt

SEQ ID NO: 521906 - DNA, 19 bp, Mus musculus
  siRNA target sequence for Dmd (NM_007868.1,10310-10328).
gacttcgccaaggtactaa

SEQ ID NO: 521907 - DNA, 19 bp, Mus musculus
  siRNA target sequence for Dmd (NM_007868.1,10316-10334).
gccaaggtactaaaaaaca

SEQ ID NO: 521908 - DNA, 19 bp, Mus musculus
  siRNA target sequence for Dmd (NM_007868.1,10321-10339).
ggtactaaaaaacaaattt

SEQ ID NO: 521909 - DNA, 19 bp, Mus musculus
  siRNA target sequence for Dmd (NM_007868.1,10325-10343).
ctaaaaaacaaatttcgaa

SEQ ID NO: 521910 - DNA, 19 bp, Mus musculus
  siRNA target sequence for Dmd (NM_007868.1,10386-10404).
cagtgcagactgtgttaga

SEQ ID NO: 521911 - DNA, 19 bp, Mus musculus
  siRNA target sequence for Dmd (NM_007868.1,10425-10443).
ccgttactctgatcaactt

SEQ ID NO: 521912 - DNA, 19 bp, Mus musculus
  siRNA target sequence for Dmd (NM_007868.1,10427-10445).
gttactctgatcaacttct

SEQ ID NO: 521913 - DNA, 19 bp, Mus musculus
  siRNA target sequence for Dmd (NM_007868.1,10438-10456).
caacttctggccagtagat

SEQ ID NO: 521914 - DNA, 19 bp, Mus musculus
  siRNA target sequence for Dmd (NM_007868.1,10441-10459).
cttctggccagtagattct

SEQ ID NO: 521915 - DNA, 19 bp, Mus musculus
  siRNA target sequence for Dmd (NM_007868.1,10480-10498).
gctttcacacgatgatact

SEQ ID NO: 521916 - DNA, 19 bp, Mus musculus
  siRNA target sequence for Dmd (NM_007868.1,10546-10564).
cagcaatggatcttatcta

SEQ ID NO: 521917 - DNA, 19 bp, Mus musculus
  siRNA target sequence for Dmd (NM_007868.1,10549-10567).
caatggatcttatctaaat

SEQ ID NO: 521918 - DNA, 19 bp, Mus musculus
  siRNA target sequence for Dmd (NM_007868.1,10588-10606).
gagcatagatgatgaacat

SEQ ID NO: 521919 - DNA, 19 bp, Mus musculus
  siRNA target sequence for Dmd (NM_007868.1,10590-10608).
gcatagatgatgaacattt

SEQ ID NO: 521920 - DNA, 19 bp, Mus musculus
  siRNA target sequence for Dmd (NM_007868.1,10665-10683).
gtagtcctgcccagatctt

SEQ ID NO: 521921 - DNA, 19 bp, Mus musculus
  siRNA target sequence for Dmd (NM_007868.1,10720-10738).
gagaatcctagcagatctt

SEQ ID NO: 521922 - DNA, 19 bp, Mus musculus
  siRNA target sequence for Dmd (NM_007868.1,10722-10740).
gaatcctagcagatcttga

SEQ ID NO: 521923 - DNA, 19 bp, Mus musculus
  siRNA target sequence for Dmd (NM_007868.1,10753-10771).
gaatctgcaagcagaatat

SEQ ID NO: 521924 - DNA, 19 bp, Mus musculus
  siRNA target sequence for Dmd (NM_007868.1,10873-10891).
cattgctgaggctaagcta

SEQ ID NO: 521925 - DNA, 19 bp, Mus musculus
  siRNA target sequence for Dmd (NM_007868.1,10888-10906).
gctactgcgccaacacaaa

SEQ ID NO: 521926 - DNA, 19 bp, Mus musculus
  siRNA target sequence for Dmd (NM_007868.1,10954-10972).
gctggagtctcagttacat

SEQ ID NO: 521927 - DNA, 19 bp, Mus musculus
  siRNA target sequence for Dmd (NM_007868.1,11087-11105).
cgagtggttggcagtcaaa

SEQ ID NO: 521928 - DNA, 19 bp, Mus musculus
  siRNA target sequence for Dmd (NM_007868.1,11090-11108).
gtggttggcagtcaaactt

SEQ ID NO: 521929 - DNA, 19 bp, Mus musculus
  siRNA target sequence for Dmd (NM_007868.1,11092-11110).
ggttggcagtcaaacttca

SEQ ID NO: 521930 - DNA, 19 bp, Mus musculus
  siRNA target sequence for Dmd (NM_007868.1,11115-11133).
ctatgggtgaggaagatct

SEQ ID NO: 521931 - DNA, 19 bp, Mus musculus
  siRNA target sequence for Dmd (NM_007868.1,11157-11175).
gcacagggttagaagaagt

SEQ ID NO: 521932 - DNA, 19 bp, Mus musculus
  siRNA target sequence for Dmd (NM_007868.1,11194-11212).
ctccttccctagttcaaga

SEQ ID NO: 521933 - DNA, 19 bp, Mus musculus
  siRNA target sequence for Dnase1 (NM_010061.2,51-69).
gctgcagccgtctcagatt

SEQ ID NO: 521934 - DNA, 19 bp, Mus musculus
  siRNA target sequence for Dnase1 (NM_010061.2,119-137).
gcacaagctaggctttagt

SEQ ID NO: 521935 - DNA, 19 bp, Mus musculus
  siRNA target sequence for Dnase1 (NM_010061.2,125-143).
gctaggctttagtctttga

SEQ ID NO: 521936 - DNA, 19 bp, Mus musculus
  siRNA target sequence for Dnase1 (NM_010061.2,126-144).
ctaggctttagtctttgat

SEQ ID NO: 521937 - DNA, 19 bp, Mus musculus
  siRNA target sequence for Dnase1 (NM_010061.2,152-170).
ggagcttcactgcttcttt

SEQ ID NO: 521938 - DNA, 19 bp, Mus musculus
  siRNA target sequence for Dnase1 (NM_010061.2,275-293).
cttcaacattcggactttt

SEQ ID NO: 521939 - DNA, 19 bp, Mus musculus
  siRNA target sequence for Dnase1 (NM_010061.2,315-333).
gctaccctctctgtatact

SEQ ID NO: 521940 - DNA, 19 bp, Mus musculus
  siRNA target sequence for Dnase1 (NM_010061.2,404-422).
gaacctgaggccttaccat

SEQ ID NO: 521941 - DNA, 19 bp, Mus musculus
  siRNA target sequence for Dnase1 (NM_010061.2,700-718).
ctggagtcctagagtataa

SEQ ID NO: 521942 - DNA, 19 bp, Mus musculus
  siRNA target sequence for Dnase1 (NM_010061.2,703-721).
gagtcctagagtataatga

SEQ ID NO: 521943 - DNA, 19 bp, Mus musculus
  siRNA target sequence for Dnase1 (NM_010061.2,711-729).
gagtataatgacaaccatt

SEQ ID NO: 521944 - DNA, 19 bp, Mus musculus
  siRNA target sequence for Dnase1 (NM_010061.2,713-731).
gtataatgacaaccattta

SEQ ID NO: 521945 - DNA, 19 bp, Mus musculus
  siRNA target sequence for Dnase1 (NM_010061.2,788-806).
ctccctctatggtgaaaaa

SEQ ID NO: 521946 - DNA, 19 bp, Mus musculus
  siRNA target sequence for Dnase1 (NM_010061.2,932-950).
caaagcctgagaataaact

SEQ ID NO: 521947 - DNA, 19 bp, Mus musculus
  siRNA target sequence for Dnase1 (NM_010061.2,1005-1023).
gccaggtgaccctctttta

SEQ ID NO: 521948 - DNA, 19 bp, Mus musculus
  siRNA target sequence for Dnase1 (NM_010061.2,1024-1042).
cttgggaggtccttataga

SEQ ID NO: 521949 - DNA, 19 bp, Mus musculus
  siRNA target sequence for Dnase1 (NM_010061.2,1027-1045).
gggaggtccttatagagta

SEQ ID NO: 521950 - DNA, 19 bp, Mus musculus
  siRNA target sequence for Dnase1 (NM_010061.2,1041-1059).
gagtaggggtagcaatgta

SEQ ID NO: 521951 - DNA, 19 bp, Mus musculus
  siRNA target sequence for Dnase1 (NM_010061.2,1043-1061).
gtaggggtagcaatgtata

SEQ ID NO: 521952 - DNA, 19 bp, Mus musculus
  siRNA target sequence for Dnase1 (NM_010061.2,1091-1109).
gggtgggtatccatctact

SEQ ID NO: 521953 - DNA, 19 bp, Mus musculus
  siRNA target sequence for Dnase1 (NM_010061.2,1159-1177).
ggcctgaccaggtgtctat

SEQ ID NO: 521954 - DNA, 19 bp, Mus musculus
  siRNA target sequence for Dnase1 (NM_010061.2,1160-1178).
gcctgaccaggtgtctatt

SEQ ID NO: 521955 - DNA, 19 bp, Mus musculus
  siRNA target sequence for Dnase1 (NM_010061.2,1162-1180).
ctgaccaggtgtctattct

SEQ ID NO: 521956 - DNA, 19 bp, Mus musculus
  siRNA target sequence for Dnase1 (NM_010061.2,1181-1199).
ggacagctatcaatatgat

SEQ ID NO: 521957 - DNA, 19 bp, Mus musculus
  siRNA target sequence for Dnase1 (NM_010061.2,1184-1202).
cagctatcaatatgatgat

SEQ ID NO: 521958 - DNA, 19 bp, Mus musculus
  siRNA target sequence for Dnase1 (NM_010061.2,1237-1255).
gagagccagccattgttaa

SEQ ID NO: 521959 - DNA, 19 bp, Mus musculus
  siRNA target sequence for Dnase1 (NM_010061.2,1256-1274).
gttcttttccccatacact

SEQ ID NO: 521960 - DNA, 19 bp, Mus musculus
  siRNA target sequence for Dnase1 (NM_010061.2,1409-1427).
gctctgaatttacattcaa

SEQ ID NO: 521961 - DNA, 19 bp, Mus musculus
  siRNA target sequence for Dnase1 (NM_010061.2,1412-1430).
ctgaatttacattcaacta

SEQ ID NO: 521962 - DNA, 19 bp, Mus musculus
  siRNA target sequence for Dnase1 (NM_010061.2,1414-1432).
gaatttacattcaactaca

SEQ ID NO: 521963 - DNA, 19 bp, Mus musculus
  siRNA target sequence for Dnase1 (NM_010061.2,1453-1471).
ggagactgtcccatatctt

SEQ ID NO: 521964 - DNA, 19 bp, Mus musculus
  siRNA target sequence for Dnase1 (NM_010061.2,1472-1490).
cacctctgctcgaagctaa

SEQ ID NO: 521965 - DNA, 19 bp, Mus musculus
  siRNA target sequence for Dnase1 (NM_010061.2,1487-1505).
ctaaaaccactctgcataa

SEQ ID NO: 521966 - DNA, 19 bp, Mus musculus
  siRNA target sequence for Dnase1 (NM_010061.2,1655-1673).
cctctacgatgtttaccta

SEQ ID NO: 521967 - DNA, 19 bp, Mus musculus
  siRNA target sequence for Dnase1 (NM_010061.2,1770-1788).
ggtaggacatcatgttcat

SEQ ID NO: 521968 - DNA, 19 bp, Mus musculus
  siRNA target sequence for Dnase1 (NM_010061.2,1783-1801).
gttcatgggagacttcaat

SEQ ID NO: 521969 - DNA, 19 bp, Mus musculus
  siRNA target sequence for Dnase1 (NM_010061.2,1908-1926).
caacacactgtgcttatga

SEQ ID NO: 521970 - DNA, 19 bp, Mus musculus
  siRNA target sequence for Dnase1 (NM_010061.2,1962-1980).
ctcgccttctcctactcaa

SEQ ID NO: 521971 - DNA, 19 bp, Mus musculus
  siRNA target sequence for Dnase1 (NM_010061.2,1999-2017).
cttacagactcctagtttt

SEQ ID NO: 521972 - DNA, 19 bp, Mus musculus
  siRNA target sequence for Dnase1 (NM_010061.2,2053-2071).
ctgggcagcttacatgtta

SEQ ID NO: 521973 - DNA, 19 bp, Mus musculus
  siRNA target sequence for Dnase1 (NM_010061.2,2055-2073).
gggcagcttacatgttagt

SEQ ID NO: 521974 - DNA, 19 bp, Mus musculus
  siRNA target sequence for Dnase1 (NM_010061.2,2056-2074).
ggcagcttacatgttagtt

SEQ ID NO: 521975 - DNA, 19 bp, Mus musculus
  siRNA target sequence for Dnase1 (NM_010061.2,2131-2149).
gggtcagcaaactctatgt

SEQ ID NO: 521976 - DNA, 19 bp, Mus musculus
  siRNA target sequence for Dnase1 (NM_010061.2,2261-2279).
cagaatacggactttccaa

SEQ ID NO: 521977 - DNA, 19 bp, Mus musculus
  siRNA target sequence for Dnase1 (NM_010061.2,2276-2294).
ccaaccagctggtatgtgt

SEQ ID NO: 521978 - DNA, 19 bp, Mus musculus
  siRNA target sequence for Dnase1 (NM_010061.2,2296-2314).
ctctctcttgtgtggttta

SEQ ID NO: 521979 - DNA, 19 bp, Mus musculus
  siRNA target sequence for Dnase1 (NM_010061.2,2300-2318).
ctcttgtgtggtttaggtt

SEQ ID NO: 521980 - DNA, 19 bp, Mus musculus
  siRNA target sequence for Dnase1 (NM_010061.2,2342-2360).
ctgtttccatactagatgt

SEQ ID NO: 521981 - DNA, 19 bp, Mus musculus
  siRNA target sequence for Dnase1 (NM_010061.2,2400-2418).
gcttaccctctgtggtata

SEQ ID NO: 521982 - DNA, 19 bp, Mus musculus
  siRNA target sequence for Dnase1 (NM_010061.2,2551-2569).
gaatccacttcaactctat

SEQ ID NO: 521983 - DNA, 19 bp, Mus musculus
  siRNA target sequence for Dnase1 (NM_010061.2,2556-2574).
cacttcaactctatttggt

SEQ ID NO: 521984 - DNA, 19 bp, Mus musculus
  siRNA target sequence for Dnase1 (NM_010061.2,2615-2633).
ccacggggactaagaaata

SEQ ID NO: 521985 - DNA, 19 bp, Mus musculus
  siRNA target sequence for Dnase1 (NM_010061.2,2619-2637).
ggggactaagaaatactgt

SEQ ID NO: 521986 - DNA, 19 bp, Mus musculus
  siRNA target sequence for Dst (NM_010081.1,109-127).
ctgatcaactcctgcatta

SEQ ID NO: 521987 - DNA, 19 bp, Mus musculus
  siRNA target sequence for Dst (NM_010081.1,120-138).
ctgcattagcttcagtaat

SEQ ID NO: 521988 - DNA, 19 bp, Mus musculus
  siRNA target sequence for Dst (NM_010081.1,152-170).
gacacaggttggatatgct

SEQ ID NO: 521989 - DNA, 19 bp, Mus musculus
  siRNA target sequence for Dst (NM_010081.1,188-206).
gagttcagagggatagtgt

SEQ ID NO: 521990 - DNA, 19 bp, Mus musculus
  siRNA target sequence for Dst (NM_010081.1,203-221).
gtgtcagctgcgaagacaa

SEQ ID NO: 521991 - DNA, 19 bp, Mus musculus
  siRNA target sequence for Dst (NM_010081.1,209-227).
gctgcgaagacaaactcat

SEQ ID NO: 521992 - DNA, 19 bp, Mus musculus
  siRNA target sequence for Dst (NM_010081.1,249-267).
gtctgattccaaaagatta

SEQ ID NO: 521993 - DNA, 19 bp, Mus musculus
  siRNA target sequence for Dst (NM_010081.1,251-269).
ctgattccaaaagattaga

SEQ ID NO: 521994 - DNA, 19 bp, Mus musculus
  siRNA target sequence for Dst (NM_010081.1,273-291).
gggagtccagtttcagaat

SEQ ID NO: 521995 - DNA, 19 bp, Mus musculus
  siRNA target sequence for Dst (NM_010081.1,275-293).
gagtccagtttcagaatga

SEQ ID NO: 521996 - DNA, 19 bp, Mus musculus
  siRNA target sequence for Dst (NM_010081.1,300-318).
gattgccgggtacatactt

SEQ ID NO: 521997 - DNA, 19 bp, Mus musculus
  siRNA target sequence for Dst (NM_010081.1,304-322).
gccgggtacatacttgaat

SEQ ID NO: 521998 - DNA, 19 bp, Mus musculus
  siRNA target sequence for Dst (NM_010081.1,306-324).
cgggtacatacttgaatgt

SEQ ID NO: 521999 - DNA, 19 bp, Mus musculus
  siRNA target sequence for Dst (NM_010081.1,427-445).
gagattatggccttaagga

SEQ ID NO: 522000 - DNA, 19 bp, Mus musculus
  siRNA target sequence for Dst (NM_010081.1,436-454).
gccttaaggaacgaatgtt

SEQ ID NO: 522001 - DNA, 19 bp, Mus musculus
  siRNA target sequence for Dst (NM_010081.1,438-456).
cttaaggaacgaatgttct

SEQ ID NO: 522002 - DNA, 19 bp, Mus musculus
  siRNA target sequence for Dst (NM_010081.1,493-511).
cagaccaagctcatgatat

SEQ ID NO: 522003 - DNA, 19 bp, Mus musculus
  siRNA target sequence for Dst (NM_010081.1,495-513).
gaccaagctcatgatatca

SEQ ID NO: 522004 - DNA, 19 bp, Mus musculus
  siRNA target sequence for Dst (NM_010081.1,504-522).
catgatatcaggaatcact

SEQ ID NO: 522005 - DNA, 19 bp, Mus musculus
  siRNA target sequence for Dst (NM_010081.1,512-530).
caggaatcactcaaagctt

SEQ ID NO: 522006 - DNA, 19 bp, Mus musculus
  siRNA target sequence for Dst (NM_010081.1,514-532).
ggaatcactcaaagcttaa

SEQ ID NO: 522007 - DNA, 19 bp, Mus musculus
  siRNA target sequence for Dst (NM_010081.1,519-537).
cactcaaagcttaaactca

SEQ ID NO: 522008 - DNA, 19 bp, Mus musculus
  siRNA target sequence for Dst (NM_010081.1,536-554).
caggatttgcacaaacctt

SEQ ID NO: 522009 - DNA, 19 bp, Mus musculus
  siRNA target sequence for Dst (NM_010081.1,572-590).
cagggctaacccagagttt

SEQ ID NO: 522010 - DNA, 19 bp, Mus musculus
  siRNA target sequence for Dst (NM_010081.1,574-592).
gggctaacccagagtttaa

SEQ ID NO: 522011 - DNA, 19 bp, Mus musculus
  siRNA target sequence for Dst (NM_010081.1,595-613).
ccttccttgacgtcttcta

SEQ ID NO: 522012 - DNA, 19 bp, Mus musculus
  siRNA target sequence for Dst (NM_010081.1,721-739).
ggggtagagccaaattcat

SEQ ID NO: 522013 - DNA, 19 bp, Mus musculus
  siRNA target sequence for Dst (NM_010081.1,722-740).
gggtagagccaaattcatt

SEQ ID NO: 522014 - DNA, 19 bp, Mus musculus
  siRNA target sequence for Dst (NM_010081.1,788-806).
ctttgctggatcagaactt

SEQ ID NO: 522015 - DNA, 19 bp, Mus musculus
  siRNA target sequence for Dst (NM_010081.1,809-827).
cagaagaggaagtcaatat

SEQ ID NO: 522016 - DNA, 19 bp, Mus musculus
  siRNA target sequence for Dst (NM_010081.1,874-892).
cagctggaccgcactgaat

SEQ ID NO: 522017 - DNA, 19 bp, Mus musculus
  siRNA target sequence for Dst (NM_010081.1,887-905).
ctgaatggggctcagattt

SEQ ID NO: 522018 - DNA, 19 bp, Mus musculus
  siRNA target sequence for Dst (NM_010081.1,913-931).
gttgaaagccatttagaaa

SEQ ID NO: 522019 - DNA, 19 bp, Mus musculus
  siRNA target sequence for Dst (NM_010081.1,946-964).
caccgagccattgaagaat

SEQ ID NO: 522020 - DNA, 19 bp, Mus musculus
  siRNA target sequence for Dst (NM_010081.1,971-989).
ccagccttaaggaagctaa

SEQ ID NO: 522021 - DNA, 19 bp, Mus musculus
  siRNA target sequence for Dst (NM_010081.1,974-992).
gccttaaggaagctaaaat

SEQ ID NO: 522022 - DNA, 19 bp, Mus musculus
  siRNA target sequence for Dst (NM_010081.1,1058-1076).
gtcagtacgctaaactctt

SEQ ID NO: 522023 - DNA, 19 bp, Mus musculus
  siRNA target sequence for Dst (NM_010081.1,1065-1083).
cgctaaactcttgaataca

SEQ ID NO: 522024 - DNA, 19 bp, Mus musculus
  siRNA target sequence for Dst (NM_010081.1,1107-1125).
cgatacactccacaacttt

SEQ ID NO: 522025 - DNA, 19 bp, Mus musculus
  siRNA target sequence for Dst (NM_010081.1,1133-1151).
gcgcaactaacgagcttat

SEQ ID NO: 522026 - DNA, 19 bp, Mus musculus
  siRNA target sequence for Dst (NM_010081.1,1135-1153).
gcaactaacgagcttatct

SEQ ID NO: 522027 - DNA, 19 bp, Mus musculus
  siRNA target sequence for Dst (NM_010081.1,1143-1161).
cgagcttatctggttgaat

SEQ ID NO: 522028 - DNA, 19 bp, Mus musculus
  siRNA target sequence for Dst (NM_010081.1,1146-1164).
gcttatctggttgaatgaa

SEQ ID NO: 522029 - DNA, 19 bp, Mus musculus
  siRNA target sequence for Dst (NM_010081.1,1170-1188).
ggagtcggaagttgcttat

SEQ ID NO: 522030 - DNA, 19 bp, Mus musculus
  siRNA target sequence for Dst (NM_010081.1,1173-1191).
gtcggaagttgcttatgat

SEQ ID NO: 522031 - DNA, 19 bp, Mus musculus
  siRNA target sequence for Dst (NM_010081.1,1431-1449).
ctatttcgagtttttcaat

SEQ ID NO: 522032 - DNA, 19 bp, Mus musculus
  siRNA target sequence for Dst (NM_010081.1,1459-1477).
gaagccactgattacctaa

SEQ ID NO: 522033 - DNA, 19 bp, Mus musculus
  siRNA target sequence for Dst (NM_010081.1,1463-1481).
ccactgattacctaaggaa

SEQ ID NO: 522034 - DNA, 19 bp, Mus musculus
  siRNA target sequence for Dst (NM_010081.1,1464-1482).
cactgattacctaaggaat

SEQ ID NO: 522035 - DNA, 19 bp, Mus musculus
  siRNA target sequence for Dst (NM_010081.1,1468-1486).
gattacctaaggaatctga

SEQ ID NO: 522036 - DNA, 19 bp, Mus musculus
  siRNA target sequence for Dst (NM_010081.1,1520-1538).
ggtccagcagcattcacaa

SEQ ID NO: 522037 - DNA, 19 bp, Mus musculus
  siRNA target sequence for Dst (NM_010081.1,1552-1570).
gtccaggagtccatggaaa

SEQ ID NO: 522038 - DNA, 19 bp, Mus musculus
  siRNA target sequence for Dst (NM_010081.1,1671-1689).
gacgtccatccccatcaaa

SEQ ID NO: 522039 - DNA, 19 bp, Mus musculus
  siRNA target sequence for Dst (NM_010081.1,1695-1713).
ctgcgactacagacagatt

SEQ ID NO: 522040 - DNA, 19 bp, Mus musculus
  siRNA target sequence for Dst (NM_010081.1,1755-1773).
caactctcatcgagctaaa

SEQ ID NO: 522041 - DNA, 19 bp, Mus musculus
  siRNA target sequence for Dst (NM_010081.1,1855-1873).
gttgactttgccaacagaa

SEQ ID NO: 522042 - DNA, 19 bp, Mus musculus
  siRNA target sequence for Dst (NM_010081.1,1871-1889).
gaattgagcaacagtatca

SEQ ID NO: 522043 - DNA, 19 bp, Mus musculus
  siRNA target sequence for Dst (NM_010081.1,1907-1925).
ggcatgagtctcacataaa

SEQ ID NO: 522044 - DNA, 19 bp, Mus musculus
  siRNA target sequence for Dst (NM_010081.1,1947-1965).
gcactatctagtcaatgaa

SEQ ID NO: 522045 - DNA, 19 bp, Mus musculus
  siRNA target sequence for Dst (NM_010081.1,1959-1977).
caatgaaatcgacagaatt

SEQ ID NO: 522046 - DNA, 19 bp, Mus musculus
  siRNA target sequence for Dst (NM_010081.1,1973-1991).
gaattcgagctagtaatgt

SEQ ID NO: 522047 - DNA, 19 bp, Mus musculus
  siRNA target sequence for Dst (NM_010081.1,1985-2003).
gtaatgtggcttcgataaa

SEQ ID NO: 522048 - DNA, 19 bp, Mus musculus
  siRNA target sequence for Dst (NM_010081.1,2051-2069).
cccgcttggaggatttcct

SEQ ID NO: 522049 - DNA, 19 bp, Mus musculus
  siRNA target sequence for Dst (NM_010081.1,2097-2115).
ctcaggctcggatataagt

SEQ ID NO: 522050 - DNA, 19 bp, Mus musculus
  siRNA target sequence for Dst (NM_010081.1,2099-2117).
caggctcggatataagtca

SEQ ID NO: 522051 - DNA, 19 bp, Mus musculus
  siRNA target sequence for Dst (NM_010081.1,2103-2121).
ctcggatataagtcaacta

SEQ ID NO: 522052 - DNA, 19 bp, Mus musculus
  siRNA target sequence for Dst (NM_010081.1,2105-2123).
cggatataagtcaactaga

SEQ ID NO: 522053 - DNA, 19 bp, Mus musculus
  siRNA target sequence for Dst (NM_010081.1,2139-2157).
gtgcaggaagtattatcaa

SEQ ID NO: 522054 - DNA, 19 bp, Mus musculus
  siRNA target sequence for Dst (NM_010081.1,2187-2205).
gcaagaggaatctgtgtat

SEQ ID NO: 522055 - DNA, 19 bp, Mus musculus
  siRNA target sequence for Dst (NM_010081.1,2217-2235).
ctcggaagtgcgaaacatt

SEQ ID NO: 522056 - DNA, 19 bp, Mus musculus
  siRNA target sequence for Dst (NM_010081.1,2289-2307).
cctggaaagagatgattta

SEQ ID NO: 522057 - DNA, 19 bp, Mus musculus
  siRNA target sequence for Dst (NM_010081.1,2374-2392).
gacttgggaacgatcacaa

SEQ ID NO: 522058 - DNA, 19 bp, Mus musculus
  siRNA target sequence for Dst (NM_010081.1,2380-2398).
ggaacgatcacaaataagt

SEQ ID NO: 522059 - DNA, 19 bp, Mus musculus
  siRNA target sequence for Dst (NM_010081.1,2485-2503).
cagatctactctatgtctt

SEQ ID NO: 522060 - DNA, 19 bp, Mus musculus
  siRNA target sequence for Dst (NM_010081.1,2501-2519).
cttccacgtacatagagaa

SEQ ID NO: 522061 - DNA, 19 bp, Mus musculus
  siRNA target sequence for Dst (NM_010081.1,2504-2522).
ccacgtacatagagaaatt

SEQ ID NO: 522062 - DNA, 19 bp, Mus musculus
  siRNA target sequence for Dst (NM_010081.1,2578-2596).
ctctacgaaaccaaactgt

SEQ ID NO: 522063 - DNA, 19 bp, Mus musculus
  siRNA target sequence for Dst (NM_010081.1,2611-2629).
gttatagcagacaagaata

SEQ ID NO: 522064 - DNA, 19 bp, Mus musculus
  siRNA target sequence for Dst (NM_010081.1,2631-2649).
cattgagaatttaatgagt

SEQ ID NO: 522065 - DNA, 19 bp, Mus musculus
  siRNA target sequence for Dst (NM_010081.1,2635-2653).
gagaatttaatgagtactt

SEQ ID NO: 522066 - DNA, 19 bp, Mus musculus
  siRNA target sequence for Dst (NM_010081.1,2666-2684).
gatcagaagtagatgagaa

SEQ ID NO: 522067 - DNA, 19 bp, Mus musculus
  siRNA target sequence for Dst (NM_010081.1,2687-2705).
gagaggtgttccatgcatt

SEQ ID NO: 522068 - DNA, 19 bp, Mus musculus
  siRNA target sequence for Dst (NM_010081.1,2712-2730).
cgagttgcagaaagcaaaa

SEQ ID NO: 522069 - DNA, 19 bp, Mus musculus
  siRNA target sequence for Dst (NM_010081.1,2767-2785).
cgggaccttgactttgact

SEQ ID NO: 522070 - DNA, 19 bp, Mus musculus
  siRNA target sequence for Dst (NM_010081.1,2922-2940).
ctggatccagcacattgaa

SEQ ID NO: 522071 - DNA, 19 bp, Mus musculus
  siRNA target sequence for Dst (NM_010081.1,3089-3107).
ctgccgtcaaggactatga

SEQ ID NO: 522072 - DNA, 19 bp, Mus musculus
  siRNA target sequence for Dst (NM_010081.1,3091-3109).
gccgtcaaggactatgagt

SEQ ID NO: 522073 - DNA, 19 bp, Mus musculus
  siRNA target sequence for Dst (NM_010081.1,3100-3118).
gactatgagttgcaaacaa

SEQ ID NO: 522074 - DNA, 19 bp, Mus musculus
  siRNA target sequence for Dst (NM_010081.1,3183-3201).
ctcagcagacctcgttatt

SEQ ID NO: 522075 - DNA, 19 bp, Mus musculus
  siRNA target sequence for Dst (NM_010081.1,3252-3270).
gacgcagtatattaaattt

SEQ ID NO: 522076 - DNA, 19 bp, Mus musculus
  siRNA target sequence for Dst (NM_010081.1,3379-3397).
gttgagaatagcaaactta

SEQ ID NO: 522077 - DNA, 19 bp, Mus musculus
  siRNA target sequence for Dst (NM_010081.1,3422-3440).
caatggtggctgagctaaa

SEQ ID NO: 522078 - DNA, 19 bp, Mus musculus
  siRNA target sequence for Dst (NM_010081.1,3431-3449).
ctgagctaaagaaacagaa

SEQ ID NO: 522079 - DNA, 19 bp, Mus musculus
  siRNA target sequence for Dst (NM_010081.1,3463-3481).
gaggagcttccgaaagtta

SEQ ID NO: 522080 - DNA, 19 bp, Mus musculus
  siRNA target sequence for Dst (NM_010081.1,3751-3769).
catctgcggaggaaagact

SEQ ID NO: 522081 - DNA, 19 bp, Mus musculus
  siRNA target sequence for Dst (NM_010081.1,4124-4142).
gcgcggtccagctcgaaaa

SEQ ID NO: 522082 - DNA, 19 bp, Mus musculus
  siRNA target sequence for Dst (NM_010081.1,4185-4203).
ggacgagacgaataacaca

SEQ ID NO: 522083 - DNA, 19 bp, Mus musculus
  siRNA target sequence for Dst (NM_010081.1,4354-4372).
cacacctatcagttggaat

SEQ ID NO: 522084 - DNA, 19 bp, Mus musculus
  siRNA target sequence for Dst (NM_010081.1,4356-4374).
cacctatcagttggaatta

SEQ ID NO: 522085 - DNA, 19 bp, Mus musculus
  siRNA target sequence for Dst (NM_010081.1,4576-4594).
gcacagttgcttcagaata

SEQ ID NO: 522086 - DNA, 19 bp, Mus musculus
  siRNA target sequence for Dst (NM_010081.1,4577-4595).
cacagttgcttcagaatat

SEQ ID NO: 522087 - DNA, 19 bp, Mus musculus
  siRNA target sequence for Dst (NM_010081.1,4812-4830).
ggcagacggttttaaggat

SEQ ID NO: 522088 - DNA, 19 bp, Mus musculus
  siRNA target sequence for Dst (NM_010081.1,4838-4856).
ggaacaccaacgaacactt

SEQ ID NO: 522089 - DNA, 19 bp, Mus musculus
  siRNA target sequence for Dst (NM_010081.1,4939-4957).
gtaagcgagttcaagcaaa

SEQ ID NO: 522090 - DNA, 19 bp, Mus musculus
  siRNA target sequence for Dst (NM_010081.1,5182-5200).
caggaagagtcggataagt

SEQ ID NO: 522091 - DNA, 19 bp, Mus musculus
  siRNA target sequence for Dst (NM_010081.1,5282-5300).
gcatcaagcacgactttgt

SEQ ID NO: 522092 - DNA, 19 bp, Mus musculus
  siRNA target sequence for Dst (NM_010081.1,5299-5317).
gtgtctctccagagagaaa

SEQ ID NO: 522093 - DNA, 19 bp, Mus musculus
  siRNA target sequence for Dst (NM_010081.1,5471-5489).
cccagagacgggaagttga

SEQ ID NO: 522094 - DNA, 19 bp, Mus musculus
  siRNA target sequence for Dst (NM_010081.1,5477-5495).
gacgggaagttgaaaacct

SEQ ID NO: 522095 - DNA, 19 bp, Mus musculus
  siRNA target sequence for Dst (NM_010081.1,5547-5565).
gctccagtgtgaaatccaa

SEQ ID NO: 522096 - DNA, 19 bp, Mus musculus
  siRNA target sequence for Dst (NM_010081.1,5591-5609).
ccttcgcgtcggcttttga

SEQ ID NO: 522097 - DNA, 19 bp, Mus musculus
  siRNA target sequence for Dst (NM_010081.1,5592-5610).
cttcgcgtcggcttttgat

SEQ ID NO: 522098 - DNA, 19 bp, Mus musculus
  siRNA target sequence for Dst (NM_010081.1,5662-5680).
gggcaccttaacctaaaga

SEQ ID NO: 522099 - DNA, 19 bp, Mus musculus
  siRNA target sequence for Dst (NM_010081.1,5818-5836).
ccatgctactcggagtatt

SEQ ID NO: 522100 - DNA, 19 bp, Mus musculus
  siRNA target sequence for Dst (NM_010081.1,5819-5837).
catgctactcggagtattt

SEQ ID NO: 522101 - DNA, 19 bp, Mus musculus
  siRNA target sequence for Dst (NM_010081.1,5823-5841).
ctactcggagtatttttct

SEQ ID NO: 522102 - DNA, 19 bp, Mus musculus
  siRNA target sequence for Dst (NM_010081.1,5859-5877).
gcagataacttttgatgat

SEQ ID NO: 522103 - DNA, 19 bp, Mus musculus
  siRNA target sequence for Dst (NM_010081.1,5860-5878).
cagataacttttgatgata

SEQ ID NO: 522104 - DNA, 19 bp, Mus musculus
  siRNA target sequence for Dst (NM_010081.1,5889-5907).
cacgcgactgtctgaacta

SEQ ID NO: 522105 - DNA, 19 bp, Mus musculus
  siRNA target sequence for Dst (NM_010081.1,5891-5909).
cgcgactgtctgaactaga

SEQ ID NO: 522106 - DNA, 19 bp, Mus musculus
  siRNA target sequence for Dst (NM_010081.1,5952-5970).
gacgtatcaggatgacaaa

SEQ ID NO: 522107 - DNA, 19 bp, Mus musculus
  siRNA target sequence for Dst (NM_010081.1,5978-5996).
gggagttggtgaagctttt

SEQ ID NO: 522108 - DNA, 19 bp, Mus musculus
  siRNA target sequence for Dst (NM_010081.1,5982-6000).
gttggtgaagcttttgaca

SEQ ID NO: 522109 - DNA, 19 bp, Mus musculus
  siRNA target sequence for Dst (NM_010081.1,5992-6010).
cttttgacacccttagaga

SEQ ID NO: 522110 - DNA, 19 bp, Mus musculus
  siRNA target sequence for Dst (NM_010081.1,5999-6017).
cacccttagagatagctaa

SEQ ID NO: 522111 - DNA, 19 bp, Mus musculus
  siRNA target sequence for Dst (NM_010081.1,6050-6068).
cgaccttaaaacaagagaa

SEQ ID NO: 522112 - DNA, 19 bp, Mus musculus
  siRNA target sequence for Dst (NM_010081.1,6122-6140).
gtggactcaagggagattt

SEQ ID NO: 522113 - DNA, 19 bp, Mus musculus
  siRNA target sequence for Dst (NM_010081.1,6125-6143).
gactcaagggagatttcct

SEQ ID NO: 522114 - DNA, 19 bp, Mus musculus
  siRNA target sequence for Dst (NM_010081.1,6170-6188).
ccccgagccttgaccttaa

SEQ ID NO: 522115 - DNA, 19 bp, Mus musculus
  siRNA target sequence for Dst (NM_010081.1,6173-6191).
cgagccttgaccttaacca

SEQ ID NO: 522116 - DNA, 19 bp, Mus musculus
  siRNA target sequence for Dst (NM_010081.1,6328-6346).
gaagttcagagaagtctta

SEQ ID NO: 522117 - DNA, 19 bp, Mus musculus
  siRNA target sequence for Dst (NM_010081.1,6368-6386).
cctccattgcaggacttta

SEQ ID NO: 522118 - DNA, 19 bp, Mus musculus
  siRNA target sequence for Dst (NM_010081.1,6369-6387).
ctccattgcaggactttat

SEQ ID NO: 522119 - DNA, 19 bp, Mus musculus
  siRNA target sequence for Dst (NM_010081.1,6371-6389).
ccattgcaggactttatct

SEQ ID NO: 522120 - DNA, 19 bp, Mus musculus
  siRNA target sequence for Dst (NM_010081.1,6388-6406).
ctagaatcttccaaagaaa

SEQ ID NO: 522121 - DNA, 19 bp, Mus musculus
  siRNA target sequence for Dst (NM_010081.1,6403-6421).
gaaaaaatgtcgttcactt

SEQ ID NO: 522122 - DNA, 19 bp, Mus musculus
  siRNA target sequence for Dst (NM_010081.1,6428-6446).
cccagaaaatcataataga

SEQ ID NO: 522123 - DNA, 19 bp, Mus musculus
  siRNA target sequence for Dst (NM_010081.1,6453-6471).
gatagctctagccttttta

SEQ ID NO: 522124 - DNA, 19 bp, Mus musculus
  siRNA target sequence for Dst (NM_010081.1,6508-6526).
gtttctggtcagacttact

SEQ ID NO: 522125 - DNA, 19 bp, Mus musculus
  siRNA target sequence for Dst (NM_010081.1,6519-6537).
gacttactgtgttgaagat

SEQ ID NO: 522126 - DNA, 19 bp, Mus musculus
  siRNA target sequence for Dst (NM_010081.1,6599-6617).
cagttttgggatattcaca

SEQ ID NO: 522127 - DNA, 19 bp, Mus musculus
  siRNA target sequence for Dst (NM_010081.1,6642-6660).
ccaggcaatggaaaataga

SEQ ID NO: 522128 - DNA, 19 bp, Mus musculus
  siRNA target sequence for Dst (NM_010081.1,6822-6840).
cacgagagtctttcctaat

SEQ ID NO: 522129 - DNA, 19 bp, Mus musculus
  siRNA target sequence for Dst (NM_010081.1,6978-6996).
cgtggtagataccaaaact

SEQ ID NO: 522130 - DNA, 19 bp, Mus musculus
  siRNA target sequence for Dst (NM_010081.1,7036-7054).
ctgattgacaagggtattt

SEQ ID NO: 522131 - DNA, 19 bp, Mus musculus
  siRNA target sequence for Dst (NM_010081.1,7083-7101).
gtggaaggaagctacattt

SEQ ID NO: 522132 - DNA, 19 bp, Mus musculus
  siRNA target sequence for Dst (NM_010081.1,7090-7108).
gaagctacattttttgact

SEQ ID NO: 522133 - DNA, 19 bp, Mus musculus
  siRNA target sequence for Dst (NM_010081.1,7126-7144).
cacatgctgactgatacta

SEQ ID NO: 522134 - DNA, 19 bp, Mus musculus
  siRNA target sequence for Dst (NM_010081.1,7148-7166).
ctggtctgcagttcaatat

SEQ ID NO: 522135 - DNA, 19 bp, Mus musculus
  siRNA target sequence for Dst (NM_010081.1,7155-7173).
gcagttcaatattagtgaa

SEQ ID NO: 522136 - DNA, 19 bp, Mus musculus
  siRNA target sequence for Dst (NM_010081.1,7182-7200).
gcagggaacgctagacaaa

SEQ ID NO: 522137 - DNA, 19 bp, Mus musculus
  siRNA target sequence for Dst (NM_010081.1,7202-7220).
ccttggtgcaaaagtatca

SEQ ID NO: 522138 - DNA, 19 bp, Mus musculus
  siRNA target sequence for Dst (NM_010081.1,7226-7244).
gcctaactacactaacaga

SEQ ID NO: 522139 - DNA, 19 bp, Mus musculus
  siRNA target sequence for Dst (NM_010081.1,7227-7245).
cctaactacactaacagaa

SEQ ID NO: 522140 - DNA, 19 bp, Mus musculus
  siRNA target sequence for Dst (NM_010081.1,7396-7414).
cttgaagcccaaatctgta

SEQ ID NO: 522141 - DNA, 19 bp, Mus musculus
  siRNA target sequence for Dst (NM_010081.1,7432-7450).
cccctaactgggaaaaagt

SEQ ID NO: 522142 - DNA, 19 bp, Mus musculus
  siRNA target sequence for Dst (NM_010081.1,7456-7474).
gtggccgaggctttgcata

SEQ ID NO: 522143 - DNA, 19 bp, Mus musculus
  siRNA target sequence for Dst (NM_010081.1,7504-7522).
cagctacgccagtgtgaat

SEQ ID NO: 522144 - DNA, 19 bp, Mus musculus
  siRNA target sequence for Dst (NM_010081.1,7506-7524).
gctacgccagtgtgaatta

SEQ ID NO: 522145 - DNA, 19 bp, Mus musculus
  siRNA target sequence for Dst (NM_010081.1,7510-7528).
cgccagtgtgaattagtga

SEQ ID NO: 522146 - DNA, 19 bp, Mus musculus
  siRNA target sequence for Dst (NM_010081.1,7511-7529).
gccagtgtgaattagtgat

SEQ ID NO: 522147 - DNA, 19 bp, Mus musculus
  siRNA target sequence for Dst (NM_010081.1,7541-7559).
gccaccccgtcagcaataa

SEQ ID NO: 522148 - DNA, 19 bp, Mus musculus
  siRNA target sequence for Dst (NM_010081.1,7543-7561).
caccccgtcagcaataaaa

SEQ ID NO: 522149 - DNA, 19 bp, Mus musculus
  siRNA target sequence for Dst (NM_010081.1,7546-7564).
cccgtcagcaataaaatga

SEQ ID NO: 522150 - DNA, 19 bp, Mus musculus
  siRNA target sequence for Dst (NM_010081.1,7547-7565).
ccgtcagcaataaaatgat

SEQ ID NO: 522151 - DNA, 19 bp, Mus musculus
  siRNA target sequence for Dst (NM_010081.1,7576-7594).
gaagccgtgaatgcaaata

SEQ ID NO: 522152 - DNA, 19 bp, Mus musculus
  siRNA target sequence for Dst (NM_010081.1,7579-7597).
gccgtgaatgcaaatatca

SEQ ID NO: 522153 - DNA, 19 bp, Mus musculus
  siRNA target sequence for Dst (NM_010081.1,7651-7669).
ctgatagagccgaaggttt

SEQ ID NO: 522154 - DNA, 19 bp, Mus musculus
  siRNA target sequence for Dst (NM_010081.1,7694-7712).
cccttcacgtcggtatcat

SEQ ID NO: 522155 - DNA, 19 bp, Mus musculus
  siRNA target sequence for Dst (NM_010081.1,7695-7713).
ccttcacgtcggtatcatt

SEQ ID NO: 522156 - DNA, 19 bp, Mus musculus
  siRNA target sequence for Dst (NM_010081.1,7737-7755).
caaagatcaaaagtcatat

SEQ ID NO: 522157 - DNA, 19 bp, Mus musculus
  siRNA target sequence for Dst (NM_010081.1,7741-7759).
gatcaaaagtcatatgtca

SEQ ID NO: 522158 - DNA, 19 bp, Mus musculus
  siRNA target sequence for Dst (NM_010081.1,7751-7769).
catatgtcagggatataat

SEQ ID NO: 522159 - DNA, 19 bp, Mus musculus
  siRNA target sequence for Dst (NM_010081.1,7770-7788).
gtgcccccagactaagaga

SEQ ID NO: 522160 - DNA, 19 bp, Mus musculus
  siRNA target sequence for Dst (NM_010081.1,7772-7790).
gcccccagactaagagaaa

SEQ ID NO: 522161 - DNA, 19 bp, Mus musculus
  siRNA target sequence for Dst (NM_010081.1,7773-7791).
cccccagactaagagaaaa

SEQ ID NO: 522162 - DNA, 19 bp, Mus musculus
  siRNA target sequence for Dst (NM_010081.1,7774-7792).
ccccagactaagagaaaat

SEQ ID NO: 522163 - DNA, 19 bp, Mus musculus
  siRNA target sequence for Dst (NM_010081.1,7779-7797).
gactaagagaaaattgaca

SEQ ID NO: 522164 - DNA, 19 bp, Mus musculus
  siRNA target sequence for Dst (NM_010081.1,7841-7859).
gacttaagctgttagaagt

SEQ ID NO: 522165 - DNA, 19 bp, Mus musculus
  siRNA target sequence for Dst (NM_010081.1,7880-7898).
ggatatccaacctctacta

SEQ ID NO: 522166 - DNA, 19 bp, Mus musculus
  siRNA target sequence for Dst (NM_010081.1,7881-7899).
gatatccaacctctactat

SEQ ID NO: 522167 - DNA, 19 bp, Mus musculus
  siRNA target sequence for Dst (NM_133833.1,106-124).
gagcgggacaaagttcaaa

SEQ ID NO: 522168 - DNA, 19 bp, Mus musculus
  siRNA target sequence for Dst (NM_133833.1,109-127).
cgggacaaagttcaaaaga

SEQ ID NO: 522169 - DNA, 19 bp, Mus musculus
  siRNA target sequence for Dst (NM_133833.1,143-161).
ggataaatcagcatctcat

SEQ ID NO: 522170 - DNA, 19 bp, Mus musculus
  siRNA target sequence for Dst (NM_133833.1,199-217).
ctgagggacgggcacaatt

SEQ ID NO: 522171 - DNA, 19 bp, Mus musculus
  siRNA target sequence for Dst (NM_133833.1,203-221).
gggacgggcacaatttgat

SEQ ID NO: 522172 - DNA, 19 bp, Mus musculus
  siRNA target sequence for Dst (NM_133833.1,268-286).
ggtcggatgcgttttcaca

SEQ ID NO: 522173 - DNA, 19 bp, Mus musculus
  siRNA target sequence for Dst (NM_133833.1,301-319).
cagattgcactcgactatt

SEQ ID NO: 522174 - DNA, 19 bp, Mus musculus
  siRNA target sequence for Dst (NM_133833.1,393-411).
ggggttaatatggacaata

SEQ ID NO: 522175 - DNA, 19 bp, Mus musculus
  siRNA target sequence for Dst (NM_133833.1,395-413).
ggttaatatggacaataat

SEQ ID NO: 522176 - DNA, 19 bp, Mus musculus
  siRNA target sequence for Dst (NM_133833.1,517-535).
gctggggtgcggtgtgaaa

SEQ ID NO: 522177 - DNA, 19 bp, Mus musculus
  siRNA target sequence for Dst (NM_133833.1,518-536).
ctggggtgcggtgtgaaaa

SEQ ID NO: 522178 - DNA, 19 bp, Mus musculus
  siRNA target sequence for Dst (NM_133833.1,520-538).
ggggtgcggtgtgaaaact

SEQ ID NO: 522179 - DNA, 19 bp, Mus musculus
  siRNA target sequence for Dst (NM_133833.1,523-541).
gtgcggtgtgaaaacttca

SEQ ID NO: 522180 - DNA, 19 bp, Mus musculus
  siRNA target sequence for Dst (NM_133833.1,526-544).
cggtgtgaaaacttcacta

SEQ ID NO: 522181 - DNA, 19 bp, Mus musculus
  siRNA target sequence for Dst (NM_133833.1,554-572).
gagatgggaaactattcaa

SEQ ID NO: 522182 - DNA, 19 bp, Mus musculus
  siRNA target sequence for Dst (NM_133833.1,570-588).
caatgccatcattcataaa

SEQ ID NO: 522183 - DNA, 19 bp, Mus musculus
  siRNA target sequence for Dst (NM_133833.1,596-614).
cggacctgatagacatgaa

SEQ ID NO: 522184 - DNA, 19 bp, Mus musculus
  siRNA target sequence for Dst (NM_133833.1,632-650).
gcaaccttgcaaatttaga

SEQ ID NO: 522185 - DNA, 19 bp, Mus musculus
  siRNA target sequence for Dst (NM_133833.1,727-745).
gacgagaagtcggtgataa

SEQ ID NO: 522186 - DNA, 19 bp, Mus musculus
  siRNA target sequence for Dst (NM_133833.1,732-750).
gaagtcggtgataacctat

SEQ ID NO: 522187 - DNA, 19 bp, Mus musculus
  siRNA target sequence for Dst (NM_133833.1,809-827).
caaacgatgttgaagtcaa

SEQ ID NO: 522188 - DNA, 19 bp, Mus musculus
  siRNA target sequence for Dst (NM_133833.1,830-848).
ggattgaataccagaatat

SEQ ID NO: 522189 - DNA, 19 bp, Mus musculus
  siRNA target sequence for Dst (NM_133833.1,858-876).
cctcatccagtggattaga

SEQ ID NO: 522190 - DNA, 19 bp, Mus musculus
  siRNA target sequence for Dst (NM_133833.1,934-952).
gcactttataatcagtatt

SEQ ID NO: 522191 - DNA, 19 bp, Mus musculus
  siRNA target sequence for Dst (NM_133833.1,993-1011).
gaaatcaaaaattaaacga

SEQ ID NO: 522192 - DNA, 19 bp, Mus musculus
  siRNA target sequence for Dst (NM_133833.1,1038-1056).
cgagtttgggcgcatcaaa

SEQ ID NO: 522193 - DNA, 19 bp, Mus musculus
  siRNA target sequence for Dst (NM_133833.1,1053-1071).
caaactccttcaaggttat

SEQ ID NO: 522194 - DNA, 19 bp, Mus musculus
  siRNA target sequence for Dst (NM_133833.1,1147-1165).
gaggttgagaggttggata

SEQ ID NO: 522195 - DNA, 19 bp, Mus musculus
  siRNA target sequence for Dst (NM_133833.1,4572-4590).
gcaggagggctacaattta

SEQ ID NO: 522196 - DNA, 19 bp, Mus musculus
  siRNA target sequence for Dst (NM_133833.1,4575-4593).
ggagggctacaatttatta

SEQ ID NO: 522197 - DNA, 19 bp, Mus musculus
  siRNA target sequence for Dst (NM_133833.1,4576-4594).
gagggctacaatttattat

SEQ ID NO: 522198 - DNA, 19 bp, Mus musculus
  siRNA target sequence for Dst (NM_133833.1,4579-4597).
ggctacaatttattattca

SEQ ID NO: 522199 - DNA, 19 bp, Mus musculus
  siRNA target sequence for Dst (NM_133833.1,4722-4740).
gactgaaaaccgcctaatt

SEQ ID NO: 522200 - DNA, 19 bp, Mus musculus
  siRNA target sequence for Dst (NM_133833.1,4726-4744).
gaaaaccgcctaattagta

SEQ ID NO: 522201 - DNA, 19 bp, Mus musculus
  siRNA target sequence for Dst (NM_133833.1,4771-4789).
ggcacggtggagttacaga

SEQ ID NO: 522202 - DNA, 19 bp, Mus musculus
  siRNA target sequence for Dst (NM_133833.1,4910-4928).
cggatagagctttgattga

SEQ ID NO: 522203 - DNA, 19 bp, Mus musculus
  siRNA target sequence for Dst (NM_133833.1,4988-5006).
cgagaaaggagttggataa

SEQ ID NO: 522204 - DNA, 19 bp, Mus musculus
  siRNA target sequence for Dst (NM_133833.1,5097-5115).
gaactggctgtcaaatgtt

SEQ ID NO: 522205 - DNA, 19 bp, Mus musculus
  siRNA target sequence for Dst (NM_133833.1,5160-5178).
ggagcagaacggaacctat

SEQ ID NO: 522206 - DNA, 19 bp, Mus musculus
  siRNA target sequence for Dst (NM_133833.1,5161-5179).
gagcagaacggaacctatt

SEQ ID NO: 522207 - DNA, 19 bp, Mus musculus
  siRNA target sequence for Dst (NM_133833.1,5166-5184).
gaacggaacctatttgcat

SEQ ID NO: 522208 - DNA, 19 bp, Mus musculus
  siRNA target sequence for Dst (NM_133833.1,5207-5225).
ctggcgaagaggatgaagt

SEQ ID NO: 522209 - DNA, 19 bp, Mus musculus
  siRNA target sequence for Dst (NM_133833.1,5211-5229).
cgaagaggatgaagtcaat

SEQ ID NO: 522210 - DNA, 19 bp, Mus musculus
  siRNA target sequence for Dst (NM_133833.1,5657-5675).
cagaggacgtcatttctca

SEQ ID NO: 522211 - DNA, 19 bp, Mus musculus
  siRNA target sequence for Dst (NM_133833.1,5680-5698).
ggcgacttgaggtacatca

SEQ ID NO: 522212 - DNA, 19 bp, Mus musculus
  siRNA target sequence for Dst (NM_133833.1,5705-5723).
ccggaaacagggtgataga

SEQ ID NO: 522213 - DNA, 19 bp, Mus musculus
  siRNA target sequence for Dst (NM_133833.1,5789-5807).
caacccacagagaagttca

SEQ ID NO: 522214 - DNA, 19 bp, Mus musculus
  siRNA target sequence for Dst (NM_133833.1,5955-5973).
ggccaaagccagcaaacat

SEQ ID NO: 522215 - DNA, 19 bp, Mus musculus
  siRNA target sequence for Dst (NM_133833.1,5956-5974).
gccaaagccagcaaacatt

SEQ ID NO: 522216 - DNA, 19 bp, Mus musculus
  siRNA target sequence for Dst (NM_133833.1,6034-6052).
gctttgcaaggacagatat

SEQ ID NO: 522217 - DNA, 19 bp, Mus musculus
  siRNA target sequence for Dst (NM_133833.1,6162-6180).
cattgtcgggagatacgat

SEQ ID NO: 522218 - DNA, 19 bp, Mus musculus
  siRNA target sequence for Dst (NM_133833.1,6311-6329).
caggtcaagtgccactaaa

SEQ ID NO: 522219 - DNA, 19 bp, Mus musculus
  siRNA target sequence for Dst (NM_133833.1,6464-6482).
cctccctgcaagcgaaaat

SEQ ID NO: 522220 - DNA, 19 bp, Mus musculus
  siRNA target sequence for Dst (NM_133833.1,6549-6567).
ggagctaaaggccaaagta

SEQ ID NO: 522221 - DNA, 19 bp, Mus musculus
  siRNA target sequence for Dst (NM_133833.1,6591-6609).
caagctccagacgtttcta

SEQ ID NO: 522222 - DNA, 19 bp, Mus musculus
  siRNA target sequence for Dst (NM_133833.1,6662-6680).
cggagctgtctcagcatat

SEQ ID NO: 522223 - DNA, 19 bp, Mus musculus
  siRNA target sequence for Dst (NM_133833.1,6673-6691).
cagcatatgcaggaatcaa

SEQ ID NO: 522224 - DNA, 19 bp, Mus musculus
  siRNA target sequence for Dst (NM_133833.1,6675-6693).
gcatatgcaggaatcaact

SEQ ID NO: 522225 - DNA, 19 bp, Mus musculus
  siRNA target sequence for Dst (NM_133833.1,6685-6703).
gaatcaactgctaaattct

SEQ ID NO: 522226 - DNA, 19 bp, Mus musculus
  siRNA target sequence for Dst (NM_133833.1,6786-6804).
ggtgtttgagaaaactaat

SEQ ID NO: 522227 - DNA, 19 bp, Mus musculus
  siRNA target sequence for Dst (NM_133833.1,6787-6805).
gtgtttgagaaaactaata

SEQ ID NO: 522228 - DNA, 19 bp, Mus musculus
  siRNA target sequence for Dst (NM_133833.1,6793-6811).
gagaaaactaataacttgt

SEQ ID NO: 522229 - DNA, 19 bp, Mus musculus
  siRNA target sequence for Dst (NM_133833.1,6879-6897).
gcagctgagtgcttttcaa

SEQ ID NO: 522230 - DNA, 19 bp, Mus musculus
  siRNA target sequence for Dst (NM_133833.1,6901-6919).
ctcgctcagtcactgaaaa

SEQ ID NO: 522231 - DNA, 19 bp, Mus musculus
  siRNA target sequence for Dst (NM_133833.1,7062-7080).
cagtggtgtctcactatgt

SEQ ID NO: 522232 - DNA, 19 bp, Mus musculus
  siRNA target sequence for Dst (NM_133833.1,7064-7082).
gtggtgtctcactatgtaa

SEQ ID NO: 522233 - DNA, 19 bp, Mus musculus
  siRNA target sequence for Dst (NM_133833.1,7116-7134).
catagccgcagccaaatca

SEQ ID NO: 522234 - DNA, 19 bp, Mus musculus
  siRNA target sequence for Dst (NM_133833.1,7133-7151).
caggtggagtaatactaaa

SEQ ID NO: 522235 - DNA, 19 bp, Mus musculus
  siRNA target sequence for Dst (NM_133833.1,7185-7203).
cttggcaaataaaggttta

SEQ ID NO: 522236 - DNA, 19 bp, Mus musculus
  siRNA target sequence for Dst (NM_133833.1,7198-7216).
ggtttaacatctattaaga

SEQ ID NO: 522237 - DNA, 19 bp, Mus musculus
  siRNA target sequence for Dst (NM_133833.1,7199-7217).
gtttaacatctattaagaa

SEQ ID NO: 522238 - DNA, 19 bp, Mus musculus
  siRNA target sequence for Dst (NM_133833.1,7230-7248).
cataagccacagttacgaa

SEQ ID NO: 522239 - DNA, 19 bp, Mus musculus
  siRNA target sequence for Dst (NM_133833.1,7255-7273).
ggcctcttactcaaggata

SEQ ID NO: 522240 - DNA, 19 bp, Mus musculus
  siRNA target sequence for Dst (NM_133833.1,7257-7275).
cctcttactcaaggataaa

SEQ ID NO: 522241 - DNA, 19 bp, Mus musculus
  siRNA target sequence for Dst (NM_133833.1,7451-7469).
cagaactgaagcaaaatgt

SEQ ID NO: 522242 - DNA, 19 bp, Mus musculus
  siRNA target sequence for Dst (NM_133833.1,7627-7645).
gagtcctccaataatctaa

SEQ ID NO: 522243 - DNA, 19 bp, Mus musculus
  siRNA target sequence for Dst (NM_133833.1,7791-7809).
cacccggaaacctcagtat

SEQ ID NO: 522244 - DNA, 19 bp, Mus musculus
  siRNA target sequence for Dst (NM_133833.1,7853-7871).
gggaagacccttctttaca

SEQ ID NO: 522245 - DNA, 19 bp, Mus musculus
  siRNA target sequence for Dst (NM_133833.1,7865-7883).
ctttacatgggattgtgaa

SEQ ID NO: 522246 - DNA, 19 bp, Mus musculus
  siRNA target sequence for Dst (NM_133833.1,8125-8143).
cagcaggcaccgaagatca

SEQ ID NO: 522247 - DNA, 19 bp, Mus musculus
  siRNA target sequence for Dst (NM_133833.1,8184-8202).
caaagaggagtacttgaaa

SEQ ID NO: 522248 - DNA, 19 bp, Mus musculus
  siRNA target sequence for Dst (NM_133833.1,8221-8239).
ctagaaggcatcttaaagt

SEQ ID NO: 522249 - DNA, 19 bp, Mus musculus
  siRNA target sequence for Dst (NM_133833.1,8227-8245).
ggcatcttaaagtcgttta

SEQ ID NO: 522250 - DNA, 19 bp, Mus musculus
  siRNA target sequence for Dst (NM_133833.1,8228-8246).
gcatcttaaagtcgtttaa

SEQ ID NO: 522251 - DNA, 19 bp, Mus musculus
  siRNA target sequence for Dst (NM_133833.1,8232-8250).
cttaaagtcgtttaaggat

SEQ ID NO: 522252 - DNA, 19 bp, Mus musculus
  siRNA target sequence for Dst (NM_133833.1,8300-8318).
cgagctcacaccagtttca

SEQ ID NO: 522253 - DNA, 19 bp, Mus musculus
  siRNA target sequence for Dst (NM_133833.1,8390-8408).
ccgcaaagctggatgtctt

SEQ ID NO: 522254 - DNA, 19 bp, Mus musculus
  siRNA target sequence for Dst (NM_133833.1,8404-8422).
gtcttggagtcgttactta

SEQ ID NO: 522255 - DNA, 19 bp, Mus musculus
  siRNA target sequence for Dst (NM_133833.1,8419-8437).
cttaactcgcagaaagact

SEQ ID NO: 522256 - DNA, 19 bp, Mus musculus
  siRNA target sequence for Dst (NM_133833.1,8447-8465).
ctttcactgagcagtctaa

SEQ ID NO: 522257 - DNA, 19 bp, Mus musculus
  siRNA target sequence for Dst (NM_133833.1,8451-8469).
cactgagcagtctaacatt

SEQ ID NO: 522258 - DNA, 19 bp, Mus musculus
  siRNA target sequence for Dst (NM_133833.1,8466-8484).
catttacgagaaaaccatt

SEQ ID NO: 522259 - DNA, 19 bp, Mus musculus
  siRNA target sequence for Dst (NM_133833.1,8491-8509).
ggcgaaaacctgttattga

SEQ ID NO: 522260 - DNA, 19 bp, Mus musculus
  siRNA target sequence for Dst (NM_133833.1,8566-8584).
gactgggaccgatttagaa

SEQ ID NO: 522261 - DNA, 19 bp, Mus musculus
  siRNA target sequence for Dst (NM_133833.1,8738-8756).
gttccatcgccgagttaaa

SEQ ID NO: 522262 - DNA, 19 bp, Mus musculus
  siRNA target sequence for Dst (NM_133833.1,8831-8849).
gcgtctgcgaggtagataa

SEQ ID NO: 522263 - DNA, 19 bp, Mus musculus
  siRNA target sequence for Dst (NM_133833.1,8832-8850).
cgtctgcgaggtagataaa

SEQ ID NO: 522264 - DNA, 19 bp, Mus musculus
  siRNA target sequence for Dst (NM_133833.1,8835-8853).
ctgcgaggtagataaagaa

SEQ ID NO: 522265 - DNA, 19 bp, Mus musculus
  siRNA target sequence for Dst (NM_133833.1,8857-8875).
gtcacggaggagaatcagt

SEQ ID NO: 522266 - DNA, 19 bp, Mus musculus
  siRNA target sequence for Dst (NM_133833.1,8874-8892).
gtcattgatggaaaaggta

SEQ ID NO: 522267 - DNA, 19 bp, Mus musculus
  siRNA target sequence for Dst (NM_133833.1,8876-8894).
cattgatggaaaaggtaaa

SEQ ID NO: 522268 - DNA, 19 bp, Mus musculus
  siRNA target sequence for Dst (NM_133833.1,9038-9056).
gaccccaggcgtacagtaa

SEQ ID NO: 522269 - DNA, 19 bp, Mus musculus
  siRNA target sequence for Dst (NM_133833.1,9040-9058).
ccccaggcgtacagtaaca

SEQ ID NO: 522270 - DNA, 19 bp, Mus musculus
  siRNA target sequence for Dst (NM_133833.1,9041-9059).
cccaggcgtacagtaacaa

SEQ ID NO: 522271 - DNA, 19 bp, Mus musculus
  siRNA target sequence for Dst (NM_133833.1,9112-9130).
caggtagacgaggcaaaaa

SEQ ID NO: 522272 - DNA, 19 bp, Mus musculus
  siRNA target sequence for Dst (NM_133833.1,9173-9191).
gaacctctgatgtgttgtt

SEQ ID NO: 522273 - DNA, 19 bp, Mus musculus
  siRNA target sequence for Dst (NM_133833.1,9238-9256).
gtggacgagaagtgttctt

SEQ ID NO: 522274 - DNA, 19 bp, Mus musculus
  siRNA target sequence for Dst (NM_133833.1,9243-9261).
cgagaagtgttctttctta

SEQ ID NO: 522275 - DNA, 19 bp, Mus musculus
  siRNA target sequence for Dst (NM_133833.1,9397-9415).
gcgtgcatgcagacctttt

SEQ ID NO: 522276 - DNA, 19 bp, Mus musculus
  siRNA target sequence for Dst (NM_133833.1,9512-9530).
gagtcaagagggacttaga

SEQ ID NO: 522277 - DNA, 19 bp, Mus musculus
  siRNA target sequence for Dst (NM_133833.1,9695-9713).
gtacagaaaccgagacaat

SEQ ID NO: 522278 - DNA, 19 bp, Mus musculus
  siRNA target sequence for Dst (NM_133833.1,9698-9716).
cagaaaccgagacaatcaa

SEQ ID NO: 522279 - DNA, 19 bp, Mus musculus
  siRNA target sequence for Dst (NM_133833.1,9724-9742).
cttgatgtgtttaaggtat

SEQ ID NO: 522280 - DNA, 19 bp, Mus musculus
  siRNA target sequence for Dst (NM_133833.1,9795-9813).
gttaggccaaggccttatt

SEQ ID NO: 522281 - DNA, 19 bp, Mus musculus
  siRNA target sequence for Dst (NM_133833.1,9881-9899).
ggaagactctcaataagaa

SEQ ID NO: 522282 - DNA, 19 bp, Mus musculus
  siRNA target sequence for Dst (NM_133833.1,10022-10040).
ctccgtccgctgagttcaa

SEQ ID NO: 522283 - DNA, 19 bp, Mus musculus
  siRNA target sequence for Dst (NM_133833.1,10026-10044).
gtccgctgagttcaaagta

SEQ ID NO: 522284 - DNA, 19 bp, Mus musculus
  siRNA target sequence for Dst (NM_133833.1,10103-10121).
ctacggtggaggtgatcaa

SEQ ID NO: 522285 - DNA, 19 bp, Mus musculus
  siRNA target sequence for Dst (NM_133833.1,10945-10963).
gcagcagatgccgagttat

SEQ ID NO: 522286 - DNA, 19 bp, Mus musculus
  siRNA target sequence for Dst (NM_133833.1,11088-11106).
catcattgatgaacttgtt

SEQ ID NO: 522287 - DNA, 19 bp, Mus musculus
  siRNA target sequence for Dst (NM_133833.1,11104-11122).
gttacgtctgggcataaaa

SEQ ID NO: 522288 - DNA, 19 bp, Mus musculus
  siRNA target sequence for Dst (NM_133833.1,11108-11126).
cgtctgggcataaaatcat

SEQ ID NO: 522289 - DNA, 19 bp, Mus musculus
  siRNA target sequence for Dst (NM_133833.1,11197-11215).
gccgtctgccagatcaact

SEQ ID NO: 522290 - DNA, 19 bp, Mus musculus
  siRNA target sequence for Dst (NM_133833.1,11269-11287).
gagacctatgaggaacttt

SEQ ID NO: 522291 - DNA, 19 bp, Mus musculus
  siRNA target sequence for Dst (NM_133833.1,11291-11309).
cctggctaacggaaacaca

SEQ ID NO: 522292 - DNA, 19 bp, Mus musculus
  siRNA target sequence for Dst (NM_133833.1,11292-11310).
ctggctaacggaaacacaa

SEQ ID NO: 522293 - DNA, 19 bp, Mus musculus
  siRNA target sequence for Dst (NM_133833.1,11302-11320).
gaaacacaacgaatcatct

SEQ ID NO: 522294 - DNA, 19 bp, Mus musculus
  siRNA target sequence for Dst (NM_133833.1,11381-11399).
ggcaacttcgagaactgat

SEQ ID NO: 522295 - DNA, 19 bp, Mus musculus
  siRNA target sequence for Dst (NM_133833.1,11382-11400).
gcaacttcgagaactgata

SEQ ID NO: 522296 - DNA, 19 bp, Mus musculus
  siRNA target sequence for Dst (NM_133833.1,11406-11424).
gcacaagccacacatagat

SEQ ID NO: 522297 - DNA, 19 bp, Mus musculus
  siRNA target sequence for Dst (NM_133833.1,11407-11425).
cacaagccacacatagata

SEQ ID NO: 522298 - DNA, 19 bp, Mus musculus
  siRNA target sequence for Dst (NM_133833.1,11416-11434).
cacatagataagatgaaca

SEQ ID NO: 522299 - DNA, 19 bp, Mus musculus
  siRNA target sequence for Dst (NM_133833.1,11506-11524).
gacaccctctacagtcaaa

SEQ ID NO: 522300 - DNA, 19 bp, Mus musculus
  siRNA target sequence for Dst (NM_133833.1,11510-11528).
ccctctacagtcaaattaa

SEQ ID NO: 522301 - DNA, 19 bp, Mus musculus
  siRNA target sequence for Dst (NM_133833.1,11511-11529).
cctctacagtcaaattaaa

SEQ ID NO: 522302 - DNA, 19 bp, Mus musculus
  siRNA target sequence for Dst (NM_133833.1,11544-11562).
gcgagctgtggttcttgat

SEQ ID NO: 522303 - DNA, 19 bp, Mus musculus
  siRNA target sequence for Dst (NM_133833.1,11582-11600).
cccagtttcatgacaagat

SEQ ID NO: 522304 - DNA, 19 bp, Mus musculus
  siRNA target sequence for Dst (NM_133833.1,11783-11801).
gatccgagggcactgaaaa

SEQ ID NO: 522305 - DNA, 19 bp, Mus musculus
  siRNA target sequence for Dst (NM_133833.1,11786-11804).
ccgagggcactgaaaaaga

SEQ ID NO: 522306 - DNA, 19 bp, Mus musculus
  siRNA target sequence for Dst (NM_133833.1,11816-11834).
gagctgtacaggataagtt

SEQ ID NO: 522307 - DNA, 19 bp, Mus musculus
  siRNA target sequence for Dst (NM_133833.1,11911-11929).
gagctagcggagaaattct

SEQ ID NO: 522308 - DNA, 19 bp, Mus musculus
  siRNA target sequence for Dst (NM_133833.1,12133-12151).
cctgacaaacccattgtca

SEQ ID NO: 522309 - DNA, 19 bp, Mus musculus
  siRNA target sequence for Dst (NM_133833.1,12176-12194).
cagcatgggattctctaaa

SEQ ID NO: 522310 - DNA, 19 bp, Mus musculus
  siRNA target sequence for Dst (NM_133833.1,12178-12196).
gcatgggattctctaaata

SEQ ID NO: 522311 - DNA, 19 bp, Mus musculus
  siRNA target sequence for Dst (NM_133833.1,12179-12197).
catgggattctctaaataa

SEQ ID NO: 522312 - DNA, 19 bp, Mus musculus
  siRNA target sequence for Dst (NM_133833.1,12259-12277).
gacggattgcagggaatat

SEQ ID NO: 522313 - DNA, 19 bp, Mus musculus
  siRNA target sequence for Dst (NM_133833.1,12263-12281).
gattgcagggaatattcga

SEQ ID NO: 522314 - DNA, 19 bp, Mus musculus
  siRNA target sequence for Dst (NM_133833.1,12345-12363).
cgtcaagcagcagattgaa

SEQ ID NO: 522315 - DNA, 19 bp, Mus musculus
  siRNA target sequence for Dst (NM_133833.1,12518-12536).
gcctggacgagcgaattgt

SEQ ID NO: 522316 - DNA, 19 bp, Mus musculus
  siRNA target sequence for Dst (NM_133833.1,12552-12570).
gctcgagggtgctctctta

SEQ ID NO: 522317 - DNA, 19 bp, Mus musculus
  siRNA target sequence for Dst (NM_133833.1,12627-12645).
caaaggcttgctaagtgaa

SEQ ID NO: 522318 - DNA, 19 bp, Mus musculus
  siRNA target sequence for Dst (NM_133833.1,12664-12682).
gacccgaaagccattgaga

SEQ ID NO: 522319 - DNA, 19 bp, Mus musculus
  siRNA target sequence for Dst (NM_133833.1,12681-12699).
gattgaactggctaagcat

SEQ ID NO: 522320 - DNA, 19 bp, Mus musculus
  siRNA target sequence for Dst (NM_133833.1,12737-12755).
cggtagaagccgtcaacaa

SEQ ID NO: 522321 - DNA, 19 bp, Mus musculus
  siRNA target sequence for Dst (NM_133833.1,12738-12756).
ggtagaagccgtcaacaaa

SEQ ID NO: 522322 - DNA, 19 bp, Mus musculus
  siRNA target sequence for Dst (NM_133833.1,12747-12765).
cgtcaacaaagcaggaaat

SEQ ID NO: 522323 - DNA, 19 bp, Mus musculus
  siRNA target sequence for Dst (NM_133833.1,12832-12850).
cagcgctggcaggatattt

SEQ ID NO: 522324 - DNA, 19 bp, Mus musculus
  siRNA target sequence for Dst (NM_133833.1,12908-12926).
ggttccacggtgaaatcga

SEQ ID NO: 522325 - DNA, 19 bp, Mus musculus
  siRNA target sequence for Dst (NM_133833.1,12909-12927).
gttccacggtgaaatcgaa

SEQ ID NO: 522326 - DNA, 19 bp, Mus musculus
  siRNA target sequence for Dst (NM_133833.1,12959-12977).
gtcatctcttggcatctaa

SEQ ID NO: 522327 - DNA, 19 bp, Mus musculus
  siRNA target sequence for Dst (NM_133833.1,13299-13317).
ggcttctcggccaagtctt

SEQ ID NO: 522328 - DNA, 19 bp, Mus musculus
  siRNA target sequence for Dst (NM_133833.1,13304-13322).
ctcggccaagtcttatctt

SEQ ID NO: 522329 - DNA, 19 bp, Mus musculus
  siRNA target sequence for Dst (NM_133833.1,13359-13377).
ctttgcgaacgaagtgaat

SEQ ID NO: 522330 - DNA, 19 bp, Mus musculus
  siRNA target sequence for Dst (NM_133833.1,13364-13382).
cgaacgaagtgaattctca

SEQ ID NO: 522331 - DNA, 19 bp, Mus musculus
  siRNA target sequence for Dst (NM_133833.1,13379-13397).
ctcaccgcgagcagataat

SEQ ID NO: 522332 - DNA, 19 bp, Mus musculus
  siRNA target sequence for Dst (NM_133833.1,13384-13402).
cgcgagcagataatagagt

SEQ ID NO: 522333 - DNA, 19 bp, Mus musculus
  siRNA target sequence for Dst (NM_133833.1,13447-13465).
gatgtcgtgctcatcaaga

SEQ ID NO: 522334 - DNA, 19 bp, Mus musculus
  siRNA target sequence for Dst (NM_133833.1,13763-13781).
cctccctggcagatgacaa

SEQ ID NO: 522335 - DNA, 19 bp, Mus musculus
  siRNA target sequence for Dst (NM_133833.1,13794-13812).
caacatgctgagtgaactt

SEQ ID NO: 522336 - DNA, 19 bp, Mus musculus
  siRNA target sequence for Dst (NM_133833.1,13906-13924).
ctgcaggccctcattgatt

SEQ ID NO: 522337 - DNA, 19 bp, Mus musculus
  siRNA target sequence for Dst (NM_133833.1,13966-13984).
gtccacggggacattgact

SEQ ID NO: 522338 - DNA, 19 bp, Mus musculus
  siRNA target sequence for Dst (NM_133833.1,14265-14283).
gcaaaccctgcgtttccat

SEQ ID NO: 522339 - DNA, 19 bp, Mus musculus
  siRNA target sequence for Dst (NM_133833.1,14309-14327).
ctctccggactctcattga

SEQ ID NO: 522340 - DNA, 19 bp, Mus musculus
  siRNA target sequence for Dst (NM_133833.1,14318-14336).
ctctcattgagcaacataa

SEQ ID NO: 522341 - DNA, 19 bp, Mus musculus
  siRNA target sequence for Dst (NM_133833.1,14419-14437).
caccctgactccattacca

SEQ ID NO: 522342 - DNA, 19 bp, Mus musculus
  siRNA target sequence for Dst (NM_133833.1,14425-14443).
gactccattaccaccatta

SEQ ID NO: 522343 - DNA, 19 bp, Mus musculus
  siRNA target sequence for Dst (NM_133833.1,14429-14447).
ccattaccaccattaagca

SEQ ID NO: 522344 - DNA, 19 bp, Mus musculus
  siRNA target sequence for Dst (NM_133833.1,14595-14613).
cacactgaccgagaaagat

SEQ ID NO: 522345 - DNA, 19 bp, Mus musculus
  siRNA target sequence for Dst (NM_133833.1,14700-14718).
gcccgacgttgataaagtt

SEQ ID NO: 522346 - DNA, 19 bp, Mus musculus
  siRNA target sequence for Dst (NM_133833.1,14701-14719).
cccgacgttgataaagtta

SEQ ID NO: 522347 - DNA, 19 bp, Mus musculus
  siRNA target sequence for Dst (NM_133833.1,14746-14764).
gaccctccctcgttacagt

SEQ ID NO: 522348 - DNA, 19 bp, Mus musculus
  siRNA target sequence for Dst (NM_133833.1,14811-14829).
cccagcctcgggcttctat

SEQ ID NO: 522349 - DNA, 19 bp, Mus musculus
  siRNA target sequence for Dst (NM_133833.1,14815-14833).
gcctcgggcttctatccat

SEQ ID NO: 522350 - DNA, 19 bp, Mus musculus
  siRNA target sequence for Dst (NM_133833.1,14991-15009).
cgacatctggcggaaaaaa

SEQ ID NO: 522351 - DNA, 19 bp, Mus musculus
  siRNA target sequence for Dst (NM_133833.1,15018-15036).
gtggatgaaccataagaaa

SEQ ID NO: 522352 - DNA, 19 bp, Mus musculus
  siRNA target sequence for Dst (NM_133833.1,15155-15173).
gcgccgtggcagacatctt

SEQ ID NO: 522353 - DNA, 19 bp, Mus musculus
  siRNA target sequence for Dst (NM_133833.1,15290-15308).
ggcaggtagccaagtgtaa

SEQ ID NO: 522354 - DNA, 19 bp, Mus musculus
  siRNA target sequence for Dst (NM_133833.1,15292-15310).
caggtagccaagtgtaagt

SEQ ID NO: 522355 - DNA, 19 bp, Mus musculus
  siRNA target sequence for Dst (NM_133833.1,15294-15312).
ggtagccaagtgtaagtgt

SEQ ID NO: 522356 - DNA, 19 bp, Mus musculus
  siRNA target sequence for Dst (NM_133833.1,15309-15327).
gtgtgccaagcgattccaa

SEQ ID NO: 522357 - DNA, 19 bp, Mus musculus
  siRNA target sequence for Dst (NM_133833.1,15331-15349).
gaacagatcggtgataaca

SEQ ID NO: 522358 - DNA, 19 bp, Mus musculus
  siRNA target sequence for Dst (NM_133833.1,15334-15352).
cagatcggtgataacaaat

SEQ ID NO: 522359 - DNA, 19 bp, Mus musculus
  siRNA target sequence for Dst (NM_133833.1,15453-15471).
ggctctggatgagttctta

SEQ ID NO: 522360 - DNA, 19 bp, Mus musculus
  siRNA target sequence for Dst (NM_133833.1,15459-15477).
ggatgagttcttagtgaaa

SEQ ID NO: 522361 - DNA, 19 bp, Mus musculus
  siRNA target sequence for Dst (NM_133833.1,15499-15517).
catcacgggagtaaaatgt

SEQ ID NO: 522362 - DNA, 19 bp, Mus musculus
  siRNA target sequence for Dst (NM_133833.1,15519-15537).
gcgttcggaatcaaactct

SEQ ID NO: 522363 - DNA, 19 bp, Mus musculus
  siRNA target sequence for Dst (NM_133833.1,15520-15538).
cgttcggaatcaaactctt

SEQ ID NO: 522364 - DNA, 19 bp, Mus musculus
  siRNA target sequence for Dst (NM_133833.1,15524-15542).
cggaatcaaactcttcaat

SEQ ID NO: 522365 - DNA, 19 bp, Mus musculus
  siRNA target sequence for Dst (NM_133833.1,15526-15544).
gaatcaaactcttcaatta

SEQ ID NO: 522366 - DNA, 19 bp, Mus musculus
  siRNA target sequence for Dst (NM_133833.1,15555-15573).
gcctactctagctaaagga

SEQ ID NO: 522367 - DNA, 19 bp, Mus musculus
  siRNA target sequence for Dst (NM_133833.1,15837-15855).
ggaggacagcgccttgata

SEQ ID NO: 522368 - DNA, 19 bp, Mus musculus
  siRNA target sequence for Dst (NM_133833.1,15841-15859).
gacagcgccttgataacga

SEQ ID NO: 522369 - DNA, 19 bp, Mus musculus
  siRNA target sequence for Dst (NM_133833.1,15975-15993).
cgcgtccgactttgacatt

SEQ ID NO: 522370 - DNA, 19 bp, Mus musculus
  siRNA target sequence for Dst (NM_133833.1,15976-15994).
gcgtccgactttgacattt

SEQ ID NO: 522371 - DNA, 19 bp, Mus musculus
  siRNA target sequence for Dst (NM_133833.1,15978-15996).
gtccgactttgacatttca

SEQ ID NO: 522372 - DNA, 19 bp, Mus musculus
  siRNA target sequence for Dst (NM_133833.1,15981-15999).
cgactttgacatttcagaa

SEQ ID NO: 522373 - DNA, 19 bp, Mus musculus
  siRNA target sequence for Dst (NM_133833.1,16118-16136).
cacctgccagcaaattaga

SEQ ID NO: 522374 - DNA, 19 bp, Mus musculus
  siRNA target sequence for Dst (NM_134448.1,4653-4671).
gaagccggataaagtgatt

SEQ ID NO: 522375 - DNA, 19 bp, Mus musculus
  siRNA target sequence for Dst (NM_134448.1,4672-4690).
gcaggcaccatcaatcaga

SEQ ID NO: 522376 - DNA, 19 bp, Mus musculus
  siRNA target sequence for Dst (NM_134448.1,4711-4729).
gtctttcaggcagttttaa

SEQ ID NO: 522377 - DNA, 19 bp, Mus musculus
  siRNA target sequence for Dst (NM_134448.1,4730-4748).
gaggccttattgactatga

SEQ ID NO: 522378 - DNA, 19 bp, Mus musculus
  siRNA target sequence for Dst (NM_134448.1,4768-4786).
gaggcacagctagtgatta

SEQ ID NO: 522379 - DNA, 19 bp, Mus musculus
  siRNA target sequence for Dst (NM_134448.1,4770-4788).
ggcacagctagtgattact

SEQ ID NO: 522380 - DNA, 19 bp, Mus musculus
  siRNA target sequence for Dst (NM_134448.1,4776-4794).
gctagtgattactggttta

SEQ ID NO: 522381 - DNA, 19 bp, Mus musculus
  siRNA target sequence for Dst (NM_134448.1,4777-4795).
ctagtgattactggtttaa

SEQ ID NO: 522382 - DNA, 19 bp, Mus musculus
  siRNA target sequence for Dst (NM_134448.1,4780-4798).
gtgattactggtttaattt

SEQ ID NO: 522383 - DNA, 19 bp, Mus musculus
  siRNA target sequence for Dst (NM_134448.1,4801-4819).
ccagagttaagaaagtgtt

SEQ ID NO: 522384 - DNA, 19 bp, Mus musculus
  siRNA target sequence for Dst (NM_134448.1,4841-4859).
gccacggcctcattgatga

SEQ ID NO: 522385 - DNA, 19 bp, Mus musculus
  siRNA target sequence for Dst (NM_134448.1,4842-4860).
ccacggcctcattgatgaa

SEQ ID NO: 522386 - DNA, 19 bp, Mus musculus
  siRNA target sequence for Dst (NM_134448.1,4845-4863).
cggcctcattgatgaacaa

SEQ ID NO: 522387 - DNA, 19 bp, Mus musculus
  siRNA target sequence for Dst (NM_134448.1,4848-4866).
cctcattgatgaacaagtt

SEQ ID NO: 522388 - DNA, 19 bp, Mus musculus
  siRNA target sequence for Dst (NM_134448.1,4861-4879).
caagttctgcgccaactaa

SEQ ID NO: 522389 - DNA, 19 bp, Mus musculus
  siRNA target sequence for Dst (NM_134448.1,4869-4887).
gcgccaactaaaagaacta

SEQ ID NO: 522390 - DNA, 19 bp, Mus musculus
  siRNA target sequence for Dst (NM_134448.1,4870-4888).
cgccaactaaaagaactaa

SEQ ID NO: 522391 - DNA, 19 bp, Mus musculus
  siRNA target sequence for Dst (NM_134448.1,4871-4889).
gccaactaaaagaactaaa

SEQ ID NO: 522392 - DNA, 19 bp, Mus musculus
  siRNA target sequence for Dst (NM_134448.1,4872-4890).
ccaactaaaagaactaaat

SEQ ID NO: 522393 - DNA, 19 bp, Mus musculus
  siRNA target sequence for Dst (NM_134448.1,4894-4912).
gcaaagcagctcatttcta

SEQ ID NO: 522394 - DNA, 19 bp, Mus musculus
  siRNA target sequence for Dst (NM_134448.1,4958-4976).
gcatggtctcagaatccat

SEQ ID NO: 522395 - DNA, 19 bp, Mus musculus
  siRNA target sequence for Dst (NM_134448.1,5081-5099).
cctccgccttgttttccaa

SEQ ID NO: 522396 - DNA, 19 bp, Mus musculus
  siRNA target sequence for Dst (NM_134448.1,5112-5130).
gcaagacacttgcaaagat

SEQ ID NO: 522397 - DNA, 19 bp, Mus musculus
  siRNA target sequence for Dst (NM_134448.1,5120-5138).
cttgcaaagatcttattga

SEQ ID NO: 522398 - DNA, 19 bp, Mus musculus
  siRNA target sequence for Dst (NM_134448.1,5154-5172).
gaaggtatctttaactgat

SEQ ID NO: 522399 - DNA, 19 bp, Mus musculus
  siRNA target sequence for Dst (NM_134448.1,5373-5391).
ctccggtcagaaaatgact

SEQ ID NO: 522400 - DNA, 19 bp, Mus musculus
  siRNA target sequence for Dst (NM_134448.1,5516-5534).
cagtacagtgtgagttgat

SEQ ID NO: 522401 - DNA, 19 bp, Mus musculus
  siRNA target sequence for Dst (NM_134448.1,5518-5536).
gtacagtgtgagttgataa

SEQ ID NO: 522402 - DNA, 19 bp, Mus musculus
  siRNA target sequence for Dst (NM_134448.1,5594-5612).
ggccccactctggtgaaat

SEQ ID NO: 522403 - DNA, 19 bp, Mus musculus
  siRNA target sequence for Dst (NM_134448.1,5595-5613).
gccccactctggtgaaata

SEQ ID NO: 522404 - DNA, 19 bp, Mus musculus
  siRNA target sequence for Dst (NM_134448.1,5597-5615).
cccactctggtgaaatatt

SEQ ID NO: 522405 - DNA, 19 bp, Mus musculus
  siRNA target sequence for Dst (NM_134448.1,5643-5661).
gttgattacaaatgaatta

SEQ ID NO: 522406 - DNA, 19 bp, Mus musculus
  siRNA target sequence for Dst (NM_134448.1,5755-5773).
gggatcatagataacaaca

SEQ ID NO: 522407 - DNA, 19 bp, Mus musculus
  siRNA target sequence for Dst (NM_134448.1,5769-5787).
caacacagcatcggtttta

SEQ ID NO: 522408 - DNA, 19 bp, Mus musculus
  siRNA target sequence for Dst (NM_134448.1,5816-5834).
ctgatttaggagatttgga

SEQ ID NO: 522409 - DNA, 19 bp, Mus musculus
  siRNA target sequence for Dst (NM_134448.1,5824-5842).
ggagatttggaagattgta

SEQ ID NO: 522410 - DNA, 19 bp, Mus musculus
  siRNA target sequence for Dst (NM_134448.1,5850-5868).
caagaggtggctctctttt

SEQ ID NO: 522411 - DNA, 19 bp, Mus musculus
  siRNA target sequence for Dst (NM_134448.1,5853-5871).
gaggtggctctctttttgt

SEQ ID NO: 522412 - DNA, 19 bp, Mus musculus
  siRNA target sequence for Dst (NM_134448.1,5880-5898).
gccatccacagttcatgat

SEQ ID NO: 522413 - DNA, 19 bp, Mus musculus
  siRNA target sequence for Dst (NM_134448.1,5881-5899).
ccatccacagttcatgatt

SEQ ID NO: 522414 - DNA, 19 bp, Mus musculus
  siRNA target sequence for Dst (NM_134448.1,5882-5900).
catccacagttcatgatta

SEQ ID NO: 522415 - DNA, 19 bp, Mus musculus
  siRNA target sequence for Dst (NM_134448.1,5970-5988).
gttattcctatcctattta

SEQ ID NO: 522416 - DNA, 19 bp, Mus musculus
  siRNA target sequence for Dst (NM_134448.1,6214-6232).
caccccggacataaagagt

SEQ ID NO: 522417 - DNA, 19 bp, Mus musculus
  siRNA target sequence for Dst (NM_134448.1,6243-6261).
cgcaaagtgggacatgaat

SEQ ID NO: 522418 - DNA, 19 bp, Mus musculus
  siRNA target sequence for Dst (NM_134448.1,6279-6297).
gggaaacaatgatagcaat

SEQ ID NO: 522419 - DNA, 19 bp, Mus musculus
  siRNA target sequence for Dst (NM_134448.1,6381-6399).
caaacctacgtcatcttca

SEQ ID NO: 522420 - DNA, 19 bp, Mus musculus
  siRNA target sequence for Dst (NM_134448.1,6430-6448).
gagtctggtagcatactta

SEQ ID NO: 522421 - DNA, 19 bp, Mus musculus
  siRNA target sequence for Dst (NM_134448.1,6432-6450).
gtctggtagcatacttaaa

SEQ ID NO: 522422 - DNA, 19 bp, Mus musculus
  siRNA target sequence for Dst (NM_134448.1,6469-6487).
gagcctgttacaaaaaagt

SEQ ID NO: 522423 - DNA, 19 bp, Mus musculus
  siRNA target sequence for Dst (NM_134448.1,6504-6522).
ccattctcattttttgaca

SEQ ID NO: 522424 - DNA, 19 bp, Mus musculus
  siRNA target sequence for Dst (NM_134448.1,6538-6556).
ccttgtgattcgaatgaaa

SEQ ID NO: 522425 - DNA, 19 bp, Mus musculus
  siRNA target sequence for Dst (NM_134448.1,6585-6603).
cccctctgtctttgactat

SEQ ID NO: 522426 - DNA, 19 bp, Mus musculus
  siRNA target sequence for Dst (NM_134448.1,6586-6604).
ccctctgtctttgactatt

SEQ ID NO: 522427 - DNA, 19 bp, Mus musculus
  siRNA target sequence for Dst (NM_134448.1,6610-6628).
cggctgagtgccctgttaa

SEQ ID NO: 522428 - DNA, 19 bp, Mus musculus
  siRNA target sequence for Dst (NM_134448.1,6646-6664).
cagagtcaggggcgtttta

SEQ ID NO: 522429 - DNA, 19 bp, Mus musculus
  siRNA target sequence for Dst (NM_134448.1,6648-6666).
gagtcaggggcgttttagt

SEQ ID NO: 522430 - DNA, 19 bp, Mus musculus
  siRNA target sequence for Dst (NM_134448.1,6650-6668).
gtcaggggcgttttagtga

SEQ ID NO: 522431 - DNA, 19 bp, Mus musculus
  siRNA target sequence for Dst (NM_134448.1,6654-6672).
ggggcgttttagtgataca

SEQ ID NO: 522432 - DNA, 19 bp, Mus musculus
  siRNA target sequence for Dst (NM_134448.1,6657-6675).
gcgttttagtgatacaagt

SEQ ID NO: 522433 - DNA, 19 bp, Mus musculus
  siRNA target sequence for Dst (NM_134448.1,6658-6676).
cgttttagtgatacaagta

SEQ ID NO: 522434 - DNA, 19 bp, Mus musculus
  siRNA target sequence for Dst (NM_134448.1,6849-6867).
gtgtagcagttctcaagta

SEQ ID NO: 522435 - DNA, 19 bp, Mus musculus
  siRNA target sequence for Dst (NM_134448.1,6854-6872).
gcagttctcaagtacacta

SEQ ID NO: 522436 - DNA, 19 bp, Mus musculus
  siRNA target sequence for Dst (NM_134448.1,6855-6873).
cagttctcaagtacactat

SEQ ID NO: 522437 - DNA, 19 bp, Mus musculus
  siRNA target sequence for Dst (NM_134448.1,6857-6875).
gttctcaagtacactatca

SEQ ID NO: 522438 - DNA, 19 bp, Mus musculus
  siRNA target sequence for Dst (NM_134448.1,6992-7010).
gtggttcccgcaatgacaa

SEQ ID NO: 522439 - DNA, 19 bp, Mus musculus
  siRNA target sequence for Dst (NM_134448.1,7022-7040).
gtggcccactgtcacataa

SEQ ID NO: 522440 - DNA, 19 bp, Mus musculus
  siRNA target sequence for Dst (NM_134448.1,7047-7065).
cattgatgctggtgactat

SEQ ID NO: 522441 - DNA, 19 bp, Mus musculus
  siRNA target sequence for Dst (NM_134448.1,7137-7155).
cacccccttgtttgaagat

SEQ ID NO: 522442 - DNA, 19 bp, Mus musculus
  siRNA target sequence for Dst (NM_134448.1,7139-7157).
cccccttgtttgaagatga

SEQ ID NO: 522443 - DNA, 19 bp, Mus musculus
  siRNA target sequence for Dst (NM_134448.1,7161-7179).
ccatgactctctaatcctt

SEQ ID NO: 522444 - DNA, 19 bp, Mus musculus
  siRNA target sequence for Dst (NM_134448.1,7184-7202).
gtgacgaccgtgactgttt

SEQ ID NO: 522445 - DNA, 19 bp, Mus musculus
  siRNA target sequence for Dst (NM_134448.1,7188-7206).
cgaccgtgactgtttgcaa

SEQ ID NO: 522446 - DNA, 19 bp, Mus musculus
  siRNA target sequence for Dst (NM_134448.1,7331-7349).
gcttaggtgtggagaacaa

SEQ ID NO: 522447 - DNA, 19 bp, Mus musculus
  siRNA target sequence for Dst (NM_134448.1,7332-7350).
cttaggtgtggagaacaaa

SEQ ID NO: 522448 - DNA, 19 bp, Mus musculus
  siRNA target sequence for Dst (NM_134448.1,7367-7385).
gctttcctgtaggtattga

SEQ ID NO: 522449 - DNA, 19 bp, Mus musculus
  siRNA target sequence for Dst (NM_134448.1,7384-7402).
gagaaacctgagttgtact

SEQ ID NO: 522450 - DNA, 19 bp, Mus musculus
  siRNA target sequence for Dst (NM_134448.1,7386-7404).
gaaacctgagttgtactta

SEQ ID NO: 522451 - DNA, 19 bp, Mus musculus
  siRNA target sequence for Dst (NM_134448.1,7405-7423).
gctggcgagaaagagttta

SEQ ID NO: 522452 - DNA, 19 bp, Mus musculus
  siRNA target sequence for Dst (NM_134448.1,7406-7424).
ctggcgagaaagagtttaa

SEQ ID NO: 522453 - DNA, 19 bp, Mus musculus
  siRNA target sequence for Dst (NM_134448.1,7408-7426).
ggcgagaaagagtttaatt

SEQ ID NO: 522454 - DNA, 19 bp, Mus musculus
  siRNA target sequence for Dst (NM_134448.1,7447-7465).
gtggagtctgtgtctgaaa

SEQ ID NO: 522455 - DNA, 19 bp, Mus musculus
  siRNA target sequence for Dst (NM_134448.1,7506-7524).
gttgactgagggtgagatt

SEQ ID NO: 522456 - DNA, 19 bp, Mus musculus
  siRNA target sequence for Dst (NM_134448.1,7509-7527).
gactgagggtgagattata

SEQ ID NO: 522457 - DNA, 19 bp, Mus musculus
  siRNA target sequence for Dst (NM_134448.1,7539-7557).
gaggttaggagcttcgtta

SEQ ID NO: 522458 - DNA, 19 bp, Mus musculus
  siRNA target sequence for Dst (NM_134448.1,7630-7648).
ggggtaggctccatacaaa

SEQ ID NO: 522459 - DNA, 19 bp, Mus musculus
  siRNA target sequence for Dst (NM_134448.1,7632-7650).
ggtaggctccatacaaagt

SEQ ID NO: 522460 - DNA, 19 bp, Mus musculus
  siRNA target sequence for Dst (NM_134448.1,7633-7651).
gtaggctccatacaaagta

SEQ ID NO: 522461 - DNA, 19 bp, Mus musculus
  siRNA target sequence for Dst (NM_134448.1,7654-7672).
gaaagctacaggccttata

SEQ ID NO: 522462 - DNA, 19 bp, Mus musculus
  siRNA target sequence for Dst (NM_134448.1,7790-7808).
ctgaccctacccagttgta

SEQ ID NO: 522463 - DNA, 19 bp, Mus musculus
  siRNA target sequence for Dst (NM_134448.1,7809-7827).
cactgctatcaggaaagaa

SEQ ID NO: 522464 - DNA, 19 bp, Mus musculus
  siRNA target sequence for Dst (NM_134448.1,7830-7848).
cgggggtgaaacccaaaat

SEQ ID NO: 522465 - DNA, 19 bp, Mus musculus
  siRNA target sequence for Dst (NM_134448.1,7832-7850).
ggggtgaaacccaaaatgt

SEQ ID NO: 522466 - DNA, 19 bp, Mus musculus
  siRNA target sequence for Dst (NM_134448.1,7834-7852).
ggtgaaacccaaaatgtca

SEQ ID NO: 522467 - DNA, 19 bp, Mus musculus
  siRNA target sequence for Dst (NM_134448.1,7869-7887).
ggacaaaacgcacagttat

SEQ ID NO: 522468 - DNA, 19 bp, Mus musculus
  siRNA target sequence for Dst (NM_134448.1,7870-7888).
gacaaaacgcacagttata

SEQ ID NO: 522469 - DNA, 19 bp, Mus musculus
  siRNA target sequence for Dst (NM_134448.1,7872-7890).
caaaacgcacagttatagt

SEQ ID NO: 522470 - DNA, 19 bp, Mus musculus
  siRNA target sequence for Dst (NM_134448.1,7881-7899).
cagttatagtccgttagaa

SEQ ID NO: 522471 - DNA, 19 bp, Mus musculus
  siRNA target sequence for Dst (NM_134448.1,8022-8040).
cactcacatggcaactaaa

SEQ ID NO: 522472 - DNA, 19 bp, Mus musculus
  siRNA target sequence for Dst (NM_134448.1,8159-8177).
gcccatcttctgacaacat

SEQ ID NO: 522473 - DNA, 19 bp, Mus musculus
  siRNA target sequence for Dst (NM_134448.1,8160-8178).
cccatcttctgacaacatt

SEQ ID NO: 522474 - DNA, 19 bp, Mus musculus
  siRNA target sequence for Dst (NM_134448.1,8162-8180).
catcttctgacaacattgt

SEQ ID NO: 522475 - DNA, 19 bp, Mus musculus
  siRNA target sequence for Dst (NM_134448.1,8218-8236).
gatggccatttgtcattta

SEQ ID NO: 522476 - DNA, 19 bp, Mus musculus
  siRNA target sequence for Dst (NM_134448.1,8329-8347).
cgggaaatgggctttcaga

SEQ ID NO: 522477 - DNA, 19 bp, Mus musculus
  siRNA target sequence for Dst (NM_134448.1,8330-8348).
gggaaatgggctttcagaa

SEQ ID NO: 522478 - DNA, 19 bp, Mus musculus
  siRNA target sequence for Dst (NM_134448.1,8426-8444).
cgacagagagcctcaacat

SEQ ID NO: 522479 - DNA, 19 bp, Mus musculus
  siRNA target sequence for Dst (NM_134448.1,8436-8454).
cctcaacatgggtaagagt

SEQ ID NO: 522480 - DNA, 19 bp, Mus musculus
  siRNA target sequence for Dst (NM_134448.1,8596-8614).
gagactcttgcagaaatat

SEQ ID NO: 522481 - DNA, 19 bp, Mus musculus
  siRNA target sequence for Dst (NM_134448.1,8725-8743).
gagactggtccgtgtactt

SEQ ID NO: 522482 - DNA, 19 bp, Mus musculus
  siRNA target sequence for Dst (NM_134448.1,8741-8759).
cttctttaggacattgtga

SEQ ID NO: 522483 - DNA, 19 bp, Mus musculus
  siRNA target sequence for Dst (NM_134448.1,8782-8800).
ctggaacccaacgaacata

SEQ ID NO: 522484 - DNA, 19 bp, Mus musculus
  siRNA target sequence for Dst (NM_134448.1,8824-8842).
cctcctaccgtgaaagata

SEQ ID NO: 522485 - DNA, 19 bp, Mus musculus
  siRNA target sequence for Dst (NM_134448.1,8825-8843).
ctcctaccgtgaaagataa

SEQ ID NO: 522486 - DNA, 19 bp, Mus musculus
  siRNA target sequence for Dst (NM_134448.1,8827-8845).
cctaccgtgaaagataact

SEQ ID NO: 522487 - DNA, 19 bp, Mus musculus
  siRNA target sequence for Dst (NM_134448.1,8828-8846).
ctaccgtgaaagataactt

SEQ ID NO: 522488 - DNA, 19 bp, Mus musculus
  siRNA target sequence for Dst (NM_134448.1,8833-8851).
gtgaaagataacttatgct

SEQ ID NO: 522489 - DNA, 19 bp, Mus musculus
  siRNA target sequence for Dst (NM_134448.1,8839-8857).
gataacttatgctctgtaa

SEQ ID NO: 522490 - DNA, 19 bp, Mus musculus
  siRNA target sequence for Dst (NM_134448.1,8909-8927).
ccgaggtccggctaagtga

SEQ ID NO: 522491 - DNA, 19 bp, Mus musculus
  siRNA target sequence for Dst (NM_134448.1,8910-8928).
cgaggtccggctaagtgat

SEQ ID NO: 522492 - DNA, 19 bp, Mus musculus
  siRNA target sequence for Dst (NM_134448.1,8929-8947).
gcttgtgtggaggaaagta

SEQ ID NO: 522493 - DNA, 19 bp, Mus musculus
  siRNA target sequence for Dst (NM_134448.1,8930-8948).
cttgtgtggaggaaagtat

SEQ ID NO: 522494 - DNA, 19 bp, Mus musculus
  siRNA target sequence for Dst (NM_134448.1,8976-8994).
gttcactccggaaaatagt

SEQ ID NO: 522495 - DNA, 19 bp, Mus musculus
  siRNA target sequence for Dst (NM_134448.1,9093-9111).
cacctccgctgacacttta

SEQ ID NO: 522496 - DNA, 19 bp, Mus musculus
  siRNA target sequence for Dst (NM_134448.1,9095-9113).
cctccgctgacactttaga

SEQ ID NO: 522497 - DNA, 19 bp, Mus musculus
  siRNA target sequence for Dst (NM_134448.1,9117-9135).
gggctgcccgcagttagaa

SEQ ID NO: 522498 - DNA, 19 bp, Mus musculus
  siRNA target sequence for Dst (NM_134448.1,9118-9136).
ggctgcccgcagttagaaa

SEQ ID NO: 522499 - DNA, 19 bp, Mus musculus
  siRNA target sequence for Dst (NM_134448.1,9261-9279).
cagtttagacaaagttcat

SEQ ID NO: 522500 - DNA, 19 bp, Mus musculus
  siRNA target sequence for Dst (NM_134448.1,9263-9281).
gtttagacaaagttcatat

SEQ ID NO: 522501 - DNA, 19 bp, Mus musculus
  siRNA target sequence for Dst (NM_134448.1,9310-9328).
gctggcacagggacgaaaa

SEQ ID NO: 522502 - DNA, 19 bp, Mus musculus
  siRNA target sequence for Dst (NM_134448.1,9313-9331).
ggcacagggacgaaaattt

SEQ ID NO: 522503 - DNA, 19 bp, Mus musculus
  siRNA target sequence for Dst (NM_134448.1,9320-9338).
ggacgaaaatttcaattca

SEQ ID NO: 522504 - DNA, 19 bp, Mus musculus
  siRNA target sequence for Dst (NM_134448.1,9414-9432).
cattagtaactcatcagaa

SEQ ID NO: 522505 - DNA, 19 bp, Mus musculus
  siRNA target sequence for Dst (NM_134448.1,9521-9539).
gcatctctgagttagctaa

SEQ ID NO: 522506 - DNA, 19 bp, Mus musculus
  siRNA target sequence for Dst (NM_134448.1,9522-9540).
catctctgagttagctaaa

SEQ ID NO: 522507 - DNA, 19 bp, Mus musculus
  siRNA target sequence for Dst (NM_134448.1,9527-9545).
ctgagttagctaaagtatt

SEQ ID NO: 522508 - DNA, 19 bp, Mus musculus
  siRNA target sequence for Dst (NM_134448.1,9529-9547).
gagttagctaaagtattaa

SEQ ID NO: 522509 - DNA, 19 bp, Mus musculus
  siRNA target sequence for Dst (NM_134448.1,9578-9596).
gccttgggtctgaattact

SEQ ID NO: 522510 - DNA, 19 bp, Mus musculus
  siRNA target sequence for Dst (NM_134448.1,9631-9649).
ctgtttgatgggtatgcaa

SEQ ID NO: 522511 - DNA, 19 bp, Mus musculus
  siRNA target sequence for Dst (NM_134448.1,9667-9685).
gaagctttggggcaaacat

SEQ ID NO: 522512 - DNA, 19 bp, Mus musculus
  siRNA target sequence for Dst (NM_134448.1,9873-9891).
gcattcagaaagtacatct

SEQ ID NO: 522513 - DNA, 19 bp, Mus musculus
  siRNA target sequence for Dst (NM_134448.1,9991-10009).
gttttgcttcaagatatga

SEQ ID NO: 522514 - DNA, 19 bp, Mus musculus
  siRNA target sequence for Dst (NM_134448.1,10008-10026).
gaaaccccccttagacaat

SEQ ID NO: 522515 - DNA, 19 bp, Mus musculus
  siRNA target sequence for Dst (NM_134448.1,10137-10155).
gttggcagaagaattctta

SEQ ID NO: 522516 - DNA, 19 bp, Mus musculus
  siRNA target sequence for Dst (NM_134448.1,10202-10220).
gcaaaagccaccaacgttt

SEQ ID NO: 522517 - DNA, 19 bp, Mus musculus
  siRNA target sequence for Dst (NM_134448.1,10203-10221).
caaaagccaccaacgttta

SEQ ID NO: 522518 - DNA, 19 bp, Mus musculus
  siRNA target sequence for Dst (NM_134448.1,10208-10226).
gccaccaacgtttacagaa

SEQ ID NO: 522519 - DNA, 19 bp, Mus musculus
  siRNA target sequence for Dst (NM_134448.1,10279-10297).
cttgcaatcaactctgaaa

SEQ ID NO: 522520 - DNA, 19 bp, Mus musculus
  siRNA target sequence for Dst (NM_134448.1,10310-10328).
ctgttcgtcatgaagactt

SEQ ID NO: 522521 - DNA, 19 bp, Mus musculus
  siRNA target sequence for Dst (NM_134448.1,10324-10342).
gacttcttacacaaactta

SEQ ID NO: 522522 - DNA, 19 bp, Mus musculus
  siRNA target sequence for Dst (NM_134448.1,10333-10351).
cacaaacttacatcctatt

SEQ ID NO: 522523 - DNA, 19 bp, Mus musculus
  siRNA target sequence for Dst (NM_134448.1,10335-10353).
caaacttacatcctattca

SEQ ID NO: 522524 - DNA, 19 bp, Mus musculus
  siRNA target sequence for Dst (NM_134448.1,10339-10357).
cttacatcctattcagatt

SEQ ID NO: 522525 - DNA, 19 bp, Mus musculus
  siRNA target sequence for Dst (NM_134448.1,10386-10404).
ggccattcaaactgtgaat

SEQ ID NO: 522526 - DNA, 19 bp, Mus musculus
  siRNA target sequence for Dst (NM_134448.1,10388-10406).
ccattcaaactgtgaatgt

SEQ ID NO: 522527 - DNA, 19 bp, Mus musculus
  siRNA target sequence for Dst (NM_134448.1,10407-10425).
ccaagatactgaacttgta

SEQ ID NO: 522528 - DNA, 19 bp, Mus musculus
  siRNA target sequence for Dst (NM_134448.1,10408-10426).
caagatactgaacttgtaa

SEQ ID NO: 522529 - DNA, 19 bp, Mus musculus
  siRNA target sequence for Dst (NM_134448.1,10456-10474).
ctagcagacctttcacata

SEQ ID NO: 522530 - DNA, 19 bp, Mus musculus
  siRNA target sequence for Dst (NM_134448.1,10460-10478).
cagacctttcacataccaa

SEQ ID NO: 522531 - DNA, 19 bp, Mus musculus
  siRNA target sequence for Dst (NM_134448.1,10504-10522).
gacgtacagtccttcatct

SEQ ID NO: 522532 - DNA, 19 bp, Mus musculus
  siRNA target sequence for Dst (NM_134448.1,10512-10530).
gtccttcatctctgattat

SEQ ID NO: 522533 - DNA, 19 bp, Mus musculus
  siRNA target sequence for Dst (NM_134448.1,10523-10541).
ctgattatgcacaagatct

SEQ ID NO: 522534 - DNA, 19 bp, Mus musculus
  siRNA target sequence for Dst (NM_134448.1,10561-10579).
caactgctgagactcttaa

SEQ ID NO: 522535 - DNA, 19 bp, Mus musculus
  siRNA target sequence for Dstn (NM_019771.1,52-70).
ggttgcggatgaagtatgt

SEQ ID NO: 522536 - DNA, 19 bp, Mus musculus
  siRNA target sequence for Dstn (NM_019771.1,72-90).
gcattttctacgacatgaa

SEQ ID NO: 522537 - DNA, 19 bp, Mus musculus
  siRNA target sequence for Dstn (NM_019771.1,102-120).
gttccacaccagaagaaat

SEQ ID NO: 522538 - DNA, 19 bp, Mus musculus
  siRNA target sequence for Dstn (NM_019771.1,169-187).
gtgcatagtcgttgaagaa

SEQ ID NO: 522539 - DNA, 19 bp, Mus musculus
  siRNA target sequence for Dstn (NM_019771.1,209-227).
gatgttggcgccaccataa

SEQ ID NO: 522540 - DNA, 19 bp, Mus musculus
  siRNA target sequence for Dstn (NM_019771.1,241-259).
gcattttgtcggaatgctt

SEQ ID NO: 522541 - DNA, 19 bp, Mus musculus
  siRNA target sequence for Dstn (NM_019771.1,273-291).
gtcgctatgctttgtatga

SEQ ID NO: 522542 - DNA, 19 bp, Mus musculus
  siRNA target sequence for Dstn (NM_019771.1,423-441).
gtataaagcatgagtatca

SEQ ID NO: 522543 - DNA, 19 bp, Mus musculus
  siRNA target sequence for Dstn (NM_019771.1,430-448).
gcatgagtatcaagcaaat

SEQ ID NO: 522544 - DNA, 19 bp, Mus musculus
  siRNA target sequence for Dstn (NM_019771.1,460-478).
cctcaatcggacctgtatt

SEQ ID NO: 522545 - DNA, 19 bp, Mus musculus
  siRNA target sequence for Dstn (NM_019771.1,463-481).
caatcggacctgtattgct

SEQ ID NO: 522546 - DNA, 19 bp, Mus musculus
  siRNA target sequence for Dstn (NM_019771.1,471-489).
cctgtattgctgaaaagct

SEQ ID NO: 522547 - DNA, 19 bp, Mus musculus
  siRNA target sequence for Dstn (NM_019771.1,472-490).
ctgtattgctgaaaagcta

SEQ ID NO: 522548 - DNA, 19 bp, Mus musculus
  siRNA target sequence for Enc1 (NM_007930.3,414-432).
gcagtggctccatcaacat

SEQ ID NO: 522549 - DNA, 19 bp, Mus musculus
  siRNA target sequence for Enc1 (NM_007930.3,417-435).
gtggctccatcaacatcta

SEQ ID NO: 522550 - DNA, 19 bp, Mus musculus
  siRNA target sequence for Enc1 (NM_007930.3,632-650).
gtgaacttcgacaattcca

SEQ ID NO: 522551 - DNA, 19 bp, Mus musculus
  siRNA target sequence for Enc1 (NM_007930.3,696-714).
cccgggtcattatcaatga

SEQ ID NO: 522552 - DNA, 19 bp, Mus musculus
  siRNA target sequence for Enc1 (NM_007930.3,771-789).
gagatgcgtgtgcagaatt

SEQ ID NO: 522553 - DNA, 19 bp, Mus musculus
  siRNA target sequence for Enc1 (NM_007930.3,777-795).
cgtgtgcagaatttctaga

SEQ ID NO: 522554 - DNA, 19 bp, Mus musculus
  siRNA target sequence for Enc1 (NM_007930.3,992-1010).
gaaaggctggtgtatgagt

SEQ ID NO: 522555 - DNA, 19 bp, Mus musculus
  siRNA target sequence for Enc1 (NM_007930.3,1177-1195).
ggccatcaggtgcaaacta

SEQ ID NO: 522556 - DNA, 19 bp, Mus musculus
  siRNA target sequence for Enc1 (NM_007930.3,1180-1198).
catcaggtgcaaactaaaa

SEQ ID NO: 522557 - DNA, 19 bp, Mus musculus
  siRNA target sequence for Enc1 (NM_007930.3,1185-1203).
ggtgcaaactaaaaatctt

SEQ ID NO: 522558 - DNA, 19 bp, Mus musculus
  siRNA target sequence for Enc1 (NM_007930.3,1186-1204).
gtgcaaactaaaaatctta

SEQ ID NO: 522559 - DNA, 19 bp, Mus musculus
  siRNA target sequence for Enc1 (NM_007930.3,1271-1289).
ctgggagggcagactttca

SEQ ID NO: 522560 - DNA, 19 bp, Mus musculus
  siRNA target sequence for Enc1 (NM_007930.3,1284-1302).
ctttcatgtgtgacaaact

SEQ ID NO: 522561 - DNA, 19 bp, Mus musculus
  siRNA target sequence for Enc1 (NM_007930.3,1353-1371).
ccagcccgaggaaagagtt

SEQ ID NO: 522562 - DNA, 19 bp, Mus musculus
  siRNA target sequence for Enc1 (NM_007930.3,1382-1400).
gcaattggctgcaaagtat

SEQ ID NO: 522563 - DNA, 19 bp, Mus musculus
  siRNA target sequence for Enc1 (NM_007930.3,1426-1444).
gaacggagtctcaaaagat

SEQ ID NO: 522564 - DNA, 19 bp, Mus musculus
  siRNA target sequence for Enc1 (NM_007930.3,1442-1460).
gatgtctgggtttacgata

SEQ ID NO: 522565 - DNA, 19 bp, Mus musculus
  siRNA target sequence for Enc1 (NM_007930.3,1531-1549).
gaagcactgcctctatgta

SEQ ID NO: 522566 - DNA, 19 bp, Mus musculus
  siRNA target sequence for Enc1 (NM_007930.3,1593-1611).
cctcggtctccctaaagca

SEQ ID NO: 522567 - DNA, 19 bp, Mus musculus
  siRNA target sequence for Enc1 (NM_007930.3,1594-1612).
ctcggtctccctaaagcaa

SEQ ID NO: 522568 - DNA, 19 bp, Mus musculus
  siRNA target sequence for Enc1 (NM_007930.3,1602-1620).
ccctaaagcaagtagaaca

SEQ ID NO: 522569 - DNA, 19 bp, Mus musculus
  siRNA target sequence for Enc1 (NM_007930.3,1688-1706).
gtagtgagtgccaaactta

SEQ ID NO: 522570 - DNA, 19 bp, Mus musculus
  siRNA target sequence for Enc1 (NM_007930.3,1753-1771).
caaggttcagtgttacgat

SEQ ID NO: 522571 - DNA, 19 bp, Mus musculus
  siRNA target sequence for Enc1 (NM_007930.3,1757-1775).
gttcagtgttacgatcaat

SEQ ID NO: 522572 - DNA, 19 bp, Mus musculus
  siRNA target sequence for Enc1 (NM_007930.3,1769-1787).
gatcaatgcgagaacagat

SEQ ID NO: 522573 - DNA, 19 bp, Mus musculus
  siRNA target sequence for Enc1 (NM_007930.3,1886-1904).
gcctgctccgcttacaaat

SEQ ID NO: 522574 - DNA, 19 bp, Mus musculus
  siRNA target sequence for Enc1 (NM_007930.3,1890-1908).
gctccgcttacaaattcaa

SEQ ID NO: 522575 - DNA, 19 bp, Mus musculus
  siRNA target sequence for Enc1 (NM_007930.3,1891-1909).
ctccgcttacaaattcaat

SEQ ID NO: 522576 - DNA, 19 bp, Mus musculus
  siRNA target sequence for Enc1 (NM_007930.3,1894-1912).
cgcttacaaattcaatagt

SEQ ID NO: 522577 - DNA, 19 bp, Mus musculus
  siRNA target sequence for Enc1 (NM_007930.3,1976-1994).
gcgtccgggaacaagcttt

SEQ ID NO: 522578 - DNA, 19 bp, Mus musculus
  siRNA target sequence for Enc1 (NM_007930.3,1977-1995).
cgtccgggaacaagcttta

SEQ ID NO: 522579 - DNA, 19 bp, Mus musculus
  siRNA target sequence for Enc1 (NM_007930.3,1981-1999).
cgggaacaagctttacgta

SEQ ID NO: 522580 - DNA, 19 bp, Mus musculus
  siRNA target sequence for Enc1 (NM_007930.3,2028-2046).
gcaagactttggactgtta

SEQ ID NO: 522581 - DNA, 19 bp, Mus musculus
  siRNA target sequence for Enc1 (NM_007930.3,2041-2059).
ctgttacgacccaacttta

SEQ ID NO: 522582 - DNA, 19 bp, Mus musculus
  siRNA target sequence for Enc1 (NM_007930.3,2043-2061).
gttacgacccaactttaga

SEQ ID NO: 522583 - DNA, 19 bp, Mus musculus
  siRNA target sequence for Enc1 (NM_007930.3,2063-2081).
gtgtggaacagcataacca

SEQ ID NO: 522584 - DNA, 19 bp, Mus musculus
  siRNA target sequence for Epb4.1l1 (NM_013510.1,239-257).
ccgattctgaggtgaagaa

SEQ ID NO: 522585 - DNA, 19 bp, Mus musculus
  siRNA target sequence for Epb4.1l1 (NM_013510.1,398-416).
gcctggatatggacgataa

SEQ ID NO: 522586 - DNA, 19 bp, Mus musculus
  siRNA target sequence for Epb4.1l1 (NM_013510.1,402-420).
ggatatggacgataaggat

SEQ ID NO: 522587 - DNA, 19 bp, Mus musculus
  siRNA target sequence for Epb4.1l1 (NM_013510.1,403-421).
gatatggacgataaggatt

SEQ ID NO: 522588 - DNA, 19 bp, Mus musculus
  siRNA target sequence for Epb4.1l1 (NM_013510.1,802-820).
cagctgagggcagacatta

SEQ ID NO: 522589 - DNA, 19 bp, Mus musculus
  siRNA target sequence for Epb4.1l1 (NM_013510.1,805-823).
ctgagggcagacattatca

SEQ ID NO: 522590 - DNA, 19 bp, Mus musculus
  siRNA target sequence for Epb4.1l1 (NM_013510.1,909-927).
ggaacacgtgggcaactat

SEQ ID NO: 522591 - DNA, 19 bp, Mus musculus
  siRNA target sequence for Epb4.1l1 (NM_013510.1,913-931).
cacgtgggcaactatgtca

SEQ ID NO: 522592 - DNA, 19 bp, Mus musculus
  siRNA target sequence for Epb4.1l1 (NM_013510.1,1077-1095).
cctgcatcacgctaaggat

SEQ ID NO: 522593 - DNA, 19 bp, Mus musculus
  siRNA target sequence for Epb4.1l1 (NM_013510.1,1078-1096).
ctgcatcacgctaaggatt

SEQ ID NO: 522594 - DNA, 19 bp, Mus musculus
  siRNA target sequence for Epb4.1l1 (NM_013510.1,1097-1115).
ctgagggcatcgatatcat

SEQ ID NO: 522595 - DNA, 19 bp, Mus musculus
  siRNA target sequence for Epb4.1l1 (NM_013510.1,1150-1168).
cgggaccgcctgagaatca

SEQ ID NO: 522596 - DNA, 19 bp, Mus musculus
  siRNA target sequence for Epb4.1l1 (NM_013510.1,1151-1169).
gggaccgcctgagaatcaa

SEQ ID NO: 522597 - DNA, 19 bp, Mus musculus
  siRNA target sequence for Epb4.1l1 (NM_013510.1,1211-1229).
ggagtaacttctacatcaa

SEQ ID NO: 522598 - DNA, 19 bp, Mus musculus
  siRNA target sequence for Epb4.1l1 (NM_013510.1,1214-1232).
gtaacttctacatcaagat

SEQ ID NO: 522599 - DNA, 19 bp, Mus musculus
  siRNA target sequence for Epb4.1l1 (NM_013510.1,1611-1629).
ccgatcagaggctgaagaa

SEQ ID NO: 522600 - DNA, 19 bp, Mus musculus
  siRNA target sequence for Epb4.1l1 (NM_013510.1,1860-1878).
caagggcaccccggaaaaa

SEQ ID NO: 522601 - DNA, 19 bp, Mus musculus
  siRNA target sequence for Epb4.1l1 (NM_013510.1,2076-2094).
ggtggacttcacggttatt

SEQ ID NO: 522602 - DNA, 19 bp, Mus musculus
  siRNA target sequence for Epb4.1l1 (NM_013510.1,2079-2097).
ggacttcacggttattggt

SEQ ID NO: 522603 - DNA, 19 bp, Mus musculus
  siRNA target sequence for Epb4.1l1 (NM_013510.1,2143-2161).
gagcttgatcgggataaaa

SEQ ID NO: 522604 - DNA, 19 bp, Mus musculus
  siRNA target sequence for Epb4.1l1 (NM_013510.1,2145-2163).
gcttgatcgggataaaagt

SEQ ID NO: 522605 - DNA, 19 bp, Mus musculus
  siRNA target sequence for Epb4.1l1 (NM_013510.1,2278-2296).
gaaatgccccagtttgagt

SEQ ID NO: 522606 - DNA, 19 bp, Mus musculus
  siRNA target sequence for Epb4.1l1 (NM_013510.1,2411-2429).
gtactccaatggtgaaaga

SEQ ID NO: 522607 - DNA, 19 bp, Mus musculus
  siRNA target sequence for Epb4.1l1 (NM_013510.1,2414-2432).
ctccaatggtgaaagactt

SEQ ID NO: 522608 - DNA, 19 bp, Mus musculus
  siRNA target sequence for Epb4.1l1 (NM_013510.1,2544-2562).
cacggaaatccgttctctt

SEQ ID NO: 522609 - DNA, 19 bp, Mus musculus
  siRNA target sequence for Epb4.1l1 (NM_013510.1,2547-2565).
ggaaatccgttctctttca

SEQ ID NO: 522610 - DNA, 19 bp, Mus musculus
  siRNA target sequence for Epb4.1l1 (NM_013510.1,2567-2585).
cgatcatcgggaaagatgt

SEQ ID NO: 522611 - DNA, 19 bp, Mus musculus
  siRNA target sequence for Epb4.1l1 (NM_013510.1,2637-2655).
cacccatgtcaccaaaact

SEQ ID NO: 522612 - DNA, 19 bp, Mus musculus
  siRNA target sequence for Epb4.1l1 (NM_013510.1,2639-2657).
cccatgtcaccaaaactgt

SEQ ID NO: 522613 - DNA, 19 bp, Mus musculus
  siRNA target sequence for Epb4.1l1 (NM_013510.1,2681-2699).
ggatcgaaaagcgaatcat

SEQ ID NO: 522614 - DNA, 19 bp, Mus musculus
  siRNA target sequence for Epb4.1l1 (NM_013510.1,2685-2703).
cgaaaagcgaatcatcatt

SEQ ID NO: 522615 - DNA, 19 bp, Mus musculus
  siRNA target sequence for Epb4.1l1 (NM_013510.1,2700-2718).
cattactggggatgaagat

SEQ ID NO: 522616 - DNA, 19 bp, Mus musculus
  siRNA target sequence for Epb4.1l2 (NM_013511.1,213-231).
gggcatctctcgattcata

SEQ ID NO: 522617 - DNA, 19 bp, Mus musculus
  siRNA target sequence for Epb4.1l2 (NM_013511.1,255-273).
gtcttacaatttagtagta

SEQ ID NO: 522618 - DNA, 19 bp, Mus musculus
  siRNA target sequence for Epb4.1l2 (NM_013511.1,495-513).
caaggaggaaacgatacaa

SEQ ID NO: 522619 - DNA, 19 bp, Mus musculus
  siRNA target sequence for Epb4.1l2 (NM_013511.1,693-711).
caagggacaagtgttgttt

SEQ ID NO: 522620 - DNA, 19 bp, Mus musculus
  siRNA target sequence for Epb4.1l2 (NM_013511.1,775-793).
catcctgagcagaaaaact

SEQ ID NO: 522621 - DNA, 19 bp, Mus musculus
  siRNA target sequence for Epb4.1l2 (NM_013511.1,849-867).
cactttcaatgtgaaattt

SEQ ID NO: 522622 - DNA, 19 bp, Mus musculus
  siRNA target sequence for Epb4.1l2 (NM_013511.1,1007-1025).
ccgagcatggggactatga

SEQ ID NO: 522623 - DNA, 19 bp, Mus musculus
  siRNA target sequence for Epb4.1l2 (NM_013511.1,1017-1035).
ggactatgacccagaagaa

SEQ ID NO: 522624 - DNA, 19 bp, Mus musculus
  siRNA target sequence for Epb4.1l2 (NM_013511.1,1101-1119).
ggtgtcagaactgcataaa

SEQ ID NO: 522625 - DNA, 19 bp, Mus musculus
  siRNA target sequence for Epb4.1l2 (NM_013511.1,1102-1120).
gtgtcagaactgcataaaa

SEQ ID NO: 522626 - DNA, 19 bp, Mus musculus
  siRNA target sequence for Epb4.1l2 (NM_013511.1,1148-1166).
ccgactctcagttcttaga

SEQ ID NO: 522627 - DNA, 19 bp, Mus musculus
  siRNA target sequence for Epb4.1l2 (NM_013511.1,1325-1343).
cctataagcgcagtaattt

SEQ ID NO: 522628 - DNA, 19 bp, Mus musculus
  siRNA target sequence for Epb4.1l2 (NM_013511.1,1332-1350).
gcgcagtaatttctacatt

SEQ ID NO: 522629 - DNA, 19 bp, Mus musculus
  siRNA target sequence for Epb4.1l2 (NM_013511.1,1333-1351).
cgcagtaatttctacatta

SEQ ID NO: 522630 - DNA, 19 bp, Mus musculus
  siRNA target sequence for Epb4.1l2 (NM_013511.1,1599-1617).
gcgtgcctctagtaaacgt

SEQ ID NO: 522631 - DNA, 19 bp, Mus musculus
  siRNA target sequence for Epb4.1l2 (NM_013511.1,1767-1785).
gcccgctgagggaaagaaa

SEQ ID NO: 522632 - DNA, 19 bp, Mus musculus
  siRNA target sequence for Epb4.1l2 (NM_013511.1,1796-1814).
gagtagacggggataatat

SEQ ID NO: 522633 - DNA, 19 bp, Mus musculus
  siRNA target sequence for Epb4.1l2 (NM_013511.1,1804-1822).
ggggataatatttatgtca

SEQ ID NO: 522634 - DNA, 19 bp, Mus musculus
  siRNA target sequence for Epb4.1l2 (NM_013511.1,1895-1913).
gtgaactcaagcgcaattt

SEQ ID NO: 522635 - DNA, 19 bp, Mus musculus
  siRNA target sequence for Epb4.1l2 (NM_013511.1,1930-1948).
gagcctcgccccagtgaat

SEQ ID NO: 522636 - DNA, 19 bp, Mus musculus
  siRNA target sequence for Epb4.1l2 (NM_013511.1,2230-2248).
gtgaccgagggcaccataa

SEQ ID NO: 522637 - DNA, 19 bp, Mus musculus
  siRNA target sequence for Epb4.1l2 (NM_013511.1,2388-2406).
ggcccaggaacatgtagtt

SEQ ID NO: 522638 - DNA, 19 bp, Mus musculus
  siRNA target sequence for Epb4.1l2 (NM_013511.1,2398-2416).
catgtagttgcccaaaagt

SEQ ID NO: 522639 - DNA, 19 bp, Mus musculus
  siRNA target sequence for Epb4.1l2 (NM_013511.1,2484-2502).
cccgcacagagttaatgga

SEQ ID NO: 522640 - DNA, 19 bp, Mus musculus
  siRNA target sequence for Epb4.1l2 (NM_013511.1,2527-2545).
ggtttgccagagattattt

SEQ ID NO: 522641 - DNA, 19 bp, Mus musculus
  siRNA target sequence for Epb4.1l2 (NM_013511.1,2533-2551).
ccagagattatttgttgtt

SEQ ID NO: 522642 - DNA, 19 bp, Mus musculus
  siRNA target sequence for Epb4.1l2 (NM_013511.1,2552-2570).
cagagccaccagtggtaaa

SEQ ID NO: 522643 - DNA, 19 bp, Mus musculus
  siRNA target sequence for Epb4.1l2 (NM_013511.1,2554-2572).
gagccaccagtggtaaaaa

SEQ ID NO: 522644 - DNA, 19 bp, Mus musculus
  siRNA target sequence for Epb4.1l2 (NM_013511.1,2556-2574).
gccaccagtggtaaaaaca

SEQ ID NO: 522645 - DNA, 19 bp, Mus musculus
  siRNA target sequence for Epb4.1l2 (NM_013511.1,2622-2640).
caaggaagtccccattgtt

SEQ ID NO: 522646 - DNA, 19 bp, Mus musculus
  siRNA target sequence for Epb4.1l2 (NM_013511.1,2626-2644).
gaagtccccattgttcaaa

SEQ ID NO: 522647 - DNA, 19 bp, Mus musculus
  siRNA target sequence for Epb4.1l2 (NM_013511.1,2699-2717).
gtgattcgggcgtgttact

SEQ ID NO: 522648 - DNA, 19 bp, Mus musculus
  siRNA target sequence for Epb4.1l2 (NM_013511.1,2701-2719).
gattcgggcgtgttactga

SEQ ID NO: 522649 - DNA, 19 bp, Mus musculus
  siRNA target sequence for Epb4.1l2 (NM_013511.1,2918-2936).
gggtggtagtgcacaaaga

SEQ ID NO: 522650 - DNA, 19 bp, Mus musculus
  siRNA target sequence for Epb4.1l2 (NM_013511.1,2922-2940).
ggtagtgcacaaagaaaca

SEQ ID NO: 522651 - DNA, 19 bp, Mus musculus
  siRNA target sequence for Epb4.1l3 (NM_013813.1,313-331).
gagggagatcggtgacaaa

SEQ ID NO: 522652 - DNA, 19 bp, Mus musculus
  siRNA target sequence for Epb4.1l3 (NM_013813.1,353-371).
gctgcgaaacagcttgaat

SEQ ID NO: 522653 - DNA, 19 bp, Mus musculus
  siRNA target sequence for Epb4.1l3 (NM_013813.1,354-372).
ctgcgaaacagcttgaata

SEQ ID NO: 522654 - DNA, 19 bp, Mus musculus
  siRNA target sequence for Epb4.1l3 (NM_013813.1,434-452).
ccgctgaagatcgtgaaaa

SEQ ID NO: 522655 - DNA, 19 bp, Mus musculus
  siRNA target sequence for Epb4.1l3 (NM_013813.1,446-464).
gtgaaaaggcctaaaagca

SEQ ID NO: 522656 - DNA, 19 bp, Mus musculus
  siRNA target sequence for Epb4.1l3 (NM_013813.1,528-546).
gaggacaagtgctctttga

SEQ ID NO: 522657 - DNA, 19 bp, Mus musculus
  siRNA target sequence for Epb4.1l3 (NM_013813.1,598-616).
gtatcgagacgcagagaat

SEQ ID NO: 522658 - DNA, 19 bp, Mus musculus
  siRNA target sequence for Epb4.1l3 (NM_013813.1,628-646).
gttggaccctgctaaggaa

SEQ ID NO: 522659 - DNA, 19 bp, Mus musculus
  siRNA target sequence for Epb4.1l3 (NM_013813.1,631-649).
ggaccctgctaaggaaatt

SEQ ID NO: 522660 - DNA, 19 bp, Mus musculus
  siRNA target sequence for Epb4.1l3 (NM_013813.1,634-652).
ccctgctaaggaaattaaa

SEQ ID NO: 522661 - DNA, 19 bp, Mus musculus
  siRNA target sequence for Epb4.1l3 (NM_013813.1,669-687).
gtgcttggcatttttcatt

SEQ ID NO: 522662 - DNA, 19 bp, Mus musculus
  siRNA target sequence for Epb4.1l3 (NM_013813.1,717-735).
cccagctatcagaagatat

SEQ ID NO: 522663 - DNA, 19 bp, Mus musculus
  siRNA target sequence for Epb4.1l3 (NM_013813.1,754-772).
cttgcagctgcgagatgat

SEQ ID NO: 522664 - DNA, 19 bp, Mus musculus
  siRNA target sequence for Epb4.1l3 (NM_013813.1,757-775).
gcagctgcgagatgatatt

SEQ ID NO: 522665 - DNA, 19 bp, Mus musculus
  siRNA target sequence for Epb4.1l3 (NM_013813.1,761-779).
ctgcgagatgatattgtgt

SEQ ID NO: 522666 - DNA, 19 bp, Mus musculus
  siRNA target sequence for Epb4.1l3 (NM_013813.1,851-869).
gactacgatcccgatgaat

SEQ ID NO: 522667 - DNA, 19 bp, Mus musculus
  siRNA target sequence for Epb4.1l3 (NM_013813.1,853-871).
ctacgatcccgatgaatgt

SEQ ID NO: 522668 - DNA, 19 bp, Mus musculus
  siRNA target sequence for Epb4.1l3 (NM_013813.1,906-924).
caaaccacacgaaagaact

SEQ ID NO: 522669 - DNA, 19 bp, Mus musculus
  siRNA target sequence for Epb4.1l3 (NM_013813.1,1055-1073).
gaaggagtggagattatgt

SEQ ID NO: 522670 - DNA, 19 bp, Mus musculus
  siRNA target sequence for Epb4.1l3 (NM_013813.1,1085-1103).
gccagtggtctgttgatat

SEQ ID NO: 522671 - DNA, 19 bp, Mus musculus
  siRNA target sequence for Epb4.1l3 (NM_013813.1,1086-1104).
ccagtggtctgttgatata

SEQ ID NO: 522672 - DNA, 19 bp, Mus musculus
  siRNA target sequence for Epb4.1l3 (NM_013813.1,1106-1124).
cgtgaccggcttcgaataa

SEQ ID NO: 522673 - DNA, 19 bp, Mus musculus
  siRNA target sequence for Epb4.1l3 (NM_013813.1,1107-1125).
gtgaccggcttcgaataaa

SEQ ID NO: 522674 - DNA, 19 bp, Mus musculus
  siRNA target sequence for Epb4.1l3 (NM_013813.1,1109-1127).
gaccggcttcgaataaaca

SEQ ID NO: 522675 - DNA, 19 bp, Mus musculus
  siRNA target sequence for Epb4.1l3 (NM_013813.1,1111-1129).
ccggcttcgaataaacaga

SEQ ID NO: 522676 - DNA, 19 bp, Mus musculus
  siRNA target sequence for Epb4.1l3 (NM_013813.1,1112-1130).
cggcttcgaataaacagat

SEQ ID NO: 522677 - DNA, 19 bp, Mus musculus
  siRNA target sequence for Epb4.1l3 (NM_013813.1,1113-1131).
ggcttcgaataaacagatt

SEQ ID NO: 522678 - DNA, 19 bp, Mus musculus
  siRNA target sequence for Epb4.1l3 (NM_013813.1,1114-1132).
gcttcgaataaacagattt

SEQ ID NO: 522679 - DNA, 19 bp, Mus musculus
  siRNA target sequence for Epb4.1l3 (NM_013813.1,1133-1151).
gcttggccgaaggtcttaa

SEQ ID NO: 522680 - DNA, 19 bp, Mus musculus
  siRNA target sequence for Epb4.1l3 (NM_013813.1,1134-1152).
cttggccgaaggtcttaaa

SEQ ID NO: 522681 - DNA, 19 bp, Mus musculus
  siRNA target sequence for Epb4.1l3 (NM_013813.1,1137-1155).
ggccgaaggtcttaaaaat

SEQ ID NO: 522682 - DNA, 19 bp, Mus musculus
  siRNA target sequence for Epb4.1l3 (NM_013813.1,1139-1157).
ccgaaggtcttaaaaattt

SEQ ID NO: 522683 - DNA, 19 bp, Mus musculus
  siRNA target sequence for Epb4.1l3 (NM_013813.1,1158-1176).
cttataaacggaacaactt

SEQ ID NO: 522684 - DNA, 19 bp, Mus musculus
  siRNA target sequence for Epb4.1l3 (NM_013813.1,1166-1184).
cggaacaacttttacatta

SEQ ID NO: 522685 - DNA, 19 bp, Mus musculus
  siRNA target sequence for Epb4.1l3 (NM_013813.1,1194-1212).
caggagagtttgagcaatt

SEQ ID NO: 522686 - DNA, 19 bp, Mus musculus
  siRNA target sequence for Epb4.1l3 (NM_013813.1,1277-1295).
gtggagcatcatacatttt

SEQ ID NO: 522687 - DNA, 19 bp, Mus musculus
  siRNA target sequence for Epb4.1l3 (NM_013813.1,1389-1407).
gagccagtgcgttgataga

SEQ ID NO: 522688 - DNA, 19 bp, Mus musculus
  siRNA target sequence for Epb4.1l3 (NM_013813.1,1430-1448).
cgctcgtccagcaaacgat

SEQ ID NO: 522689 - DNA, 19 bp, Mus musculus
  siRNA target sequence for Epb4.1l3 (NM_013813.1,1472-1490).
ggagcgtcagtgagtgaaa

SEQ ID NO: 522690 - DNA, 19 bp, Mus musculus
  siRNA target sequence for Epb4.1l3 (NM_013813.1,1476-1494).
cgtcagtgagtgaaaacca

SEQ ID NO: 522691 - DNA, 19 bp, Mus musculus
  siRNA target sequence for Epb4.1l3 (NM_013813.1,1487-1505).
gaaaaccatgaaatataca

SEQ ID NO: 522692 - DNA, 19 bp, Mus musculus
  siRNA target sequence for Epb4.1l3 (NM_013813.1,1496-1514).
gaaatatacatgaaggatt

SEQ ID NO: 522693 - DNA, 19 bp, Mus musculus
  siRNA target sequence for Epb4.1l3 (NM_013813.1,1541-1559).
ggccagtacgccacaacaa

SEQ ID NO: 522694 - DNA, 19 bp, Mus musculus
  siRNA target sequence for Epb4.1l3 (NM_013813.1,1777-1795).
caaggcacaggatctagat

SEQ ID NO: 522695 - DNA, 19 bp, Mus musculus
  siRNA target sequence for Epb4.1l3 (NM_013813.1,1781-1799).
gcacaggatctagataaaa

SEQ ID NO: 522696 - DNA, 19 bp, Mus musculus
  siRNA target sequence for Epb4.1l3 (NM_013813.1,1813-1831).
gatgaagcaccaaaccaat

SEQ ID NO: 522697 - DNA, 19 bp, Mus musculus
  siRNA target sequence for Epb4.1l3 (NM_013813.1,1816-1834).
gaagcaccaaaccaatatt

SEQ ID NO: 522698 - DNA, 19 bp, Mus musculus
  siRNA target sequence for Epb4.1l3 (NM_013813.1,1819-1837).
gcaccaaaccaatattagt

SEQ ID NO: 522699 - DNA, 19 bp, Mus musculus
  siRNA target sequence for Epb4.1l3 (NM_013813.1,1939-1957).
ggaggatgcacccatgatt

SEQ ID NO: 522700 - DNA, 19 bp, Mus musculus
  siRNA target sequence for Epb4.1l3 (NM_013813.1,1970-1988).
cccgaggagaccaaacagt

SEQ ID NO: 522701 - DNA, 19 bp, Mus musculus
  siRNA target sequence for Epb4.1l3 (NM_013813.1,2047-2065).
gaaacccacagagttcata

SEQ ID NO: 522702 - DNA, 19 bp, Mus musculus
  siRNA target sequence for Epb4.1l3 (NM_013813.1,2066-2084).
ggaggggtttcgtctacta

SEQ ID NO: 522703 - DNA, 19 bp, Mus musculus
  siRNA target sequence for Epb4.1l3 (NM_013813.1,2179-2197).
ggtgttgcaggaaacgata

SEQ ID NO: 522704 - DNA, 19 bp, Mus musculus
  siRNA target sequence for Epb4.1l3 (NM_013813.1,2503-2521).
cacgagtgtgggcagtatt

SEQ ID NO: 522705 - DNA, 19 bp, Mus musculus
  siRNA target sequence for Epb4.1l3 (NM_013813.1,2506-2524).
gagtgtgggcagtatttct

SEQ ID NO: 522706 - DNA, 19 bp, Mus musculus
  siRNA target sequence for Epb4.1l3 (NM_013813.1,2534-2552).
gcaaagctagagatctcta

SEQ ID NO: 522707 - DNA, 19 bp, Mus musculus
  siRNA target sequence for Epb4.1l3 (NM_013813.1,2570-2588).
gtccacacggaaacgaaaa

SEQ ID NO: 522708 - DNA, 19 bp, Mus musculus
  siRNA target sequence for Epb4.1l3 (NM_013813.1,2657-2675).
cagacgatcacgtctgaaa

SEQ ID NO: 522709 - DNA, 19 bp, Mus musculus
  siRNA target sequence for Epb4.1l3 (NM_013813.1,2668-2686).
gtctgaaaccactagtact

SEQ ID NO: 522710 - DNA, 19 bp, Mus musculus
  siRNA target sequence for Epb4.1l3 (NM_013813.1,2730-2748).
cggagacgaggattgagaa

SEQ ID NO: 522711 - DNA, 19 bp, Mus musculus
  siRNA target sequence for Epb4.1l3 (NM_013813.1,2739-2757).
ggattgagaagcgaatagt

SEQ ID NO: 522712 - DNA, 19 bp, Mus musculus
  siRNA target sequence for Epb4.1l3 (NM_013813.1,2761-2779).
cacaggggacgctgacatt

SEQ ID NO: 522713 - DNA, 19 bp, Mus musculus
  siRNA target sequence for Epb4.1l3 (NM_013813.1,2839-2857).
gtcagtgaccaaagtagta

SEQ ID NO: 522714 - DNA, 19 bp, Mus musculus
  siRNA target sequence for Epb4.9 (NM_013514.2,592-610).
cgacctgacctcatgatct

SEQ ID NO: 522715 - DNA, 19 bp, Mus musculus
  siRNA target sequence for Epb4.9 (NM_013514.2,593-611).
gacctgacctcatgatcta

SEQ ID NO: 522716 - DNA, 19 bp, Mus musculus
  siRNA target sequence for Epb4.9 (NM_013514.2,596-614).
ctgacctcatgatctatga

SEQ ID NO: 522717 - DNA, 19 bp, Mus musculus
  siRNA target sequence for Epb4.9 (NM_013514.2,728-746).
gccggactcttggaatcat

SEQ ID NO: 522718 - DNA, 19 bp, Mus musculus
  siRNA target sequence for Epb4.9 (NM_013514.2,827-845).
cggattccaacatctacaa

SEQ ID NO: 522719 - DNA, 19 bp, Mus musculus
  siRNA target sequence for Epb4.9 (NM_013514.2,829-847).
gattccaacatctacaaga

SEQ ID NO: 522720 - DNA, 19 bp, Mus musculus
  siRNA target sequence for Epb4.9 (NM_013514.2,921-939).
catcgaatcctccaagttt

SEQ ID NO: 522721 - DNA, 19 bp, Mus musculus
  siRNA target sequence for Epb4.9 (NM_013514.2,963-981).
caaccagccagccaagata

SEQ ID NO: 522722 - DNA, 19 bp, Mus musculus
  siRNA target sequence for Epb4.9 (NM_013514.2,1164-1182).
gggaaagatgatcttgaaa

SEQ ID NO: 522723 - DNA, 19 bp, Mus musculus
  siRNA target sequence for Epb4.9 (NM_013514.2,1257-1275).
cttgcattcgggaacatct

SEQ ID NO: 522724 - DNA, 19 bp, Mus musculus
  siRNA target sequence for Epb4.9 (NM_013514.2,1375-1393).
cagatctatccctatgaga

SEQ ID NO: 522725 - DNA, 19 bp, Mus musculus
  siRNA target sequence for Epb4.9 (NM_013514.2,1452-1470).
gcttgagaggcatttgtca

SEQ ID NO: 522726 - DNA, 19 bp, Mus musculus
  siRNA target sequence for Fhl3 (NM_010213.1,254-272).
gcgttccgtgctatgacaa

SEQ ID NO: 522727 - DNA, 19 bp, Mus musculus
  siRNA target sequence for Fhl3 (NM_010213.1,865-883).
ggtggaggcaagtatgtgt

SEQ ID NO: 522728 - DNA, 19 bp, Mus musculus
  siRNA target sequence for Fhod1 (NM_177699.2,114-132).
cagtatccgtggtaactgt

SEQ ID NO: 522729 - DNA, 19 bp, Mus musculus
  siRNA target sequence for Fhod1 (NM_177699.2,392-410).
gggcggaagcccacgttaa

SEQ ID NO: 522730 - DNA, 19 bp, Mus musculus
  siRNA target sequence for Fhod1 (NM_177699.2,393-411).
ggcggaagcccacgttaat

SEQ ID NO: 522731 - DNA, 19 bp, Mus musculus
  siRNA target sequence for Fhod1 (NM_177699.2,396-414).
ggaagcccacgttaatcct

SEQ ID NO: 522732 - DNA, 19 bp, Mus musculus
  siRNA target sequence for Fhod1 (NM_177699.2,429-447).
ccgtgagggtcaatgctat

SEQ ID NO: 522733 - DNA, 19 bp, Mus musculus
  siRNA target sequence for Fhod1 (NM_177699.2,485-503).
cgccgatctctcttctcat

SEQ ID NO: 522734 - DNA, 19 bp, Mus musculus
  siRNA target sequence for Fhod1 (NM_177699.2,486-504).
gccgatctctcttctcatt

SEQ ID NO: 522735 - DNA, 19 bp, Mus musculus
  siRNA target sequence for Fhod1 (NM_177699.2,488-506).
cgatctctcttctcattaa

SEQ ID NO: 522736 - DNA, 19 bp, Mus musculus
  siRNA target sequence for Fhod1 (NM_177699.2,724-742).
ccgcttggtggtaaagaca

SEQ ID NO: 522737 - DNA, 19 bp, Mus musculus
  siRNA target sequence for Fhod1 (NM_177699.2,1002-1020).
cgctggtccaacgtttctt

SEQ ID NO: 522738 - DNA, 19 bp, Mus musculus
  siRNA target sequence for Fhod1 (NM_177699.2,1024-1042).
caccgctggcactgatgtt

SEQ ID NO: 522739 - DNA, 19 bp, Mus musculus
  siRNA target sequence for Fhod1 (NM_177699.2,1026-1044).
ccgctggcactgatgttga

SEQ ID NO: 522740 - DNA, 19 bp, Mus musculus
  siRNA target sequence for Fhod1 (NM_177699.2,1053-1071).
cccagctaacgctctatga

SEQ ID NO: 522741 - DNA, 19 bp, Mus musculus
  siRNA target sequence for Fhod1 (NM_177699.2,1055-1073).
cagctaacgctctatgaga

SEQ ID NO: 522742 - DNA, 19 bp, Mus musculus
  siRNA target sequence for Fhod1 (NM_177699.2,1177-1195).
gagccgaagatcactagaa

SEQ ID NO: 522743 - DNA, 19 bp, Mus musculus
  siRNA target sequence for Fhod1 (NM_177699.2,1392-1410).
gtgagagaagcgtctacaa

SEQ ID NO: 522744 - DNA, 19 bp, Mus musculus
  siRNA target sequence for Fhod1 (NM_177699.2,2027-2045).
ccaaggcaccccaccaaaa

SEQ ID NO: 522745 - DNA, 19 bp, Mus musculus
  siRNA target sequence for Fhod1 (NM_177699.2,2060-2078).
cttttctggcgggaactaa

SEQ ID NO: 522746 - DNA, 19 bp, Mus musculus
  siRNA target sequence for Fhod1 (NM_177699.2,2307-2325).
cacccgtgcacgtcatcaa

SEQ ID NO: 522747 - DNA, 19 bp, Mus musculus
  siRNA target sequence for Fhod1 (NM_177699.2,2335-2353).
gctcaacttcgatgagttt

SEQ ID NO: 522748 - DNA, 19 bp, Mus musculus
  siRNA target sequence for Fhod1 (NM_177699.2,2479-2497).
gatgacgcttgcttccatt

SEQ ID NO: 522749 - DNA, 19 bp, Mus musculus
  siRNA target sequence for Fhod1 (NM_177699.2,2572-2590).
gccactgtttgatctgaaa

SEQ ID NO: 522750 - DNA, 19 bp, Mus musculus
  siRNA target sequence for Fhod1 (NM_177699.2,2619-2637).
ccaccttccgctgtattct

SEQ ID NO: 522751 - DNA, 19 bp, Mus musculus
  siRNA target sequence for Fhod1 (NM_177699.2,2733-2751).
cagtgcgacggcagtcatt

SEQ ID NO: 522752 - DNA, 19 bp, Mus musculus
  siRNA target sequence for Fhod1 (NM_177699.2,2742-2760).
ggcagtcattgctctatca

SEQ ID NO: 522753 - DNA, 19 bp, Mus musculus
  siRNA target sequence for Fhod1 (NM_177699.2,2743-2761).
gcagtcattgctctatcat

SEQ ID NO: 522754 - DNA, 19 bp, Mus musculus
  siRNA target sequence for Fhod1 (NM_177699.2,2992-3010).
ggtagccatgttaagagta

SEQ ID NO: 522755 - DNA, 19 bp, Mus musculus
  siRNA target sequence for Fhod1 (NM_177699.2,3014-3032).
catcgccgagtctgcaata

SEQ ID NO: 522756 - DNA, 19 bp, Mus musculus
  siRNA target sequence for Fhod1 (NM_177699.2,3017-3035).
cgccgagtctgcaataggt

SEQ ID NO: 522757 - DNA, 19 bp, Mus musculus
  siRNA target sequence for Fhod1 (NM_177699.2,3018-3036).
gccgagtctgcaataggtt

SEQ ID NO: 522758 - DNA, 19 bp, Mus musculus
  siRNA target sequence for Fhod1 (NM_177699.2,3106-3124).
ccacacactgagagagttt

SEQ ID NO: 522759 - DNA, 19 bp, Mus musculus
  siRNA target sequence for Fhod1 (NM_177699.2,3202-3220).
gacccgtggtcgcatgatt

SEQ ID NO: 522760 - DNA, 19 bp, Mus musculus
  siRNA target sequence for Fhod1 (NM_177699.2,3298-3316).
gccaggtcagggtgatact

SEQ ID NO: 522761 - DNA, 19 bp, Mus musculus
  siRNA target sequence for Fhod1 (NM_177699.2,3480-3498).
ccgacacgtcagatgagat

SEQ ID NO: 522762 - DNA, 19 bp, Mus musculus
  siRNA target sequence for Fhod1 (NM_177699.2,3481-3499).
cgacacgtcagatgagata

SEQ ID NO: 522763 - DNA, 19 bp, Mus musculus
  siRNA target sequence for Fhod1 (NM_177699.2,3634-3652).
ggcactgggactaagcaaa

SEQ ID NO: 522764 - DNA, 19 bp, Mus musculus
  siRNA target sequence for Fliih (NM_022009.1,133-151).
gcctgcgatggctaaagct

SEQ ID NO: 522765 - DNA, 19 bp, Mus musculus
  siRNA target sequence for Fliih (NM_022009.1,459-477).
cccaaccagctgttcatca

SEQ ID NO: 522766 - DNA, 19 bp, Mus musculus
  siRNA target sequence for Fliih (NM_022009.1,465-483).
cagctgttcatcaacctta

SEQ ID NO: 522767 - DNA, 19 bp, Mus musculus
  siRNA target sequence for Fliih (NM_022009.1,690-708).
gagggcctgagcaaccttt

SEQ ID NO: 522768 - DNA, 19 bp, Mus musculus
  siRNA target sequence for Fliih (NM_022009.1,694-712).
gcctgagcaacctttcaga

SEQ ID NO: 522769 - DNA, 19 bp, Mus musculus
  siRNA target sequence for Fliih (NM_022009.1,1006-1024).
ccaacaacaacctagaact

SEQ ID NO: 522770 - DNA, 19 bp, Mus musculus
  siRNA target sequence for Fliih (NM_022009.1,1042-1060).
gcaggtgcccaaaactgaa

SEQ ID NO: 522771 - DNA, 19 bp, Mus musculus
  siRNA target sequence for Fliih (NM_022009.1,1189-1207).
ccgccgagtggtacaacat

SEQ ID NO: 522772 - DNA, 19 bp, Mus musculus
  siRNA target sequence for Fliih (NM_022009.1,1190-1208).
cgccgagtggtacaacatt

SEQ ID NO: 522773 - DNA, 19 bp, Mus musculus
  siRNA target sequence for Fliih (NM_022009.1,1192-1210).
ccgagtggtacaacattga

SEQ ID NO: 522774 - DNA, 19 bp, Mus musculus
  siRNA target sequence for Fliih (NM_022009.1,1194-1212).
gagtggtacaacattgact

SEQ ID NO: 522775 - DNA, 19 bp, Mus musculus
  siRNA target sequence for Fliih (NM_022009.1,1488-1506).
gactactcggagttcttta

SEQ ID NO: 522776 - DNA, 19 bp, Mus musculus
  siRNA target sequence for Fliih (NM_022009.1,1653-1671).
ctgaactgggagatctact

SEQ ID NO: 522777 - DNA, 19 bp, Mus musculus
  siRNA target sequence for Fliih (NM_022009.1,1688-1706).
ggccacacttgacaagaaa

SEQ ID NO: 522778 - DNA, 19 bp, Mus musculus
  siRNA target sequence for Fliih (NM_022009.1,1715-1733).
cgccattcatgcagtcaat

SEQ ID NO: 522779 - DNA, 19 bp, Mus musculus
  siRNA target sequence for Fliih (NM_022009.1,1869-1887).
gaagatacacactatgtta

SEQ ID NO: 522780 - DNA, 19 bp, Mus musculus
  siRNA target sequence for Fliih (NM_022009.1,1888-1906).
ccaggatgtaccgtgtata

SEQ ID NO: 522781 - DNA, 19 bp, Mus musculus
  siRNA target sequence for Fliih (NM_022009.1,1899-1917).
cgtgtatatgggaaaaaga

SEQ ID NO: 522782 - DNA, 19 bp, Mus musculus
  siRNA target sequence for Fliih (NM_022009.1,1943-1961).
caaagggtcctcactagat

SEQ ID NO: 522783 - DNA, 19 bp, Mus musculus
  siRNA target sequence for Fliih (NM_022009.1,1952-1970).
ctcactagatccaaggttt

SEQ ID NO: 522784 - DNA, 19 bp, Mus musculus
  siRNA target sequence for Fliih (NM_022009.1,1956-1974).
ctagatccaaggtttgtgt

SEQ ID NO: 522785 - DNA, 19 bp, Mus musculus
  siRNA target sequence for Fliih (NM_022009.1,1989-2007).
gggctggacatttatgtgt

SEQ ID NO: 522786 - DNA, 19 bp, Mus musculus
  siRNA target sequence for Fliih (NM_022009.1,2017-2035).
cccaggccacactgagtaa

SEQ ID NO: 522787 - DNA, 19 bp, Mus musculus
  siRNA target sequence for Fliih (NM_022009.1,2164-2182).
ctgagatcaagaatcatgt

SEQ ID NO: 522788 - DNA, 19 bp, Mus musculus
  siRNA target sequence for Fliih (NM_022009.1,2200-2218).
caccccagcccaagctata

SEQ ID NO: 522789 - DNA, 19 bp, Mus musculus
  siRNA target sequence for Fliih (NM_022009.1,2202-2220).
ccccagcccaagctataca

SEQ ID NO: 522790 - DNA, 19 bp, Mus musculus
  siRNA target sequence for Fliih (NM_022009.1,2371-2389).
gctggtctgatgtattcat

SEQ ID NO: 522791 - DNA, 19 bp, Mus musculus
  siRNA target sequence for Fliih (NM_022009.1,2420-2438).
gcgtgcagcagcactcaaa

SEQ ID NO: 522792 - DNA, 19 bp, Mus musculus
  siRNA target sequence for Fliih (NM_022009.1,2973-2991).
gactttcagtgcatcgttt

SEQ ID NO: 522793 - DNA, 19 bp, Mus musculus
  siRNA target sequence for Fliih (NM_022009.1,2979-2997).
cagtgcatcgtttacttct

SEQ ID NO: 522794 - DNA, 19 bp, Mus musculus
  siRNA target sequence for Fliih (NM_022009.1,3024-3042).
ggctggctgaccttcacat

SEQ ID NO: 522795 - DNA, 19 bp, Mus musculus
  siRNA target sequence for Fliih (NM_022009.1,3046-3064).
gtcttcagaagaagtttga

SEQ ID NO: 522796 - DNA, 19 bp, Mus musculus
  siRNA target sequence for Fliih (NM_022009.1,3086-3104).
ggaggtagtacgtatgaca

SEQ ID NO: 522797 - DNA, 19 bp, Mus musculus
  siRNA target sequence for Fliih (NM_022009.1,3241-3259).
cccggtgcatccagattaa

SEQ ID NO: 522798 - DNA, 19 bp, Mus musculus
  siRNA target sequence for Fliih (NM_022009.1,3245-3263).
gtgcatccagattaacact

SEQ ID NO: 522799 - DNA, 19 bp, Mus musculus
  siRNA target sequence for Fliih (NM_022009.1,3395-3413).
catcctgaacactatgttt

SEQ ID NO: 522800 - DNA, 19 bp, Mus musculus
  siRNA target sequence for Fliih (NM_022009.1,3504-3522).
gacgatgcggagtacatga

SEQ ID NO: 522801 - DNA, 19 bp, Mus musculus
  siRNA target sequence for Fliih (NM_022009.1,3547-3565).
ccaatgagaagggttactt

SEQ ID NO: 522802 - DNA, 19 bp, Mus musculus
  siRNA target sequence for Fliih (NM_022009.1,3620-3638).
catcatgctgctagacaat

SEQ ID NO: 522803 - DNA, 19 bp, Mus musculus
  siRNA target sequence for Fliih (NM_022009.1,3639-3657).
ggccaagaagtctacatgt

SEQ ID NO: 522804 - DNA, 19 bp, Mus musculus
  siRNA target sequence for Fliih (NM_022009.1,3722-3740).
ccagcacacacgctctaaa

SEQ ID NO: 522805 - DNA, 19 bp, Mus musculus
  siRNA target sequence for Fliih (NM_022009.1,3730-3748).
cacgctctaaagaacatga

SEQ ID NO: 522806 - DNA, 19 bp, Mus musculus
  siRNA target sequence for Fliih (NM_022009.1,3765-3783).
cgcctggtccgcaaaggta

SEQ ID NO: 522807 - DNA, 19 bp, Mus musculus
  siRNA target sequence for Fmn (NM_010230.1,222-240).
ctgctatatcagcttctat

SEQ ID NO: 522808 - DNA, 19 bp, Mus musculus
  siRNA target sequence for Fmn (NM_010230.1,224-242).
gctatatcagcttctatct

SEQ ID NO: 522809 - DNA, 19 bp, Mus musculus
  siRNA target sequence for Fmn (NM_010230.1,225-243).
ctatatcagcttctatctt

SEQ ID NO: 522810 - DNA, 19 bp, Mus musculus
  siRNA target sequence for Fmn (NM_010230.1,250-268).
ggggaagtcagaggatttt

SEQ ID NO: 522811 - DNA, 19 bp, Mus musculus
  siRNA target sequence for Fmn (NM_010230.1,256-274).
gtcagaggattttcataca

SEQ ID NO: 522812 - DNA, 19 bp, Mus musculus
  siRNA target sequence for Fmn (NM_010230.1,287-305).
ctctagacagatccaataa

SEQ ID NO: 522813 - DNA, 19 bp, Mus musculus
  siRNA target sequence for Fmn (NM_010230.1,299-317).
ccaataacgctttccataa

SEQ ID NO: 522814 - DNA, 19 bp, Mus musculus
  siRNA target sequence for Fmn (NM_010230.1,376-394).
catccaggcgacatatttt

SEQ ID NO: 522815 - DNA, 19 bp, Mus musculus
  siRNA target sequence for Fmn (NM_010230.1,379-397).
ccaggcgacatatttttca

SEQ ID NO: 522816 - DNA, 19 bp, Mus musculus
  siRNA target sequence for Fmn (NM_010230.1,396-414).
caaacagactcccacaaaa

SEQ ID NO: 522817 - DNA, 19 bp, Mus musculus
  siRNA target sequence for Fmn (NM_010230.1,486-504).
caacatcctcggtgtttca

SEQ ID NO: 522818 - DNA, 19 bp, Mus musculus
  siRNA target sequence for Fmn (NM_010230.1,531-549).
ggagctgtcagtaatcctt

SEQ ID NO: 522819 - DNA, 19 bp, Mus musculus
  siRNA target sequence for Fmn (NM_010230.1,620-638).
ggaggagcacccaagagaa

SEQ ID NO: 522820 - DNA, 19 bp, Mus musculus
  siRNA target sequence for Fmn (NM_010230.1,801-819).
ccggctcctagaagaaaga

SEQ ID NO: 522821 - DNA, 19 bp, Mus musculus
  siRNA target sequence for Fmn (NM_010230.1,1038-1056).
ggagcccccacaaccaaat

SEQ ID NO: 522822 - DNA, 19 bp, Mus musculus
  siRNA target sequence for Fmn (NM_010230.1,1048-1066).
caaccaaatgtgtctgaaa

SEQ ID NO: 522823 - DNA, 19 bp, Mus musculus
  siRNA target sequence for Fmn (NM_010230.1,1109-1127).
ctcggaagtcaaagtcatt

SEQ ID NO: 522824 - DNA, 19 bp, Mus musculus
  siRNA target sequence for Fmn (NM_010230.1,1190-1208).
ccccagtaaaacgaatagt

SEQ ID NO: 522825 - DNA, 19 bp, Mus musculus
  siRNA target sequence for Fmn (NM_010230.1,1191-1209).
cccagtaaaacgaatagtt

SEQ ID NO: 522826 - DNA, 19 bp, Mus musculus
  siRNA target sequence for Fmn (NM_010230.1,1192-1210).
ccagtaaaacgaatagtta

SEQ ID NO: 522827 - DNA, 19 bp, Mus musculus
  siRNA target sequence for Fmn (NM_010230.1,1293-1311).
cctcccaggaggtgaaact

SEQ ID NO: 522828 - DNA, 19 bp, Mus musculus
  siRNA target sequence for Fmn (NM_010230.1,1378-1396).
ccagaaagagcctccatta

SEQ ID NO: 522829 - DNA, 19 bp, Mus musculus
  siRNA target sequence for Fmn (NM_010230.1,1415-1433).
ccgaggccgctgtgaacaa

SEQ ID NO: 522830 - DNA, 19 bp, Mus musculus
  siRNA target sequence for Fmn (NM_010230.1,1438-1456).
ctccgcaaggtgatagaga

SEQ ID NO: 522831 - DNA, 19 bp, Mus musculus
  siRNA target sequence for Fmn (NM_010230.1,1511-1529).
caagggccacccacacttt

SEQ ID NO: 522832 - DNA, 19 bp, Mus musculus
  siRNA target sequence for Fmn (NM_010230.1,1521-1539).
ccacactttcccagaaact

SEQ ID NO: 522833 - DNA, 19 bp, Mus musculus
  siRNA target sequence for Fmn (NM_010230.1,1564-1582).
ccgcagagtggccataaat

SEQ ID NO: 522834 - DNA, 19 bp, Mus musculus
  siRNA target sequence for Fmn (NM_010230.1,1565-1583).
cgcagagtggccataaatt

SEQ ID NO: 522835 - DNA, 19 bp, Mus musculus
  siRNA target sequence for Fmn (NM_010230.1,1631-1649).
ccaaatgcgatgagaagaa

SEQ ID NO: 522836 - DNA, 19 bp, Mus musculus
  siRNA target sequence for Fmn (NM_010230.1,1675-1693).
cttggcatggtatttaata

SEQ ID NO: 522837 - DNA, 19 bp, Mus musculus
  siRNA target sequence for Fmn (NM_010230.1,1834-1852).
gagtaccctagtagaaaga

SEQ ID NO: 522838 - DNA, 19 bp, Mus musculus
  siRNA target sequence for Fmn (NM_010230.1,1887-1905).
cttggagccatcatctact

SEQ ID NO: 522839 - DNA, 19 bp, Mus musculus
  siRNA target sequence for Fmn (NM_010230.1,2279-2297).
ggccacccccaaagacaaa

SEQ ID NO: 522840 - DNA, 19 bp, Mus musculus
  siRNA target sequence for Fmn (NM_010230.1,2432-2450).
ggggtgagcacgcattagt

SEQ ID NO: 522841 - DNA, 19 bp, Mus musculus
  siRNA target sequence for Fmn (NM_010230.1,2433-2451).
gggtgagcacgcattagta

SEQ ID NO: 522842 - DNA, 19 bp, Mus musculus
  siRNA target sequence for Fmn (NM_010230.1,2434-2452).
ggtgagcacgcattagtaa

SEQ ID NO: 522843 - DNA, 19 bp, Mus musculus
  siRNA target sequence for Fmn (NM_010230.1,2997-3015).
cctagctcttcctaacagt

SEQ ID NO: 522844 - DNA, 19 bp, Mus musculus
  siRNA target sequence for Fmn (NM_010230.1,3111-3129).
cagccagtatcctcgtaaa

SEQ ID NO: 522845 - DNA, 19 bp, Mus musculus
  siRNA target sequence for Fmn (NM_010230.1,3114-3132).
ccagtatcctcgtaaacca

SEQ ID NO: 522846 - DNA, 19 bp, Mus musculus
  siRNA target sequence for Fmn (NM_010230.1,3141-3159).
gcccagctgtcctatgaaa

SEQ ID NO: 522847 - DNA, 19 bp, Mus musculus
  siRNA target sequence for Fmn (NM_010230.1,3146-3164).
gctgtcctatgaaaccttt

SEQ ID NO: 522848 - DNA, 19 bp, Mus musculus
  siRNA target sequence for Fmn (NM_010230.1,3151-3169).
cctatgaaacctttgtatt

SEQ ID NO: 522849 - DNA, 19 bp, Mus musculus
  siRNA target sequence for Fmn (NM_010230.1,3202-3220).
gacgccgcaccaactttat

SEQ ID NO: 522850 - DNA, 19 bp, Mus musculus
  siRNA target sequence for Fmn (NM_010230.1,3227-3245).
ccttagaagagcctcatat

SEQ ID NO: 522851 - DNA, 19 bp, Mus musculus
  siRNA target sequence for Fmn (NM_010230.1,3228-3246).
cttagaagagcctcatatt

SEQ ID NO: 522852 - DNA, 19 bp, Mus musculus
  siRNA target sequence for Fmn (NM_010230.1,3248-3266).
gggacacaagtgaatttga

SEQ ID NO: 522853 - DNA, 19 bp, Mus musculus
  siRNA target sequence for Fmn (NM_010230.1,3285-3303).
cacaactcaacagaagaaa

SEQ ID NO: 522854 - DNA, 19 bp, Mus musculus
  siRNA target sequence for Fmn (NM_010230.1,3314-3332).
cagaggcctacgaaaagaa

SEQ ID NO: 522855 - DNA, 19 bp, Mus musculus
  siRNA target sequence for Fmn (NM_010230.1,3319-3337).
gcctacgaaaagaagaaca

SEQ ID NO: 522856 - DNA, 19 bp, Mus musculus
  siRNA target sequence for Fmn (NM_010230.1,3348-3366).
gatcatcaagttattggat

SEQ ID NO: 522857 - DNA, 19 bp, Mus musculus
  siRNA target sequence for Fmn (NM_010230.1,3364-3382).
gatggaaagcgatctcaaa

SEQ ID NO: 522858 - DNA, 19 bp, Mus musculus
  siRNA target sequence for Fmn (NM_010230.1,3368-3386).
gaaagcgatctcaaactgt

SEQ ID NO: 522859 - DNA, 19 bp, Mus musculus
  siRNA target sequence for Fmn (NM_010230.1,3393-3411).
cttgatatctagtttacat

SEQ ID NO: 522860 - DNA, 19 bp, Mus musculus
  siRNA target sequence for Fmn (NM_010230.1,3396-3414).
gatatctagtttacatcta

SEQ ID NO: 522861 - DNA, 19 bp, Mus musculus
  siRNA target sequence for Fmn (NM_010230.1,3401-3419).
ctagtttacatctagaaat

SEQ ID NO: 522862 - DNA, 19 bp, Mus musculus
  siRNA target sequence for Fmn (NM_010230.1,3409-3427).
catctagaaatgaaagata

SEQ ID NO: 522863 - DNA, 19 bp, Mus musculus
  siRNA target sequence for Fmn (NM_010230.1,3476-3494).
ccttagcagccttatatga

SEQ ID NO: 522864 - DNA, 19 bp, Mus musculus
  siRNA target sequence for Fmn (NM_010230.1,3507-3525).
ggaggatgaactgactaaa

SEQ ID NO: 522865 - DNA, 19 bp, Mus musculus
  siRNA target sequence for Fmn (NM_010230.1,3521-3539).
ctaaaataagaaagtacta

SEQ ID NO: 522866 - DNA, 19 bp, Mus musculus
  siRNA target sequence for Fmn (NM_010230.1,3534-3552).
gtactatgagacatccaaa

SEQ ID NO: 522867 - DNA, 19 bp, Mus musculus
  siRNA target sequence for Fmn (NM_010230.1,3573-3591).
ggacaaacctgaacaattt

SEQ ID NO: 522868 - DNA, 19 bp, Mus musculus
  siRNA target sequence for Fmn (NM_010230.1,3574-3592).
gacaaacctgaacaatttt

SEQ ID NO: 522869 - DNA, 19 bp, Mus musculus
  siRNA target sequence for Fmn (NM_010230.1,3625-3643).
gaacgtgcccagtgcataa

SEQ ID NO: 522870 - DNA, 19 bp, Mus musculus
  siRNA target sequence for Fmn (NM_010230.1,3628-3646).
cgtgcccagtgcataatct

SEQ ID NO: 522871 - DNA, 19 bp, Mus musculus
  siRNA target sequence for Fmn (NM_010230.1,3629-3647).
gtgcccagtgcataatctt

SEQ ID NO: 522872 - DNA, 19 bp, Mus musculus
  siRNA target sequence for Fmn (NM_010230.1,3631-3649).
gcccagtgcataatcttca

SEQ ID NO: 522873 - DNA, 19 bp, Mus musculus
  siRNA target sequence for Fmn (NM_010230.1,3666-3684).
gggtatcacatccttacat

SEQ ID NO: 522874 - DNA, 19 bp, Mus musculus
  siRNA target sequence for Fmn (NM_010230.1,3674-3692).
catccttacatcgaaaagt

SEQ ID NO: 522875 - DNA, 19 bp, Mus musculus
  siRNA target sequence for Fmn (NM_010230.1,3677-3695).
ccttacatcgaaaagtaga

SEQ ID NO: 522876 - DNA, 19 bp, Mus musculus
  siRNA target sequence for Fmn (NM_010230.1,3744-3762).
ggatatcttagctctcatt

SEQ ID NO: 522877 - DNA, 19 bp, Mus musculus
  siRNA target sequence for Fmn (NM_010230.1,3757-3775).
ctcattctggcttttggaa

SEQ ID NO: 522878 - DNA, 19 bp, Mus musculus
  siRNA target sequence for Fmn (NM_010230.1,3807-3825).
gcaagcagacggatatagt

SEQ ID NO: 522879 - DNA, 19 bp, Mus musculus
  siRNA target sequence for Fmn (NM_010230.1,3808-3826).
caagcagacggatatagtt

SEQ ID NO: 522880 - DNA, 19 bp, Mus musculus
  siRNA target sequence for Fmn (NM_010230.1,3812-3830).
cagacggatatagtttaga

SEQ ID NO: 522881 - DNA, 19 bp, Mus musculus
  siRNA target sequence for Fmn (NM_010230.1,3816-3834).
cggatatagtttagaaatt

SEQ ID NO: 522882 - DNA, 19 bp, Mus musculus
  siRNA target sequence for Fmn (NM_010230.1,3863-3881).
gggacaatgggatgaatct

SEQ ID NO: 522883 - DNA, 19 bp, Mus musculus
  siRNA target sequence for Fmn (NM_010230.1,3876-3894).
gaatctggtggactatgtt

SEQ ID NO: 522884 - DNA, 19 bp, Mus musculus
  siRNA target sequence for Fmn (NM_010230.1,3900-3918).
gtactacctgcgatactat

SEQ ID NO: 522885 - DNA, 19 bp, Mus musculus
  siRNA target sequence for Fmn (NM_010230.1,4092-4110).
ctctcaagtcaagtttgaa

SEQ ID NO: 522886 - DNA, 19 bp, Mus musculus
  siRNA target sequence for Fmn (NM_010230.1,4108-4126).
gaagacctcctaaaggatt

SEQ ID NO: 522887 - DNA, 19 bp, Mus musculus
  siRNA target sequence for Fmn (NM_010230.1,4131-4149).
gaagctgaagcgtcaacta

SEQ ID NO: 522888 - DNA, 19 bp, Mus musculus
  siRNA target sequence for Fmn (NM_010230.1,4284-4302).
gaatgcacagaaaagtttt

SEQ ID NO: 522889 - DNA, 19 bp, Mus musculus
  siRNA target sequence for Fmn (NM_010230.1,4358-4376).
cccccagctatgtgtttat

SEQ ID NO: 522890 - DNA, 19 bp, Mus musculus
  siRNA target sequence for Fmn (NM_010230.1,4420-4438).
cgggagagtaagaacatat

SEQ ID NO: 522891 - DNA, 19 bp, Mus musculus
  siRNA target sequence for Fmn (NM_010230.1,4425-4443).
gagtaagaacatatctaaa

SEQ ID NO: 522892 - DNA, 19 bp, Mus musculus
  siRNA target sequence for Fmn (NM_010230.1,4427-4445).
gtaagaacatatctaaaga

SEQ ID NO: 522893 - DNA, 19 bp, Mus musculus
  siRNA target sequence for Fmn (NM_010230.1,4465-4483).
gcatccgtcagcaaactga

SEQ ID NO: 522894 - DNA, 19 bp, Mus musculus
  siRNA target sequence for Fmn (NM_010230.1,4521-4539).
caccgctagtctgaaagaa

SEQ ID NO: 522895 - DNA, 19 bp, Mus musculus
  siRNA target sequence for Fmn (NM_010230.1,4524-4542).
cgctagtctgaaagaaaga

SEQ ID NO: 522896 - DNA, 19 bp, Mus musculus
  siRNA target sequence for Fmn (NM_010230.1,4526-4544).
ctagtctgaaagaaagact

SEQ ID NO: 522897 - DNA, 19 bp, Mus musculus
  siRNA target sequence for Fmn2 (NM_019445.1,399-417).
gagcaagtccgattctaga

SEQ ID NO: 522898 - DNA, 19 bp, Mus musculus
  siRNA target sequence for Fmn2 (NM_019445.1,416-434).
gagcctcggtgttttccaa

SEQ ID NO: 522899 - DNA, 19 bp, Mus musculus
  siRNA target sequence for Fmn2 (NM_019445.1,431-449).
ccaacctgcggatcagaaa

SEQ ID NO: 522900 - DNA, 19 bp, Mus musculus
  siRNA target sequence for Fmn2 (NM_019445.1,678-696).
gaccgcggaggatttggaa

SEQ ID NO: 522901 - DNA, 19 bp, Mus musculus
  siRNA target sequence for Fmn2 (NM_019445.1,773-791).
cggagcaggaggatttgct

SEQ ID NO: 522902 - DNA, 19 bp, Mus musculus
  siRNA target sequence for Fmn2 (NM_019445.1,941-959).
gaagcgaggctgaaaagga

SEQ ID NO: 522903 - DNA, 19 bp, Mus musculus
  siRNA target sequence for Fmn2 (NM_019445.1,1194-1212).
gtgcgaggaggatgctttt

SEQ ID NO: 522904 - DNA, 19 bp, Mus musculus
  siRNA target sequence for Fmn2 (NM_019445.1,1361-1379).
cacgctgcttcaaacctta

SEQ ID NO: 522905 - DNA, 19 bp, Mus musculus
  siRNA target sequence for Fmn2 (NM_019445.1,1419-1437).
gcagctcagctctcctaat

SEQ ID NO: 522906 - DNA, 19 bp, Mus musculus
  siRNA target sequence for Fmn2 (NM_019445.1,1462-1480).
cagagtcctaggatcaaaa

SEQ ID NO: 522907 - DNA, 19 bp, Mus musculus
  siRNA target sequence for Fmn2 (NM_019445.1,1845-1863).
cgccatgggtcttctactt

SEQ ID NO: 522908 - DNA, 19 bp, Mus musculus
  siRNA target sequence for Fmn2 (NM_019445.1,1878-1896).
cttcagggaaccgtgtaat

SEQ ID NO: 522909 - DNA, 19 bp, Mus musculus
  siRNA target sequence for Fmn2 (NM_019445.1,1883-1901).
gggaaccgtgtaatcagaa

SEQ ID NO: 522910 - DNA, 19 bp, Mus musculus
  siRNA target sequence for Fmn2 (NM_019445.1,1916-1934).
cagctccatttgatcaaga

SEQ ID NO: 522911 - DNA, 19 bp, Mus musculus
  siRNA target sequence for Fmn2 (NM_019445.1,1919-1937).
ctccatttgatcaagatca

SEQ ID NO: 522912 - DNA, 19 bp, Mus musculus
  siRNA target sequence for Fmn2 (NM_019445.1,1946-1964).
cctgggctgcggttagtca

SEQ ID NO: 522913 - DNA, 19 bp, Mus musculus
  siRNA target sequence for Fmn2 (NM_019445.1,1947-1965).
ctgggctgcggttagtcaa

SEQ ID NO: 522914 - DNA, 19 bp, Mus musculus
  siRNA target sequence for Fmn2 (NM_019445.1,2067-2085).
cgttgatacagaacctaaa

SEQ ID NO: 522915 - DNA, 19 bp, Mus musculus
  siRNA target sequence for Fmn2 (NM_019445.1,2068-2086).
gttgatacagaacctaaat

SEQ ID NO: 522916 - DNA, 19 bp, Mus musculus
  siRNA target sequence for Fmn2 (NM_019445.1,2071-2089).
gatacagaacctaaatcct

SEQ ID NO: 522917 - DNA, 19 bp, Mus musculus
  siRNA target sequence for Fmn2 (NM_019445.1,2103-2121).
cccgaaaaaatgctcaaat

SEQ ID NO: 522918 - DNA, 19 bp, Mus musculus
  siRNA target sequence for Fmn2 (NM_019445.1,2106-2124).
gaaaaaatgctcaaatggt

SEQ ID NO: 522919 - DNA, 19 bp, Mus musculus
  siRNA target sequence for Fmn2 (NM_019445.1,2196-2214).
cgaggatctacgcacaaaa

SEQ ID NO: 522920 - DNA, 19 bp, Mus musculus
  siRNA target sequence for Fmn2 (NM_019445.1,2197-2215).
gaggatctacgcacaaaaa

SEQ ID NO: 522921 - DNA, 19 bp, Mus musculus
  siRNA target sequence for Fmn2 (NM_019445.1,2199-2217).
ggatctacgcacaaaaata

SEQ ID NO: 522922 - DNA, 19 bp, Mus musculus
  siRNA target sequence for Fmn2 (NM_019445.1,2223-2241).
gctagagaagcaatatcca

SEQ ID NO: 522923 - DNA, 19 bp, Mus musculus
  siRNA target sequence for Fmn2 (NM_019445.1,2312-2330).
gtctagatgctcttgtatt

SEQ ID NO: 522924 - DNA, 19 bp, Mus musculus
  siRNA target sequence for Fmn2 (NM_019445.1,2358-2376).
gactcttgaggcaaaatca

SEQ ID NO: 522925 - DNA, 19 bp, Mus musculus
  siRNA target sequence for Fmn2 (NM_019445.1,2360-2378).
ctcttgaggcaaaatcaat

SEQ ID NO: 522926 - DNA, 19 bp, Mus musculus
  siRNA target sequence for Fmn2 (NM_019445.1,2382-2400).
gacttccccaacagaagaa

SEQ ID NO: 522927 - DNA, 19 bp, Mus musculus
  siRNA target sequence for Fmn2 (NM_019445.1,2473-2491).
ggagagtcagcccttctaa

SEQ ID NO: 522928 - DNA, 19 bp, Mus musculus
  siRNA target sequence for Fmn2 (NM_019445.1,2503-2521).
ggacctcagacaaaattct

SEQ ID NO: 522929 - DNA, 19 bp, Mus musculus
  siRNA target sequence for Fmn2 (NM_019445.1,2525-2543).
cagagatttctctgattgt

SEQ ID NO: 522930 - DNA, 19 bp, Mus musculus
  siRNA target sequence for Fmn2 (NM_019445.1,2542-2560).
gtgtctccaaggagaatat

SEQ ID NO: 522931 - DNA, 19 bp, Mus musculus
  siRNA target sequence for Fmn2 (NM_019445.1,2544-2562).
gtctccaaggagaatatca

SEQ ID NO: 522932 - DNA, 19 bp, Mus musculus
  siRNA target sequence for Fmn2 (NM_019445.1,2568-2586).
gctggatgcccaacagata

SEQ ID NO: 522933 - DNA, 19 bp, Mus musculus
  siRNA target sequence for Fmn2 (NM_019445.1,2583-2601).
gatacagagtgcatcacaa

SEQ ID NO: 522934 - DNA, 19 bp, Mus musculus
  siRNA target sequence for Fmn2 (NM_019445.1,2677-2695).
gaaaccagccatgaacatt

SEQ ID NO: 522935 - DNA, 19 bp, Mus musculus
  siRNA target sequence for Fmn2 (NM_019445.1,2851-2869).
gccccagccctacaattta

SEQ ID NO: 522936 - DNA, 19 bp, Mus musculus
  siRNA target sequence for Fmn2 (NM_019445.1,2854-2872).
ccagccctacaatttagca

SEQ ID NO: 522937 - DNA, 19 bp, Mus musculus
  siRNA target sequence for Fmn2 (NM_019445.1,2855-2873).
cagccctacaatttagcaa

SEQ ID NO: 522938 - DNA, 19 bp, Mus musculus
  siRNA target sequence for Fmn2 (NM_019445.1,3523-3541).
caagggtgtggatttcttt

SEQ ID NO: 522939 - DNA, 19 bp, Mus musculus
  siRNA target sequence for Fmn2 (NM_019445.1,3555-3573).
cactggcttgtttggatta

SEQ ID NO: 522940 - DNA, 19 bp, Mus musculus
  siRNA target sequence for Fmn2 (NM_019445.1,3564-3582).
gtttggattagggatgaat

SEQ ID NO: 522941 - DNA, 19 bp, Mus musculus
  siRNA target sequence for Fmn2 (NM_019445.1,3624-3642).
gccaatgaagcctctctat

SEQ ID NO: 522942 - DNA, 19 bp, Mus musculus
  siRNA target sequence for Fmn2 (NM_019445.1,3625-3643).
ccaatgaagcctctctatt

SEQ ID NO: 522943 - DNA, 19 bp, Mus musculus
  siRNA target sequence for Fmn2 (NM_019445.1,3650-3668).
gaattcaactccatagtaa

SEQ ID NO: 522944 - DNA, 19 bp, Mus musculus
  siRNA target sequence for Fmn2 (NM_019445.1,3687-3705).
gcttatttgggaaaagatt

SEQ ID NO: 522945 - DNA, 19 bp, Mus musculus
  siRNA target sequence for Fmn2 (NM_019445.1,3702-3720).
gattgaagagccatccata

SEQ ID NO: 522946 - DNA, 19 bp, Mus musculus
  siRNA target sequence for Fmn2 (NM_019445.1,3847-3865).
caagcagtaggaattctaa

SEQ ID NO: 522947 - DNA, 19 bp, Mus musculus
  siRNA target sequence for Fmn2 (NM_019445.1,3867-3885).
gtctagtctgcatttagat

SEQ ID NO: 522948 - DNA, 19 bp, Mus musculus
  siRNA target sequence for Fmn2 (NM_019445.1,3869-3887).
ctagtctgcatttagatat

SEQ ID NO: 522949 - DNA, 19 bp, Mus musculus
  siRNA target sequence for Fmn2 (NM_019445.1,3944-3962).
cccttcaagctctctatga

SEQ ID NO: 522950 - DNA, 19 bp, Mus musculus
  siRNA target sequence for Fmn2 (NM_019445.1,3949-3967).
caagctctctatgagaata

SEQ ID NO: 522951 - DNA, 19 bp, Mus musculus
  siRNA target sequence for Fmn2 (NM_019445.1,4094-4112).
ccgagcgggtcttctgtat

SEQ ID NO: 522952 - DNA, 19 bp, Mus musculus
  siRNA target sequence for Fmn2 (NM_019445.1,4137-4155).
gagcatttgctcaattcgt

SEQ ID NO: 522953 - DNA, 19 bp, Mus musculus
  siRNA target sequence for Fmn2 (NM_019445.1,4165-4183).
gaattgctacaaaaactgt

SEQ ID NO: 522954 - DNA, 19 bp, Mus musculus
  siRNA target sequence for Fmn2 (NM_019445.1,4182-4200).
gtgtgagaccttaaaaaat

SEQ ID NO: 522955 - DNA, 19 bp, Mus musculus
  siRNA target sequence for Fmn2 (NM_019445.1,4346-4364).
gaagccttttgtcatatat

SEQ ID NO: 522956 - DNA, 19 bp, Mus musculus
  siRNA target sequence for Fmn2 (NM_019445.1,4526-4544).
cggaagccggtaaagtgta

SEQ ID NO: 522957 - DNA, 19 bp, Mus musculus
  siRNA target sequence for Fmn2 (NM_019445.1,4553-4571).
cctctgcggagcatatgca

SEQ ID NO: 522958 - DNA, 19 bp, Mus musculus
  siRNA target sequence for Fmn2 (NM_019445.1,4646-4664).
cagagactcataaatgctt

SEQ ID NO: 522959 - DNA, 19 bp, Mus musculus
  siRNA target sequence for Fmn2 (NM_019445.1,4648-4666).
gagactcataaatgctttt

SEQ ID NO: 522960 - DNA, 19 bp, Mus musculus
  siRNA target sequence for Fmn2 (NM_019445.1,4652-4670).
ctcataaatgctttttgga

SEQ ID NO: 522961 - DNA, 19 bp, Mus musculus
  siRNA target sequence for Fmn2 (NM_019445.1,4830-4848).
ggtgtgtaggcagaagaaa

SEQ ID NO: 522962 - DNA, 19 bp, Mus musculus
  siRNA target sequence for Fmn2 (NM_019445.1,4850-4868).
gaaaatcactctataaagt

SEQ ID NO: 522963 - DNA, 19 bp, Mus musculus
  siRNA target sequence for Fmn2 (NM_019445.1,4888-4906).
gggattaaagcgaagataa

SEQ ID NO: 522964 - DNA, 19 bp, Mus musculus
  siRNA target sequence for Fmnl (NM_019679.1,35-53).
ggttcacgcgggtcttgaa

SEQ ID NO: 522965 - DNA, 19 bp, Mus musculus
  siRNA target sequence for Fmnl (NM_019679.1,41-59).
cgcgggtcttgaactgtat

SEQ ID NO: 522966 - DNA, 19 bp, Mus musculus
  siRNA target sequence for Fmnl (NM_019679.1,213-231).
ccgaaaggtagcatctgat

SEQ ID NO: 522967 - DNA, 19 bp, Mus musculus
  siRNA target sequence for Fmnl (NM_019679.1,214-232).
cgaaaggtagcatctgatt

SEQ ID NO: 522968 - DNA, 19 bp, Mus musculus
  siRNA target sequence for Fmnl (NM_019679.1,393-411).
ccagtgctctgttgcatat

SEQ ID NO: 522969 - DNA, 19 bp, Mus musculus
  siRNA target sequence for Fmnl (NM_019679.1,398-416).
gctctgttgcatatgacat

SEQ ID NO: 522970 - DNA, 19 bp, Mus musculus
  siRNA target sequence for Fmnl (NM_019679.1,501-519).
ctcatctgtgcccaaaagt

SEQ ID NO: 522971 - DNA, 19 bp, Mus musculus
  siRNA target sequence for Fmnl (NM_019679.1,606-624).
gtgcatcatgtgtctaaga

SEQ ID NO: 522972 - DNA, 19 bp, Mus musculus
  siRNA target sequence for Fmnl (NM_019679.1,647-665).
gcttcagccttgttatgaa

SEQ ID NO: 522973 - DNA, 19 bp, Mus musculus
  siRNA target sequence for Fmnl (NM_019679.1,691-709).
gctctaagccttaacaaca

SEQ ID NO: 522974 - DNA, 19 bp, Mus musculus
  siRNA target sequence for Fmnl (NM_019679.1,692-710).
ctctaagccttaacaacaa

SEQ ID NO: 522975 - DNA, 19 bp, Mus musculus
  siRNA target sequence for Fmnl (NM_019679.1,828-846).
gcaccgatttgaaaagcta

SEQ ID NO: 522976 - DNA, 19 bp, Mus musculus
  siRNA target sequence for Fmnl (NM_019679.1,922-940).
cactctgtggagaatatga

SEQ ID NO: 522977 - DNA, 19 bp, Mus musculus
  siRNA target sequence for Fmnl (NM_019679.1,1045-1063).
gcgtatctggacaacgttt

SEQ ID NO: 522978 - DNA, 19 bp, Mus musculus
  siRNA target sequence for Fmnl (NM_019679.1,1046-1064).
cgtatctggacaacgtttt

SEQ ID NO: 522979 - DNA, 19 bp, Mus musculus
  siRNA target sequence for Fmnl (NM_019679.1,1047-1065).
gtatctggacaacgttttt

SEQ ID NO: 522980 - DNA, 19 bp, Mus musculus
  siRNA target sequence for Fmnl (NM_019679.1,1220-1238).
gccaggctcgcaaggaatt

SEQ ID NO: 522981 - DNA, 19 bp, Mus musculus
  siRNA target sequence for Fmnl (NM_019679.1,1332-1350).
gcgaccctcggctctagaa

SEQ ID NO: 522982 - DNA, 19 bp, Mus musculus
  siRNA target sequence for Fmnl (NM_019679.1,1337-1355).
cctcggctctagaactgaa

SEQ ID NO: 522983 - DNA, 19 bp, Mus musculus
  siRNA target sequence for Fmnl (NM_019679.1,1496-1514).
ctagcacagcagagtcaat

SEQ ID NO: 522984 - DNA, 19 bp, Mus musculus
  siRNA target sequence for Fmnl (NM_019679.1,1828-1846).
cggatgccactgcttaact

SEQ ID NO: 522985 - DNA, 19 bp, Mus musculus
  siRNA target sequence for Fmnl (NM_019679.1,1914-1932).
ccaggagctagacatgaat

SEQ ID NO: 522986 - DNA, 19 bp, Mus musculus
  siRNA target sequence for Fmnl (NM_019679.1,1942-1960).
gaacactttaagaccaaat

SEQ ID NO: 522987 - DNA, 19 bp, Mus musculus
  siRNA target sequence for Fmnl (NM_019679.1,1966-1984).
ggtccctgcctggatatca

SEQ ID NO: 522988 - DNA, 19 bp, Mus musculus
  siRNA target sequence for Fmnl (NM_019679.1,2017-2035).
cccactaagacaatactca

SEQ ID NO: 522989 - DNA, 19 bp, Mus musculus
  siRNA target sequence for Fmnl (NM_019679.1,2021-2039).
ctaagacaatactcattga

SEQ ID NO: 522990 - DNA, 19 bp, Mus musculus
  siRNA target sequence for Fmnl (NM_019679.1,2287-2305).
cttccggagcgcatgaaca

SEQ ID NO: 522991 - DNA, 19 bp, Mus musculus
  siRNA target sequence for Fmnl (NM_019679.1,2370-2388).
cattgcagcctctatgtct

SEQ ID NO: 522992 - DNA, 19 bp, Mus musculus
  siRNA target sequence for Fmnl (NM_019679.1,2411-2429).
gccagatcctagagattgt

SEQ ID NO: 522993 - DNA, 19 bp, Mus musculus
  siRNA target sequence for Fmnl (NM_019679.1,2464-2482).
cgtggggcagcctatggtt

SEQ ID NO: 522994 - DNA, 19 bp, Mus musculus
  siRNA target sequence for Fmnl (NM_019679.1,2582-2600).
cacagctcacgggttttca

SEQ ID NO: 522995 - DNA, 19 bp, Mus musculus
  siRNA target sequence for Fmnl (NM_019679.1,2586-2604).
gctcacgggttttcatagt

SEQ ID NO: 522996 - DNA, 19 bp, Mus musculus
  siRNA target sequence for Fmnl (NM_019679.1,2603-2621).
gtgatctgcactttttgga

SEQ ID NO: 522997 - DNA, 19 bp, Mus musculus
  siRNA target sequence for Fmnl (NM_019679.1,2811-2829).
gtctgtggtggagtacttt

SEQ ID NO: 522998 - DNA, 19 bp, Mus musculus
  siRNA target sequence for Fscn1 (NM_007984.1,187-205).
gctagtagcttgaaaaaga

SEQ ID NO: 522999 - DNA, 19 bp, Mus musculus
  siRNA target sequence for Fscn1 (NM_007984.1,493-511).
cacccgcaggttaacatct

SEQ ID NO: 523000 - DNA, 19 bp, Mus musculus
  siRNA target sequence for Fscn1 (NM_007984.1,496-514).
ccgcaggttaacatctaca

SEQ ID NO: 523001 - DNA, 19 bp, Mus musculus
  siRNA target sequence for Fscn1 (NM_007984.1,813-831).
caccaaggtgggcaaagat

SEQ ID NO: 523002 - DNA, 19 bp, Mus musculus
  siRNA target sequence for Fscn1 (NM_007984.1,815-833).
ccaaggtgggcaaagatga

SEQ ID NO: 523003 - DNA, 19 bp, Mus musculus
  siRNA target sequence for Fscn1 (NM_007984.1,973-991).
gaccgcgacacaagaaagt

SEQ ID NO: 523004 - DNA, 19 bp, Mus musculus
  siRNA target sequence for Fscn1 (NM_007984.1,975-993).
ccgcgacacaagaaagtgt

SEQ ID NO: 523005 - DNA, 19 bp, Mus musculus
  siRNA target sequence for Fscn1 (NM_007984.1,1068-1086).
gaacgccagctgctacttt

SEQ ID NO: 523006 - DNA, 19 bp, Mus musculus
  siRNA target sequence for Fscn1 (NM_007984.1,1072-1090).
gccagctgctactttgaca

SEQ ID NO: 523007 - DNA, 19 bp, Mus musculus
  siRNA target sequence for Fscn1 (NM_007984.1,1124-1142).
cctccaacggcaagtttgt

SEQ ID NO: 523008 - DNA, 19 bp, Mus musculus
  siRNA target sequence for Fscn1 (NM_007984.1,1357-1375).
gactccacgggcaagtact

SEQ ID NO: 523009 - DNA, 19 bp, Mus musculus
  siRNA target sequence for Fscn1 (NM_007984.1,1412-1430).
gcgacacccctgtggattt

SEQ ID NO: 523010 - DNA, 19 bp, Mus musculus
  siRNA target sequence for Fscn3 (NM_019569.2,197-215).
ctcacctttgaagcatata

SEQ ID NO: 523011 - DNA, 19 bp, Mus musculus
  siRNA target sequence for Fscn3 (NM_019569.2,202-220).
ctttgaagcatataagagt

SEQ ID NO: 523012 - DNA, 19 bp, Mus musculus
  siRNA target sequence for Fscn3 (NM_019569.2,299-317).
gctgtgatacgactaaaga

SEQ ID NO: 523013 - DNA, 19 bp, Mus musculus
  siRNA target sequence for Fscn3 (NM_019569.2,445-463).
catctctggtcgctatctt

SEQ ID NO: 523014 - DNA, 19 bp, Mus musculus
  siRNA target sequence for Fscn3 (NM_019569.2,468-486).
ccgatggggaggatgtatt

SEQ ID NO: 523015 - DNA, 19 bp, Mus musculus
  siRNA target sequence for Fscn3 (NM_019569.2,470-488).
gatggggaggatgtattct

SEQ ID NO: 523016 - DNA, 19 bp, Mus musculus
  siRNA target sequence for Fscn3 (NM_019569.2,499-517).
ggttctttcagcttaccat

SEQ ID NO: 523017 - DNA, 19 bp, Mus musculus
  siRNA target sequence for Fscn3 (NM_019569.2,500-518).
gttctttcagcttaccata

SEQ ID NO: 523018 - DNA, 19 bp, Mus musculus
  siRNA target sequence for Fscn3 (NM_019569.2,503-521).
ctttcagcttaccatatgt

SEQ ID NO: 523019 - DNA, 19 bp, Mus musculus
  siRNA target sequence for Fscn3 (NM_019569.2,667-685).
ccaagatggatgttaccat

SEQ ID NO: 523020 - DNA, 19 bp, Mus musculus
  siRNA target sequence for Fscn3 (NM_019569.2,783-801).
gactcgtggccctatgtga

SEQ ID NO: 523021 - DNA, 19 bp, Mus musculus
  siRNA target sequence for Fscn3 (NM_019569.2,803-821).
ggagaaggcggcacattgt

SEQ ID NO: 523022 - DNA, 19 bp, Mus musculus
  siRNA target sequence for Fscn3 (NM_019569.2,820-838).
gtatccgcagggttcacat

SEQ ID NO: 523023 - DNA, 19 bp, Mus musculus
  siRNA target sequence for Fscn3 (NM_019569.2,825-843).
cgcagggttcacatcttct

SEQ ID NO: 523024 - DNA, 19 bp, Mus musculus
  siRNA target sequence for Fscn3 (NM_019569.2,826-844).
gcagggttcacatcttcta

SEQ ID NO: 523025 - DNA, 19 bp, Mus musculus
  siRNA target sequence for Fscn3 (NM_019569.2,940-958).
cctctcagtcatctatgat

SEQ ID NO: 523026 - DNA, 19 bp, Mus musculus
  siRNA target sequence for Fscn3 (NM_019569.2,1077-1095).
ggaggcatcgggcaatcat

SEQ ID NO: 523027 - DNA, 19 bp, Mus musculus
  siRNA target sequence for Fscn3 (NM_019569.2,1132-1150).
ccgagtgcactggaattgt

SEQ ID NO: 523028 - DNA, 19 bp, Mus musculus
  siRNA target sequence for Fscn3 (NM_019569.2,1197-1215).
cctctgatggcctgctaat

SEQ ID NO: 523029 - DNA, 19 bp, Mus musculus
  siRNA target sequence for Fscn3 (NM_019569.2,1282-1300).
cgtcttacgcggtcgatat

SEQ ID NO: 523030 - DNA, 19 bp, Mus musculus
  siRNA target sequence for Fscn3 (NM_019569.2,1380-1398).
gtcgccagggcatctatca

SEQ ID NO: 523031 - DNA, 19 bp, Mus musculus
  siRNA target sequence for Fscn3 (NM_019569.2,1415-1433).
ggatccttctggtcaataa

SEQ ID NO: 523032 - DNA, 19 bp, Mus musculus
  siRNA target sequence for Fscn3 (NM_019569.2,1461-1479).
gaaaatttgccctcaactt

SEQ ID NO: 523033 - DNA, 19 bp, Mus musculus
  siRNA target sequence for Fscn3 (NM_019569.2,1474-1492).
caacttctgcatagaacta

SEQ ID NO: 523034 - DNA, 19 bp, Mus musculus
  siRNA target sequence for Fscn3 (NM_019569.2,1547-1565).
gaccggagtggcacactat

SEQ ID NO: 523035 - DNA, 19 bp, Mus musculus
  siRNA target sequence for Gmfb (NM_022023.1,197-215).
cccacaatgctgctattat

SEQ ID NO: 523036 - DNA, 19 bp, Mus musculus
  siRNA target sequence for Gmfb (NM_022023.1,206-224).
ctgctattataatgaagat

SEQ ID NO: 523037 - DNA, 19 bp, Mus musculus
  siRNA target sequence for Gmfb (NM_022023.1,209-227).
ctattataatgaagattga

SEQ ID NO: 523038 - DNA, 19 bp, Mus musculus
  siRNA target sequence for Gmfb (NM_022023.1,267-285).
gggtgtctctccagatgaa

SEQ ID NO: 523039 - DNA, 19 bp, Mus musculus
  siRNA target sequence for Gmfb (NM_022023.1,306-324).
gcggcagcctcgcttcatt

SEQ ID NO: 523040 - DNA, 19 bp, Mus musculus
  siRNA target sequence for Gmfb (NM_022023.1,316-334).
cgcttcattgtgtatagtt

SEQ ID NO: 523041 - DNA, 19 bp, Mus musculus
  siRNA target sequence for Gmfb (NM_022023.1,317-335).
gcttcattgtgtatagtta

SEQ ID NO: 523042 - DNA, 19 bp, Mus musculus
  siRNA target sequence for Gmfb (NM_022023.1,332-350).
gttataaataccaacatga

SEQ ID NO: 523043 - DNA, 19 bp, Mus musculus
  siRNA target sequence for Gmfb (NM_022023.1,365-383).
cgtacccgctctgctttat

SEQ ID NO: 523044 - DNA, 19 bp, Mus musculus
  siRNA target sequence for Gmfb (NM_022023.1,366-384).
gtacccgctctgctttatt

SEQ ID NO: 523045 - DNA, 19 bp, Mus musculus
  siRNA target sequence for Gmfb (NM_022023.1,460-478).
gccgagctaaccaaggtat

SEQ ID NO: 523046 - DNA, 19 bp, Mus musculus
  siRNA target sequence for Gmfb (NM_022023.1,462-480).
cgagctaaccaaggtattt

SEQ ID NO: 523047 - DNA, 19 bp, Mus musculus
  siRNA target sequence for Gmfb (NM_022023.1,520-538).
cgtgagaaacttggatttt

SEQ ID NO: 523048 - DNA, 19 bp, Mus musculus
  siRNA target sequence for Gmfg (NM_022024.1,511-529).
ccgagacctggcttaagga

SEQ ID NO: 523049 - DNA, 19 bp, Mus musculus
  siRNA target sequence for Gmfg (NM_022024.1,512-530).
cgagacctggcttaaggaa

SEQ ID NO: 523050 - DNA, 19 bp, Mus musculus
  siRNA target sequence for Grid2ip (NM_133355.1,57-75).
gagctgcctagggatcttt

SEQ ID NO: 523051 - DNA, 19 bp, Mus musculus
  siRNA target sequence for Grid2ip (NM_133355.1,59-77).
gctgcctagggatctttat

SEQ ID NO: 523052 - DNA, 19 bp, Mus musculus
  siRNA target sequence for Grid2ip (NM_133355.1,60-78).
ctgcctagggatctttatt

SEQ ID NO: 523053 - DNA, 19 bp, Mus musculus
  siRNA target sequence for Grid2ip (NM_133355.1,72-90).
ctttattcccaaaaagcat

SEQ ID NO: 523054 - DNA, 19 bp, Mus musculus
  siRNA target sequence for Grid2ip (NM_133355.1,199-217).
ccggagcgcctcttagtgt

SEQ ID NO: 523055 - DNA, 19 bp, Mus musculus
  siRNA target sequence for Grid2ip (NM_133355.1,314-332).
gtaggacggttcgagttta

SEQ ID NO: 523056 - DNA, 19 bp, Mus musculus
  siRNA target sequence for Grid2ip (NM_133355.1,317-335).
ggacggttcgagtttataa

SEQ ID NO: 523057 - DNA, 19 bp, Mus musculus
  siRNA target sequence for Grid2ip (NM_133355.1,318-336).
gacggttcgagtttataaa

SEQ ID NO: 523058 - DNA, 19 bp, Mus musculus
  siRNA target sequence for Grid2ip (NM_133355.1,328-346).
gtttataaaggcaacaaga

SEQ ID NO: 523059 - DNA, 19 bp, Mus musculus
  siRNA target sequence for Grid2ip (NM_133355.1,373-391).
ggaccggtctggatcgaat

SEQ ID NO: 523060 - DNA, 19 bp, Mus musculus
  siRNA target sequence for Grid2ip (NM_133355.1,553-571).
gtccctttcgccagtgatt

SEQ ID NO: 523061 - DNA, 19 bp, Mus musculus
  siRNA target sequence for Grid2ip (NM_133355.1,555-573).
ccctttcgccagtgattca

SEQ ID NO: 523062 - DNA, 19 bp, Mus musculus
  siRNA target sequence for Grid2ip (NM_133355.1,728-746).
ctctcgagcgcttctttca

SEQ ID NO: 523063 - DNA, 19 bp, Mus musculus
  siRNA target sequence for Grid2ip (NM_133355.1,745-763).
cagcacaggaacatcgata

SEQ ID NO: 523064 - DNA, 19 bp, Mus musculus
  siRNA target sequence for Grid2ip (NM_133355.1,764-782).
ccctcatcgtggatgtcta

SEQ ID NO: 523065 - DNA, 19 bp, Mus musculus
  siRNA target sequence for Grid2ip (NM_133355.1,1132-1150).
cctaaccccaaaatgatgt

SEQ ID NO: 523066 - DNA, 19 bp, Mus musculus
  siRNA target sequence for Grid2ip (NM_133355.1,1594-1612).
ctgacacccgagaatgact

SEQ ID NO: 523067 - DNA, 19 bp, Mus musculus
  siRNA target sequence for Grid2ip (NM_133355.1,1596-1614).
gacacccgagaatgactat

SEQ ID NO: 523068 - DNA, 19 bp, Mus musculus
  siRNA target sequence for Grid2ip (NM_133355.1,2181-2199).
ccacaagaaggcctacaat

SEQ ID NO: 523069 - DNA, 19 bp, Mus musculus
  siRNA target sequence for Grid2ip (NM_133355.1,2182-2200).
cacaagaaggcctacaata

SEQ ID NO: 523070 - DNA, 19 bp, Mus musculus
  siRNA target sequence for Grid2ip (NM_133355.1,2566-2584).
gccatgggtaactatctca

SEQ ID NO: 523071 - DNA, 19 bp, Mus musculus
  siRNA target sequence for Grid2ip (NM_133355.1,2567-2585).
ccatgggtaactatctcaa

SEQ ID NO: 523072 - DNA, 19 bp, Mus musculus
  siRNA target sequence for Grid2ip (NM_133355.1,2758-2776).
cccctggctgccaaagtga

SEQ ID NO: 523073 - DNA, 19 bp, Mus musculus
  siRNA target sequence for Gsn (NM_146120.2,230-248).
ggcgtgtggagaagtttga

SEQ ID NO: 523074 - DNA, 19 bp, Mus musculus
  siRNA target sequence for Gsn (NM_146120.2,290-308).
cgggtgatgcctatgtcat

SEQ ID NO: 523075 - DNA, 19 bp, Mus musculus
  siRNA target sequence for Gsn (NM_146120.2,300-318).
ctatgtcatcctaaagact

SEQ ID NO: 523076 - DNA, 19 bp, Mus musculus
  siRNA target sequence for Gsn (NM_146120.2,357-375).
ctattggctgggcaatgaa

SEQ ID NO: 523077 - DNA, 19 bp, Mus musculus
  siRNA target sequence for Gsn (NM_146120.2,635-653).
cctgggacagtttcaacaa

SEQ ID NO: 523078 - DNA, 19 bp, Mus musculus
  siRNA target sequence for Gsn (NM_146120.2,670-688).
ctggacctgggaaacaata

SEQ ID NO: 523079 - DNA, 19 bp, Mus musculus
  siRNA target sequence for Gsn (NM_146120.2,707-725).
ctggcagcaacaaatttga

SEQ ID NO: 523080 - DNA, 19 bp, Mus musculus
  siRNA target sequence for Gsn (NM_146120.2,774-792).
gagtggccgtgctcaagta

SEQ ID NO: 523081 - DNA, 19 bp, Mus musculus
  siRNA target sequence for Gsn (NM_146120.2,1167-1185).
cggtgagacccctctcttt

SEQ ID NO: 523082 - DNA, 19 bp, Mus musculus
  siRNA target sequence for Gsn (NM_146120.2,1168-1186).
ggtgagacccctctcttta

SEQ ID NO: 523083 - DNA, 19 bp, Mus musculus
  siRNA target sequence for Gsn (NM_146120.2,1169-1187).
gtgagacccctctctttaa

SEQ ID NO: 523084 - DNA, 19 bp, Mus musculus
  siRNA target sequence for Gsn (NM_146120.2,1180-1198).
ctctttaagcagttcttca

SEQ ID NO: 523085 - DNA, 19 bp, Mus musculus
  siRNA target sequence for Gsn (NM_146120.2,1269-1287).
ggagcgcgtacctttcgat

SEQ ID NO: 523086 - DNA, 19 bp, Mus musculus
  siRNA target sequence for Gsn (NM_146120.2,1346-1364).
gaactggccagaaacagat

SEQ ID NO: 523087 - DNA, 19 bp, Mus musculus
  siRNA target sequence for Gsn (NM_146120.2,1406-1424).
ccacatacgggcagttcta

SEQ ID NO: 523088 - DNA, 19 bp, Mus musculus
  siRNA target sequence for Gsn (NM_146120.2,1407-1425).
cacatacgggcagttctat

SEQ ID NO: 523089 - DNA, 19 bp, Mus musculus
  siRNA target sequence for Gsn (NM_146120.2,1426-1444).
ggaggcgacagctacatca

SEQ ID NO: 523090 - DNA, 19 bp, Mus musculus
  siRNA target sequence for Gsn (NM_146120.2,1427-1445).
gaggcgacagctacatcat

SEQ ID NO: 523091 - DNA, 19 bp, Mus musculus
  siRNA target sequence for Gsn (NM_146120.2,1430-1448).
gcgacagctacatcattct

SEQ ID NO: 523092 - DNA, 19 bp, Mus musculus
  siRNA target sequence for Gsn (NM_146120.2,1432-1450).
gacagctacatcattctgt

SEQ ID NO: 523093 - DNA, 19 bp, Mus musculus
  siRNA target sequence for Gsn (NM_146120.2,1755-1773).
ggaggtgatgcctaagtct

SEQ ID NO: 523094 - DNA, 19 bp, Mus musculus
  siRNA target sequence for Gsn (NM_146120.2,2042-2060).
ggatcggacgctttgtgat

SEQ ID NO: 523095 - DNA, 19 bp, Mus musculus
  siRNA target sequence for Gsn (NM_146120.2,2088-2106).
ggaagacctggctactgat

SEQ ID NO: 523096 - DNA, 19 bp, Mus musculus
  siRNA target sequence for Hdac6 (NM_010413.2,36-54).
ctccaccggccaagattct

SEQ ID NO: 523097 - DNA, 19 bp, Mus musculus
  siRNA target sequence for Hdac6 (NM_010413.2,45-63).
ccaagattcttctactaga

SEQ ID NO: 523098 - DNA, 19 bp, Mus musculus
  siRNA target sequence for Hdac6 (NM_010413.2,161-179).
ccaatctagcggaggtaaa

SEQ ID NO: 523099 - DNA, 19 bp, Mus musculus
  siRNA target sequence for Hdac6 (NM_010413.2,166-184).
ctagcggaggtaaagaaga

SEQ ID NO: 523100 - DNA, 19 bp, Mus musculus
  siRNA target sequence for Hdac6 (NM_010413.2,284-302).
ctggattggtgtttgatga

SEQ ID NO: 523101 - DNA, 19 bp, Mus musculus
  siRNA target sequence for Hdac6 (NM_010413.2,291-309).
ggtgtttgatgaacaacta

SEQ ID NO: 523102 - DNA, 19 bp, Mus musculus
  siRNA target sequence for Hdac6 (NM_010413.2,368-386).
ccatcagagagcaactgat

SEQ ID NO: 523103 - DNA, 19 bp, Mus musculus
  siRNA target sequence for Hdac6 (NM_010413.2,489-507).
gacaacccagtacatgaat

SEQ ID NO: 523104 - DNA, 19 bp, Mus musculus
  siRNA target sequence for Hdac6 (NM_010413.2,521-539).
gagtactggcagaaaccta

SEQ ID NO: 523105 - DNA, 19 bp, Mus musculus
  siRNA target sequence for Hdac6 (NM_010413.2,528-546).
ggcagaaacctatgattca

SEQ ID NO: 523106 - DNA, 19 bp, Mus musculus
  siRNA target sequence for Hdac6 (NM_010413.2,530-548).
cagaaacctatgattcagt

SEQ ID NO: 523107 - DNA, 19 bp, Mus musculus
  siRNA target sequence for Hdac6 (NM_010413.2,536-554).
cctatgattcagtgtatct

SEQ ID NO: 523108 - DNA, 19 bp, Mus musculus
  siRNA target sequence for Hdac6 (NM_010413.2,553-571).
ctgcatccgaactcatatt

SEQ ID NO: 523109 - DNA, 19 bp, Mus musculus
  siRNA target sequence for Hdac6 (NM_010413.2,556-574).
catccgaactcatattcct

SEQ ID NO: 523110 - DNA, 19 bp, Mus musculus
  siRNA target sequence for Hdac6 (NM_010413.2,673-691).
catgctcagcacaatctta

SEQ ID NO: 523111 - DNA, 19 bp, Mus musculus
  siRNA target sequence for Hdac6 (NM_010413.2,677-695).
ctcagcacaatcttatgga

SEQ ID NO: 523112 - DNA, 19 bp, Mus musculus
  siRNA target sequence for Hdac6 (NM_010413.2,688-706).
cttatggatgggtattgca

SEQ ID NO: 523113 - DNA, 19 bp, Mus musculus
  siRNA target sequence for Hdac6 (NM_010413.2,694-712).
gatgggtattgcatgttca

SEQ ID NO: 523114 - DNA, 19 bp, Mus musculus
  siRNA target sequence for Hdac6 (NM_010413.2,730-748).
gcccgctatgcgcaaaaga

SEQ ID NO: 523115 - DNA, 19 bp, Mus musculus
  siRNA target sequence for Hdac6 (NM_010413.2,731-749).
cccgctatgcgcaaaagaa

SEQ ID NO: 523116 - DNA, 19 bp, Mus musculus
  siRNA target sequence for Hdac6 (NM_010413.2,846-864).
ctccatccaccgatatgaa

SEQ ID NO: 523117 - DNA, 19 bp, Mus musculus
  siRNA target sequence for Hdac6 (NM_010413.2,848-866).
ccatccaccgatatgaaca

SEQ ID NO: 523118 - DNA, 19 bp, Mus musculus
  siRNA target sequence for Hdac6 (NM_010413.2,849-867).
catccaccgatatgaacat

SEQ ID NO: 523119 - DNA, 19 bp, Mus musculus
  siRNA target sequence for Hdac6 (NM_010413.2,872-890).
gcttctggccccaccttaa

SEQ ID NO: 523120 - DNA, 19 bp, Mus musculus
  siRNA target sequence for Hdac6 (NM_010413.2,883-901).
caccttaaggcttctaact

SEQ ID NO: 523121 - DNA, 19 bp, Mus musculus
  siRNA target sequence for Hdac6 (NM_010413.2,900-918).
ctggtccactataggtttt

SEQ ID NO: 523122 - DNA, 19 bp, Mus musculus
  siRNA target sequence for Hdac6 (NM_010413.2,927-945).
ccaaggatataccatcaat

SEQ ID NO: 523123 - DNA, 19 bp, Mus musculus
  siRNA target sequence for Hdac6 (NM_010413.2,969-987).
gcgggacgctgactacatt

SEQ ID NO: 523124 - DNA, 19 bp, Mus musculus
  siRNA target sequence for Hdac6 (NM_010413.2,1013-1031).
cagttgcctcggagtttca

SEQ ID NO: 523125 - DNA, 19 bp, Mus musculus
  siRNA target sequence for Hdac6 (NM_010413.2,1044-1062).
cttggtggccgctggattt

SEQ ID NO: 523126 - DNA, 19 bp, Mus musculus
  siRNA target sequence for Hdac6 (NM_010413.2,1118-1136).
cccacctaacccatttgct

SEQ ID NO: 523127 - DNA, 19 bp, Mus musculus
  siRNA target sequence for Hdac6 (NM_010413.2,1169-1187).
ccctggagggtggctataa

SEQ ID NO: 523128 - DNA, 19 bp, Mus musculus
  siRNA target sequence for Hdac6 (NM_010413.2,1335-1353).
ggtcctggagagatcagtt

SEQ ID NO: 523129 - DNA, 19 bp, Mus musculus
  siRNA target sequence for Hdac6 (NM_010413.2,1429-1447).
gcactgcccatggatacat

SEQ ID NO: 523130 - DNA, 19 bp, Mus musculus
  siRNA target sequence for Hdac6 (NM_010413.2,1506-1524).
caacctctgggacaatcat

SEQ ID NO: 523131 - DNA, 19 bp, Mus musculus
  siRNA target sequence for Hdac6 (NM_010413.2,1543-1561).
cgcatcttacgcatcatgt

SEQ ID NO: 523132 - DNA, 19 bp, Mus musculus
  siRNA target sequence for Hdac6 (NM_010413.2,1669-1687).
ctccgcaccacagaaaaga

SEQ ID NO: 523133 - DNA, 19 bp, Mus musculus
  siRNA target sequence for Hdac6 (NM_010413.2,1672-1690).
cgcaccacagaaaagatga

SEQ ID NO: 523134 - DNA, 19 bp, Mus musculus
  siRNA target sequence for Hdac6 (NM_010413.2,1752-1770).
ctttgcctgcgcaaagctt

SEQ ID NO: 523135 - DNA, 19 bp, Mus musculus
  siRNA target sequence for Hdac6 (NM_010413.2,1807-1825).
ctctcgggagaggttctaa

SEQ ID NO: 523136 - DNA, 19 bp, Mus musculus
  siRNA target sequence for Hdac6 (NM_010413.2,1857-1875).
ccacgcggagccaaatgct

SEQ ID NO: 523137 - DNA, 19 bp, Mus musculus
  siRNA target sequence for Hdac6 (NM_010413.2,1916-1934).
ctcgccatgcccagatcat

SEQ ID NO: 523138 - DNA, 19 bp, Mus musculus
  siRNA target sequence for Hdac6 (NM_010413.2,1942-1960).
cgtgccctgcggatcctaa

SEQ ID NO: 523139 - DNA, 19 bp, Mus musculus
  siRNA target sequence for Hdac6 (NM_010413.2,1943-1961).
gtgccctgcggatcctaat

SEQ ID NO: 523140 - DNA, 19 bp, Mus musculus
  siRNA target sequence for Hdac6 (NM_010413.2,1946-1964).
ccctgcggatcctaatcgt

SEQ ID NO: 523141 - DNA, 19 bp, Mus musculus
  siRNA target sequence for Hdac6 (NM_010413.2,1962-1980).
cgtggattgggatgttcat

SEQ ID NO: 523142 - DNA, 19 bp, Mus musculus
  siRNA target sequence for Hdac6 (NM_010413.2,1965-1983).
ggattgggatgttcatcat

SEQ ID NO: 523143 - DNA, 19 bp, Mus musculus
  siRNA target sequence for Hdac6 (NM_010413.2,2008-2026).
gaggatgaccctagtgtat

SEQ ID NO: 523144 - DNA, 19 bp, Mus musculus
  siRNA target sequence for Hdac6 (NM_010413.2,2010-2028).
ggatgaccctagtgtatta

SEQ ID NO: 523145 - DNA, 19 bp, Mus musculus
  siRNA target sequence for Hdac6 (NM_010413.2,2011-2029).
gatgaccctagtgtattat

SEQ ID NO: 523146 - DNA, 19 bp, Mus musculus
  siRNA target sequence for Hdac6 (NM_010413.2,2153-2171).
gcatgggtgatgctgatta

SEQ ID NO: 523147 - DNA, 19 bp, Mus musculus
  siRNA target sequence for Hdac6 (NM_010413.2,2197-2215).
cttcccatcgcctatgagt

SEQ ID NO: 523148 - DNA, 19 bp, Mus musculus
  siRNA target sequence for Hdac6 (NM_010413.2,2200-2218).
cccatcgcctatgagttta

SEQ ID NO: 523149 - DNA, 19 bp, Mus musculus
  siRNA target sequence for Hdac6 (NM_010413.2,2201-2219).
ccatcgcctatgagtttaa

SEQ ID NO: 523150 - DNA, 19 bp, Mus musculus
  siRNA target sequence for Hdac6 (NM_010413.2,2332-2350).
cttgctggtggccgtatta

SEQ ID NO: 523151 - DNA, 19 bp, Mus musculus
  siRNA target sequence for Hdac6 (NM_010413.2,2338-2356).
ggtggccgtattattctta

SEQ ID NO: 523152 - DNA, 19 bp, Mus musculus
  siRNA target sequence for Hdac6 (NM_010413.2,2339-2357).
gtggccgtattattcttat

SEQ ID NO: 523153 - DNA, 19 bp, Mus musculus
  siRNA target sequence for Hdac6 (NM_010413.2,2343-2361).
ccgtattattcttattcta

SEQ ID NO: 523154 - DNA, 19 bp, Mus musculus
  siRNA target sequence for Hdac6 (NM_010413.2,2470-2488).
ggagccctggtttcaatca

SEQ ID NO: 523155 - DNA, 19 bp, Mus musculus
  siRNA target sequence for Hdac6 (NM_010413.2,2500-2518).
caagtccatcgcaaatact

SEQ ID NO: 523156 - DNA, 19 bp, Mus musculus
  siRNA target sequence for Hdac6 (NM_010413.2,2611-2629).
gtatcagctaaggaaatga

SEQ ID NO: 523157 - DNA, 19 bp, Mus musculus
  siRNA target sequence for Hdac6 (NM_010413.2,2631-2649).
cacaccgaaaggaaaggtt

SEQ ID NO: 523158 - DNA, 19 bp, Mus musculus
  siRNA target sequence for Hdac6 (NM_010413.2,2704-2722).
ctaggccaggctaaatcaa

SEQ ID NO: 523159 - DNA, 19 bp, Mus musculus
  siRNA target sequence for Hdac6 (NM_010413.2,2708-2726).
gccaggctaaatcaaagat

SEQ ID NO: 523160 - DNA, 19 bp, Mus musculus
  siRNA target sequence for Hdac6 (NM_010413.2,2914-2932).
cctccagcctcgcatacaa

SEQ ID NO: 523161 - DNA, 19 bp, Mus musculus
  siRNA target sequence for Hdac6 (NM_010413.2,3076-3094).
ggaggtcaggacatgaaca

SEQ ID NO: 523162 - DNA, 19 bp, Mus musculus
  siRNA target sequence for Hdac6 (NM_010413.2,3112-3130).
ggatttggggactttaata

SEQ ID NO: 523163 - DNA, 19 bp, Mus musculus
  siRNA target sequence for Hdac6 (NM_010413.2,3217-3235).
gtgtcccaaccttgtaaga

SEQ ID NO: 523164 - DNA, 19 bp, Mus musculus
  siRNA target sequence for Hdac6 (NM_010413.2,3261-3279).
ggtgtgtctgacttgctat

SEQ ID NO: 523165 - DNA, 19 bp, Mus musculus
  siRNA target sequence for Hdac6 (NM_010413.2,3288-3306).
ctgcagtcgctatgtcaat

SEQ ID NO: 523166 - DNA, 19 bp, Mus musculus
  siRNA target sequence for Hip1 (NM_146001.1,475-493).
gcagcatctacctcaaact

SEQ ID NO: 523167 - DNA, 19 bp, Mus musculus
  siRNA target sequence for Hip1 (NM_146001.1,509-527).
ggagtaccacaccaaaaat

SEQ ID NO: 523168 - DNA, 19 bp, Mus musculus
  siRNA target sequence for Hip1 (NM_146001.1,579-597).
ggagaaagtgacgttaaca

SEQ ID NO: 523169 - DNA, 19 bp, Mus musculus
  siRNA target sequence for Hip1 (NM_146001.1,586-604).
gtgacgttaacaacttttt

SEQ ID NO: 523170 - DNA, 19 bp, Mus musculus
  siRNA target sequence for Hip1 (NM_146001.1,851-869).
gcagttcacaaagttgaaa

SEQ ID NO: 523171 - DNA, 19 bp, Mus musculus
  siRNA target sequence for Hip1 (NM_146001.1,859-877).
caaagttgaaagatctgtt

SEQ ID NO: 523172 - DNA, 19 bp, Mus musculus
  siRNA target sequence for Hip1 (NM_146001.1,883-901).
gctccagcaacctacagta

SEQ ID NO: 523173 - DNA, 19 bp, Mus musculus
  siRNA target sequence for Hip1 (NM_146001.1,1085-1103).
gtttgacaacaagtttgat

SEQ ID NO: 523174 - DNA, 19 bp, Mus musculus
  siRNA target sequence for Hip1 (NM_146001.1,1124-1142).
gagcagcgaccctttcaat

SEQ ID NO: 523175 - DNA, 19 bp, Mus musculus
  siRNA target sequence for Hip1 (NM_146001.1,1126-1144).
gcagcgaccctttcaattt

SEQ ID NO: 523176 - DNA, 19 bp, Mus musculus
  siRNA target sequence for Hip1 (NM_146001.1,1129-1147).
gcgaccctttcaatttcaa

SEQ ID NO: 523177 - DNA, 19 bp, Mus musculus
  siRNA target sequence for Hip1 (NM_146001.1,1133-1151).
ccctttcaatttcaacaat

SEQ ID NO: 523178 - DNA, 19 bp, Mus musculus
  siRNA target sequence for Hip1 (NM_146001.1,1172-1190).
cgagaaggaccacttgatt

SEQ ID NO: 523179 - DNA, 19 bp, Mus musculus
  siRNA target sequence for Hip1 (NM_146001.1,1224-1242).
gggcagctggacaacatga

SEQ ID NO: 523180 - DNA, 19 bp, Mus musculus
  siRNA target sequence for Hip1 (NM_146001.1,1419-1437).
ctgactgagatagaaagaa

SEQ ID NO: 523181 - DNA, 19 bp, Mus musculus
  siRNA target sequence for Hip1 (NM_146001.1,1446-1464).
gctaatgaacagaggtata

SEQ ID NO: 523182 - DNA, 19 bp, Mus musculus
  siRNA target sequence for Hip1 (NM_146001.1,1558-1576).
ggcaagcccaggtggattt

SEQ ID NO: 523183 - DNA, 19 bp, Mus musculus
  siRNA target sequence for Hip1 (NM_146001.1,1924-1942).
ctgcggagcgtgagataca

SEQ ID NO: 523184 - DNA, 19 bp, Mus musculus
  siRNA target sequence for Hip1 (NM_146001.1,2226-2244).
gaaaccctggcctatctgt

SEQ ID NO: 523185 - DNA, 19 bp, Mus musculus
  siRNA target sequence for Hip1 (NM_146001.1,2433-2451).
cggatagaggaaattctca

SEQ ID NO: 523186 - DNA, 19 bp, Mus musculus
  siRNA target sequence for Hip1 (NM_146001.1,2601-2619).
gcatcccctaaagaatttt

SEQ ID NO: 523187 - DNA, 19 bp, Mus musculus
  siRNA target sequence for Hip1 (NM_146001.1,2602-2620).
catcccctaaagaatttta

SEQ ID NO: 523188 - DNA, 19 bp, Mus musculus
  siRNA target sequence for Hip1 (NM_146001.1,2893-2911).
ccatttctggcaaatctca

SEQ ID NO: 523189 - DNA, 19 bp, Mus musculus
  siRNA target sequence for Hip1 (NM_146001.1,2925-2943).
gacagtatggacttctcaa

SEQ ID NO: 523190 - DNA, 19 bp, Mus musculus
  siRNA target sequence for Hip1 (NM_146001.1,3115-3133).
ctactgtccaagaagcaat

SEQ ID NO: 523191 - DNA, 19 bp, Mus musculus
  siRNA target sequence for Hip1 (NM_146001.1,3129-3147).
gcaataccggacaaagagt

SEQ ID NO: 523192 - DNA, 19 bp, Mus musculus
  siRNA target sequence for Hip1r (NM_145070.2,420-438).
ccaacgtcctgcatgacta

SEQ ID NO: 523193 - DNA, 19 bp, Mus musculus
  siRNA target sequence for Hip1r (NM_145070.2,421-439).
caacgtcctgcatgactat

SEQ ID NO: 523194 - DNA, 19 bp, Mus musculus
  siRNA target sequence for Hip1r (NM_145070.2,506-524).
cacctggtgaatatctata

SEQ ID NO: 523195 - DNA, 19 bp, Mus musculus
  siRNA target sequence for Hip1r (NM_145070.2,509-527).
ctggtgaatatctatacca

SEQ ID NO: 523196 - DNA, 19 bp, Mus musculus
  siRNA target sequence for Hip1r (NM_145070.2,511-529).
ggtgaatatctataccaaa

SEQ ID NO: 523197 - DNA, 19 bp, Mus musculus
  siRNA target sequence for Hip1r (NM_145070.2,547-565).
ctccttccaccttaagcat

SEQ ID NO: 523198 - DNA, 19 bp, Mus musculus
  siRNA target sequence for Hip1r (NM_145070.2,618-636).
cgggaactgatgtcaacaa

SEQ ID NO: 523199 - DNA, 19 bp, Mus musculus
  siRNA target sequence for Hip1r (NM_145070.2,813-831).
cagtgaagctcatgtttaa

SEQ ID NO: 523200 - DNA, 19 bp, Mus musculus
  siRNA target sequence for Hip1r (NM_145070.2,927-945).
cagacatgctgtacttcaa

SEQ ID NO: 523201 - DNA, 19 bp, Mus musculus
  siRNA target sequence for Hip1r (NM_145070.2,929-947).
gacatgctgtacttcaaga

SEQ ID NO: 523202 - DNA, 19 bp, Mus musculus
  siRNA target sequence for Hip1r (NM_145070.2,972-990).
ctgagggaccccccaattt

SEQ ID NO: 523203 - DNA, 19 bp, Mus musculus
  siRNA target sequence for Hip1r (NM_145070.2,1066-1084).
gcctgagaacctaattgaa

SEQ ID NO: 523204 - DNA, 19 bp, Mus musculus
  siRNA target sequence for Hip1r (NM_145070.2,1184-1202).
ctccaaatcgagaacttga

SEQ ID NO: 523205 - DNA, 19 bp, Mus musculus
  siRNA target sequence for Hip1r (NM_145070.2,1484-1502).
cacagcgaactcattaaca

SEQ ID NO: 523206 - DNA, 19 bp, Mus musculus
  siRNA target sequence for Hip1r (NM_145070.2,1626-1644).
gtgagtctgagatgaagat

SEQ ID NO: 523207 - DNA, 19 bp, Mus musculus
  siRNA target sequence for Hip1r (NM_145070.2,2219-2237).
gctgcggacaccattgtca

SEQ ID NO: 523208 - DNA, 19 bp, Mus musculus
  siRNA target sequence for Hip1r (NM_145070.2,2220-2238).
ctgcggacaccattgtcaa

SEQ ID NO: 523209 - DNA, 19 bp, Mus musculus
  siRNA target sequence for Hip1r (NM_145070.2,2520-2538).
ggaggatcgaggacatgat

SEQ ID NO: 523210 - DNA, 19 bp, Mus musculus
  siRNA target sequence for Hip1r (NM_145070.2,2690-2708).
gcaacgcagcaggaatttt

SEQ ID NO: 523211 - DNA, 19 bp, Mus musculus
  siRNA target sequence for Hip1r (NM_145070.2,2691-2709).
caacgcagcaggaatttta

SEQ ID NO: 523212 - DNA, 19 bp, Mus musculus
  siRNA target sequence for Hip1r (NM_145070.2,2817-2835).
gcaaatacgaggaactcat

SEQ ID NO: 523213 - DNA, 19 bp, Mus musculus
  siRNA target sequence for Hip1r (NM_145070.2,2836-2854).
cgtctgctcccatgagatt

SEQ ID NO: 523214 - DNA, 19 bp, Mus musculus
  siRNA target sequence for Hip1r (NM_145070.2,3138-3156).
ggaaacagcactatgtact

SEQ ID NO: 523215 - DNA, 19 bp, Mus musculus
  siRNA target sequence for Hip1r (NM_145070.2,3215-3233).
cgaagtggggccactaaga

SEQ ID NO: 523216 - DNA, 19 bp, Mus musculus
  siRNA target sequence for Hip1r (NM_145070.2,3216-3234).
gaagtggggccactaagaa

SEQ ID NO: 523217 - DNA, 19 bp, Mus musculus
  siRNA target sequence for Hip1r (NM_145070.2,3311-3329).
gctcaacttgtgaactact

SEQ ID NO: 523218 - DNA, 19 bp, Mus musculus
  siRNA target sequence for Hpca (NM_010471.2,410-428).
ggtttcgtccgtgatgaaa

SEQ ID NO: 523219 - DNA, 19 bp, Mus musculus
  siRNA target sequence for Hpca (NM_010471.2,411-429).
gtttcgtccgtgatgaaaa

SEQ ID NO: 523220 - DNA, 19 bp, Mus musculus
  siRNA target sequence for Ipp (NM_008389.1,163-181).
gtgttatgatccagttact

SEQ ID NO: 523221 - DNA, 19 bp, Mus musculus
  siRNA target sequence for Ipp (NM_008389.1,165-183).
gttatgatccagttactaa

SEQ ID NO: 523222 - DNA, 19 bp, Mus musculus
  siRNA target sequence for Ipp (NM_008389.1,170-188).
gatccagttactaaacaat

SEQ ID NO: 523223 - DNA, 19 bp, Mus musculus
  siRNA target sequence for Ipp (NM_008389.1,189-207).
ggacaactgttgcttcaat

SEQ ID NO: 523224 - DNA, 19 bp, Mus musculus
  siRNA target sequence for Ipp (NM_008389.1,192-210).
caactgttgcttcaatgaa

SEQ ID NO: 523225 - DNA, 19 bp, Mus musculus
  siRNA target sequence for Ipp (NM_008389.1,195-213).
ctgttgcttcaatgaatca

SEQ ID NO: 523226 - DNA, 19 bp, Mus musculus
  siRNA target sequence for Ipp (NM_008389.1,220-238).
ctgtggattgggagtatgt

SEQ ID NO: 523227 - DNA, 19 bp, Mus musculus
  siRNA target sequence for Ipp (NM_008389.1,241-259).
gtgctacggggcaatctat

SEQ ID NO: 523228 - DNA, 19 bp, Mus musculus
  siRNA target sequence for Ipp (NM_008389.1,311-329).
gatcctgatgagaataagt

SEQ ID NO: 523229 - DNA, 19 bp, Mus musculus
  siRNA target sequence for Ipp (NM_008389.1,351-369).
cagtgtcacgctactactt

SEQ ID NO: 523230 - DNA, 19 bp, Mus musculus
  siRNA target sequence for Ipp (NM_008389.1,376-394).
ctgtgagatgcaaggttta

SEQ ID NO: 523231 - DNA, 19 bp, Mus musculus
  siRNA target sequence for Ipp (NM_008389.1,382-400).
gatgcaaggtttaatttat

SEQ ID NO: 523232 - DNA, 19 bp, Mus musculus
  siRNA target sequence for Ipp (NM_008389.1,427-445).
gctagagctccgttccttt

SEQ ID NO: 523233 - DNA, 19 bp, Mus musculus
  siRNA target sequence for Ipp (NM_008389.1,436-454).
ccgttcctttgaggtttat

SEQ ID NO: 523234 - DNA, 19 bp, Mus musculus
  siRNA target sequence for Ipp (NM_008389.1,556-574).
gtggaatgagacacaagat

SEQ ID NO: 523235 - DNA, 19 bp, Mus musculus
  siRNA target sequence for Ipp (NM_008389.1,581-599).
catactgtagaaaagtact

SEQ ID NO: 523236 - DNA, 19 bp, Mus musculus
  siRNA target sequence for Ipp (NM_008389.1,618-636).
gggttgaagttgcttcaat

SEQ ID NO: 523237 - DNA, 19 bp, Mus musculus
  siRNA target sequence for Ipp (NM_008389.1,658-676).
gtgtgctgtgacagtcaat

SEQ ID NO: 523238 - DNA, 19 bp, Mus musculus
  siRNA target sequence for Ipp (NM_008389.1,701-719).
cggtcttctagccatgatt

SEQ ID NO: 523239 - DNA, 19 bp, Mus musculus
  siRNA target sequence for Ipp (NM_008389.1,702-720).
ggtcttctagccatgattt

SEQ ID NO: 523240 - DNA, 19 bp, Mus musculus
  siRNA target sequence for Klhl1 (NM_053105.1,653-671).
ggctccgggagaaaagact

SEQ ID NO: 523241 - DNA, 19 bp, Mus musculus
  siRNA target sequence for Klhl1 (NM_053105.1,806-824).
cagagtcggctgctcaaaa

SEQ ID NO: 523242 - DNA, 19 bp, Mus musculus
  siRNA target sequence for Klhl1 (NM_053105.1,810-828).
gtcggctgctcaaaaacca

SEQ ID NO: 523243 - DNA, 19 bp, Mus musculus
  siRNA target sequence for Klhl1 (NM_053105.1,842-860).
gtgagcgctttctggaaaa

SEQ ID NO: 523244 - DNA, 19 bp, Mus musculus
  siRNA target sequence for Klhl1 (NM_053105.1,928-946).
gctgaatggcaccttacta

SEQ ID NO: 523245 - DNA, 19 bp, Mus musculus
  siRNA target sequence for Klhl1 (NM_053105.1,1153-1171).
gttgacatcgaccaatcat

SEQ ID NO: 523246 - DNA, 19 bp, Mus musculus
  siRNA target sequence for Klhl1 (NM_053105.1,1156-1174).
gacatcgaccaatcattca

SEQ ID NO: 523247 - DNA, 19 bp, Mus musculus
  siRNA target sequence for Klhl1 (NM_053105.1,1158-1176).
catcgaccaatcattcact

SEQ ID NO: 523248 - DNA, 19 bp, Mus musculus
  siRNA target sequence for Klhl1 (NM_053105.1,1179-1197).
cacctcaaagtgatttgga

SEQ ID NO: 523249 - DNA, 19 bp, Mus musculus
  siRNA target sequence for Klhl1 (NM_053105.1,1206-1224).
gctccgaagaattctatca

SEQ ID NO: 523250 - DNA, 19 bp, Mus musculus
  siRNA target sequence for Klhl1 (NM_053105.1,1207-1225).
ctccgaagaattctatcaa

SEQ ID NO: 523251 - DNA, 19 bp, Mus musculus
  siRNA target sequence for Klhl1 (NM_053105.1,1297-1315).
catcctgatagttggaaat

SEQ ID NO: 523252 - DNA, 19 bp, Mus musculus
  siRNA target sequence for Klhl1 (NM_053105.1,1301-1319).
ctgatagttggaaatcgaa

SEQ ID NO: 523253 - DNA, 19 bp, Mus musculus
  siRNA target sequence for Klhl1 (NM_053105.1,1442-1460).
ctctgggatcttgttcaat

SEQ ID NO: 523254 - DNA, 19 bp, Mus musculus
  siRNA target sequence for Klhl1 (NM_053105.1,1448-1466).
gatcttgttcaatttgcat

SEQ ID NO: 523255 - DNA, 19 bp, Mus musculus
  siRNA target sequence for Klhl1 (NM_053105.1,1587-1605).
catccaactgtttaggaat

SEQ ID NO: 523256 - DNA, 19 bp, Mus musculus
  siRNA target sequence for Klhl1 (NM_053105.1,1622-1640).
gctcaaggatgcattgaat

SEQ ID NO: 523257 - DNA, 19 bp, Mus musculus
  siRNA target sequence for Klhl1 (NM_053105.1,1623-1641).
ctcaaggatgcattgaatt

SEQ ID NO: 523258 - DNA, 19 bp, Mus musculus
  siRNA target sequence for Klhl1 (NM_053105.1,1625-1643).
caaggatgcattgaattaa

SEQ ID NO: 523259 - DNA, 19 bp, Mus musculus
  siRNA target sequence for Klhl1 (NM_053105.1,1675-1693).
cataatggaagtaatcaga

SEQ ID NO: 523260 - DNA, 19 bp, Mus musculus
  siRNA target sequence for Klhl1 (NM_053105.1,1741-1759).
ggccagtgatgatgtaaat

SEQ ID NO: 523261 - DNA, 19 bp, Mus musculus
  siRNA target sequence for Klhl1 (NM_053105.1,1792-1810).
gatgatgtgggtcaagtat

SEQ ID NO: 523262 - DNA, 19 bp, Mus musculus
  siRNA target sequence for Klhl1 (NM_053105.1,1927-1945).
ggaatgtcaaaaactgatt

SEQ ID NO: 523263 - DNA, 19 bp, Mus musculus
  siRNA target sequence for Klhl1 (NM_053105.1,1964-1982).
catctattgcccgaaagaa

SEQ ID NO: 523264 - DNA, 19 bp, Mus musculus
  siRNA target sequence for Klhl1 (NM_053105.1,1967-1985).
ctattgcccgaaagaagaa

SEQ ID NO: 523265 - DNA, 19 bp, Mus musculus
  siRNA target sequence for Klhl1 (NM_053105.1,2011-2029).
gcccagaaaatctacagtt

SEQ ID NO: 523266 - DNA, 19 bp, Mus musculus
  siRNA target sequence for Klhl1 (NM_053105.1,2043-2061).
cagtggggggaatggataa

SEQ ID NO: 523267 - DNA, 19 bp, Mus musculus
  siRNA target sequence for Klhl1 (NM_053105.1,2045-2063).
gtggggggaatggataata

SEQ ID NO: 523268 - DNA, 19 bp, Mus musculus
  siRNA target sequence for Klhl1 (NM_053105.1,2050-2068).
gggaatggataataacaaa

SEQ ID NO: 523269 - DNA, 19 bp, Mus musculus
  siRNA target sequence for Klhl1 (NM_053105.1,2065-2083).
caaaggggctacaaccata

SEQ ID NO: 523270 - DNA, 19 bp, Mus musculus
  siRNA target sequence for Klhl1 (NM_053105.1,2073-2091).
ctacaaccatagagaagta

SEQ ID NO: 523271 - DNA, 19 bp, Mus musculus
  siRNA target sequence for Klhl1 (NM_053105.1,2192-2210).
ggtcgagatggcttaaaga

SEQ ID NO: 523272 - DNA, 19 bp, Mus musculus
  siRNA target sequence for Klhl1 (NM_053105.1,2209-2227).
gactttgaacactgttgaa

SEQ ID NO: 523273 - DNA, 19 bp, Mus musculus
  siRNA target sequence for Klhl1 (NM_053105.1,2229-2247).
gttacaatcccaaaaccaa

SEQ ID NO: 523274 - DNA, 19 bp, Mus musculus
  siRNA target sequence for Klhl1 (NM_053105.1,2244-2262).
ccaagacatggactgtttt

SEQ ID NO: 523275 - DNA, 19 bp, Mus musculus
  siRNA target sequence for Klhl1 (NM_053105.1,2263-2281).
gccaccaatgtcaacacat

SEQ ID NO: 523276 - DNA, 19 bp, Mus musculus
  siRNA target sequence for Klhl1 (NM_053105.1,2264-2282).
ccaccaatgtcaacacata

SEQ ID NO: 523277 - DNA, 19 bp, Mus musculus
  siRNA target sequence for Klhl1 (NM_053105.1,2284-2302).
gcatggtctaggagtaact

SEQ ID NO: 523278 - DNA, 19 bp, Mus musculus
  siRNA target sequence for Klhl1 (NM_053105.1,2383-2401).
gagccagcagtggacatat

SEQ ID NO: 523279 - DNA, 19 bp, Mus musculus
  siRNA target sequence for Klhl1 (NM_053105.1,2385-2403).
gccagcagtggacatatgt

SEQ ID NO: 523280 - DNA, 19 bp, Mus musculus
  siRNA target sequence for Klhl1 (NM_053105.1,2495-2513).
ctgagttcaatggaatact

SEQ ID NO: 523281 - DNA, 19 bp, Mus musculus
  siRNA target sequence for Klhl1 (NM_053105.1,2497-2515).
gagttcaatggaatactat

SEQ ID NO: 523282 - DNA, 19 bp, Mus musculus
  siRNA target sequence for Klhl1 (NM_053105.1,2516-2534).
gatcctcatacaaataagt

SEQ ID NO: 523283 - DNA, 19 bp, Mus musculus
  siRNA target sequence for Klhl1 (NM_053105.1,2656-2674).
ggactacgtggaaaggtat

SEQ ID NO: 523284 - DNA, 19 bp, Mus musculus
  siRNA target sequence for Klhl1 (NM_053105.1,2800-2818).
caccatggagtcctatgat

SEQ ID NO: 523285 - DNA, 19 bp, Mus musculus
  siRNA target sequence for Klhl1 (NM_053105.1,2809-2827).
gtcctatgatccacaaact

SEQ ID NO: 523286 - DNA, 19 bp, Mus musculus
  siRNA target sequence for Klhl1 (NM_053105.1,2811-2829).
cctatgatccacaaactaa

SEQ ID NO: 523287 - DNA, 19 bp, Mus musculus
  siRNA target sequence for Klhl1 (NM_053105.1,2816-2834).
gatccacaaactaatgagt

SEQ ID NO: 523288 - DNA, 19 bp, Mus musculus
  siRNA target sequence for Klhl1 (NM_053105.1,2874-2892).
cctgtgtggttgtcatcaa

SEQ ID NO: 523289 - DNA, 19 bp, Mus musculus
  siRNA target sequence for Lcp1 (NM_008879.2,449-467).
gctgcaatgagctaaatga

SEQ ID NO: 523290 - DNA, 19 bp, Mus musculus
  siRNA target sequence for Lcp1 (NM_008879.2,499-517).
gggtaccgagtgagagaaa

SEQ ID NO: 523291 - DNA, 19 bp, Mus musculus
  siRNA target sequence for Lcp1 (NM_008879.2,508-526).
gtgagagaaatcacagaaa

SEQ ID NO: 523292 - DNA, 19 bp, Mus musculus
  siRNA target sequence for Lcp1 (NM_008879.2,588-606).
ggtcttccatggcttaaaa

SEQ ID NO: 523293 - DNA, 19 bp, Mus musculus
  siRNA target sequence for Lcp1 (NM_008879.2,1037-1055).
gacttttgtggcaagtcat

SEQ ID NO: 523294 - DNA, 19 bp, Mus musculus
  siRNA target sequence for Lcp1 (NM_008879.2,1044-1062).
gtggcaagtcatcaagatt

SEQ ID NO: 523295 - DNA, 19 bp, Mus musculus
  siRNA target sequence for Lcp1 (NM_008879.2,1077-1095).
cattgaactcagcagaaat

SEQ ID NO: 523296 - DNA, 19 bp, Mus musculus
  siRNA target sequence for Lcp1 (NM_008879.2,1180-1198).
gctaactaccacctagaaa

SEQ ID NO: 523297 - DNA, 19 bp, Mus musculus
  siRNA target sequence for Lcp1 (NM_008879.2,1201-1219).
gcaggctgcaccaaaatca

SEQ ID NO: 523298 - DNA, 19 bp, Mus musculus
  siRNA target sequence for Lcp1 (NM_008879.2,1269-1287).
cgagcaagtggctccaaaa

SEQ ID NO: 523299 - DNA, 19 bp, Mus musculus
  siRNA target sequence for Lcp1 (NM_008879.2,1272-1290).
gcaagtggctccaaaagga

SEQ ID NO: 523300 - DNA, 19 bp, Mus musculus
  siRNA target sequence for Lcp1 (NM_008879.2,1278-1296).
ggctccaaaaggagatgaa

SEQ ID NO: 523301 - DNA, 19 bp, Mus musculus
  siRNA target sequence for Lcp1 (NM_008879.2,1549-1567).
gagcggaccttcaggaatt

SEQ ID NO: 523302 - DNA, 19 bp, Mus musculus
  siRNA target sequence for Lcp1 (NM_008879.2,1552-1570).
cggaccttcaggaattgga

SEQ ID NO: 523303 - DNA, 19 bp, Mus musculus
  siRNA target sequence for Lsp1 (NM_019391.1,471-489).
cgcactcctgaggagaaat

SEQ ID NO: 523304 - DNA, 19 bp, Mus musculus
  siRNA target sequence for Lsp1 (NM_019391.1,731-749).
cggagccacggcagcaatt

SEQ ID NO: 523305 - DNA, 19 bp, Mus musculus
  siRNA target sequence for Lsp1 (NM_019391.1,733-751).
gagccacggcagcaattct

SEQ ID NO: 523306 - DNA, 19 bp, Mus musculus
  siRNA target sequence for Lsp1 (NM_019391.1,775-793).
gggactgaaccctctcaaa

SEQ ID NO: 523307 - DNA, 19 bp, Mus musculus
  siRNA target sequence for Lsp1 (NM_019391.1,915-933).
ggcggaagagcatctgata

SEQ ID NO: 523308 - DNA, 19 bp, Mus musculus
  siRNA target sequence for Lsp1 (NM_019391.1,956-974).
gccctttggccttagaaga

SEQ ID NO: 523309 - DNA, 19 bp, Mus musculus
  siRNA target sequence for Lsp1 (NM_019391.1,1039-1057).
ctgaaccgctccattaaaa

SEQ ID NO: 523310 - DNA, 19 bp, Mus musculus
  siRNA target sequence for Lsp1 (NM_019391.1,1084-1102).
ccaaccttgcccatttcca

SEQ ID NO: 523311 - DNA, 19 bp, Mus musculus
  siRNA target sequence for Lsp1 (NM_019391.1,1094-1112).
ccatttccacaattgatga

SEQ ID NO: 523312 - DNA, 19 bp, Mus musculus
  siRNA target sequence for Lsp1 (NM_019391.1,1095-1113).
catttccacaattgatgaa

SEQ ID NO: 523313 - DNA, 19 bp, Mus musculus
  siRNA target sequence for Lsp1 (NM_019391.1,1111-1129).
gaacgcctgcagcagtata

SEQ ID NO: 523314 - DNA, 19 bp, Mus musculus
  siRNA target sequence for Lsp1 (NM_019391.1,1327-1345).
ggaggctccaagatctcat

SEQ ID NO: 523315 - DNA, 19 bp, Mus musculus
  siRNA target sequence for Marcks (NM_008538.1,457-475).
cgtcgccttccaaagcaaa

SEQ ID NO: 523316 - DNA, 19 bp, Mus musculus
  siRNA target sequence for Marcks (NM_008538.1,800-818).
cagcgagaccccgaaaaaa

SEQ ID NO: 523317 - DNA, 19 bp, Mus musculus
  siRNA target sequence for Mefv (NM_019453.1,41-59).
caagacccttggtgatcat

SEQ ID NO: 523318 - DNA, 19 bp, Mus musculus
  siRNA target sequence for Mefv (NM_019453.1,51-69).
ggtgatcatctgctaaaca

SEQ ID NO: 523319 - DNA, 19 bp, Mus musculus
  siRNA target sequence for Mefv (NM_019453.1,80-98).
gctgctgccctatgacttt

SEQ ID NO: 523320 - DNA, 19 bp, Mus musculus
  siRNA target sequence for Mefv (NM_019453.1,84-102).
ctgccctatgactttgaga

SEQ ID NO: 523321 - DNA, 19 bp, Mus musculus
  siRNA target sequence for Mefv (NM_019453.1,101-119).
gaagttcaagtttaagcta

SEQ ID NO: 523322 - DNA, 19 bp, Mus musculus
  siRNA target sequence for Mefv (NM_019453.1,302-320).
cacaggcacagaacattta

SEQ ID NO: 523323 - DNA, 19 bp, Mus musculus
  siRNA target sequence for Mefv (NM_019453.1,308-326).
cacagaacatttaattgaa

SEQ ID NO: 523324 - DNA, 19 bp, Mus musculus
  siRNA target sequence for Mefv (NM_019453.1,310-328).
cagaacatttaattgaaga

SEQ ID NO: 523325 - DNA, 19 bp, Mus musculus
  siRNA target sequence for Mefv (NM_019453.1,351-369).
cagtcttctgtagagaata

SEQ ID NO: 523326 - DNA, 19 bp, Mus musculus
  siRNA target sequence for Mefv (NM_019453.1,415-433).
cacagcaaaacaatgatga

SEQ ID NO: 523327 - DNA, 19 bp, Mus musculus
  siRNA target sequence for Mefv (NM_019453.1,419-437).
gcaaaacaatgatgaatca

SEQ ID NO: 523328 - DNA, 19 bp, Mus musculus
  siRNA target sequence for Mefv (NM_019453.1,557-575).
gagcacagcgcctctctat

SEQ ID NO: 523329 - DNA, 19 bp, Mus musculus
  siRNA target sequence for Mefv (NM_019453.1,658-676).
ggaggcttcaaggacttta

SEQ ID NO: 523330 - DNA, 19 bp, Mus musculus
  siRNA target sequence for Mefv (NM_019453.1,661-679).
ggcttcaaggactttacaa

SEQ ID NO: 523331 - DNA, 19 bp, Mus musculus
  siRNA target sequence for Mefv (NM_019453.1,663-681).
cttcaaggactttacaaca

SEQ ID NO: 523332 - DNA, 19 bp, Mus musculus
  siRNA target sequence for Mefv (NM_019453.1,704-722).
caagaaagccgaagtgtat

SEQ ID NO: 523333 - DNA, 19 bp, Mus musculus
  siRNA target sequence for Mefv (NM_019453.1,707-725).
gaaagccgaagtgtatgta

SEQ ID NO: 523334 - DNA, 19 bp, Mus musculus
  siRNA target sequence for Mefv (NM_019453.1,746-764).
gcgacccaggagtcttgaa

SEQ ID NO: 523335 - DNA, 19 bp, Mus musculus
  siRNA target sequence for Mefv (NM_019453.1,747-765).
cgacccaggagtcttgaaa

SEQ ID NO: 523336 - DNA, 19 bp, Mus musculus
  siRNA target sequence for Mefv (NM_019453.1,923-941).
catggtgctggatgaaaaa

SEQ ID NO: 523337 - DNA, 19 bp, Mus musculus
  siRNA target sequence for Mefv (NM_019453.1,930-948).
ctggatgaaaaaacattca

SEQ ID NO: 523338 - DNA, 19 bp, Mus musculus
  siRNA target sequence for Mefv (NM_019453.1,984-1002).
gagagatgccctacatcat

SEQ ID NO: 523339 - DNA, 19 bp, Mus musculus
  siRNA target sequence for Mefv (NM_019453.1,1534-1552).
gggagatgaggggatatgt

SEQ ID NO: 523340 - DNA, 19 bp, Mus musculus
  siRNA target sequence for Mefv (NM_019453.1,1587-1605).
gacgatttcctgaaacaaa

SEQ ID NO: 523341 - DNA, 19 bp, Mus musculus
  siRNA target sequence for Mefv (NM_019453.1,1633-1651).
gtccacttgagaagctata

SEQ ID NO: 523342 - DNA, 19 bp, Mus musculus
  siRNA target sequence for Mefv (NM_019453.1,1636-1654).
cacttgagaagctatacca

SEQ ID NO: 523343 - DNA, 19 bp, Mus musculus
  siRNA target sequence for Mefv (NM_019453.1,1664-1682).
gaagcaagaacaactcttt

SEQ ID NO: 523344 - DNA, 19 bp, Mus musculus
  siRNA target sequence for Mefv (NM_019453.1,1750-1768).
ccctactggatgagatgat

SEQ ID NO: 523345 - DNA, 19 bp, Mus musculus
  siRNA target sequence for Mefv (NM_019453.1,1751-1769).
cctactggatgagatgatt

SEQ ID NO: 523346 - DNA, 19 bp, Mus musculus
  siRNA target sequence for Mefv (NM_019453.1,1809-1827).
ctcatgcaggacattggaa

SEQ ID NO: 523347 - DNA, 19 bp, Mus musculus
  siRNA target sequence for Mefv (NM_019453.1,1831-1849).
ccttgcacagggctaagat

SEQ ID NO: 523348 - DNA, 19 bp, Mus musculus
  siRNA target sequence for Mefv (NM_019453.1,1905-1923).
ctgctctaccagaagtcaa

SEQ ID NO: 523349 - DNA, 19 bp, Mus musculus
  siRNA target sequence for Mefv (NM_019453.1,1908-1926).
ctctaccagaagtcaaagt

SEQ ID NO: 523350 - DNA, 19 bp, Mus musculus
  siRNA target sequence for Mefv (NM_019453.1,1910-1928).
ctaccagaagtcaaagtct

SEQ ID NO: 523351 - DNA, 19 bp, Mus musculus
  siRNA target sequence for Mefv (NM_019453.1,1956-1974).
gaaatgctgagctctgaaa

SEQ ID NO: 523352 - DNA, 19 bp, Mus musculus
  siRNA target sequence for Mefv (NM_019453.1,1976-1994).
ggcattcagcgcttcagat

SEQ ID NO: 523353 - DNA, 19 bp, Mus musculus
  siRNA target sequence for Mefv (NM_019453.1,1984-2002).
gcgcttcagatgtagcaaa

SEQ ID NO: 523354 - DNA, 19 bp, Mus musculus
  siRNA target sequence for Mefv (NM_019453.1,2081-2099).
cacacaggactgtgatgta

SEQ ID NO: 523355 - DNA, 19 bp, Mus musculus
  siRNA target sequence for Mefv (NM_019453.1,2083-2101).
cacaggactgtgatgtagt

SEQ ID NO: 523356 - DNA, 19 bp, Mus musculus
  siRNA target sequence for Mefv (NM_019453.1,2088-2106).
gactgtgatgtagtatttt

SEQ ID NO: 523357 - DNA, 19 bp, Mus musculus
  siRNA target sequence for Mefv (NM_019453.1,2131-2149).
cagaacctaaagattacct

SEQ ID NO: 523358 - DNA, 19 bp, Mus musculus
  siRNA target sequence for Mefv (NM_019453.1,2259-2277).
gactggcgcttaagaacat

SEQ ID NO: 523359 - DNA, 19 bp, Mus musculus
  siRNA target sequence for Mefv (NM_019453.1,2275-2293).
catgctgttaccgtgattt

SEQ ID NO: 523360 - DNA, 19 bp, Mus musculus
  siRNA target sequence for Mefv (NM_019453.1,2278-2296).
gctgttaccgtgatttgga

SEQ ID NO: 523361 - DNA, 19 bp, Mus musculus
  siRNA target sequence for Mefv (NM_019453.1,2318-2336).
cctcatcttctcgatgata

SEQ ID NO: 523362 - DNA, 19 bp, Mus musculus
  siRNA target sequence for Mefv (NM_019453.1,2319-2337).
ctcatcttctcgatgatat

SEQ ID NO: 523363 - DNA, 19 bp, Mus musculus
  siRNA target sequence for Mlph (NM_053015.1,1060-1078).
cgatgtcaggggcaaacat

SEQ ID NO: 523364 - DNA, 19 bp, Mus musculus
  siRNA target sequence for Mlph (NM_053015.1,1188-1206).
ctcagatcttggagttgaa

SEQ ID NO: 523365 - DNA, 19 bp, Mus musculus
  siRNA target sequence for Mlph (NM_053015.1,1201-1219).
gttgaacaagcgaatgtca

SEQ ID NO: 523366 - DNA, 19 bp, Mus musculus
  siRNA target sequence for Mlph (NM_053015.1,1235-1253).
ctagtccacctggagaata

SEQ ID NO: 523367 - DNA, 19 bp, Mus musculus
  siRNA target sequence for Mlph (NM_053015.1,1489-1507).
ccctgctcggcctacaaaa

SEQ ID NO: 523368 - DNA, 19 bp, Mus musculus
  siRNA target sequence for Mlph (NM_053015.1,1490-1508).
cctgctcggcctacaaaaa

SEQ ID NO: 523369 - DNA, 19 bp, Mus musculus
  siRNA target sequence for Mlph (NM_053015.1,1493-1511).
gctcggcctacaaaaagca

SEQ ID NO: 523370 - DNA, 19 bp, Mus musculus
  siRNA target sequence for Mlph (NM_053015.1,1649-1667).
ggaaaacctcggagaaagt

SEQ ID NO: 523371 - DNA, 19 bp, Mus musculus
  siRNA target sequence for Mlph (NM_053015.1,1668-1686).
caggcatcccgatctttct

SEQ ID NO: 523372 - DNA, 19 bp, Mus musculus
  siRNA target sequence for Mlph (NM_053015.1,1692-1710).
gcgttactgagaaacttga

SEQ ID NO: 523373 - DNA, 19 bp, Mus musculus
  siRNA target sequence for Mlph (NM_053015.1,1822-1840).
cgtagacagtggttctttt

SEQ ID NO: 523374 - DNA, 19 bp, Mus musculus
  siRNA target sequence for Mlph (NM_053015.1,1859-1877).
cgtggctcgctgacacaaa

SEQ ID NO: 523375 - DNA, 19 bp, Mus musculus
  siRNA target sequence for Mlph (NM_053015.1,1899-1917).
ggacagccagacacatctt

SEQ ID NO: 523376 - DNA, 19 bp, Mus musculus
  siRNA target sequence for Mtss1 (NM_144800.1,1500-1518).
gctgccaaccagttgtcta

SEQ ID NO: 523377 - DNA, 19 bp, Mus musculus
  siRNA target sequence for Mtss1 (NM_144800.1,1501-1519).
ctgccaaccagttgtctaa

SEQ ID NO: 523378 - DNA, 19 bp, Mus musculus
  siRNA target sequence for Mtss1 (NM_144800.1,2014-2032).
gctgctctgaggataccat

SEQ ID NO: 523379 - DNA, 19 bp, Mus musculus
  siRNA target sequence for Mtss1 (NM_144800.1,2033-2051).
cccctcccaagtttcagat

SEQ ID NO: 523380 - DNA, 19 bp, Mus musculus
  siRNA target sequence for Mtss1 (NM_144800.1,2039-2057).
ccaagtttcagattacgat

SEQ ID NO: 523381 - DNA, 19 bp, Mus musculus
  siRNA target sequence for Mtss1 (NM_144800.1,2040-2058).
caagtttcagattacgatt

SEQ ID NO: 523382 - DNA, 19 bp, Mus musculus
  siRNA target sequence for Mtss1 (NM_144800.1,2043-2061).
gtttcagattacgattatt

SEQ ID NO: 523383 - DNA, 19 bp, Mus musculus
  siRNA target sequence for Mtss1 (NM_144800.1,2054-2072).
cgattatttctctgtaagt

SEQ ID NO: 523384 - DNA, 19 bp, Mus musculus
  siRNA target sequence for Mtss1 (NM_144800.1,2086-2104).
cagagcagcaagaattcga

SEQ ID NO: 523385 - DNA, 19 bp, Mus musculus
  siRNA target sequence for Mtss1 (NM_144800.1,2295-2313).
ggtcctattcccatcaaga

SEQ ID NO: 523386 - DNA, 19 bp, Mus musculus
  siRNA target sequence for Mtss1 (NM_144800.1,2436-2454).
ccccagggtgtcagcaata

SEQ ID NO: 523387 - DNA, 19 bp, Mus musculus
  siRNA target sequence for Mtss1 (NM_144800.1,2437-2455).
cccagggtgtcagcaatat

SEQ ID NO: 523388 - DNA, 19 bp, Mus musculus
  siRNA target sequence for Mtss1 (NM_144800.1,2653-2671).
ctcagggagaagacatgtt

SEQ ID NO: 523389 - DNA, 19 bp, Mus musculus
  siRNA target sequence for Muc1 (NM_013605.1,79-97).
gcattcgggctcctttctt

SEQ ID NO: 523390 - DNA, 19 bp, Mus musculus
  siRNA target sequence for Muc1 (NM_013605.1,104-122).
gctacttctagcaagtcta

SEQ ID NO: 523391 - DNA, 19 bp, Mus musculus
  siRNA target sequence for Muc1 (NM_013605.1,105-123).
ctacttctagcaagtctaa

SEQ ID NO: 523392 - DNA, 19 bp, Mus musculus
  siRNA target sequence for Muc1 (NM_013605.1,951-969).
cacagtggtacctcaacta

SEQ ID NO: 523393 - DNA, 19 bp, Mus musculus
  siRNA target sequence for Muc1 (NM_013605.1,958-976).
gtacctcaactacaactaa

SEQ ID NO: 523394 - DNA, 19 bp, Mus musculus
  siRNA target sequence for Muc1 (NM_013605.1,973-991).
ctaacagctctgaatcagt

SEQ ID NO: 523395 - DNA, 19 bp, Mus musculus
  siRNA target sequence for Muc1 (NM_013605.1,998-1016).
caccactccagtttacagt

SEQ ID NO: 523396 - DNA, 19 bp, Mus musculus
  siRNA target sequence for Muc1 (NM_013605.1,1013-1031).
cagtagcatgccattctct

SEQ ID NO: 523397 - DNA, 19 bp, Mus musculus
  siRNA target sequence for Muc1 (NM_013605.1,1045-1063).
cgtcaggctcagctatcat

SEQ ID NO: 523398 - DNA, 19 bp, Mus musculus
  siRNA target sequence for Muc1 (NM_013605.1,1116-1134).
gctaccagtctagtctata

SEQ ID NO: 523399 - DNA, 19 bp, Mus musculus
  siRNA target sequence for Muc1 (NM_013605.1,1117-1135).
ctaccagtctagtctataa

SEQ ID NO: 523400 - DNA, 19 bp, Mus musculus
  siRNA target sequence for Muc1 (NM_013605.1,1139-1157).
ctctgcaatagctacaact

SEQ ID NO: 523401 - DNA, 19 bp, Mus musculus
  siRNA target sequence for Muc1 (NM_013605.1,1259-1277).
ctatagcacagtaccattt

SEQ ID NO: 523402 - DNA, 19 bp, Mus musculus
  siRNA target sequence for Muc1 (NM_013605.1,1355-1373).
ccacccatttaattcttct

SEQ ID NO: 523403 - DNA, 19 bp, Mus musculus
  siRNA target sequence for Muc1 (NM_013605.1,1390-1408).
ccaactactaccaagaact

SEQ ID NO: 523404 - DNA, 19 bp, Mus musculus
  siRNA target sequence for Muc1 (NM_013605.1,1425-1443).
ggattgtttctgcagattt

SEQ ID NO: 523405 - DNA, 19 bp, Mus musculus
  siRNA target sequence for Muc1 (NM_013605.1,1461-1479).
gggatctctagcatcaagt

SEQ ID NO: 523406 - DNA, 19 bp, Mus musculus
  siRNA target sequence for Muc1 (NM_013605.1,1488-1506).
ggctccgtggtggtagaat

SEQ ID NO: 523407 - DNA, 19 bp, Mus musculus
  siRNA target sequence for Muc1 (NM_013605.1,1520-1538).
ccgggagggtacttttagt

SEQ ID NO: 523408 - DNA, 19 bp, Mus musculus
  siRNA target sequence for Muc1 (NM_013605.1,1547-1565).
cgtgaagtcacagcttata

SEQ ID NO: 523409 - DNA, 19 bp, Mus musculus
  siRNA target sequence for Muc1 (NM_013605.1,1587-1605).
gactataatctgactattt

SEQ ID NO: 523410 - DNA, 19 bp, Mus musculus
  siRNA target sequence for Muc1 (NM_013605.1,1691-1709).
gctggtctgtattttggtt

SEQ ID NO: 523411 - DNA, 19 bp, Mus musculus
  siRNA target sequence for Muc1 (NM_013605.1,1773-1791).
cagctggacatctttccaa

SEQ ID NO: 523412 - DNA, 19 bp, Mus musculus
  siRNA target sequence for Muc1 (NM_013605.1,1886-1904).
ggaggtttcggcaggtaat

SEQ ID NO: 523413 - DNA, 19 bp, Mus musculus
  siRNA target sequence for Muc1 (NM_013605.1,1912-1930).
gcagtctctcttataccaa

SEQ ID NO: 523414 - DNA, 19 bp, Mus musculus
  siRNA target sequence for Mybpc3 (NM_008653.1,111-129).
gccggagccagggaagaaa

SEQ ID NO: 523415 - DNA, 19 bp, Mus musculus
  siRNA target sequence for Mybpc3 (NM_008653.1,250-268).
gacatcaccgccaatgaca

SEQ ID NO: 523416 - DNA, 19 bp, Mus musculus
  siRNA target sequence for Mybpc3 (NM_008653.1,259-277).
gccaatgacaagtatggtt

SEQ ID NO: 523417 - DNA, 19 bp, Mus musculus
  siRNA target sequence for Mybpc3 (NM_008653.1,559-577).
cctattggcctctttctga

SEQ ID NO: 523418 - DNA, 19 bp, Mus musculus
  siRNA target sequence for Mybpc3 (NM_008653.1,746-764).
gagccagcaaggtctactt

SEQ ID NO: 523419 - DNA, 19 bp, Mus musculus
  siRNA target sequence for Mybpc3 (NM_008653.1,748-766).
gccagcaaggtctacttgt

SEQ ID NO: 523420 - DNA, 19 bp, Mus musculus
  siRNA target sequence for Mybpc3 (NM_008653.1,749-767).
ccagcaaggtctacttgtt

SEQ ID NO: 523421 - DNA, 19 bp, Mus musculus
  siRNA target sequence for Mybpc3 (NM_008653.1,750-768).
cagcaaggtctacttgttt

SEQ ID NO: 523422 - DNA, 19 bp, Mus musculus
  siRNA target sequence for Mybpc3 (NM_008653.1,823-841).
gtgtctaccaaggacaaat

SEQ ID NO: 523423 - DNA, 19 bp, Mus musculus
  siRNA target sequence for Mybpc3 (NM_008653.1,825-843).
gtctaccaaggacaaattt

SEQ ID NO: 523424 - DNA, 19 bp, Mus musculus
  siRNA target sequence for Mybpc3 (NM_008653.1,970-988).
gctgggactccggacttta

SEQ ID NO: 523425 - DNA, 19 bp, Mus musculus
  siRNA target sequence for Mybpc3 (NM_008653.1,973-991).
gggactccggactttagtt

SEQ ID NO: 523426 - DNA, 19 bp, Mus musculus
  siRNA target sequence for Mybpc3 (NM_008653.1,1013-1031).
gtttccggagggactcaaa

SEQ ID NO: 523427 - DNA, 19 bp, Mus musculus
  siRNA target sequence for Mybpc3 (NM_008653.1,1273-1291).
gaagtcaagtggcttaaga

SEQ ID NO: 523428 - DNA, 19 bp, Mus musculus
  siRNA target sequence for Mybpc3 (NM_008653.1,1427-1445).
gcacggagctctttgtcaa

SEQ ID NO: 523429 - DNA, 19 bp, Mus musculus
  siRNA target sequence for Mybpc3 (NM_008653.1,1428-1446).
cacggagctctttgtcaaa

SEQ ID NO: 523430 - DNA, 19 bp, Mus musculus
  siRNA target sequence for Mybpc3 (NM_008653.1,1430-1448).
cggagctctttgtcaaaga

SEQ ID NO: 523431 - DNA, 19 bp, Mus musculus
  siRNA target sequence for Mybpc3 (NM_008653.1,1499-1517).
gtcagcgggtggagtttga

SEQ ID NO: 523432 - DNA, 19 bp, Mus musculus
  siRNA target sequence for Mybpc3 (NM_008653.1,1579-1597).
cgtgaggagaccttcaaat

SEQ ID NO: 523433 - DNA, 19 bp, Mus musculus
  siRNA target sequence for Mybpc3 (NM_008653.1,1593-1611).
caaataccggttcaagaaa

SEQ ID NO: 523434 - DNA, 19 bp, Mus musculus
  siRNA target sequence for Mybpc3 (NM_008653.1,1616-1634).
ggcggaaacaccacttgat

SEQ ID NO: 523435 - DNA, 19 bp, Mus musculus
  siRNA target sequence for Mybpc3 (NM_008653.1,1618-1636).
cggaaacaccacttgatca

SEQ ID NO: 523436 - DNA, 19 bp, Mus musculus
  siRNA target sequence for Mybpc3 (NM_008653.1,1619-1637).
ggaaacaccacttgatcat

SEQ ID NO: 523437 - DNA, 19 bp, Mus musculus
  siRNA target sequence for Mybpc3 (NM_008653.1,1626-1644).
ccacttgatcatcaatgaa

SEQ ID NO: 523438 - DNA, 19 bp, Mus musculus
  siRNA target sequence for Mybpc3 (NM_008653.1,1697-1715).
cactggctgagctcattgt

SEQ ID NO: 523439 - DNA, 19 bp, Mus musculus
  siRNA target sequence for Mybpc3 (NM_008653.1,1797-1815).
ggtttcagatgagaatgta

SEQ ID NO: 523440 - DNA, 19 bp, Mus musculus
  siRNA target sequence for Mybpc3 (NM_008653.1,1853-1871).
ctgacaaccgcataaaggt

SEQ ID NO: 523441 - DNA, 19 bp, Mus musculus
  siRNA target sequence for Mybpc3 (NM_008653.1,1863-1881).
cataaaggtgtcccatata

SEQ ID NO: 523442 - DNA, 19 bp, Mus musculus
  siRNA target sequence for Mybpc3 (NM_008653.1,2029-2047).
cccaagatccacttggatt

SEQ ID NO: 523443 - DNA, 19 bp, Mus musculus
  siRNA target sequence for Mybpc3 (NM_008653.1,2098-2116).
cgcctggatgtccctattt

SEQ ID NO: 523444 - DNA, 19 bp, Mus musculus
  siRNA target sequence for Mybpc3 (NM_008653.1,2100-2118).
cctggatgtccctatttct

SEQ ID NO: 523445 - DNA, 19 bp, Mus musculus
  siRNA target sequence for Mybpc3 (NM_008653.1,2546-2564).
ggtggatgaggctcaactt

SEQ ID NO: 523446 - DNA, 19 bp, Mus musculus
  siRNA target sequence for Mybpc3 (NM_008653.1,2608-2626).
gagggtgtagcctatgaga

SEQ ID NO: 523447 - DNA, 19 bp, Mus musculus
  siRNA target sequence for Mybpc3 (NM_008653.1,2628-2646).
gcgagtctacgcagtcaat

SEQ ID NO: 523448 - DNA, 19 bp, Mus musculus
  siRNA target sequence for Mybpc3 (NM_008653.1,2922-2940).
ccgagtacgggcacacaat

SEQ ID NO: 523449 - DNA, 19 bp, Mus musculus
  siRNA target sequence for Mybpc3 (NM_008653.1,2924-2942).
gagtacgggcacacaatgt

SEQ ID NO: 523450 - DNA, 19 bp, Mus musculus
  siRNA target sequence for Mybpc3 (NM_008653.1,3229-3247).
gtgacagttcgcattgaga

SEQ ID NO: 523451 - DNA, 19 bp, Mus musculus
  siRNA target sequence for Mybpc3 (NM_008653.1,3384-3402).
gatctggggttatactgta

SEQ ID NO: 523452 - DNA, 19 bp, Mus musculus
  siRNA target sequence for Mybpc3 (NM_008653.1,3389-3407).
ggggttatactgtacagaa

SEQ ID NO: 523453 - DNA, 19 bp, Mus musculus
  siRNA target sequence for Mybpc3 (NM_008653.1,3390-3408).
gggttatactgtacagaaa

SEQ ID NO: 523454 - DNA, 19 bp, Mus musculus
  siRNA target sequence for Mybpc3 (NM_008653.1,3461-3479).
ctcactgtgtggtatcaga

SEQ ID NO: 523455 - DNA, 19 bp, Mus musculus
  siRNA target sequence for Mybpc3 (NM_008653.1,3467-3485).
gtgtggtatcagagcttat

SEQ ID NO: 523456 - DNA, 19 bp, Mus musculus
  siRNA target sequence for Mybpc3 (NM_008653.1,3469-3487).
gtggtatcagagcttatca

SEQ ID NO: 523457 - DNA, 19 bp, Mus musculus
  siRNA target sequence for Mybpc3 (NM_008653.1,3508-3526).
cgggtcttcagccataaca

SEQ ID NO: 523458 - DNA, 19 bp, Mus musculus
  siRNA target sequence for Mybpc3 (NM_008653.1,3509-3527).
gggtcttcagccataacat

SEQ ID NO: 523459 - DNA, 19 bp, Mus musculus
  siRNA target sequence for Mybpc3 (NM_008653.1,3561-3579).
ggagccagtctttattcca

SEQ ID NO: 523460 - DNA, 19 bp, Mus musculus
  siRNA target sequence for Mybpc3 (NM_008653.1,3562-3580).
gagccagtctttattccaa

SEQ ID NO: 523461 - DNA, 19 bp, Mus musculus
  siRNA target sequence for Mybpc3 (NM_008653.1,3581-3599).
gaccaggcatcacatatga

SEQ ID NO: 523462 - DNA, 19 bp, Mus musculus
  siRNA target sequence for Mybpc3 (NM_008653.1,3593-3611).
catatgagccacccaaata

SEQ ID NO: 523463 - DNA, 19 bp, Mus musculus
  siRNA target sequence for Mybpc3 (NM_008653.1,3657-3675).
ggcaaatcgctccatcatt

SEQ ID NO: 523464 - DNA, 19 bp, Mus musculus
  siRNA target sequence for Mybpc3 (NM_008653.1,3668-3686).
ccatcattgcaggctataa

SEQ ID NO: 523465 - DNA, 19 bp, Mus musculus
  siRNA target sequence for Mybpc3 (NM_008653.1,3669-3687).
catcattgcaggctataat

SEQ ID NO: 523466 - DNA, 19 bp, Mus musculus
  siRNA target sequence for Mybpc3 (NM_008653.1,3718-3736).
cctaagcccaagatttcct

SEQ ID NO: 523467 - DNA, 19 bp, Mus musculus
  siRNA target sequence for Mybpc3 (NM_008653.1,3769-3787).
gctcgcttccgcatgttct

SEQ ID NO: 523468 - DNA, 19 bp, Mus musculus
  siRNA target sequence for Mybpc3 (NM_008653.1,3819-3837).
gaaaccctgcccctatgat

SEQ ID NO: 523469 - DNA, 19 bp, Mus musculus
  siRNA target sequence for Myrip (NM_144557.2,225-243).
ggtgcagagagacttcaat

SEQ ID NO: 523470 - DNA, 19 bp, Mus musculus
  siRNA target sequence for Myrip (NM_144557.2,516-534).
ggagtggttctacaacaat

SEQ ID NO: 523471 - DNA, 19 bp, Mus musculus
  siRNA target sequence for Myrip (NM_144557.2,627-645).
cctaggaggaggattgttt

SEQ ID NO: 523472 - DNA, 19 bp, Mus musculus
  siRNA target sequence for Myrip (NM_144557.2,635-653).
gaggattgtttgaaccaaa

SEQ ID NO: 523473 - DNA, 19 bp, Mus musculus
  siRNA target sequence for Myrip (NM_144557.2,658-676).
gagaatgaagggagcattt

SEQ ID NO: 523474 - DNA, 19 bp, Mus musculus
  siRNA target sequence for Myrip (NM_144557.2,802-820).
gacagcctggacaaacaga

SEQ ID NO: 523475 - DNA, 19 bp, Mus musculus
  siRNA target sequence for Myrip (NM_144557.2,878-896).
ccatcctgcagaggattat

SEQ ID NO: 523476 - DNA, 19 bp, Mus musculus
  siRNA target sequence for Myrip (NM_144557.2,1236-1254).
cttgaaggacggtagtaga

SEQ ID NO: 523477 - DNA, 19 bp, Mus musculus
  siRNA target sequence for Myrip (NM_144557.2,1352-1370).
ccgacagtgaggaagactt

SEQ ID NO: 523478 - DNA, 19 bp, Mus musculus
  siRNA target sequence for Myrip (NM_144557.2,1502-1520).
ccatgtgctcggattcaga

SEQ ID NO: 523479 - DNA, 19 bp, Mus musculus
  siRNA target sequence for Myrip (NM_144557.2,1627-1645).
ggagaactggacgtcaatt

SEQ ID NO: 523480 - DNA, 19 bp, Mus musculus
  siRNA target sequence for Myrip (NM_144557.2,1628-1646).
gagaactggacgtcaattt

SEQ ID NO: 523481 - DNA, 19 bp, Mus musculus
  siRNA target sequence for Myrip (NM_144557.2,1630-1648).
gaactggacgtcaatttca

SEQ ID NO: 523482 - DNA, 19 bp, Mus musculus
  siRNA target sequence for Myrip (NM_144557.2,1904-1922).
gaaatagactgtatgagtt

SEQ ID NO: 523483 - DNA, 19 bp, Mus musculus
  siRNA target sequence for Myrip (NM_144557.2,1979-1997).
ccaaggcggaacctaagaa

SEQ ID NO: 523484 - DNA, 19 bp, Mus musculus
  siRNA target sequence for Myrip (NM_144557.2,2178-2196).
cagagaaaacgggatgttt

SEQ ID NO: 523485 - DNA, 19 bp, Mus musculus
  siRNA target sequence for Myrip (NM_144557.2,2237-2255).
cgtccttggaagaaaacgt

SEQ ID NO: 523486 - DNA, 19 bp, Mus musculus
  siRNA target sequence for Myrip (NM_144557.2,2424-2442).
catcgagagccgcatttca

SEQ ID NO: 523487 - DNA, 19 bp, Mus musculus
  siRNA target sequence for Myrip (NM_144557.2,2450-2468).
ccatcgctggcttaaacat

SEQ ID NO: 523488 - DNA, 19 bp, Mus musculus
  siRNA target sequence for Myrip (NM_144557.2,2451-2469).
catcgctggcttaaacata

SEQ ID NO: 523489 - DNA, 19 bp, Mus musculus
  siRNA target sequence for Myrip (NM_144557.2,2513-2531).
ggagccaggtacaaactat

SEQ ID NO: 523490 - DNA, 19 bp, Mus musculus
  siRNA target sequence for Myrip (NM_144557.2,2516-2534).
gccaggtacaaactataga

SEQ ID NO: 523491 - DNA, 19 bp, Mus musculus
  siRNA target sequence for Myrip (NM_144557.2,2600-2618).
cttccgtgacccccattaa

SEQ ID NO: 523492 - DNA, 19 bp, Mus musculus
  siRNA target sequence for Myrip (NM_144557.2,2604-2622).
cgtgacccccattaagaca

SEQ ID NO: 523493 - DNA, 19 bp, Mus musculus
  siRNA target sequence for Myrip (NM_144557.2,2605-2623).
gtgacccccattaagacat

SEQ ID NO: 523494 - DNA, 19 bp, Mus musculus
  siRNA target sequence for Myrip (NM_144557.2,2609-2627).
cccccattaagacattcaa

SEQ ID NO: 523495 - DNA, 19 bp, Mus musculus
  siRNA target sequence for Myrip (NM_144557.2,2644-2662).
caaggctcctccacaaaca

SEQ ID NO: 523496 - DNA, 19 bp, Mus musculus
  siRNA target sequence for Nrap (NM_008733.2,1274-1292).
gggtctggagaatagtaaa

SEQ ID NO: 523497 - DNA, 19 bp, Mus musculus
  siRNA target sequence for Nrap (NM_008733.2,1320-1338).
ccccagttcaggaatgtga

SEQ ID NO: 523498 - DNA, 19 bp, Mus musculus
  siRNA target sequence for Nrap (NM_008733.2,1355-1373).
caccagcgataataaatat

SEQ ID NO: 523499 - DNA, 19 bp, Mus musculus
  siRNA target sequence for Nrap (NM_008733.2,1357-1375).
ccagcgataataaatataa

SEQ ID NO: 523500 - DNA, 19 bp, Mus musculus
  siRNA target sequence for Nrap (NM_008733.2,1358-1376).
cagcgataataaatataaa

SEQ ID NO: 523501 - DNA, 19 bp, Mus musculus
  siRNA target sequence for Parva (NM_020606.3,374-392).
ggacaatggtcgatccaaa

SEQ ID NO: 523502 - DNA, 19 bp, Mus musculus
  siRNA target sequence for Parva (NM_020606.3,432-450).
gctcatcgactggatcaat

SEQ ID NO: 523503 - DNA, 19 bp, Mus musculus
  siRNA target sequence for Parva (NM_020606.3,443-461).
ggatcaatgacgtattggt

SEQ ID NO: 523504 - DNA, 19 bp, Mus musculus
  siRNA target sequence for Parva (NM_020606.3,453-471).
cgtattggtgggagaaaga

SEQ ID NO: 523505 - DNA, 19 bp, Mus musculus
  siRNA target sequence for Parva (NM_020606.3,454-472).
gtattggtgggagaaagaa

SEQ ID NO: 523506 - DNA, 19 bp, Mus musculus
  siRNA target sequence for Parva (NM_020606.3,480-498).
gaaggacctcgctgaagat

SEQ ID NO: 523507 - DNA, 19 bp, Mus musculus
  siRNA target sequence for Parva (NM_020606.3,486-504).
cctcgctgaagatctctat

SEQ ID NO: 523508 - DNA, 19 bp, Mus musculus
  siRNA target sequence for Parva (NM_020606.3,489-507).
cgctgaagatctctatgat

SEQ ID NO: 523509 - DNA, 19 bp, Mus musculus
  siRNA target sequence for Parva (NM_020606.3,712-730).
ctggttgctctgtctcaat

SEQ ID NO: 523510 - DNA, 19 bp, Mus musculus
  siRNA target sequence for Parva (NM_020606.3,817-835).
caaatccaagaggaaataa

SEQ ID NO: 523511 - DNA, 19 bp, Mus musculus
  siRNA target sequence for Parva (NM_020606.3,868-886).
gaacgtgatgcctttgaca

SEQ ID NO: 523512 - DNA, 19 bp, Mus musculus
  siRNA target sequence for Parva (NM_020606.3,945-963).
cgtgaacaagcatctgaat

SEQ ID NO: 523513 - DNA, 19 bp, Mus musculus
  siRNA target sequence for Parva (NM_020606.3,1202-1220).
cgctgagagtgctatacaa

SEQ ID NO: 523514 - DNA, 19 bp, Mus musculus
  siRNA target sequence for Parvb (NM_133167.2,115-133).
cagggaggtgactgactta

SEQ ID NO: 523515 - DNA, 19 bp, Mus musculus
  siRNA target sequence for Parvb (NM_133167.2,174-192).
cggctttggtggacattca

SEQ ID NO: 523516 - DNA, 19 bp, Mus musculus
  siRNA target sequence for Parvb (NM_133167.2,396-414).
cgcactgcaagctgaatgt

SEQ ID NO: 523517 - DNA, 19 bp, Mus musculus
  siRNA target sequence for Parvb (NM_133167.2,693-711).
cgaccacagagatcatgat

SEQ ID NO: 523518 - DNA, 19 bp, Mus musculus
  siRNA target sequence for Parvb (NM_133167.2,722-740).
gagcgggacgccttcgata

SEQ ID NO: 523519 - DNA, 19 bp, Mus musculus
  siRNA target sequence for Parvb (NM_133167.2,726-744).
gggacgccttcgatactct

SEQ ID NO: 523520 - DNA, 19 bp, Mus musculus
  siRNA target sequence for Parvb (NM_133167.2,727-745).
ggacgccttcgatactctt

SEQ ID NO: 523521 - DNA, 19 bp, Mus musculus
  siRNA target sequence for Parvb (NM_133167.2,728-746).
gacgccttcgatactcttt

SEQ ID NO: 523522 - DNA, 19 bp, Mus musculus
  siRNA target sequence for Parvb (NM_133167.2,732-750).
ccttcgatactcttttcga

SEQ ID NO: 523523 - DNA, 19 bp, Mus musculus
  siRNA target sequence for Parvb (NM_133167.2,864-882).
gtgtgtacctagttctact

SEQ ID NO: 523524 - DNA, 19 bp, Mus musculus
  siRNA target sequence for Parvb (NM_133167.2,888-906).
gccttcttgaagactactt

SEQ ID NO: 523525 - DNA, 19 bp, Mus musculus
  siRNA target sequence for Parvb (NM_133167.2,889-907).
ccttcttgaagactacttt

SEQ ID NO: 523526 - DNA, 19 bp, Mus musculus
  siRNA target sequence for Parvb (NM_133167.2,1012-1030).
caaggcacgccctgaagat

SEQ ID NO: 523527 - DNA, 19 bp, Mus musculus
  siRNA target sequence for Parvb (NM_133167.2,1023-1041).
ctgaagatgtggtgaactt

SEQ ID NO: 523528 - DNA, 19 bp, Mus musculus
  siRNA target sequence for Parvb (NM_133167.2,1053-1071).
ccactctgcgggtccttta

SEQ ID NO: 523529 - DNA, 19 bp, Mus musculus
  siRNA target sequence for Parvb (NM_133167.2,1074-1092).
cgctgttcaccaagtacaa

SEQ ID NO: 523530 - DNA, 19 bp, Mus musculus
  siRNA target sequence for Parvg (NM_022321.2,617-635).
gaagtcatccacattgaga

SEQ ID NO: 523531 - DNA, 19 bp, Mus musculus
  siRNA target sequence for Parvg (NM_022321.2,716-734).
gacgcctttgatgaattat

SEQ ID NO: 523532 - DNA, 19 bp, Mus musculus
  siRNA target sequence for Parvg (NM_022321.2,718-736).
cgcctttgatgaattattt

SEQ ID NO: 523533 - DNA, 19 bp, Mus musculus
  siRNA target sequence for Parvg (NM_022321.2,1041-1059).
gcacactgaggatacttta

SEQ ID NO: 523534 - DNA, 19 bp, Mus musculus
  siRNA target sequence for Pfn1 (NM_011072.2,312-330).
ggcaaagaccggtcaagtt

SEQ ID NO: 523535 - DNA, 19 bp, Mus musculus
  siRNA target sequence for Pfn1 (NM_011072.2,389-407).
gctgcaagacggggaattt

SEQ ID NO: 523536 - DNA, 19 bp, Mus musculus
  siRNA target sequence for Pfn1 (NM_011072.2,390-408).
ctgcaagacggggaattta

SEQ ID NO: 523537 - DNA, 19 bp, Mus musculus
  siRNA target sequence for Pfn1 (NM_011072.2,392-410).
gcaagacggggaatttaca

SEQ ID NO: 523538 - DNA, 19 bp, Mus musculus
  siRNA target sequence for Pfn1 (NM_011072.2,393-411).
caagacggggaatttacaa

SEQ ID NO: 523539 - DNA, 19 bp, Mus musculus
  siRNA target sequence for Pfn1 (NM_011072.2,398-416).
cggggaatttacaatggat

SEQ ID NO: 523540 - DNA, 19 bp, Mus musculus
  siRNA target sequence for Pfn2 (NM_019410.2,126-144).
gctactgcgacgccaaata

SEQ ID NO: 523541 - DNA, 19 bp, Mus musculus
  siRNA target sequence for Pfn2 (NM_019410.2,178-196).
gagcatcacgccagtagaa

SEQ ID NO: 523542 - DNA, 19 bp, Mus musculus
  siRNA target sequence for Pfn2 (NM_019410.2,180-198).
gcatcacgccagtagaaat

SEQ ID NO: 523543 - DNA, 19 bp, Mus musculus
  siRNA target sequence for Pfn2 (NM_019410.2,184-202).
cacgccagtagaaatagat

SEQ ID NO: 523544 - DNA, 19 bp, Mus musculus
  siRNA target sequence for Pfn2 (NM_019410.2,186-204).
cgccagtagaaatagatat

SEQ ID NO: 523545 - DNA, 19 bp, Mus musculus
  siRNA target sequence for Pfn2 (NM_019410.2,188-206).
ccagtagaaatagatatga

SEQ ID NO: 523546 - DNA, 19 bp, Mus musculus
  siRNA target sequence for Pfn2 (NM_019410.2,221-239).
cgggaaggtttctttacca

SEQ ID NO: 523547 - DNA, 19 bp, Mus musculus
  siRNA target sequence for Pfn2 (NM_019410.2,222-240).
gggaaggtttctttaccaa

SEQ ID NO: 523548 - DNA, 19 bp, Mus musculus
  siRNA target sequence for Pfn2 (NM_019410.2,232-250).
ctttaccaacggtttgact

SEQ ID NO: 523549 - DNA, 19 bp, Mus musculus
  siRNA target sequence for Pfn2 (NM_019410.2,277-295).
cagagatagcctatacgtt

SEQ ID NO: 523550 - DNA, 19 bp, Mus musculus
  siRNA target sequence for Pfn2 (NM_019410.2,313-331).
ggacatccggacaaagagt

SEQ ID NO: 523551 - DNA, 19 bp, Mus musculus
  siRNA target sequence for Pfn2 (NM_019410.2,335-353).
ggtggggagccaacataca

SEQ ID NO: 523552 - DNA, 19 bp, Mus musculus
  siRNA target sequence for Pfn2 (NM_019410.2,336-354).
gtggggagccaacatacaa

SEQ ID NO: 523553 - DNA, 19 bp, Mus musculus
  siRNA target sequence for Pfn2 (NM_019410.2,375-393).
ggagagtcttggtctttgt

SEQ ID NO: 523554 - DNA, 19 bp, Mus musculus
  siRNA target sequence for Pfn2 (NM_019410.2,376-394).
gagagtcttggtctttgta

SEQ ID NO: 523555 - DNA, 19 bp, Mus musculus
  siRNA target sequence for Pfn2 (NM_019410.2,378-396).
gagtcttggtctttgtaat

SEQ ID NO: 523556 - DNA, 19 bp, Mus musculus
  siRNA target sequence for Pfn2 (NM_019410.2,412-430).
ccatggaggcggattgaat

SEQ ID NO: 523557 - DNA, 19 bp, Mus musculus
  siRNA target sequence for Pfn2 (NM_019410.2,413-431).
catggaggcggattgaata

SEQ ID NO: 523558 - DNA, 19 bp, Mus musculus
  siRNA target sequence for Pfn2 (NM_019410.2,416-434).
ggaggcggattgaataaga

SEQ ID NO: 523559 - DNA, 19 bp, Mus musculus
  siRNA target sequence for Pfn2 (NM_019410.2,427-445).
gaataagaaggcatactca

SEQ ID NO: 523560 - DNA, 19 bp, Mus musculus
  siRNA target sequence for Pfn2 (NM_019410.2,437-455).
gcatactcaatggcaaaat

SEQ ID NO: 523561 - DNA, 19 bp, Mus musculus
  siRNA target sequence for Pls3 (NM_145629.1,219-237).
gcgaccacccagatttcca

SEQ ID NO: 523562 - DNA, 19 bp, Mus musculus
  siRNA target sequence for Pls3 (NM_145629.1,221-239).
gaccacccagatttccaaa

SEQ ID NO: 523563 - DNA, 19 bp, Mus musculus
  siRNA target sequence for Pls3 (NM_145629.1,284-302).
caacagcaatggattcatt

SEQ ID NO: 523564 - DNA, 19 bp, Mus musculus
  siRNA target sequence for Pls3 (NM_145629.1,295-313).
gattcatttgcgactatga

SEQ ID NO: 523565 - DNA, 19 bp, Mus musculus
  siRNA target sequence for Pls3 (NM_145629.1,324-342).
cttttcaaggaagctaata

SEQ ID NO: 523566 - DNA, 19 bp, Mus musculus
  siRNA target sequence for Pls3 (NM_145629.1,346-364).
cactgcccggatataaagt

SEQ ID NO: 523567 - DNA, 19 bp, Mus musculus
  siRNA target sequence for Pls3 (NM_145629.1,348-366).
ctgcccggatataaagtga

SEQ ID NO: 523568 - DNA, 19 bp, Mus musculus
  siRNA target sequence for Pls3 (NM_145629.1,422-440).
cagctttaatgagtttgtt

SEQ ID NO: 523569 - DNA, 19 bp, Mus musculus
  siRNA target sequence for Pls3 (NM_145629.1,466-484).
gtgatatcgctaaaacctt

SEQ ID NO: 523570 - DNA, 19 bp, Mus musculus
  siRNA target sequence for Pls3 (NM_145629.1,552-570).
gggacccagcattcctatt

SEQ ID NO: 523571 - DNA, 19 bp, Mus musculus
  siRNA target sequence for Pls3 (NM_145629.1,618-636).
gaaaatgatcccgattgta

SEQ ID NO: 523572 - DNA, 19 bp, Mus musculus
  siRNA target sequence for Pls3 (NM_145629.1,628-646).
ccgattgtagacatgtcat

SEQ ID NO: 523573 - DNA, 19 bp, Mus musculus
  siRNA target sequence for Pls3 (NM_145629.1,629-647).
cgattgtagacatgtcata

SEQ ID NO: 523574 - DNA, 19 bp, Mus musculus
  siRNA target sequence for Pls3 (NM_145629.1,649-667).
ccatgaacccaaatactga

SEQ ID NO: 523575 - DNA, 19 bp, Mus musculus
  siRNA target sequence for Pls3 (NM_145629.1,650-668).
catgaacccaaatactgat

SEQ ID NO: 523576 - DNA, 19 bp, Mus musculus
  siRNA target sequence for Pls3 (NM_145629.1,693-711).
gggatcgtgctctgcaaaa

SEQ ID NO: 523577 - DNA, 19 bp, Mus musculus
  siRNA target sequence for Pls3 (NM_145629.1,694-712).
ggatcgtgctctgcaaaat

SEQ ID NO: 523578 - DNA, 19 bp, Mus musculus
  siRNA target sequence for Pls3 (NM_145629.1,830-848).
gtgtcacgttgtgaacatt

SEQ ID NO: 523579 - DNA, 19 bp, Mus musculus
  siRNA target sequence for Pls3 (NM_145629.1,1059-1077).
ggctggcaaaagatcaaca

SEQ ID NO: 523580 - DNA, 19 bp, Mus musculus
  siRNA target sequence for Pls3 (NM_145629.1,1155-1173).
ggggagccacggatagata

SEQ ID NO: 523581 - DNA, 19 bp, Mus musculus
  siRNA target sequence for Pls3 (NM_145629.1,1158-1176).
gagccacggatagatatta

SEQ ID NO: 523582 - DNA, 19 bp, Mus musculus
  siRNA target sequence for Pls3 (NM_145629.1,1161-1179).
ccacggatagatattaaca

SEQ ID NO: 523583 - DNA, 19 bp, Mus musculus
  siRNA target sequence for Pls3 (NM_145629.1,1162-1180).
cacggatagatattaacat

SEQ ID NO: 523584 - DNA, 19 bp, Mus musculus
  siRNA target sequence for Pls3 (NM_145629.1,1164-1182).
cggatagatattaacatgt

SEQ ID NO: 523585 - DNA, 19 bp, Mus musculus
  siRNA target sequence for Pls3 (NM_145629.1,1178-1196).
catgtcaggtttcaatgaa

SEQ ID NO: 523586 - DNA, 19 bp, Mus musculus
  siRNA target sequence for Pls3 (NM_145629.1,1181-1199).
gtcaggtttcaatgaaact

SEQ ID NO: 523587 - DNA, 19 bp, Mus musculus
  siRNA target sequence for Pls3 (NM_145629.1,1211-1229).
gagagccgaaagtatgctt

SEQ ID NO: 523588 - DNA, 19 bp, Mus musculus
  siRNA target sequence for Pls3 (NM_145629.1,1216-1234).
ccgaaagtatgcttcaaca

SEQ ID NO: 523589 - DNA, 19 bp, Mus musculus
  siRNA target sequence for Pls3 (NM_145629.1,1233-1251).
caagcagataaattaggtt

SEQ ID NO: 523590 - DNA, 19 bp, Mus musculus
  siRNA target sequence for Pls3 (NM_145629.1,1248-1266).
ggttgcagacagttcgtta

SEQ ID NO: 523591 - DNA, 19 bp, Mus musculus
  siRNA target sequence for Pls3 (NM_145629.1,1262-1280).
cgttactccagctgatgtt

SEQ ID NO: 523592 - DNA, 19 bp, Mus musculus
  siRNA target sequence for Pls3 (NM_145629.1,1342-1360).
cactaactaaacctgaaaa

SEQ ID NO: 523593 - DNA, 19 bp, Mus musculus
  siRNA target sequence for Pls3 (NM_145629.1,1427-1445).
gaactctcttggtgttaat

SEQ ID NO: 523594 - DNA, 19 bp, Mus musculus
  siRNA target sequence for Pls3 (NM_145629.1,1448-1466).
ccacgtcaaccatctctat

SEQ ID NO: 523595 - DNA, 19 bp, Mus musculus
  siRNA target sequence for Pls3 (NM_145629.1,1497-1515).
cagctgtatgagaggatta

SEQ ID NO: 523596 - DNA, 19 bp, Mus musculus
  siRNA target sequence for Pls3 (NM_145629.1,1502-1520).
gtatgagaggattaaagtt

SEQ ID NO: 523597 - DNA, 19 bp, Mus musculus
  siRNA target sequence for Pls3 (NM_145629.1,1527-1545).
gactggagtaaagttaaca

SEQ ID NO: 523598 - DNA, 19 bp, Mus musculus
  siRNA target sequence for Pls3 (NM_145629.1,1595-1613).
caactatgcagttgaatta

SEQ ID NO: 523599 - DNA, 19 bp, Mus musculus
  siRNA target sequence for Pls3 (NM_145629.1,1712-1730).
gagaagatatacccttaat

SEQ ID NO: 523600 - DNA, 19 bp, Mus musculus
  siRNA target sequence for Pls3 (NM_145629.1,1787-1805).
ggtcaacagaacattgagt

SEQ ID NO: 523601 - DNA, 19 bp, Mus musculus
  siRNA target sequence for Pls3 (NM_145629.1,1861-1879).
gtttggcggttgtggattt

SEQ ID NO: 523602 - DNA, 19 bp, Mus musculus
  siRNA target sequence for Pls3 (NM_145629.1,1867-1885).
cggttgtggatttaattga

SEQ ID NO: 523603 - DNA, 19 bp, Mus musculus
  siRNA target sequence for Pls3 (NM_145629.1,1893-1911).
caaccaggctgcattaact

SEQ ID NO: 523604 - DNA, 19 bp, Mus musculus
  siRNA target sequence for Pls3 (NM_145629.1,1897-1915).
caggctgcattaactatga

SEQ ID NO: 523605 - DNA, 19 bp, Mus musculus
  siRNA target sequence for Pls3 (NM_145629.1,1920-1938).
gtgaagagtgggaatctaa

SEQ ID NO: 523606 - DNA, 19 bp, Mus musculus
  siRNA target sequence for Pls3 (NM_145629.1,1963-1981).
ccaagtacgcagtatcgat

SEQ ID NO: 523607 - DNA, 19 bp, Mus musculus
  siRNA target sequence for Pls3 (NM_145629.1,1974-1992).
gtatcgatggctagaagaa

SEQ ID NO: 523608 - DNA, 19 bp, Mus musculus
  siRNA target sequence for Pls3 (NM_145629.1,1990-2008).
gaatcggagccagagtata

SEQ ID NO: 523609 - DNA, 19 bp, Mus musculus
  siRNA target sequence for Pstpip1 (NM_011193.1,627-645).
gcaagttgtcgctctacaa

SEQ ID NO: 523610 - DNA, 19 bp, Mus musculus
  siRNA target sequence for Pstpip1 (NM_011193.1,737-755).
caccagaagcaagtagaaa

SEQ ID NO: 523611 - DNA, 19 bp, Mus musculus
  siRNA target sequence for Pstpip1 (NM_011193.1,807-825).
gagtgtacaggcaaaatat

SEQ ID NO: 523612 - DNA, 19 bp, Mus musculus
  siRNA target sequence for Pstpip1 (NM_011193.1,811-829).
gtacaggcaaaatatcgaa

SEQ ID NO: 523613 - DNA, 19 bp, Mus musculus
  siRNA target sequence for Pstpip1 (NM_011193.1,1079-1097).
gctccggtgccttatcaga

SEQ ID NO: 523614 - DNA, 19 bp, Mus musculus
  siRNA target sequence for Pstpip1 (NM_011193.1,1080-1098).
ctccggtgccttatcagaa

SEQ ID NO: 523615 - DNA, 19 bp, Mus musculus
  siRNA target sequence for Pstpip1 (NM_011193.1,1083-1101).
cggtgccttatcagaacta

SEQ ID NO: 523616 - DNA, 19 bp, Mus musculus
  siRNA target sequence for Pstpip1 (NM_011193.1,1148-1166).
ccctcctgcggtgtgataa

SEQ ID NO: 523617 - DNA, 19 bp, Mus musculus
  siRNA target sequence for Pstpip1 (NM_011193.1,1149-1167).
cctcctgcggtgtgataaa

SEQ ID NO: 523618 - DNA, 19 bp, Mus musculus
  siRNA target sequence for Pstpip1 (NM_011193.1,1292-1310).
gcgacccagggaaacctta

SEQ ID NO: 523619 - DNA, 19 bp, Mus musculus
  siRNA target sequence for Pstpip1 (NM_011193.1,1298-1316).
cagggaaaccttaactcat

SEQ ID NO: 523620 - DNA, 19 bp, Mus musculus
  siRNA target sequence for Pstpip1 (NM_011193.1,1342-1360).
cgactacactgcacagaat

SEQ ID NO: 523621 - DNA, 19 bp, Mus musculus
  siRNA target sequence for Pstpip1 (NM_011193.1,1343-1361).
gactacactgcacagaatt

SEQ ID NO: 523622 - DNA, 19 bp, Mus musculus
  siRNA target sequence for Pstpip2 (NM_013831.2,988-1006).
cacccatcatgtatgagaa

SEQ ID NO: 523623 - DNA, 19 bp, Mus musculus
  siRNA target sequence for Pstpip2 (NM_013831.2,1032-1050).
gccccaccagaaaagacta

SEQ ID NO: 523624 - DNA, 19 bp, Mus musculus
  siRNA target sequence for Ptk9 (NM_008971.2,362-380).
gctgtatgcggcaacaaga

SEQ ID NO: 523625 - DNA, 19 bp, Mus musculus
  siRNA target sequence for Ptk9l (NM_011876.2,220-238).
gctccatccgacttatcaa

SEQ ID NO: 523626 - DNA, 19 bp, Mus musculus
  siRNA target sequence for Ptk9l (NM_011876.2,221-239).
ctccatccgacttatcaaa

SEQ ID NO: 523627 - DNA, 19 bp, Mus musculus
  siRNA target sequence for Ptk9l (NM_011876.2,223-241).
ccatccgacttatcaaagt

SEQ ID NO: 523628 - DNA, 19 bp, Mus musculus
  siRNA target sequence for Ptk9l (NM_011876.2,356-374).
cctcctcttccgacttgat

SEQ ID NO: 523629 - DNA, 19 bp, Mus musculus
  siRNA target sequence for Ptk9l (NM_011876.2,357-375).
ctcctcttccgacttgatt

SEQ ID NO: 523630 - DNA, 19 bp, Mus musculus
  siRNA target sequence for Ptk9l (NM_011876.2,411-429).
gcctggtcacctgacaatt

SEQ ID NO: 523631 - DNA, 19 bp, Mus musculus
  siRNA target sequence for Ptk9l (NM_011876.2,435-453).
gtgcggctgaagatgctat

SEQ ID NO: 523632 - DNA, 19 bp, Mus musculus
  siRNA target sequence for Ptk9l (NM_011876.2,440-458).
gctgaagatgctatatgca

SEQ ID NO: 523633 - DNA, 19 bp, Mus musculus
  siRNA target sequence for Ptk9l (NM_011876.2,463-481).
cacgcgccaccgtgaagaa

SEQ ID NO: 523634 - DNA, 19 bp, Mus musculus
  siRNA target sequence for Ptk9l (NM_011876.2,614-632).
ccagcagatccgaatcaat

SEQ ID NO: 523635 - DNA, 19 bp, Mus musculus
  siRNA target sequence for Ptk9l (NM_011876.2,645-663).
gagatcagcgtggaaagta

SEQ ID NO: 523636 - DNA, 19 bp, Mus musculus
  siRNA target sequence for Ptk9l (NM_011876.2,647-665).
gatcagcgtggaaagtaaa

SEQ ID NO: 523637 - DNA, 19 bp, Mus musculus
  siRNA target sequence for Ptk9l (NM_011876.2,735-753).
cagaagacggtcaactata

SEQ ID NO: 523638 - DNA, 19 bp, Mus musculus
  siRNA target sequence for Ptk9l (NM_011876.2,869-887).
cctatacaagcatactcat

SEQ ID NO: 523639 - DNA, 19 bp, Mus musculus
  siRNA target sequence for Rdx (NM_009041.1,168-186).
gccgaagccaatcaatgta

SEQ ID NO: 523640 - DNA, 19 bp, Mus musculus
  siRNA target sequence for Rdx (NM_009041.1,169-187).
ccgaagccaatcaatgtaa

SEQ ID NO: 523641 - DNA, 19 bp, Mus musculus
  siRNA target sequence for Rdx (NM_009041.1,171-189).
gaagccaatcaatgtaaga

SEQ ID NO: 523642 - DNA, 19 bp, Mus musculus
  siRNA target sequence for Rdx (NM_009041.1,222-240).
catccagcccaatacaact

SEQ ID NO: 523643 - DNA, 19 bp, Mus musculus
  siRNA target sequence for Rdx (NM_009041.1,293-311).
ggttttttgggctgcaata

SEQ ID NO: 523644 - DNA, 19 bp, Mus musculus
  siRNA target sequence for Rdx (NM_009041.1,332-350).
ctacatggcttaaattgaa

SEQ ID NO: 523645 - DNA, 19 bp, Mus musculus
  siRNA target sequence for Rdx (NM_009041.1,335-353).
catggcttaaattgaataa

SEQ ID NO: 523646 - DNA, 19 bp, Mus musculus
  siRNA target sequence for Rdx (NM_009041.1,388-406).
cctttacagttcaagttta

SEQ ID NO: 523647 - DNA, 19 bp, Mus musculus
  siRNA target sequence for Rdx (NM_009041.1,471-489).
cttcttgcaagttaaagaa

SEQ ID NO: 523648 - DNA, 19 bp, Mus musculus
  siRNA target sequence for Rdx (NM_009041.1,481-499).
gttaaagaagccatcttaa

SEQ ID NO: 523649 - DNA, 19 bp, Mus musculus
  siRNA target sequence for Rdx (NM_009041.1,561-579).
caagtatggagattataat

SEQ ID NO: 523650 - DNA, 19 bp, Mus musculus
  siRNA target sequence for Rdx (NM_009041.1,596-614).
caggctatctggctaatga

SEQ ID NO: 523651 - DNA, 19 bp, Mus musculus
  siRNA target sequence for Rdx (NM_009041.1,606-624).
ggctaatgacagactctta

SEQ ID NO: 523652 - DNA, 19 bp, Mus musculus
  siRNA target sequence for Rdx (NM_009041.1,729-747).
gatggaatacttgaagatt

SEQ ID NO: 523653 - DNA, 19 bp, Mus musculus
  siRNA target sequence for Rdx (NM_009041.1,749-767).
cgcaagatctagagatgta

SEQ ID NO: 523654 - DNA, 19 bp, Mus musculus
  siRNA target sequence for Rdx (NM_009041.1,750-768).
gcaagatctagagatgtat

SEQ ID NO: 523655 - DNA, 19 bp, Mus musculus
  siRNA target sequence for Rdx (NM_009041.1,770-788).
gtgtcaactactttgaaat

SEQ ID NO: 523656 - DNA, 19 bp, Mus musculus
  siRNA target sequence for Rdx (NM_009041.1,859-877).
gacaagttaacacctaaaa

SEQ ID NO: 523657 - DNA, 19 bp, Mus musculus
  siRNA target sequence for Rdx (NM_009041.1,864-882).
gttaacacctaaaattggt

SEQ ID NO: 523658 - DNA, 19 bp, Mus musculus
  siRNA target sequence for Rdx (NM_009041.1,931-949).
gttataaagccaattgaca

SEQ ID NO: 523659 - DNA, 19 bp, Mus musculus
  siRNA target sequence for Rdx (NM_009041.1,976-994).
gcacctcgtctgagaatca

SEQ ID NO: 523660 - DNA, 19 bp, Mus musculus
  siRNA target sequence for Rdx (NM_009041.1,977-995).
cacctcgtctgagaatcaa

SEQ ID NO: 523661 - DNA, 19 bp, Mus musculus
  siRNA target sequence for Rdx (NM_009041.1,980-998).
ctcgtctgagaatcaataa

SEQ ID NO: 523662 - DNA, 19 bp, Mus musculus
  siRNA target sequence for Rdx (NM_009041.1,985-1003).
ctgagaatcaataaacgaa

SEQ ID NO: 523663 - DNA, 19 bp, Mus musculus
  siRNA target sequence for Rdx (NM_009041.1,987-1005).
gagaatcaataaacgaatt

SEQ ID NO: 523664 - DNA, 19 bp, Mus musculus
  siRNA target sequence for Rdx (NM_009041.1,989-1007).
gaatcaataaacgaatttt

SEQ ID NO: 523665 - DNA, 19 bp, Mus musculus
  siRNA target sequence for Rdx (NM_009041.1,1000-1018).
cgaattttggccttatgta

SEQ ID NO: 523666 - DNA, 19 bp, Mus musculus
  siRNA target sequence for Rdx (NM_009041.1,1001-1019).
gaattttggccttatgtat

SEQ ID NO: 523667 - DNA, 19 bp, Mus musculus
  siRNA target sequence for Rdx (NM_009041.1,1011-1029).
cttatgtatgggaaaccat

SEQ ID NO: 523668 - DNA, 19 bp, Mus musculus
  siRNA target sequence for Rdx (NM_009041.1,1047-1065).
gagaaagcctgatactatt

SEQ ID NO: 523669 - DNA, 19 bp, Mus musculus
  siRNA target sequence for Rdx (NM_009041.1,1055-1073).
ctgatactattgaagtaca

SEQ ID NO: 523670 - DNA, 19 bp, Mus musculus
  siRNA target sequence for Rdx (NM_009041.1,1296-1314).
ggagcgccagcgagcaaaa

SEQ ID NO: 523671 - DNA, 19 bp, Mus musculus
  siRNA target sequence for Rdx (NM_009041.1,1384-1402).
gctgctgaccagatgaaga

SEQ ID NO: 523672 - DNA, 19 bp, Mus musculus
  siRNA target sequence for Rdx (NM_009041.1,1420-1438).
gcagaacttgccgaattca

SEQ ID NO: 523673 - DNA, 19 bp, Mus musculus
  siRNA target sequence for Rdx (NM_009041.1,1431-1449).
cgaattcactgccaagatt

SEQ ID NO: 523674 - DNA, 19 bp, Mus musculus
  siRNA target sequence for Rdx (NM_009041.1,1495-1513).
gagtggcagcacaaagctt

SEQ ID NO: 523675 - DNA, 19 bp, Mus musculus
  siRNA target sequence for Rdx (NM_009041.1,1744-1762).
cagctccaggcattgagtt

SEQ ID NO: 523676 - DNA, 19 bp, Mus musculus
  siRNA target sequence for Rdx (NM_009041.1,1752-1770).
ggcattgagttcagaatta

SEQ ID NO: 523677 - DNA, 19 bp, Mus musculus
  siRNA target sequence for Rdx (NM_009041.1,1771-1789).
gcccaagctagagatgaaa

SEQ ID NO: 523678 - DNA, 19 bp, Mus musculus
  siRNA target sequence for Rdx (NM_009041.1,1890-1908).
gcgcatcgatgagtttgaa

SEQ ID NO: 523679 - DNA, 19 bp, Mus musculus
  siRNA target sequence for Scin (NM_009132.1,177-195).
gggtgcctatggtgacttt

SEQ ID NO: 523680 - DNA, 19 bp, Mus musculus
  siRNA target sequence for Scin (NM_009132.1,179-197).
gtgcctatggtgactttta

SEQ ID NO: 523681 - DNA, 19 bp, Mus musculus
  siRNA target sequence for Scin (NM_009132.1,182-200).
cctatggtgacttttacgt

SEQ ID NO: 523682 - DNA, 19 bp, Mus musculus
  siRNA target sequence for Scin (NM_009132.1,322-340).
gtccagatggacgactatt

SEQ ID NO: 523683 - DNA, 19 bp, Mus musculus
  siRNA target sequence for Scin (NM_009132.1,376-394).
ggctatgagtcgactgatt

SEQ ID NO: 523684 - DNA, 19 bp, Mus musculus
  siRNA target sequence for Scin (NM_009132.1,377-395).
gctatgagtcgactgattt

SEQ ID NO: 523685 - DNA, 19 bp, Mus musculus
  siRNA target sequence for Scin (NM_009132.1,378-396).
ctatgagtcgactgatttt

SEQ ID NO: 523686 - DNA, 19 bp, Mus musculus
  siRNA target sequence for Scin (NM_009132.1,391-409).
gattttgtgggctatttca

SEQ ID NO: 523687 - DNA, 19 bp, Mus musculus
  siRNA target sequence for Scin (NM_009132.1,437-455).
gtgtggcttctggactaaa

SEQ ID NO: 523688 - DNA, 19 bp, Mus musculus
  siRNA target sequence for Scin (NM_009132.1,441-459).
ggcttctggactaaaccat

SEQ ID NO: 523689 - DNA, 19 bp, Mus musculus
  siRNA target sequence for Scin (NM_009132.1,563-581).
gcgactgcttcatcattga

SEQ ID NO: 523690 - DNA, 19 bp, Mus musculus
  siRNA target sequence for Scin (NM_009132.1,786-804).
cgatgtcgtagcagacata

SEQ ID NO: 523691 - DNA, 19 bp, Mus musculus
  siRNA target sequence for Scin (NM_009132.1,787-805).
gatgtcgtagcagacataa

SEQ ID NO: 523692 - DNA, 19 bp, Mus musculus
  siRNA target sequence for Scin (NM_009132.1,790-808).
gtcgtagcagacataagta

SEQ ID NO: 523693 - DNA, 19 bp, Mus musculus
  siRNA target sequence for Scin (NM_009132.1,820-838).
gcgaagctctacatggttt

SEQ ID NO: 523694 - DNA, 19 bp, Mus musculus
  siRNA target sequence for Scin (NM_009132.1,825-843).
gctctacatggtttcagat

SEQ ID NO: 523695 - DNA, 19 bp, Mus musculus
  siRNA target sequence for Scin (NM_009132.1,851-869).
ggtccatgaaagtaacact

SEQ ID NO: 523696 - DNA, 19 bp, Mus musculus
  siRNA target sequence for Scin (NM_009132.1,887-905).
cgttctccatgggaatgtt

SEQ ID NO: 523697 - DNA, 19 bp, Mus musculus
  siRNA target sequence for Scin (NM_009132.1,933-951).
ccatggtgctgcaaaacaa

SEQ ID NO: 523698 - DNA, 19 bp, Mus musculus
  siRNA target sequence for Scin (NM_009132.1,934-952).
catggtgctgcaaaacaaa

SEQ ID NO: 523699 - DNA, 19 bp, Mus musculus
  siRNA target sequence for Scin (NM_009132.1,1008-1026).
gacagctgaggagttttta

SEQ ID NO: 523700 - DNA, 19 bp, Mus musculus
  siRNA target sequence for Scin (NM_009132.1,1075-1093).
ggcggtgaaacaccaattt

SEQ ID NO: 523701 - DNA, 19 bp, Mus musculus
  siRNA target sequence for Scin (NM_009132.1,1190-1208).
cgtttgatgcctcaaaact

SEQ ID NO: 523702 - DNA, 19 bp, Mus musculus
  siRNA target sequence for Scin (NM_009132.1,1316-1334).
gctcctatggcgagttcta

SEQ ID NO: 523703 - DNA, 19 bp, Mus musculus
  siRNA target sequence for Scin (NM_009132.1,1317-1335).
ctcctatggcgagttctat

SEQ ID NO: 523704 - DNA, 19 bp, Mus musculus
  siRNA target sequence for Scin (NM_009132.1,1336-1354).
ggcggtgactgctacatta

SEQ ID NO: 523705 - DNA, 19 bp, Mus musculus
  siRNA target sequence for Scin (NM_009132.1,1337-1355).
gcggtgactgctacattat

SEQ ID NO: 523706 - DNA, 19 bp, Mus musculus
  siRNA target sequence for Scin (NM_009132.1,1389-1407).
cacatggcaaggagcaaat

SEQ ID NO: 523707 - DNA, 19 bp, Mus musculus
  siRNA target sequence for Scin (NM_009132.1,1514-1532).
ctcacctgctgagtttgtt

SEQ ID NO: 523708 - DNA, 19 bp, Mus musculus
  siRNA target sequence for Scin (NM_009132.1,1537-1555).
gacaaaccactcattattt

SEQ ID NO: 523709 - DNA, 19 bp, Mus musculus
  siRNA target sequence for Scin (NM_009132.1,1543-1561).
ccactcattatttataaga

SEQ ID NO: 523710 - DNA, 19 bp, Mus musculus
  siRNA target sequence for Scin (NM_009132.1,1598-1616).
cccctacacgcctttttca

SEQ ID NO: 523711 - DNA, 19 bp, Mus musculus
  siRNA target sequence for Scin (NM_009132.1,1599-1617).
ccctacacgcctttttcaa

SEQ ID NO: 523712 - DNA, 19 bp, Mus musculus
  siRNA target sequence for Scin (NM_009132.1,1601-1619).
ctacacgcctttttcaagt

SEQ ID NO: 523713 - DNA, 19 bp, Mus musculus
  siRNA target sequence for Scin (NM_009132.1,1632-1650).
ggcatctatcaccagaatt

SEQ ID NO: 523714 - DNA, 19 bp, Mus musculus
  siRNA target sequence for Scin (NM_009132.1,1643-1661).
ccagaattgtggagattga

SEQ ID NO: 523715 - DNA, 19 bp, Mus musculus
  siRNA target sequence for Scin (NM_009132.1,1723-1741).
gcgtgggaacagatcttta

SEQ ID NO: 523716 - DNA, 19 bp, Mus musculus
  siRNA target sequence for Scin (NM_009132.1,1838-1856).
ggacaccgattgtcatcat

SEQ ID NO: 523717 - DNA, 19 bp, Mus musculus
  siRNA target sequence for Shrm (NM_015756.1,289-307).
ccccacggagagattcgtt

SEQ ID NO: 523718 - DNA, 19 bp, Mus musculus
  siRNA target sequence for Shrm (NM_015756.1,290-308).
cccacggagagattcgttt

SEQ ID NO: 523719 - DNA, 19 bp, Mus musculus
  siRNA target sequence for Shrm (NM_015756.1,291-309).
ccacggagagattcgttta

SEQ ID NO: 523720 - DNA, 19 bp, Mus musculus
  siRNA target sequence for Shrm (NM_015756.1,292-310).
cacggagagattcgtttat

SEQ ID NO: 523721 - DNA, 19 bp, Mus musculus
  siRNA target sequence for Shrm (NM_015756.1,294-312).
cggagagattcgtttatct

SEQ ID NO: 523722 - DNA, 19 bp, Mus musculus
  siRNA target sequence for Shrm (NM_015756.1,371-389).
cgtggagaaccgttaatca

SEQ ID NO: 523723 - DNA, 19 bp, Mus musculus
  siRNA target sequence for Shrm (NM_015756.1,372-390).
gtggagaaccgttaatcat

SEQ ID NO: 523724 - DNA, 19 bp, Mus musculus
  siRNA target sequence for Shrm (NM_015756.1,382-400).
gttaatcatttccaagatt

SEQ ID NO: 523725 - DNA, 19 bp, Mus musculus
  siRNA target sequence for Shrm (NM_015756.1,446-464).
ggggacgaagtcatacaca

SEQ ID NO: 523726 - DNA, 19 bp, Mus musculus
  siRNA target sequence for Shrm (NM_015756.1,447-465).
gggacgaagtcatacacat

SEQ ID NO: 523727 - DNA, 19 bp, Mus musculus
  siRNA target sequence for Shrm (NM_015756.1,512-530).
gtgaaagggtcctacaaga

SEQ ID NO: 523728 - DNA, 19 bp, Mus musculus
  siRNA target sequence for Shrm (NM_015756.1,581-599).
gatcctggtacctctaagt

SEQ ID NO: 523729 - DNA, 19 bp, Mus musculus
  siRNA target sequence for Shrm (NM_015756.1,714-732).
cgtggcataccaccaaatt

SEQ ID NO: 523730 - DNA, 19 bp, Mus musculus
  siRNA target sequence for Shrm (NM_015756.1,756-774).
gcatgatgcagatatctca

SEQ ID NO: 523731 - DNA, 19 bp, Mus musculus
  siRNA target sequence for Shrm (NM_015756.1,837-855).
ccaactacgaccatgctta

SEQ ID NO: 523732 - DNA, 19 bp, Mus musculus
  siRNA target sequence for Shrm (NM_015756.1,838-856).
caactacgaccatgcttat

SEQ ID NO: 523733 - DNA, 19 bp, Mus musculus
  siRNA target sequence for Shrm (NM_015756.1,974-992).
cagctaggccaccttcata

SEQ ID NO: 523734 - DNA, 19 bp, Mus musculus
  siRNA target sequence for Shrm (NM_015756.1,1082-1100).
ggttccatggacgtgattt

SEQ ID NO: 523735 - DNA, 19 bp, Mus musculus
  siRNA target sequence for Shrm (NM_015756.1,1150-1168).
cgtcaagacggtctatgat

SEQ ID NO: 523736 - DNA, 19 bp, Mus musculus
  siRNA target sequence for Shrm (NM_015756.1,1440-1458).
cctggtccagccttgatca

SEQ ID NO: 523737 - DNA, 19 bp, Mus musculus
  siRNA target sequence for Shrm (NM_015756.1,1565-1583).
ccagtgaaatctaagcata

SEQ ID NO: 523738 - DNA, 19 bp, Mus musculus
  siRNA target sequence for Shrm (NM_015756.1,1566-1584).
cagtgaaatctaagcataa

SEQ ID NO: 523739 - DNA, 19 bp, Mus musculus
  siRNA target sequence for Shrm (NM_015756.1,1568-1586).
gtgaaatctaagcataatt

SEQ ID NO: 523740 - DNA, 19 bp, Mus musculus
  siRNA target sequence for Shrm (NM_015756.1,1618-1636).
gctgcccactggcatctat

SEQ ID NO: 523741 - DNA, 19 bp, Mus musculus
  siRNA target sequence for Shrm (NM_015756.1,1705-1723).
ctaccctgcgctagtcaaa

SEQ ID NO: 523742 - DNA, 19 bp, Mus musculus
  siRNA target sequence for Shrm (NM_015756.1,1720-1738).
caaagagagtggatacaca

SEQ ID NO: 523743 - DNA, 19 bp, Mus musculus
  siRNA target sequence for Shrm (NM_015756.1,1780-1798).
gaacgggaatcaaaatgaa

SEQ ID NO: 523744 - DNA, 19 bp, Mus musculus
  siRNA target sequence for Shrm (NM_015756.1,1871-1889).
gaacccacggccaaataca

SEQ ID NO: 523745 - DNA, 19 bp, Mus musculus
  siRNA target sequence for Shrm (NM_015756.1,1878-1896).
cggccaaatacatctacaa

SEQ ID NO: 523746 - DNA, 19 bp, Mus musculus
  siRNA target sequence for Shrm (NM_015756.1,1891-1909).
ctacaaagtccatttttct

SEQ ID NO: 523747 - DNA, 19 bp, Mus musculus
  siRNA target sequence for Shrm (NM_015756.1,1960-1978).
ccacggccatagtccatat

SEQ ID NO: 523748 - DNA, 19 bp, Mus musculus
  siRNA target sequence for Shrm (NM_015756.1,2693-2711).
gccggcagcgtccatttct

SEQ ID NO: 523749 - DNA, 19 bp, Mus musculus
  siRNA target sequence for Shrm (NM_015756.1,2789-2807).
ccccagtgcagccatttga

SEQ ID NO: 523750 - DNA, 19 bp, Mus musculus
  siRNA target sequence for Shrm (NM_015756.1,4549-4567).
caccttggcgcctgagttt

SEQ ID NO: 523751 - DNA, 19 bp, Mus musculus
  siRNA target sequence for Shrm (NM_015756.1,4568-4586).
gcgaacctgaagcactata

SEQ ID NO: 523752 - DNA, 19 bp, Mus musculus
  siRNA target sequence for Shrm (NM_015756.1,4570-4588).
gaacctgaagcactataga

SEQ ID NO: 523753 - DNA, 19 bp, Mus musculus
  siRNA target sequence for Shrm (NM_015756.1,4706-4724).
gatgacgaagtgttcatga

SEQ ID NO: 523754 - DNA, 19 bp, Mus musculus
  siRNA target sequence for Shrm (NM_015756.1,4727-4745).
gacttgcaccccaaggtta

SEQ ID NO: 523755 - DNA, 19 bp, Mus musculus
  siRNA target sequence for Shrm (NM_015756.1,4732-4750).
gcaccccaaggttacttca

SEQ ID NO: 523756 - DNA, 19 bp, Mus musculus
  siRNA target sequence for Shrm (NM_015756.1,4733-4751).
caccccaaggttacttcaa

SEQ ID NO: 523757 - DNA, 19 bp, Mus musculus
  siRNA target sequence for Shrm (NM_015756.1,4800-4818).
gcgaggaacctctagtgaa

SEQ ID NO: 523758 - DNA, 19 bp, Mus musculus
  siRNA target sequence for Shrm (NM_015756.1,4801-4819).
cgaggaacctctagtgaat

SEQ ID NO: 523759 - DNA, 19 bp, Mus musculus
  siRNA target sequence for Shrm (NM_015756.1,4971-4989).
ccgaaggtagtcagataat

SEQ ID NO: 523760 - DNA, 19 bp, Mus musculus
  siRNA target sequence for Shrm (NM_015756.1,5006-5024).
caaacctcggccaaaggtt

SEQ ID NO: 523761 - DNA, 19 bp, Mus musculus
  siRNA target sequence for Shrm (NM_015756.1,5113-5131).
ccgaaacctcacttatgaa

SEQ ID NO: 523762 - DNA, 19 bp, Mus musculus
  siRNA target sequence for Shrm (NM_015756.1,5209-5227).
ggctctagccaaggaaatt

SEQ ID NO: 523763 - DNA, 19 bp, Mus musculus
  siRNA target sequence for Shrm (NM_015756.1,5211-5229).
ctctagccaaggaaattgt

SEQ ID NO: 523764 - DNA, 19 bp, Mus musculus
  siRNA target sequence for Shrm (NM_015756.1,5244-5262).
ctctggcagacattttaga

SEQ ID NO: 523765 - DNA, 19 bp, Mus musculus
  siRNA target sequence for Shrm (NM_015756.1,5472-5490).
cggagctgctcaacaaaat

SEQ ID NO: 523766 - DNA, 19 bp, Mus musculus
  siRNA target sequence for Snta1 (NM_009228.1,416-434).
caagatgcctattctcatt

SEQ ID NO: 523767 - DNA, 19 bp, Mus musculus
  siRNA target sequence for Snta1 (NM_009228.1,464-482).
ccagacggaggcccttttt

SEQ ID NO: 523768 - DNA, 19 bp, Mus musculus
  siRNA target sequence for Snta1 (NM_009228.1,467-485).
gacggaggccctttttgtt

SEQ ID NO: 523769 - DNA, 19 bp, Mus musculus
  siRNA target sequence for Snta1 (NM_009228.1,502-520).
ctgtgaatggtgaagattt

SEQ ID NO: 523770 - DNA, 19 bp, Mus musculus
  siRNA target sequence for Snta1 (NM_009228.1,544-562).
cggtacaggccctcaagaa

SEQ ID NO: 523771 - DNA, 19 bp, Mus musculus
  siRNA target sequence for Snta1 (NM_009228.1,576-594).
gttgtgttggaggttaagt

SEQ ID NO: 523772 - DNA, 19 bp, Mus musculus
  siRNA target sequence for Snta1 (NM_009228.1,606-624).
gtctcaccctatttcaaga

SEQ ID NO: 523773 - DNA, 19 bp, Mus musculus
  siRNA target sequence for Snta1 (NM_009228.1,608-626).
ctcaccctatttcaagaat

SEQ ID NO: 523774 - DNA, 19 bp, Mus musculus
  siRNA target sequence for Snta1 (NM_009228.1,726-744).
gccaaacacgtatctttga

SEQ ID NO: 523775 - DNA, 19 bp, Mus musculus
  siRNA target sequence for Snta1 (NM_009228.1,727-745).
ccaaacacgtatctttgaa

SEQ ID NO: 523776 - DNA, 19 bp, Mus musculus
  siRNA target sequence for Snta1 (NM_009228.1,820-838).
gccaggacgctgtcttctt

SEQ ID NO: 523777 - DNA, 19 bp, Mus musculus
  siRNA target sequence for Snta1 (NM_009228.1,888-906).
gcgcagatcggcacattca

SEQ ID NO: 523778 - DNA, 19 bp, Mus musculus
  siRNA target sequence for Snta1 (NM_009228.1,889-907).
cgcagatcggcacattcat

SEQ ID NO: 523779 - DNA, 19 bp, Mus musculus
  siRNA target sequence for Snta1 (NM_009228.1,890-908).
gcagatcggcacattcata

SEQ ID NO: 523780 - DNA, 19 bp, Mus musculus
  siRNA target sequence for Snta1 (NM_009228.1,1169-1187).
gggctcagtgccctatgat

SEQ ID NO: 523781 - DNA, 19 bp, Mus musculus
  siRNA target sequence for Snta1 (NM_009228.1,1310-1328).
ggctgctgaaggcatacaa

SEQ ID NO: 523782 - DNA, 19 bp, Mus musculus
  siRNA target sequence for Snta1 (NM_009228.1,1542-1560).
cactcgtgtcccaaaacga

SEQ ID NO: 523783 - DNA, 19 bp, Mus musculus
  siRNA target sequence for Snta1 (NM_009228.1,1551-1569).
cccaaaacgatggtcttta

SEQ ID NO: 523784 - DNA, 19 bp, Mus musculus
  siRNA target sequence for Sntb1 (NM_016667.1,428-446).
gcggactgctggaagtttt

SEQ ID NO: 523785 - DNA, 19 bp, Mus musculus
  siRNA target sequence for Sntb1 (NM_016667.1,431-449).
gactgctggaagttttggt

SEQ ID NO: 523786 - DNA, 19 bp, Mus musculus
  siRNA target sequence for Sntb1 (NM_016667.1,450-468).
gcgggatcgctggcataaa

SEQ ID NO: 523787 - DNA, 19 bp, Mus musculus
  siRNA target sequence for Sntb1 (NM_016667.1,452-470).
gggatcgctggcataaagt

SEQ ID NO: 523788 - DNA, 19 bp, Mus musculus
  siRNA target sequence for Sntb1 (NM_016667.1,541-559).
ggggctgccaccaatggtt

SEQ ID NO: 523789 - DNA, 19 bp, Mus musculus
  siRNA target sequence for Sntb1 (NM_016667.1,664-682).
gtacctgagtccatctcaa

SEQ ID NO: 523790 - DNA, 19 bp, Mus musculus
  siRNA target sequence for Sntb1 (NM_016667.1,972-990).
gtccccggtgtctgagatt

SEQ ID NO: 523791 - DNA, 19 bp, Mus musculus
  siRNA target sequence for Sntb1 (NM_016667.1,976-994).
ccggtgtctgagattggat

SEQ ID NO: 523792 - DNA, 19 bp, Mus musculus
  siRNA target sequence for Sntb1 (NM_016667.1,1092-1110).
ccccctcaagatgtgttat

SEQ ID NO: 523793 - DNA, 19 bp, Mus musculus
  siRNA target sequence for Sntb1 (NM_016667.1,1359-1377).
gcccggagagagtgagaaa

SEQ ID NO: 523794 - DNA, 19 bp, Mus musculus
  siRNA target sequence for Sntb1 (NM_016667.1,1404-1422).
gactgagaaagatctttta

SEQ ID NO: 523795 - DNA, 19 bp, Mus musculus
  siRNA target sequence for Sntb1 (NM_016667.1,1461-1479).
cagcccggtgcattcgtat

SEQ ID NO: 523796 - DNA, 19 bp, Mus musculus
  siRNA target sequence for Sntb1 (NM_016667.1,1470-1488).
gcattcgtatccacttctt

SEQ ID NO: 523797 - DNA, 19 bp, Mus musculus
  siRNA target sequence for Sntb1 (NM_016667.1,1572-1590).
caagcaaggaattgaaaca

SEQ ID NO: 523798 - DNA, 19 bp, Mus musculus
  siRNA target sequence for Sntb1 (NM_016667.1,1645-1663).
gtacaggggtgccacaatt

SEQ ID NO: 523799 - DNA, 19 bp, Mus musculus
  siRNA target sequence for Sntb1 (NM_016667.1,1669-1687).
gagctcactgccgaaatca

SEQ ID NO: 523800 - DNA, 19 bp, Mus musculus
  siRNA target sequence for Sntb1 (NM_016667.1,1718-1736).
gccgcttgaccatacatta

SEQ ID NO: 523801 - DNA, 19 bp, Mus musculus
  siRNA target sequence for Sntb1 (NM_016667.1,1719-1737).
ccgcttgaccatacattat

SEQ ID NO: 523802 - DNA, 19 bp, Mus musculus
  siRNA target sequence for Sntb1 (NM_016667.1,1783-1801).
cccaagacaatcatacagt

SEQ ID NO: 523803 - DNA, 19 bp, Mus musculus
  siRNA target sequence for Sntb1 (NM_016667.1,1805-1823).
cttatgagaagctcaaaat

SEQ ID NO: 523804 - DNA, 19 bp, Mus musculus
  siRNA target sequence for Sntb1 (NM_016667.1,1844-1862).
ggatgctctatttagactt

SEQ ID NO: 523805 - DNA, 19 bp, Mus musculus
  siRNA target sequence for Sntb1 (NM_016667.1,1845-1863).
gatgctctatttagacttt

SEQ ID NO: 523806 - DNA, 19 bp, Mus musculus
  siRNA target sequence for Sntb1 (NM_016667.1,1904-1922).
gccccaagccgatcgtttt

SEQ ID NO: 523807 - DNA, 19 bp, Mus musculus
  siRNA target sequence for Sntb1 (NM_016667.1,1906-1924).
cccaagccgatcgttttca

SEQ ID NO: 523808 - DNA, 19 bp, Mus musculus
  siRNA target sequence for Sntb1 (NM_016667.1,1907-1925).
ccaagccgatcgttttcat

SEQ ID NO: 523809 - DNA, 19 bp, Mus musculus
  siRNA target sequence for Sntb2 (NM_009229.2,585-603).
cgagaagtaacaccatata

SEQ ID NO: 523810 - DNA, 19 bp, Mus musculus
  siRNA target sequence for Sntb2 (NM_009229.2,586-604).
gagaagtaacaccatatat

SEQ ID NO: 523811 - DNA, 19 bp, Mus musculus
  siRNA target sequence for Sntb2 (NM_009229.2,588-606).
gaagtaacaccatatatca

SEQ ID NO: 523812 - DNA, 19 bp, Mus musculus
  siRNA target sequence for Sntb2 (NM_009229.2,608-626).
gaaaccatctttagtatca

SEQ ID NO: 523813 - DNA, 19 bp, Mus musculus
  siRNA target sequence for Sntb2 (NM_009229.2,722-740).
gaaggtcatccctctcaaa

SEQ ID NO: 523814 - DNA, 19 bp, Mus musculus
  siRNA target sequence for Sntb2 (NM_009229.2,771-789).
ccagatctggagaacagat

SEQ ID NO: 523815 - DNA, 19 bp, Mus musculus
  siRNA target sequence for Sntb2 (NM_009229.2,873-891).
gctatccacaccaacataa

SEQ ID NO: 523816 - DNA, 19 bp, Mus musculus
  siRNA target sequence for Sntb2 (NM_009229.2,874-892).
ctatccacaccaacataat

SEQ ID NO: 523817 - DNA, 19 bp, Mus musculus
  siRNA target sequence for Sntb2 (NM_009229.2,1105-1123).
catcaccgtgtcatagcta

SEQ ID NO: 523818 - DNA, 19 bp, Mus musculus
  siRNA target sequence for Sntb2 (NM_009229.2,1216-1234).
ctcggcagggcattgagat

SEQ ID NO: 523819 - DNA, 19 bp, Mus musculus
  siRNA target sequence for Sntb2 (NM_009229.2,1251-1269).
gaaactcatcgggatttgt

SEQ ID NO: 523820 - DNA, 19 bp, Mus musculus
  siRNA target sequence for Sntb2 (NM_009229.2,1334-1352).
cctaggctgcaccttaagt

SEQ ID NO: 523821 - DNA, 19 bp, Mus musculus
  siRNA target sequence for Sntb2 (NM_009229.2,1366-1384).
ggttcactgtccactatga

SEQ ID NO: 523822 - DNA, 19 bp, Mus musculus
  siRNA target sequence for Sntb2 (NM_009229.2,1383-1401).
gaacacgggttcactatca

SEQ ID NO: 523823 - DNA, 19 bp, Mus musculus
  siRNA target sequence for Sntb2 (NM_009229.2,1413-1431).
ggaggcgccagcagcatat

SEQ ID NO: 523824 - DNA, 19 bp, Mus musculus
  siRNA target sequence for Sntb2 (NM_009229.2,1414-1432).
gaggcgccagcagcatatt

SEQ ID NO: 523825 - DNA, 19 bp, Mus musculus
  siRNA target sequence for Sntb2 (NM_009229.2,1416-1434).
ggcgccagcagcatattgt

SEQ ID NO: 523826 - DNA, 19 bp, Mus musculus
  siRNA target sequence for Sntb2 (NM_009229.2,1417-1435).
gcgccagcagcatattgta

SEQ ID NO: 523827 - DNA, 19 bp, Mus musculus
  siRNA target sequence for Sntb2 (NM_009229.2,1433-1451).
gtaccgctatccctttgaa

SEQ ID NO: 523828 - DNA, 19 bp, Mus musculus
  siRNA target sequence for Sntb2 (NM_009229.2,1444-1462).
cctttgaacggctgaagat

SEQ ID NO: 523829 - DNA, 19 bp, Mus musculus
  siRNA target sequence for Sntb2 (NM_009229.2,1477-1495).
gaatcagaaatctctattt

SEQ ID NO: 523830 - DNA, 19 bp, Mus musculus
  siRNA target sequence for Sntb2 (NM_009229.2,1481-1499).
cagaaatctctatttggat

SEQ ID NO: 523831 - DNA, 19 bp, Mus musculus
  siRNA target sequence for Sntb2 (NM_009229.2,1543-1561).
gtccaaagccgattgtatt

SEQ ID NO: 523832 - DNA, 19 bp, Mus musculus
  siRNA target sequence for Sntb2 (NM_009229.2,1546-1564).
caaagccgattgtatttgt

SEQ ID NO: 523833 - DNA, 19 bp, Mus musculus
  siRNA target sequence for Sntb2 (NM_009229.2,1552-1570).
cgattgtatttgtattgca

SEQ ID NO: 523834 - DNA, 19 bp, Mus musculus
  siRNA target sequence for Sntb2 (NM_009229.2,1563-1581).
gtattgcacacgttcttat

SEQ ID NO: 523835 - DNA, 19 bp, Mus musculus
  siRNA target sequence for Sntg1 (NM_027671.3,1363-1381).
cgaagacaggtgtttgctt

SEQ ID NO: 523836 - DNA, 19 bp, Mus musculus
  siRNA target sequence for Sntg1 (NM_027671.3,1378-1396).
gcttgctacaagatggtaa

SEQ ID NO: 523837 - DNA, 19 bp, Mus musculus
  siRNA target sequence for Sntg1 (NM_027671.3,1379-1397).
cttgctacaagatggtaat

SEQ ID NO: 523838 - DNA, 19 bp, Mus musculus
  siRNA target sequence for Sntg1 (NM_027671.3,1527-1545).
gtaggaggattcggattaa

SEQ ID NO: 523839 - DNA, 19 bp, Mus musculus
  siRNA target sequence for Sntg1 (NM_027671.3,1530-1548).
ggaggattcggattaagca

SEQ ID NO: 523840 - DNA, 19 bp, Mus musculus
  siRNA target sequence for Sntg1 (NM_027671.3,1531-1549).
gaggattcggattaagcat

SEQ ID NO: 523841 - DNA, 19 bp, Mus musculus
  siRNA target sequence for Sntg1 (NM_027671.3,1533-1551).
ggattcggattaagcataa

SEQ ID NO: 523842 - DNA, 19 bp, Mus musculus
  siRNA target sequence for Sntg1 (NM_027671.3,1574-1592).
cccggttgtcatttccaaa

SEQ ID NO: 523843 - DNA, 19 bp, Mus musculus
  siRNA target sequence for Sntg1 (NM_027671.3,1575-1593).
ccggttgtcatttccaaaa

SEQ ID NO: 523844 - DNA, 19 bp, Mus musculus
  siRNA target sequence for Sntg1 (NM_027671.3,1577-1595).
ggttgtcatttccaaaata

SEQ ID NO: 523845 - DNA, 19 bp, Mus musculus
  siRNA target sequence for Sntg1 (NM_027671.3,1578-1596).
gttgtcatttccaaaatat

SEQ ID NO: 523846 - DNA, 19 bp, Mus musculus
  siRNA target sequence for Sntg1 (NM_027671.3,1581-1599).
gtcatttccaaaatatcta

SEQ ID NO: 523847 - DNA, 19 bp, Mus musculus
  siRNA target sequence for Sntg1 (NM_027671.3,1617-1635).
ctgtcggggctgcttttta

SEQ ID NO: 523848 - DNA, 19 bp, Mus musculus
  siRNA target sequence for Sntg1 (NM_027671.3,1619-1637).
gtcggggctgctttttatt

SEQ ID NO: 523849 - DNA, 19 bp, Mus musculus
  siRNA target sequence for Sntg1 (NM_027671.3,1622-1640).
ggggctgctttttattgga

SEQ ID NO: 523850 - DNA, 19 bp, Mus musculus
  siRNA target sequence for Sntg1 (NM_027671.3,1641-1659).
gatgcaattctacagataa

SEQ ID NO: 523851 - DNA, 19 bp, Mus musculus
  siRNA target sequence for Sntg1 (NM_027671.3,1650-1668).
ctacagataaatggaatta

SEQ ID NO: 523852 - DNA, 19 bp, Mus musculus
  siRNA target sequence for Sntg1 (NM_027671.3,1662-1680).
ggaattaatgtgaggaaat

SEQ ID NO: 523853 - DNA, 19 bp, Mus musculus
  siRNA target sequence for Sntg1 (NM_027671.3,1769-1787).
cctcaaactcccagttaat

SEQ ID NO: 523854 - DNA, 19 bp, Mus musculus
  siRNA target sequence for Sntg1 (NM_027671.3,1849-1867).
gtggcttacacctcaacta

SEQ ID NO: 523855 - DNA, 19 bp, Mus musculus
  siRNA target sequence for Sntg1 (NM_027671.3,1859-1877).
cctcaactaccatccaaat

SEQ ID NO: 523856 - DNA, 19 bp, Mus musculus
  siRNA target sequence for Sntg1 (NM_027671.3,1860-1878).
ctcaactaccatccaaata

SEQ ID NO: 523857 - DNA, 19 bp, Mus musculus
  siRNA target sequence for Sntg1 (NM_027671.3,1955-1973).
gctcattcccctacttcat

SEQ ID NO: 523858 - DNA, 19 bp, Mus musculus
  siRNA target sequence for Sntg1 (NM_027671.3,1975-1993).
cccgcttctctcagtatgt

SEQ ID NO: 523859 - DNA, 19 bp, Mus musculus
  siRNA target sequence for Sntg1 (NM_027671.3,2018-2036).
gaacgctttccaagttgtt

SEQ ID NO: 523860 - DNA, 19 bp, Mus musculus
  siRNA target sequence for Sntg1 (NM_027671.3,2047-2065).
gagtctgcagtggaattct

SEQ ID NO: 523861 - DNA, 19 bp, Mus musculus
  siRNA target sequence for Sntg1 (NM_027671.3,2093-2111).
ggattggctccaagcaata

SEQ ID NO: 523862 - DNA, 19 bp, Mus musculus
  siRNA target sequence for Sntg1 (NM_027671.3,2172-2190).
gtaaaccagcagatagtct

SEQ ID NO: 523863 - DNA, 19 bp, Mus musculus
  siRNA target sequence for Sntg1 (NM_027671.3,2225-2243).
cctccaagaccgtgtgtat

SEQ ID NO: 523864 - DNA, 19 bp, Mus musculus
  siRNA target sequence for Sntg1 (NM_027671.3,2226-2244).
ctccaagaccgtgtgtata

SEQ ID NO: 523865 - DNA, 19 bp, Mus musculus
  siRNA target sequence for Sntg1 (NM_027671.3,2240-2258).
gtatacacctgtgtttctt

SEQ ID NO: 523866 - DNA, 19 bp, Mus musculus
  siRNA target sequence for Sntg1 (NM_027671.3,2262-2280).
ctgaggggctcctgtcttt

SEQ ID NO: 523867 - DNA, 19 bp, Mus musculus
  siRNA target sequence for Sntg1 (NM_027671.3,2320-2338).
ctcgagcagagaaaacctt

SEQ ID NO: 523868 - DNA, 19 bp, Mus musculus
  siRNA target sequence for Sntg1 (NM_027671.3,2384-2402).
gctggatcggcggaaacat

SEQ ID NO: 523869 - DNA, 19 bp, Mus musculus
  siRNA target sequence for Sntg1 (NM_027671.3,2385-2403).
ctggatcggcggaaacatt

SEQ ID NO: 523870 - DNA, 19 bp, Mus musculus
  siRNA target sequence for Sntg1 (NM_027671.3,2489-2507).
ccaaacagccacctttctt

SEQ ID NO: 523871 - DNA, 19 bp, Mus musculus
  siRNA target sequence for Sntg1 (NM_027671.3,2508-2526).
gaagtggagcgcatacagt

SEQ ID NO: 523872 - DNA, 19 bp, Mus musculus
  siRNA target sequence for Sntg1 (NM_027671.3,2523-2541).
cagtgcaagacctatgcat

SEQ ID NO: 523873 - DNA, 19 bp, Mus musculus
  siRNA target sequence for Sntg1 (NM_027671.3,2610-2628).
gcaacaaaggctgtacttt

SEQ ID NO: 523874 - DNA, 19 bp, Mus musculus
  siRNA target sequence for Sntg1 (NM_027671.3,2620-2638).
ctgtactttggaggtataa

SEQ ID NO: 523875 - DNA, 19 bp, Mus musculus
  siRNA target sequence for Sntg1 (NM_027671.3,2664-2682).
gatgacggcaaaagcaaaa

SEQ ID NO: 523876 - DNA, 19 bp, Mus musculus
  siRNA target sequence for Sntg1 (NM_027671.3,2667-2685).
gacggcaaaagcaaaatca

SEQ ID NO: 523877 - DNA, 19 bp, Mus musculus
  siRNA target sequence for Sntg1 (NM_027671.3,2704-2722).
cagatacgaaacagattga

SEQ ID NO: 523878 - DNA, 19 bp, Mus musculus
  siRNA target sequence for Sntg1 (NM_027671.3,2755-2773).
ctgttcttcactgtattca

SEQ ID NO: 523879 - DNA, 19 bp, Mus musculus
  siRNA target sequence for Sntg1 (NM_027671.3,2800-2818).
gtttggaccctctgttttt

SEQ ID NO: 523880 - DNA, 19 bp, Mus musculus
  siRNA target sequence for Sntg1 (NM_027671.3,2804-2822).
ggaccctctgtttttaggt

SEQ ID NO: 523881 - DNA, 19 bp, Mus musculus
  siRNA target sequence for Sntg1 (NM_027671.3,2805-2823).
gaccctctgtttttaggta

SEQ ID NO: 523882 - DNA, 19 bp, Mus musculus
  siRNA target sequence for Sntg1 (NM_027671.3,2807-2825).
ccctctgtttttaggtaat

SEQ ID NO: 523883 - DNA, 19 bp, Mus musculus
  siRNA target sequence for Sntg1 (NM_027671.3,2847-2865).
gtcagctctgcttctacaa

SEQ ID NO: 523884 - DNA, 19 bp, Mus musculus
  siRNA target sequence for Sntg2 (NM_172951.1,183-201).
ctctggccttgttgtatga

SEQ ID NO: 523885 - DNA, 19 bp, Mus musculus
  siRNA target sequence for Sntg2 (NM_172951.1,248-266).
gaggtgctgactattcaaa

SEQ ID NO: 523886 - DNA, 19 bp, Mus musculus
  siRNA target sequence for Sntg2 (NM_172951.1,305-323).
gctaatcacagaactgtta

SEQ ID NO: 523887 - DNA, 19 bp, Mus musculus
  siRNA target sequence for Sntg2 (NM_172951.1,348-366).
gcctgggcctaagtatcaa

SEQ ID NO: 523888 - DNA, 19 bp, Mus musculus
  siRNA target sequence for Sntg2 (NM_172951.1,383-401).
ggggtccccgtcgtcatat

SEQ ID NO: 523889 - DNA, 19 bp, Mus musculus
  siRNA target sequence for Sntg2 (NM_172951.1,385-403).
ggtccccgtcgtcatatct

SEQ ID NO: 523890 - DNA, 19 bp, Mus musculus
  siRNA target sequence for Sntg2 (NM_172951.1,386-404).
gtccccgtcgtcatatcta

SEQ ID NO: 523891 - DNA, 19 bp, Mus musculus
  siRNA target sequence for Sntg2 (NM_172951.1,388-406).
ccccgtcgtcatatctaaa

SEQ ID NO: 523892 - DNA, 19 bp, Mus musculus
  siRNA target sequence for Sntg2 (NM_172951.1,389-407).
cccgtcgtcatatctaaaa

SEQ ID NO: 523893 - DNA, 19 bp, Mus musculus
  siRNA target sequence for Sntg2 (NM_172951.1,390-408).
ccgtcgtcatatctaaaat

SEQ ID NO: 523894 - DNA, 19 bp, Mus musculus
  siRNA target sequence for Sntg2 (NM_172951.1,391-409).
cgtcgtcatatctaaaata

SEQ ID NO: 523895 - DNA, 19 bp, Mus musculus
  siRNA target sequence for Sntg2 (NM_172951.1,392-410).
gtcgtcatatctaaaatat

SEQ ID NO: 523896 - DNA, 19 bp, Mus musculus
  siRNA target sequence for Sntg2 (NM_172951.1,448-466).
cataggagatgctgtacta

SEQ ID NO: 523897 - DNA, 19 bp, Mus musculus
  siRNA target sequence for Sntg2 (NM_172951.1,469-487).
ggttaatggcattaatgta

SEQ ID NO: 523898 - DNA, 19 bp, Mus musculus
  siRNA target sequence for Sntg2 (NM_172951.1,708-726).
cctcacccatagctaatga

SEQ ID NO: 523899 - DNA, 19 bp, Mus musculus
  siRNA target sequence for Sntg2 (NM_172951.1,709-727).
ctcacccatagctaatgaa

SEQ ID NO: 523900 - DNA, 19 bp, Mus musculus
  siRNA target sequence for Sntg2 (NM_172951.1,899-917).
gactggttgcgttcaatct

SEQ ID NO: 523901 - DNA, 19 bp, Mus musculus
  siRNA target sequence for Sntg2 (NM_172951.1,901-919).
ctggttgcgttcaatctca

SEQ ID NO: 523902 - DNA, 19 bp, Mus musculus
  siRNA target sequence for Sntg2 (NM_172951.1,930-948).
gtgacctgacgcttcaaca

SEQ ID NO: 523903 - DNA, 19 bp, Mus musculus
  siRNA target sequence for Sntg2 (NM_172951.1,932-950).
gacctgacgcttcaacata

SEQ ID NO: 523904 - DNA, 19 bp, Mus musculus
  siRNA target sequence for Sntg2 (NM_172951.1,935-953).
ctgacgcttcaacatatga

SEQ ID NO: 523905 - DNA, 19 bp, Mus musculus
  siRNA target sequence for Sntg2 (NM_172951.1,939-957).
cgcttcaacatatgaaaat

SEQ ID NO: 523906 - DNA, 19 bp, Mus musculus
  siRNA target sequence for Sntg2 (NM_172951.1,994-1012).
gcacatgggatgggtaaat

SEQ ID NO: 523907 - DNA, 19 bp, Mus musculus
  siRNA target sequence for Sntg2 (NM_172951.1,1029-1047).
ctgacaactctcagaactt

SEQ ID NO: 523908 - DNA, 19 bp, Mus musculus
  siRNA target sequence for Sntg2 (NM_172951.1,1128-1146).
gagcagaacgtgcctataa

SEQ ID NO: 523909 - DNA, 19 bp, Mus musculus
  siRNA target sequence for Sntg2 (NM_172951.1,1180-1198).
ctggctttcagataactat

SEQ ID NO: 523910 - DNA, 19 bp, Mus musculus
  siRNA target sequence for Sntg2 (NM_172951.1,1244-1262).
gaagaccccaggtcatact

SEQ ID NO: 523911 - DNA, 19 bp, Mus musculus
  siRNA target sequence for Sntg2 (NM_172951.1,1356-1374).
caactttcatggaagttca

SEQ ID NO: 523912 - DNA, 19 bp, Mus musculus
  siRNA target sequence for Sntg2 (NM_172951.1,1373-1391).
cagagaaccgggtccaaaa

SEQ ID NO: 523913 - DNA, 19 bp, Mus musculus
  siRNA target sequence for Sntg2 (NM_172951.1,1375-1393).
gagaaccgggtccaaaaca

SEQ ID NO: 523914 - DNA, 19 bp, Mus musculus
  siRNA target sequence for Sntg2 (NM_172951.1,1377-1395).
gaaccgggtccaaaacata

SEQ ID NO: 523915 - DNA, 19 bp, Mus musculus
  siRNA target sequence for Sntg2 (NM_172951.1,1380-1398).
ccgggtccaaaacatatct

SEQ ID NO: 523916 - DNA, 19 bp, Mus musculus
  siRNA target sequence for Sntg2 (NM_172951.1,1456-1474).
ctgctttgacggtaagaca

SEQ ID NO: 523917 - DNA, 19 bp, Mus musculus
  siRNA target sequence for Sntg2 (NM_172951.1,1458-1476).
gctttgacggtaagacaaa

SEQ ID NO: 523918 - DNA, 19 bp, Mus musculus
  siRNA target sequence for Sntg2 (NM_172951.1,1484-1502).
ctctggagattcaagttct

SEQ ID NO: 523919 - DNA, 19 bp, Mus musculus
  siRNA target sequence for Sntg2 (NM_172951.1,1569-1587).
ccaagcagattgaaacgaa

SEQ ID NO: 523920 - DNA, 19 bp, Mus musculus
  siRNA target sequence for Sntg2 (NM_172951.1,1624-1642).
ctgcatccactccttcatt

SEQ ID NO: 523921 - DNA, 19 bp, Mus musculus
  siRNA target sequence for Sntg2 (NM_172951.1,1659-1677).
ccctggaccccgtgttcat

SEQ ID NO: 523922 - DNA, 19 bp, Mus musculus
  siRNA target sequence for Sntg2 (NM_172951.1,1664-1682).
gaccccgtgttcatggata

SEQ ID NO: 523923 - DNA, 19 bp, Mus musculus
  siRNA target sequence for Spna1 (NM_011465.2,110-128).
ggaccaaaggtcctagaaa

SEQ ID NO: 523924 - DNA, 19 bp, Mus musculus
  siRNA target sequence for Spna1 (NM_011465.2,149-167).
cgaagagcggaggtgttaa

SEQ ID NO: 523925 - DNA, 19 bp, Mus musculus
  siRNA target sequence for Spna1 (NM_011465.2,150-168).
gaagagcggaggtgttaaa

SEQ ID NO: 523926 - DNA, 19 bp, Mus musculus
  siRNA target sequence for Spna1 (NM_011465.2,153-171).
gagcggaggtgttaaacca

SEQ ID NO: 523927 - DNA, 19 bp, Mus musculus
  siRNA target sequence for Spna1 (NM_011465.2,225-243).
cttaccactatcaagtttt

SEQ ID NO: 523928 - DNA, 19 bp, Mus musculus
  siRNA target sequence for Spna1 (NM_011465.2,271-289).
gtggatcatggaaaagctt

SEQ ID NO: 523929 - DNA, 19 bp, Mus musculus
  siRNA target sequence for Spna1 (NM_011465.2,287-305).
cttgaaattgcaaaagata

SEQ ID NO: 523930 - DNA, 19 bp, Mus musculus
  siRNA target sequence for Spna1 (NM_011465.2,343-361).
gaagcacgaatcctttgta

SEQ ID NO: 523931 - DNA, 19 bp, Mus musculus
  siRNA target sequence for Spna1 (NM_011465.2,346-364).
gcacgaatcctttgtatca

SEQ ID NO: 523932 - DNA, 19 bp, Mus musculus
  siRNA target sequence for Spna1 (NM_011465.2,409-427).
cagggaagctcgatttgca

SEQ ID NO: 523933 - DNA, 19 bp, Mus musculus
  siRNA target sequence for Spna1 (NM_011465.2,530-548).
ctgcgggcactgaagttct

SEQ ID NO: 523934 - DNA, 19 bp, Mus musculus
  siRNA target sequence for Spna1 (NM_011465.2,598-616).
ggaagctatagtgacatta

SEQ ID NO: 523935 - DNA, 19 bp, Mus musculus
  siRNA target sequence for Spna1 (NM_011465.2,655-673).
gcataagaagtttgaagaa

SEQ ID NO: 523936 - DNA, 19 bp, Mus musculus
  siRNA target sequence for Spna1 (NM_011465.2,690-708).
ccgctcggaagggaaaagt

SEQ ID NO: 523937 - DNA, 19 bp, Mus musculus
  siRNA target sequence for Spna1 (NM_011465.2,707-725).
gtggacagagtgaaccaat

SEQ ID NO: 523938 - DNA, 19 bp, Mus musculus
  siRNA target sequence for Spna1 (NM_011465.2,712-730).
cagagtgaaccaatatgct

SEQ ID NO: 523939 - DNA, 19 bp, Mus musculus
  siRNA target sequence for Spna1 (NM_011465.2,714-732).
gagtgaaccaatatgctaa

SEQ ID NO: 523940 - DNA, 19 bp, Mus musculus
  siRNA target sequence for Spna1 (NM_011465.2,745-763).
ggagaaacatcctaagtta

SEQ ID NO: 523941 - DNA, 19 bp, Mus musculus
  siRNA target sequence for Spna1 (NM_011465.2,755-773).
cctaagttaccagagataa

SEQ ID NO: 523942 - DNA, 19 bp, Mus musculus
  siRNA target sequence for Spna1 (NM_011465.2,756-774).
ctaagttaccagagataaa

SEQ ID NO: 523943 - DNA, 19 bp, Mus musculus
  siRNA target sequence for Spna1 (NM_011465.2,857-875).
gcagacctccagcgattta

SEQ ID NO: 523944 - DNA, 19 bp, Mus musculus
  siRNA target sequence for Spna1 (NM_011465.2,860-878).
gacctccagcgatttaaaa

SEQ ID NO: 523945 - DNA, 19 bp, Mus musculus
  siRNA target sequence for Spna1 (NM_011465.2,879-897).
gggatgtcaatgaagctat

SEQ ID NO: 523946 - DNA, 19 bp, Mus musculus
  siRNA target sequence for Spna1 (NM_011465.2,946-964).
caaagatcttgttagttct

SEQ ID NO: 523947 - DNA, 19 bp, Mus musculus
  siRNA target sequence for Spna1 (NM_011465.2,968-986).
gcattgtttcacaatcaca

SEQ ID NO: 523948 - DNA, 19 bp, Mus musculus
  siRNA target sequence for Spna1 (NM_011465.2,1137-1155).
ccttggccactaacagata

SEQ ID NO: 523949 - DNA, 19 bp, Mus musculus
  siRNA target sequence for Spna1 (NM_011465.2,1138-1156).
cttggccactaacagatat

SEQ ID NO: 523950 - DNA, 19 bp, Mus musculus
  siRNA target sequence for Spna1 (NM_011465.2,1141-1159).
ggccactaacagatatgca

SEQ ID NO: 523951 - DNA, 19 bp, Mus musculus
  siRNA target sequence for Spna1 (NM_011465.2,1142-1160).
gccactaacagatatgcaa

SEQ ID NO: 523952 - DNA, 19 bp, Mus musculus
  siRNA target sequence for Spna1 (NM_011465.2,1178-1196).
gggtaccatcggttcttat

SEQ ID NO: 523953 - DNA, 19 bp, Mus musculus
  siRNA target sequence for Spna1 (NM_011465.2,1189-1207).
gttcttatctgactatgat

SEQ ID NO: 523954 - DNA, 19 bp, Mus musculus
  siRNA target sequence for Spna1 (NM_011465.2,1327-1345).
ctcttatgatgatcgattt

SEQ ID NO: 523955 - DNA, 19 bp, Mus musculus
  siRNA target sequence for Spna1 (NM_011465.2,1329-1347).
cttatgatgatcgatttca

SEQ ID NO: 523956 - DNA, 19 bp, Mus musculus
  siRNA target sequence for Spna1 (NM_011465.2,1410-1428).
gagagaagatgacaatact

SEQ ID NO: 523957 - DNA, 19 bp, Mus musculus
  siRNA target sequence for Spna1 (NM_011465.2,1485-1503).
gccaatgtctggatttcca

SEQ ID NO: 523958 - DNA, 19 bp, Mus musculus
  siRNA target sequence for Spna1 (NM_011465.2,1510-1528).
ctaccgagacagtgaacaa

SEQ ID NO: 523959 - DNA, 19 bp, Mus musculus
  siRNA target sequence for Spna1 (NM_011465.2,1676-1694).
gagactgcaaccaagctta

SEQ ID NO: 523960 - DNA, 19 bp, Mus musculus
  siRNA target sequence for Spna1 (NM_011465.2,1682-1700).
gcaaccaagcttattgaca

SEQ ID NO: 523961 - DNA, 19 bp, Mus musculus
  siRNA target sequence for Spna1 (NM_011465.2,1686-1704).
ccaagcttattgacaatga

SEQ ID NO: 523962 - DNA, 19 bp, Mus musculus
  siRNA target sequence for Spna1 (NM_011465.2,1720-1738).
gaatatcgctgctattcgt

SEQ ID NO: 523963 - DNA, 19 bp, Mus musculus
  siRNA target sequence for Spna1 (NM_011465.2,1776-1794).
gggctgccactagaagaaa

SEQ ID NO: 523964 - DNA, 19 bp, Mus musculus
  siRNA target sequence for Spna1 (NM_011465.2,1798-1816).
gttggtagattcacaactt

SEQ ID NO: 523965 - DNA, 19 bp, Mus musculus
  siRNA target sequence for Spna1 (NM_011465.2,1846-1864).
cctaaaaacctggatcaat

SEQ ID NO: 523966 - DNA, 19 bp, Mus musculus
  siRNA target sequence for Spna1 (NM_011465.2,1847-1865).
ctaaaaacctggatcaata

SEQ ID NO: 523967 - DNA, 19 bp, Mus musculus
  siRNA target sequence for Spna1 (NM_011465.2,1959-1977).
cagtgaatgagattatgct

SEQ ID NO: 523968 - DNA, 19 bp, Mus musculus
  siRNA target sequence for Spna1 (NM_011465.2,1967-1985).
gagattatgctcaataact

SEQ ID NO: 523969 - DNA, 19 bp, Mus musculus
  siRNA target sequence for Spna1 (NM_011465.2,2231-2249).
gtacagaatctactaagaa

SEQ ID NO: 523970 - DNA, 19 bp, Mus musculus
  siRNA target sequence for Spna1 (NM_011465.2,2311-2329).
catggcggcacactttgaa

SEQ ID NO: 523971 - DNA, 19 bp, Mus musculus
  siRNA target sequence for Spna1 (NM_011465.2,2317-2335).
ggcacactttgaagagata

SEQ ID NO: 523972 - DNA, 19 bp, Mus musculus
  siRNA target sequence for Spna1 (NM_011465.2,2361-2379).
gtgcaaggcaggaatcctt

SEQ ID NO: 523973 - DNA, 19 bp, Mus musculus
  siRNA target sequence for Spna1 (NM_011465.2,2549-2567).
gccaagaatcttctaaaca

SEQ ID NO: 523974 - DNA, 19 bp, Mus musculus
  siRNA target sequence for Spna1 (NM_011465.2,2603-2621).
gaaccacggattcaagtaa

SEQ ID NO: 523975 - DNA, 19 bp, Mus musculus
  siRNA target sequence for Spna1 (NM_011465.2,2606-2624).
ccacggattcaagtaataa

SEQ ID NO: 523976 - DNA, 19 bp, Mus musculus
  siRNA target sequence for Spna1 (NM_011465.2,2610-2628).
ggattcaagtaataacaga

SEQ ID NO: 523977 - DNA, 19 bp, Mus musculus
  siRNA target sequence for Spna1 (NM_011465.2,2659-2677).
cttcgctgcagaagacata

SEQ ID NO: 523978 - DNA, 19 bp, Mus musculus
  siRNA target sequence for Spna1 (NM_011465.2,2686-2704).
ggttgaaagcttgaacaaa

SEQ ID NO: 523979 - DNA, 19 bp, Mus musculus
  siRNA target sequence for Spna1 (NM_011465.2,2717-2735).
ctccatgctcgagctatta

SEQ ID NO: 523980 - DNA, 19 bp, Mus musculus
  siRNA target sequence for Spna1 (NM_011465.2,2719-2737).
ccatgctcgagctattaga

SEQ ID NO: 523981 - DNA, 19 bp, Mus musculus
  siRNA target sequence for Spna1 (NM_011465.2,2736-2754).
gacgggagaatgatcttaa

SEQ ID NO: 523982 - DNA, 19 bp, Mus musculus
  siRNA target sequence for Spna1 (NM_011465.2,2795-2813).
gaagcagaagcatggatta

SEQ ID NO: 523983 - DNA, 19 bp, Mus musculus
  siRNA target sequence for Spna1 (NM_011465.2,2825-2843).
cccattgtagacaacaaaa

SEQ ID NO: 523984 - DNA, 19 bp, Mus musculus
  siRNA target sequence for Spna1 (NM_011465.2,2926-2944).
cagcataaaggctctaaga

SEQ ID NO: 523985 - DNA, 19 bp, Mus musculus
  siRNA target sequence for Spna1 (NM_011465.2,2928-2946).
gcataaaggctctaagaga

SEQ ID NO: 523986 - DNA, 19 bp, Mus musculus
  siRNA target sequence for Spna1 (NM_011465.2,3002-3020).
gaagctagggtcatagctt

SEQ ID NO: 523987 - DNA, 19 bp, Mus musculus
  siRNA target sequence for Spna1 (NM_011465.2,3006-3024).
ctagggtcatagctttgta

SEQ ID NO: 523988 - DNA, 19 bp, Mus musculus
  siRNA target sequence for Spna1 (NM_011465.2,3112-3130).
gaaggttgaagctgatgat

SEQ ID NO: 523989 - DNA, 19 bp, Mus musculus
  siRNA target sequence for Spna1 (NM_011465.2,3143-3161).
gtgccagcggtttatgtca

SEQ ID NO: 523990 - DNA, 19 bp, Mus musculus
  siRNA target sequence for Spna1 (NM_011465.2,3298-3316).
cttgctgcagcgctacaat

SEQ ID NO: 523991 - DNA, 19 bp, Mus musculus
  siRNA target sequence for Spna1 (NM_011465.2,3304-3322).
gcagcgctacaatgagttt

SEQ ID NO: 523992 - DNA, 19 bp, Mus musculus
  siRNA target sequence for Spna1 (NM_011465.2,3439-3457).
gagggatctaaagagtaat

SEQ ID NO: 523993 - DNA, 19 bp, Mus musculus
  siRNA target sequence for Spna1 (NM_011465.2,3489-3507).
ctgacgaactgctctttga

SEQ ID NO: 523994 - DNA, 19 bp, Mus musculus
  siRNA target sequence for Spna1 (NM_011465.2,3576-3594).
ggctggcagatgaacagta

SEQ ID NO: 523995 - DNA, 19 bp, Mus musculus
  siRNA target sequence for Spna1 (NM_011465.2,3650-3668).
gtcaaggaacagattgata

SEQ ID NO: 523996 - DNA, 19 bp, Mus musculus
  siRNA target sequence for Spna1 (NM_011465.2,3726-3744).
ccctccagaggcaacatga

SEQ ID NO: 523997 - DNA, 19 bp, Mus musculus
  siRNA target sequence for Spna1 (NM_011465.2,3883-3901).
cacacttcaaggtcttaca

SEQ ID NO: 523998 - DNA, 19 bp, Mus musculus
  siRNA target sequence for Spna1 (NM_011465.2,3988-4006).
cattggcggtgtgatatca

SEQ ID NO: 523999 - DNA, 19 bp, Mus musculus
  siRNA target sequence for Spna1 (NM_011465.2,4013-4031).
gagctggctgaggacttaa

SEQ ID NO: 524000 - DNA, 19 bp, Mus musculus
  siRNA target sequence for Spna1 (NM_011465.2,4015-4033).
gctggctgaggacttaact

SEQ ID NO: 524001 - DNA, 19 bp, Mus musculus
  siRNA target sequence for Spna1 (NM_011465.2,4063-4081).
ggagcatcacgatgacata

SEQ ID NO: 524002 - DNA, 19 bp, Mus musculus
  siRNA target sequence for Spna1 (NM_011465.2,4064-4082).
gagcatcacgatgacataa

SEQ ID NO: 524003 - DNA, 19 bp, Mus musculus
  siRNA target sequence for Spna1 (NM_011465.2,4106-4124).
gccttagaagactttggta

SEQ ID NO: 524004 - DNA, 19 bp, Mus musculus
  siRNA target sequence for Spna1 (NM_011465.2,4115-4133).
gactttggtacagaactta

SEQ ID NO: 524005 - DNA, 19 bp, Mus musculus
  siRNA target sequence for Spna1 (NM_011465.2,4117-4135).
ctttggtacagaacttata

SEQ ID NO: 524006 - DNA, 19 bp, Mus musculus
  siRNA target sequence for Spna1 (NM_011465.2,4121-4139).
ggtacagaacttatagaca

SEQ ID NO: 524007 - DNA, 19 bp, Mus musculus
  siRNA target sequence for Spna1 (NM_011465.2,4138-4156).
cagcggccaccgtaacaga

SEQ ID NO: 524008 - DNA, 19 bp, Mus musculus
  siRNA target sequence for Spna1 (NM_011465.2,4158-4176).
gtgaaattgacaatactct

SEQ ID NO: 524009 - DNA, 19 bp, Mus musculus
  siRNA target sequence for Spna1 (NM_011465.2,4166-4184).
gacaatactctccagaata

SEQ ID NO: 524010 - DNA, 19 bp, Mus musculus
  siRNA target sequence for Spna1 (NM_011465.2,4326-4344).
cagacgacagggatcactt

SEQ ID NO: 524011 - DNA, 19 bp, Mus musculus
  siRNA target sequence for Spna1 (NM_011465.2,4328-4346).
gacgacagggatcacttaa

SEQ ID NO: 524012 - DNA, 19 bp, Mus musculus
  siRNA target sequence for Spna1 (NM_011465.2,4333-4351).
cagggatcacttaaacagt

SEQ ID NO: 524013 - DNA, 19 bp, Mus musculus
  siRNA target sequence for Spna1 (NM_011465.2,4436-4454).
gccacaaggctcatagaca

SEQ ID NO: 524014 - DNA, 19 bp, Mus musculus
  siRNA target sequence for Spna1 (NM_011465.2,4437-4455).
ccacaaggctcatagacaa

SEQ ID NO: 524015 - DNA, 19 bp, Mus musculus
  siRNA target sequence for Spna1 (NM_011465.2,4438-4456).
cacaaggctcatagacaat

SEQ ID NO: 524016 - DNA, 19 bp, Mus musculus
  siRNA target sequence for Spna1 (NM_011465.2,4510-4528).
gtggaaggctctcaaagaa

SEQ ID NO: 524017 - DNA, 19 bp, Mus musculus
  siRNA target sequence for Spna1 (NM_011465.2,4630-4648).
catagcctgtgatgaatct

SEQ ID NO: 524018 - DNA, 19 bp, Mus musculus
  siRNA target sequence for Spna1 (NM_011465.2,4634-4652).
gcctgtgatgaatcttata

SEQ ID NO: 524019 - DNA, 19 bp, Mus musculus
  siRNA target sequence for Spna1 (NM_011465.2,4655-4673).
gatcccactaacattcaga

SEQ ID NO: 524020 - DNA, 19 bp, Mus musculus
  siRNA target sequence for Spna1 (NM_011465.2,4727-4745).
caggtggatggggttatca

SEQ ID NO: 524021 - DNA, 19 bp, Mus musculus
  siRNA target sequence for Spna1 (NM_011465.2,4884-4902).
ccagtcggcagcaaaggtt

SEQ ID NO: 524022 - DNA, 19 bp, Mus musculus
  siRNA target sequence for Spna1 (NM_011465.2,4889-4907).
cggcagcaaaggttcaaca

SEQ ID NO: 524023 - DNA, 19 bp, Mus musculus
  siRNA target sequence for Spna1 (NM_011465.2,4967-4985).
gatcaggccagggacttaa

SEQ ID NO: 524024 - DNA, 19 bp, Mus musculus
  siRNA target sequence for Spna1 (NM_011465.2,4970-4988).
caggccagggacttaactt

SEQ ID NO: 524025 - DNA, 19 bp, Mus musculus
  siRNA target sequence for Spna1 (NM_011465.2,4972-4990).
ggccagggacttaacttca

SEQ ID NO: 524026 - DNA, 19 bp, Mus musculus
  siRNA target sequence for Spna1 (NM_011465.2,4992-5010).
caggaaacctacttaagaa

SEQ ID NO: 524027 - DNA, 19 bp, Mus musculus
  siRNA target sequence for Spna1 (NM_011465.2,5043-5061).
gagaggaccctctcaaaga

SEQ ID NO: 524028 - DNA, 19 bp, Mus musculus
  siRNA target sequence for Spna1 (NM_011465.2,5091-5109).
ccagtgggactttcaacat

SEQ ID NO: 524029 - DNA, 19 bp, Mus musculus
  siRNA target sequence for Spna1 (NM_011465.2,5094-5112).
gtgggactttcaacattga

SEQ ID NO: 524030 - DNA, 19 bp, Mus musculus
  siRNA target sequence for Spna1 (NM_011465.2,5138-5156).
gtcaatgagcgctttgaaa

SEQ ID NO: 524031 - DNA, 19 bp, Mus musculus
  siRNA target sequence for Spna1 (NM_011465.2,5250-5268).
ggatagaggagaagttgtt

SEQ ID NO: 524032 - DNA, 19 bp, Mus musculus
  siRNA target sequence for Spna1 (NM_011465.2,5307-5325).
gtgttcagaacttattgaa

SEQ ID NO: 524033 - DNA, 19 bp, Mus musculus
  siRNA target sequence for Spna1 (NM_011465.2,5309-5327).
gttcagaacttattgaaaa

SEQ ID NO: 524034 - DNA, 19 bp, Mus musculus
  siRNA target sequence for Spna1 (NM_011465.2,5347-5365).
ggagctagtggcacatgaa

SEQ ID NO: 524035 - DNA, 19 bp, Mus musculus
  siRNA target sequence for Spna1 (NM_011465.2,5651-5669).
gaagctttggagaatgact

SEQ ID NO: 524036 - DNA, 19 bp, Mus musculus
  siRNA target sequence for Spna1 (NM_011465.2,5680-5698).
caagaaccgggtacaagat

SEQ ID NO: 524037 - DNA, 19 bp, Mus musculus
  siRNA target sequence for Spna1 (NM_011465.2,5683-5701).
gaaccgggtacaagatgtt

SEQ ID NO: 524038 - DNA, 19 bp, Mus musculus
  siRNA target sequence for Spna1 (NM_011465.2,5686-5704).
ccgggtacaagatgtttgt

SEQ ID NO: 524039 - DNA, 19 bp, Mus musculus
  siRNA target sequence for Spna1 (NM_011465.2,5712-5730).
gagaagacattcttaataa

SEQ ID NO: 524040 - DNA, 19 bp, Mus musculus
  siRNA target sequence for Spna1 (NM_011465.2,6185-6203).
gaggagctattcatggaat

SEQ ID NO: 524041 - DNA, 19 bp, Mus musculus
  siRNA target sequence for Spna1 (NM_011465.2,6187-6205).
ggagctattcatggaattt

SEQ ID NO: 524042 - DNA, 19 bp, Mus musculus
  siRNA target sequence for Spna1 (NM_011465.2,6190-6208).
gctattcatggaatttgca

SEQ ID NO: 524043 - DNA, 19 bp, Mus musculus
  siRNA target sequence for Spna1 (NM_011465.2,6271-6289).
gcattgtgtctctctaaat

SEQ ID NO: 524044 - DNA, 19 bp, Mus musculus
  siRNA target sequence for Spna1 (NM_011465.2,6276-6294).
gtgtctctctaaatgagat

SEQ ID NO: 524045 - DNA, 19 bp, Mus musculus
  siRNA target sequence for Spna1 (NM_011465.2,6344-6362).
gctcaagaggatttcaact

SEQ ID NO: 524046 - DNA, 19 bp, Mus musculus
  siRNA target sequence for Spna1 (NM_011465.2,6382-6400).
gcaaattaaagccttaaat

SEQ ID NO: 524047 - DNA, 19 bp, Mus musculus
  siRNA target sequence for Spna1 (NM_011465.2,6401-6419).
gtcccctccagtccttata

SEQ ID NO: 524048 - DNA, 19 bp, Mus musculus
  siRNA target sequence for Spna1 (NM_011465.2,6414-6432).
cttatacctggttaacagt

SEQ ID NO: 524049 - DNA, 19 bp, Mus musculus
  siRNA target sequence for Spna1 (NM_011465.2,6506-6524).
gaggctaggcagatcaaga

SEQ ID NO: 524050 - DNA, 19 bp, Mus musculus
  siRNA target sequence for Spna1 (NM_011465.2,6694-6712).
ccatctgaccaagattgaa

SEQ ID NO: 524051 - DNA, 19 bp, Mus musculus
  siRNA target sequence for Spna1 (NM_011465.2,6737-6755).
gctctgatccttgatatca

SEQ ID NO: 524052 - DNA, 19 bp, Mus musculus
  siRNA target sequence for Spna1 (NM_011465.2,6738-6756).
ctctgatccttgatatcaa

SEQ ID NO: 524053 - DNA, 19 bp, Mus musculus
  siRNA target sequence for Spna1 (NM_011465.2,6807-6825).
ggatgcgaatgcaacacaa

SEQ ID NO: 524054 - DNA, 19 bp, Mus musculus
  siRNA target sequence for Spna1 (NM_011465.2,6808-6826).
gatgcgaatgcaacacaat

SEQ ID NO: 524055 - DNA, 19 bp, Mus musculus
  siRNA target sequence for Spna1 (NM_011465.2,6836-6854).
cagattcaagccaaagaca

SEQ ID NO: 524056 - DNA, 19 bp, Mus musculus
  siRNA target sequence for Spna1 (NM_011465.2,6905-6923).
cacttcgatgagaacttga

SEQ ID NO: 524057 - DNA, 19 bp, Mus musculus
  siRNA target sequence for Spna1 (NM_011465.2,6919-6937).
cttgacagggcgattgact

SEQ ID NO: 524058 - DNA, 19 bp, Mus musculus
  siRNA target sequence for Spna1 (NM_011465.2,6927-6945).
ggcgattgactcacaaaga

SEQ ID NO: 524059 - DNA, 19 bp, Mus musculus
  siRNA target sequence for Spna1 (NM_011465.2,6929-6947).
cgattgactcacaaagagt

SEQ ID NO: 524060 - DNA, 19 bp, Mus musculus
  siRNA target sequence for Spna1 (NM_011465.2,6957-6975).
gcctgagaggactcaatta

SEQ ID NO: 524061 - DNA, 19 bp, Mus musculus
  siRNA target sequence for Spna1 (NM_011465.2,6959-6977).
ctgagaggactcaattact

SEQ ID NO: 524062 - DNA, 19 bp, Mus musculus
  siRNA target sequence for Spna1 (NM_011465.2,6961-6979).
gagaggactcaattactat

SEQ ID NO: 524063 - DNA, 19 bp, Mus musculus
  siRNA target sequence for Spna1 (NM_011465.2,7007-7025).
gagcccaagtttgagaaat

SEQ ID NO: 524064 - DNA, 19 bp, Mus musculus
  siRNA target sequence for Spna1 (NM_011465.2,7067-7085).
ctggaagactatacatcat

SEQ ID NO: 524065 - DNA, 19 bp, Mus musculus
  siRNA target sequence for Spna1 (NM_011465.2,7114-7132).
caagaccagcgatgacata

SEQ ID NO: 524066 - DNA, 19 bp, Mus musculus
  siRNA target sequence for Spna1 (NM_011465.2,7157-7175).
gaaggcaaggcctatatta

SEQ ID NO: 524067 - DNA, 19 bp, Mus musculus
  siRNA target sequence for Spna1 (NM_011465.2,7160-7178).
ggcaaggcctatattacca

SEQ ID NO: 524068 - DNA, 19 bp, Mus musculus
  siRNA target sequence for Spna1 (NM_011465.2,7161-7179).
gcaaggcctatattaccaa

SEQ ID NO: 524069 - DNA, 19 bp, Mus musculus
  siRNA target sequence for Spna1 (NM_011465.2,7197-7215).
ctctcaccccggaacaagt

SEQ ID NO: 524070 - DNA, 19 bp, Mus musculus
  siRNA target sequence for Spna1 (NM_011465.2,7203-7221).
ccccggaacaagtgtcatt

SEQ ID NO: 524071 - DNA, 19 bp, Mus musculus
  siRNA target sequence for Spna1 (NM_011465.2,7205-7223).
ccggaacaagtgtcattct

SEQ ID NO: 524072 - DNA, 19 bp, Mus musculus
  siRNA target sequence for Spna1 (NM_011465.2,7207-7225).
ggaacaagtgtcattctgt

SEQ ID NO: 524073 - DNA, 19 bp, Mus musculus
  siRNA target sequence for Spna1 (NM_011465.2,7208-7226).
gaacaagtgtcattctgta

SEQ ID NO: 524074 - DNA, 19 bp, Mus musculus
  siRNA target sequence for Spna1 (NM_011465.2,7227-7245).
ccatacatatgcagcaata

SEQ ID NO: 524075 - DNA, 19 bp, Mus musculus
  siRNA target sequence for Spnb1 (NM_013675.2,148-166).
catcggccacggagtttga

SEQ ID NO: 524076 - DNA, 19 bp, Mus musculus
  siRNA target sequence for Spnb1 (NM_013675.2,154-172).
ccacggagtttgaaaacgt

SEQ ID NO: 524077 - DNA, 19 bp, Mus musculus
  siRNA target sequence for Spnb1 (NM_013675.2,184-202).
caccattcagccggattaa

SEQ ID NO: 524078 - DNA, 19 bp, Mus musculus
  siRNA target sequence for Spnb1 (NM_013675.2,221-239).
cgatgacgaactggataat

SEQ ID NO: 524079 - DNA, 19 bp, Mus musculus
  siRNA target sequence for Spnb1 (NM_013675.2,225-243).
gacgaactggataatgaca

SEQ ID NO: 524080 - DNA, 19 bp, Mus musculus
  siRNA target sequence for Spnb1 (NM_013675.2,299-317).
ggaagtggtccagaagaaa

SEQ ID NO: 524081 - DNA, 19 bp, Mus musculus
  siRNA target sequence for Spnb1 (NM_013675.2,522-540).
cgcgtgcacctggaaaaca

SEQ ID NO: 524082 - DNA, 19 bp, Mus musculus
  siRNA target sequence for Spnb1 (NM_013675.2,523-541).
gcgtgcacctggaaaacat

SEQ ID NO: 524083 - DNA, 19 bp, Mus musculus
  siRNA target sequence for Spnb1 (NM_013675.2,710-728).
ctacccccatgtcaatgta

SEQ ID NO: 524084 - DNA, 19 bp, Mus musculus
  siRNA target sequence for Spnb1 (NM_013675.2,767-785).
caatgccctaatacacaaa

SEQ ID NO: 524085 - DNA, 19 bp, Mus musculus
  siRNA target sequence for Spnb1 (NM_013675.2,946-964).
cctacgtggtggcgtttta

SEQ ID NO: 524086 - DNA, 19 bp, Mus musculus
  siRNA target sequence for Spnb1 (NM_013675.2,947-965).
ctacgtggtggcgttttat

SEQ ID NO: 524087 - DNA, 19 bp, Mus musculus
  siRNA target sequence for Spnb1 (NM_013675.2,1085-1103).
gctcacttggattgaacaa

SEQ ID NO: 524088 - DNA, 19 bp, Mus musculus
  siRNA target sequence for Spnb1 (NM_013675.2,1086-1104).
ctcacttggattgaacaaa

SEQ ID NO: 524089 - DNA, 19 bp, Mus musculus
  siRNA target sequence for Spnb1 (NM_013675.2,1229-1247).
ggaagtcctcctattcact

SEQ ID NO: 524090 - DNA, 19 bp, Mus musculus
  siRNA target sequence for Spnb1 (NM_013675.2,1235-1253).
cctcctattcactatccaa

SEQ ID NO: 524091 - DNA, 19 bp, Mus musculus
  siRNA target sequence for Spnb1 (NM_013675.2,1236-1254).
ctcctattcactatccaat

SEQ ID NO: 524092 - DNA, 19 bp, Mus musculus
  siRNA target sequence for Spnb1 (NM_013675.2,1256-1274).
ccggatgagagccaacaat

SEQ ID NO: 524093 - DNA, 19 bp, Mus musculus
  siRNA target sequence for Spnb1 (NM_013675.2,1446-1464).
gagacgtggctcaatgaaa

SEQ ID NO: 524094 - DNA, 19 bp, Mus musculus
  siRNA target sequence for Spnb1 (NM_013675.2,1475-1493).
ggtgacccaggataacttt

SEQ ID NO: 524095 - DNA, 19 bp, Mus musculus
  siRNA target sequence for Spnb1 (NM_013675.2,1727-1745).
ggcactgcagaaactcttt

SEQ ID NO: 524096 - DNA, 19 bp, Mus musculus
  siRNA target sequence for Spnb1 (NM_013675.2,2152-2170).
ccagcgtgctcatcttaca

SEQ ID NO: 524097 - DNA, 19 bp, Mus musculus
  siRNA target sequence for Spnb1 (NM_013675.2,2206-2224).
ggctggacgcccatctgaa

SEQ ID NO: 524098 - DNA, 19 bp, Mus musculus
  siRNA target sequence for Spnb1 (NM_013675.2,2207-2225).
gctggacgcccatctgaaa

SEQ ID NO: 524099 - DNA, 19 bp, Mus musculus
  siRNA target sequence for Spnb1 (NM_013675.2,2211-2229).
gacgcccatctgaaacaga

SEQ ID NO: 524100 - DNA, 19 bp, Mus musculus
  siRNA target sequence for Spnb1 (NM_013675.2,2282-2300).
gatcgagacccgtgtcaaa

SEQ ID NO: 524101 - DNA, 19 bp, Mus musculus
  siRNA target sequence for Spnb1 (NM_013675.2,2336-2354).
ggctgcctttcgtaagaaa

SEQ ID NO: 524102 - DNA, 19 bp, Mus musculus
  siRNA target sequence for Spnb1 (NM_013675.2,2338-2356).
ctgcctttcgtaagaaaga

SEQ ID NO: 524103 - DNA, 19 bp, Mus musculus
  siRNA target sequence for Spnb1 (NM_013675.2,2358-2376).
ctgcaggatgcggaaaact

SEQ ID NO: 524104 - DNA, 19 bp, Mus musculus
  siRNA target sequence for Spnb1 (NM_013675.2,2361-2379).
caggatgcggaaaacttct

SEQ ID NO: 524105 - DNA, 19 bp, Mus musculus
  siRNA target sequence for Spnb1 (NM_013675.2,2583-2601).
cgagattccccagatgtaa

SEQ ID NO: 524106 - DNA, 19 bp, Mus musculus
  siRNA target sequence for Spnb1 (NM_013675.2,2586-2604).
gattccccagatgtaacaa

SEQ ID NO: 524107 - DNA, 19 bp, Mus musculus
  siRNA target sequence for Spnb1 (NM_013675.2,2799-2817).
gtgcagcacaggtttgaca

SEQ ID NO: 524108 - DNA, 19 bp, Mus musculus
  siRNA target sequence for Spnb1 (NM_013675.2,2839-2857).
ccttgatggcgcagattga

SEQ ID NO: 524109 - DNA, 19 bp, Mus musculus
  siRNA target sequence for Spnb1 (NM_013675.2,2840-2858).
cttgatggcgcagattgat

SEQ ID NO: 524110 - DNA, 19 bp, Mus musculus
  siRNA target sequence for Spnb1 (NM_013675.2,2998-3016).
cagctctccgagtaaacaa

SEQ ID NO: 524111 - DNA, 19 bp, Mus musculus
  siRNA target sequence for Spnb1 (NM_013675.2,3001-3019).
ctctccgagtaaacaatta

SEQ ID NO: 524112 - DNA, 19 bp, Mus musculus
  siRNA target sequence for Spnb1 (NM_013675.2,3003-3021).
ctccgagtaaacaattact

SEQ ID NO: 524113 - DNA, 19 bp, Mus musculus
  siRNA target sequence for Spnb1 (NM_013675.2,3005-3023).
ccgagtaaacaattactgt

SEQ ID NO: 524114 - DNA, 19 bp, Mus musculus
  siRNA target sequence for Spnb1 (NM_013675.2,3117-3135).
gccatccagcggaagttgt

SEQ ID NO: 524115 - DNA, 19 bp, Mus musculus
  siRNA target sequence for Spnb1 (NM_013675.2,3242-3260).
ccagcggcaagcagatgtt

SEQ ID NO: 524116 - DNA, 19 bp, Mus musculus
  siRNA target sequence for Spnb1 (NM_013675.2,3247-3265).
ggcaagcagatgttgagaa

SEQ ID NO: 524117 - DNA, 19 bp, Mus musculus
  siRNA target sequence for Spnb1 (NM_013675.2,3478-3496).
cgcacagagacgattacca

SEQ ID NO: 524118 - DNA, 19 bp, Mus musculus
  siRNA target sequence for Spnb1 (NM_013675.2,3479-3497).
gcacagagacgattaccat

SEQ ID NO: 524119 - DNA, 19 bp, Mus musculus
  siRNA target sequence for Spnb1 (NM_013675.2,3480-3498).
cacagagacgattaccata

SEQ ID NO: 524120 - DNA, 19 bp, Mus musculus
  siRNA target sequence for Spnb1 (NM_013675.2,3567-3585).
cggttagagggcctagata

SEQ ID NO: 524121 - DNA, 19 bp, Mus musculus
  siRNA target sequence for Spnb1 (NM_013675.2,3849-3867).
gccgagggcaacctgtatt

SEQ ID NO: 524122 - DNA, 19 bp, Mus musculus
  siRNA target sequence for Spnb1 (NM_013675.2,3884-3902).
gaaggtgcagctgattgaa

SEQ ID NO: 524123 - DNA, 19 bp, Mus musculus
  siRNA target sequence for Spnb1 (NM_013675.2,3998-4016).
gctcactctctggatcaat

SEQ ID NO: 524124 - DNA, 19 bp, Mus musculus
  siRNA target sequence for Spnb1 (NM_013675.2,4059-4077).
cgcaaccttcacaacaaat

SEQ ID NO: 524125 - DNA, 19 bp, Mus musculus
  siRNA target sequence for Spnb1 (NM_013675.2,4304-4322).
ccacgccgaccttaacaaa

SEQ ID NO: 524126 - DNA, 19 bp, Mus musculus
  siRNA target sequence for Spnb1 (NM_013675.2,4305-4323).
cacgccgaccttaacaaat

SEQ ID NO: 524127 - DNA, 19 bp, Mus musculus
  siRNA target sequence for Spnb1 (NM_013675.2,4309-4327).
ccgaccttaacaaatggat

SEQ ID NO: 524128 - DNA, 19 bp, Mus musculus
  siRNA target sequence for Spnb1 (NM_013675.2,4389-4407).
cggatgttggctaagttga

SEQ ID NO: 524129 - DNA, 19 bp, Mus musculus
  siRNA target sequence for Spnb1 (NM_013675.2,4411-4429).
gagtggaggaacaagtgaa

SEQ ID NO: 524130 - DNA, 19 bp, Mus musculus
  siRNA target sequence for Spnb1 (NM_013675.2,4498-4516).
cggacatgagcatcgaaaa

SEQ ID NO: 524131 - DNA, 19 bp, Mus musculus
  siRNA target sequence for Spnb1 (NM_013675.2,4654-4672).
ctgactatggcactaatct

SEQ ID NO: 524132 - DNA, 19 bp, Mus musculus
  siRNA target sequence for Spnb1 (NM_013675.2,4945-4963).
gcgagcaggagctatatgt

SEQ ID NO: 524133 - DNA, 19 bp, Mus musculus
  siRNA target sequence for Spnb1 (NM_013675.2,4947-4965).
gagcaggagctatatgtgt

SEQ ID NO: 524134 - DNA, 19 bp, Mus musculus
  siRNA target sequence for Spnb1 (NM_013675.2,5046-5064).
gagtatggacggaatatca

SEQ ID NO: 524135 - DNA, 19 bp, Mus musculus
  siRNA target sequence for Spnb1 (NM_013675.2,5191-5209).
ggcggaggctggagaacat

SEQ ID NO: 524136 - DNA, 19 bp, Mus musculus
  siRNA target sequence for Spnb1 (NM_013675.2,5244-5262).
gacttagagcagtggatta

SEQ ID NO: 524137 - DNA, 19 bp, Mus musculus
  siRNA target sequence for Spnb1 (NM_013675.2,5252-5270).
gcagtggattacggaaaaa

SEQ ID NO: 524138 - DNA, 19 bp, Mus musculus
  siRNA target sequence for Spnb1 (NM_013675.2,5320-5338).
ctatgctacgtgacaagtt

SEQ ID NO: 524139 - DNA, 19 bp, Mus musculus
  siRNA target sequence for Spnb1 (NM_013675.2,5535-5553).
gacctgcaccgctatttct

SEQ ID NO: 524140 - DNA, 19 bp, Mus musculus
  siRNA target sequence for Spnb1 (NM_013675.2,5567-5585).
gatcctgggcctcatagat

SEQ ID NO: 524141 - DNA, 19 bp, Mus musculus
  siRNA target sequence for Spnb1 (NM_013675.2,5957-5975).
ggaattgctcttgaagtat

SEQ ID NO: 524142 - DNA, 19 bp, Mus musculus
  siRNA target sequence for Spnb1 (NM_013675.2,6075-6093).
gacgagatccgggagaaat

SEQ ID NO: 524143 - DNA, 19 bp, Mus musculus
  siRNA target sequence for Spnb1 (NM_013675.2,6089-6107).
gaaattgcagcaagtgata

SEQ ID NO: 524144 - DNA, 19 bp, Mus musculus
  siRNA target sequence for Spnb1 (NM_013675.2,6203-6221).
ggccgaggcatggttgatt

SEQ ID NO: 524145 - DNA, 19 bp, Mus musculus
  siRNA target sequence for Spnb1 (NM_013675.2,6262-6280).
cagtggacagcgtagaaaa

SEQ ID NO: 524146 - DNA, 19 bp, Mus musculus
  siRNA target sequence for Spnb1 (NM_013675.2,6267-6285).
gacagcgtagaaaagctta

SEQ ID NO: 524147 - DNA, 19 bp, Mus musculus
  siRNA target sequence for Spnb1 (NM_013675.2,6467-6485).
ggccacagagagaacatct

SEQ ID NO: 524148 - DNA, 19 bp, Mus musculus
  siRNA target sequence for Spnb1 (NM_013675.2,6478-6496).
gaacatctccggtcagttt

SEQ ID NO: 524149 - DNA, 19 bp, Mus musculus
  siRNA target sequence for Spnb2 (NM_009260.1,385-403).
ccgggcaggtgccttacaa

SEQ ID NO: 524150 - DNA, 19 bp, Mus musculus
  siRNA target sequence for Spnb2 (NM_009260.1,387-405).
gggcaggtgccttacaact

SEQ ID NO: 524151 - DNA, 19 bp, Mus musculus
  siRNA target sequence for Spnb2 (NM_009260.1,639-657).
gtcgacaaggctcttcaat

SEQ ID NO: 524152 - DNA, 19 bp, Mus musculus
  siRNA target sequence for Spnb2 (NM_009260.1,764-782).
ccagatccaggatattagt

SEQ ID NO: 524153 - DNA, 19 bp, Mus musculus
  siRNA target sequence for Spnb2 (NM_009260.1,860-878).
gtaccccaatgtcaacatt

SEQ ID NO: 524154 - DNA, 19 bp, Mus musculus
  siRNA target sequence for Spnb2 (NM_009260.1,864-882).
cccaatgtcaacattcaca

SEQ ID NO: 524155 - DNA, 19 bp, Mus musculus
  siRNA target sequence for Spnb2 (NM_009260.1,866-884).
caatgtcaacattcacaat

SEQ ID NO: 524156 - DNA, 19 bp, Mus musculus
  siRNA target sequence for Spnb2 (NM_009260.1,870-888).
gtcaacattcacaatttca

SEQ ID NO: 524157 - DNA, 19 bp, Mus musculus
  siRNA target sequence for Spnb2 (NM_009260.1,914-932).
cttcaatgcactgatacat

SEQ ID NO: 524158 - DNA, 19 bp, Mus musculus
  siRNA target sequence for Spnb2 (NM_009260.1,1022-1040).
gcaccttggcctcactaaa

SEQ ID NO: 524159 - DNA, 19 bp, Mus musculus
  siRNA target sequence for Spnb2 (NM_009260.1,1030-1048).
gcctcactaaactgttaga

SEQ ID NO: 524160 - DNA, 19 bp, Mus musculus
  siRNA target sequence for Spnb2 (NM_009260.1,1071-1089).
caccctgatgagaagtcta

SEQ ID NO: 524161 - DNA, 19 bp, Mus musculus
  siRNA target sequence for Spnb2 (NM_009260.1,1096-1114).
catacgtggtgacttacta

SEQ ID NO: 524162 - DNA, 19 bp, Mus musculus
  siRNA target sequence for Spnb2 (NM_009260.1,1169-1187).
ggtgcttgataatgctata

SEQ ID NO: 524163 - DNA, 19 bp, Mus musculus
  siRNA target sequence for Spnb2 (NM_009260.1,1173-1191).
cttgataatgctatagaaa

SEQ ID NO: 524164 - DNA, 19 bp, Mus musculus
  siRNA target sequence for Spnb2 (NM_009260.1,1183-1201).
ctatagaaacagagaaaat

SEQ ID NO: 524165 - DNA, 19 bp, Mus musculus
  siRNA target sequence for Spnb2 (NM_009260.1,1271-1289).
caaccgcaaatttgctaat

SEQ ID NO: 524166 - DNA, 19 bp, Mus musculus
  siRNA target sequence for Spnb2 (NM_009260.1,1344-1362).
gagaaaccacctaagttta

SEQ ID NO: 524167 - DNA, 19 bp, Mus musculus
  siRNA target sequence for Spnb2 (NM_009260.1,1346-1364).
gaaaccacctaagtttact

SEQ ID NO: 524168 - DNA, 19 bp, Mus musculus
  siRNA target sequence for Spnb2 (NM_009260.1,1405-1423).
gcaagatgcgagcgaataa

SEQ ID NO: 524169 - DNA, 19 bp, Mus musculus
  siRNA target sequence for Spnb2 (NM_009260.1,1406-1424).
caagatgcgagcgaataat

SEQ ID NO: 524170 - DNA, 19 bp, Mus musculus
  siRNA target sequence for Spnb2 (NM_009260.1,1532-1550).
gctcatacggcaggaaaaa

SEQ ID NO: 524171 - DNA, 19 bp, Mus musculus
  siRNA target sequence for Spnb2 (NM_009260.1,1792-1810).
cagcgaggaaggacaatgt

SEQ ID NO: 524172 - DNA, 19 bp, Mus musculus
  siRNA target sequence for Spnb2 (NM_009260.1,1794-1812).
gcgaggaaggacaatgtca

SEQ ID NO: 524173 - DNA, 19 bp, Mus musculus
  siRNA target sequence for Spnb2 (NM_009260.1,1795-1813).
cgaggaaggacaatgtcat

SEQ ID NO: 524174 - DNA, 19 bp, Mus musculus
  siRNA target sequence for Spnb2 (NM_009260.1,1852-1870).
ggaggcagcgtcttgagat

SEQ ID NO: 524175 - DNA, 19 bp, Mus musculus
  siRNA target sequence for Spnb2 (NM_009260.1,1855-1873).
ggcagcgtcttgagatgaa

SEQ ID NO: 524176 - DNA, 19 bp, Mus musculus
  siRNA target sequence for Spnb2 (NM_009260.1,1868-1886).
gatgaacctgggattgcaa

SEQ ID NO: 524177 - DNA, 19 bp, Mus musculus
  siRNA target sequence for Spnb2 (NM_009260.1,1875-1893).
ctgggattgcaaaagatat

SEQ ID NO: 524178 - DNA, 19 bp, Mus musculus
  siRNA target sequence for Spnb2 (NM_009260.1,1896-1914).
caggaaatgctttatatta

SEQ ID NO: 524179 - DNA, 19 bp, Mus musculus
  siRNA target sequence for Spnb2 (NM_009260.1,1953-1971).
caagactatggcaaacact

SEQ ID NO: 524180 - DNA, 19 bp, Mus musculus
  siRNA target sequence for Spnb2 (NM_009260.1,1978-1996).
gtgttgaagacctgttaca

SEQ ID NO: 524181 - DNA, 19 bp, Mus musculus
  siRNA target sequence for Spnb2 (NM_009260.1,2039-2057).
gcgtgtaagaggtgtgaat

SEQ ID NO: 524182 - DNA, 19 bp, Mus musculus
  siRNA target sequence for Spnb2 (NM_009260.1,2138-2156).
catggagttctgctatcaa

SEQ ID NO: 524183 - DNA, 19 bp, Mus musculus
  siRNA target sequence for Spnb2 (NM_009260.1,2326-2344).
gcaagcaccgggcatttga

SEQ ID NO: 524184 - DNA, 19 bp, Mus musculus
  siRNA target sequence for Spnb2 (NM_009260.1,2418-2436).
cactttggatcggaaaaga

SEQ ID NO: 524185 - DNA, 19 bp, Mus musculus
  siRNA target sequence for Spnb2 (NM_009260.1,2435-2453).
gatccgtgagagaatcatt

SEQ ID NO: 524186 - DNA, 19 bp, Mus musculus
  siRNA target sequence for Spnb2 (NM_009260.1,2438-2456).
ccgtgagagaatcatttat

SEQ ID NO: 524187 - DNA, 19 bp, Mus musculus
  siRNA target sequence for Spnb2 (NM_009260.1,2439-2457).
cgtgagagaatcatttata

SEQ ID NO: 524188 - DNA, 19 bp, Mus musculus
  siRNA target sequence for Spnb2 (NM_009260.1,2440-2458).
gtgagagaatcatttatat

SEQ ID NO: 524189 - DNA, 19 bp, Mus musculus
  siRNA target sequence for Spnb2 (NM_009260.1,2562-2580).
gatgcttggatgttagata

SEQ ID NO: 524190 - DNA, 19 bp, Mus musculus
  siRNA target sequence for Spnb2 (NM_009260.1,2566-2584).
cttggatgttagatatact

SEQ ID NO: 524191 - DNA, 19 bp, Mus musculus
  siRNA target sequence for Spnb2 (NM_009260.1,2569-2587).
ggatgttagatatactcaa

SEQ ID NO: 524192 - DNA, 19 bp, Mus musculus
  siRNA target sequence for Spnb2 (NM_009260.1,2573-2591).
gttagatatactcaagatt

SEQ ID NO: 524193 - DNA, 19 bp, Mus musculus
  siRNA target sequence for Spnb2 (NM_009260.1,3173-3191).
ccacctcgagtgcaatgaa

SEQ ID NO: 524194 - DNA, 19 bp, Mus musculus
  siRNA target sequence for Spnb2 (NM_009260.1,3174-3192).
cacctcgagtgcaatgaaa

SEQ ID NO: 524195 - DNA, 19 bp, Mus musculus
  siRNA target sequence for Spnb2 (NM_009260.1,3179-3197).
cgagtgcaatgaaaccaaa

SEQ ID NO: 524196 - DNA, 19 bp, Mus musculus
  siRNA target sequence for Spnb2 (NM_009260.1,3373-3391).
ctgaccaggctcaagctat

SEQ ID NO: 524197 - DNA, 19 bp, Mus musculus
  siRNA target sequence for Spnb2 (NM_009260.1,3594-3612).
ctcacacagcacgagaata

SEQ ID NO: 524198 - DNA, 19 bp, Mus musculus
  siRNA target sequence for Spnb2 (NM_009260.1,3720-3738).
cggctgcaggccttagaca

SEQ ID NO: 524199 - DNA, 19 bp, Mus musculus
  siRNA target sequence for Spnb2 (NM_009260.1,3745-3763).
ggaatgagctccacaaaat

SEQ ID NO: 524200 - DNA, 19 bp, Mus musculus
  siRNA target sequence for Spnb2 (NM_009260.1,3834-3852).
gctgaagcttttcttaata

SEQ ID NO: 524201 - DNA, 19 bp, Mus musculus
  siRNA target sequence for Spnb2 (NM_009260.1,3860-3878).
gtatgttttggctcatact

SEQ ID NO: 524202 - DNA, 19 bp, Mus musculus
  siRNA target sequence for Spnb2 (NM_009260.1,4127-4145).
gaagttcctgcaagattgt

SEQ ID NO: 524203 - DNA, 19 bp, Mus musculus
  siRNA target sequence for Spnb2 (NM_009260.1,4154-4172).
gtccctctggatcaatgaa

SEQ ID NO: 524204 - DNA, 19 bp, Mus musculus
  siRNA target sequence for Spnb2 (NM_009260.1,4210-4228).
ccagaaatctgcacagtaa

SEQ ID NO: 524205 - DNA, 19 bp, Mus musculus
  siRNA target sequence for Spnb2 (NM_009260.1,4218-4236).
ctgcacagtaaatggttaa

SEQ ID NO: 524206 - DNA, 19 bp, Mus musculus
  siRNA target sequence for Spnb2 (NM_009260.1,4231-4249).
ggttaaagcatcaagcatt

SEQ ID NO: 524207 - DNA, 19 bp, Mus musculus
  siRNA target sequence for Spnb2 (NM_009260.1,4271-4289).
caaagaatggcttgacaaa

SEQ ID NO: 524208 - DNA, 19 bp, Mus musculus
  siRNA target sequence for Spnb2 (NM_009260.1,4415-4433).
gcggctctttgatgcaaat

SEQ ID NO: 524209 - DNA, 19 bp, Mus musculus
  siRNA target sequence for Spnb2 (NM_009260.1,4416-4434).
cggctctttgatgcaaata

SEQ ID NO: 524210 - DNA, 19 bp, Mus musculus
  siRNA target sequence for Spnb2 (NM_009260.1,4437-4455).
gctgagcttttcacacaaa

SEQ ID NO: 524211 - DNA, 19 bp, Mus musculus
  siRNA target sequence for Spnb2 (NM_009260.1,4456-4474).
gctgcgcagatcttgacaa

SEQ ID NO: 524212 - DNA, 19 bp, Mus musculus
  siRNA target sequence for Spnb2 (NM_009260.1,4457-4475).
ctgcgcagatcttgacaaa

SEQ ID NO: 524213 - DNA, 19 bp, Mus musculus
  siRNA target sequence for Spnb2 (NM_009260.1,4490-4508).
ggagagccagattcaatct

SEQ ID NO: 524214 - DNA, 19 bp, Mus musculus
  siRNA target sequence for Spnb2 (NM_009260.1,4577-4595).
gatggaagttcggaagaaa

SEQ ID NO: 524215 - DNA, 19 bp, Mus musculus
  siRNA target sequence for Spnb2 (NM_009260.1,4717-4735).
gtgagaggaagcataacct

SEQ ID NO: 524216 - DNA, 19 bp, Mus musculus
  siRNA target sequence for Spnb2 (NM_009260.1,4744-4762).
ccaaggagatccatcagtt

SEQ ID NO: 524217 - DNA, 19 bp, Mus musculus
  siRNA target sequence for Spnb2 (NM_009260.1,4773-4791).
gtggaggacgaaatcctat

SEQ ID NO: 524218 - DNA, 19 bp, Mus musculus
  siRNA target sequence for Spnb2 (NM_009260.1,4814-4832).
ggcaacttccacagatcat

SEQ ID NO: 524219 - DNA, 19 bp, Mus musculus
  siRNA target sequence for Spnb2 (NM_009260.1,4900-4918).
gacaccagcctcgtattga

SEQ ID NO: 524220 - DNA, 19 bp, Mus musculus
  siRNA target sequence for Spnb2 (NM_009260.1,4929-4947).
gagaggagtcaaaacatca

SEQ ID NO: 524221 - DNA, 19 bp, Mus musculus
  siRNA target sequence for Spnb2 (NM_009260.1,5072-5090).
ggcgcagcagtactacttt

SEQ ID NO: 524222 - DNA, 19 bp, Mus musculus
  siRNA target sequence for Spnb2 (NM_009260.1,5166-5184).
cagagtgctgtctctatgt

SEQ ID NO: 524223 - DNA, 19 bp, Mus musculus
  siRNA target sequence for Spnb2 (NM_009260.1,5286-5304).
gaaagtgagcgtattagca

SEQ ID NO: 524224 - DNA, 19 bp, Mus musculus
  siRNA target sequence for Spnb2 (NM_009260.1,5360-5378).
gaggagaggaaaacttgat

SEQ ID NO: 524225 - DNA, 19 bp, Mus musculus
  siRNA target sequence for Spnb2 (NM_009260.1,5524-5542).
ctcgagacacaggaaacat

SEQ ID NO: 524226 - DNA, 19 bp, Mus musculus
  siRNA target sequence for Spnb2 (NM_009260.1,5550-5568).
gagcgtgtggatacagtta

SEQ ID NO: 524227 - DNA, 19 bp, Mus musculus
  siRNA target sequence for Spnb2 (NM_009260.1,5630-5648).
gaaagatggtctcaatgaa

SEQ ID NO: 524228 - DNA, 19 bp, Mus musculus
  siRNA target sequence for Spnb2 (NM_009260.1,5669-5687).
gctcattgacacaagaaca

SEQ ID NO: 524229 - DNA, 19 bp, Mus musculus
  siRNA target sequence for Spnb2 (NM_009260.1,5704-5722).
catatgaacttcataagtt

SEQ ID NO: 524230 - DNA, 19 bp, Mus musculus
  siRNA target sequence for Spnb2 (NM_009260.1,5749-5767).
gccgaatccaggacaaaca

SEQ ID NO: 524231 - DNA, 19 bp, Mus musculus
  siRNA target sequence for Spnb2 (NM_009260.1,5751-5769).
cgaatccaggacaaacaca

SEQ ID NO: 524232 - DNA, 19 bp, Mus musculus
  siRNA target sequence for Spnb2 (NM_009260.1,6122-6140).
gtcatctgttgaactgtta

SEQ ID NO: 524233 - DNA, 19 bp, Mus musculus
  siRNA target sequence for Spnb2 (NM_009260.1,6177-6195).
gctcgtaatgacagcttta

SEQ ID NO: 524234 - DNA, 19 bp, Mus musculus
  siRNA target sequence for Spnb2 (NM_009260.1,6222-6240).
ctgctggcacggaaacact

SEQ ID NO: 524235 - DNA, 19 bp, Mus musculus
  siRNA target sequence for Spnb2 (NM_009260.1,6224-6242).
gctggcacggaaacactat

SEQ ID NO: 524236 - DNA, 19 bp, Mus musculus
  siRNA target sequence for Spnb2 (NM_009260.1,6228-6246).
gcacggaaacactatgctt

SEQ ID NO: 524237 - DNA, 19 bp, Mus musculus
  siRNA target sequence for Spnb2 (NM_009260.1,6289-6307).
gaaaagaaatgattgacaa

SEQ ID NO: 524238 - DNA, 19 bp, Mus musculus
  siRNA target sequence for Spnb2 (NM_009260.1,6315-6333).
gaccggtgggagtggttaa

SEQ ID NO: 524239 - DNA, 19 bp, Mus musculus
  siRNA target sequence for Spnb2 (NM_009260.1,6317-6335).
ccggtgggagtggttaaga

SEQ ID NO: 524240 - DNA, 19 bp, Mus musculus
  siRNA target sequence for Spnb2 (NM_009260.1,6319-6337).
ggtgggagtggttaagact

SEQ ID NO: 524241 - DNA, 19 bp, Mus musculus
  siRNA target sequence for Spnb2 (NM_009260.1,6323-6341).
ggagtggttaagactgatt

SEQ ID NO: 524242 - DNA, 19 bp, Mus musculus
  siRNA target sequence for Spnb2 (NM_009260.1,6345-6363).
gaggtccatcagttctcaa

SEQ ID NO: 524243 - DNA, 19 bp, Mus musculus
  siRNA target sequence for Spnb2 (NM_009260.1,6396-6414).
ggacaggaaccatacctat

SEQ ID NO: 524244 - DNA, 19 bp, Mus musculus
  siRNA target sequence for Spnb2 (NM_009260.1,6410-6428).
cctatccagccgtgaaatt

SEQ ID NO: 524245 - DNA, 19 bp, Mus musculus
  siRNA target sequence for Spnb2 (NM_009260.1,6443-6461).
cgaagtggagaagcttatt

SEQ ID NO: 524246 - DNA, 19 bp, Mus musculus
  siRNA target sequence for Spnb2 (NM_009260.1,6464-6482).
gcgccatgaggcgtttgaa

SEQ ID NO: 524247 - DNA, 19 bp, Mus musculus
  siRNA target sequence for Spnb2 (NM_009260.1,6465-6483).
cgccatgaggcgtttgaaa

SEQ ID NO: 524248 - DNA, 19 bp, Mus musculus
  siRNA target sequence for Spnb2 (NM_009260.1,6466-6484).
gccatgaggcgtttgaaaa

SEQ ID NO: 524249 - DNA, 19 bp, Mus musculus
  siRNA target sequence for Spnb2 (NM_009260.1,6493-6511).
cgacctgggatgagagatt

SEQ ID NO: 524250 - DNA, 19 bp, Mus musculus
  siRNA target sequence for Spnb2 (NM_009260.1,6497-6515).
ctgggatgagagattctct

SEQ ID NO: 524251 - DNA, 19 bp, Mus musculus
  siRNA target sequence for Spnb2 (NM_009260.1,6603-6621).
gacccaaacacgaaggttt

SEQ ID NO: 524252 - DNA, 19 bp, Mus musculus
  siRNA target sequence for Spnb2 (NM_009260.1,6607-6625).
caaacacgaaggtttcaga

SEQ ID NO: 524253 - DNA, 19 bp, Mus musculus
  siRNA target sequence for Spnb2 (NM_009260.1,6638-6656).
ccagcaatgggatacttca

SEQ ID NO: 524254 - DNA, 19 bp, Mus musculus
  siRNA target sequence for Spnb2 (NM_009260.1,6639-6657).
cagcaatgggatacttcaa

SEQ ID NO: 524255 - DNA, 19 bp, Mus musculus
  siRNA target sequence for Spnb2 (NM_009260.1,6699-6717).
ggatctccacgggttagtt

SEQ ID NO: 524256 - DNA, 19 bp, Mus musculus
  siRNA target sequence for Spnb2 (NM_009260.1,6700-6718).
gatctccacgggttagtta

SEQ ID NO: 524257 - DNA, 19 bp, Mus musculus
  siRNA target sequence for Spnb2 (NM_009260.1,6715-6733).
gttaccgctctcaaacgta

SEQ ID NO: 524258 - DNA, 19 bp, Mus musculus
  siRNA target sequence for Spnb2 (NM_009260.1,6720-6738).
cgctctcaaacgtaccaaa

SEQ ID NO: 524259 - DNA, 19 bp, Mus musculus
  siRNA target sequence for Spnb2 (NM_009260.1,6721-6739).
gctctcaaacgtaccaaaa

SEQ ID NO: 524260 - DNA, 19 bp, Mus musculus
  siRNA target sequence for Spnb4 (NM_032610.1,628-646).
cctgcgcttccagattcaa

SEQ ID NO: 524261 - DNA, 19 bp, Mus musculus
  siRNA target sequence for Spnb4 (NM_032610.1,731-749).
ggttaccctgaggtaaaca

SEQ ID NO: 524262 - DNA, 19 bp, Mus musculus
  siRNA target sequence for Spnb4 (NM_032610.1,743-761).
gtaaacatccagaatttca

SEQ ID NO: 524263 - DNA, 19 bp, Mus musculus
  siRNA target sequence for Spnb4 (NM_032610.1,1022-1040).
gagggaaaacggattggaa

SEQ ID NO: 524264 - DNA, 19 bp, Mus musculus
  siRNA target sequence for Spnb4 (NM_032610.1,1124-1142).
cgcactgtggacctcatta

SEQ ID NO: 524265 - DNA, 19 bp, Mus musculus
  siRNA target sequence for Spnb4 (NM_032610.1,1136-1154).
ctcattagcaaccaaaagt

SEQ ID NO: 524266 - DNA, 19 bp, Mus musculus
  siRNA target sequence for Spnb4 (NM_032610.1,1138-1156).
cattagcaaccaaaagttt

SEQ ID NO: 524267 - DNA, 19 bp, Mus musculus
  siRNA target sequence for Spnb4 (NM_032610.1,1259-1277).
ctactcttcagcatccaaa

SEQ ID NO: 524268 - DNA, 19 bp, Mus musculus
  siRNA target sequence for Spnb4 (NM_032610.1,1467-1485).
gggagagctggctaaatga

SEQ ID NO: 524269 - DNA, 19 bp, Mus musculus
  siRNA target sequence for Spnb4 (NM_032610.1,1731-1749).
cccggcttgagcagaatct

SEQ ID NO: 524270 - DNA, 19 bp, Mus musculus
  siRNA target sequence for Spnb4 (NM_032610.1,2219-2237).
ctgctggcgcagcataaga

SEQ ID NO: 524271 - DNA, 19 bp, Mus musculus
  siRNA target sequence for Spnb4 (NM_032610.1,2881-2899).
ggtggtgcagcatcgattt

SEQ ID NO: 524272 - DNA, 19 bp, Mus musculus
  siRNA target sequence for Spnb4 (NM_032610.1,2887-2905).
gcagcatcgatttgaaagt

SEQ ID NO: 524273 - DNA, 19 bp, Mus musculus
  siRNA target sequence for Spnb4 (NM_032610.1,2890-2908).
gcatcgatttgaaagtctt

SEQ ID NO: 524274 - DNA, 19 bp, Mus musculus
  siRNA target sequence for Spnb4 (NM_032610.1,3405-3423).
gtttcctgcgcgatttgga

SEQ ID NO: 524275 - DNA, 19 bp, Mus musculus
  siRNA target sequence for Spnb4 (NM_032610.1,3410-3428).
ctgcgcgatttggatactt

SEQ ID NO: 524276 - DNA, 19 bp, Mus musculus
  siRNA target sequence for Spnb4 (NM_032610.1,3718-3736).
ccaagcgcacgtctatcaa

SEQ ID NO: 524277 - DNA, 19 bp, Mus musculus
  siRNA target sequence for Spnb4 (NM_032610.1,3723-3741).
cgcacgtctatcaactctt

SEQ ID NO: 524278 - DNA, 19 bp, Mus musculus
  siRNA target sequence for Spnb4 (NM_032610.1,3829-3847).
ggtagaagaggcgatgaaa

SEQ ID NO: 524279 - DNA, 19 bp, Mus musculus
  siRNA target sequence for Spnb4 (NM_032610.1,4015-4033).
gcagtggatgcaaaaacta

SEQ ID NO: 524280 - DNA, 19 bp, Mus musculus
  siRNA target sequence for Spnb4 (NM_032610.1,4046-4064).
gtgctgcagcactttctta

SEQ ID NO: 524281 - DNA, 19 bp, Mus musculus
  siRNA target sequence for Spnb4 (NM_032610.1,4051-4069).
gcagcactttcttagagat

SEQ ID NO: 524282 - DNA, 19 bp, Mus musculus
  siRNA target sequence for Spnb4 (NM_032610.1,4139-4157).
cacaagctgcacaagagat

SEQ ID NO: 524283 - DNA, 19 bp, Mus musculus
  siRNA target sequence for Spnb4 (NM_032610.1,4265-4283).
gcctctgtgcgcaagaaat

SEQ ID NO: 524284 - DNA, 19 bp, Mus musculus
  siRNA target sequence for Spnb4 (NM_032610.1,4267-4285).
ctctgtgcgcaagaaatta

SEQ ID NO: 524285 - DNA, 19 bp, Mus musculus
  siRNA target sequence for Spnb4 (NM_032610.1,4403-4421).
cggctgcttcacatggaaa

SEQ ID NO: 524286 - DNA, 19 bp, Mus musculus
  siRNA target sequence for Spnb4 (NM_032610.1,4468-4486).
cagccagctcaagaagtta

SEQ ID NO: 524287 - DNA, 19 bp, Mus musculus
  siRNA target sequence for Spnb4 (NM_032610.1,4996-5014).
ggtggaacagtactacttt

SEQ ID NO: 524288 - DNA, 19 bp, Mus musculus
  siRNA target sequence for Spnb4 (NM_032610.1,5418-5436).
cggtgctacaggagaaatt

SEQ ID NO: 524289 - DNA, 19 bp, Mus musculus
  siRNA target sequence for Spnb4 (NM_032610.1,5422-5440).
gctacaggagaaattctca

SEQ ID NO: 524290 - DNA, 19 bp, Mus musculus
  siRNA target sequence for Spnb4 (NM_032610.1,5625-5643).
cctctcgggagctgcataa

SEQ ID NO: 524291 - DNA, 19 bp, Mus musculus
  siRNA target sequence for Spnb4 (NM_032610.1,5628-5646).
ctcgggagctgcataagtt

SEQ ID NO: 524292 - DNA, 19 bp, Mus musculus
  siRNA target sequence for Spnb4 (NM_032610.1,5631-5649).
gggagctgcataagttctt

SEQ ID NO: 524293 - DNA, 19 bp, Mus musculus
  siRNA target sequence for Spnb4 (NM_032610.1,5911-5929).
gctagcagcctgtgaagat

SEQ ID NO: 524294 - DNA, 19 bp, Mus musculus
  siRNA target sequence for Spnb4 (NM_032610.1,6575-6593).
cgtccagggggctatgaca

SEQ ID NO: 524295 - DNA, 19 bp, Mus musculus
  siRNA target sequence for Spnb4 (NM_032610.1,7583-7601).
gtggctagtgactacaaga

SEQ ID NO: 524296 - DNA, 19 bp, Mus musculus
  siRNA target sequence for Stab2 (NM_138673.1,118-136).
ggggttgcttgtgcaaaat

SEQ ID NO: 524297 - DNA, 19 bp, Mus musculus
  siRNA target sequence for Stab2 (NM_138673.1,164-182).
ctgacaaagagatgtgata

SEQ ID NO: 524298 - DNA, 19 bp, Mus musculus
  siRNA target sequence for Stab2 (NM_138673.1,179-197).
gataagaagtctactctaa

SEQ ID NO: 524299 - DNA, 19 bp, Mus musculus
  siRNA target sequence for Stab2 (NM_138673.1,215-233).
cagtcctgctcggttaaca

SEQ ID NO: 524300 - DNA, 19 bp, Mus musculus
  siRNA target sequence for Stab2 (NM_138673.1,217-235).
gtcctgctcggttaacatt

SEQ ID NO: 524301 - DNA, 19 bp, Mus musculus
  siRNA target sequence for Stab2 (NM_138673.1,246-264).
gtccagacggctacatcaa

SEQ ID NO: 524302 - DNA, 19 bp, Mus musculus
  siRNA target sequence for Stab2 (NM_138673.1,248-266).
ccagacggctacatcaaga

SEQ ID NO: 524303 - DNA, 19 bp, Mus musculus
  siRNA target sequence for Stab2 (NM_138673.1,249-267).
cagacggctacatcaagat

SEQ ID NO: 524304 - DNA, 19 bp, Mus musculus
  siRNA target sequence for Stab2 (NM_138673.1,256-274).
ctacatcaagattaccaat

SEQ ID NO: 524305 - DNA, 19 bp, Mus musculus
  siRNA target sequence for Stab2 (NM_138673.1,451-469).
caggggtgtttgtgatgaa

SEQ ID NO: 524306 - DNA, 19 bp, Mus musculus
  siRNA target sequence for Stab2 (NM_138673.1,793-811).
gcccatcaacccatgttta

SEQ ID NO: 524307 - DNA, 19 bp, Mus musculus
  siRNA target sequence for Stab2 (NM_138673.1,794-812).
cccatcaacccatgtttaa

SEQ ID NO: 524308 - DNA, 19 bp, Mus musculus
  siRNA target sequence for Stab2 (NM_138673.1,796-814).
catcaacccatgtttaaaa

SEQ ID NO: 524309 - DNA, 19 bp, Mus musculus
  siRNA target sequence for Stab2 (NM_138673.1,958-976).
gtctacggtgtgcagatat

SEQ ID NO: 524310 - DNA, 19 bp, Mus musculus
  siRNA target sequence for Stab2 (NM_138673.1,960-978).
ctacggtgtgcagatatga

SEQ ID NO: 524311 - DNA, 19 bp, Mus musculus
  siRNA target sequence for Stab2 (NM_138673.1,991-1009).
gtctcactgcgagtgtaaa

SEQ ID NO: 524312 - DNA, 19 bp, Mus musculus
  siRNA target sequence for Stab2 (NM_138673.1,997-1015).
ctgcgagtgtaaagaacat

SEQ ID NO: 524313 - DNA, 19 bp, Mus musculus
  siRNA target sequence for Stab2 (NM_138673.1,999-1017).
gcgagtgtaaagaacatta

SEQ ID NO: 524314 - DNA, 19 bp, Mus musculus
  siRNA target sequence for Stab2 (NM_138673.1,1051-1069).
gacggacatctgtgaatca

SEQ ID NO: 524315 - DNA, 19 bp, Mus musculus
  siRNA target sequence for Stab2 (NM_138673.1,1128-1146).
gcacttgccagaaaggtta

SEQ ID NO: 524316 - DNA, 19 bp, Mus musculus
  siRNA target sequence for Stab2 (NM_138673.1,1129-1147).
cacttgccagaaaggttat

SEQ ID NO: 524317 - DNA, 19 bp, Mus musculus
  siRNA target sequence for Stab2 (NM_138673.1,1157-1175).
ggcctgaactgctatggaa

SEQ ID NO: 524318 - DNA, 19 bp, Mus musculus
  siRNA target sequence for Stab2 (NM_138673.1,1314-1332).
cctcagacaagggactaaa

SEQ ID NO: 524319 - DNA, 19 bp, Mus musculus
  siRNA target sequence for Stab2 (NM_138673.1,1315-1333).
ctcagacaagggactaaaa

SEQ ID NO: 524320 - DNA, 19 bp, Mus musculus
  siRNA target sequence for Stab2 (NM_138673.1,1326-1344).
gactaaaaggggttgatgt

SEQ ID NO: 524321 - DNA, 19 bp, Mus musculus
  siRNA target sequence for Stab2 (NM_138673.1,1340-1358).
gatgtaaaggagctcttaa

SEQ ID NO: 524322 - DNA, 19 bp, Mus musculus
  siRNA target sequence for Stab2 (NM_138673.1,1419-1437).
cggagcagatgtataactt

SEQ ID NO: 524323 - DNA, 19 bp, Mus musculus
  siRNA target sequence for Stab2 (NM_138673.1,1487-1505).
gataaggacaatcaactaa

SEQ ID NO: 524324 - DNA, 19 bp, Mus musculus
  siRNA target sequence for Stab2 (NM_138673.1,1588-1606).
cagagcgatggacaagata

SEQ ID NO: 524325 - DNA, 19 bp, Mus musculus
  siRNA target sequence for Stab2 (NM_138673.1,1590-1608).
gagcgatggacaagataga

SEQ ID NO: 524326 - DNA, 19 bp, Mus musculus
  siRNA target sequence for Stab2 (NM_138673.1,1628-1646).
ccccagcaaaccattatga

SEQ ID NO: 524327 - DNA, 19 bp, Mus musculus
  siRNA target sequence for Stab2 (NM_138673.1,1630-1648).
ccagcaaaccattatgaca

SEQ ID NO: 524328 - DNA, 19 bp, Mus musculus
  siRNA target sequence for Stab2 (NM_138673.1,1631-1649).
cagcaaaccattatgacaa

SEQ ID NO: 524329 - DNA, 19 bp, Mus musculus
  siRNA target sequence for Stab2 (NM_138673.1,1647-1665).
caatgctacaaccaagata

SEQ ID NO: 524330 - DNA, 19 bp, Mus musculus
  siRNA target sequence for Stab2 (NM_138673.1,1658-1676).
ccaagatatggcaagttca

SEQ ID NO: 524331 - DNA, 19 bp, Mus musculus
  siRNA target sequence for Stab2 (NM_138673.1,1684-1702).
gctagagaaaaccaatgtt

SEQ ID NO: 524332 - DNA, 19 bp, Mus musculus
  siRNA target sequence for Stab2 (NM_138673.1,1730-1748).
gatgagccatacaccattt

SEQ ID NO: 524333 - DNA, 19 bp, Mus musculus
  siRNA target sequence for Stab2 (NM_138673.1,1782-1800).
cggctggtgtcctcgatta

SEQ ID NO: 524334 - DNA, 19 bp, Mus musculus
  siRNA target sequence for Stab2 (NM_138673.1,1845-1863).
gataccacattgttgcatt

SEQ ID NO: 524335 - DNA, 19 bp, Mus musculus
  siRNA target sequence for Stab2 (NM_138673.1,1916-1934).
gccaaccagatcatcacat

SEQ ID NO: 524336 - DNA, 19 bp, Mus musculus
  siRNA target sequence for Stab2 (NM_138673.1,1922-1940).
cagatcatcacatttaaca

SEQ ID NO: 524337 - DNA, 19 bp, Mus musculus
  siRNA target sequence for Stab2 (NM_138673.1,1989-2007).
ccgaggtcgctgccaaaaa

SEQ ID NO: 524338 - DNA, 19 bp, Mus musculus
  siRNA target sequence for Stab2 (NM_138673.1,2001-2019).
ccaaaaacggccgaattta

SEQ ID NO: 524339 - DNA, 19 bp, Mus musculus
  siRNA target sequence for Stab2 (NM_138673.1,2066-2084).
ccccaccgatgcaatgaaa

SEQ ID NO: 524340 - DNA, 19 bp, Mus musculus
  siRNA target sequence for Stab2 (NM_138673.1,2068-2086).
ccaccgatgcaatgaaaca

SEQ ID NO: 524341 - DNA, 19 bp, Mus musculus
  siRNA target sequence for Stab2 (NM_138673.1,2069-2087).
caccgatgcaatgaaacaa

SEQ ID NO: 524342 - DNA, 19 bp, Mus musculus
  siRNA target sequence for Stab2 (NM_138673.1,2072-2090).
cgatgcaatgaaacaaaga

SEQ ID NO: 524343 - DNA, 19 bp, Mus musculus
  siRNA target sequence for Stab2 (NM_138673.1,2109-2127).
cttgcgtgaggtgtttcat

SEQ ID NO: 524344 - DNA, 19 bp, Mus musculus
  siRNA target sequence for Stab2 (NM_138673.1,2112-2130).
gcgtgaggtgtttcatgaa

SEQ ID NO: 524345 - DNA, 19 bp, Mus musculus
  siRNA target sequence for Stab2 (NM_138673.1,2113-2131).
cgtgaggtgtttcatgaaa

SEQ ID NO: 524346 - DNA, 19 bp, Mus musculus
  siRNA target sequence for Stab2 (NM_138673.1,2157-2175).
cggagcccacggcaatctt

SEQ ID NO: 524347 - DNA, 19 bp, Mus musculus
  siRNA target sequence for Stab2 (NM_138673.1,2162-2180).
cccacggcaatcttcacaa

SEQ ID NO: 524348 - DNA, 19 bp, Mus musculus
  siRNA target sequence for Stab2 (NM_138673.1,2166-2184).
cggcaatcttcacaaacaa

SEQ ID NO: 524349 - DNA, 19 bp, Mus musculus
  siRNA target sequence for Stab2 (NM_138673.1,2223-2241).
gttgtgcccgatattgtga

SEQ ID NO: 524350 - DNA, 19 bp, Mus musculus
  siRNA target sequence for Stab2 (NM_138673.1,2301-2319).
gtccaggaggcttcatgaa

SEQ ID NO: 524351 - DNA, 19 bp, Mus musculus
  siRNA target sequence for Stab2 (NM_138673.1,2415-2433).
gctccaaacccaacagata

SEQ ID NO: 524352 - DNA, 19 bp, Mus musculus
  siRNA target sequence for Stab2 (NM_138673.1,2416-2434).
ctccaaacccaacagatat

SEQ ID NO: 524353 - DNA, 19 bp, Mus musculus
  siRNA target sequence for Stab2 (NM_138673.1,2435-2453).
ggacctcagtgtaacagaa

SEQ ID NO: 524354 - DNA, 19 bp, Mus musculus
  siRNA target sequence for Stab2 (NM_138673.1,2465-2483).
gttcatggaatatgtgata

SEQ ID NO: 524355 - DNA, 19 bp, Mus musculus
  siRNA target sequence for Stab2 (NM_138673.1,2565-2583).
cagcctgtgggccctatat

SEQ ID NO: 524356 - DNA, 19 bp, Mus musculus
  siRNA target sequence for Stab2 (NM_138673.1,2573-2591).
gggccctatatgcaattct

SEQ ID NO: 524357 - DNA, 19 bp, Mus musculus
  siRNA target sequence for Stab2 (NM_138673.1,2575-2593).
gccctatatgcaattctgt

SEQ ID NO: 524358 - DNA, 19 bp, Mus musculus
  siRNA target sequence for Stab2 (NM_138673.1,2600-2618).
catgccacctgtgaataca

SEQ ID NO: 524359 - DNA, 19 bp, Mus musculus
  siRNA target sequence for Stab2 (NM_138673.1,2666-2684).
ggaactctctgttctaaga

SEQ ID NO: 524360 - DNA, 19 bp, Mus musculus
  siRNA target sequence for Stab2 (NM_138673.1,2667-2685).
gaactctctgttctaagaa

SEQ ID NO: 524361 - DNA, 19 bp, Mus musculus
  siRNA target sequence for Stab2 (NM_138673.1,2707-2725).
ctccagaggaggatgtagt

SEQ ID NO: 524362 - DNA, 19 bp, Mus musculus
  siRNA target sequence for Stab2 (NM_138673.1,2724-2742).
gtcctaacgcagaatgcat

SEQ ID NO: 524363 - DNA, 19 bp, Mus musculus
  siRNA target sequence for Stab2 (NM_138673.1,2747-2765).
gctagcacggggacataca

SEQ ID NO: 524364 - DNA, 19 bp, Mus musculus
  siRNA target sequence for Stab2 (NM_138673.1,2855-2873).
gacaacgccacctgtttat

SEQ ID NO: 524365 - DNA, 19 bp, Mus musculus
  siRNA target sequence for Stab2 (NM_138673.1,2857-2875).
caacgccacctgtttatat

SEQ ID NO: 524366 - DNA, 19 bp, Mus musculus
  siRNA target sequence for Stab2 (NM_138673.1,2860-2878).
cgccacctgtttatatgta

SEQ ID NO: 524367 - DNA, 19 bp, Mus musculus
  siRNA target sequence for Stab2 (NM_138673.1,2918-2936).
cgaggaaacggaattgatt

SEQ ID NO: 524368 - DNA, 19 bp, Mus musculus
  siRNA target sequence for Stab2 (NM_138673.1,2928-2946).
gaattgattgtgaacctat

SEQ ID NO: 524369 - DNA, 19 bp, Mus musculus
  siRNA target sequence for Stab2 (NM_138673.1,2933-2951).
gattgtgaacctatcattt

SEQ ID NO: 524370 - DNA, 19 bp, Mus musculus
  siRNA target sequence for Stab2 (NM_138673.1,2982-3000).
ccctggccacctgtcaata

SEQ ID NO: 524371 - DNA, 19 bp, Mus musculus
  siRNA target sequence for Stab2 (NM_138673.1,2983-3001).
cctggccacctgtcaatat

SEQ ID NO: 524372 - DNA, 19 bp, Mus musculus
  siRNA target sequence for Stab2 (NM_138673.1,2984-3002).
ctggccacctgtcaatata

SEQ ID NO: 524373 - DNA, 19 bp, Mus musculus
  siRNA target sequence for Stab2 (NM_138673.1,2986-3004).
ggccacctgtcaatatact

SEQ ID NO: 524374 - DNA, 19 bp, Mus musculus
  siRNA target sequence for Stab2 (NM_138673.1,2987-3005).
gccacctgtcaatatactt

SEQ ID NO: 524375 - DNA, 19 bp, Mus musculus
  siRNA target sequence for Stab2 (NM_138673.1,2988-3006).
ccacctgtcaatatacttt

SEQ ID NO: 524376 - DNA, 19 bp, Mus musculus
  siRNA target sequence for Stab2 (NM_138673.1,2992-3010).
ctgtcaatatactttgtct

SEQ ID NO: 524377 - DNA, 19 bp, Mus musculus
  siRNA target sequence for Stab2 (NM_138673.1,3037-3055).
gggctatgaaggaaatggt

SEQ ID NO: 524378 - DNA, 19 bp, Mus musculus
  siRNA target sequence for Stab2 (NM_138673.1,3054-3072).
gtgtcctgtgctatggaaa

SEQ ID NO: 524379 - DNA, 19 bp, Mus musculus
  siRNA target sequence for Stab2 (NM_138673.1,3099-3117).
ctgaagcagctgtatttta

SEQ ID NO: 524380 - DNA, 19 bp, Mus musculus
  siRNA target sequence for Stab2 (NM_138673.1,3119-3137).
cagtggatcaataatgctt

SEQ ID NO: 524381 - DNA, 19 bp, Mus musculus
  siRNA target sequence for Stab2 (NM_138673.1,3234-3252).
ggttgtcacggaacaacat

SEQ ID NO: 524382 - DNA, 19 bp, Mus musculus
  siRNA target sequence for Stab2 (NM_138673.1,3235-3253).
gttgtcacggaacaacatt

SEQ ID NO: 524383 - DNA, 19 bp, Mus musculus
  siRNA target sequence for Stab2 (NM_138673.1,3250-3268).
cattccagccctgataaaa

SEQ ID NO: 524384 - DNA, 19 bp, Mus musculus
  siRNA target sequence for Stab2 (NM_138673.1,3374-3392).
gcagatgggaatatcacaa

SEQ ID NO: 524385 - DNA, 19 bp, Mus musculus
  siRNA target sequence for Stab2 (NM_138673.1,3375-3393).
cagatgggaatatcacaat

SEQ ID NO: 524386 - DNA, 19 bp, Mus musculus
  siRNA target sequence for Stab2 (NM_138673.1,3590-3608).
gcagatgcttatactgtat

SEQ ID NO: 524387 - DNA, 19 bp, Mus musculus
  siRNA target sequence for Stab2 (NM_138673.1,3591-3609).
cagatgcttatactgtatt

SEQ ID NO: 524388 - DNA, 19 bp, Mus musculus
  siRNA target sequence for Stab2 (NM_138673.1,3603-3621).
ctgtatttgtgccaaacaa

SEQ ID NO: 524389 - DNA, 19 bp, Mus musculus
  siRNA target sequence for Stab2 (NM_138673.1,3623-3641).
gaagccatcgaaagttata

SEQ ID NO: 524390 - DNA, 19 bp, Mus musculus
  siRNA target sequence for Stab2 (NM_138673.1,3626-3644).
gccatcgaaagttatatca

SEQ ID NO: 524391 - DNA, 19 bp, Mus musculus
  siRNA target sequence for Stab2 (NM_138673.1,3790-3808).
caatgaccagctgtatgta

SEQ ID NO: 524392 - DNA, 19 bp, Mus musculus
  siRNA target sequence for Stab2 (NM_138673.1,3889-3907).
gaagaataggtgtgacaat

SEQ ID NO: 524393 - DNA, 19 bp, Mus musculus
  siRNA target sequence for Stab2 (NM_138673.1,3892-3910).
gaataggtgtgacaataat

SEQ ID NO: 524394 - DNA, 19 bp, Mus musculus
  siRNA target sequence for Stab2 (NM_138673.1,3970-3988).
cgagacaaaaccacttagt

SEQ ID NO: 524395 - DNA, 19 bp, Mus musculus
  siRNA target sequence for Stab2 (NM_138673.1,3983-4001).
cttagtgagacgaggaaat

SEQ ID NO: 524396 - DNA, 19 bp, Mus musculus
  siRNA target sequence for Stab2 (NM_138673.1,3987-4005).
gtgagacgaggaaatgcat

SEQ ID NO: 524397 - DNA, 19 bp, Mus musculus
  siRNA target sequence for Stab2 (NM_138673.1,3991-4009).
gacgaggaaatgcatctat

SEQ ID NO: 524398 - DNA, 19 bp, Mus musculus
  siRNA target sequence for Stab2 (NM_138673.1,4002-4020).
gcatctattccgtttactt

SEQ ID NO: 524399 - DNA, 19 bp, Mus musculus
  siRNA target sequence for Stab2 (NM_138673.1,4247-4265).
gggaagtatggtattcact

SEQ ID NO: 524400 - DNA, 19 bp, Mus musculus
  siRNA target sequence for Stab2 (NM_138673.1,4436-4454).
ggcaaagcctcgtgcaaat

SEQ ID NO: 524401 - DNA, 19 bp, Mus musculus
  siRNA target sequence for Stab2 (NM_138673.1,4483-4501).
ggtctgcacagccatcaat

SEQ ID NO: 524402 - DNA, 19 bp, Mus musculus
  siRNA target sequence for Stab2 (NM_138673.1,4532-4550).
gccaaggctgactgtaaga

SEQ ID NO: 524403 - DNA, 19 bp, Mus musculus
  siRNA target sequence for Stab2 (NM_138673.1,4605-4623).
gcatcgtgtgcctcgaaat

SEQ ID NO: 524404 - DNA, 19 bp, Mus musculus
  siRNA target sequence for Stab2 (NM_138673.1,4747-4765).
catcaacgtctgcttaact

SEQ ID NO: 524405 - DNA, 19 bp, Mus musculus
  siRNA target sequence for Stab2 (NM_138673.1,4750-4768).
caacgtctgcttaactaat

SEQ ID NO: 524406 - DNA, 19 bp, Mus musculus
  siRNA target sequence for Stab2 (NM_138673.1,4811-4829).
caagatcaaaggacatgta

SEQ ID NO: 524407 - DNA, 19 bp, Mus musculus
  siRNA target sequence for Stab2 (NM_138673.1,4901-4919).
ccctcaacgtcccagtatt

SEQ ID NO: 524408 - DNA, 19 bp, Mus musculus
  siRNA target sequence for Stab2 (NM_138673.1,4902-4920).
cctcaacgtcccagtattt

SEQ ID NO: 524409 - DNA, 19 bp, Mus musculus
  siRNA target sequence for Stab2 (NM_138673.1,5005-5023).
cagtgagtccaagcttaaa

SEQ ID NO: 524410 - DNA, 19 bp, Mus musculus
  siRNA target sequence for Stab2 (NM_138673.1,5009-5027).
gagtccaagcttaaagtct

SEQ ID NO: 524411 - DNA, 19 bp, Mus musculus
  siRNA target sequence for Stab2 (NM_138673.1,5017-5035).
gcttaaagtctgggataaa

SEQ ID NO: 524412 - DNA, 19 bp, Mus musculus
  siRNA target sequence for Stab2 (NM_138673.1,5087-5105).
ctactgctggagaacctaa

SEQ ID NO: 524413 - DNA, 19 bp, Mus musculus
  siRNA target sequence for Stab2 (NM_138673.1,5194-5212).
ggttctgtccagtgacatt

SEQ ID NO: 524414 - DNA, 19 bp, Mus musculus
  siRNA target sequence for Stab2 (NM_138673.1,5226-5244).
gagtcatccacgtcataga

SEQ ID NO: 524415 - DNA, 19 bp, Mus musculus
  siRNA target sequence for Stab2 (NM_138673.1,5256-5274).
ctccccaaaacttgcttat

SEQ ID NO: 524416 - DNA, 19 bp, Mus musculus
  siRNA target sequence for Stab2 (NM_138673.1,5295-5313).
gcagggttctgctaaacct

SEQ ID NO: 524417 - DNA, 19 bp, Mus musculus
  siRNA target sequence for Stab2 (NM_138673.1,5296-5314).
cagggttctgctaaacctt

SEQ ID NO: 524418 - DNA, 19 bp, Mus musculus
  siRNA target sequence for Stab2 (NM_138673.1,5328-5346).
caaaccatggatataccaa

SEQ ID NO: 524419 - DNA, 19 bp, Mus musculus
  siRNA target sequence for Stab2 (NM_138673.1,5333-5351).
catggatataccaaattca

SEQ ID NO: 524420 - DNA, 19 bp, Mus musculus
  siRNA target sequence for Stab2 (NM_138673.1,5467-5485).
ggacttcctgttcaatgaa

SEQ ID NO: 524421 - DNA, 19 bp, Mus musculus
  siRNA target sequence for Stab2 (NM_138673.1,5651-5669).
ggacaaatgtgcaggatta

SEQ ID NO: 524422 - DNA, 19 bp, Mus musculus
  siRNA target sequence for Stab2 (NM_138673.1,5709-5727).
gcattgactgcctgctaat

SEQ ID NO: 524423 - DNA, 19 bp, Mus musculus
  siRNA target sequence for Stab2 (NM_138673.1,5742-5760).
gtggccgatgtgacacttt

SEQ ID NO: 524424 - DNA, 19 bp, Mus musculus
  siRNA target sequence for Stab2 (NM_138673.1,5744-5762).
ggccgatgtgacactttta

SEQ ID NO: 524425 - DNA, 19 bp, Mus musculus
  siRNA target sequence for Stab2 (NM_138673.1,5746-5764).
ccgatgtgacacttttact

SEQ ID NO: 524426 - DNA, 19 bp, Mus musculus
  siRNA target sequence for Stab2 (NM_138673.1,5747-5765).
cgatgtgacacttttacta

SEQ ID NO: 524427 - DNA, 19 bp, Mus musculus
  siRNA target sequence for Stab2 (NM_138673.1,5755-5773).
cacttttactaccttcaat

SEQ ID NO: 524428 - DNA, 19 bp, Mus musculus
  siRNA target sequence for Stab2 (NM_138673.1,5783-5801).
gaatgtgggagctgtttct

SEQ ID NO: 524429 - DNA, 19 bp, Mus musculus
  siRNA target sequence for Stab2 (NM_138673.1,5931-5949).
ggtgctgcagtggttactt

SEQ ID NO: 524430 - DNA, 19 bp, Mus musculus
  siRNA target sequence for Stab2 (NM_138673.1,5981-5999).
ccagacacaccgtgtaaca

SEQ ID NO: 524431 - DNA, 19 bp, Mus musculus
  siRNA target sequence for Stab2 (NM_138673.1,5982-6000).
cagacacaccgtgtaacaa

SEQ ID NO: 524432 - DNA, 19 bp, Mus musculus
  siRNA target sequence for Stab2 (NM_138673.1,6006-6024).
gcatgtgttatgatcagta

SEQ ID NO: 524433 - DNA, 19 bp, Mus musculus
  siRNA target sequence for Stab2 (NM_138673.1,6035-6053).
ggacagtgccaatgtcata

SEQ ID NO: 524434 - DNA, 19 bp, Mus musculus
  siRNA target sequence for Stab2 (NM_138673.1,6261-6279).
caacctgtatggagaacaa

SEQ ID NO: 524435 - DNA, 19 bp, Mus musculus
  siRNA target sequence for Stab2 (NM_138673.1,6289-6307).
gtgtaacttgaattacgaa

SEQ ID NO: 524436 - DNA, 19 bp, Mus musculus
  siRNA target sequence for Stab2 (NM_138673.1,6304-6322).
cgaaggtgacggaatcaca

SEQ ID NO: 524437 - DNA, 19 bp, Mus musculus
  siRNA target sequence for Stab2 (NM_138673.1,6305-6323).
gaaggtgacggaatcacat

SEQ ID NO: 524438 - DNA, 19 bp, Mus musculus
  siRNA target sequence for Stab2 (NM_138673.1,6321-6339).
catgcacagtcgtggattt

SEQ ID NO: 524439 - DNA, 19 bp, Mus musculus
  siRNA target sequence for Stab2 (NM_138673.1,6463-6481).
ctgtgcaaacggtgtcaat

SEQ ID NO: 524440 - DNA, 19 bp, Mus musculus
  siRNA target sequence for Stab2 (NM_138673.1,6529-6547).
gcagaagtgtgaatgtaaa

SEQ ID NO: 524441 - DNA, 19 bp, Mus musculus
  siRNA target sequence for Stab2 (NM_138673.1,6669-6687).
ctactgttggcgtattcca

SEQ ID NO: 524442 - DNA, 19 bp, Mus musculus
  siRNA target sequence for Stab2 (NM_138673.1,6701-6719).
ctgggccagtacaaactga

SEQ ID NO: 524443 - DNA, 19 bp, Mus musculus
  siRNA target sequence for Stab2 (NM_138673.1,6705-6723).
gccagtacaaactgacatt

SEQ ID NO: 524444 - DNA, 19 bp, Mus musculus
  siRNA target sequence for Stab2 (NM_138673.1,6706-6724).
ccagtacaaactgacattt

SEQ ID NO: 524445 - DNA, 19 bp, Mus musculus
  siRNA target sequence for Stab2 (NM_138673.1,6858-6876).
cgatctacgcctctaagaa

SEQ ID NO: 524446 - DNA, 19 bp, Mus musculus
  siRNA target sequence for Stab2 (NM_138673.1,6859-6877).
gatctacgcctctaagaaa

SEQ ID NO: 524447 - DNA, 19 bp, Mus musculus
  siRNA target sequence for Stab2 (NM_138673.1,6862-6880).
ctacgcctctaagaaatgt

SEQ ID NO: 524448 - DNA, 19 bp, Mus musculus
  siRNA target sequence for Stab2 (NM_138673.1,6915-6933).
ggaccaacaagagtgaaat

SEQ ID NO: 524449 - DNA, 19 bp, Mus musculus
  siRNA target sequence for Stab2 (NM_138673.1,6937-6955).
ggacgtcttctgttacaga

SEQ ID NO: 524450 - DNA, 19 bp, Mus musculus
  siRNA target sequence for Stab2 (NM_138673.1,6938-6956).
gacgtcttctgttacagaa

SEQ ID NO: 524451 - DNA, 19 bp, Mus musculus
  siRNA target sequence for Stab2 (NM_138673.1,6946-6964).
ctgttacagaatgaaagat

SEQ ID NO: 524452 - DNA, 19 bp, Mus musculus
  siRNA target sequence for Stab2 (NM_138673.1,7066-7084).
gacagaggtgctggttttt

SEQ ID NO: 524453 - DNA, 19 bp, Mus musculus
  siRNA target sequence for Stab2 (NM_138673.1,7070-7088).
gaggtgctggttttttcca

SEQ ID NO: 524454 - DNA, 19 bp, Mus musculus
  siRNA target sequence for Stab2 (NM_138673.1,7214-7232).
caccacctcactaatgtca

SEQ ID NO: 524455 - DNA, 19 bp, Mus musculus
  siRNA target sequence for Stab2 (NM_138673.1,7231-7249).
caacgtctccttttacgat

SEQ ID NO: 524456 - DNA, 19 bp, Mus musculus
  siRNA target sequence for Stab2 (NM_138673.1,7383-7401).
ctaacggggttctccatat

SEQ ID NO: 524457 - DNA, 19 bp, Mus musculus
  siRNA target sequence for Stab2 (NM_138673.1,7387-7405).
cggggttctccatatcatt

SEQ ID NO: 524458 - DNA, 19 bp, Mus musculus
  siRNA target sequence for Stab2 (NM_138673.1,7455-7473).
gcctaggaacaggcatatt

SEQ ID NO: 524459 - DNA, 19 bp, Mus musculus
  siRNA target sequence for Stab2 (NM_138673.1,7521-7539).
cctacttccggctaaacca

SEQ ID NO: 524460 - DNA, 19 bp, Mus musculus
  siRNA target sequence for Stab2 (NM_138673.1,7529-7547).
cggctaaaccagagaacaa

SEQ ID NO: 524461 - DNA, 19 bp, Mus musculus
  siRNA target sequence for Stab2 (NM_138673.1,7531-7549).
gctaaaccagagaacaact

SEQ ID NO: 524462 - DNA, 19 bp, Mus musculus
  siRNA target sequence for Stab2 (NM_138673.1,7548-7566).
ctggcttccggcgttttga

SEQ ID NO: 524463 - DNA, 19 bp, Mus musculus
  siRNA target sequence for Stab2 (NM_138673.1,7550-7568).
ggcttccggcgttttgagt

SEQ ID NO: 524464 - DNA, 19 bp, Mus musculus
  siRNA target sequence for Svil (NM_153153.1,88-106).
ctaggcgcttagaaggaat

SEQ ID NO: 524465 - DNA, 19 bp, Mus musculus
  siRNA target sequence for Svil (NM_153153.1,91-109).
ggcgcttagaaggaataga

SEQ ID NO: 524466 - DNA, 19 bp, Mus musculus
  siRNA target sequence for Svil (NM_153153.1,157-175).
ctcatcggctgctagaaga

SEQ ID NO: 524467 - DNA, 19 bp, Mus musculus
  siRNA target sequence for Svil (NM_153153.1,206-224).
ccctgcaagccctcatatt

SEQ ID NO: 524468 - DNA, 19 bp, Mus musculus
  siRNA target sequence for Svil (NM_153153.1,256-274).
ggtcctccctagaaaagca

SEQ ID NO: 524469 - DNA, 19 bp, Mus musculus
  siRNA target sequence for Svil (NM_153153.1,273-291).
caaactccttctaaatact

SEQ ID NO: 524470 - DNA, 19 bp, Mus musculus
  siRNA target sequence for Svil (NM_153153.1,297-315).
gaaacctcaggcatccata

SEQ ID NO: 524471 - DNA, 19 bp, Mus musculus
  siRNA target sequence for Svil (NM_153153.1,355-373).
cggaaaggatcgcaagata

SEQ ID NO: 524472 - DNA, 19 bp, Mus musculus
  siRNA target sequence for Svil (NM_153153.1,357-375).
gaaaggatcgcaagataca

SEQ ID NO: 524473 - DNA, 19 bp, Mus musculus
  siRNA target sequence for Svil (NM_153153.1,485-503).
gactgagagacgaggaaaa

SEQ ID NO: 524474 - DNA, 19 bp, Mus musculus
  siRNA target sequence for Svil (NM_153153.1,601-619).
ccccgctgggaagcaatat

SEQ ID NO: 524475 - DNA, 19 bp, Mus musculus
  siRNA target sequence for Svil (NM_153153.1,882-900).
ggcgatacaccttcactta

SEQ ID NO: 524476 - DNA, 19 bp, Mus musculus
  siRNA target sequence for Svil (NM_153153.1,883-901).
gcgatacaccttcacttat

SEQ ID NO: 524477 - DNA, 19 bp, Mus musculus
  siRNA target sequence for Svil (NM_153153.1,885-903).
gatacaccttcacttatca

SEQ ID NO: 524478 - DNA, 19 bp, Mus musculus
  siRNA target sequence for Svil (NM_153153.1,972-990).
ctcacctcagagtccttaa

SEQ ID NO: 524479 - DNA, 19 bp, Mus musculus
  siRNA target sequence for Svil (NM_153153.1,974-992).
cacctcagagtccttaact

SEQ ID NO: 524480 - DNA, 19 bp, Mus musculus
  siRNA target sequence for Svil (NM_153153.1,1028-1046).
gcctatccagtcagaaagt

SEQ ID NO: 524481 - DNA, 19 bp, Mus musculus
  siRNA target sequence for Svil (NM_153153.1,1029-1047).
cctatccagtcagaaagtt

SEQ ID NO: 524482 - DNA, 19 bp, Mus musculus
  siRNA target sequence for Svil (NM_153153.1,1189-1207).
ggtcagccaccccaaaagt

SEQ ID NO: 524483 - DNA, 19 bp, Mus musculus
  siRNA target sequence for Svil (NM_153153.1,1190-1208).
gtcagccaccccaaaagtt

SEQ ID NO: 524484 - DNA, 19 bp, Mus musculus
  siRNA target sequence for Svil (NM_153153.1,1192-1210).
cagccaccccaaaagttat

SEQ ID NO: 524485 - DNA, 19 bp, Mus musculus
  siRNA target sequence for Svil (NM_153153.1,1200-1218).
ccaaaagttataaaatcta

SEQ ID NO: 524486 - DNA, 19 bp, Mus musculus
  siRNA target sequence for Svil (NM_153153.1,1216-1234).
ctaccaccttgaagattct

SEQ ID NO: 524487 - DNA, 19 bp, Mus musculus
  siRNA target sequence for Svil (NM_153153.1,1265-1283).
ccatatttgtgagtcaaaa

SEQ ID NO: 524488 - DNA, 19 bp, Mus musculus
  siRNA target sequence for Svil (NM_153153.1,1358-1376).
cgtgagaggccacaaagat

SEQ ID NO: 524489 - DNA, 19 bp, Mus musculus
  siRNA target sequence for Svil (NM_153153.1,1377-1395).
ccctctggtaataaagact

SEQ ID NO: 524490 - DNA, 19 bp, Mus musculus
  siRNA target sequence for Svil (NM_153153.1,1378-1396).
cctctggtaataaagactt

SEQ ID NO: 524491 - DNA, 19 bp, Mus musculus
  siRNA target sequence for Svil (NM_153153.1,1415-1433).
ctccatcgatgtagaatct

SEQ ID NO: 524492 - DNA, 19 bp, Mus musculus
  siRNA target sequence for Svil (NM_153153.1,1438-1456).
gggagcggcaagttcaaca

SEQ ID NO: 524493 - DNA, 19 bp, Mus musculus
  siRNA target sequence for Svil (NM_153153.1,1474-1492).
ctggccggagtgaaatgct

SEQ ID NO: 524494 - DNA, 19 bp, Mus musculus
  siRNA target sequence for Svil (NM_153153.1,1531-1549).
cattgaccagtcacacaaa

SEQ ID NO: 524495 - DNA, 19 bp, Mus musculus
  siRNA target sequence for Svil (NM_153153.1,1584-1602).
cgctctctgtcagattaca

SEQ ID NO: 524496 - DNA, 19 bp, Mus musculus
  siRNA target sequence for Svil (NM_153153.1,1730-1748).
cgcccagctccgaaacata

SEQ ID NO: 524497 - DNA, 19 bp, Mus musculus
  siRNA target sequence for Svil (NM_153153.1,1731-1749).
gcccagctccgaaacatat

SEQ ID NO: 524498 - DNA, 19 bp, Mus musculus
  siRNA target sequence for Svil (NM_153153.1,1732-1750).
cccagctccgaaacatatt

SEQ ID NO: 524499 - DNA, 19 bp, Mus musculus
  siRNA target sequence for Svil (NM_153153.1,1733-1751).
ccagctccgaaacatattt

SEQ ID NO: 524500 - DNA, 19 bp, Mus musculus
  siRNA target sequence for Svil (NM_153153.1,1869-1887).
ctttctcctggtgaaagta

SEQ ID NO: 524501 - DNA, 19 bp, Mus musculus
  siRNA target sequence for Svil (NM_153153.1,1903-1921).
gatttagaactcaacctat

SEQ ID NO: 524502 - DNA, 19 bp, Mus musculus
  siRNA target sequence for Svil (NM_153153.1,1952-1970).
gtacccttctggttcagaa

SEQ ID NO: 524503 - DNA, 19 bp, Mus musculus
  siRNA target sequence for Svil (NM_153153.1,1975-1993).
cagtggtcgaggatgaaga

SEQ ID NO: 524504 - DNA, 19 bp, Mus musculus
  siRNA target sequence for Svil (NM_153153.1,2028-2046).
gccaagaggctgcttttca

SEQ ID NO: 524505 - DNA, 19 bp, Mus musculus
  siRNA target sequence for Svil (NM_153153.1,2174-2192).
ggtcattgcagctactgaa

SEQ ID NO: 524506 - DNA, 19 bp, Mus musculus
  siRNA target sequence for Svil (NM_153153.1,2443-2461).
ccacccgaaacagaataga

SEQ ID NO: 524507 - DNA, 19 bp, Mus musculus
  siRNA target sequence for Svil (NM_153153.1,2597-2615).
ggttgctcccacatatgca

SEQ ID NO: 524508 - DNA, 19 bp, Mus musculus
  siRNA target sequence for Svil (NM_153153.1,2621-2639).
ccttcggaagctatctgtt

SEQ ID NO: 524509 - DNA, 19 bp, Mus musculus
  siRNA target sequence for Svil (NM_153153.1,2648-2666).
cacaagtgccactgactat

SEQ ID NO: 524510 - DNA, 19 bp, Mus musculus
  siRNA target sequence for Svil (NM_153153.1,2650-2668).
caagtgccactgactataa

SEQ ID NO: 524511 - DNA, 19 bp, Mus musculus
  siRNA target sequence for Svil (NM_153153.1,2817-2835).
gaagacagtggcgttcaaa

SEQ ID NO: 524512 - DNA, 19 bp, Mus musculus
  siRNA target sequence for Svil (NM_153153.1,2930-2948).
cctaaggaggggaagctta

SEQ ID NO: 524513 - DNA, 19 bp, Mus musculus
  siRNA target sequence for Svil (NM_153153.1,3230-3248).
gaacccttgtgccatgttt

SEQ ID NO: 524514 - DNA, 19 bp, Mus musculus
  siRNA target sequence for Svil (NM_153153.1,3234-3252).
ccttgtgccatgtttgctt

SEQ ID NO: 524515 - DNA, 19 bp, Mus musculus
  siRNA target sequence for Svil (NM_153153.1,3288-3306).
ctggattcacccagcaaaa

SEQ ID NO: 524516 - DNA, 19 bp, Mus musculus
  siRNA target sequence for Svil (NM_153153.1,3297-3315).
cccagcaaaaccatgtcaa

SEQ ID NO: 524517 - DNA, 19 bp, Mus musculus
  siRNA target sequence for Svil (NM_153153.1,3470-3488).
gagccagatgacgattgaa

SEQ ID NO: 524518 - DNA, 19 bp, Mus musculus
  siRNA target sequence for Svil (NM_153153.1,3472-3490).
gccagatgacgattgaaga

SEQ ID NO: 524519 - DNA, 19 bp, Mus musculus
  siRNA target sequence for Svil (NM_153153.1,3658-3676).
gcactaccccggtttccaa

SEQ ID NO: 524520 - DNA, 19 bp, Mus musculus
  siRNA target sequence for Svil (NM_153153.1,3659-3677).
cactaccccggtttccaaa

SEQ ID NO: 524521 - DNA, 19 bp, Mus musculus
  siRNA target sequence for Svil (NM_153153.1,3674-3692).
caaacccttggaagatatt

SEQ ID NO: 524522 - DNA, 19 bp, Mus musculus
  siRNA target sequence for Svil (NM_153153.1,3749-3767).
cttcctaaggaggctaaat

SEQ ID NO: 524523 - DNA, 19 bp, Mus musculus
  siRNA target sequence for Svil (NM_153153.1,3802-3820).
cggtcactggcaaatctgt

SEQ ID NO: 524524 - DNA, 19 bp, Mus musculus
  siRNA target sequence for Svil (NM_153153.1,3929-3947).
cattttcgacccttatgct

SEQ ID NO: 524525 - DNA, 19 bp, Mus musculus
  siRNA target sequence for Svil (NM_153153.1,4067-4085).
cacagagcaaaggctaaat

SEQ ID NO: 524526 - DNA, 19 bp, Mus musculus
  siRNA target sequence for Svil (NM_153153.1,4196-4214).
caacctgaggagtgtcaat

SEQ ID NO: 524527 - DNA, 19 bp, Mus musculus
  siRNA target sequence for Svil (NM_153153.1,4200-4218).
ctgaggagtgtcaatctga

SEQ ID NO: 524528 - DNA, 19 bp, Mus musculus
  siRNA target sequence for Svil (NM_153153.1,4240-4258).
gcgcgatgccctacaagaa

SEQ ID NO: 524529 - DNA, 19 bp, Mus musculus
  siRNA target sequence for Svil (NM_153153.1,4260-4278).
ctcatgctgttgcagatta

SEQ ID NO: 524530 - DNA, 19 bp, Mus musculus
  siRNA target sequence for Svil (NM_153153.1,4262-4280).
catgctgttgcagattaaa

SEQ ID NO: 524531 - DNA, 19 bp, Mus musculus
  siRNA target sequence for Svil (NM_153153.1,4265-4283).
gctgttgcagattaaagga

SEQ ID NO: 524532 - DNA, 19 bp, Mus musculus
  siRNA target sequence for Svil (NM_153153.1,4423-4441).
ctgaacttgcaacgttaat

SEQ ID NO: 524533 - DNA, 19 bp, Mus musculus
  siRNA target sequence for Svil (NM_153153.1,4428-4446).
cttgcaacgttaattcaga

SEQ ID NO: 524534 - DNA, 19 bp, Mus musculus
  siRNA target sequence for Svil (NM_153153.1,4432-4450).
caacgttaattcagacaaa

SEQ ID NO: 524535 - DNA, 19 bp, Mus musculus
  siRNA target sequence for Svil (NM_153153.1,4462-4480).
gttgtagagctacatacat

SEQ ID NO: 524536 - DNA, 19 bp, Mus musculus
  siRNA target sequence for Svil (NM_153153.1,4595-4613).
gtacgagacagccatcata

SEQ ID NO: 524537 - DNA, 19 bp, Mus musculus
  siRNA target sequence for Svil (NM_153153.1,4633-4651).
gcctgacagatgacaaact

SEQ ID NO: 524538 - DNA, 19 bp, Mus musculus
  siRNA target sequence for Svil (NM_153153.1,4721-4739).
gtttgactttggtagtgaa

SEQ ID NO: 524539 - DNA, 19 bp, Mus musculus
  siRNA target sequence for Svil (NM_153153.1,4725-4743).
gactttggtagtgaagttt

SEQ ID NO: 524540 - DNA, 19 bp, Mus musculus
  siRNA target sequence for Svil (NM_153153.1,4768-4786).
cgttagcacaacggaaaat

SEQ ID NO: 524541 - DNA, 19 bp, Mus musculus
  siRNA target sequence for Svil (NM_153153.1,4774-4792).
cacaacggaaaatagcatt

SEQ ID NO: 524542 - DNA, 19 bp, Mus musculus
  siRNA target sequence for Svil (NM_153153.1,4794-4812).
cagctggctaagcacttat

SEQ ID NO: 524543 - DNA, 19 bp, Mus musculus
  siRNA target sequence for Svil (NM_153153.1,4797-4815).
ctggctaagcacttatgga

SEQ ID NO: 524544 - DNA, 19 bp, Mus musculus
  siRNA target sequence for Svil (NM_153153.1,4813-4831).
ggaacggaacctttgacta

SEQ ID NO: 524545 - DNA, 19 bp, Mus musculus
  siRNA target sequence for Svil (NM_153153.1,4814-4832).
gaacggaacctttgactat

SEQ ID NO: 524546 - DNA, 19 bp, Mus musculus
  siRNA target sequence for Svil (NM_153153.1,4902-4920).
cggcctgactgggcaatat

SEQ ID NO: 524547 - DNA, 19 bp, Mus musculus
  siRNA target sequence for Svil (NM_153153.1,4903-4921).
ggcctgactgggcaatatt

SEQ ID NO: 524548 - DNA, 19 bp, Mus musculus
  siRNA target sequence for Svil (NM_153153.1,4904-4922).
gcctgactgggcaatattt

SEQ ID NO: 524549 - DNA, 19 bp, Mus musculus
  siRNA target sequence for Svil (NM_153153.1,4908-4926).
gactgggcaatatttggaa

SEQ ID NO: 524550 - DNA, 19 bp, Mus musculus
  siRNA target sequence for Svil (NM_153153.1,4914-4932).
gcaatatttggaagagtta

SEQ ID NO: 524551 - DNA, 19 bp, Mus musculus
  siRNA target sequence for Svil (NM_153153.1,4927-4945).
gagttacggagcacaatga

SEQ ID NO: 524552 - DNA, 19 bp, Mus musculus
  siRNA target sequence for Svil (NM_153153.1,4929-4947).
gttacggagcacaatgaga

SEQ ID NO: 524553 - DNA, 19 bp, Mus musculus
  siRNA target sequence for Svil (NM_153153.1,4933-4951).
cggagcacaatgagactat

SEQ ID NO: 524554 - DNA, 19 bp, Mus musculus
  siRNA target sequence for Svil (NM_153153.1,4934-4952).
ggagcacaatgagactatt

SEQ ID NO: 524555 - DNA, 19 bp, Mus musculus
  siRNA target sequence for Svil (NM_153153.1,4938-4956).
cacaatgagactattctgt

SEQ ID NO: 524556 - DNA, 19 bp, Mus musculus
  siRNA target sequence for Svil (NM_153153.1,4955-4973).
gttcaaagagaaattcctt

SEQ ID NO: 524557 - DNA, 19 bp, Mus musculus
  siRNA target sequence for Svil (NM_153153.1,5003-5021).
gaagaattctggagaagtt

SEQ ID NO: 524558 - DNA, 19 bp, Mus musculus
  siRNA target sequence for Svil (NM_153153.1,5047-5065).
ccgacgtcaagccttatga

SEQ ID NO: 524559 - DNA, 19 bp, Mus musculus
  siRNA target sequence for Svil (NM_153153.1,5048-5066).
cgacgtcaagccttatgat

SEQ ID NO: 524560 - DNA, 19 bp, Mus musculus
  siRNA target sequence for Svil (NM_153153.1,5079-5097).
gtggcgacgccccagatta

SEQ ID NO: 524561 - DNA, 19 bp, Mus musculus
  siRNA target sequence for Svil (NM_153153.1,5081-5099).
ggcgacgccccagattaca

SEQ ID NO: 524562 - DNA, 19 bp, Mus musculus
  siRNA target sequence for Svil (NM_153153.1,5344-5362).
gagtggctggcaaagagaa

SEQ ID NO: 524563 - DNA, 19 bp, Mus musculus
  siRNA target sequence for Svil (NM_153153.1,5665-5683).
ccatggtcgttctgaatat

SEQ ID NO: 524564 - DNA, 19 bp, Mus musculus
  siRNA target sequence for Svil (NM_153153.1,5666-5684).
catggtcgttctgaatata

SEQ ID NO: 524565 - DNA, 19 bp, Mus musculus
  siRNA target sequence for Svil (NM_153153.1,5804-5822).
cagcagcaacgtgacaata

SEQ ID NO: 524566 - DNA, 19 bp, Mus musculus
  siRNA target sequence for Svil (NM_153153.1,5806-5824).
gcagcaacgtgacaataca

SEQ ID NO: 524567 - DNA, 19 bp, Mus musculus
  siRNA target sequence for Svil (NM_153153.1,5807-5825).
cagcaacgtgacaatacat

SEQ ID NO: 524568 - DNA, 19 bp, Mus musculus
  siRNA target sequence for Svil (NM_153153.1,5809-5827).
gcaacgtgacaatacatga

SEQ ID NO: 524569 - DNA, 19 bp, Mus musculus
  siRNA target sequence for Svil (NM_153153.1,5907-5925).
caagatcctggaagtttta

SEQ ID NO: 524570 - DNA, 19 bp, Mus musculus
  siRNA target sequence for Svil (NM_153153.1,5910-5928).
gatcctggaagttttaact

SEQ ID NO: 524571 - DNA, 19 bp, Mus musculus
  siRNA target sequence for Svil (NM_153153.1,6118-6136).
ggcccactgaaaacaagat

SEQ ID NO: 524572 - DNA, 19 bp, Mus musculus
  siRNA target sequence for Svil (NM_153153.1,6119-6137).
gcccactgaaaacaagata

SEQ ID NO: 524573 - DNA, 19 bp, Mus musculus
  siRNA target sequence for Svil (NM_153153.1,6120-6138).
cccactgaaaacaagataa

SEQ ID NO: 524574 - DNA, 19 bp, Mus musculus
  siRNA target sequence for Svil (NM_153153.1,6200-6218).
gtactgccgaggaaagaat

SEQ ID NO: 524575 - DNA, 19 bp, Mus musculus
  siRNA target sequence for Svil (NM_153153.1,6226-6244).
ggccaccccccaagtctta

SEQ ID NO: 524576 - DNA, 19 bp, Mus musculus
  siRNA target sequence for Svil (NM_153153.1,6236-6254).
caagtcttaccttattcat

SEQ ID NO: 524577 - DNA, 19 bp, Mus musculus
  siRNA target sequence for Svil (NM_153153.1,6259-6277).
ggctagagcccctgacatt

SEQ ID NO: 524578 - DNA, 19 bp, Mus musculus
  siRNA target sequence for Svil (NM_153153.1,6261-6279).
ctagagcccctgacattca

SEQ ID NO: 524579 - DNA, 19 bp, Mus musculus
  siRNA target sequence for Svil (NM_153153.1,6330-6348).
gaaatggatactgaagttt

SEQ ID NO: 524580 - DNA, 19 bp, Mus musculus
  siRNA target sequence for Svil (NM_153153.1,6359-6377).
caccttggtggaagatgta

SEQ ID NO: 524581 - DNA, 19 bp, Mus musculus
  siRNA target sequence for Svil (NM_153153.1,6361-6379).
ccttggtggaagatgtatt

SEQ ID NO: 524582 - DNA, 19 bp, Mus musculus
  siRNA target sequence for Svil (NM_153153.1,6362-6380).
cttggtggaagatgtatta

SEQ ID NO: 524583 - DNA, 19 bp, Mus musculus
  siRNA target sequence for Svil (NM_153153.1,6386-6404).
gctctgtaaaaccatctat

SEQ ID NO: 524584 - DNA, 19 bp, Mus musculus
  siRNA target sequence for Svil (NM_153153.1,6443-6461).
ggtcgaccctctaaagctt

SEQ ID NO: 524585 - DNA, 19 bp, Mus musculus
  siRNA target sequence for Svil (NM_153153.1,6449-6467).
ccctctaaagcttgagatt

SEQ ID NO: 524586 - DNA, 19 bp, Mus musculus
  siRNA target sequence for Svil (NM_153153.1,6450-6468).
cctctaaagcttgagattt

SEQ ID NO: 524587 - DNA, 19 bp, Mus musculus
  siRNA target sequence for Svil (NM_153153.1,6451-6469).
ctctaaagcttgagattta

SEQ ID NO: 524588 - DNA, 19 bp, Mus musculus
  siRNA target sequence for Svil (NM_153153.1,6506-6524).
gtccagagatgaattcaat

SEQ ID NO: 524589 - DNA, 19 bp, Mus musculus
  siRNA target sequence for Svil (NM_178046.2,1330-1348).
ggcgagtatctccttttct

SEQ ID NO: 524590 - DNA, 19 bp, Mus musculus
  siRNA target sequence for Svil (NM_178046.2,1331-1349).
gcgagtatctccttttctt

SEQ ID NO: 524591 - DNA, 19 bp, Mus musculus
  siRNA target sequence for Svil (NM_178046.2,1332-1350).
cgagtatctccttttcttt

SEQ ID NO: 524592 - DNA, 19 bp, Mus musculus
  siRNA target sequence for Syn1 (NM_013680.1,508-526).
gactgggcaaaatacttca

SEQ ID NO: 524593 - DNA, 19 bp, Mus musculus
  siRNA target sequence for Syn1 (NM_013680.1,510-528).
ctgggcaaaatacttcaaa

SEQ ID NO: 524594 - DNA, 19 bp, Mus musculus
  siRNA target sequence for Syn1 (NM_013680.1,702-720).
cttcagcatggcacgtaat

SEQ ID NO: 524595 - DNA, 19 bp, Mus musculus
  siRNA target sequence for Syn1 (NM_013680.1,705-723).
cagcatggcacgtaatgga

SEQ ID NO: 524596 - DNA, 19 bp, Mus musculus
  siRNA target sequence for Syn1 (NM_013680.1,757-775).
gctggaatccccagtgtaa

SEQ ID NO: 524597 - DNA, 19 bp, Mus musculus
  siRNA target sequence for Syn1 (NM_013680.1,760-778).
ggaatccccagtgtaaact

SEQ ID NO: 524598 - DNA, 19 bp, Mus musculus
  siRNA target sequence for Syn1 (NM_013680.1,768-786).
cagtgtaaactctttgcat

SEQ ID NO: 524599 - DNA, 19 bp, Mus musculus
  siRNA target sequence for Syn1 (NM_013680.1,869-887).
ctctgattgatcagacttt

SEQ ID NO: 524600 - DNA, 19 bp, Mus musculus
  siRNA target sequence for Syn1 (NM_013680.1,877-895).
gatcagactttctatccta

SEQ ID NO: 524601 - DNA, 19 bp, Mus musculus
  siRNA target sequence for Syn1 (NM_013680.1,884-902).
ctttctatcctaatcacaa

SEQ ID NO: 524602 - DNA, 19 bp, Mus musculus
  siRNA target sequence for Syn1 (NM_013680.1,923-941).
cataccctgtggttgtgaa

SEQ ID NO: 524603 - DNA, 19 bp, Mus musculus
  siRNA target sequence for Syn1 (NM_013680.1,942-960).
gatgggccacgcacattct

SEQ ID NO: 524604 - DNA, 19 bp, Mus musculus
  siRNA target sequence for Syn1 (NM_013680.1,1015-1033).
gttgtggcactgactaaga

SEQ ID NO: 524605 - DNA, 19 bp, Mus musculus
  siRNA target sequence for Syn1 (NM_013680.1,1018-1036).
gtggcactgactaagacat

SEQ ID NO: 524606 - DNA, 19 bp, Mus musculus
  siRNA target sequence for Syn1 (NM_013680.1,1050-1068).
gcccttcattgatgctaaa

SEQ ID NO: 524607 - DNA, 19 bp, Mus musculus
  siRNA target sequence for Syn1 (NM_013680.1,1207-1225).
gacacgtgctcagagattt

SEQ ID NO: 524608 - DNA, 19 bp, Mus musculus
  siRNA target sequence for Syn1 (NM_013680.1,1209-1227).
cacgtgctcagagattttt

SEQ ID NO: 524609 - DNA, 19 bp, Mus musculus
  siRNA target sequence for Syn1 (NM_013680.1,1270-1288).
gacggaagggatcacatta

SEQ ID NO: 524610 - DNA, 19 bp, Mus musculus
  siRNA target sequence for Syn1 (NM_013680.1,1274-1292).
gaagggatcacattattga

SEQ ID NO: 524611 - DNA, 19 bp, Mus musculus
  siRNA target sequence for Syn1 (NM_013680.1,1360-1378).
cttgtggtcaacaagatga

SEQ ID NO: 524612 - DNA, 19 bp, Mus musculus
  siRNA target sequence for Syn1 (NM_013680.1,1823-1841).
ctacccgtcaggcatctat

SEQ ID NO: 524613 - DNA, 19 bp, Mus musculus
  siRNA target sequence for Tln (NM_011602.2,166-184).
gcgctttcgctgaagatta

SEQ ID NO: 524614 - DNA, 19 bp, Mus musculus
  siRNA target sequence for Tln (NM_011602.2,169-187).
ctttcgctgaagattagca

SEQ ID NO: 524615 - DNA, 19 bp, Mus musculus
  siRNA target sequence for Tln (NM_011602.2,198-216).
ggtgaagacgatgcaattt

SEQ ID NO: 524616 - DNA, 19 bp, Mus musculus
  siRNA target sequence for Tln (NM_011602.2,237-255).
cgacgcctgccgcatgatt

SEQ ID NO: 524617 - DNA, 19 bp, Mus musculus
  siRNA target sequence for Tln (NM_011602.2,353-371).
ggaaagctttggactacta

SEQ ID NO: 524618 - DNA, 19 bp, Mus musculus
  siRNA target sequence for Tln (NM_011602.2,420-438).
cctgaagatccggatgtta

SEQ ID NO: 524619 - DNA, 19 bp, Mus musculus
  siRNA target sequence for Tln (NM_011602.2,439-457).
gacggaacggtgaagacta

SEQ ID NO: 524620 - DNA, 19 bp, Mus musculus
  siRNA target sequence for Tln (NM_011602.2,442-460).
ggaacggtgaagactatca

SEQ ID NO: 524621 - DNA, 19 bp, Mus musculus
  siRNA target sequence for Tln (NM_011602.2,443-461).
gaacggtgaagactatcat

SEQ ID NO: 524622 - DNA, 19 bp, Mus musculus
  siRNA target sequence for Tln (NM_011602.2,487-505).
gacatgctcatgaccattt

SEQ ID NO: 524623 - DNA, 19 bp, Mus musculus
  siRNA target sequence for Tln (NM_011602.2,518-536).
gtatcaccaaccatgatga

SEQ ID NO: 524624 - DNA, 19 bp, Mus musculus
  siRNA target sequence for Tln (NM_011602.2,582-600).
gacagggaccctgagaaaa

SEQ ID NO: 524625 - DNA, 19 bp, Mus musculus
  siRNA target sequence for Tln (NM_011602.2,584-602).
cagggaccctgagaaaaga

SEQ ID NO: 524626 - DNA, 19 bp, Mus musculus
  siRNA target sequence for Tln (NM_011602.2,610-628).
ctactgcgagatgaaaaga

SEQ ID NO: 524627 - DNA, 19 bp, Mus musculus
  siRNA target sequence for Tln (NM_011602.2,736-754).
ctgcggagaaagttcttct

SEQ ID NO: 524628 - DNA, 19 bp, Mus musculus
  siRNA target sequence for Tln (NM_011602.2,739-757).
cggagaaagttcttctact

SEQ ID NO: 524629 - DNA, 19 bp, Mus musculus
  siRNA target sequence for Tln (NM_011602.2,897-915).
gtttggacctcacaatgaa

SEQ ID NO: 524630 - DNA, 19 bp, Mus musculus
  siRNA target sequence for Tln (NM_011602.2,981-999).
gggagagcgtaagatcttt

SEQ ID NO: 524631 - DNA, 19 bp, Mus musculus
  siRNA target sequence for Tln (NM_011602.2,983-1001).
gagagcgtaagatctttca

SEQ ID NO: 524632 - DNA, 19 bp, Mus musculus
  siRNA target sequence for Tln (NM_011602.2,1019-1037).
ggcagatgagtgaaattga

SEQ ID NO: 524633 - DNA, 19 bp, Mus musculus
  siRNA target sequence for Tln (NM_011602.2,1063-1081).
gcccgttccctcaagactt

SEQ ID NO: 524634 - DNA, 19 bp, Mus musculus
  siRNA target sequence for Tln (NM_011602.2,1240-1258).
gcctctcccaagagcttta

SEQ ID NO: 524635 - DNA, 19 bp, Mus musculus
  siRNA target sequence for Tln (NM_011602.2,1242-1260).
ctctcccaagagctttact

SEQ ID NO: 524636 - DNA, 19 bp, Mus musculus
  siRNA target sequence for Tln (NM_011602.2,1396-1414).
ggagatgaagagtctacta

SEQ ID NO: 524637 - DNA, 19 bp, Mus musculus
  siRNA target sequence for Tln (NM_011602.2,1397-1415).
gagatgaagagtctactat

SEQ ID NO: 524638 - DNA, 19 bp, Mus musculus
  siRNA target sequence for Tln (NM_011602.2,1638-1656).
ggcgctcactggaaccatt

SEQ ID NO: 524639 - DNA, 19 bp, Mus musculus
  siRNA target sequence for Tln (NM_011602.2,1639-1657).
gcgctcactggaaccatta

SEQ ID NO: 524640 - DNA, 19 bp, Mus musculus
  siRNA target sequence for Tln (NM_011602.2,1640-1658).
cgctcactggaaccattaa

SEQ ID NO: 524641 - DNA, 19 bp, Mus musculus
  siRNA target sequence for Tln (NM_011602.2,1732-1750).
gatgctgcctccaaagctt

SEQ ID NO: 524642 - DNA, 19 bp, Mus musculus
  siRNA target sequence for Tln (NM_011602.2,1748-1766).
cttggcgtaagaacaagat

SEQ ID NO: 524643 - DNA, 19 bp, Mus musculus
  siRNA target sequence for Tln (NM_011602.2,1922-1940).
cccgtggggtgaagctatt

SEQ ID NO: 524644 - DNA, 19 bp, Mus musculus
  siRNA target sequence for Tln (NM_011602.2,2250-2268).
gcttcagacccaagtgatt

SEQ ID NO: 524645 - DNA, 19 bp, Mus musculus
  siRNA target sequence for Tln (NM_011602.2,2418-2436).
ctcgcaagcagctacagaa

SEQ ID NO: 524646 - DNA, 19 bp, Mus musculus
  siRNA target sequence for Tln (NM_011602.2,2575-2593).
ctcaccgtcactgaaaaca

SEQ ID NO: 524647 - DNA, 19 bp, Mus musculus
  siRNA target sequence for Tln (NM_011602.2,2579-2597).
ccgtcactgaaaacatctt

SEQ ID NO: 524648 - DNA, 19 bp, Mus musculus
  siRNA target sequence for Tln (NM_011602.2,2660-2678).
cagacctggtcaatgctat

SEQ ID NO: 524649 - DNA, 19 bp, Mus musculus
  siRNA target sequence for Tln (NM_011602.2,3176-3194).
cctcagtgccaacaattca

SEQ ID NO: 524650 - DNA, 19 bp, Mus musculus
  siRNA target sequence for Tln (NM_011602.2,3295-3313).
ggacctttggagatggatt

SEQ ID NO: 524651 - DNA, 19 bp, Mus musculus
  siRNA target sequence for Tln (NM_011602.2,3314-3332).
ctgcactgagtgttgtaca

SEQ ID NO: 524652 - DNA, 19 bp, Mus musculus
  siRNA target sequence for Tln (NM_011602.2,3321-3339).
gagtgttgtacaaaatcta

SEQ ID NO: 524653 - DNA, 19 bp, Mus musculus
  siRNA target sequence for Tln (NM_011602.2,3371-3389).
ctcgagatggcaagcttaa

SEQ ID NO: 524654 - DNA, 19 bp, Mus musculus
  siRNA target sequence for Tln (NM_011602.2,3403-3421).
gaaacaatggagaagtgta

SEQ ID NO: 524655 - DNA, 19 bp, Mus musculus
  siRNA target sequence for Tln (NM_011602.2,3773-3791).
gccaaagagacgtggataa

SEQ ID NO: 524656 - DNA, 19 bp, Mus musculus
  siRNA target sequence for Tln (NM_011602.2,3774-3792).
ccaaagagacgtggataat

SEQ ID NO: 524657 - DNA, 19 bp, Mus musculus
  siRNA target sequence for Tln (NM_011602.2,3848-3866).
caagcacggggacatttca

SEQ ID NO: 524658 - DNA, 19 bp, Mus musculus
  siRNA target sequence for Tln (NM_011602.2,3872-3890).
cacagagccgattgaatga

SEQ ID NO: 524659 - DNA, 19 bp, Mus musculus
  siRNA target sequence for Tln (NM_011602.2,4078-4096).
ggcatatccatgtcttcaa

SEQ ID NO: 524660 - DNA, 19 bp, Mus musculus
  siRNA target sequence for Tln (NM_011602.2,4380-4398).
gactggcatctcccaaaat

SEQ ID NO: 524661 - DNA, 19 bp, Mus musculus
  siRNA target sequence for Tln (NM_011602.2,4478-4496).
ccgcacaggcagcatatct

SEQ ID NO: 524662 - DNA, 19 bp, Mus musculus
  siRNA target sequence for Tln (NM_011602.2,4479-4497).
cgcacaggcagcatatcta

SEQ ID NO: 524663 - DNA, 19 bp, Mus musculus
  siRNA target sequence for Tln (NM_011602.2,4620-4638).
ccaggcccaggtgttatct

SEQ ID NO: 524664 - DNA, 19 bp, Mus musculus
  siRNA target sequence for Tln (NM_011602.2,4632-4650).
gttatctgcagccactatt

SEQ ID NO: 524665 - DNA, 19 bp, Mus musculus
  siRNA target sequence for Tln (NM_011602.2,4660-4678).
cacacatctgcattgtgta

SEQ ID NO: 524666 - DNA, 19 bp, Mus musculus
  siRNA target sequence for Tln (NM_011602.2,4718-4736).
ctgccaagcgccagtttgt

SEQ ID NO: 524667 - DNA, 19 bp, Mus musculus
  siRNA target sequence for Tln (NM_011602.2,4721-4739).
ccaagcgccagtttgtaca

SEQ ID NO: 524668 - DNA, 19 bp, Mus musculus
  siRNA target sequence for Tln (NM_011602.2,4758-4776).
caacagtacagccaatctt

SEQ ID NO: 524669 - DNA, 19 bp, Mus musculus
  siRNA target sequence for Tln (NM_011602.2,4942-4960).
gccatggagcccattgtaa

SEQ ID NO: 524670 - DNA, 19 bp, Mus musculus
  siRNA target sequence for Tln (NM_011602.2,4943-4961).
ccatggagcccattgtaat

SEQ ID NO: 524671 - DNA, 19 bp, Mus musculus
  siRNA target sequence for Tln (NM_011602.2,4947-4965).
ggagcccattgtaatctct

SEQ ID NO: 524672 - DNA, 19 bp, Mus musculus
  siRNA target sequence for Tln (NM_011602.2,5077-5095).
gtctcagattccatcaaga

SEQ ID NO: 524673 - DNA, 19 bp, Mus musculus
  siRNA target sequence for Tln (NM_011602.2,5079-5097).
ctcagattccatcaagaaa

SEQ ID NO: 524674 - DNA, 19 bp, Mus musculus
  siRNA target sequence for Tln (NM_011602.2,5171-5189).
gcttgcgggacctagatca

SEQ ID NO: 524675 - DNA, 19 bp, Mus musculus
  siRNA target sequence for Tln (NM_011602.2,5268-5286).
cactgcagtgcaagaaatt

SEQ ID NO: 524676 - DNA, 19 bp, Mus musculus
  siRNA target sequence for Tln (NM_011602.2,5354-5372).
cccaaatggcccagtactt

SEQ ID NO: 524677 - DNA, 19 bp, Mus musculus
  siRNA target sequence for Tln (NM_011602.2,5355-5373).
ccaaatggcccagtacttt

SEQ ID NO: 524678 - DNA, 19 bp, Mus musculus
  siRNA target sequence for Tln (NM_011602.2,5440-5458).
cttctggaccagactaaaa

SEQ ID NO: 524679 - DNA, 19 bp, Mus musculus
  siRNA target sequence for Tln (NM_011602.2,5443-5461).
ctggaccagactaaaacgt

SEQ ID NO: 524680 - DNA, 19 bp, Mus musculus
  siRNA target sequence for Tln (NM_011602.2,5475-5493).
cttgcagttgctatatact

SEQ ID NO: 524681 - DNA, 19 bp, Mus musculus
  siRNA target sequence for Tln (NM_011602.2,5635-5653).
ggcatggtggactctatca

SEQ ID NO: 524682 - DNA, 19 bp, Mus musculus
  siRNA target sequence for Tln (NM_011602.2,5694-5712).
cccagaaggctcattcgta

SEQ ID NO: 524683 - DNA, 19 bp, Mus musculus
  siRNA target sequence for Tln (NM_011602.2,5698-5716).
gaaggctcattcgtagatt

SEQ ID NO: 524684 - DNA, 19 bp, Mus musculus
  siRNA target sequence for Tln (NM_011602.2,5702-5720).
gctcattcgtagattacca

SEQ ID NO: 524685 - DNA, 19 bp, Mus musculus
  siRNA target sequence for Tln (NM_011602.2,5820-5838).
ccagctgaccagtgactat

SEQ ID NO: 524686 - DNA, 19 bp, Mus musculus
  siRNA target sequence for Tln (NM_011602.2,5892-5910).
gataggcgctcacatcaaa

SEQ ID NO: 524687 - DNA, 19 bp, Mus musculus
  siRNA target sequence for Tln (NM_011602.2,5975-5993).
gtagccccagtgatgtcta

SEQ ID NO: 524688 - DNA, 19 bp, Mus musculus
  siRNA target sequence for Tln (NM_011602.2,6174-6192).
ccgtgagggtgctgaaact

SEQ ID NO: 524689 - DNA, 19 bp, Mus musculus
  siRNA target sequence for Tln (NM_011602.2,6176-6194).
gtgagggtgctgaaacttt

SEQ ID NO: 524690 - DNA, 19 bp, Mus musculus
  siRNA target sequence for Tln (NM_011602.2,6180-6198).
gggtgctgaaacttttgct

SEQ ID NO: 524691 - DNA, 19 bp, Mus musculus
  siRNA target sequence for Tln (NM_011602.2,6201-6219).
ccaccgggagggtatctta

SEQ ID NO: 524692 - DNA, 19 bp, Mus musculus
  siRNA target sequence for Tln (NM_011602.2,6202-6220).
caccgggagggtatcttaa

SEQ ID NO: 524693 - DNA, 19 bp, Mus musculus
  siRNA target sequence for Tln (NM_011602.2,6205-6223).
cgggagggtatcttaaaga

SEQ ID NO: 524694 - DNA, 19 bp, Mus musculus
  siRNA target sequence for Tln (NM_011602.2,6207-6225).
ggagggtatcttaaagaca

SEQ ID NO: 524695 - DNA, 19 bp, Mus musculus
  siRNA target sequence for Tln (NM_011602.2,6625-6643).
gaactggcggtcttctgtt

SEQ ID NO: 524696 - DNA, 19 bp, Mus musculus
  siRNA target sequence for Tln (NM_011602.2,6668-6686).
ctacccctgaagacttcat

SEQ ID NO: 524697 - DNA, 19 bp, Mus musculus
  siRNA target sequence for Tln (NM_011602.2,6746-6764).
gtcgacaggaagatgtcat

SEQ ID NO: 524698 - DNA, 19 bp, Mus musculus
  siRNA target sequence for Tln (NM_011602.2,6881-6899).
gggagtgtgccaatggtta

SEQ ID NO: 524699 - DNA, 19 bp, Mus musculus
  siRNA target sequence for Tln (NM_011602.2,7162-7180).
gcggatgagtccttgaact

SEQ ID NO: 524700 - DNA, 19 bp, Mus musculus
  siRNA target sequence for Tln (NM_011602.2,7361-7379).
ctgcggccaccaacaatct

SEQ ID NO: 524701 - DNA, 19 bp, Mus musculus
  siRNA target sequence for Tln (NM_011602.2,7415-7433).
ctagccaggagaaactcat

SEQ ID NO: 524702 - DNA, 19 bp, Mus musculus
  siRNA target sequence for Tln (NM_011602.2,7556-7574).
cctcagataacctggtaaa

SEQ ID NO: 524703 - DNA, 19 bp, Mus musculus
  siRNA target sequence for Tmod2 (NM_016711.2,268-286).
gagcttcttggcaaactct

SEQ ID NO: 524704 - DNA, 19 bp, Mus musculus
  siRNA target sequence for Tmod2 (NM_016711.2,306-324).
gttggaaaatgttctagat

SEQ ID NO: 524705 - DNA, 19 bp, Mus musculus
  siRNA target sequence for Tmod2 (NM_016711.2,516-534).
ggaaaagcctgtagaaact

SEQ ID NO: 524706 - DNA, 19 bp, Mus musculus
  siRNA target sequence for Tmod2 (NM_016711.2,633-651).
ccacaatttgctcaacaat

SEQ ID NO: 524707 - DNA, 19 bp, Mus musculus
  siRNA target sequence for Tmod2 (NM_016711.2,642-660).
gctcaacaatccgaagttt

SEQ ID NO: 524708 - DNA, 19 bp, Mus musculus
  siRNA target sequence for Tmod2 (NM_016711.2,648-666).
caatccgaagtttgatgaa

SEQ ID NO: 524709 - DNA, 19 bp, Mus musculus
  siRNA target sequence for Tmod2 (NM_016711.2,823-841).
ctcaacaacattaagaaca

SEQ ID NO: 524710 - DNA, 19 bp, Mus musculus
  siRNA target sequence for Tmod2 (NM_016711.2,969-987).
caacaagaccttgaaaagt

SEQ ID NO: 524711 - DNA, 19 bp, Mus musculus
  siRNA target sequence for Tmod2 (NM_016711.2,972-990).
caagaccttgaaaagtcta

SEQ ID NO: 524712 - DNA, 19 bp, Mus musculus
  siRNA target sequence for Tmod2 (NM_016711.2,988-1006).
ctaaacgtagagtccaatt

SEQ ID NO: 524713 - DNA, 19 bp, Mus musculus
  siRNA target sequence for Tmod2 (NM_016711.2,994-1012).
gtagagtccaattttatca

SEQ ID NO: 524714 - DNA, 19 bp, Mus musculus
  siRNA target sequence for Tmod2 (NM_016711.2,1042-1060).
gcgctgcgggagaatgaca

SEQ ID NO: 524715 - DNA, 19 bp, Mus musculus
  siRNA target sequence for Tmod2 (NM_016711.2,1207-1225).
gctgccatcacaaaaaata

SEQ ID NO: 524716 - DNA, 19 bp, Mus musculus
  siRNA target sequence for Tmod2 (NM_016711.2,1208-1226).
ctgccatcacaaaaaataa

SEQ ID NO: 524717 - DNA, 19 bp, Mus musculus
  siRNA target sequence for Tmod3 (NM_016963.1,187-205).
ccgaatcagagctgaaaca

SEQ ID NO: 524718 - DNA, 19 bp, Mus musculus
  siRNA target sequence for Tmod3 (NM_016963.1,291-309).
gccacgggaccctttgata

SEQ ID NO: 524719 - DNA, 19 bp, Mus musculus
  siRNA target sequence for Tmod3 (NM_016963.1,293-311).
cacgggaccctttgataga

SEQ ID NO: 524720 - DNA, 19 bp, Mus musculus
  siRNA target sequence for Tmod3 (NM_016963.1,295-313).
cgggaccctttgatagaga

SEQ ID NO: 524721 - DNA, 19 bp, Mus musculus
  siRNA target sequence for Tmod3 (NM_016963.1,353-371).
caaagaccgggacgattat

SEQ ID NO: 524722 - DNA, 19 bp, Mus musculus
  siRNA target sequence for Tmod3 (NM_016963.1,422-440).
gccagcgcagactcttaca

SEQ ID NO: 524723 - DNA, 19 bp, Mus musculus
  siRNA target sequence for Tmod3 (NM_016963.1,455-473).
cctcgacccagagttagaa

SEQ ID NO: 524724 - DNA, 19 bp, Mus musculus
  siRNA target sequence for Tmod3 (NM_016963.1,508-526).
gcgaccttgcagctattct

SEQ ID NO: 524725 - DNA, 19 bp, Mus musculus
  siRNA target sequence for Tmod3 (NM_016963.1,509-527).
cgaccttgcagctattctt

SEQ ID NO: 524726 - DNA, 19 bp, Mus musculus
  siRNA target sequence for Tmod3 (NM_016963.1,601-619).
gttttcccaatgtggttaa

SEQ ID NO: 524727 - DNA, 19 bp, Mus musculus
  siRNA target sequence for Tmod3 (NM_016963.1,664-682).
ccaacgttgaagagagttt

SEQ ID NO: 524728 - DNA, 19 bp, Mus musculus
  siRNA target sequence for Tmod3 (NM_016963.1,686-704).
gagaattagggaaaacgat

SEQ ID NO: 524729 - DNA, 19 bp, Mus musculus
  siRNA target sequence for Tmod3 (NM_016963.1,701-719).
cgatgcccgtcttgttgaa

SEQ ID NO: 524730 - DNA, 19 bp, Mus musculus
  siRNA target sequence for Tmod3 (NM_016963.1,705-723).
gcccgtcttgttgaagtta

SEQ ID NO: 524731 - DNA, 19 bp, Mus musculus
  siRNA target sequence for Tmod3 (NM_016963.1,706-724).
cccgtcttgttgaagttaa

SEQ ID NO: 524732 - DNA, 19 bp, Mus musculus
  siRNA target sequence for Tmod3 (NM_016963.1,707-725).
ccgtcttgttgaagttaat

SEQ ID NO: 524733 - DNA, 19 bp, Mus musculus
  siRNA target sequence for Tmod3 (NM_016963.1,714-732).
gttgaagttaatttgaata

SEQ ID NO: 524734 - DNA, 19 bp, Mus musculus
  siRNA target sequence for Tmod3 (NM_016963.1,746-764).
cccaattccaactctaaaa

SEQ ID NO: 524735 - DNA, 19 bp, Mus musculus
  siRNA target sequence for Tmod3 (NM_016963.1,788-806).
caacacgcatgtgaaacat

SEQ ID NO: 524736 - DNA, 19 bp, Mus musculus
  siRNA target sequence for Tmod3 (NM_016963.1,914-932).
cacaggcgcaggggtttta

SEQ ID NO: 524737 - DNA, 19 bp, Mus musculus
  siRNA target sequence for Tmod3 (NM_016963.1,945-963).
gctttgagagataatgaga

SEQ ID NO: 524738 - DNA, 19 bp, Mus musculus
  siRNA target sequence for Tmod3 (NM_016963.1,1001-1019).
gttgggcacctcagtagaa

SEQ ID NO: 524739 - DNA, 19 bp, Mus musculus
  siRNA target sequence for Tmod3 (NM_016963.1,1104-1122).
gcagccaacgcgataacga

SEQ ID NO: 524740 - DNA, 19 bp, Mus musculus
  siRNA target sequence for Tmod3 (NM_016963.1,1105-1123).
cagccaacgcgataacgaa

SEQ ID NO: 524741 - DNA, 19 bp, Mus musculus
  siRNA target sequence for Tmod3 (NM_016963.1,1112-1130).
cgcgataacgaagaacaat

SEQ ID NO: 524742 - DNA, 19 bp, Mus musculus
  siRNA target sequence for Tmod3 (NM_016963.1,1114-1132).
cgataacgaagaacaatga

SEQ ID NO: 524743 - DNA, 19 bp, Mus musculus
  siRNA target sequence for Tmod3 (NM_016963.1,1139-1157).
gcgcaagaggcgaattgaa

SEQ ID NO: 524744 - DNA, 19 bp, Mus musculus
  siRNA target sequence for Tmod4 (NM_016712.1,59-77).
gagacatcgacgaagatga

SEQ ID NO: 524745 - DNA, 19 bp, Mus musculus
  siRNA target sequence for Tmod4 (NM_016712.1,118-136).
gactgtgagctacaagaaa

SEQ ID NO: 524746 - DNA, 19 bp, Mus musculus
  siRNA target sequence for Tmod4 (NM_016712.1,173-191).
gacaacgtgaccagacaaa

SEQ ID NO: 524747 - DNA, 19 bp, Mus musculus
  siRNA target sequence for Tmod4 (NM_016712.1,175-193).
caacgtgaccagacaaaga

SEQ ID NO: 524748 - DNA, 19 bp, Mus musculus
  siRNA target sequence for Tmod4 (NM_016712.1,336-354).
cccagcacaggaacagatt

SEQ ID NO: 524749 - DNA, 19 bp, Mus musculus
  siRNA target sequence for Tmod4 (NM_016712.1,381-399).
gctgtcccatgctacagat

SEQ ID NO: 524750 - DNA, 19 bp, Mus musculus
  siRNA target sequence for Tmod4 (NM_016712.1,423-441).
catcctgggcatgtataca

SEQ ID NO: 524751 - DNA, 19 bp, Mus musculus
  siRNA target sequence for Tmod4 (NM_016712.1,444-462).
gatgagcaacaagcaatat

SEQ ID NO: 524752 - DNA, 19 bp, Mus musculus
  siRNA target sequence for Tmod4 (NM_016712.1,516-534).
ggtacagcctgacaagtat

SEQ ID NO: 524753 - DNA, 19 bp, Mus musculus
  siRNA target sequence for Tmod4 (NM_016712.1,517-535).
gtacagcctgacaagtata

SEQ ID NO: 524754 - DNA, 19 bp, Mus musculus
  siRNA target sequence for Tmod4 (NM_016712.1,590-608).
gggtacggagtaatgacaa

SEQ ID NO: 524755 - DNA, 19 bp, Mus musculus
  siRNA target sequence for Tmod4 (NM_016712.1,665-683).
gtgacttgtgtgaagcaat

SEQ ID NO: 524756 - DNA, 19 bp, Mus musculus
  siRNA target sequence for Tmod4 (NM_016712.1,669-687).
cttgtgtgaagcaatgaaa

SEQ ID NO: 524757 - DNA, 19 bp, Mus musculus
  siRNA target sequence for Tmod4 (NM_016712.1,787-805).
cagagcctgaacattgagt

SEQ ID NO: 524758 - DNA, 19 bp, Mus musculus
  siRNA target sequence for Tmod4 (NM_016712.1,791-809).
gcctgaacattgagtctaa

SEQ ID NO: 524759 - DNA, 19 bp, Mus musculus
  siRNA target sequence for Tmod4 (NM_016712.1,846-864).
ggcagttcgggaaaatgct

SEQ ID NO: 524760 - DNA, 19 bp, Mus musculus
  siRNA target sequence for Tmod4 (NM_016712.1,905-923).
ctggtgatgcggtagagat

SEQ ID NO: 524761 - DNA, 19 bp, Mus musculus
  siRNA target sequence for Tmod4 (NM_016712.1,964-982).
cgcttcgggtaccacttta

SEQ ID NO: 524762 - DNA, 19 bp, Mus musculus
  siRNA target sequence for Tmod4 (NM_016712.1,966-984).
cttcgggtaccactttaca

SEQ ID NO: 524763 - DNA, 19 bp, Mus musculus
  siRNA target sequence for Tmod4 (NM_016712.1,969-987).
cgggtaccactttacacaa

SEQ ID NO: 524764 - DNA, 19 bp, Mus musculus
  siRNA target sequence for Tmod4 (NM_016712.1,1014-1032).
cgccatgacccggaacaat

SEQ ID NO: 524765 - DNA, 19 bp, Mus musculus
  siRNA target sequence for Tmod4 (NM_016712.1,1016-1034).
ccatgacccggaacaatga

SEQ ID NO: 524766 - DNA, 19 bp, Mus musculus
  siRNA target sequence for Tmsb4x (NM_021278.1,180-198).
ctgagatcgagaaattcga

SEQ ID NO: 524767 - DNA, 19 bp, Mus musculus
  siRNA target sequence for Tmsb4x (NM_021278.1,182-200).
gagatcgagaaattcgata

SEQ ID NO: 524768 - DNA, 19 bp, Mus musculus
  siRNA target sequence for Tmsb4x (NM_021278.1,197-215).
gataagtcgaagttgaaga

SEQ ID NO: 524769 - DNA, 19 bp, Mus musculus
  siRNA target sequence for Tnni2 (NM_009405.1,327-345).
gacctgaggggcaagttca

SEQ ID NO: 524770 - DNA, 19 bp, Mus musculus
  siRNA target sequence for Tnni3 (NM_009406.2,224-242).
cgagccacacgccaagaaa

SEQ ID NO: 524771 - DNA, 19 bp, Mus musculus
  siRNA target sequence for Tnni3 (NM_009406.2,225-243).
gagccacacgccaagaaaa

SEQ ID NO: 524772 - DNA, 19 bp, Mus musculus
  siRNA target sequence for Tnni3 (NM_009406.2,228-246).
ccacacgccaagaaaaagt

SEQ ID NO: 524773 - DNA, 19 bp, Mus musculus
  siRNA target sequence for Tnni3 (NM_009406.2,231-249).
cacgccaagaaaaagtcta

SEQ ID NO: 524774 - DNA, 19 bp, Mus musculus
  siRNA target sequence for Tnni3 (NM_009406.2,251-269).
gatctccgcctccagaaaa

SEQ ID NO: 524775 - DNA, 19 bp, Mus musculus
  siRNA target sequence for Tnni3 (NM_009406.2,262-280).
ccagaaaacttcagttgaa

SEQ ID NO: 524776 - DNA, 19 bp, Mus musculus
  siRNA target sequence for Tnni3 (NM_009406.2,402-420).
gaagagcttcaggacttat

SEQ ID NO: 524777 - DNA, 19 bp, Mus musculus
  siRNA target sequence for Tnni3 (NM_009406.2,463-481).
gatatgacgtggaagcaaa

SEQ ID NO: 524778 - DNA, 19 bp, Mus musculus
  siRNA target sequence for Tnni3 (NM_009406.2,468-486).
gacgtggaagcaaaagtca

SEQ ID NO: 524779 - DNA, 19 bp, Mus musculus
  siRNA target sequence for Tnni3 (NM_009406.2,695-713).
gggagactggcgcaagaat

SEQ ID NO: 524780 - DNA, 19 bp, Mus musculus
  siRNA target sequence for Tnni3 (NM_009406.2,696-714).
ggagactggcgcaagaata

SEQ ID NO: 524781 - DNA, 19 bp, Mus musculus
  siRNA target sequence for Tnni3 (NM_009406.2,697-715).
gagactggcgcaagaatat

SEQ ID NO: 524782 - DNA, 19 bp, Mus musculus
  siRNA target sequence for Tnni3 (NM_009406.2,739-757).
gccgcaagaaaaagtttga

SEQ ID NO: 524783 - DNA, 19 bp, Mus musculus
  siRNA target sequence for Tpm1 (NM_024427.2,262-280).
ctccgaggctctcaaagat

SEQ ID NO: 524784 - DNA, 19 bp, Mus musculus
  siRNA target sequence for Tpm1 (NM_024427.2,477-495).
gccgagcccaaaaagatga

SEQ ID NO: 524785 - DNA, 19 bp, Mus musculus
  siRNA target sequence for Tpm1 (NM_024427.2,555-573).
ctgaccggaagtatgaaga

SEQ ID NO: 524786 - DNA, 19 bp, Mus musculus
  siRNA target sequence for Tpm1 (NM_024427.2,579-597).
cccgtaagctggtcatcat

SEQ ID NO: 524787 - DNA, 19 bp, Mus musculus
  siRNA target sequence for Tpm1 (NM_024427.2,634-652).
gctctcagaaggcaaatgt

SEQ ID NO: 524788 - DNA, 19 bp, Mus musculus
  siRNA target sequence for Tpm1 (NM_024427.2,678-696).
cggtgacgaacaacttgaa

SEQ ID NO: 524789 - DNA, 19 bp, Mus musculus
  siRNA target sequence for Tpm1 (NM_024427.2,809-827).
gagagatcagtaaccaaat

SEQ ID NO: 524790 - DNA, 19 bp, Mus musculus
  siRNA target sequence for Tpm1 (NM_024427.2,917-935).
ctggagctaaacaacatgt

SEQ ID NO: 524791 - DNA, 19 bp, Mus musculus
  siRNA target sequence for Tpm2 (NM_009416.2,108-126).
ccgaagccgacaaaaagca

SEQ ID NO: 524792 - DNA, 19 bp, Mus musculus
  siRNA target sequence for Tpm2 (NM_009416.2,109-127).
cgaagccgacaaaaagcaa

SEQ ID NO: 524793 - DNA, 19 bp, Mus musculus
  siRNA target sequence for Tpm2 (NM_009416.2,502-520).
ggactcagaccgcaaatat

SEQ ID NO: 524794 - DNA, 19 bp, Mus musculus
  siRNA target sequence for Tpm2 (NM_009416.2,632-650).
gttaccaacaacttgaaat

SEQ ID NO: 524795 - DNA, 19 bp, Mus musculus
  siRNA target sequence for Tpm2 (NM_009416.2,659-677).
gcccaagcggacaagtatt

SEQ ID NO: 524796 - DNA, 19 bp, Mus musculus
  siRNA target sequence for Tpm2 (NM_009416.2,662-680).
caagcggacaagtattcca

SEQ ID NO: 524797 - DNA, 19 bp, Mus musculus
  siRNA target sequence for Tpm2 (NM_009416.2,697-715).
cgaagaagagatcaaactt

SEQ ID NO: 524798 - DNA, 19 bp, Mus musculus
  siRNA target sequence for Tpm2 (NM_009416.2,812-830).
gtctatgcacagaagatga

SEQ ID NO: 524799 - DNA, 19 bp, Mus musculus
  siRNA target sequence for Tpm2 (NM_009416.2,857-875).
gacaacgcactcaatgaca

SEQ ID NO: 524800 - DNA, 19 bp, Mus musculus
  siRNA target sequence for Tpm3 (NM_022314.2,79-97).
gttagacaaagagaatgtt

SEQ ID NO: 524801 - DNA, 19 bp, Mus musculus
  siRNA target sequence for Tpm3 (NM_022314.2,154-172).
gcagctagaggatgaacta

SEQ ID NO: 524802 - DNA, 19 bp, Mus musculus
  siRNA target sequence for Tpm3 (NM_022314.2,206-224).
gatgagctggacaagtatt

SEQ ID NO: 524803 - DNA, 19 bp, Mus musculus
  siRNA target sequence for Tpm3 (NM_022314.2,217-235).
caagtattcggaagcttta

SEQ ID NO: 524804 - DNA, 19 bp, Mus musculus
  siRNA target sequence for Utrn (NM_011682.1,23-41).
ggcagccaccacatttcgt

SEQ ID NO: 524805 - DNA, 19 bp, Mus musculus
  siRNA target sequence for Utrn (NM_011682.1,190-208).
cgataagtctgatgtgtaa

SEQ ID NO: 524806 - DNA, 19 bp, Mus musculus
  siRNA target sequence for Vasp (NM_009499.1,29-47).
gggctactgtgatgcttta

SEQ ID NO: 524807 - DNA, 19 bp, Mus musculus
  siRNA target sequence for Vasp (NM_009499.1,30-48).
ggctactgtgatgctttat

SEQ ID NO: 524808 - DNA, 19 bp, Mus musculus
  siRNA target sequence for Vasp (NM_009499.1,32-50).
ctactgtgatgctttatga

SEQ ID NO: 524809 - DNA, 19 bp, Mus musculus
  siRNA target sequence for Vasp (NM_009499.1,167-185).
cggatcagcaggtggttat

SEQ ID NO: 524810 - DNA, 19 bp, Mus musculus
  siRNA target sequence for Vasp (NM_009499.1,169-187).
gatcagcaggtggttatca

SEQ ID NO: 524811 - DNA, 19 bp, Mus musculus
  siRNA target sequence for Vasp (NM_009499.1,172-190).
cagcaggtggttatcaact

SEQ ID NO: 524812 - DNA, 19 bp, Mus musculus
  siRNA target sequence for Vasp (NM_009499.1,292-310).
gacgccatacagtttgcaa

SEQ ID NO: 524813 - DNA, 19 bp, Mus musculus
  siRNA target sequence for Vcl (NM_009502.3,312-330).
caccagcctttattaaggt

SEQ ID NO: 524814 - DNA, 19 bp, Mus musculus
  siRNA target sequence for Vcl (NM_009502.3,317-335).
gcctttattaaggttgaaa

SEQ ID NO: 524815 - DNA, 19 bp, Mus musculus
  siRNA target sequence for Vcl (NM_009502.3,318-336).
cctttattaaggttgaaaa

SEQ ID NO: 524816 - DNA, 19 bp, Mus musculus
  siRNA target sequence for Vcl (NM_009502.3,319-337).
ctttattaaggttgaaaat

SEQ ID NO: 524817 - DNA, 19 bp, Mus musculus
  siRNA target sequence for Vcl (NM_009502.3,418-436).
cggctctaggggaatcctt

SEQ ID NO: 524818 - DNA, 19 bp, Mus musculus
  siRNA target sequence for Vcl (NM_009502.3,470-488).
gaggctgaggttcgtaaaa

SEQ ID NO: 524819 - DNA, 19 bp, Mus musculus
  siRNA target sequence for Vcl (NM_009502.3,472-490).
ggctgaggttcgtaaaatt

SEQ ID NO: 524820 - DNA, 19 bp, Mus musculus
  siRNA target sequence for Vcl (NM_009502.3,473-491).
gctgaggttcgtaaaatta

SEQ ID NO: 524821 - DNA, 19 bp, Mus musculus
  siRNA target sequence for Vcl (NM_009502.3,476-494).
gaggttcgtaaaattatta

SEQ ID NO: 524822 - DNA, 19 bp, Mus musculus
  siRNA target sequence for Vcl (NM_009502.3,495-513).
gggtttgcaaaggaatttt

SEQ ID NO: 524823 - DNA, 19 bp, Mus musculus
  siRNA target sequence for Vcl (NM_009502.3,530-548).
gcagaggtagtggaaacta

SEQ ID NO: 524824 - DNA, 19 bp, Mus musculus
  siRNA target sequence for Vcl (NM_009502.3,578-596).
cttgggccaggaatgacta

SEQ ID NO: 524825 - DNA, 19 bp, Mus musculus
  siRNA target sequence for Vcl (NM_009502.3,594-612).
ctaagatggccaaaatgat

SEQ ID NO: 524826 - DNA, 19 bp, Mus musculus
  siRNA target sequence for Vcl (NM_009502.3,598-616).
gatggccaaaatgattgat

SEQ ID NO: 524827 - DNA, 19 bp, Mus musculus
  siRNA target sequence for Vcl (NM_009502.3,653-671).
gtgatgttggtgaactcaa

SEQ ID NO: 524828 - DNA, 19 bp, Mus musculus
  siRNA target sequence for Vcl (NM_009502.3,725-743).
gttacaaccaaaaactcaa

SEQ ID NO: 524829 - DNA, 19 bp, Mus musculus
  siRNA target sequence for Vcl (NM_009502.3,764-782).
gctttgaaaaatcgaaatt

SEQ ID NO: 524830 - DNA, 19 bp, Mus musculus
  siRNA target sequence for Vcl (NM_009502.3,814-832).
cgagatcattcgtgtgtta

SEQ ID NO: 524831 - DNA, 19 bp, Mus musculus
  siRNA target sequence for Vcl (NM_009502.3,899-917).
gcgtccatagactccaaat

SEQ ID NO: 524832 - DNA, 19 bp, Mus musculus
  siRNA target sequence for Vcl (NM_009502.3,900-918).
cgtccatagactccaaatt

SEQ ID NO: 524833 - DNA, 19 bp, Mus musculus
  siRNA target sequence for Vcl (NM_009502.3,979-997).
ggccatcaggcagatctta

SEQ ID NO: 524834 - DNA, 19 bp, Mus musculus
  siRNA target sequence for Vcl (NM_009502.3,1270-1288).
gctggcggatccaaatggt

SEQ ID NO: 524835 - DNA, 19 bp, Mus musculus
  siRNA target sequence for Vcl (NM_009502.3,1332-1350).
ctcggaagattgcagaatt

SEQ ID NO: 524836 - DNA, 19 bp, Mus musculus
  siRNA target sequence for Vcl (NM_009502.3,1334-1352).
cggaagattgcagaattat

SEQ ID NO: 524837 - DNA, 19 bp, Mus musculus
  siRNA target sequence for Vcl (NM_009502.3,1384-1402).
ccgctcccttggagagata

SEQ ID NO: 524838 - DNA, 19 bp, Mus musculus
  siRNA target sequence for Vcl (NM_009502.3,1585-1603).
ggcgcagcggtggattgat

SEQ ID NO: 524839 - DNA, 19 bp, Mus musculus
  siRNA target sequence for Vcl (NM_009502.3,1586-1604).
gcgcagcggtggattgata

SEQ ID NO: 524840 - DNA, 19 bp, Mus musculus
  siRNA target sequence for Vcl (NM_009502.3,1587-1605).
cgcagcggtggattgataa

SEQ ID NO: 524841 - DNA, 19 bp, Mus musculus
  siRNA target sequence for Vcl (NM_009502.3,1692-1710).
gaccttatcgccaagatct

SEQ ID NO: 524842 - DNA, 19 bp, Mus musculus
  siRNA target sequence for Vcl (NM_009502.3,1820-1838).
gactccttaaaggatctta

SEQ ID NO: 524843 - DNA, 19 bp, Mus musculus
  siRNA target sequence for Vcl (NM_009502.3,1865-1883).
caagaggtatccgatgttt

SEQ ID NO: 524844 - DNA, 19 bp, Mus musculus
  siRNA target sequence for Vcl (NM_009502.3,1868-1886).
gaggtatccgatgttttca

SEQ ID NO: 524845 - DNA, 19 bp, Mus musculus
  siRNA target sequence for Vcl (NM_009502.3,1877-1895).
gatgttttcagcgatacta

SEQ ID NO: 524846 - DNA, 19 bp, Mus musculus
  siRNA target sequence for Vcl (NM_009502.3,1880-1898).
gttttcagcgatactacaa

SEQ ID NO: 524847 - DNA, 19 bp, Mus musculus
  siRNA target sequence for Vcl (NM_009502.3,1948-1966).
caatagggaagaggtattt

SEQ ID NO: 524848 - DNA, 19 bp, Mus musculus
  siRNA target sequence for Vcl (NM_009502.3,2034-2052).
ctgttggtactgccaataa

SEQ ID NO: 524849 - DNA, 19 bp, Mus musculus
  siRNA target sequence for Vcl (NM_009502.3,2036-2054).
gttggtactgccaataaat

SEQ ID NO: 524850 - DNA, 19 bp, Mus musculus
  siRNA target sequence for Vcl (NM_009502.3,2039-2057).
ggtactgccaataaatcga

SEQ ID NO: 524851 - DNA, 19 bp, Mus musculus
  siRNA target sequence for Vcl (NM_009502.3,2116-2134).
ctccgctgctcggatctta

SEQ ID NO: 524852 - DNA, 19 bp, Mus musculus
  siRNA target sequence for Vcl (NM_009502.3,2118-2136).
ccgctgctcggatcttact

SEQ ID NO: 524853 - DNA, 19 bp, Mus musculus
  siRNA target sequence for Vcl (NM_009502.3,2148-2166).
gtaaccaggctgcttatga

SEQ ID NO: 524854 - DNA, 19 bp, Mus musculus
  siRNA target sequence for Vcl (NM_009502.3,2191-2209).
gtggattgataatgttgaa

SEQ ID NO: 524855 - DNA, 19 bp, Mus musculus
  siRNA target sequence for Vcl (NM_009502.3,2224-2242).
ggtggacgaggctattgat

SEQ ID NO: 524856 - DNA, 19 bp, Mus musculus
  siRNA target sequence for Vcl (NM_009502.3,2225-2243).
gtggacgaggctattgata

SEQ ID NO: 524857 - DNA, 19 bp, Mus musculus
  siRNA target sequence for Vcl (NM_009502.3,2254-2272).
gttggatgcttctgaagaa

SEQ ID NO: 524858 - DNA, 19 bp, Mus musculus
  siRNA target sequence for Vcl (NM_009502.3,2287-2305).
cctggacaagtgtaaggta

SEQ ID NO: 524859 - DNA, 19 bp, Mus musculus
  siRNA target sequence for Vcl (NM_009502.3,2338-2356).
cgctggagcaaccagtatt

SEQ ID NO: 524860 - DNA, 19 bp, Mus musculus
  siRNA target sequence for Vcl (NM_009502.3,2622-2640).
ctccaccagaccttgaaca

SEQ ID NO: 524861 - DNA, 19 bp, Mus musculus
  siRNA target sequence for Vcl (NM_009502.3,2757-2775).
ctggtgaggtgattaacca

SEQ ID NO: 524862 - DNA, 19 bp, Mus musculus
  siRNA target sequence for Vcl (NM_009502.3,2807-2825).
gatgaagctcggaaatggt

SEQ ID NO: 524863 - DNA, 19 bp, Mus musculus
  siRNA target sequence for Vcl (NM_009502.3,2913-2931).
gtaccaagcgggcacttat

SEQ ID NO: 524864 - DNA, 19 bp, Mus musculus
  siRNA target sequence for Vcl (NM_009502.3,2916-2934).
ccaagcgggcacttattca

SEQ ID NO: 524865 - DNA, 19 bp, Mus musculus
  siRNA target sequence for Vcl (NM_009502.3,3004-3022).
cacagataagcggattaga

SEQ ID NO: 524866 - DNA, 19 bp, Mus musculus
  siRNA target sequence for Vcl (NM_009502.3,3014-3032).
cggattagaaccaatctct

SEQ ID NO: 524867 - DNA, 19 bp, Mus musculus
  siRNA target sequence for Vcl (NM_009502.3,3042-3060).
gcgagcgaatcccaactat

SEQ ID NO: 524868 - DNA, 19 bp, Mus musculus
  siRNA target sequence for Vcl (NM_009502.3,3043-3061).
cgagcgaatcccaactata

SEQ ID NO: 524869 - DNA, 19 bp, Mus musculus
  siRNA target sequence for Vcl (NM_009502.3,3044-3062).
gagcgaatcccaactataa

SEQ ID NO: 524870 - DNA, 19 bp, Mus musculus
  siRNA target sequence for Vcl (NM_009502.3,3047-3065).
cgaatcccaactataagca

SEQ ID NO: 524871 - DNA, 19 bp, Mus musculus
  siRNA target sequence for Vcl (NM_009502.3,3209-3227).
gctgaagctgcttcaatca

SEQ ID NO: 524872 - DNA, 19 bp, Mus musculus
  siRNA target sequence for Vcl (NM_009502.3,3212-3230).
gaagctgcttcaatcaaaa

SEQ ID NO: 524873 - DNA, 19 bp, Mus musculus
  siRNA target sequence for Vcl (NM_009502.3,3254-3272).
ctgcgctgggtcagaaaga

SEQ ID NO: 524874 - DNA, 19 bp, Mus musculus
  siRNA target sequence for Vil (NM_009509.1,99-117).
cactcccgggatacagata

SEQ ID NO: 524875 - DNA, 19 bp, Mus musculus
  siRNA target sequence for Vil (NM_009509.1,356-374).
gcaacgagagcgagacttt

SEQ ID NO: 524876 - DNA, 19 bp, Mus musculus
  siRNA target sequence for Vil (NM_009509.1,427-445).
ggcatgaagcacgtagaaa

SEQ ID NO: 524877 - DNA, 19 bp, Mus musculus
  siRNA target sequence for Vil (NM_009509.1,429-447).
catgaagcacgtagaaaca

SEQ ID NO: 524878 - DNA, 19 bp, Mus musculus
  siRNA target sequence for Vil (NM_009509.1,514-532).
gaaatgtcctggaagagtt

SEQ ID NO: 524879 - DNA, 19 bp, Mus musculus
  siRNA target sequence for Vil (NM_009509.1,712-730).
ccacagctgatggcaatta

SEQ ID NO: 524880 - DNA, 19 bp, Mus musculus
  siRNA target sequence for Vil (NM_009509.1,715-733).
cagctgatggcaattatga

SEQ ID NO: 524881 - DNA, 19 bp, Mus musculus
  siRNA target sequence for Vil (NM_009509.1,741-759).
gctgggcccacgcaaagaa

SEQ ID NO: 524882 - DNA, 19 bp, Mus musculus
  siRNA target sequence for Vil (NM_009509.1,746-764).
gcccacgcaaagaactgaa

SEQ ID NO: 524883 - DNA, 19 bp, Mus musculus
  siRNA target sequence for Vil (NM_009509.1,1073-1091).
ccatcttccaacaactctt

SEQ ID NO: 524884 - DNA, 19 bp, Mus musculus
  siRNA target sequence for Vil (NM_009509.1,1368-1386).
gcaacactacttgttatat

SEQ ID NO: 524885 - DNA, 19 bp, Mus musculus
  siRNA target sequence for Vil (NM_009509.1,1372-1390).
cactacttgttatatatct

SEQ ID NO: 524886 - DNA, 19 bp, Mus musculus
  siRNA target sequence for Vil (NM_009509.1,1404-1422).
ggccagccaggatgaaatt

SEQ ID NO: 524887 - DNA, 19 bp, Mus musculus
  siRNA target sequence for Vil (NM_009509.1,1590-1608).
gccctctacgaggctattt

SEQ ID NO: 524888 - DNA, 19 bp, Mus musculus
  siRNA target sequence for Vil (NM_009509.1,1592-1610).
cctctacgaggctatttca

SEQ ID NO: 524889 - DNA, 19 bp, Mus musculus
  siRNA target sequence for Vil (NM_009509.1,1616-1634).
gagggaccaatgctgataa

SEQ ID NO: 524890 - DNA, 19 bp, Mus musculus
  siRNA target sequence for Vil (NM_009509.1,1785-1803).
ctctcggacggagaaacaa

SEQ ID NO: 524891 - DNA, 19 bp, Mus musculus
  siRNA target sequence for Vil (NM_009509.1,1787-1805).
ctcggacggagaaacaagt

SEQ ID NO: 524892 - DNA, 19 bp, Mus musculus
  siRNA target sequence for Vil (NM_009509.1,1819-1837).
caggagccagccaacttct

SEQ ID NO: 524893 - DNA, 19 bp, Mus musculus
  siRNA target sequence for Vil (NM_009509.1,2077-2095).
gctacaactgtacaagaat

SEQ ID NO: 524894 - DNA, 19 bp, Mus musculus
  siRNA target sequence for Vil (NM_009509.1,2200-2218).
cccttcaagtggagtaaca

SEQ ID NO: 524895 - DNA, 19 bp, Mus musculus
  siRNA target sequence for Vil (NM_009509.1,2210-2228).
ggagtaacaccaaatccta

SEQ ID NO: 524896 - DNA, 19 bp, Mus musculus
  siRNA target sequence for Vil (NM_009509.1,2294-2312).
gcccgaaagtggacgtttt

SEQ ID NO: 524897 - DNA, 19 bp, Mus musculus
  siRNA target sequence for Vil (NM_009509.1,2296-2314).
ccgaaagtggacgttttca

SEQ ID NO: 524898 - DNA, 19 bp, Mus musculus
  siRNA target sequence for Vil (NM_009509.1,2491-2509).
cctcgatggaagcaacaaa

SEQ ID NO: 524899 - DNA, 19 bp, Mus musculus
  siRNA target sequence for Villp (NM_011700.1,131-149).
ctcatgggaatttctttga

SEQ ID NO: 524900 - DNA, 19 bp, Mus musculus
  siRNA target sequence for Villp (NM_011700.1,158-176).
gctatgtcgtccttcatgt

SEQ ID NO: 524901 - DNA, 19 bp, Mus musculus
  siRNA target sequence for Villp (NM_011700.1,177-195).
ccctcagagtccaaaagct

SEQ ID NO: 524902 - DNA, 19 bp, Mus musculus
  siRNA target sequence for Villp (NM_011700.1,178-196).
cctcagagtccaaaagcta

SEQ ID NO: 524903 - DNA, 19 bp, Mus musculus
  siRNA target sequence for Villp (NM_011700.1,346-364).
gactgcttccacagctatt

SEQ ID NO: 524904 - DNA, 19 bp, Mus musculus
  siRNA target sequence for Villp (NM_011700.1,418-436).
gcggagaccaacatgtaca

SEQ ID NO: 524905 - DNA, 19 bp, Mus musculus
  siRNA target sequence for Villp (NM_011700.1,419-437).
cggagaccaacatgtacaa

SEQ ID NO: 524906 - DNA, 19 bp, Mus musculus
  siRNA target sequence for Villp (NM_011700.1,663-681).
ggtagatgcggagaatgaa

SEQ ID NO: 524907 - DNA, 19 bp, Mus musculus
  siRNA target sequence for Villp (NM_011700.1,748-766).
gtacccagcaacagtgtta

SEQ ID NO: 524908 - DNA, 19 bp, Mus musculus
  siRNA target sequence for Villp (NM_011700.1,761-779).
gtgttagccagctacaaaa

SEQ ID NO: 524909 - DNA, 19 bp, Mus musculus
  siRNA target sequence for Villp (NM_011700.1,870-888).
gcaagaggacggttgctat

SEQ ID NO: 524910 - DNA, 19 bp, Mus musculus
  siRNA target sequence for Villp (NM_011700.1,1220-1238).
ggtacatccaggacttaca

SEQ ID NO: 524911 - DNA, 19 bp, Mus musculus
  siRNA target sequence for Villp (NM_011700.1,1586-1604).
gccacaacaccagaactat

SEQ ID NO: 524912 - DNA, 19 bp, Mus musculus
  siRNA target sequence for Villp (NM_011700.1,1645-1663).
gtcttctttctgatcacaa

SEQ ID NO: 524913 - DNA, 19 bp, Mus musculus
  siRNA target sequence for Villp (NM_011700.1,1659-1677).
cacaagtcatgtttgctat

SEQ ID NO: 524914 - DNA, 19 bp, Mus musculus
  siRNA target sequence for Villp (NM_011700.1,1775-1793).
gtcaggagcctctctactt

SEQ ID NO: 524915 - DNA, 19 bp, Mus musculus
  siRNA target sequence for Villp (NM_011700.1,1819-1837).
ccctatcccagtaacaaga

SEQ ID NO: 524916 - DNA, 19 bp, Mus musculus
  siRNA target sequence for Villp (NM_011700.1,2237-2255).
cccgtaaggagttctatct

SEQ ID NO: 524917 - DNA, 19 bp, Mus musculus
  siRNA target sequence for Wbp3 (NM_011711.1,428-446).
cttcttggaccccaatgta

SEQ ID NO: 524918 - DNA, 19 bp, Mus musculus
  siRNA target sequence for Wbp3 (NM_011711.1,431-449).
cttggaccccaatgtaaca

SEQ ID NO: 524919 - DNA, 19 bp, Mus musculus
  siRNA target sequence for Wbp3 (NM_011711.1,511-529).
cacttcgcaccaatcacat

SEQ ID NO: 524920 - DNA, 19 bp, Mus musculus
  siRNA target sequence for Wbp3 (NM_011711.1,535-553).
gggtgagggagtttctcaa

SEQ ID NO: 524921 - DNA, 19 bp, Mus musculus
  siRNA target sequence for Wbp3 (NM_011711.1,539-557).
gagggagtttctcaatgat

SEQ ID NO: 524922 - DNA, 19 bp, Mus musculus
  siRNA target sequence for Wbp3 (NM_011711.1,541-559).
gggagtttctcaatgatga

SEQ ID NO: 524923 - DNA, 19 bp, Mus musculus
  siRNA target sequence for Wbp3 (NM_011711.1,643-661).
gtgatgacggtgcatttga

SEQ ID NO: 524924 - DNA, 19 bp, Mus musculus
  siRNA target sequence for Wbp3 (NM_011711.1,645-663).
gatgacggtgcatttgaca

SEQ ID NO: 524925 - DNA, 19 bp, Mus musculus
  siRNA target sequence for Wbp3 (NM_011711.1,927-945).
gcacttagcctcaacaaca

SEQ ID NO: 524926 - DNA, 19 bp, Mus musculus
  siRNA target sequence for Wbp3 (NM_011711.1,1002-1020).
cggggaggtcatgaaatca

SEQ ID NO: 524927 - DNA, 19 bp, Mus musculus
  siRNA target sequence for Wbp3 (NM_011711.1,1003-1021).
ggggaggtcatgaaatcat

SEQ ID NO: 524928 - DNA, 19 bp, Mus musculus
  siRNA target sequence for Wbp3 (NM_011711.1,1023-1041).
ctggctgcctttgacaatt

SEQ ID NO: 524929 - DNA, 19 bp, Mus musculus
  siRNA target sequence for Wbp3 (NM_011711.1,1188-1206).
cacctgcaatatgagttta

SEQ ID NO: 524930 - DNA, 19 bp, Mus musculus
  siRNA target sequence for Wbp3 (NM_011711.1,1262-1280).
gttgcaggtgcagattcaa

SEQ ID NO: 524931 - DNA, 19 bp, Mus musculus
  siRNA target sequence for Wbp3 (NM_011711.1,1507-1525).
gcaaccaggtgcatactct

SEQ ID NO: 524932 - DNA, 19 bp, Mus musculus
  siRNA target sequence for Wbp3 (NM_011711.1,1508-1526).
caaccaggtgcatactctt

SEQ ID NO: 524933 - DNA, 19 bp, Mus musculus
  siRNA target sequence for Wbp3 (NM_011711.1,1522-1540).
ctcttcggaggctcattaa

SEQ ID NO: 524934 - DNA, 19 bp, Mus musculus
  siRNA target sequence for Wbp3 (NM_011711.1,1527-1545).
cggaggctcattaaggaaa

SEQ ID NO: 524935 - DNA, 19 bp, Mus musculus
  siRNA target sequence for Wbp3 (NM_011711.1,1528-1546).
ggaggctcattaaggaaaa

SEQ ID NO: 524936 - DNA, 19 bp, Mus musculus
  siRNA target sequence for Wbp3 (NM_011711.1,1872-1890).
cggttgccagtcttcaact

SEQ ID NO: 524937 - DNA, 19 bp, Mus musculus
  siRNA target sequence for Wbp3 (NM_011711.1,1886-1904).
caactggacagcactaaaa

SEQ ID NO: 524938 - DNA, 19 bp, Mus musculus
  siRNA target sequence for Wbp3 (NM_011711.1,1978-1996).
ggtttgaagagttatttaa

SEQ ID NO: 524939 - DNA, 19 bp, Mus musculus
  siRNA target sequence for Wbp3 (NM_011711.1,1983-2001).
gaagagttatttaagacaa

SEQ ID NO: 524940 - DNA, 19 bp, Mus musculus
  siRNA target sequence for Wbp3 (NM_011711.1,2155-2173).
ccatccacacgtttgactt

SEQ ID NO: 524941 - DNA, 19 bp, Mus musculus
  siRNA target sequence for Wbp3 (NM_011711.1,2290-2308).
ctgaggaccgcttcatgtt

SEQ ID NO: 524942 - DNA, 19 bp, Mus musculus
  siRNA target sequence for Wbp3 (NM_011711.1,2390-2408).
gctcacaccgcaactgaat

SEQ ID NO: 524943 - DNA, 19 bp, Mus musculus
  siRNA target sequence for Wbp3 (NM_011711.1,2432-2450).
cgtcaagtcctcacagaaa

SEQ ID NO: 524944 - DNA, 19 bp, Mus musculus
  siRNA target sequence for Wbp3 (NM_011711.1,2625-2643).
ccggaactggctaacttct

SEQ ID NO: 524945 - DNA, 19 bp, Mus musculus
  siRNA target sequence for Wbp3 (NM_011711.1,2769-2787).
gtccttcgaaacttcctta

SEQ ID NO: 524946 - DNA, 19 bp, Mus musculus
  siRNA target sequence for Wbp3 (NM_011711.1,2772-2790).
cttcgaaacttccttagta

SEQ ID NO: 524947 - DNA, 19 bp, Mus musculus
  siRNA target sequence for Wbp3 (NM_011711.1,2780-2798).
cttccttagtaccaatgaa

SEQ ID NO: 524948 - DNA, 19 bp, Mus musculus
  siRNA target sequence for Wbp3 (NM_011711.1,2890-2908).
cacctccttctgtgttttt

SEQ ID NO: 524949 - DNA, 19 bp, Mus musculus
  siRNA target sequence for Wbp3 (NM_011711.1,2911-2929).
cagtatttgtccgattcat

SEQ ID NO: 524950 - DNA, 19 bp, Mus musculus
  siRNA target sequence for Wbp3 (NM_011711.1,2922-2940).
cgattcattcgttcttaca

SEQ ID NO: 524951 - DNA, 19 bp, Mus musculus
  siRNA target sequence for Wbp3 (NM_011711.1,2923-2941).
gattcattcgttcttacaa

SEQ ID NO: 524952 - DNA, 19 bp, Mus musculus
  siRNA target sequence for Wbp3 (NM_011711.1,3125-3143).
ggggaaggatggtaccatt

SEQ ID NO: 524953 - DNA, 19 bp, Mus musculus
  siRNA target sequence for Wbp3 (NM_011711.1,3136-3154).
gtaccattgaggacatcat

SEQ ID NO: 524954 - DNA, 19 bp, Mus musculus
  siRNA target sequence for Wbp3 (NM_011711.1,3226-3244).
cccaccatgacgagtcaaa

SEQ ID NO: 524955 - DNA, 19 bp, Mus musculus
  siRNA target sequence for Wbp3 (NM_011711.1,3231-3249).
catgacgagtcaaactgtt

SEQ ID NO: 524956 - DNA, 19 bp, Mus musculus
  siRNA target sequence for Wdr1 (NM_011715.1,140-158).
gaccccaagggcgatcatt

SEQ ID NO: 524957 - DNA, 19 bp, Mus musculus
  siRNA target sequence for Wdr1 (NM_011715.1,173-191).
ggcaagtgcgtcatcctaa

SEQ ID NO: 524958 - DNA, 19 bp, Mus musculus
  siRNA target sequence for Wdr1 (NM_011715.1,196-214).
catcgataaccctgctatt

SEQ ID NO: 524959 - DNA, 19 bp, Mus musculus
  siRNA target sequence for Wdr1 (NM_011715.1,199-217).
cgataaccctgctattgct

SEQ ID NO: 524960 - DNA, 19 bp, Mus musculus
  siRNA target sequence for Wdr1 (NM_011715.1,206-224).
cctgctattgctgatatct

SEQ ID NO: 524961 - DNA, 19 bp, Mus musculus
  siRNA target sequence for Wdr1 (NM_011715.1,209-227).
gctattgctgatatctaca

SEQ ID NO: 524962 - DNA, 19 bp, Mus musculus
  siRNA target sequence for Wdr1 (NM_011715.1,228-246).
cagaacatgcccatcaagt

SEQ ID NO: 524963 - DNA, 19 bp, Mus musculus
  siRNA target sequence for Wdr1 (NM_011715.1,263-281).
gcacccagcggattctaca

SEQ ID NO: 524964 - DNA, 19 bp, Mus musculus
  siRNA target sequence for Wdr1 (NM_011715.1,264-282).
cacccagcggattctacat

SEQ ID NO: 524965 - DNA, 19 bp, Mus musculus
  siRNA target sequence for Wdr1 (NM_011715.1,334-352).
ggagcatcttctaaagtat

SEQ ID NO: 524966 - DNA, 19 bp, Mus musculus
  siRNA target sequence for Wdr1 (NM_011715.1,587-605).
gagggccctccattcaagt

SEQ ID NO: 524967 - DNA, 19 bp, Mus musculus
  siRNA target sequence for Wdr1 (NM_011715.1,590-608).
ggccctccattcaagttca

SEQ ID NO: 524968 - DNA, 19 bp, Mus musculus
  siRNA target sequence for Wdr1 (NM_011715.1,591-609).
gccctccattcaagttcaa

SEQ ID NO: 524969 - DNA, 19 bp, Mus musculus
  siRNA target sequence for Wdr1 (NM_011715.1,640-658).
caactgtgtgcgattctct

SEQ ID NO: 524970 - DNA, 19 bp, Mus musculus
  siRNA target sequence for Wdr1 (NM_011715.1,696-714).
gccagattttcatttatga

SEQ ID NO: 524971 - DNA, 19 bp, Mus musculus
  siRNA target sequence for Wdr1 (NM_011715.1,759-777).
cccatgatggaggaattta

SEQ ID NO: 524972 - DNA, 19 bp, Mus musculus
  siRNA target sequence for Wdr1 (NM_011715.1,792-810).
gtcctgatagcactcattt

SEQ ID NO: 524973 - DNA, 19 bp, Mus musculus
  siRNA target sequence for Wdr1 (NM_011715.1,797-815).
gatagcactcatttgctat

SEQ ID NO: 524974 - DNA, 19 bp, Mus musculus
  siRNA target sequence for Wdr1 (NM_011715.1,825-843).
gagacaaaacctctaagat

SEQ ID NO: 524975 - DNA, 19 bp, Mus musculus
  siRNA target sequence for Wdr1 (NM_011715.1,827-845).
gacaaaacctctaagattt

SEQ ID NO: 524976 - DNA, 19 bp, Mus musculus
  siRNA target sequence for Wdr1 (NM_011715.1,837-855).
ctaagatttgggatgtcaa

SEQ ID NO: 524977 - DNA, 19 bp, Mus musculus
  siRNA target sequence for Wdr1 (NM_011715.1,841-859).
gatttgggatgtcaatgta

SEQ ID NO: 524978 - DNA, 19 bp, Mus musculus
  siRNA target sequence for Wdr1 (NM_011715.1,847-865).
ggatgtcaatgtaaactct

SEQ ID NO: 524979 - DNA, 19 bp, Mus musculus
  siRNA target sequence for Wdr1 (NM_011715.1,953-971).
ctgtctggatacatcaact

SEQ ID NO: 524980 - DNA, 19 bp, Mus musculus
  siRNA target sequence for Wdr1 (NM_011715.1,1042-1060).
gaccgtgcacagaaatggt

SEQ ID NO: 524981 - DNA, 19 bp, Mus musculus
  siRNA target sequence for Wdr1 (NM_011715.1,1061-1079).
ggcaagtcctacatctatt

SEQ ID NO: 524982 - DNA, 19 bp, Mus musculus
  siRNA target sequence for Wdr1 (NM_011715.1,1063-1081).
caagtcctacatctattct

SEQ ID NO: 524983 - DNA, 19 bp, Mus musculus
  siRNA target sequence for Wdr1 (NM_011715.1,1083-1101).
ggagccatgatggacatat

SEQ ID NO: 524984 - DNA, 19 bp, Mus musculus
  siRNA target sequence for Wdr1 (NM_011715.1,1086-1104).
gccatgatggacatatcaa

SEQ ID NO: 524985 - DNA, 19 bp, Mus musculus
  siRNA target sequence for Wdr1 (NM_011715.1,1091-1109).
gatggacatatcaattact

SEQ ID NO: 524986 - DNA, 19 bp, Mus musculus
  siRNA target sequence for Wdr1 (NM_011715.1,1311-1329).
gccctgggggatatactgt

SEQ ID NO: 524987 - DNA, 19 bp, Mus musculus
  siRNA target sequence for Wdr1 (NM_011715.1,1333-1351).
cgtgtgcattggacagatt

SEQ ID NO: 524988 - DNA, 19 bp, Mus musculus
  siRNA target sequence for Wdr1 (NM_011715.1,1489-1507).
ggcctccacactaaaggat

SEQ ID NO: 524989 - DNA, 19 bp, Mus musculus
  siRNA target sequence for Wdr1 (NM_011715.1,1546-1564).
cgtggcctactctcatgat

SEQ ID NO: 524990 - DNA, 19 bp, Mus musculus
  siRNA target sequence for Wdr1 (NM_011715.1,1593-1611).
gcaaggtggtcacagtatt

SEQ ID NO: 524991 - DNA, 19 bp, Mus musculus
  siRNA target sequence for Wdr1 (NM_011715.1,1597-1615).
ggtggtcacagtattcagt

SEQ ID NO: 524992 - DNA, 19 bp, Mus musculus
  siRNA target sequence for Wdr1 (NM_011715.1,1622-1640).
gatggctattcggagaata

SEQ ID NO: 524993 - DNA, 19 bp, Mus musculus
  siRNA target sequence for Wdr1 (NM_011715.1,1626-1644).
gctattcggagaataatgt

SEQ ID NO: 524994 - DNA, 19 bp, Mus musculus
  siRNA target sequence for Wdr1 (NM_011715.1,1655-1673).
caccatgcaaaaattgtgt

SEQ ID NO: 524995 - DNA, 19 bp, Mus musculus
  siRNA target sequence for Wdr1 (NM_011715.1,1707-1725).
cctctggcggcatggatat

SEQ ID NO: 524996 - DNA, 19 bp, Mus musculus
  siRNA target sequence for Wdr1 (NM_011715.1,1710-1728).
ctggcggcatggatatgat

SEQ ID NO: 524997 - DNA, 19 bp, Mus musculus
  siRNA target sequence for Zp2 (NM_011775.2,167-185).
caggcactctcatttgtga

SEQ ID NO: 524998 - DNA, 19 bp, Mus musculus
  siRNA target sequence for Zp2 (NM_011775.2,171-189).
cactctcatttgtgacaaa

SEQ ID NO: 524999 - DNA, 19 bp, Mus musculus
  siRNA target sequence for Zp2 (NM_011775.2,186-204).
caaagacgaagtgagaatt

SEQ ID NO: 525000 - DNA, 19 bp, Mus musculus
  siRNA target sequence for Zp2 (NM_011775.2,190-208).
gacgaagtgagaattgaat

SEQ ID NO: 525001 - DNA, 19 bp, Mus musculus
  siRNA target sequence for Zp2 (NM_011775.2,252-270).
ggatacccttggtagtgaa

SEQ ID NO: 525002 - DNA, 19 bp, Mus musculus
  siRNA target sequence for Zp2 (NM_011775.2,257-275).
cccttggtagtgaaatttt

SEQ ID NO: 525003 - DNA, 19 bp, Mus musculus
  siRNA target sequence for Zp2 (NM_011775.2,290-308).
ctctggacttggaaaggtt

SEQ ID NO: 525004 - DNA, 19 bp, Mus musculus
  siRNA target sequence for Zp2 (NM_011775.2,327-345).
cgagacctgcactataaaa

SEQ ID NO: 525005 - DNA, 19 bp, Mus musculus
  siRNA target sequence for Zp2 (NM_011775.2,387-405).
caccactgatgtgagatat

SEQ ID NO: 525006 - DNA, 19 bp, Mus musculus
  siRNA target sequence for Zp2 (NM_011775.2,401-419).
gatataaagatgacatgta

SEQ ID NO: 525007 - DNA, 19 bp, Mus musculus
  siRNA target sequence for Zp2 (NM_011775.2,480-498).
caggagagatctaatatct

SEQ ID NO: 525008 - DNA, 19 bp, Mus musculus
  siRNA target sequence for Zp2 (NM_011775.2,558-576).
gggatggattgttaagatt

SEQ ID NO: 525009 - DNA, 19 bp, Mus musculus
  siRNA target sequence for Zp2 (NM_011775.2,584-602).
gtacaagagcccacattct

SEQ ID NO: 525010 - DNA, 19 bp, Mus musculus
  siRNA target sequence for Zp2 (NM_011775.2,606-624).
cttgaaggatgccatagta

SEQ ID NO: 525011 - DNA, 19 bp, Mus musculus
  siRNA target sequence for Zp2 (NM_011775.2,609-627).
gaaggatgccatagtacaa

SEQ ID NO: 525012 - DNA, 19 bp, Mus musculus
  siRNA target sequence for Zp2 (NM_011775.2,616-634).
gccatagtacaaggattta

SEQ ID NO: 525013 - DNA, 19 bp, Mus musculus
  siRNA target sequence for Zp2 (NM_011775.2,617-635).
ccatagtacaaggatttaa

SEQ ID NO: 525014 - DNA, 19 bp, Mus musculus
  siRNA target sequence for Zp2 (NM_011775.2,677-695).
ccaatgctactggaatagt

SEQ ID NO: 525015 - DNA, 19 bp, Mus musculus
  siRNA target sequence for Zp2 (NM_011775.2,678-696).
caatgctactggaatagtt

SEQ ID NO: 525016 - DNA, 19 bp, Mus musculus
  siRNA target sequence for Zp2 (NM_011775.2,683-701).
ctactggaatagttcacta

SEQ ID NO: 525017 - DNA, 19 bp, Mus musculus
  siRNA target sequence for Zp2 (NM_011775.2,709-727).
gagagcagctatctctata

SEQ ID NO: 525018 - DNA, 19 bp, Mus musculus
  siRNA target sequence for Zp2 (NM_011775.2,713-731).
gcagctatctctatactgt

SEQ ID NO: 525019 - DNA, 19 bp, Mus musculus
  siRNA target sequence for Zp2 (NM_011775.2,792-810).
ctgcgcaccagatctttct

SEQ ID NO: 525020 - DNA, 19 bp, Mus musculus
  siRNA target sequence for Zp2 (NM_011775.2,794-812).
gcgcaccagatctttctgt

SEQ ID NO: 525021 - DNA, 19 bp, Mus musculus
  siRNA target sequence for Zp2 (NM_011775.2,831-849).
catgactctcactatacca

SEQ ID NO: 525022 - DNA, 19 bp, Mus musculus
  siRNA target sequence for Zp2 (NM_011775.2,836-854).
ctctcactataccagaatt

SEQ ID NO: 525023 - DNA, 19 bp, Mus musculus
  siRNA target sequence for Zp2 (NM_011775.2,840-858).
cactataccagaatttcct

SEQ ID NO: 525024 - DNA, 19 bp, Mus musculus
  siRNA target sequence for Zp2 (NM_011775.2,911-929).
ggcatgccaatggaattga

SEQ ID NO: 525025 - DNA, 19 bp, Mus musculus
  siRNA target sequence for Zp2 (NM_011775.2,913-931).
catgccaatggaattgaca

SEQ ID NO: 525026 - DNA, 19 bp, Mus musculus
  siRNA target sequence for Zp2 (NM_011775.2,937-955).
gcaacaaatggcttgagat

SEQ ID NO: 525027 - DNA, 19 bp, Mus musculus
  siRNA target sequence for Zp2 (NM_011775.2,938-956).
caacaaatggcttgagatt

SEQ ID NO: 525028 - DNA, 19 bp, Mus musculus
  siRNA target sequence for Zp2 (NM_011775.2,992-1010).
ctgaaaaatgtccattcta

SEQ ID NO: 525029 - DNA, 19 bp, Mus musculus
  siRNA target sequence for Zp2 (NM_011775.2,1001-1019).
gtccattctaccagttcta

SEQ ID NO: 525030 - DNA, 19 bp, Mus musculus
  siRNA target sequence for Zp2 (NM_011775.2,1030-1048).
ctcaagctgaccttctact

SEQ ID NO: 525031 - DNA, 19 bp, Mus musculus
  siRNA target sequence for Zp2 (NM_011775.2,1098-1116).
gtcaccagtctctatagat

SEQ ID NO: 525032 - DNA, 19 bp, Mus musculus
  siRNA target sequence for Zp2 (NM_011775.2,1100-1118).
caccagtctctatagatga

SEQ ID NO: 525033 - DNA, 19 bp, Mus musculus
  siRNA target sequence for Zp2 (NM_011775.2,1103-1121).
cagtctctatagatgaact

SEQ ID NO: 525034 - DNA, 19 bp, Mus musculus
  siRNA target sequence for Zp2 (NM_011775.2,1127-1145).
cacaggatgggtttatgga

SEQ ID NO: 525035 - DNA, 19 bp, Mus musculus
  siRNA target sequence for Zp2 (NM_011775.2,1211-1229).
cctcttgccagcctatttt

SEQ ID NO: 525036 - DNA, 19 bp, Mus musculus
  siRNA target sequence for Zp2 (NM_011775.2,1214-1232).
cttgccagcctattttcaa

SEQ ID NO: 525037 - DNA, 19 bp, Mus musculus
  siRNA target sequence for Zp2 (NM_011775.2,1246-1264).
gggcttgcaaggtttcaca

SEQ ID NO: 525038 - DNA, 19 bp, Mus musculus
  siRNA target sequence for Zp2 (NM_011775.2,1248-1266).
gcttgcaaggtttcacata

SEQ ID NO: 525039 - DNA, 19 bp, Mus musculus
  siRNA target sequence for Zp2 (NM_011775.2,1257-1275).
gtttcacatacctctgaat

SEQ ID NO: 525040 - DNA, 19 bp, Mus musculus
  siRNA target sequence for Zp2 (NM_011775.2,1304-1322).
gtgataaagtcatctatga

SEQ ID NO: 525041 - DNA, 19 bp, Mus musculus
  siRNA target sequence for Zp2 (NM_011775.2,1306-1324).
gataaagtcatctatgaga

SEQ ID NO: 525042 - DNA, 19 bp, Mus musculus
  siRNA target sequence for Zp2 (NM_011775.2,1352-1370).
caccctccaacattgtatt

SEQ ID NO: 525043 - DNA, 19 bp, Mus musculus
  siRNA target sequence for Zp2 (NM_011775.2,1381-1399).
gagttcaggatgacagtaa

SEQ ID NO: 525044 - DNA, 19 bp, Mus musculus
  siRNA target sequence for Zp2 (NM_011775.2,1389-1407).
gatgacagtaagatgctat

SEQ ID NO: 525045 - DNA, 19 bp, Mus musculus
  siRNA target sequence for Zp2 (NM_011775.2,1394-1412).
cagtaagatgctattacat

SEQ ID NO: 525046 - DNA, 19 bp, Mus musculus
  siRNA target sequence for Zp2 (NM_011775.2,1396-1414).
gtaagatgctattacatca

SEQ ID NO: 525047 - DNA, 19 bp, Mus musculus
  siRNA target sequence for Zp2 (NM_011775.2,1410-1428).
catcagagacagtatgcta

SEQ ID NO: 525048 - DNA, 19 bp, Mus musculus
  siRNA target sequence for Zp2 (NM_011775.2,1488-1506).
ggtgttggtcctacaaaca

SEQ ID NO: 525049 - DNA, 19 bp, Mus musculus
  siRNA target sequence for Zp2 (NM_011775.2,1489-1507).
gtgttggtcctacaaacat

SEQ ID NO: 525050 - DNA, 19 bp, Mus musculus
  siRNA target sequence for Zp2 (NM_011775.2,1505-1523).
catacccagaccaatccta

SEQ ID NO: 525051 - DNA, 19 bp, Mus musculus
  siRNA target sequence for Zp2 (NM_011775.2,1620-1638).
catcaagctggtcttagat

SEQ ID NO: 525052 - DNA, 19 bp, Mus musculus
  siRNA target sequence for Zp2 (NM_011775.2,1720-1738).
gacaactaccgcactactt

SEQ ID NO: 525053 - DNA, 19 bp, Mus musculus
  siRNA target sequence for Zp2 (NM_011775.2,1784-1802).
ggtttgatgtgaagacttt

SEQ ID NO: 525054 - DNA, 19 bp, Mus musculus
  siRNA target sequence for Zp2 (NM_011775.2,1849-1867).
cactgcagtgccttgatct

SEQ ID NO: 525055 - DNA, 19 bp, Mus musculus
  siRNA target sequence for Zp2 (NM_011775.2,1967-1985).
gccttccaggacctattct

SEQ ID NO: 525056 - DNA, 19 bp, Mus musculus
  siRNA target sequence for Zp2 (NM_011775.2,2035-2053).
gagattaccaaggatatta

SEQ ID NO: 525057 - DNA, 19 bp, Mus musculus
  siRNA target sequence for Zp2 (NM_011775.2,2047-2065).
gatattattgccaaggata

SEQ ID NO: 525058 - DNA, 19 bp, Mus musculus
  siRNA target sequence for Zp2 (NM_011775.2,2057-2075).
ccaaggatattgcttctaa

SEQ ID NO: 525059 - DNA, 19 bp, Mus musculus
  siRNA target sequence for Zp2 (NM_011775.2,2113-2131).
gtcattctaggcttcatct

SEQ ID NO: 525060 - DNA, 19 bp, Mus musculus
  siRNA target sequence for Zp2 (NM_011775.2,2150-2168).
gaactataaggttcaatca

SEQ ID NO: 525061 - DNA, 19 bp, Mus musculus
  siRNA target sequence for Gabarap (NM_019749.3,580-598).
gtttttctttgtcaacaat

SEQ ID NO: 525062 - DNA, 19 bp, Mus musculus
  siRNA target sequence for Gabarap (NM_019749.3,646-664).
ccatgaagaagacttcttt

SEQ ID NO: 525063 - DNA, 19 bp, Mus musculus
  siRNA target sequence for Mapre1 (NM_007896.2,70-88).
cgtcagtcaccagtgataa

SEQ ID NO: 525064 - DNA, 19 bp, Mus musculus
  siRNA target sequence for Mapre1 (NM_007896.2,73-91).
cagtcaccagtgataacct

SEQ ID NO: 525065 - DNA, 19 bp, Mus musculus
  siRNA target sequence for Mapre1 (NM_007896.2,75-93).
gtcaccagtgataacctaa

SEQ ID NO: 525066 - DNA, 19 bp, Mus musculus
  siRNA target sequence for Mapre1 (NM_007896.2,108-126).
ctggcttggatcaatgaat

SEQ ID NO: 525067 - DNA, 19 bp, Mus musculus
  siRNA target sequence for Mapre1 (NM_007896.2,110-128).
ggcttggatcaatgaatct

SEQ ID NO: 525068 - DNA, 19 bp, Mus musculus
  siRNA target sequence for Mapre1 (NM_007896.2,112-130).
cttggatcaatgaatctct

SEQ ID NO: 525069 - DNA, 19 bp, Mus musculus
  siRNA target sequence for Mapre1 (NM_007896.2,166-184).
caggggctgcatattgtca

SEQ ID NO: 525070 - DNA, 19 bp, Mus musculus
  siRNA target sequence for Mapre1 (NM_007896.2,171-189).
gctgcatattgtcagttta

SEQ ID NO: 525071 - DNA, 19 bp, Mus musculus
  siRNA target sequence for Mapre1 (NM_007896.2,172-190).
ctgcatattgtcagtttat

SEQ ID NO: 525072 - DNA, 19 bp, Mus musculus
  siRNA target sequence for Mapre1 (NM_007896.2,197-215).
gctcttccctggatccatt

SEQ ID NO: 525073 - DNA, 19 bp, Mus musculus
  siRNA target sequence for Mapre1 (NM_007896.2,236-254).
ccaagctaagctagaacat

SEQ ID NO: 525074 - DNA, 19 bp, Mus musculus
  siRNA target sequence for Mapre1 (NM_007896.2,263-281).
ccagaacttcaaaatacta

SEQ ID NO: 525075 - DNA, 19 bp, Mus musculus
  siRNA target sequence for Mapre1 (NM_007896.2,305-323).
cgttgacaaaataattcct

SEQ ID NO: 525076 - DNA, 19 bp, Mus musculus
  siRNA target sequence for Mapre1 (NM_007896.2,321-339).
cctgtggataaattagtaa

SEQ ID NO: 525077 - DNA, 19 bp, Mus musculus
  siRNA target sequence for Mapre1 (NM_007896.2,376-394).
ggttcaagaagttttttga

SEQ ID NO: 525078 - DNA, 19 bp, Mus musculus
  siRNA target sequence for Mapre1 (NM_007896.2,471-489).
gtcgccccagctttgagta

SEQ ID NO: 525079 - DNA, 19 bp, Mus musculus
  siRNA target sequence for Mapre1 (NM_007896.2,525-543).
ccacagagacccattgcaa

SEQ ID NO: 525080 - DNA, 19 bp, Mus musculus
  siRNA target sequence for Mapre1 (NM_007896.2,577-595).
ccggaatggtgcgaaagaa

SEQ ID NO: 525081 - DNA, 19 bp, Mus musculus
  siRNA target sequence for Mapre1 (NM_007896.2,578-596).
cggaatggtgcgaaagaat

SEQ ID NO: 525082 - DNA, 19 bp, Mus musculus
  siRNA target sequence for Mapre1 (NM_007896.2,692-710).
cttctacttcggaaagcta

SEQ ID NO: 525083 - DNA, 19 bp, Mus musculus
  siRNA target sequence for Mapre1 (NM_007896.2,701-719).
cggaaagctaaggaacatt

SEQ ID NO: 525084 - DNA, 19 bp, Mus musculus
  siRNA target sequence for Mapre1 (NM_007896.2,764-782).
gcagaggattgtagatatt

SEQ ID NO: 525085 - DNA, 19 bp, Mus musculus
  siRNA target sequence for Mapre2 (NM_153058.2,146-164).
ccccaaatggcgagaacaa

SEQ ID NO: 525086 - DNA, 19 bp, Mus musculus
  siRNA target sequence for Mapre2 (NM_153058.2,148-166).
ccaaatggcgagaacaaca

SEQ ID NO: 525087 - DNA, 19 bp, Mus musculus
  siRNA target sequence for Mapre2 (NM_153058.2,178-196).
caggataacgggactatca

SEQ ID NO: 525088 - DNA, 19 bp, Mus musculus
  siRNA target sequence for Mapre2 (NM_153058.2,180-198).
ggataacgggactatcatt

SEQ ID NO: 525089 - DNA, 19 bp, Mus musculus
  siRNA target sequence for Mapre2 (NM_153058.2,223-241).
ggggagcggtcctacagtt

SEQ ID NO: 525090 - DNA, 19 bp, Mus musculus
  siRNA target sequence for Mapre2 (NM_153058.2,249-267).
ggcggtcaatgtgtattct

SEQ ID NO: 525091 - DNA, 19 bp, Mus musculus
  siRNA target sequence for Mapre2 (NM_153058.2,250-268).
gcggtcaatgtgtattcta

SEQ ID NO: 525092 - DNA, 19 bp, Mus musculus
  siRNA target sequence for Mapre2 (NM_153058.2,272-290).
cgataacccaggagactat

SEQ ID NO: 525093 - DNA, 19 bp, Mus musculus
  siRNA target sequence for Mapre2 (NM_153058.2,330-348).
gtctctaaactacacaaaa

SEQ ID NO: 525094 - DNA, 19 bp, Mus musculus
  siRNA target sequence for Mapre2 (NM_153058.2,332-350).
ctctaaactacacaaaagt

SEQ ID NO: 525095 - DNA, 19 bp, Mus musculus
  siRNA target sequence for Mapre2 (NM_153058.2,448-466).
gagcatgagtatattcaca

SEQ ID NO: 525096 - DNA, 19 bp, Mus musculus
  siRNA target sequence for Mapre2 (NM_153058.2,454-472).
gagtatattcacaacttta

SEQ ID NO: 525097 - DNA, 19 bp, Mus musculus
  siRNA target sequence for Mapre2 (NM_153058.2,534-552).
ggtgaaagggcgtttccaa

SEQ ID NO: 525098 - DNA, 19 bp, Mus musculus
  siRNA target sequence for Mapre2 (NM_153058.2,819-837).
cagatctgacaaagattta

SEQ ID NO: 525099 - DNA, 19 bp, Mus musculus
  siRNA target sequence for Mapre2 (NM_153058.2,856-874).
ctcaacgagcaggtacatt

SEQ ID NO: 525100 - DNA, 19 bp, Mus musculus
  siRNA target sequence for Mapre2 (NM_153058.2,858-876).
caacgagcaggtacattca

SEQ ID NO: 525101 - DNA, 19 bp, Mus musculus
  siRNA target sequence for Mapre2 (NM_153058.2,864-882).
gcaggtacattcattgaaa

SEQ ID NO: 525102 - DNA, 19 bp, Mus musculus
  siRNA target sequence for Mapre2 (NM_153058.2,984-1002).
cgtgcagcgactaatggaa

SEQ ID NO: 525103 - DNA, 19 bp, Mus musculus
  siRNA target sequence for Mapre3 (NM_133350.1,195-213).
gagtcgccatgatatgctt

SEQ ID NO: 525104 - DNA, 19 bp, Mus musculus
  siRNA target sequence for Mapre3 (NM_133350.1,240-258).
caattataccaagattgaa

SEQ ID NO: 525105 - DNA, 19 bp, Mus musculus
  siRNA target sequence for Mapre3 (NM_133350.1,420-438).
cattcccgtagagaagtta

SEQ ID NO: 525106 - DNA, 19 bp, Mus musculus
  siRNA target sequence for Mapre3 (NM_133350.1,424-442).
cccgtagagaagttagtga

SEQ ID NO: 525107 - DNA, 19 bp, Mus musculus
  siRNA target sequence for Mapre3 (NM_133350.1,425-443).
ccgtagagaagttagtgaa

SEQ ID NO: 525108 - DNA, 19 bp, Mus musculus
  siRNA target sequence for Mapre3 (NM_133350.1,426-444).
cgtagagaagttagtgaaa

SEQ ID NO: 525109 - DNA, 19 bp, Mus musculus
  siRNA target sequence for Mapre3 (NM_133350.1,492-510).
ctttgacgcaaactatgat

SEQ ID NO: 525110 - DNA, 19 bp, Mus musculus
  siRNA target sequence for Mapre3 (NM_133350.1,577-595).
gatcagatcttcaacaaat

SEQ ID NO: 525111 - DNA, 19 bp, Mus musculus
  siRNA target sequence for Mapre3 (NM_133350.1,591-609).
caaatccaagaaactcatt

SEQ ID NO: 525112 - DNA, 19 bp, Mus musculus
  siRNA target sequence for Mapre3 (NM_133350.1,638-656).
ccacaggccccaagaacat

SEQ ID NO: 525113 - DNA, 19 bp, Mus musculus
  siRNA target sequence for Mapre3 (NM_133350.1,794-812).
ccgtagacgggcttgagaa

SEQ ID NO: 525114 - DNA, 19 bp, Mus musculus
  siRNA target sequence for Mapre3 (NM_133350.1,795-813).
cgtagacgggcttgagaaa

SEQ ID NO: 525115 - DNA, 19 bp, Mus musculus
  siRNA target sequence for Mapre3 (NM_133350.1,810-828).
gaaagaacgagatttctat

SEQ ID NO: 525116 - DNA, 19 bp, Mus musculus
  siRNA target sequence for Mapre3 (NM_133350.1,814-832).
gaacgagatttctatttca

SEQ ID NO: 525117 - DNA, 19 bp, Mus musculus
  siRNA target sequence for Mapre3 (NM_133350.1,921-939).
cacggaggagggatttgca

SEQ ID NO: 525118 - DNA, 19 bp, Mus musculus
  siRNA target sequence for Mapre3 (NM_133350.1,941-959).
cccctgaggatgatgagat

SEQ ID NO: 525119 - DNA, 19 bp, Mus musculus
  siRNA target sequence for Nde1 (NM_023317.1,390-408).
gagatctgcggcaggaatt

SEQ ID NO: 525120 - DNA, 19 bp, Mus musculus
  siRNA target sequence for Nde1 (NM_023317.1,531-549).
gacctagctctggtttgaa

SEQ ID NO: 525121 - DNA, 19 bp, Mus musculus
  siRNA target sequence for Nde1 (NM_023317.1,533-551).
cctagctctggtttgaaca

SEQ ID NO: 525122 - DNA, 19 bp, Mus musculus
  siRNA target sequence for Nde1 (NM_023317.1,643-661).
ggacctgcttcggaaagtt

SEQ ID NO: 525123 - DNA, 19 bp, Mus musculus
  siRNA target sequence for Nde1 (NM_023317.1,687-705).
catgcaggaacttcatgta

SEQ ID NO: 525124 - DNA, 19 bp, Mus musculus
  siRNA target sequence for Nde1 (NM_023317.1,739-757).
ctcaggacgaggaaccaaa

SEQ ID NO: 525125 - DNA, 19 bp, Mus musculus
  siRNA target sequence for Nde1 (NM_023317.1,802-820).
cgataaagggtcaggaaaa

SEQ ID NO: 525126 - DNA, 19 bp, Mus musculus
  siRNA target sequence for Rnf30 (NM_021447.1,683-701).
ctctgcccaccatttacaa

SEQ ID NO: 525127 - DNA, 19 bp, Mus musculus
  siRNA target sequence for Rnf30 (NM_021447.1,818-836).
gcagacagaagcaactgtt

SEQ ID NO: 525128 - DNA, 19 bp, Mus musculus
  siRNA target sequence for Rnf30 (NM_021447.1,854-872).
ccctgtgcgcggttttgga

SEQ ID NO: 525129 - DNA, 19 bp, Mus musculus
  siRNA target sequence for Rnf30 (NM_021447.1,1102-1120).
ccggagccaggctatgaga

SEQ ID NO: 525130 - DNA, 19 bp, Mus musculus
  siRNA target sequence for Rnf30 (NM_021447.1,1147-1165).
gagcacgtggccgaaatgt

SEQ ID NO: 525131 - DNA, 19 bp, Mus musculus
  siRNA target sequence for Trim2 (NM_030706.1,313-331).
ccgtggtgcgccagattga

SEQ ID NO: 525132 - DNA, 19 bp, Mus musculus
  siRNA target sequence for Trim2 (NM_030706.1,358-376).
gcctggaacggtacaagaa

SEQ ID NO: 525133 - DNA, 19 bp, Mus musculus
  siRNA target sequence for Trim2 (NM_030706.1,635-653).
cccaaaccatgatggaaat

SEQ ID NO: 525134 - DNA, 19 bp, Mus musculus
  siRNA target sequence for Trim2 (NM_030706.1,786-804).
ctggacgcagtcaacaaaa

SEQ ID NO: 525135 - DNA, 19 bp, Mus musculus
  siRNA target sequence for Trim2 (NM_030706.1,841-859).
cagaaatcatccatcagtt

SEQ ID NO: 525136 - DNA, 19 bp, Mus musculus
  siRNA target sequence for Trim2 (NM_030706.1,1305-1323).
cagcccatgtccgttacta

SEQ ID NO: 525137 - DNA, 19 bp, Mus musculus
  siRNA target sequence for Trim2 (NM_030706.1,1307-1325).
gcccatgtccgttactata

SEQ ID NO: 525138 - DNA, 19 bp, Mus musculus
  siRNA target sequence for Trim2 (NM_030706.1,1308-1326).
cccatgtccgttactataa

SEQ ID NO: 525139 - DNA, 19 bp, Mus musculus
  siRNA target sequence for Trim2 (NM_030706.1,1417-1435).
gagagatcctggacaacaa

SEQ ID NO: 525140 - DNA, 19 bp, Mus musculus
  siRNA target sequence for Trim2 (NM_030706.1,1440-1458).
ggcacctacgagttcttgt

SEQ ID NO: 525141 - DNA, 19 bp, Mus musculus
  siRNA target sequence for Trim2 (NM_030706.1,1441-1459).
gcacctacgagttcttgta

SEQ ID NO: 525142 - DNA, 19 bp, Mus musculus
  siRNA target sequence for Trim2 (NM_030706.1,1442-1460).
cacctacgagttcttgtat

SEQ ID NO: 525143 - DNA, 19 bp, Mus musculus
  siRNA target sequence for Trim2 (NM_030706.1,1498-1516).
ggctctacgaccagcatat

SEQ ID NO: 525144 - DNA, 19 bp, Mus musculus
  siRNA target sequence for Trim2 (NM_030706.1,1519-1537).
gaggcagcccgtttaagct

SEQ ID NO: 525145 - DNA, 19 bp, Mus musculus
  siRNA target sequence for Trim2 (NM_030706.1,1657-1675).
gcaccggcaagcgaaaaga

SEQ ID NO: 525146 - DNA, 19 bp, Mus musculus
  siRNA target sequence for Trim2 (NM_030706.1,1700-1718).
cttccgagtcggtaccaaa

SEQ ID NO: 525147 - DNA, 19 bp, Mus musculus
  siRNA target sequence for Trim2 (NM_030706.1,1710-1728).
ggtaccaaaggaagaaaca

SEQ ID NO: 525148 - DNA, 19 bp, Mus musculus
  siRNA target sequence for Trim2 (NM_030706.1,1752-1770).
ggtgtggctgcatctacaa

SEQ ID NO: 525149 - DNA, 19 bp, Mus musculus
  siRNA target sequence for Trim2 (NM_030706.1,1778-1796).
gatattaattgcagatagt

SEQ ID NO: 525150 - DNA, 19 bp, Mus musculus
  siRNA target sequence for Trim2 (NM_030706.1,1807-1825).
gtgtgcagatcttttccaa

SEQ ID NO: 525151 - DNA, 19 bp, Mus musculus
  siRNA target sequence for Trim2 (NM_030706.1,1940-1958).
caacaagtgggttagcatt

SEQ ID NO: 525152 - DNA, 19 bp, Mus musculus
  siRNA target sequence for Trim2 (NM_030706.1,2031-2049).
gaccgcaatgggcacatta

SEQ ID NO: 525153 - DNA, 19 bp, Mus musculus
  siRNA target sequence for Trim2 (NM_030706.1,2067-2085).
gcgtgctgtgtgtttatct

SEQ ID NO: 525154 - DNA, 19 bp, Mus musculus
  siRNA target sequence for Trim2 (NM_030706.1,2068-2086).
cgtgctgtgtgtttatctt

SEQ ID NO: 525155 - DNA, 19 bp, Mus musculus
  siRNA target sequence for Trim2 (NM_030706.1,2087-2105).
ccagcccaacgggaaaata

SEQ ID NO: 525156 - DNA, 19 bp, Mus musculus
  siRNA target sequence for Trim2 (NM_030706.1,2163-2181).
gcagctgtgaatagcaata

SEQ ID NO: 525157 - DNA, 19 bp, Mus musculus
  siRNA target sequence for Trim2 (NM_030706.1,2164-2182).
cagctgtgaatagcaataa

SEQ ID NO: 525158 - DNA, 19 bp, Mus musculus
  siRNA target sequence for Trim2 (NM_030706.1,2232-2250).
caggaaggagaattcatgt

SEQ ID NO: 525159 - DNA, 19 bp, Mus musculus
  siRNA target sequence for Trim2 (NM_030706.1,2235-2253).
gaaggagaattcatgttga

SEQ ID NO: 525160 - DNA, 19 bp, Mus musculus
  siRNA target sequence for Trim2 (NM_030706.1,2353-2371).
gcaggatccaggtttttga

SEQ ID NO: 525161 - DNA, 19 bp, Mus musculus
  siRNA target sequence for Trim2 (NM_030706.1,2373-2391).
gggagtggatcatttttgt

SEQ ID NO: 525162 - DNA, 19 bp, Mus musculus
  siRNA target sequence for Trim2 (NM_030706.1,2476-2494).
ccggaaaccactgtttcaa

SEQ ID NO: 525163 - DNA, 19 bp, Mus musculus
  siRNA target sequence for Trim2 (NM_030706.1,2492-2510).
caaggtctaccggtactta

SEQ ID NO: 525164 - DNA, 19 bp, Mus musculus
  siRNA target sequence for Trim2 (NM_030706.1,2496-2514).
gtctaccggtacttacagt

SEQ ID NO: 525165 - DNA, 19 bp, Mus musculus
  siRNA target sequence for Kifap3 (NM_010629.1,206-224).
gacgccagatacctcaaaa

SEQ ID NO: 525166 - DNA, 19 bp, Mus musculus
  siRNA target sequence for Kifap3 (NM_010629.1,209-227).
gccagatacctcaaaagga

SEQ ID NO: 525167 - DNA, 19 bp, Mus musculus
  siRNA target sequence for Kifap3 (NM_010629.1,237-255).
gggggaatattgatgtaca

SEQ ID NO: 525168 - DNA, 19 bp, Mus musculus
  siRNA target sequence for Kifap3 (NM_010629.1,261-279).
cagaaaaagctctcattgt

SEQ ID NO: 525169 - DNA, 19 bp, Mus musculus
  siRNA target sequence for Kifap3 (NM_010629.1,297-315).
ctaccattcttggagaaat

SEQ ID NO: 525170 - DNA, 19 bp, Mus musculus
  siRNA target sequence for Kifap3 (NM_010629.1,324-342).
ccatgttgggagaacgaaa

SEQ ID NO: 525171 - DNA, 19 bp, Mus musculus
  siRNA target sequence for Kifap3 (NM_010629.1,370-388).
gagtctcaatgctaacaca

SEQ ID NO: 525172 - DNA, 19 bp, Mus musculus
  siRNA target sequence for Kifap3 (NM_010629.1,572-590).
gacgaagtggccaacatta

SEQ ID NO: 525173 - DNA, 19 bp, Mus musculus
  siRNA target sequence for Kifap3 (NM_010629.1,574-592).
cgaagtggccaacattaat

SEQ ID NO: 525174 - DNA, 19 bp, Mus musculus
  siRNA target sequence for Kifap3 (NM_010629.1,672-690).
ctcgaaatcctgataacct

SEQ ID NO: 525175 - DNA, 19 bp, Mus musculus
  siRNA target sequence for Kifap3 (NM_010629.1,764-782).
gttgagttagctacaaaca

SEQ ID NO: 525176 - DNA, 19 bp, Mus musculus
  siRNA target sequence for Kifap3 (NM_010629.1,767-785).
gagttagctacaaacatca

SEQ ID NO: 525177 - DNA, 19 bp, Mus musculus
  siRNA target sequence for Kifap3 (NM_010629.1,774-792).
ctacaaacatcatttatat

SEQ ID NO: 525178 - DNA, 19 bp, Mus musculus
  siRNA target sequence for Kifap3 (NM_010629.1,835-853).
cactcactacaaaattgga

SEQ ID NO: 525179 - DNA, 19 bp, Mus musculus
  siRNA target sequence for Kifap3 (NM_010629.1,855-873).
cactgtgtatgaatatcat

SEQ ID NO: 525180 - DNA, 19 bp, Mus musculus
  siRNA target sequence for Kifap3 (NM_010629.1,861-879).
gtatgaatatcattgatca

SEQ ID NO: 525181 - DNA, 19 bp, Mus musculus
  siRNA target sequence for Kifap3 (NM_010629.1,895-913).
cgagctttggcaagaagaa

SEQ ID NO: 525182 - DNA, 19 bp, Mus musculus
  siRNA target sequence for Kifap3 (NM_010629.1,944-962).
gaccttgaaaatcaaacat

SEQ ID NO: 525183 - DNA, 19 bp, Mus musculus
  siRNA target sequence for Kifap3 (NM_010629.1,970-988).
ggattatgacaaaaccttt

SEQ ID NO: 525184 - DNA, 19 bp, Mus musculus
  siRNA target sequence for Kifap3 (NM_010629.1,997-1015).
ccaaggacttgtggtaaaa

SEQ ID NO: 525185 - DNA, 19 bp, Mus musculus
  siRNA target sequence for Kifap3 (NM_010629.1,1002-1020).
gacttgtggtaaaacaaga

SEQ ID NO: 525186 - DNA, 19 bp, Mus musculus
  siRNA target sequence for Kifap3 (NM_010629.1,1063-1081).
ggaggacacacgtacagaa

SEQ ID NO: 525187 - DNA, 19 bp, Mus musculus
  siRNA target sequence for Kifap3 (NM_010629.1,1071-1089).
cacgtacagaactgaagat

SEQ ID NO: 525188 - DNA, 19 bp, Mus musculus
  siRNA target sequence for Kifap3 (NM_010629.1,1090-1108).
gaggaacaagaatatcgtt

SEQ ID NO: 525189 - DNA, 19 bp, Mus musculus
  siRNA target sequence for Kifap3 (NM_010629.1,1125-1143).
ctcttgatcgggacaattt

SEQ ID NO: 525190 - DNA, 19 bp, Mus musculus
  siRNA target sequence for Kifap3 (NM_010629.1,1160-1178).
gtcgtgtcattcttaaaga

SEQ ID NO: 525191 - DNA, 19 bp, Mus musculus
  siRNA target sequence for Kifap3 (NM_010629.1,1162-1180).
cgtgtcattcttaaagaaa

SEQ ID NO: 525192 - DNA, 19 bp, Mus musculus
  siRNA target sequence for Kifap3 (NM_010629.1,1213-1231).
ggtagagatggatattgtt

SEQ ID NO: 525193 - DNA, 19 bp, Mus musculus
  siRNA target sequence for Kifap3 (NM_010629.1,1317-1335).
caggcctgaggaacaagat

SEQ ID NO: 525194 - DNA, 19 bp, Mus musculus
  siRNA target sequence for Kifap3 (NM_010629.1,1409-1427).
gtgctttaccatataagca

SEQ ID NO: 525195 - DNA, 19 bp, Mus musculus
  siRNA target sequence for Kifap3 (NM_010629.1,1425-1443).
gcatggatgaccgctttaa

SEQ ID NO: 525196 - DNA, 19 bp, Mus musculus
  siRNA target sequence for Kifap3 (NM_010629.1,1429-1447).
ggatgaccgctttaagtca

SEQ ID NO: 525197 - DNA, 19 bp, Mus musculus
  siRNA target sequence for Kifap3 (NM_010629.1,1430-1448).
gatgaccgctttaagtcaa

SEQ ID NO: 525198 - DNA, 19 bp, Mus musculus
  siRNA target sequence for Kifap3 (NM_010629.1,1433-1451).
gaccgctttaagtcaatgt

SEQ ID NO: 525199 - DNA, 19 bp, Mus musculus
  siRNA target sequence for Kifap3 (NM_010629.1,1500-1518).
gttcagatgaacgaattga

SEQ ID NO: 525200 - DNA, 19 bp, Mus musculus
  siRNA target sequence for Kifap3 (NM_010629.1,1594-1612).
gctgaaaatgctcatgaaa

SEQ ID NO: 525201 - DNA, 19 bp, Mus musculus
  siRNA target sequence for Kifap3 (NM_010629.1,1676-1694).
gggcccactaagaatttgt

SEQ ID NO: 525202 - DNA, 19 bp, Mus musculus
  siRNA target sequence for Kifap3 (NM_010629.1,1769-1787).
ggaacgctggcaaatctga

SEQ ID NO: 525203 - DNA, 19 bp, Mus musculus
  siRNA target sequence for Kifap3 (NM_010629.1,1773-1791).
cgctggcaaatctgacaat

SEQ ID NO: 525204 - DNA, 19 bp, Mus musculus
  siRNA target sequence for Kifap3 (NM_010629.1,1876-1894).
ggatgaccttgttttagaa

SEQ ID NO: 525205 - DNA, 19 bp, Mus musculus
  siRNA target sequence for Kifap3 (NM_010629.1,1981-1999).
gctgctgaacgctcaacaa

SEQ ID NO: 525206 - DNA, 19 bp, Mus musculus
  siRNA target sequence for Kifap3 (NM_010629.1,1987-2005).
gaacgctcaacaagaagat

SEQ ID NO: 525207 - DNA, 19 bp, Mus musculus
  siRNA target sequence for Kifap3 (NM_010629.1,1990-2008).
cgctcaacaagaagatgat

SEQ ID NO: 525208 - DNA, 19 bp, Mus musculus
  siRNA target sequence for Kifap3 (NM_010629.1,2019-2037).
gtcaaataatctatgtctt

SEQ ID NO: 525209 - DNA, 19 bp, Mus musculus
  siRNA target sequence for Kifap3 (NM_010629.1,2064-2082).
caagagatgtcataatcaa

SEQ ID NO: 525210 - DNA, 19 bp, Mus musculus
  siRNA target sequence for Kifap3 (NM_010629.1,2094-2112).
ctccagcatatctcattga

SEQ ID NO: 525211 - DNA, 19 bp, Mus musculus
  siRNA target sequence for Kifap3 (NM_010629.1,2111-2129).
gacctgatgcatgataaaa

SEQ ID NO: 525212 - DNA, 19 bp, Mus musculus
  siRNA target sequence for Kifap3 (NM_010629.1,2114-2132).
ctgatgcatgataaaaata

SEQ ID NO: 525213 - DNA, 19 bp, Mus musculus
  siRNA target sequence for Kifap3 (NM_010629.1,2116-2134).
gatgcatgataaaaataat

SEQ ID NO: 525214 - DNA, 19 bp, Mus musculus
  siRNA target sequence for Kifap3 (NM_010629.1,2141-2159).
cggaaagtctgtgataaca

SEQ ID NO: 525215 - DNA, 19 bp, Mus musculus
  siRNA target sequence for Kifap3 (NM_010629.1,2153-2171).
gataacacattagatatca

SEQ ID NO: 525216 - DNA, 19 bp, Mus musculus
  siRNA target sequence for Kifap3 (NM_010629.1,2218-2236).
gtttcgctggcataactct

SEQ ID NO: 525217 - DNA, 19 bp, Mus musculus
  siRNA target sequence for Kifap3 (NM_010629.1,2273-2291).
gagagcgagcagtacttgt

SEQ ID NO: 525218 - DNA, 19 bp, Mus musculus
  siRNA target sequence for Kifap3 (NM_010629.1,2275-2293).
gagcgagcagtacttgtat

SEQ ID NO: 525219 - DNA, 19 bp, Mus musculus
  siRNA target sequence for Kifap3 (NM_010629.1,2284-2302).
gtacttgtatggtgatgat

SEQ ID NO: 525220 - DNA, 19 bp, Mus musculus
  siRNA target sequence for Kifap3 (NM_010629.1,2359-2377).
caactcagacggactaatt

SEQ ID NO: 525221 - DNA, 19 bp, Mus musculus
  siRNA target sequence for Mapk8ip (NM_011162.2,643-661).
ctcaggacacgctgaataa

SEQ ID NO: 525222 - DNA, 19 bp, Mus musculus
  siRNA target sequence for Mapk8ip (NM_011162.2,645-663).
caggacacgctgaataata

SEQ ID NO: 525223 - DNA, 19 bp, Mus musculus
  siRNA target sequence for Mapk8ip (NM_011162.2,648-666).
gacacgctgaataataact

SEQ ID NO: 525224 - DNA, 19 bp, Mus musculus
  siRNA target sequence for Mapk8ip (NM_011162.2,650-668).
cacgctgaataataactct

SEQ ID NO: 525225 - DNA, 19 bp, Mus musculus
  siRNA target sequence for Mapk8ip (NM_011162.2,739-757).
cgcctccacatgaacacat

SEQ ID NO: 525226 - DNA, 19 bp, Mus musculus
  siRNA target sequence for Mapk8ip (NM_011162.2,1249-1267).
cctacgactcggtcaagta

SEQ ID NO: 525227 - DNA, 19 bp, Mus musculus
  siRNA target sequence for Mapk8ip (NM_011162.2,1346-1364).
cgactctgccactgtctat

SEQ ID NO: 525228 - DNA, 19 bp, Mus musculus
  siRNA target sequence for Mapk8ip (NM_011162.2,1596-1614).
caaacccatcgggctatat

SEQ ID NO: 525229 - DNA, 19 bp, Mus musculus
  siRNA target sequence for Mapk8ip (NM_011162.2,1683-1701).
caggcagaagactattggt

SEQ ID NO: 525230 - DNA, 19 bp, Mus musculus
  siRNA target sequence for Mapk8ip (NM_011162.2,1685-1703).
ggcagaagactattggtat

SEQ ID NO: 525231 - DNA, 19 bp, Mus musculus
  siRNA target sequence for Mapk8ip (NM_011162.2,1699-1717).
ggtatgaggcctataacat

SEQ ID NO: 525232 - DNA, 19 bp, Mus musculus
  siRNA target sequence for Mapk8ip (NM_011162.2,1844-1862).
gtctgtccaggttccttat

SEQ ID NO: 525233 - DNA, 19 bp, Mus musculus
  siRNA target sequence for Mapk8ip (NM_011162.2,1848-1866).
gtccaggttccttatcaca

SEQ ID NO: 525234 - DNA, 19 bp, Mus musculus
  siRNA target sequence for Mapk8ip (NM_011162.2,1881-1899).
ctctgtgctgctatgcaaa

SEQ ID NO: 525235 - DNA, 19 bp, Mus musculus
  siRNA target sequence for Mapk8ip (NM_011162.2,1917-1935).
cggctcaccgtgcacttta

SEQ ID NO: 525236 - DNA, 19 bp, Mus musculus
  siRNA target sequence for Mapk8ip (NM_011162.2,1918-1936).
ggctcaccgtgcactttaa

SEQ ID NO: 525237 - DNA, 19 bp, Mus musculus
  siRNA target sequence for Mapk8ip (NM_011162.2,1966-1984).
gtgtcaggggtgtcaagat

SEQ ID NO: 525238 - DNA, 19 bp, Mus musculus
  siRNA target sequence for Mapk8ip (NM_011162.2,2065-2083).
gtggataccatccaaagaa

SEQ ID NO: 525239 - DNA, 19 bp, Mus musculus
  siRNA target sequence for Mapk8ip (NM_011162.2,2073-2091).
catccaaagaataacaagt

SEQ ID NO: 525240 - DNA, 19 bp, Mus musculus
  siRNA target sequence for Mapk8ip (NM_011162.2,2090-2108).
gtactttgggtttatcact

SEQ ID NO: 525241 - DNA, 19 bp, Mus musculus
  siRNA target sequence for Mapk8ip (NM_011162.2,2180-2198).
gtctgtggggcgtgcattt

SEQ ID NO: 525242 - DNA, 19 bp, Mus musculus
  siRNA target sequence for Mapk8ip (NM_011162.2,2182-2200).
ctgtggggcgtgcatttca

SEQ ID NO: 525243 - DNA, 19 bp, Mus musculus
  siRNA target sequence for Mapk8ip (NM_011162.2,2191-2209).
gtgcatttcagcagttcta

SEQ ID NO: 525244 - DNA, 19 bp, Mus musculus
  siRNA target sequence for Mapk8ip (NM_011162.2,2193-2211).
gcatttcagcagttctaca

SEQ ID NO: 525245 - DNA, 19 bp, Mus musculus
  siRNA target sequence for Mapk8ip (NM_011162.2,2194-2212).
catttcagcagttctacaa

SEQ ID NO: 525246 - DNA, 19 bp, Mus musculus
  siRNA target sequence for Mapk8ip (NM_011162.2,2225-2243).
gtatacctgtcctacagaa

SEQ ID NO: 525247 - DNA, 19 bp, Mus musculus
  siRNA target sequence for Mapk8ip2 (NM_021921.2,165-183).
gacataagcctggaagaat

SEQ ID NO: 525248 - DNA, 19 bp, Mus musculus
  siRNA target sequence for Mapk8ip2 (NM_021921.2,167-185).
cataagcctggaagaattt

SEQ ID NO: 525249 - DNA, 19 bp, Mus musculus
  siRNA target sequence for Mapk8ip2 (NM_021921.2,285-303).
gagcagccacaccctattt

SEQ ID NO: 525250 - DNA, 19 bp, Mus musculus
  siRNA target sequence for Mapk8ip2 (NM_021921.2,288-306).
cagccacaccctatttgtt

SEQ ID NO: 525251 - DNA, 19 bp, Mus musculus
  siRNA target sequence for Mapk8ip2 (NM_021921.2,540-558).
gactctctgaataacaaca

SEQ ID NO: 525252 - DNA, 19 bp, Mus musculus
  siRNA target sequence for Mapk8ip2 (NM_021921.2,766-784).
cctcggatcctggtattga

SEQ ID NO: 525253 - DNA, 19 bp, Mus musculus
  siRNA target sequence for Mapk8ip2 (NM_021921.2,885-903).
cgcctagggcgcatgatct

SEQ ID NO: 525254 - DNA, 19 bp, Mus musculus
  siRNA target sequence for Mapk8ip2 (NM_021921.2,953-971).
cagtggccgctcatcacat

SEQ ID NO: 525255 - DNA, 19 bp, Mus musculus
  siRNA target sequence for Mapk8ip2 (NM_021921.2,1022-1040).
ggagcccgagccactacat

SEQ ID NO: 525256 - DNA, 19 bp, Mus musculus
  siRNA target sequence for Mapk8ip2 (NM_021921.2,1025-1043).
gcccgagccactacatgaa

SEQ ID NO: 525257 - DNA, 19 bp, Mus musculus
  siRNA target sequence for Mapk8ip2 (NM_021921.2,1167-1185).
ctggtgagccgcatgatct

SEQ ID NO: 525258 - DNA, 19 bp, Mus musculus
  siRNA target sequence for Mapk8ip2 (NM_021921.2,1191-1209).
ggctcctcgcccattcgtt

SEQ ID NO: 525259 - DNA, 19 bp, Mus musculus
  siRNA target sequence for Mapk8ip2 (NM_021921.2,1323-1341).
gtggacatggacactcttt

SEQ ID NO: 525260 - DNA, 19 bp, Mus musculus
  siRNA target sequence for Mapk8ip2 (NM_021921.2,1398-1416).
ccctgccttttccttagta

SEQ ID NO: 525261 - DNA, 19 bp, Mus musculus
  siRNA target sequence for Mapk8ip2 (NM_021921.2,1619-1637).
ggtgtacgatgcagttaaa

SEQ ID NO: 525262 - DNA, 19 bp, Mus musculus
  siRNA target sequence for Mapk8ip2 (NM_021921.2,1751-1769).
ggcgggagctacgttacta

SEQ ID NO: 525263 - DNA, 19 bp, Mus musculus
  siRNA target sequence for Mapk8ip2 (NM_021921.2,2235-2253).
gccacagcccggaaactaa

SEQ ID NO: 525264 - DNA, 19 bp, Mus musculus
  siRNA target sequence for Mapk8ip2 (NM_021921.2,2275-2293).
cctcttgtgaccttgagat

SEQ ID NO: 525265 - DNA, 19 bp, Mus musculus
  siRNA target sequence for Mapk8ip2 (NM_021921.2,2397-2415).
ccccgaaacagctgctatt

SEQ ID NO: 525266 - DNA, 19 bp, Mus musculus
  siRNA target sequence for Mapk8ip2 (NM_021921.2,2399-2417).
ccgaaacagctgctatttt

SEQ ID NO: 525267 - DNA, 19 bp, Mus musculus
  siRNA target sequence for Mapk8ip2 (NM_021921.2,2471-2489).
gtcccaggagtctatgaga

SEQ ID NO: 525268 - DNA, 19 bp, Mus musculus
  siRNA target sequence for Mapk8ip3 (NM_013931.1,483-501).
cagatccaggtagaacatt

SEQ ID NO: 525269 - DNA, 19 bp, Mus musculus
  siRNA target sequence for Mapk8ip3 (NM_013931.1,489-507).
caggtagaacattatgagt

SEQ ID NO: 525270 - DNA, 19 bp, Mus musculus
  siRNA target sequence for Mapk8ip3 (NM_013931.1,728-746).
gcgtcccacctctctgaat

SEQ ID NO: 525271 - DNA, 19 bp, Mus musculus
  siRNA target sequence for Mapk8ip3 (NM_013931.1,999-1017).
cccctgggggactatgtca

SEQ ID NO: 525272 - DNA, 19 bp, Mus musculus
  siRNA target sequence for Mapk8ip3 (NM_013931.1,1135-1153).
ccgatgttcaggacattat

SEQ ID NO: 525273 - DNA, 19 bp, Mus musculus
  siRNA target sequence for Mapk8ip3 (NM_013931.1,1213-1231).
gcccaacccagggaattgt

SEQ ID NO: 525274 - DNA, 19 bp, Mus musculus
  siRNA target sequence for Mapk8ip3 (NM_013931.1,1219-1237).
cccagggaattgtaaacaa

SEQ ID NO: 525275 - DNA, 19 bp, Mus musculus
  siRNA target sequence for Mapk8ip3 (NM_013931.1,1224-1242).
ggaattgtaaacaaagctt

SEQ ID NO: 525276 - DNA, 19 bp, Mus musculus
  siRNA target sequence for Mapk8ip3 (NM_013931.1,1346-1364).
gcgcgatgatttttttgga

SEQ ID NO: 525277 - DNA, 19 bp, Mus musculus
  siRNA target sequence for Mapk8ip3 (NM_013931.1,1532-1550).
gctggagaaccgaatcaaa

SEQ ID NO: 525278 - DNA, 19 bp, Mus musculus
  siRNA target sequence for Mapk8ip3 (NM_013931.1,1577-1595).
caagtcagaggcagtaact

SEQ ID NO: 525279 - DNA, 19 bp, Mus musculus
  siRNA target sequence for Mapk8ip3 (NM_013931.1,1626-1644).
gatgtaagcagctatctct

SEQ ID NO: 525280 - DNA, 19 bp, Mus musculus
  siRNA target sequence for Mapk8ip3 (NM_013931.1,1894-1912).
cctacccatctgtgaacat

SEQ ID NO: 525281 - DNA, 19 bp, Mus musculus
  siRNA target sequence for Mapk8ip3 (NM_013931.1,1895-1913).
ctacccatctgtgaacatt

SEQ ID NO: 525282 - DNA, 19 bp, Mus musculus
  siRNA target sequence for Mapk8ip3 (NM_013931.1,1899-1917).
ccatctgtgaacattcact

SEQ ID NO: 525283 - DNA, 19 bp, Mus musculus
  siRNA target sequence for Mapk8ip3 (NM_013931.1,1900-1918).
catctgtgaacattcacta

SEQ ID NO: 525284 - DNA, 19 bp, Mus musculus
  siRNA target sequence for Mapk8ip3 (NM_013931.1,1903-1921).
ctgtgaacattcactacaa

SEQ ID NO: 525285 - DNA, 19 bp, Mus musculus
  siRNA target sequence for Mapk8ip3 (NM_013931.1,1905-1923).
gtgaacattcactacaagt

SEQ ID NO: 525286 - DNA, 19 bp, Mus musculus
  siRNA target sequence for Mapk8ip3 (NM_013931.1,2162-2180).
ggaagacacccggatgaaa

SEQ ID NO: 525287 - DNA, 19 bp, Mus musculus
  siRNA target sequence for Mapk8ip3 (NM_013931.1,2425-2443).
cctccagtcgggtatggat

SEQ ID NO: 525288 - DNA, 19 bp, Mus musculus
  siRNA target sequence for Mapk8ip3 (NM_013931.1,2532-2550).
gcccacgtcctgtgtatct

SEQ ID NO: 525289 - DNA, 19 bp, Mus musculus
  siRNA target sequence for Mapk8ip3 (NM_013931.1,2991-3009).
ggggaactctcaacaacaa

SEQ ID NO: 525290 - DNA, 19 bp, Mus musculus
  siRNA target sequence for Mapk8ip3 (NM_013931.1,3096-3114).
ctgcactccatcaagctaa

SEQ ID NO: 525291 - DNA, 19 bp, Mus musculus
  siRNA target sequence for Mapk8ip3 (NM_013931.1,3494-3512).
ggacattgagccctatgtt

SEQ ID NO: 525292 - DNA, 19 bp, Mus musculus
  siRNA target sequence for Mapk8ip3 (NM_013931.1,3495-3513).
gacattgagccctatgtta

SEQ ID NO: 525293 - DNA, 19 bp, Mus musculus
  siRNA target sequence for Mapk8ip3 (NM_013931.1,3555-3573).
cgcatcacagccttactca

SEQ ID NO: 525294 - DNA, 19 bp, Mus musculus
  siRNA target sequence for Mapk8ip3 (NM_013931.1,3601-3619).
ctggcaatggggttgtcat

SEQ ID NO: 525295 - DNA, 19 bp, Mus musculus
  siRNA target sequence for Mapk8ip3 (NM_013931.1,3669-3687).
gggctccgagccaacaaga

SEQ ID NO: 525296 - DNA, 19 bp, Mus musculus
  siRNA target sequence for Lmod1 (NM_053106.1,570-588).
gccgaagaagggcgtttta

SEQ ID NO: 525297 - DNA, 19 bp, Mus musculus
  siRNA target sequence for Lmod1 (NM_053106.1,571-589).
ccgaagaagggcgttttaa

SEQ ID NO: 525298 - DNA, 19 bp, Mus musculus
  siRNA target sequence for Lmod1 (NM_053106.1,572-590).
cgaagaagggcgttttaaa

SEQ ID NO: 525299 - DNA, 19 bp, Mus musculus
  siRNA target sequence for Lmod1 (NM_053106.1,576-594).
gaagggcgttttaaagaaa

SEQ ID NO: 525300 - DNA, 19 bp, Mus musculus
  siRNA target sequence for Lmod1 (NM_053106.1,654-672).
gaaggtcatcagaggtatt

SEQ ID NO: 525301 - DNA, 19 bp, Mus musculus
  siRNA target sequence for Lmod1 (NM_053106.1,940-958).
gaggatgagggcataggtt

SEQ ID NO: 525302 - DNA, 19 bp, Mus musculus
  siRNA target sequence for Lmod1 (NM_053106.1,1121-1139).
cagctcccagcatatttga

SEQ ID NO: 525303 - DNA, 19 bp, Mus musculus
  siRNA target sequence for Lmod1 (NM_053106.1,1302-1320).
ccatgtggcctttgcaatt

SEQ ID NO: 525304 - DNA, 19 bp, Mus musculus
  siRNA target sequence for Lmod1 (NM_053106.1,1315-1333).
gcaattgctatcatgttaa

SEQ ID NO: 525305 - DNA, 19 bp, Mus musculus
  siRNA target sequence for Pacsin1 (NM_011861.1,403-421).
cgagaaaggtcctcagtat

SEQ ID NO: 525306 - DNA, 19 bp, Mus musculus
  siRNA target sequence for Pacsin1 (NM_011861.1,623-641).
ccctgggctaaaaagatga

SEQ ID NO: 525307 - DNA, 19 bp, Mus musculus
  siRNA target sequence for Pacsin1 (NM_011861.1,656-674).
gccaagaaggcctatcact

SEQ ID NO: 525308 - DNA, 19 bp, Mus musculus
  siRNA target sequence for Pacsin1 (NM_011861.1,657-675).
ccaagaaggcctatcactt

SEQ ID NO: 525309 - DNA, 19 bp, Mus musculus
  siRNA target sequence for Pacsin1 (NM_011861.1,705-723).
cccgggagatgaacagtaa

SEQ ID NO: 525310 - DNA, 19 bp, Mus musculus
  siRNA target sequence for Pacsin1 (NM_011861.1,707-725).
cgggagatgaacagtaaga

SEQ ID NO: 525311 - DNA, 19 bp, Mus musculus
  siRNA target sequence for Pacsin1 (NM_011861.1,929-947).
gaagtcctgctggatatca

SEQ ID NO: 525312 - DNA, 19 bp, Mus musculus
  siRNA target sequence for Pacsin1 (NM_011861.1,975-993).
gcagctacatgcatgtcta

SEQ ID NO: 525313 - DNA, 19 bp, Mus musculus
  siRNA target sequence for Pacsin1 (NM_011861.1,1214-1232).
ggggaccgtggcagtgtta

SEQ ID NO: 525314 - DNA, 19 bp, Mus musculus
  siRNA target sequence for Pacsin1 (NM_011861.1,1356-1374).
gtgtacgggcactctatga

SEQ ID NO: 525315 - DNA, 19 bp, Mus musculus
  siRNA target sequence for Pacsin2 (NM_011862.1,550-568).
gaaggcatcactgatgaat

SEQ ID NO: 525316 - DNA, 19 bp, Mus musculus
  siRNA target sequence for Pacsin2 (NM_011862.1,826-844).
caagatagaaaaatgcaaa

SEQ ID NO: 525317 - DNA, 19 bp, Mus musculus
  siRNA target sequence for Pacsin2 (NM_011862.1,840-858).
gcaaacaggacgttctaaa

SEQ ID NO: 525318 - DNA, 19 bp, Mus musculus
  siRNA target sequence for Pacsin2 (NM_011862.1,1023-1041).
ccaatgtggctagctataa

SEQ ID NO: 525319 - DNA, 19 bp, Mus musculus
  siRNA target sequence for Pacsin2 (NM_011862.1,1028-1046).
gtggctagctataaaacca

SEQ ID NO: 525320 - DNA, 19 bp, Mus musculus
  siRNA target sequence for Pacsin2 (NM_011862.1,1102-1120).
gtggttccgggctaaccat

SEQ ID NO: 525321 - DNA, 19 bp, Mus musculus
  siRNA target sequence for Pacsin2 (NM_011862.1,1159-1177).
gtggtctgcagatctgaat

SEQ ID NO: 525322 - DNA, 19 bp, Mus musculus
  siRNA target sequence for Pacsin2 (NM_011862.1,1272-1290).
ctggcagcaaccttagtgt

SEQ ID NO: 525323 - DNA, 19 bp, Mus musculus
  siRNA target sequence for Pacsin2 (NM_011862.1,1305-1323).
cccagtccacgcagttaca

SEQ ID NO: 525324 - DNA, 19 bp, Mus musculus
  siRNA target sequence for Pacsin2 (NM_011862.1,1384-1402).
ggacattaaggccaaaaat

SEQ ID NO: 525325 - DNA, 19 bp, Mus musculus
  siRNA target sequence for Pacsin2 (NM_011862.1,1516-1534).
cacgacctcaggaacagaa

SEQ ID NO: 525326 - DNA, 19 bp, Mus musculus
  siRNA target sequence for Pacsin2 (NM_011862.1,1641-1659).
ggtgcaagggacgtttaga

SEQ ID NO: 525327 - DNA, 19 bp, Mus musculus
  siRNA target sequence for Pacsin3 (NM_028733.1,479-497).
gaacgtgcccgcattgaga

SEQ ID NO: 525328 - DNA, 19 bp, Mus musculus
  siRNA target sequence for Pacsin3 (NM_028733.1,745-763).
ggatggtttccgtaaagct

SEQ ID NO: 525329 - DNA, 19 bp, Mus musculus
  siRNA target sequence for Pacsin3 (NM_028733.1,794-812).
gttgaggcttctaagaaga

SEQ ID NO: 525330 - DNA, 19 bp, Mus musculus
  siRNA target sequence for Pacsin3 (NM_028733.1,1055-1073).
cagcggcttctcttcttca

SEQ ID NO: 525331 - DNA, 19 bp, Mus musculus
  siRNA target sequence for Pacsin3 (NM_028733.1,1244-1262).
gaggaatggtcgttagaca

SEQ ID NO: 525332 - DNA, 19 bp, Mus musculus
  siRNA target sequence for Pacsin3 (NM_028733.1,1302-1320).
gcccagatgaggttactct

SEQ ID NO: 525333 - DNA, 19 bp, Mus musculus
  siRNA target sequence for Pacsin3 (NM_028733.1,1327-1345).
cattgtaccgacaagagat

SEQ ID NO: 525334 - DNA, 19 bp, Mus musculus
  siRNA target sequence for Pacsin3 (NM_028733.1,1581-1599).
gtctgtaccctgccaatta

SEQ ID NO: 525335 - DNA, 19 bp, Mus musculus
  siRNA target sequence for Pacsin3 (NM_028733.1,1585-1603).
gtaccctgccaattacgta

SEQ ID NO: 525336 - DNA, 19 bp, Mus musculus
  siRNA target sequence for Pacsin3 (NM_028733.1,1589-1607).
cctgccaattacgtagaat

SEQ ID NO: 525337 - DNA, 19 bp, Mus musculus
  siRNA target sequence for Pacsin3 (NM_028733.1,1593-1611).
ccaattacgtagaatgtgt

SEQ ID NO: 525338 - DNA, 19 bp, Mus musculus
  siRNA target sequence for Pdlim3 (NM_016798.2,144-162).
ctctctgggggcatagact

SEQ ID NO: 525339 - DNA, 19 bp, Mus musculus
  siRNA target sequence for Pdlim3 (NM_016798.2,246-264).
gctattgatggctttggta

SEQ ID NO: 525340 - DNA, 19 bp, Mus musculus
  siRNA target sequence for Pdlim3 (NM_016798.2,256-274).
gctttggtacggagtctat

SEQ ID NO: 525341 - DNA, 19 bp, Mus musculus
  siRNA target sequence for Pdlim3 (NM_016798.2,317-335).
ccagttgtgtctcaagatt

SEQ ID NO: 525342 - DNA, 19 bp, Mus musculus
  siRNA target sequence for Pdlim3 (NM_016798.2,342-360).
gcagaaactcgcttatggt

SEQ ID NO: 525343 - DNA, 19 bp, Mus musculus
  siRNA target sequence for Pdlim3 (NM_016798.2,441-459).
ggtaccgcgcacaacagaa

SEQ ID NO: 525344 - DNA, 19 bp, Mus musculus
  siRNA target sequence for Pdlim3 (NM_016798.2,473-491).
cgtagcagcagcaaacatt

SEQ ID NO: 525345 - DNA, 19 bp, Mus musculus
  siRNA target sequence for Pdlim3 (NM_016798.2,478-496).
cagcagcaaacattgatga

SEQ ID NO: 525346 - DNA, 19 bp, Mus musculus
  siRNA target sequence for Pdlim3 (NM_016798.2,506-524).
ggtagtgagcgcttcctat

SEQ ID NO: 525347 - DNA, 19 bp, Mus musculus
  siRNA target sequence for Pdlim3 (NM_016798.2,507-525).
gtagtgagcgcttcctata

SEQ ID NO: 525348 - DNA, 19 bp, Mus musculus
  siRNA target sequence for Pdlim3 (NM_016798.2,531-549).
ccaattgggctctattcaa

SEQ ID NO: 525349 - DNA, 19 bp, Mus musculus
  siRNA target sequence for Pdlim3 (NM_016798.2,596-614).
ccccggatcactgcaaaat

SEQ ID NO: 525350 - DNA, 19 bp, Mus musculus
  siRNA target sequence for Pdlim3 (NM_016798.2,598-616).
ccggatcactgcaaaatga

SEQ ID NO: 525351 - DNA, 19 bp, Mus musculus
  siRNA target sequence for Pdlim3 (NM_016798.2,599-617).
cggatcactgcaaaatgaa

SEQ ID NO: 525352 - DNA, 19 bp, Mus musculus
  siRNA target sequence for Pdlim3 (NM_016798.2,773-791).
gagggctccggttacgaaa

SEQ ID NO: 525353 - DNA, 19 bp, Mus musculus
  siRNA target sequence for Pdlim3 (NM_016798.2,836-854).
caagtgtgggagtggtatt

SEQ ID NO: 525354 - DNA, 19 bp, Mus musculus
  siRNA target sequence for Sdc1 (NM_011519.1,296-314).
ctgccctcccgcaaattgt

SEQ ID NO: 525355 - DNA, 19 bp, Mus musculus
  siRNA target sequence for Sdc1 (NM_011519.1,305-323).
cgcaaattgtggctgtaaa

SEQ ID NO: 525356 - DNA, 19 bp, Mus musculus
  siRNA target sequence for Sdc1 (NM_011519.1,306-324).
gcaaattgtggctgtaaat

SEQ ID NO: 525357 - DNA, 19 bp, Mus musculus
  siRNA target sequence for Sdc1 (NM_011519.1,388-406).
ggtgctttgccagatactt

SEQ ID NO: 525358 - DNA, 19 bp, Mus musculus
  siRNA target sequence for Sdc1 (NM_011519.1,389-407).
gtgctttgccagatacttt

SEQ ID NO: 525359 - DNA, 19 bp, Mus musculus
  siRNA target sequence for Sdc1 (NM_011519.1,391-409).
gctttgccagatactttgt

SEQ ID NO: 525360 - DNA, 19 bp, Mus musculus
  siRNA target sequence for Sdc1 (NM_011519.1,581-599).
ctgctcgggacaaggaaaa

SEQ ID NO: 525361 - DNA, 19 bp, Mus musculus
  siRNA target sequence for Sdc1 (NM_011519.1,791-809).
gcggcacttctgtcatcaa

SEQ ID NO: 525362 - DNA, 19 bp, Mus musculus
  siRNA target sequence for Sdc1 (NM_011519.1,792-810).
cggcacttctgtcatcaaa

SEQ ID NO: 525363 - DNA, 19 bp, Mus musculus
  siRNA target sequence for Sdc1 (NM_011519.1,794-812).
gcacttctgtcatcaaaga

SEQ ID NO: 525364 - DNA, 19 bp, Mus musculus
  siRNA target sequence for Sdc2 (NM_008304.1,592-610).
gctgacatccgataaggat

SEQ ID NO: 525365 - DNA, 19 bp, Mus musculus
  siRNA target sequence for Sdc2 (NM_008304.1,593-611).
ctgacatccgataaggata

SEQ ID NO: 525366 - DNA, 19 bp, Mus musculus
  siRNA target sequence for Sdc2 (NM_008304.1,597-615).
catccgataaggatatgta

SEQ ID NO: 525367 - DNA, 19 bp, Mus musculus
  siRNA target sequence for Sdc2 (NM_008304.1,607-625).
ggatatgtaccttgacaat

SEQ ID NO: 525368 - DNA, 19 bp, Mus musculus
  siRNA target sequence for Sdc2 (NM_008304.1,645-663).
caggagtatatcctattga

SEQ ID NO: 525369 - DNA, 19 bp, Mus musculus
  siRNA target sequence for Sdc2 (NM_008304.1,785-803).
gaaaccatgacgttgaaga

SEQ ID NO: 525370 - DNA, 19 bp, Mus musculus
  siRNA target sequence for Sdc2 (NM_008304.1,886-904).
gctgggccctgctataaaa

SEQ ID NO: 525371 - DNA, 19 bp, Mus musculus
  siRNA target sequence for Sdc2 (NM_008304.1,916-934).
gtacacggagaaacattca

SEQ ID NO: 525372 - DNA, 19 bp, Mus musculus
  siRNA target sequence for Sdc2 (NM_008304.1,929-947).
cattcagacaatctgttta

SEQ ID NO: 525373 - DNA, 19 bp, Mus musculus
  siRNA target sequence for Sdc2 (NM_008304.1,943-961).
gtttaaacggacagaagtt

SEQ ID NO: 525374 - DNA, 19 bp, Mus musculus
  siRNA target sequence for Sdc2 (NM_008304.1,983-1001).
ggtgtgatcggctttctct

SEQ ID NO: 525375 - DNA, 19 bp, Mus musculus
  siRNA target sequence for Sdc2 (NM_008304.1,984-1002).
gtgtgatcggctttctctt

SEQ ID NO: 525376 - DNA, 19 bp, Mus musculus
  siRNA target sequence for Sdc2 (NM_008304.1,1030-1048).
gtaccgcatgcggaagaaa

SEQ ID NO: 525377 - DNA, 19 bp, Mus musculus
  siRNA target sequence for Sdc2 (NM_008304.1,1033-1051).
ccgcatgcggaagaaagat

SEQ ID NO: 525378 - DNA, 19 bp, Mus musculus
  siRNA target sequence for Sdc2 (NM_008304.1,1067-1085).
cttggagaacgcaaaccat

SEQ ID NO: 525379 - DNA, 19 bp, Mus musculus
  siRNA target sequence for Sdc2 (NM_008304.1,1106-1124).
gcacccactaaggagtttt

SEQ ID NO: 525380 - DNA, 19 bp, Mus musculus
  siRNA target sequence for Sdc2 (NM_008304.1,1107-1125).
cacccactaaggagtttta

SEQ ID NO: 525381 - DNA, 19 bp, Mus musculus
  siRNA target sequence for Sdc3 (NM_011520.1,170-188).
caacgctggcgcaatgaga

SEQ ID NO: 525382 - DNA, 19 bp, Mus musculus
  siRNA target sequence for Sdc3 (NM_011520.1,229-247).
cgactcgtttcctgatgat

SEQ ID NO: 525383 - DNA, 19 bp, Mus musculus
  siRNA target sequence for Sdc3 (NM_011520.1,390-408).
ccgtggacaccccatttga

SEQ ID NO: 525384 - DNA, 19 bp, Mus musculus
  siRNA target sequence for Sdc3 (NM_011520.1,488-506).
gagtccagccagaaagcta

SEQ ID NO: 525385 - DNA, 19 bp, Mus musculus
  siRNA target sequence for Sdc4 (NM_011521.1,182-200).
ctggcggctcggatgactt

SEQ ID NO: 525386 - DNA, 19 bp, Mus musculus
  siRNA target sequence for Sdc4 (NM_011521.1,185-203).
gcggctcggatgactttga

SEQ ID NO: 525387 - DNA, 19 bp, Mus musculus
  siRNA target sequence for Sdc4 (NM_011521.1,245-263).
ggcccttccctgaagtgat

SEQ ID NO: 525388 - DNA, 19 bp, Mus musculus
  siRNA target sequence for Sdc4 (NM_011521.1,246-264).
gcccttccctgaagtgatt

SEQ ID NO: 525389 - DNA, 19 bp, Mus musculus
  siRNA target sequence for Sdc4 (NM_011521.1,269-287).
ccttggtgccactggataa

SEQ ID NO: 525390 - DNA, 19 bp, Mus musculus
  siRNA target sequence for Sdc4 (NM_011521.1,380-398).
ccgacgtgggggatgacat

SEQ ID NO: 525391 - DNA, 19 bp, Mus musculus
  siRNA target sequence for Sdc4 (NM_011521.1,390-408).
ggatgacatgtccaacaaa

SEQ ID NO: 525392 - DNA, 19 bp, Mus musculus
  siRNA target sequence for Sdc4 (NM_011521.1,571-589).
ggcaagaaacccatctaca

SEQ ID NO: 525393 - DNA, 19 bp, Mus musculus
  siRNA target sequence for Sdc4 (NM_011521.1,596-614).
cccccaccaatgagttcta

SEQ ID NO: 525394 - DNA, 19 bp, Mus musculus
  siRNA target sequence for Tada3l (NM_133932.1,767-785).
gatgaagctgaacattata

SEQ ID NO: 525395 - DNA, 19 bp, Mus musculus
  siRNA target sequence for Carm1 (NM_021531.1,363-381).
cacaccccacgatttctgt

SEQ ID NO: 525396 - DNA, 19 bp, Mus musculus
  siRNA target sequence for Carm1 (NM_021531.1,367-385).
ccccacgatttctgttctt

SEQ ID NO: 525397 - DNA, 19 bp, Mus musculus
  siRNA target sequence for Carm1 (NM_021531.1,368-386).
cccacgatttctgttcttt

SEQ ID NO: 525398 - DNA, 19 bp, Mus musculus
  siRNA target sequence for Carm1 (NM_021531.1,468-486).
gcagtacttccagttctat

SEQ ID NO: 525399 - DNA, 19 bp, Mus musculus
  siRNA target sequence for Carm1 (NM_021531.1,806-824).
gctacatgctcttcaatga

SEQ ID NO: 525400 - DNA, 19 bp, Mus musculus
  siRNA target sequence for Carm1 (NM_021531.1,839-857).
gctacctccatgccaaaaa

SEQ ID NO: 525401 - DNA, 19 bp, Mus musculus
  siRNA target sequence for Carm1 (NM_021531.1,1013-1031).
ccgctgtggatgagtactt

SEQ ID NO: 525402 - DNA, 19 bp, Mus musculus
  siRNA target sequence for Carm1 (NM_021531.1,1075-1093).
gccaaatctgtcaagtaca

SEQ ID NO: 525403 - DNA, 19 bp, Mus musculus
  siRNA target sequence for Carm1 (NM_021531.1,1122-1140).
cgatttgcacaggatagaa

SEQ ID NO: 525404 - DNA, 19 bp, Mus musculus
  siRNA target sequence for Carm1 (NM_021531.1,1133-1151).
ggatagaaatcccattcaa

SEQ ID NO: 525405 - DNA, 19 bp, Mus musculus
  siRNA target sequence for Carm1 (NM_021531.1,1196-1214).
ggttcgatgttgctttcat

SEQ ID NO: 525406 - DNA, 19 bp, Mus musculus
  siRNA target sequence for Carm1 (NM_021531.1,1197-1215).
gttcgatgttgctttcatt

SEQ ID NO: 525407 - DNA, 19 bp, Mus musculus
  siRNA target sequence for Carm1 (NM_021531.1,1207-1225).
gctttcattggctccataa

SEQ ID NO: 525408 - DNA, 19 bp, Mus musculus
  siRNA target sequence for Carm1 (NM_021531.1,1290-1308).
cttccagtcaccgttgttt

SEQ ID NO: 525409 - DNA, 19 bp, Mus musculus
  siRNA target sequence for Carm1 (NM_021531.1,1342-1360).
ctgcttattgccaacaaaa

SEQ ID NO: 525410 - DNA, 19 bp, Mus musculus
  siRNA target sequence for Carm1 (NM_021531.1,1496-1514).
cgtctccctcggagaatat

SEQ ID NO: 525411 - DNA, 19 bp, Mus musculus
  siRNA target sequence for Carm1 (NM_021531.1,1523-1541).
caggaagcacctataatct

SEQ ID NO: 525412 - DNA, 19 bp, Mus musculus
  siRNA target sequence for Carm1 (NM_021531.1,1642-1660).
gctaacacagggattgtca

SEQ ID NO: 525413 - DNA, 19 bp, Mus musculus
  siRNA target sequence for Carm1 (NM_021531.1,1643-1661).
ctaacacagggattgtcaa

SEQ ID NO: 525414 - DNA, 19 bp, Mus musculus
  siRNA target sequence for Carm1 (NM_021531.1,1673-1691).
cccggatgggctccataat

SEQ ID NO: 525415 - DNA, 19 bp, Mus musculus
  siRNA target sequence for Carm1 (NM_021531.1,1675-1693).
cggatgggctccataatga

SEQ ID NO: 525416 - DNA, 19 bp, Mus musculus
  siRNA target sequence for Carm1 (NM_021531.1,1751-1769).
cccactatgcagtcaacaa

SEQ ID NO: 525417 - DNA, 19 bp, Mus musculus
  siRNA target sequence for Catnb (NM_007614.2,559-577).
ctgctcatcccactaatgt

SEQ ID NO: 525418 - DNA, 19 bp, Mus musculus
  siRNA target sequence for Catnb (NM_007614.2,591-609).
gaaccatcacagatgttga

SEQ ID NO: 525419 - DNA, 19 bp, Mus musculus
  siRNA target sequence for Catnb (NM_007614.2,612-630).
catgcagttgtcaatttga

SEQ ID NO: 525420 - DNA, 19 bp, Mus musculus
  siRNA target sequence for Catnb (NM_007614.2,618-636).
gttgtcaatttgattaact

SEQ ID NO: 525421 - DNA, 19 bp, Mus musculus
  siRNA target sequence for Catnb (NM_007614.2,680-698).
gacaaaactgctaaacgat

SEQ ID NO: 525422 - DNA, 19 bp, Mus musculus
  siRNA target sequence for Catnb (NM_007614.2,699-717).
gaggaccaggtggtagtta

SEQ ID NO: 525423 - DNA, 19 bp, Mus musculus
  siRNA target sequence for Catnb (NM_007614.2,704-722).
ccaggtggtagttaataaa

SEQ ID NO: 525424 - DNA, 19 bp, Mus musculus
  siRNA target sequence for Catnb (NM_007614.2,707-725).
ggtggtagttaataaagct

SEQ ID NO: 525425 - DNA, 19 bp, Mus musculus
  siRNA target sequence for Catnb (NM_007614.2,735-753).
gtccatcagctttccaaaa

SEQ ID NO: 525426 - DNA, 19 bp, Mus musculus
  siRNA target sequence for Catnb (NM_007614.2,807-825).
gtacgcaccatgcagaata

SEQ ID NO: 525427 - DNA, 19 bp, Mus musculus
  siRNA target sequence for Catnb (NM_007614.2,814-832).
ccatgcagaatacaaatga

SEQ ID NO: 525428 - DNA, 19 bp, Mus musculus
  siRNA target sequence for Catnb (NM_007614.2,818-836).
gcagaatacaaatgatgta

SEQ ID NO: 525429 - DNA, 19 bp, Mus musculus
  siRNA target sequence for Catnb (NM_007614.2,858-876).
gggactctgcacaaccttt

SEQ ID NO: 525430 - DNA, 19 bp, Mus musculus
  siRNA target sequence for Catnb (NM_007614.2,862-880).
ctctgcacaacctttctca

SEQ ID NO: 525431 - DNA, 19 bp, Mus musculus
  siRNA target sequence for Catnb (NM_007614.2,890-908).
gggcttgctggccatcttt

SEQ ID NO: 525432 - DNA, 19 bp, Mus musculus
  siRNA target sequence for Catnb (NM_007614.2,925-943).
cagcgctggtgaaaatgct

SEQ ID NO: 525433 - DNA, 19 bp, Mus musculus
  siRNA target sequence for Catnb (NM_007614.2,977-995).
catcacgacactgcataat

SEQ ID NO: 525434 - DNA, 19 bp, Mus musculus
  siRNA target sequence for Catnb (NM_007614.2,1042-1060).
gtggactgcagaaaatggt

SEQ ID NO: 525435 - DNA, 19 bp, Mus musculus
  siRNA target sequence for Catnb (NM_007614.2,1170-1188).
ggaccccaagccttagtaa

SEQ ID NO: 525436 - DNA, 19 bp, Mus musculus
  siRNA target sequence for Catnb (NM_007614.2,1171-1189).
gaccccaagccttagtaaa

SEQ ID NO: 525437 - DNA, 19 bp, Mus musculus
  siRNA target sequence for Catnb (NM_007614.2,1173-1191).
ccccaagccttagtaaaca

SEQ ID NO: 525438 - DNA, 19 bp, Mus musculus
  siRNA target sequence for Catnb (NM_007614.2,1175-1193).
ccaagccttagtaaacata

SEQ ID NO: 525439 - DNA, 19 bp, Mus musculus
  siRNA target sequence for Catnb (NM_007614.2,1179-1197).
gccttagtaaacataatga

SEQ ID NO: 525440 - DNA, 19 bp, Mus musculus
  siRNA target sequence for Catnb (NM_007614.2,1198-1216).
ggacctacacttatgagaa

SEQ ID NO: 525441 - DNA, 19 bp, Mus musculus
  siRNA target sequence for Catnb (NM_007614.2,1328-1346).
cccaagtcagcgacttgtt

SEQ ID NO: 525442 - DNA, 19 bp, Mus musculus
  siRNA target sequence for Catnb (NM_007614.2,1333-1351).
gtcagcgacttgttcaaaa

SEQ ID NO: 525443 - DNA, 19 bp, Mus musculus
  siRNA target sequence for Catnb (NM_007614.2,1335-1353).
cagcgacttgttcaaaact

SEQ ID NO: 525444 - DNA, 19 bp, Mus musculus
  siRNA target sequence for Catnb (NM_007614.2,1337-1355).
gcgacttgttcaaaactgt

SEQ ID NO: 525445 - DNA, 19 bp, Mus musculus
  siRNA target sequence for Catnb (NM_007614.2,1437-1455).
ctgggttccgatgatataa

SEQ ID NO: 525446 - DNA, 19 bp, Mus musculus
  siRNA target sequence for Catnb (NM_007614.2,1441-1459).
gttccgatgatataaatgt

SEQ ID NO: 525447 - DNA, 19 bp, Mus musculus
  siRNA target sequence for Catnb (NM_007614.2,1463-1481).
cacctgtgcagctggaatt

SEQ ID NO: 525448 - DNA, 19 bp, Mus musculus
  siRNA target sequence for Catnb (NM_007614.2,1471-1489).
cagctggaattctctctaa

SEQ ID NO: 525449 - DNA, 19 bp, Mus musculus
  siRNA target sequence for Catnb (NM_007614.2,1484-1502).
ctctaacctcacttgcaat

SEQ ID NO: 525450 - DNA, 19 bp, Mus musculus
  siRNA target sequence for Catnb (NM_007614.2,1486-1504).
ctaacctcacttgcaataa

SEQ ID NO: 525451 - DNA, 19 bp, Mus musculus
  siRNA target sequence for Catnb (NM_007614.2,1573-1591).
ctggtgacagggaagacat

SEQ ID NO: 525452 - DNA, 19 bp, Mus musculus
  siRNA target sequence for Catnb (NM_007614.2,1736-1754).
ggcaactgttggattgatt

SEQ ID NO: 525453 - DNA, 19 bp, Mus musculus
  siRNA target sequence for Catnb (NM_007614.2,1793-1811).
gcgggaacagggtgctatt

SEQ ID NO: 525454 - DNA, 19 bp, Mus musculus
  siRNA target sequence for Catnb (NM_007614.2,1807-1825).
ctattccacgactagttca

SEQ ID NO: 525455 - DNA, 19 bp, Mus musculus
  siRNA target sequence for Catnb (NM_007614.2,1876-1894).
gaacgcagcagcagtttgt

SEQ ID NO: 525456 - DNA, 19 bp, Mus musculus
  siRNA target sequence for Catnb (NM_007614.2,1904-1922).
gcgcatggaggagatagta

SEQ ID NO: 525457 - DNA, 19 bp, Mus musculus
  siRNA target sequence for Catnb (NM_007614.2,1961-1979).
cgttcacaaccggattgta

SEQ ID NO: 525458 - DNA, 19 bp, Mus musculus
  siRNA target sequence for Catnb (NM_007614.2,1962-1980).
gttcacaaccggattgtaa

SEQ ID NO: 525459 - DNA, 19 bp, Mus musculus
  siRNA target sequence for Catnb (NM_007614.2,1977-1995).
gtaatccgaggactcaata

SEQ ID NO: 525460 - DNA, 19 bp, Mus musculus
  siRNA target sequence for Catnb (NM_007614.2,1982-2000).
ccgaggactcaataccatt

SEQ ID NO: 525461 - DNA, 19 bp, Mus musculus
  siRNA target sequence for Catnb (NM_007614.2,1986-2004).
ggactcaataccattccat

SEQ ID NO: 525462 - DNA, 19 bp, Mus musculus
  siRNA target sequence for Catnb (NM_007614.2,1987-2005).
gactcaataccattccatt

SEQ ID NO: 525463 - DNA, 19 bp, Mus musculus
  siRNA target sequence for Catnb (NM_007614.2,2125-2143).
ctcccctgacagagttact

SEQ ID NO: 525464 - DNA, 19 bp, Mus musculus
  siRNA target sequence for Catnb (NM_007614.2,2205-2223).
gacaagccacaggattaca

SEQ ID NO: 525465 - DNA, 19 bp, Mus musculus
  siRNA target sequence for Catnb (NM_007614.2,2353-2371).
ccagctaccgttcttttca

SEQ ID NO: 525466 - DNA, 19 bp, Mus musculus
  siRNA target sequence for Catnb (NM_007614.2,2410-2428).
ctatgatggagcatgagat

SEQ ID NO: 525467 - DNA, 19 bp, Mus musculus
  siRNA target sequence for Cbfb (NM_022309.2,368-386).
gccgcgagtgcgagattaa

SEQ ID NO: 525468 - DNA, 19 bp, Mus musculus
  siRNA target sequence for Cbfb (NM_022309.2,370-388).
cgcgagtgcgagattaagt

SEQ ID NO: 525469 - DNA, 19 bp, Mus musculus
  siRNA target sequence for Cbfb (NM_022309.2,371-389).
gcgagtgcgagattaagta

SEQ ID NO: 525470 - DNA, 19 bp, Mus musculus
  siRNA target sequence for Cbfb (NM_022309.2,373-391).
gagtgcgagattaagtaca

SEQ ID NO: 525471 - DNA, 19 bp, Mus musculus
  siRNA target sequence for Cbfb (NM_022309.2,478-496).
gctacaggaaccaatctgt

SEQ ID NO: 525472 - DNA, 19 bp, Mus musculus
  siRNA target sequence for Cbfb (NM_022309.2,542-560).
cacctagccgggaatatgt

SEQ ID NO: 525473 - DNA, 19 bp, Mus musculus
  siRNA target sequence for Cbfb (NM_022309.2,551-569).
gggaatatgtcgacttaga

SEQ ID NO: 525474 - DNA, 19 bp, Mus musculus
  siRNA target sequence for Cbfb (NM_022309.2,553-571).
gaatatgtcgacttagaga

SEQ ID NO: 525475 - DNA, 19 bp, Mus musculus
  siRNA target sequence for Cbfb (NM_022309.2,572-590).
gagaagcaggcaaggtata

SEQ ID NO: 525476 - DNA, 19 bp, Mus musculus
  siRNA target sequence for Cbfb (NM_022309.2,577-595).
gcaggcaaggtatacttga

SEQ ID NO: 525477 - DNA, 19 bp, Mus musculus
  siRNA target sequence for Cbfb (NM_022309.2,578-596).
caggcaaggtatacttgaa

SEQ ID NO: 525478 - DNA, 19 bp, Mus musculus
  siRNA target sequence for Cbfb (NM_022309.2,597-615).
ggctcccatgattctgaat

SEQ ID NO: 525479 - DNA, 19 bp, Mus musculus
  siRNA target sequence for Cbfb (NM_022309.2,616-634).
ggagtgtgtgttatatgga

SEQ ID NO: 525480 - DNA, 19 bp, Mus musculus
  siRNA target sequence for Cbfb (NM_022309.2,632-650).
ggaagggctggattgatct

SEQ ID NO: 525481 - DNA, 19 bp, Mus musculus
  siRNA target sequence for Cbfb (NM_022309.2,776-794).
ggtctcaccgggaggaaat

SEQ ID NO: 525482 - DNA, 19 bp, Mus musculus
  siRNA target sequence for Cbfb (NM_022309.2,818-836).
ctagtcctggttctaactt

SEQ ID NO: 525483 - DNA, 19 bp, Mus musculus
  siRNA target sequence for Cbfb (NM_022309.2,842-860).
gcggtgatgatctcaaact

SEQ ID NO: 525484 - DNA, 19 bp, Mus musculus
  siRNA target sequence for Cbfb (NM_022309.2,843-861).
cggtgatgatctcaaactt

SEQ ID NO: 525485 - DNA, 19 bp, Mus musculus
  siRNA target sequence for Cited4 (NM_019563.1,691-709).
ggccagagcgagttcgatt

SEQ ID NO: 525486 - DNA, 19 bp, Mus musculus
  siRNA target sequence for Fhl5 (NM_021318.2,189-207).
gtagtcaatttgattgtca

SEQ ID NO: 525487 - DNA, 19 bp, Mus musculus
  siRNA target sequence for Fhl5 (NM_021318.2,222-240).
ccctgattgggaagaaata

SEQ ID NO: 525488 - DNA, 19 bp, Mus musculus
  siRNA target sequence for Fhl5 (NM_021318.2,231-249).
ggaagaaatatgtactcaa

SEQ ID NO: 525489 - DNA, 19 bp, Mus musculus
  siRNA target sequence for Fhl5 (NM_021318.2,273-291).
cctgctacgatcgtatctt

SEQ ID NO: 525490 - DNA, 19 bp, Mus musculus
  siRNA target sequence for Fhl5 (NM_021318.2,274-292).
ctgctacgatcgtatcttt

SEQ ID NO: 525491 - DNA, 19 bp, Mus musculus
  siRNA target sequence for Fhl5 (NM_021318.2,277-295).
ctacgatcgtatcttttct

SEQ ID NO: 525492 - DNA, 19 bp, Mus musculus
  siRNA target sequence for Fhl5 (NM_021318.2,284-302).
cgtatcttttctaactatt

SEQ ID NO: 525493 - DNA, 19 bp, Mus musculus
  siRNA target sequence for Fhl5 (NM_021318.2,298-316).
ctattgtgagcagtgtaaa

SEQ ID NO: 525494 - DNA, 19 bp, Mus musculus
  siRNA target sequence for Fhl5 (NM_021318.2,310-328).
gtgtaaagaaccaattgaa

SEQ ID NO: 525495 - DNA, 19 bp, Mus musculus
  siRNA target sequence for Fhl5 (NM_021318.2,515-533).
ggttctcggaaaatggaat

SEQ ID NO: 525496 - DNA, 19 bp, Mus musculus
  siRNA target sequence for Fhl5 (NM_021318.2,516-534).
gttctcggaaaatggaatt

SEQ ID NO: 525497 - DNA, 19 bp, Mus musculus
  siRNA target sequence for Fhl5 (NM_021318.2,519-537).
ctcggaaaatggaatttaa

SEQ ID NO: 525498 - DNA, 19 bp, Mus musculus
  siRNA target sequence for Fhl5 (NM_021318.2,530-548).
gaatttaagggcaattact

SEQ ID NO: 525499 - DNA, 19 bp, Mus musculus
  siRNA target sequence for Fhl5 (NM_021318.2,539-557).
ggcaattactggcatgaaa

SEQ ID NO: 525500 - DNA, 19 bp, Mus musculus
  siRNA target sequence for Fhl5 (NM_021318.2,577-595).
ctgccgacagccaatagga

SEQ ID NO: 525501 - DNA, 19 bp, Mus musculus
  siRNA target sequence for Fhl5 (NM_021318.2,612-630).
ccaaagagagtggcaatta

SEQ ID NO: 525502 - DNA, 19 bp, Mus musculus
  siRNA target sequence for Fhl5 (NM_021318.2,693-711).
cttccggtgggataacctt

SEQ ID NO: 525503 - DNA, 19 bp, Mus musculus
  siRNA target sequence for Fhl5 (NM_021318.2,773-791).
gaggaggcatttatgtcaa

SEQ ID NO: 525504 - DNA, 19 bp, Mus musculus
  siRNA target sequence for Fhl5 (NM_021318.2,778-796).
ggcatttatgtcaaaggat

SEQ ID NO: 525505 - DNA, 19 bp, Mus musculus
  siRNA target sequence for Fhl5 (NM_021318.2,804-822).
cattctgcctggattgcta

SEQ ID NO: 525506 - DNA, 19 bp, Mus musculus
  siRNA target sequence for Fhl5 (NM_021318.2,827-845).
catctttatgctaaaaagt

SEQ ID NO: 525507 - DNA, 19 bp, Mus musculus
  siRNA target sequence for Fhl5 (NM_021318.2,886-904).
caagttcatctgctttcaa

SEQ ID NO: 525508 - DNA, 19 bp, Mus musculus
  siRNA target sequence for Fhl5 (NM_021318.2,959-977).
gtgggtgaaggattcttga

SEQ ID NO: 525509 - DNA, 19 bp, Mus musculus
  siRNA target sequence for Fhl5 (NM_021318.2,968-986).
ggattcttgacccataaca

SEQ ID NO: 525510 - DNA, 19 bp, Mus musculus
  siRNA target sequence for Fhl5 (NM_021318.2,969-987).
gattcttgacccataacat

SEQ ID NO: 525511 - DNA, 19 bp, Mus musculus
  siRNA target sequence for Fhl5 (NM_021318.2,978-996).
cccataacatggaaatctt

SEQ ID NO: 525512 - DNA, 19 bp, Mus musculus
  siRNA target sequence for Fhl5 (NM_021318.2,979-997).
ccataacatggaaatctta

SEQ ID NO: 525513 - DNA, 19 bp, Mus musculus
  siRNA target sequence for Jmy (NM_021310.1,195-213).
gcgcgagaagcacaagttt

SEQ ID NO: 525514 - DNA, 19 bp, Mus musculus
  siRNA target sequence for Jmy (NM_021310.1,234-252).
cgagatcgaaggcaagttt

SEQ ID NO: 525515 - DNA, 19 bp, Mus musculus
  siRNA target sequence for Jmy (NM_021310.1,240-258).
cgaaggcaagtttgctata

SEQ ID NO: 525516 - DNA, 19 bp, Mus musculus
  siRNA target sequence for Jmy (NM_021310.1,241-259).
gaaggcaagtttgctataa

SEQ ID NO: 525517 - DNA, 19 bp, Mus musculus
  siRNA target sequence for Jmy (NM_021310.1,244-262).
ggcaagtttgctataacct

SEQ ID NO: 525518 - DNA, 19 bp, Mus musculus
  siRNA target sequence for Jmy (NM_021310.1,760-778).
gagtcttcggccgaagaat

SEQ ID NO: 525519 - DNA, 19 bp, Mus musculus
  siRNA target sequence for Jmy (NM_021310.1,939-957).
ggagatcgacgctctatgt

SEQ ID NO: 525520 - DNA, 19 bp, Mus musculus
  siRNA target sequence for Jmy (NM_021310.1,940-958).
gagatcgacgctctatgtt

SEQ ID NO: 525521 - DNA, 19 bp, Mus musculus
  siRNA target sequence for Jmy (NM_021310.1,945-963).
cgacgctctatgttaccaa

SEQ ID NO: 525522 - DNA, 19 bp, Mus musculus
  siRNA target sequence for Jmy (NM_021310.1,1039-1057).
gatgatccggaggagtatt

SEQ ID NO: 525523 - DNA, 19 bp, Mus musculus
  siRNA target sequence for Jmy (NM_021310.1,1045-1063).
ccggaggagtattacgaaa

SEQ ID NO: 525524 - DNA, 19 bp, Mus musculus
  siRNA target sequence for Jmy (NM_021310.1,1305-1323).
gatttccatggagaatgat

SEQ ID NO: 525525 - DNA, 19 bp, Mus musculus
  siRNA target sequence for Jmy (NM_021310.1,1310-1328).
ccatggagaatgattattt

SEQ ID NO: 525526 - DNA, 19 bp, Mus musculus
  siRNA target sequence for Jmy (NM_021310.1,1389-1407).
catggctgttttgtctatt

SEQ ID NO: 525527 - DNA, 19 bp, Mus musculus
  siRNA target sequence for Jmy (NM_021310.1,1408-1426).
caggatctcaccgtcaaat

SEQ ID NO: 525528 - DNA, 19 bp, Mus musculus
  siRNA target sequence for Jmy (NM_021310.1,1411-1429).
gatctcaccgtcaaatatt

SEQ ID NO: 525529 - DNA, 19 bp, Mus musculus
  siRNA target sequence for Jmy (NM_021310.1,1418-1436).
ccgtcaaatattttgaaat

SEQ ID NO: 525530 - DNA, 19 bp, Mus musculus
  siRNA target sequence for Jmy (NM_021310.1,1475-1493).
gagcagatcagaagaaatt

SEQ ID NO: 525531 - DNA, 19 bp, Mus musculus
  siRNA target sequence for Jmy (NM_021310.1,1516-1534).
gctgctgagcgaatggaaa

SEQ ID NO: 525532 - DNA, 19 bp, Mus musculus
  siRNA target sequence for Jmy (NM_021310.1,1520-1538).
ctgagcgaatggaaaaact

SEQ ID NO: 525533 - DNA, 19 bp, Mus musculus
  siRNA target sequence for Jmy (NM_021310.1,1539-1557).
ccagtatgcagtttctaaa

SEQ ID NO: 525534 - DNA, 19 bp, Mus musculus
  siRNA target sequence for Jmy (NM_021310.1,1572-1590).
gatgagagctaaagaaatt

SEQ ID NO: 525535 - DNA, 19 bp, Mus musculus
  siRNA target sequence for Jmy (NM_021310.1,1635-1653).
cttacagggtggtacagaa

SEQ ID NO: 525536 - DNA, 19 bp, Mus musculus
  siRNA target sequence for Jmy (NM_021310.1,1674-1692).
gctggaatctgactactat

SEQ ID NO: 525537 - DNA, 19 bp, Mus musculus
  siRNA target sequence for Jmy (NM_021310.1,1698-1716).
gcaacttcagttgtatgaa

SEQ ID NO: 525538 - DNA, 19 bp, Mus musculus
  siRNA target sequence for Jmy (NM_021310.1,1768-1786).
gagagcatcaagagactta

SEQ ID NO: 525539 - DNA, 19 bp, Mus musculus
  siRNA target sequence for Jmy (NM_021310.1,1770-1788).
gagcatcaagagacttata

SEQ ID NO: 525540 - DNA, 19 bp, Mus musculus
  siRNA target sequence for Jmy (NM_021310.1,1773-1791).
catcaagagacttatatca

SEQ ID NO: 525541 - DNA, 19 bp, Mus musculus
  siRNA target sequence for Jmy (NM_021310.1,1812-1830).
gtactacgacacttacgaa

SEQ ID NO: 525542 - DNA, 19 bp, Mus musculus
  siRNA target sequence for Jmy (NM_021310.1,1956-1974).
gaaagcctacctcagaaat

SEQ ID NO: 525543 - DNA, 19 bp, Mus musculus
  siRNA target sequence for Jmy (NM_021310.1,1994-2012).
caaaacaccatgagaagtt

SEQ ID NO: 525544 - DNA, 19 bp, Mus musculus
  siRNA target sequence for Jmy (NM_021310.1,2045-2063).
gagcccatcatacaataca

SEQ ID NO: 525545 - DNA, 19 bp, Mus musculus
  siRNA target sequence for Jmy (NM_021310.1,2047-2065).
gcccatcatacaatacaaa

SEQ ID NO: 525546 - DNA, 19 bp, Mus musculus
  siRNA target sequence for Jmy (NM_021310.1,2048-2066).
cccatcatacaatacaaat

SEQ ID NO: 525547 - DNA, 19 bp, Mus musculus
  siRNA target sequence for Jmy (NM_021310.1,2139-2157).
ggatagacttcgaacattt

SEQ ID NO: 525548 - DNA, 19 bp, Mus musculus
  siRNA target sequence for Jmy (NM_021310.1,2140-2158).
gatagacttcgaacattta

SEQ ID NO: 525549 - DNA, 19 bp, Mus musculus
  siRNA target sequence for Jmy (NM_021310.1,2144-2162).
gacttcgaacatttaagca

SEQ ID NO: 525550 - DNA, 19 bp, Mus musculus
  siRNA target sequence for Jmy (NM_021310.1,2173-2191).
gggcaagtcatccttaagt

SEQ ID NO: 525551 - DNA, 19 bp, Mus musculus
  siRNA target sequence for Jmy (NM_021310.1,2184-2202).
ccttaagtcgaccagatta

SEQ ID NO: 525552 - DNA, 19 bp, Mus musculus
  siRNA target sequence for Jmy (NM_021310.1,2203-2221).
cgagtggcgcattcaagaa

SEQ ID NO: 525553 - DNA, 19 bp, Mus musculus
  siRNA target sequence for Jmy (NM_021310.1,2206-2224).
gtggcgcattcaagaagaa

SEQ ID NO: 525554 - DNA, 19 bp, Mus musculus
  siRNA target sequence for Jmy (NM_021310.1,2365-2383).
caacttgaagacacttcat

SEQ ID NO: 525555 - DNA, 19 bp, Mus musculus
  siRNA target sequence for Jmy (NM_021310.1,2455-2473).
gctccactgttgactagta

SEQ ID NO: 525556 - DNA, 19 bp, Mus musculus
  siRNA target sequence for Jmy (NM_021310.1,2456-2474).
ctccactgttgactagtat

SEQ ID NO: 525557 - DNA, 19 bp, Mus musculus
  siRNA target sequence for Jmy (NM_021310.1,2459-2477).
cactgttgactagtattga

SEQ ID NO: 525558 - DNA, 19 bp, Mus musculus
  siRNA target sequence for Jmy (NM_021310.1,2479-2497).
cccaaaccgtgttctgtta

SEQ ID NO: 525559 - DNA, 19 bp, Mus musculus
  siRNA target sequence for Jmy (NM_021310.1,2486-2504).
cgtgttctgttactataga

SEQ ID NO: 525560 - DNA, 19 bp, Mus musculus
  siRNA target sequence for Jmy (NM_021310.1,2487-2505).
gtgttctgttactatagat

SEQ ID NO: 525561 - DNA, 19 bp, Mus musculus
  siRNA target sequence for Maged1 (NM_019791.1,445-463).
ggcctaagacaggctttaa

SEQ ID NO: 525562 - DNA, 19 bp, Mus musculus
  siRNA target sequence for Maged1 (NM_019791.1,481-499).
caaaggggccaaatgatta

SEQ ID NO: 525563 - DNA, 19 bp, Mus musculus
  siRNA target sequence for Maged1 (NM_019791.1,485-503).
ggggccaaatgattactct

SEQ ID NO: 525564 - DNA, 19 bp, Mus musculus
  siRNA target sequence for Maged1 (NM_019791.1,563-581).
gaatggcacccctaaaggt

SEQ ID NO: 525565 - DNA, 19 bp, Mus musculus
  siRNA target sequence for Maged1 (NM_019791.1,621-639).
ggcaaatcagctaaaaagt

SEQ ID NO: 525566 - DNA, 19 bp, Mus musculus
  siRNA target sequence for Maged1 (NM_019791.1,623-641).
caaatcagctaaaaagtct

SEQ ID NO: 525567 - DNA, 19 bp, Mus musculus
  siRNA target sequence for Maged1 (NM_019791.1,628-646).
cagctaaaaagtctgaaat

SEQ ID NO: 525568 - DNA, 19 bp, Mus musculus
  siRNA target sequence for Maged1 (NM_019791.1,648-666).
gcctttaagggtcagaata

SEQ ID NO: 525569 - DNA, 19 bp, Mus musculus
  siRNA target sequence for Maged1 (NM_019791.1,682-700).
ccggtaccacctacaattt

SEQ ID NO: 525570 - DNA, 19 bp, Mus musculus
  siRNA target sequence for Maged1 (NM_019791.1,731-749).
caacaaccagcctaagaca

SEQ ID NO: 525571 - DNA, 19 bp, Mus musculus
  siRNA target sequence for Maged1 (NM_019791.1,750-768).
gctaaggcttggaatgaca

SEQ ID NO: 525572 - DNA, 19 bp, Mus musculus
  siRNA target sequence for Maged1 (NM_019791.1,792-810).
gcccagacccagaatgtaa

SEQ ID NO: 525573 - DNA, 19 bp, Mus musculus
  siRNA target sequence for Maged1 (NM_019791.1,908-926).
cgtggagtcccggactata

SEQ ID NO: 525574 - DNA, 19 bp, Mus musculus
  siRNA target sequence for Maged1 (NM_019791.1,909-927).
gtggagtcccggactataa

SEQ ID NO: 525575 - DNA, 19 bp, Mus musculus
  siRNA target sequence for Maged1 (NM_019791.1,911-929).
ggagtcccggactataatt

SEQ ID NO: 525576 - DNA, 19 bp, Mus musculus
  siRNA target sequence for Maged1 (NM_019791.1,938-956).
gaggacccgcaaggttaat

SEQ ID NO: 525577 - DNA, 19 bp, Mus musculus
  siRNA target sequence for Maged1 (NM_019791.1,940-958).
ggacccgcaaggttaataa

SEQ ID NO: 525578 - DNA, 19 bp, Mus musculus
  siRNA target sequence for Maged1 (NM_019791.1,943-961).
cccgcaaggttaataactt

SEQ ID NO: 525579 - DNA, 19 bp, Mus musculus
  siRNA target sequence for Maged1 (NM_019791.1,945-963).
cgcaaggttaataacttga

SEQ ID NO: 525580 - DNA, 19 bp, Mus musculus
  siRNA target sequence for Maged1 (NM_019791.1,1510-1528).
cacctgactggcagaactt

SEQ ID NO: 525581 - DNA, 19 bp, Mus musculus
  siRNA target sequence for Maged1 (NM_019791.1,1526-1544).
cttacgaccctcacctaat

SEQ ID NO: 525582 - DNA, 19 bp, Mus musculus
  siRNA target sequence for Maged1 (NM_019791.1,1530-1548).
cgaccctcacctaatctga

SEQ ID NO: 525583 - DNA, 19 bp, Mus musculus
  siRNA target sequence for Maged1 (NM_019791.1,1638-1656).
gtcaagtacctgatgctta

SEQ ID NO: 525584 - DNA, 19 bp, Mus musculus
  siRNA target sequence for Maged1 (NM_019791.1,1640-1658).
caagtacctgatgcttaaa

SEQ ID NO: 525585 - DNA, 19 bp, Mus musculus
  siRNA target sequence for Maged1 (NM_019791.1,1699-1717).
gggatatcatccgagaata

SEQ ID NO: 525586 - DNA, 19 bp, Mus musculus
  siRNA target sequence for Maged1 (NM_019791.1,1711-1729).
gagaatacactgatgtcta

SEQ ID NO: 525587 - DNA, 19 bp, Mus musculus
  siRNA target sequence for Maged1 (NM_019791.1,1739-1757).
cattgagcgcgcatgcttt

SEQ ID NO: 525588 - DNA, 19 bp, Mus musculus
  siRNA target sequence for Maged1 (NM_019791.1,1787-1805).
gaaggaaatcgacaaagaa

SEQ ID NO: 525589 - DNA, 19 bp, Mus musculus
  siRNA target sequence for Maged1 (NM_019791.1,1854-1872).
ctgggaacgaccaaagaca

SEQ ID NO: 525590 - DNA, 19 bp, Mus musculus
  siRNA target sequence for Maged1 (NM_019791.1,1885-1903).
gcctcctcttagtgattct

SEQ ID NO: 525591 - DNA, 19 bp, Mus musculus
  siRNA target sequence for Maged1 (NM_019791.1,2000-2018).
ccttggtgacctgagaaaa

SEQ ID NO: 525592 - DNA, 19 bp, Mus musculus
  siRNA target sequence for Maged1 (NM_019791.1,2007-2025).
gacctgagaaaacttctta

SEQ ID NO: 525593 - DNA, 19 bp, Mus musculus
  siRNA target sequence for Maged1 (NM_019791.1,2022-2040).
cttacttacgagtttgtaa

SEQ ID NO: 525594 - DNA, 19 bp, Mus musculus
  siRNA target sequence for Maged1 (NM_019791.1,2026-2044).
cttacgagtttgtaaagca

SEQ ID NO: 525595 - DNA, 19 bp, Mus musculus
  siRNA target sequence for Maged1 (NM_019791.1,2438-2456).
gtttccccaggcctttact

SEQ ID NO: 525596 - DNA, 19 bp, Mus musculus
  siRNA target sequence for Maged1 (NM_019791.1,2450-2468).
ctttactggccccatcatt

SEQ ID NO: 525597 - DNA, 19 bp, Mus musculus
  siRNA target sequence for Naca (NM_013608.1,5109-5127).
ccccattgagacttcaaca

SEQ ID NO: 525598 - DNA, 19 bp, Mus musculus
  siRNA target sequence for Naca (NM_013608.1,5357-5375).
cccctcaggcatctgaaaa

SEQ ID NO: 525599 - DNA, 19 bp, Mus musculus
  siRNA target sequence for Naca (NM_013608.1,5399-5417).
cagctttcacggaaatgct

SEQ ID NO: 525600 - DNA, 19 bp, Mus musculus
  siRNA target sequence for Naca (NM_013608.1,5518-5536).
ccctcctctaagaaagaca

SEQ ID NO: 525601 - DNA, 19 bp, Mus musculus
  siRNA target sequence for Naca (NM_013608.1,5522-5540).
cctctaagaaagacacaaa

SEQ ID NO: 525602 - DNA, 19 bp, Mus musculus
  siRNA target sequence for Naca (NM_013608.1,5578-5596).
gttcctgttgagaaagaca

SEQ ID NO: 525603 - DNA, 19 bp, Mus musculus
  siRNA target sequence for Naca (NM_013608.1,5692-5710).
ccactagcagcgtttacct

SEQ ID NO: 525604 - DNA, 19 bp, Mus musculus
  siRNA target sequence for Naca (NM_013608.1,5702-5720).
cgtttacctctgacaaagt

SEQ ID NO: 525605 - DNA, 19 bp, Mus musculus
  siRNA target sequence for Ncoa2 (NM_008678.1,282-300).
ggacccagccccaaaagga

SEQ ID NO: 525606 - DNA, 19 bp, Mus musculus
  siRNA target sequence for Ncoa2 (NM_008678.1,318-336).
cgcgagcaggagaataagt

SEQ ID NO: 525607 - DNA, 19 bp, Mus musculus
  siRNA target sequence for Ncoa2 (NM_008678.1,319-337).
gcgagcaggagaataagta

SEQ ID NO: 525608 - DNA, 19 bp, Mus musculus
  siRNA target sequence for Ncoa2 (NM_008678.1,357-375).
ctgatcttcgcaaacttta

SEQ ID NO: 525609 - DNA, 19 bp, Mus musculus
  siRNA target sequence for Ncoa2 (NM_008678.1,362-380).
cttcgcaaactttaatgat

SEQ ID NO: 525610 - DNA, 19 bp, Mus musculus
  siRNA target sequence for Ncoa2 (NM_008678.1,634-652).
cacagtatctacggtataa

SEQ ID NO: 525611 - DNA, 19 bp, Mus musculus
  siRNA target sequence for Ncoa2 (NM_008678.1,638-656).
gtatctacggtataaccaa

SEQ ID NO: 525612 - DNA, 19 bp, Mus musculus
  siRNA target sequence for Ncoa2 (NM_008678.1,696-714).
gtcggggaccacactgaat

SEQ ID NO: 525613 - DNA, 19 bp, Mus musculus
  siRNA target sequence for Ncoa2 (NM_008678.1,698-716).
cggggaccacactgaattt

SEQ ID NO: 525614 - DNA, 19 bp, Mus musculus
  siRNA target sequence for Ncoa2 (NM_008678.1,702-720).
gaccacactgaatttgtca

SEQ ID NO: 525615 - DNA, 19 bp, Mus musculus
  siRNA target sequence for Ncoa2 (NM_008678.1,853-871).
gccaggaagcccatcagaa

SEQ ID NO: 525616 - DNA, 19 bp, Mus musculus
  siRNA target sequence for Ncoa2 (NM_008678.1,938-956).
gcagtcctgcttgatttgt

SEQ ID NO: 525617 - DNA, 19 bp, Mus musculus
  siRNA target sequence for Ncoa2 (NM_008678.1,996-1014).
ccctcatcagaaagcttta

SEQ ID NO: 525618 - DNA, 19 bp, Mus musculus
  siRNA target sequence for Ncoa2 (NM_008678.1,1091-1109).
ggaagatctggtaagaaga

SEQ ID NO: 525619 - DNA, 19 bp, Mus musculus
  siRNA target sequence for Ncoa2 (NM_008678.1,1092-1110).
gaagatctggtaagaagat

SEQ ID NO: 525620 - DNA, 19 bp, Mus musculus
  siRNA target sequence for Ncoa2 (NM_008678.1,1134-1152).
catgaaggggagtctctat

SEQ ID NO: 525621 - DNA, 19 bp, Mus musculus
  siRNA target sequence for Ncoa2 (NM_008678.1,1137-1155).
gaaggggagtctctatcat

SEQ ID NO: 525622 - DNA, 19 bp, Mus musculus
  siRNA target sequence for Ncoa2 (NM_008678.1,1196-1214).
ggcgttcagtcagatctat

SEQ ID NO: 525623 - DNA, 19 bp, Mus musculus
  siRNA target sequence for Ncoa2 (NM_008678.1,1211-1229).
ctatcgtttttctttgtct

SEQ ID NO: 525624 - DNA, 19 bp, Mus musculus
  siRNA target sequence for Ncoa2 (NM_008678.1,1271-1289).
ccgttctcagactactaat

SEQ ID NO: 525625 - DNA, 19 bp, Mus musculus
  siRNA target sequence for Ncoa2 (NM_008678.1,1273-1291).
gttctcagactactaatga

SEQ ID NO: 525626 - DNA, 19 bp, Mus musculus
  siRNA target sequence for Ncoa2 (NM_008678.1,1332-1350).
cagaatgtatgtgtaatga

SEQ ID NO: 525627 - DNA, 19 bp, Mus musculus
  siRNA target sequence for Ncoa2 (NM_008678.1,1379-1397).
gaagccattgaatccaatt

SEQ ID NO: 525628 - DNA, 19 bp, Mus musculus
  siRNA target sequence for Ncoa2 (NM_008678.1,1383-1401).
ccattgaatccaattagct

SEQ ID NO: 525629 - DNA, 19 bp, Mus musculus
  siRNA target sequence for Ncoa2 (NM_008678.1,1451-1469).
catgaccctcggtagcaat

SEQ ID NO: 525630 - DNA, 19 bp, Mus musculus
  siRNA target sequence for Ncoa2 (NM_008678.1,1454-1472).
gaccctcggtagcaatata

SEQ ID NO: 525631 - DNA, 19 bp, Mus musculus
  siRNA target sequence for Ncoa2 (NM_008678.1,1456-1474).
ccctcggtagcaatataaa

SEQ ID NO: 525632 - DNA, 19 bp, Mus musculus
  siRNA target sequence for Ncoa2 (NM_008678.1,1457-1475).
cctcggtagcaatataaat

SEQ ID NO: 525633 - DNA, 19 bp, Mus musculus
  siRNA target sequence for Ncoa2 (NM_008678.1,1460-1478).
cggtagcaatataaatttt

SEQ ID NO: 525634 - DNA, 19 bp, Mus musculus
  siRNA target sequence for Ncoa2 (NM_008678.1,1570-1588).
ccactcctcagggtagtaa

SEQ ID NO: 525635 - DNA, 19 bp, Mus musculus
  siRNA target sequence for Ncoa2 (NM_008678.1,1573-1591).
ctcctcagggtagtaacta

SEQ ID NO: 525636 - DNA, 19 bp, Mus musculus
  siRNA target sequence for Ncoa2 (NM_008678.1,1585-1603).
gtaactatgcactcaaaat

SEQ ID NO: 525637 - DNA, 19 bp, Mus musculus
  siRNA target sequence for Ncoa2 (NM_008678.1,1771-1789).
caggaaatagccatagtta

SEQ ID NO: 525638 - DNA, 19 bp, Mus musculus
  siRNA target sequence for Ncoa2 (NM_008678.1,1773-1791).
ggaaatagccatagttata

SEQ ID NO: 525639 - DNA, 19 bp, Mus musculus
  siRNA target sequence for Ncoa2 (NM_008678.1,1859-1877).
ggcttcaccggacctaaaa

SEQ ID NO: 525640 - DNA, 19 bp, Mus musculus
  siRNA target sequence for Ncoa2 (NM_008678.1,1860-1878).
gcttcaccggacctaaaaa

SEQ ID NO: 525641 - DNA, 19 bp, Mus musculus
  siRNA target sequence for Ncoa2 (NM_008678.1,1861-1879).
cttcaccggacctaaaaat

SEQ ID NO: 525642 - DNA, 19 bp, Mus musculus
  siRNA target sequence for Ncoa2 (NM_008678.1,1889-1907).
gcaaaactccccagttaat

SEQ ID NO: 525643 - DNA, 19 bp, Mus musculus
  siRNA target sequence for Ncoa2 (NM_008678.1,1943-1961).
ggactccaaagactgtttt

SEQ ID NO: 525644 - DNA, 19 bp, Mus musculus
  siRNA target sequence for Ncoa2 (NM_008678.1,1976-1994).
gccctcagaaggtacaact

SEQ ID NO: 525645 - DNA, 19 bp, Mus musculus
  siRNA target sequence for Ncoa2 (NM_008678.1,2179-2197).
gctccttgtcggacacaaa

SEQ ID NO: 525646 - DNA, 19 bp, Mus musculus
  siRNA target sequence for Ncoa2 (NM_008678.1,2267-2285).
gattttgcacagactctta

SEQ ID NO: 525647 - DNA, 19 bp, Mus musculus
  siRNA target sequence for Ncoa2 (NM_008678.1,2403-2421).
ccagcgagccccaagaaga

SEQ ID NO: 525648 - DNA, 19 bp, Mus musculus
  siRNA target sequence for Ncoa2 (NM_008678.1,2431-2449).
cactactgcgctatttgct

SEQ ID NO: 525649 - DNA, 19 bp, Mus musculus
  siRNA target sequence for Ncoa2 (NM_008678.1,2440-2458).
gctatttgctcgacaaaga

SEQ ID NO: 525650 - DNA, 19 bp, Mus musculus
  siRNA target sequence for Ncoa2 (NM_008678.1,2441-2459).
ctatttgctcgacaaagat

SEQ ID NO: 525651 - DNA, 19 bp, Mus musculus
  siRNA target sequence for Ncoa2 (NM_008678.1,2447-2465).
gctcgacaaagatgatact

SEQ ID NO: 525652 - DNA, 19 bp, Mus musculus
  siRNA target sequence for Ncoa2 (NM_008678.1,2448-2466).
ctcgacaaagatgatacta

SEQ ID NO: 525653 - DNA, 19 bp, Mus musculus
  siRNA target sequence for Ncoa2 (NM_008678.1,2450-2468).
cgacaaagatgatactaaa

SEQ ID NO: 525654 - DNA, 19 bp, Mus musculus
  siRNA target sequence for Ncoa2 (NM_008678.1,2502-2520).
gagcgactggacagtaaga

SEQ ID NO: 525655 - DNA, 19 bp, Mus musculus
  siRNA target sequence for Ncoa2 (NM_008678.1,2504-2522).
gcgactggacagtaagaca

SEQ ID NO: 525656 - DNA, 19 bp, Mus musculus
  siRNA target sequence for Ncoa2 (NM_008678.1,2523-2541).
gatcctgccagtaacacaa

SEQ ID NO: 525657 - DNA, 19 bp, Mus musculus
  siRNA target sequence for Ncoa2 (NM_008678.1,2526-2544).
cctgccagtaacacaaagt

SEQ ID NO: 525658 - DNA, 19 bp, Mus musculus
  siRNA target sequence for Ncoa2 (NM_008678.1,2529-2547).
gccagtaacacaaagttaa

SEQ ID NO: 525659 - DNA, 19 bp, Mus musculus
  siRNA target sequence for Ncoa2 (NM_008678.1,2530-2548).
ccagtaacacaaagttaat

SEQ ID NO: 525660 - DNA, 19 bp, Mus musculus
  siRNA target sequence for Ncoa2 (NM_008678.1,2531-2549).
cagtaacacaaagttaatt

SEQ ID NO: 525661 - DNA, 19 bp, Mus musculus
  siRNA target sequence for Ncoa2 (NM_008678.1,2706-2724).
gacaagcaagccatcatca

SEQ ID NO: 525662 - DNA, 19 bp, Mus musculus
  siRNA target sequence for Ncoa2 (NM_008678.1,2708-2726).
caagcaagccatcatcaat

SEQ ID NO: 525663 - DNA, 19 bp, Mus musculus
  siRNA target sequence for Ncoa2 (NM_008678.1,2910-2928).
ccaccaatcagaaacagta

SEQ ID NO: 525664 - DNA, 19 bp, Mus musculus
  siRNA target sequence for Ncoa2 (NM_008678.1,3212-3230).
gtctcaggtcatgaacata

SEQ ID NO: 525665 - DNA, 19 bp, Mus musculus
  siRNA target sequence for Ncoa2 (NM_008678.1,3238-3256).
ctgagttagagatgaacat

SEQ ID NO: 525666 - DNA, 19 bp, Mus musculus
  siRNA target sequence for Ncoa2 (NM_008678.1,3257-3275).
gggaggacctcagtataat

SEQ ID NO: 525667 - DNA, 19 bp, Mus musculus
  siRNA target sequence for Ncoa2 (NM_008678.1,3259-3277).
gaggacctcagtataatca

SEQ ID NO: 525668 - DNA, 19 bp, Mus musculus
  siRNA target sequence for Ncoa2 (NM_008678.1,3282-3300).
caggcccctccgaaccaaa

SEQ ID NO: 525669 - DNA, 19 bp, Mus musculus
  siRNA target sequence for Ncoa2 (NM_008678.1,3559-3577).
gtcaggagtccagcataat

SEQ ID NO: 525670 - DNA, 19 bp, Mus musculus
  siRNA target sequence for Ncoa2 (NM_008678.1,3652-3670).
ccatgcaagatccaaactt

SEQ ID NO: 525671 - DNA, 19 bp, Mus musculus
  siRNA target sequence for Ncoa2 (NM_008678.1,3681-3699).
ggacagcggccaaattaca

SEQ ID NO: 525672 - DNA, 19 bp, Mus musculus
  siRNA target sequence for Ncoa2 (NM_008678.1,3877-3895).
ccactcaggctcctattaa

SEQ ID NO: 525673 - DNA, 19 bp, Mus musculus
  siRNA target sequence for Ncoa2 (NM_008678.1,3878-3896).
cactcaggctcctattaat

SEQ ID NO: 525674 - DNA, 19 bp, Mus musculus
  siRNA target sequence for Ncoa2 (NM_008678.1,3992-4010).
gagaggacagggcttgaat

SEQ ID NO: 525675 - DNA, 19 bp, Mus musculus
  siRNA target sequence for Ncoa2 (NM_008678.1,4105-4123).
cgaactacggaataagtca

SEQ ID NO: 525676 - DNA, 19 bp, Mus musculus
  siRNA target sequence for Ncoa2 (NM_008678.1,4109-4127).
ctacggaataagtcaacaa

SEQ ID NO: 525677 - DNA, 19 bp, Mus musculus
  siRNA target sequence for Ncoa2 (NM_008678.1,4339-4357).
ccagcatgtatagtaacaa

SEQ ID NO: 525678 - DNA, 19 bp, Mus musculus
  siRNA target sequence for Ncoa2 (NM_008678.1,4342-4360).
gcatgtatagtaacaacat

SEQ ID NO: 525679 - DNA, 19 bp, Mus musculus
  siRNA target sequence for Ncoa2 (NM_008678.1,4517-4535).
caaccttttcccaaaccaa

SEQ ID NO: 525680 - DNA, 19 bp, Mus musculus
  siRNA target sequence for Ncoa2 (NM_008678.1,4567-4585).
gagatgcatctcggaaata

SEQ ID NO: 525681 - DNA, 19 bp, Mus musculus
  siRNA target sequence for Rnf14 (NM_020012.1,314-332).
cccaggaggatgaactact

SEQ ID NO: 525682 - DNA, 19 bp, Mus musculus
  siRNA target sequence for Rnf14 (NM_020012.1,331-349).
ctggccctggcgagtattt

SEQ ID NO: 525683 - DNA, 19 bp, Mus musculus
  siRNA target sequence for Rnf14 (NM_020012.1,333-351).
ggccctggcgagtatttat

SEQ ID NO: 525684 - DNA, 19 bp, Mus musculus
  siRNA target sequence for Rnf14 (NM_020012.1,336-354).
cctggcgagtatttatgat

SEQ ID NO: 525685 - DNA, 19 bp, Mus musculus
  siRNA target sequence for Rnf14 (NM_020012.1,391-409).
ggagaaaccaggatctatt

SEQ ID NO: 525686 - DNA, 19 bp, Mus musculus
  siRNA target sequence for Rnf14 (NM_020012.1,411-429).
ggatctgccacagaatttt

SEQ ID NO: 525687 - DNA, 19 bp, Mus musculus
  siRNA target sequence for Rnf14 (NM_020012.1,412-430).
gatctgccacagaatttta

SEQ ID NO: 525688 - DNA, 19 bp, Mus musculus
  siRNA target sequence for Rnf14 (NM_020012.1,417-435).
gccacagaattttaagata

SEQ ID NO: 525689 - DNA, 19 bp, Mus musculus
  siRNA target sequence for Rnf14 (NM_020012.1,438-456).
cgtgagcggcaattcaaat

SEQ ID NO: 525690 - DNA, 19 bp, Mus musculus
  siRNA target sequence for Rnf14 (NM_020012.1,465-483).
ccagaatagtggctttgaa

SEQ ID NO: 525691 - DNA, 19 bp, Mus musculus
  siRNA target sequence for Rnf14 (NM_020012.1,466-484).
cagaatagtggctttgaat

SEQ ID NO: 525692 - DNA, 19 bp, Mus musculus
  siRNA target sequence for Rnf14 (NM_020012.1,526-544).
ctgccaccagattatccat

SEQ ID NO: 525693 - DNA, 19 bp, Mus musculus
  siRNA target sequence for Rnf14 (NM_020012.1,553-571).
ccaccttcattcacactta

SEQ ID NO: 525694 - DNA, 19 bp, Mus musculus
  siRNA target sequence for Rnf14 (NM_020012.1,732-750).
gatggggtctcagaaaaaa

SEQ ID NO: 525695 - DNA, 19 bp, Mus musculus
  siRNA target sequence for Rnf14 (NM_020012.1,861-879).
ggatgtagagtcattgtca

SEQ ID NO: 525696 - DNA, 19 bp, Mus musculus
  siRNA target sequence for Rnf14 (NM_020012.1,862-880).
gatgtagagtcattgtcaa

SEQ ID NO: 525697 - DNA, 19 bp, Mus musculus
  siRNA target sequence for Rnf14 (NM_020012.1,918-936).
gcagacgaagtgcttcaat

SEQ ID NO: 525698 - DNA, 19 bp, Mus musculus
  siRNA target sequence for Rnf14 (NM_020012.1,921-939).
gacgaagtgcttcaatagt

SEQ ID NO: 525699 - DNA, 19 bp, Mus musculus
  siRNA target sequence for Rnf14 (NM_020012.1,923-941).
cgaagtgcttcaatagtaa

SEQ ID NO: 525700 - DNA, 19 bp, Mus musculus
  siRNA target sequence for Rnf14 (NM_020012.1,924-942).
gaagtgcttcaatagtaaa

SEQ ID NO: 525701 - DNA, 19 bp, Mus musculus
  siRNA target sequence for Rnf14 (NM_020012.1,979-997).
ggtagtgattgcatgtact

SEQ ID NO: 525702 - DNA, 19 bp, Mus musculus
  siRNA target sequence for Rnf14 (NM_020012.1,980-998).
gtagtgattgcatgtactt

SEQ ID NO: 525703 - DNA, 19 bp, Mus musculus
  siRNA target sequence for Rnf14 (NM_020012.1,983-1001).
gtgattgcatgtacttctt

SEQ ID NO: 525704 - DNA, 19 bp, Mus musculus
  siRNA target sequence for Rnf14 (NM_020012.1,1027-1045).
gcctgtctgaaggattact

SEQ ID NO: 525705 - DNA, 19 bp, Mus musculus
  siRNA target sequence for Rnf14 (NM_020012.1,1028-1046).
cctgtctgaaggattactt

SEQ ID NO: 525706 - DNA, 19 bp, Mus musculus
  siRNA target sequence for Rnf14 (NM_020012.1,1031-1049).
gtctgaaggattactttga

SEQ ID NO: 525707 - DNA, 19 bp, Mus musculus
  siRNA target sequence for Rnf14 (NM_020012.1,1118-1136).
ctcctggtcaggtcaaaga

SEQ ID NO: 525708 - DNA, 19 bp, Mus musculus
  siRNA target sequence for Rnf14 (NM_020012.1,1140-1158).
ggtagaagcagacttgttt

SEQ ID NO: 525709 - DNA, 19 bp, Mus musculus
  siRNA target sequence for Rnf14 (NM_020012.1,1183-1201).
cagtctaccttggatctaa

SEQ ID NO: 525710 - DNA, 19 bp, Mus musculus
  siRNA target sequence for Rnf14 (NM_020012.1,1347-1365).
ggtaactgcagagaaatta

SEQ ID NO: 525711 - DNA, 19 bp, Mus musculus
  siRNA target sequence for Rnf14 (NM_020012.1,1348-1366).
gtaactgcagagaaattaa

SEQ ID NO: 525712 - DNA, 19 bp, Mus musculus
  siRNA target sequence for Rnf14 (NM_020012.1,1371-1389).
cttacgaaatgaataccta

SEQ ID NO: 525713 - DNA, 19 bp, Mus musculus
  siRNA target sequence for Rnf14 (NM_020012.1,1516-1534).
ggcacacccatacagaaat

SEQ ID NO: 525714 - DNA, 19 bp, Mus musculus
  siRNA target sequence for Rnf14 (NM_020012.1,1517-1535).
gcacacccatacagaaatt

SEQ ID NO: 525715 - DNA, 19 bp, Mus musculus
  siRNA target sequence for Rnf14 (NM_020012.1,1518-1536).
cacacccatacagaaatta

SEQ ID NO: 525716 - DNA, 19 bp, Mus musculus
  siRNA target sequence for Rnf14 (NM_020012.1,1540-1558).
ggctgcaacaagatgactt

SEQ ID NO: 525717 - DNA, 19 bp, Mus musculus
  siRNA target sequence for Rnf14 (NM_020012.1,1612-1630).
gcaaatccttacagacatt

SEQ ID NO: 525718 - DNA, 19 bp, Mus musculus
  siRNA target sequence for Rnf14 (NM_020012.1,1625-1643).
gacatttcactgattctga

SEQ ID NO: 525719 - DNA, 19 bp, Mus musculus
  siRNA target sequence for Rnf14 (NM_020012.1,1642-1660).
gagtctccatgctttaaca

SEQ ID NO: 525720 - DNA, 19 bp, Mus musculus
  siRNA target sequence for Rnf14 (NM_020012.1,1668-1686).
ccatgccgtggatattaat

SEQ ID NO: 525721 - DNA, 19 bp, Mus musculus
  siRNA target sequence for Rnf14 (NM_020012.1,1678-1696).
gatattaatggtgatatgt

SEQ ID NO: 525722 - DNA, 19 bp, Mus musculus
  siRNA target sequence for Vgll2 (NM_153786.1,185-203).
gggagctcctcattttcca

SEQ ID NO: 525723 - DNA, 19 bp, Mus musculus
  siRNA target sequence for Vgll2 (NM_153786.1,186-204).
ggagctcctcattttccaa

SEQ ID NO: 525724 - DNA, 19 bp, Mus musculus
  siRNA target sequence for Vgll2 (NM_153786.1,260-278).
cccgaagctgagtacatca

SEQ ID NO: 525725 - DNA, 19 bp, Mus musculus
  siRNA target sequence for Vgll2 (NM_153786.1,261-279).
ccgaagctgagtacatcaa

SEQ ID NO: 525726 - DNA, 19 bp, Mus musculus
  siRNA target sequence for Vgll2 (NM_153786.1,263-281).
gaagctgagtacatcaact

SEQ ID NO: 525727 - DNA, 19 bp, Mus musculus
  siRNA target sequence for Vgll2 (NM_153786.1,328-346).
ggtggacgaacatttcagt

SEQ ID NO: 525728 - DNA, 19 bp, Mus musculus
  siRNA target sequence for 4930524C15Rik (NM_021397.1,43-61).
ccagacccccacaagacta

SEQ ID NO: 525729 - DNA, 19 bp, Mus musculus
  siRNA target sequence for 4930524C15Rik (NM_021397.1,78-96).
ctgataggttggtacagtt

SEQ ID NO: 525730 - DNA, 19 bp, Mus musculus
  siRNA target sequence for 4930524C15Rik (NM_021397.1,110-128).
cggccagcactgtgtgata

SEQ ID NO: 525731 - DNA, 19 bp, Mus musculus
  siRNA target sequence for 4930524C15Rik (NM_021397.1,254-272).
cagattctgacctttgtct

SEQ ID NO: 525732 - DNA, 19 bp, Mus musculus
  siRNA target sequence for 4930524C15Rik (NM_021397.1,256-274).
gattctgacctttgtctat

SEQ ID NO: 525733 - DNA, 19 bp, Mus musculus
  siRNA target sequence for 4930524C15Rik (NM_021397.1,360-378).
cctgtcagagagctcaaaa

SEQ ID NO: 525734 - DNA, 19 bp, Mus musculus
  siRNA target sequence for 4930524C15Rik (NM_021397.1,415-433).
gaggcaccagcaatcagaa

SEQ ID NO: 525735 - DNA, 19 bp, Mus musculus
  siRNA target sequence for 4930524C15Rik (NM_021397.1,524-542).
gagatgtcacacaagcata

SEQ ID NO: 525736 - DNA, 19 bp, Mus musculus
  siRNA target sequence for 4930524C15Rik (NM_021397.1,526-544).
gatgtcacacaagcataaa

SEQ ID NO: 525737 - DNA, 19 bp, Mus musculus
  siRNA target sequence for 4930524C15Rik (NM_021397.1,529-547).
gtcacacaagcataaagca

SEQ ID NO: 525738 - DNA, 19 bp, Mus musculus
  siRNA target sequence for 4930524C15Rik (NM_021397.1,572-590).
ggagcaactaggatgatga

SEQ ID NO: 525739 - DNA, 19 bp, Mus musculus
  siRNA target sequence for 4930524C15Rik (NM_021397.1,674-692).
ccaggttccctcctaacta

SEQ ID NO: 525740 - DNA, 19 bp, Mus musculus
  siRNA target sequence for 4930524C15Rik (NM_021397.1,826-844).
gcaggtccggcctcaagat

SEQ ID NO: 525741 - DNA, 19 bp, Mus musculus
  siRNA target sequence for 4930524C15Rik (NM_021397.1,1073-1091).
cgctctcggccctattctt

SEQ ID NO: 525742 - DNA, 19 bp, Mus musculus
  siRNA target sequence for Aebp1 (NM_009636.1,398-416).
cagcgtccccgcaaatcca

SEQ ID NO: 525743 - DNA, 19 bp, Mus musculus
  siRNA target sequence for Aebp1 (NM_009636.1,427-445).
caagcagcgggcagatgta

SEQ ID NO: 525744 - DNA, 19 bp, Mus musculus
  siRNA target sequence for Aebp1 (NM_009636.1,883-901).
gcccacactggactacaat

SEQ ID NO: 525745 - DNA, 19 bp, Mus musculus
  siRNA target sequence for Aebp1 (NM_009636.1,885-903).
ccacactggactacaatga

SEQ ID NO: 525746 - DNA, 19 bp, Mus musculus
  siRNA target sequence for Aebp1 (NM_009636.1,916-934).
ggaggattacgaggatttt

SEQ ID NO: 525747 - DNA, 19 bp, Mus musculus
  siRNA target sequence for Aebp1 (NM_009636.1,1071-1089).
cggactatggggatagcta

SEQ ID NO: 525748 - DNA, 19 bp, Mus musculus
  siRNA target sequence for Aebp1 (NM_009636.1,1087-1105).
ctacgtgatccccaactat

SEQ ID NO: 525749 - DNA, 19 bp, Mus musculus
  siRNA target sequence for Aebp1 (NM_009636.1,1090-1108).
cgtgatccccaactatgat

SEQ ID NO: 525750 - DNA, 19 bp, Mus musculus
  siRNA target sequence for Aebp1 (NM_009636.1,1106-1124).
gatgacttggactattatt

SEQ ID NO: 525751 - DNA, 19 bp, Mus musculus
  siRNA target sequence for Aebp1 (NM_009636.1,1308-1326).
cgccagtggagaaaatcaa

SEQ ID NO: 525752 - DNA, 19 bp, Mus musculus
  siRNA target sequence for Aebp1 (NM_009636.1,1432-1450).
gcaggctggtgccaatgaa

SEQ ID NO: 525753 - DNA, 19 bp, Mus musculus
  siRNA target sequence for Aebp1 (NM_009636.1,1582-1600).
cttcgtgactaccttcttt

SEQ ID NO: 525754 - DNA, 19 bp, Mus musculus
  siRNA target sequence for Aebp1 (NM_009636.1,1620-1638).
gccagacctgggtgatgta

SEQ ID NO: 525755 - DNA, 19 bp, Mus musculus
  siRNA target sequence for Aebp1 (NM_009636.1,1641-1659).
ccaatggctacgaggaaat

SEQ ID NO: 525756 - DNA, 19 bp, Mus musculus
  siRNA target sequence for Aebp1 (NM_009636.1,1716-1734).
cagttgtggcccgtttcat

SEQ ID NO: 525757 - DNA, 19 bp, Mus musculus
  siRNA target sequence for Aebp1 (NM_009636.1,1726-1744).
ccgtttcatccgcatctat

SEQ ID NO: 525758 - DNA, 19 bp, Mus musculus
  siRNA target sequence for Aebp1 (NM_009636.1,1813-1831).
cagctactacgcacagaat

SEQ ID NO: 525759 - DNA, 19 bp, Mus musculus
  siRNA target sequence for Aebp1 (NM_009636.1,1815-1833).
gctactacgcacagaatga

SEQ ID NO: 525760 - DNA, 19 bp, Mus musculus
  siRNA target sequence for Aebp1 (NM_009636.1,1826-1844).
cagaatgaggtggtaacta

SEQ ID NO: 525761 - DNA, 19 bp, Mus musculus
  siRNA target sequence for Aebp1 (NM_009636.1,1828-1846).
gaatgaggtggtaactact

SEQ ID NO: 525762 - DNA, 19 bp, Mus musculus
  siRNA target sequence for Aebp1 (NM_009636.1,1912-1930).
ggagtgccccacaatcact

SEQ ID NO: 525763 - DNA, 19 bp, Mus musculus
  siRNA target sequence for Aebp1 (NM_009636.1,1953-1971).
gttcacgagggctcaagat

SEQ ID NO: 525764 - DNA, 19 bp, Mus musculus
  siRNA target sequence for Aebp1 (NM_009636.1,1972-1990).
ctacgcaatggaaatctca

SEQ ID NO: 525765 - DNA, 19 bp, Mus musculus
  siRNA target sequence for Aebp1 (NM_009636.1,2083-2101).
cctgctcatgcaataccta

SEQ ID NO: 525766 - DNA, 19 bp, Mus musculus
  siRNA target sequence for Aebp1 (NM_009636.1,2084-2102).
ctgctcatgcaatacctat

SEQ ID NO: 525767 - DNA, 19 bp, Mus musculus
  siRNA target sequence for Aebp1 (NM_009636.1,2337-2355).
gggtcccaaacaataactt

SEQ ID NO: 525768 - DNA, 19 bp, Mus musculus
  siRNA target sequence for Aebp1 (NM_009636.1,2469-2487).
gtgagcggcttgtgtctta

SEQ ID NO: 525769 - DNA, 19 bp, Mus musculus
  siRNA target sequence for Aebp1 (NM_009636.1,2480-2498).
gtgtcttatccctatgaca

SEQ ID NO: 525770 - DNA, 19 bp, Mus musculus
  siRNA target sequence for Aebp1 (NM_009636.1,2592-2610).
ctccagatcacgctatttt

SEQ ID NO: 525771 - DNA, 19 bp, Mus musculus
  siRNA target sequence for Aebp1 (NM_009636.1,2697-2715).
gcggcatgggcattgtcaa

SEQ ID NO: 525772 - DNA, 19 bp, Mus musculus
  siRNA target sequence for Aebp1 (NM_009636.1,2732-2750).
cctcgctctgggactttca

SEQ ID NO: 525773 - DNA, 19 bp, Mus musculus
  siRNA target sequence for Aebp1 (NM_009636.1,2733-2751).
ctcgctctgggactttcaa

SEQ ID NO: 525774 - DNA, 19 bp, Mus musculus
  siRNA target sequence for Aebp1 (NM_009636.1,2736-2754).
gctctgggactttcaatga

SEQ ID NO: 525775 - DNA, 19 bp, Mus musculus
  siRNA target sequence for Aebp1 (NM_009636.1,2741-2759).
gggactttcaatgacttta

SEQ ID NO: 525776 - DNA, 19 bp, Mus musculus
  siRNA target sequence for Aebp1 (NM_009636.1,2745-2763).
ctttcaatgactttagcta

SEQ ID NO: 525777 - DNA, 19 bp, Mus musculus
  siRNA target sequence for Aebp1 (NM_009636.1,2837-2855).
cgagaatgggagaacaaca

SEQ ID NO: 525778 - DNA, 19 bp, Mus musculus
  siRNA target sequence for Aebp1 (NM_009636.1,3275-3293).
cgactgcgtcgcctcaatt

SEQ ID NO: 525779 - DNA, 19 bp, Mus musculus
  siRNA target sequence for Aebp1 (NM_009636.1,3278-3296).
ctgcgtcgcctcaattcta

SEQ ID NO: 525780 - DNA, 19 bp, Mus musculus
  siRNA target sequence for Ankrd1 (NM_013468.2,259-277).
cgagaggcagagctcaaaa

SEQ ID NO: 525781 - DNA, 19 bp, Mus musculus
  siRNA target sequence for Ankrd1 (NM_013468.2,260-278).
gagaggcagagctcaaaaa

SEQ ID NO: 525782 - DNA, 19 bp, Mus musculus
  siRNA target sequence for Ankrd1 (NM_013468.2,421-439).
gatgtgccgaggtttctga

SEQ ID NO: 525783 - DNA, 19 bp, Mus musculus
  siRNA target sequence for Ankrd1 (NM_013468.2,453-471).
gaacaaactgccagttgta

SEQ ID NO: 525784 - DNA, 19 bp, Mus musculus
  siRNA target sequence for Ankrd1 (NM_013468.2,464-482).
cagttgtagagaaattcct

SEQ ID NO: 525785 - DNA, 19 bp, Mus musculus
  siRNA target sequence for Ankrd1 (NM_013468.2,500-518).
ccgacgtctgcgatgagta

SEQ ID NO: 525786 - DNA, 19 bp, Mus musculus
  siRNA target sequence for Ankrd1 (NM_013468.2,501-519).
cgacgtctgcgatgagtat

SEQ ID NO: 525787 - DNA, 19 bp, Mus musculus
  siRNA target sequence for Ankrd1 (NM_013468.2,502-520).
gacgtctgcgatgagtata

SEQ ID NO: 525788 - DNA, 19 bp, Mus musculus
  siRNA target sequence for Ankrd1 (NM_013468.2,504-522).
cgtctgcgatgagtataaa

SEQ ID NO: 525789 - DNA, 19 bp, Mus musculus
  siRNA target sequence for Ankrd1 (NM_013468.2,563-581).
cgatcgtggagaagttaat

SEQ ID NO: 525790 - DNA, 19 bp, Mus musculus
  siRNA target sequence for Ankrd1 (NM_013468.2,587-605).
ctggagcccagattgaatt

SEQ ID NO: 525791 - DNA, 19 bp, Mus musculus
  siRNA target sequence for Ankrd1 (NM_013468.2,740-758).
cggtgaggactggtcatta

SEQ ID NO: 525792 - DNA, 19 bp, Mus musculus
  siRNA target sequence for Ankrd1 (NM_013468.2,782-800).
cctgcgaggctgatctcaa

SEQ ID NO: 525793 - DNA, 19 bp, Mus musculus
  siRNA target sequence for Ankrd1 (NM_013468.2,783-801).
ctgcgaggctgatctcaat

SEQ ID NO: 525794 - DNA, 19 bp, Mus musculus
  siRNA target sequence for Ankrd1 (NM_013468.2,845-863).
ggctgaaccgctataagat

SEQ ID NO: 525795 - DNA, 19 bp, Mus musculus
  siRNA target sequence for Ankrd1 (NM_013468.2,847-865).
ctgaaccgctataagatga

SEQ ID NO: 525796 - DNA, 19 bp, Mus musculus
  siRNA target sequence for Ankrd1 (NM_013468.2,890-908).
cggacctcaaggtcaagaa

SEQ ID NO: 525797 - DNA, 19 bp, Mus musculus
  siRNA target sequence for Ankrd1 (NM_013468.2,953-971).
gtggaaccaaagcaatatt

SEQ ID NO: 525798 - DNA, 19 bp, Mus musculus
  siRNA target sequence for Ankrd1 (NM_013468.2,956-974).
gaaccaaagcaatattcga

SEQ ID NO: 525799 - DNA, 19 bp, Mus musculus
  siRNA target sequence for Atf7ip (NM_019426.2,136-154).
gaacctcagaaaaaagtct

SEQ ID NO: 525800 - DNA, 19 bp, Mus musculus
  siRNA target sequence for Atf7ip (NM_019426.2,140-158).
ctcagaaaaaagtcttcaa

SEQ ID NO: 525801 - DNA, 19 bp, Mus musculus
  siRNA target sequence for Atf7ip (NM_019426.2,252-270).
gaacgggagccatgagaat

SEQ ID NO: 525802 - DNA, 19 bp, Mus musculus
  siRNA target sequence for Atf7ip (NM_019426.2,283-301).
cccacttcacccttggaaa

SEQ ID NO: 525803 - DNA, 19 bp, Mus musculus
  siRNA target sequence for Atf7ip (NM_019426.2,284-302).
ccacttcacccttggaaaa

SEQ ID NO: 525804 - DNA, 19 bp, Mus musculus
  siRNA target sequence for Atf7ip (NM_019426.2,383-401).
ggaaagagaccccttgtat

SEQ ID NO: 525805 - DNA, 19 bp, Mus musculus
  siRNA target sequence for Atf7ip (NM_019426.2,508-526).
ggtagtccagcctctgata

SEQ ID NO: 525806 - DNA, 19 bp, Mus musculus
  siRNA target sequence for Atf7ip (NM_019426.2,509-527).
gtagtccagcctctgataa

SEQ ID NO: 525807 - DNA, 19 bp, Mus musculus
  siRNA target sequence for Atf7ip (NM_019426.2,538-556).
ggtaccccagtctctgata

SEQ ID NO: 525808 - DNA, 19 bp, Mus musculus
  siRNA target sequence for Atf7ip (NM_019426.2,539-557).
gtaccccagtctctgataa

SEQ ID NO: 525809 - DNA, 19 bp, Mus musculus
  siRNA target sequence for Atf7ip (NM_019426.2,867-885).
gagtgagccagctacaagt

SEQ ID NO: 525810 - DNA, 19 bp, Mus musculus
  siRNA target sequence for Atf7ip (NM_019426.2,968-986).
ccccctccggtgattcaca

SEQ ID NO: 525811 - DNA, 19 bp, Mus musculus
  siRNA target sequence for Atf7ip (NM_019426.2,1149-1167).
gacagagccgagtagcaat

SEQ ID NO: 525812 - DNA, 19 bp, Mus musculus
  siRNA target sequence for Atf7ip (NM_019426.2,1151-1169).
cagagccgagtagcaataa

SEQ ID NO: 525813 - DNA, 19 bp, Mus musculus
  siRNA target sequence for Atf7ip (NM_019426.2,1153-1171).
gagccgagtagcaataaca

SEQ ID NO: 525814 - DNA, 19 bp, Mus musculus
  siRNA target sequence for Atf7ip (NM_019426.2,1155-1173).
gccgagtagcaataacagt

SEQ ID NO: 525815 - DNA, 19 bp, Mus musculus
  siRNA target sequence for Atf7ip (NM_019426.2,1193-1211).
gtgaagacgacgaacactt

SEQ ID NO: 525816 - DNA, 19 bp, Mus musculus
  siRNA target sequence for Atf7ip (NM_019426.2,1203-1221).
cgaacacttagaccaaatt

SEQ ID NO: 525817 - DNA, 19 bp, Mus musculus
  siRNA target sequence for Atf7ip (NM_019426.2,1209-1227).
cttagaccaaattcaaagt

SEQ ID NO: 525818 - DNA, 19 bp, Mus musculus
  siRNA target sequence for Atf7ip (NM_019426.2,1238-1256).
gtgatgagggaaataaagt

SEQ ID NO: 525819 - DNA, 19 bp, Mus musculus
  siRNA target sequence for Atf7ip (NM_019426.2,1240-1258).
gatgagggaaataaagtga

SEQ ID NO: 525820 - DNA, 19 bp, Mus musculus
  siRNA target sequence for Atf7ip (NM_019426.2,1290-1308).
cgaaacacacagtgcaatt

SEQ ID NO: 525821 - DNA, 19 bp, Mus musculus
  siRNA target sequence for Atf7ip (NM_019426.2,1418-1436).
gcgaaaaggatgagcataa

SEQ ID NO: 525822 - DNA, 19 bp, Mus musculus
  siRNA target sequence for Atf7ip (NM_019426.2,1536-1554).
gatcattccgattttggaa

SEQ ID NO: 525823 - DNA, 19 bp, Mus musculus
  siRNA target sequence for Atf7ip (NM_019426.2,1539-1557).
cattccgattttggaaaaa

SEQ ID NO: 525824 - DNA, 19 bp, Mus musculus
  siRNA target sequence for Atf7ip (NM_019426.2,1562-1580).
cacccaccgaggatgaact

SEQ ID NO: 525825 - DNA, 19 bp, Mus musculus
  siRNA target sequence for Atf7ip (NM_019426.2,1603-1621).
ctccttccagtcgaaacaa

SEQ ID NO: 525826 - DNA, 19 bp, Mus musculus
  siRNA target sequence for Atf7ip (NM_019426.2,1605-1623).
ccttccagtcgaaacaagt

SEQ ID NO: 525827 - DNA, 19 bp, Mus musculus
  siRNA target sequence for Atf7ip (NM_019426.2,1622-1640).
gtcaagatttggaggataa

SEQ ID NO: 525828 - DNA, 19 bp, Mus musculus
  siRNA target sequence for Atf7ip (NM_019426.2,1656-1674).
cggctcaccctcgaaacaa

SEQ ID NO: 525829 - DNA, 19 bp, Mus musculus
  siRNA target sequence for Atf7ip (NM_019426.2,1658-1676).
gctcaccctcgaaacaaga

SEQ ID NO: 525830 - DNA, 19 bp, Mus musculus
  siRNA target sequence for Atf7ip (NM_019426.2,1663-1681).
ccctcgaaacaagaaagta

SEQ ID NO: 525831 - DNA, 19 bp, Mus musculus
  siRNA target sequence for Atf7ip (NM_019426.2,1665-1683).
ctcgaaacaagaaagtagt

SEQ ID NO: 525832 - DNA, 19 bp, Mus musculus
  siRNA target sequence for Atf7ip (NM_019426.2,1682-1700).
gtgagaatttgccaaaaga

SEQ ID NO: 525833 - DNA, 19 bp, Mus musculus
  siRNA target sequence for Atf7ip (NM_019426.2,1728-1746).
ggatctttcgtgtggaaaa

SEQ ID NO: 525834 - DNA, 19 bp, Mus musculus
  siRNA target sequence for Atf7ip (NM_019426.2,1759-1777).
gctgtagcgcagagtaaga

SEQ ID NO: 525835 - DNA, 19 bp, Mus musculus
  siRNA target sequence for Atf7ip (NM_019426.2,1760-1778).
ctgtagcgcagagtaagat

SEQ ID NO: 525836 - DNA, 19 bp, Mus musculus
  siRNA target sequence for Atf7ip (NM_019426.2,1762-1780).
gtagcgcagagtaagatga

SEQ ID NO: 525837 - DNA, 19 bp, Mus musculus
  siRNA target sequence for Atf7ip (NM_019426.2,1851-1869).
gcagccacctgtgagaaat

SEQ ID NO: 525838 - DNA, 19 bp, Mus musculus
  siRNA target sequence for Atf7ip (NM_019426.2,1855-1873).
ccacctgtgagaaatgagt

SEQ ID NO: 525839 - DNA, 19 bp, Mus musculus
  siRNA target sequence for Atf7ip (NM_019426.2,1872-1890).
gttttctagacgaaaacgt

SEQ ID NO: 525840 - DNA, 19 bp, Mus musculus
  siRNA target sequence for Atf7ip (NM_019426.2,1889-1907).
gttctaagtcagaagacat

SEQ ID NO: 525841 - DNA, 19 bp, Mus musculus
  siRNA target sequence for Atf7ip (NM_019426.2,1932-1950).
gcgatatatggatgaagaa

SEQ ID NO: 525842 - DNA, 19 bp, Mus musculus
  siRNA target sequence for Atf7ip (NM_019426.2,1954-1972).
gaggctgagtttcaagtaa

SEQ ID NO: 525843 - DNA, 19 bp, Mus musculus
  siRNA target sequence for Atf7ip (NM_019426.2,1957-1975).
gctgagtttcaagtaaaga

SEQ ID NO: 525844 - DNA, 19 bp, Mus musculus
  siRNA target sequence for Atf7ip (NM_019426.2,2020-2038).
cagtggttgctacaagaaa

SEQ ID NO: 525845 - DNA, 19 bp, Mus musculus
  siRNA target sequence for Atf7ip (NM_019426.2,2095-2113).
cgagtggagaagatagagt

SEQ ID NO: 525846 - DNA, 19 bp, Mus musculus
  siRNA target sequence for Atf7ip (NM_019426.2,2152-2170).
gccaagatagccaggttaa

SEQ ID NO: 525847 - DNA, 19 bp, Mus musculus
  siRNA target sequence for Atf7ip (NM_019426.2,2161-2179).
gccaggttaaccaaacgtt

SEQ ID NO: 525848 - DNA, 19 bp, Mus musculus
  siRNA target sequence for Atf7ip (NM_019426.2,2162-2180).
ccaggttaaccaaacgttt

SEQ ID NO: 525849 - DNA, 19 bp, Mus musculus
  siRNA target sequence for Atf7ip (NM_019426.2,2163-2181).
caggttaaccaaacgtttt

SEQ ID NO: 525850 - DNA, 19 bp, Mus musculus
  siRNA target sequence for Atf7ip (NM_019426.2,2166-2184).
gttaaccaaacgttttgga

SEQ ID NO: 525851 - DNA, 19 bp, Mus musculus
  siRNA target sequence for Atf7ip (NM_019426.2,2389-2407).
gccagtcacgccacttcta

SEQ ID NO: 525852 - DNA, 19 bp, Mus musculus
  siRNA target sequence for Atf7ip (NM_019426.2,2531-2549).
ggacccctcagcctacaat

SEQ ID NO: 525853 - DNA, 19 bp, Mus musculus
  siRNA target sequence for Atf7ip (NM_019426.2,2623-2641).
catccagggactttagtga

SEQ ID NO: 525854 - DNA, 19 bp, Mus musculus
  siRNA target sequence for Atf7ip (NM_019426.2,2631-2649).
gactttagtgaccaatcaa

SEQ ID NO: 525855 - DNA, 19 bp, Mus musculus
  siRNA target sequence for Atf7ip (NM_019426.2,2656-2674).
ggcaacgtggagttcatat

SEQ ID NO: 525856 - DNA, 19 bp, Mus musculus
  siRNA target sequence for Atf7ip (NM_019426.2,2658-2676).
caacgtggagttcatatct

SEQ ID NO: 525857 - DNA, 19 bp, Mus musculus
  siRNA target sequence for Atf7ip (NM_019426.2,2693-2711).
cagtgagtggtcttaccaa

SEQ ID NO: 525858 - DNA, 19 bp, Mus musculus
  siRNA target sequence for Atf7ip (NM_019426.2,2697-2715).
gagtggtcttaccaaaaat

SEQ ID NO: 525859 - DNA, 19 bp, Mus musculus
  siRNA target sequence for Atf7ip (NM_019426.2,2733-2751).
cttgccaaaccccactaaa

SEQ ID NO: 525860 - DNA, 19 bp, Mus musculus
  siRNA target sequence for Atf7ip (NM_019426.2,2736-2754).
gccaaaccccactaaacca

SEQ ID NO: 525861 - DNA, 19 bp, Mus musculus
  siRNA target sequence for Atf7ip (NM_019426.2,2767-2785).
gtgcccagtcctagtagta

SEQ ID NO: 525862 - DNA, 19 bp, Mus musculus
  siRNA target sequence for Atf7ip (NM_019426.2,2769-2787).
gcccagtcctagtagtatt

SEQ ID NO: 525863 - DNA, 19 bp, Mus musculus
  siRNA target sequence for Atf7ip (NM_019426.2,2771-2789).
ccagtcctagtagtattca

SEQ ID NO: 525864 - DNA, 19 bp, Mus musculus
  siRNA target sequence for Atf7ip (NM_019426.2,2844-2862).
cgttccaaccgcacattct

SEQ ID NO: 525865 - DNA, 19 bp, Mus musculus
  siRNA target sequence for Atf7ip (NM_019426.2,2845-2863).
gttccaaccgcacattcta

SEQ ID NO: 525866 - DNA, 19 bp, Mus musculus
  siRNA target sequence for Atf7ip (NM_019426.2,2849-2867).
caaccgcacattctattgt

SEQ ID NO: 525867 - DNA, 19 bp, Mus musculus
  siRNA target sequence for Atf7ip (NM_019426.2,2871-2889).
ggccacaaggacttctcta

SEQ ID NO: 525868 - DNA, 19 bp, Mus musculus
  siRNA target sequence for Atf7ip (NM_019426.2,2899-2917).
ggcccgtcaggactctata

SEQ ID NO: 525869 - DNA, 19 bp, Mus musculus
  siRNA target sequence for Atf7ip (NM_019426.2,2902-2920).
ccgtcaggactctatagct

SEQ ID NO: 525870 - DNA, 19 bp, Mus musculus
  siRNA target sequence for Atf7ip (NM_019426.2,2908-2926).
ggactctatagctcttcaa

SEQ ID NO: 525871 - DNA, 19 bp, Mus musculus
  siRNA target sequence for Atf7ip (NM_019426.2,2927-2945).
gcagtcgaggcccaataca

SEQ ID NO: 525872 - DNA, 19 bp, Mus musculus
  siRNA target sequence for Atf7ip (NM_019426.2,2935-2953).
ggcccaatacagatgaaaa

SEQ ID NO: 525873 - DNA, 19 bp, Mus musculus
  siRNA target sequence for Atf7ip (NM_019426.2,2944-2962).
cagatgaaaatcccaatat

SEQ ID NO: 525874 - DNA, 19 bp, Mus musculus
  siRNA target sequence for Atf7ip (NM_019426.2,2977-2995).
ccatcttcagcagaacaaa

SEQ ID NO: 525875 - DNA, 19 bp, Mus musculus
  siRNA target sequence for Atf7ip (NM_019426.2,3002-3020).
ctgccaccccaagaattgt

SEQ ID NO: 525876 - DNA, 19 bp, Mus musculus
  siRNA target sequence for Atf7ip (NM_019426.2,3006-3024).
caccccaagaattgttaca

SEQ ID NO: 525877 - DNA, 19 bp, Mus musculus
  siRNA target sequence for Atf7ip (NM_019426.2,3114-3132).
ctcaagtggtgtcattgat

SEQ ID NO: 525878 - DNA, 19 bp, Mus musculus
  siRNA target sequence for Atf7ip (NM_019426.2,3116-3134).
caagtggtgtcattgatct

SEQ ID NO: 525879 - DNA, 19 bp, Mus musculus
  siRNA target sequence for Atf7ip (NM_019426.2,3180-3198).
gataagtcctccttcttca

SEQ ID NO: 525880 - DNA, 19 bp, Mus musculus
  siRNA target sequence for Atf7ip (NM_019426.2,3405-3423).
ccaccaagtggtttataca

SEQ ID NO: 525881 - DNA, 19 bp, Mus musculus
  siRNA target sequence for Atf7ip (NM_019426.2,3406-3424).
caccaagtggtttatacaa

SEQ ID NO: 525882 - DNA, 19 bp, Mus musculus
  siRNA target sequence for Atf7ip (NM_019426.2,3451-3469).
cccctacgaggaactgtta

SEQ ID NO: 525883 - DNA, 19 bp, Mus musculus
  siRNA target sequence for Atf7ip (NM_019426.2,3452-3470).
ccctacgaggaactgttat

SEQ ID NO: 525884 - DNA, 19 bp, Mus musculus
  siRNA target sequence for Atf7ip (NM_019426.2,3488-3506).
gccaggtcaatcctcaaaa

SEQ ID NO: 525885 - DNA, 19 bp, Mus musculus
  siRNA target sequence for Atf7ip (NM_019426.2,3489-3507).
ccaggtcaatcctcaaaat

SEQ ID NO: 525886 - DNA, 19 bp, Mus musculus
  siRNA target sequence for Atf7ip (NM_019426.2,3492-3510).
ggtcaatcctcaaaatagt

SEQ ID NO: 525887 - DNA, 19 bp, Mus musculus
  siRNA target sequence for Atf7ip (NM_019426.2,3525-3543).
gcctcagacaaccacatat

SEQ ID NO: 525888 - DNA, 19 bp, Mus musculus
  siRNA target sequence for Atf7ip (NM_019426.2,3527-3545).
ctcagacaaccacatatgt

SEQ ID NO: 525889 - DNA, 19 bp, Mus musculus
  siRNA target sequence for Atf7ip (NM_019426.2,3531-3549).
gacaaccacatatgttgta

SEQ ID NO: 525890 - DNA, 19 bp, Mus musculus
  siRNA target sequence for Atf7ip (NM_019426.2,3533-3551).
caaccacatatgttgtaaa

SEQ ID NO: 525891 - DNA, 19 bp, Mus musculus
  siRNA target sequence for Atf7ip (NM_019426.2,3536-3554).
ccacatatgttgtaaacaa

SEQ ID NO: 525892 - DNA, 19 bp, Mus musculus
  siRNA target sequence for Atf7ip (NM_019426.2,3911-3929).
gcactctcacgcagtttgt

SEQ ID NO: 525893 - DNA, 19 bp, Mus musculus
  siRNA target sequence for Bcl11a (NM_016707.1,292-310).
ggcaaaccccagcacttaa

SEQ ID NO: 525894 - DNA, 19 bp, Mus musculus
  siRNA target sequence for Bcl11a (NM_016707.1,324-342).
ctcgcccgaacctcttgaa

SEQ ID NO: 525895 - DNA, 19 bp, Mus musculus
  siRNA target sequence for Bcl11a (NM_016707.1,491-509).
gcagcctctgcttagaaaa

SEQ ID NO: 525896 - DNA, 19 bp, Mus musculus
  siRNA target sequence for Bcl11a (NM_016707.1,495-513).
cctctgcttagaaaaaggt

SEQ ID NO: 525897 - DNA, 19 bp, Mus musculus
  siRNA target sequence for Bcl11a (NM_016707.1,536-554).
ctcccatcgagatgaaaaa

SEQ ID NO: 525898 - DNA, 19 bp, Mus musculus
  siRNA target sequence for Bcl11a (NM_016707.1,595-613).
gaggatgacgattgtttat

SEQ ID NO: 525899 - DNA, 19 bp, Mus musculus
  siRNA target sequence for Bcl11a (NM_016707.1,698-716).
ctgcacacggagctctaat

SEQ ID NO: 525900 - DNA, 19 bp, Mus musculus
  siRNA target sequence for Bcl11a (NM_016707.1,749-767).
cgcagggtatttgtaaaga

SEQ ID NO: 525901 - DNA, 19 bp, Mus musculus
  siRNA target sequence for Bcl11a (NM_016707.1,777-795).
cagctacacatgtacaact

SEQ ID NO: 525902 - DNA, 19 bp, Mus musculus
  siRNA target sequence for Bcl11a (NM_016707.1,783-801).
cacatgtacaacttgcaaa

SEQ ID NO: 525903 - DNA, 19 bp, Mus musculus
  siRNA target sequence for Bcl11a (NM_016707.1,843-861).
gaacactcatggattaaga

SEQ ID NO: 525904 - DNA, 19 bp, Mus musculus
  siRNA target sequence for Bcl11a (NM_016707.1,848-866).
ctcatggattaagaatcta

SEQ ID NO: 525905 - DNA, 19 bp, Mus musculus
  siRNA target sequence for Bcl11a (NM_016707.1,954-972).
ccatgggattcatattgca

SEQ ID NO: 525906 - DNA, 19 bp, Mus musculus
  siRNA target sequence for Bcl11a (NM_016707.1,960-978).
gattcatattgcagacaat

SEQ ID NO: 525907 - DNA, 19 bp, Mus musculus
  siRNA target sequence for Bcl11a (NM_016707.1,983-1001).
cctttaacctgctaagaat

SEQ ID NO: 525908 - DNA, 19 bp, Mus musculus
  siRNA target sequence for Bcl11a (NM_016707.1,984-1002).
ctttaacctgctaagaata

SEQ ID NO: 525909 - DNA, 19 bp, Mus musculus
  siRNA target sequence for Bcl11a (NM_016707.1,1076-1094).
caccaccgagacatcactt

SEQ ID NO: 525910 - DNA, 19 bp, Mus musculus
  siRNA target sequence for Bcl11a (NM_016707.1,1167-1185).
cagggtgctgcggttgaat

SEQ ID NO: 525911 - DNA, 19 bp, Mus musculus
  siRNA target sequence for Bcl11a (NM_016707.1,1171-1189).
gtgctgcggttgaatccaa

SEQ ID NO: 525912 - DNA, 19 bp, Mus musculus
  siRNA target sequence for Bcl11a (NM_016707.1,1201-1219).
cctcccgccatggatttct

SEQ ID NO: 525913 - DNA, 19 bp, Mus musculus
  siRNA target sequence for Bcl11a (NM_016707.1,1204-1222).
cccgccatggatttctcta

SEQ ID NO: 525914 - DNA, 19 bp, Mus musculus
  siRNA target sequence for Bcl11a (NM_016707.1,1280-1298).
ccagtcctatgcaaaggtt

SEQ ID NO: 525915 - DNA, 19 bp, Mus musculus
  siRNA target sequence for Bcl11a (NM_016707.1,1281-1299).
cagtcctatgcaaaggtta

SEQ ID NO: 525916 - DNA, 19 bp, Mus musculus
  siRNA target sequence for Bcl11a (NM_016707.1,1390-1408).
ccggtcaagtccaagtcat

SEQ ID NO: 525917 - DNA, 19 bp, Mus musculus
  siRNA target sequence for Bcl11a (NM_016707.1,1690-1708).
gagaacgaccccaacttga

SEQ ID NO: 525918 - DNA, 19 bp, Mus musculus
  siRNA target sequence for Bcl11a (NM_016707.1,1966-1984).
gtcctgggcgaaaagcata

SEQ ID NO: 525919 - DNA, 19 bp, Mus musculus
  siRNA target sequence for Bcl11a (NM_016707.1,2013-2031).
ccatagggacacttgtgat

SEQ ID NO: 525920 - DNA, 19 bp, Mus musculus
  siRNA target sequence for Bcl11a (NM_016707.1,2067-2085).
cgatggcactgttaatggt

SEQ ID NO: 525921 - DNA, 19 bp, Mus musculus
  siRNA target sequence for Bcl11a (NM_016707.1,2117-2135).
ggggtctgtccaaaaagct

SEQ ID NO: 525922 - DNA, 19 bp, Mus musculus
  siRNA target sequence for Bcl11a (NM_016707.1,2431-2449).
gggagcacgccccatatta

SEQ ID NO: 525923 - DNA, 19 bp, Mus musculus
  siRNA target sequence for Bcl11a (NM_016707.1,2433-2451).
gagcacgccccatattagt

SEQ ID NO: 525924 - DNA, 19 bp, Mus musculus
  siRNA target sequence for Bcl11a (NM_016707.1,2545-2563).
caagatgtgtggcagtttt

SEQ ID NO: 525925 - DNA, 19 bp, Mus musculus
  siRNA target sequence for Bcl11a (NM_016707.1,2573-2591).
gctcaagaacccttaagtt

SEQ ID NO: 525926 - DNA, 19 bp, Mus musculus
  siRNA target sequence for Hdac5 (NM_010412.2,593-611).
ccagcaccgaggtaaagct

SEQ ID NO: 525927 - DNA, 19 bp, Mus musculus
  siRNA target sequence for Hdac5 (NM_010412.2,701-719).
gagcccaccacgcttcttt

SEQ ID NO: 525928 - DNA, 19 bp, Mus musculus
  siRNA target sequence for Hdac5 (NM_010412.2,756-774).
gacgcctccctcctacaaa

SEQ ID NO: 525929 - DNA, 19 bp, Mus musculus
  siRNA target sequence for Hdac5 (NM_010412.2,808-826).
gactttcccctccgtaaaa

SEQ ID NO: 525930 - DNA, 19 bp, Mus musculus
  siRNA target sequence for Hdac5 (NM_010412.2,828-846).
ggcctcggaacccaactta

SEQ ID NO: 525931 - DNA, 19 bp, Mus musculus
  siRNA target sequence for Hdac5 (NM_010412.2,829-847).
gcctcggaacccaacttaa

SEQ ID NO: 525932 - DNA, 19 bp, Mus musculus
  siRNA target sequence for Hdac5 (NM_010412.2,830-848).
cctcggaacccaacttaaa

SEQ ID NO: 525933 - DNA, 19 bp, Mus musculus
  siRNA target sequence for Hdac5 (NM_010412.2,831-849).
ctcggaacccaacttaaaa

SEQ ID NO: 525934 - DNA, 19 bp, Mus musculus
  siRNA target sequence for Hdac5 (NM_010412.2,833-851).
cggaacccaacttaaaagt

SEQ ID NO: 525935 - DNA, 19 bp, Mus musculus
  siRNA target sequence for Hdac5 (NM_010412.2,834-852).
ggaacccaacttaaaagta

SEQ ID NO: 525936 - DNA, 19 bp, Mus musculus
  siRNA target sequence for Hdac5 (NM_010412.2,897-915).
cctcctgcgtcgaaaggat

SEQ ID NO: 525937 - DNA, 19 bp, Mus musculus
  siRNA target sequence for Hdac5 (NM_010412.2,912-930).
ggatggcactgttattagt

SEQ ID NO: 525938 - DNA, 19 bp, Mus musculus
  siRNA target sequence for Hdac5 (NM_010412.2,913-931).
gatggcactgttattagta

SEQ ID NO: 525939 - DNA, 19 bp, Mus musculus
  siRNA target sequence for Hdac5 (NM_010412.2,916-934).
ggcactgttattagtactt

SEQ ID NO: 525940 - DNA, 19 bp, Mus musculus
  siRNA target sequence for Hdac5 (NM_010412.2,917-935).
gcactgttattagtacttt

SEQ ID NO: 525941 - DNA, 19 bp, Mus musculus
  siRNA target sequence for Hdac5 (NM_010412.2,974-992).
gggtgtcgtccgtgtgtaa

SEQ ID NO: 525942 - DNA, 19 bp, Mus musculus
  siRNA target sequence for Hdac5 (NM_010412.2,978-996).
gtcgtccgtgtgtaacagt

SEQ ID NO: 525943 - DNA, 19 bp, Mus musculus
  siRNA target sequence for Hdac5 (NM_010412.2,1135-1153).
cagttcagcctctatacgt

SEQ ID NO: 525944 - DNA, 19 bp, Mus musculus
  siRNA target sequence for Hdac5 (NM_010412.2,1292-1310).
cactgaccggcaagttcat

SEQ ID NO: 525945 - DNA, 19 bp, Mus musculus
  siRNA target sequence for Hdac5 (NM_010412.2,1647-1665).
gggcaagatccttaccaaa

SEQ ID NO: 525946 - DNA, 19 bp, Mus musculus
  siRNA target sequence for Hdac5 (NM_010412.2,1878-1896).
cgagagtggtcctgatgaa

SEQ ID NO: 525947 - DNA, 19 bp, Mus musculus
  siRNA target sequence for Hdac5 (NM_010412.2,2241-2259).
gcggatccggggtcgtaaa

SEQ ID NO: 525948 - DNA, 19 bp, Mus musculus
  siRNA target sequence for Hdac5 (NM_010412.2,2422-2440).
gacacggtgtggaatgaga

SEQ ID NO: 525949 - DNA, 19 bp, Mus musculus
  siRNA target sequence for Hdac5 (NM_010412.2,2515-2533).
ctcaagaatggatttgcta

SEQ ID NO: 525950 - DNA, 19 bp, Mus musculus
  siRNA target sequence for Hdac5 (NM_010412.2,2598-2616).
cgtagccatcacagctaaa

SEQ ID NO: 525951 - DNA, 19 bp, Mus musculus
  siRNA target sequence for Hdac5 (NM_010412.2,2684-2702).
gcacccagcaagcattcta

SEQ ID NO: 525952 - DNA, 19 bp, Mus musculus
  siRNA target sequence for Hdac5 (NM_010412.2,2742-2760).
cgacaacgggaacttcttt

SEQ ID NO: 525953 - DNA, 19 bp, Mus musculus
  siRNA target sequence for Hdac5 (NM_010412.2,2800-2818).
ggtgtggggtacaacgtaa

SEQ ID NO: 525954 - DNA, 19 bp, Mus musculus
  siRNA target sequence for Hdac5 (NM_010412.2,2801-2819).
gtgtggggtacaacgtaaa

SEQ ID NO: 525955 - DNA, 19 bp, Mus musculus
  siRNA target sequence for Hdac5 (NM_010412.2,2972-2990).
cactgggtggctattctgt

SEQ ID NO: 525956 - DNA, 19 bp, Mus musculus
  siRNA target sequence for Hdac5 (NM_010412.2,2987-3005).
ctgtcaccgccagatgttt

SEQ ID NO: 525957 - DNA, 19 bp, Mus musculus
  siRNA target sequence for Hdac5 (NM_010412.2,3185-3203).
cggttgccacactagagaa

SEQ ID NO: 525958 - DNA, 19 bp, Mus musculus
  siRNA target sequence for Hdac5 (NM_010412.2,3211-3229).
gagatccagagcaaacact

SEQ ID NO: 525959 - DNA, 19 bp, Mus musculus
  siRNA target sequence for Hdac9 (NM_024124.1,138-156).
gcagcaagagttacttctt

SEQ ID NO: 525960 - DNA, 19 bp, Mus musculus
  siRNA target sequence for Hdac9 (NM_024124.1,139-157).
cagcaagagttacttctta

SEQ ID NO: 525961 - DNA, 19 bp, Mus musculus
  siRNA target sequence for Hdac9 (NM_024124.1,210-228).
gcagcacgagaatttgaca

SEQ ID NO: 525962 - DNA, 19 bp, Mus musculus
  siRNA target sequence for Hdac9 (NM_024124.1,211-229).
cagcacgagaatttgacaa

SEQ ID NO: 525963 - DNA, 19 bp, Mus musculus
  siRNA target sequence for Hdac9 (NM_024124.1,442-460).
caagaattcctgttgagta

SEQ ID NO: 525964 - DNA, 19 bp, Mus musculus
  siRNA target sequence for Hdac9 (NM_024124.1,479-497).
ctccaaccaatggaaagaa

SEQ ID NO: 525965 - DNA, 19 bp, Mus musculus
  siRNA target sequence for Hdac9 (NM_024124.1,538-556).
cacacatcactggatcaaa

SEQ ID NO: 525966 - DNA, 19 bp, Mus musculus
  siRNA target sequence for Hdac9 (NM_024124.1,583-601).
ccatcctacaagtacacat

SEQ ID NO: 525967 - DNA, 19 bp, Mus musculus
  siRNA target sequence for Hdac9 (NM_024124.1,605-623).
caggagctcaagatagcaa

SEQ ID NO: 525968 - DNA, 19 bp, Mus musculus
  siRNA target sequence for Hdac9 (NM_024124.1,613-631).
caagatagcaaggatgatt

SEQ ID NO: 525969 - DNA, 19 bp, Mus musculus
  siRNA target sequence for Hdac9 (NM_024124.1,628-646).
gatttccccttgagaaaaa

SEQ ID NO: 525970 - DNA, 19 bp, Mus musculus
  siRNA target sequence for Hdac9 (NM_024124.1,649-667).
gcctcagagcccaacttga

SEQ ID NO: 525971 - DNA, 19 bp, Mus musculus
  siRNA target sequence for Hdac9 (NM_024124.1,650-668).
cctcagagcccaacttgaa

SEQ ID NO: 525972 - DNA, 19 bp, Mus musculus
  siRNA target sequence for Hdac9 (NM_024124.1,669-687).
ggtgcggtccaggttaaaa

SEQ ID NO: 525973 - DNA, 19 bp, Mus musculus
  siRNA target sequence for Hdac9 (NM_024124.1,726-744).
gcggaaggatggaaatctt

SEQ ID NO: 525974 - DNA, 19 bp, Mus musculus
  siRNA target sequence for Hdac9 (NM_024124.1,736-754).
ggaaatcttgtcacttcat

SEQ ID NO: 525975 - DNA, 19 bp, Mus musculus
  siRNA target sequence for Hdac9 (NM_024124.1,835-853).
ggccctgctgggaatgtga

SEQ ID NO: 525976 - DNA, 19 bp, Mus musculus
  siRNA target sequence for Hdac9 (NM_024124.1,907-925).
ccacagcagcgcatactaa

SEQ ID NO: 525977 - DNA, 19 bp, Mus musculus
  siRNA target sequence for Hdac9 (NM_024124.1,915-933).
gcgcatactaattcatgaa

SEQ ID NO: 525978 - DNA, 19 bp, Mus musculus
  siRNA target sequence for Hdac9 (NM_024124.1,938-956).
ccatgaacctgctaagtct

SEQ ID NO: 525979 - DNA, 19 bp, Mus musculus
  siRNA target sequence for Hdac9 (NM_024124.1,946-964).
ctgctaagtctctatacct

SEQ ID NO: 525980 - DNA, 19 bp, Mus musculus
  siRNA target sequence for Hdac9 (NM_024124.1,967-985).
ccgtccctgcccaatatca

SEQ ID NO: 525981 - DNA, 19 bp, Mus musculus
  siRNA target sequence for Hdac9 (NM_024124.1,969-987).
gtccctgcccaatatcact

SEQ ID NO: 525982 - DNA, 19 bp, Mus musculus
  siRNA target sequence for Hdac9 (NM_024124.1,1006-1024).
ccgtccccactcaatgctt

SEQ ID NO: 525983 - DNA, 19 bp, Mus musculus
  siRNA target sequence for Hdac9 (NM_024124.1,1022-1040).
cttctaactcactcaaaga

SEQ ID NO: 525984 - DNA, 19 bp, Mus musculus
  siRNA target sequence for Hdac9 (NM_024124.1,1118-1136).
cctccagccacgttcatgt

SEQ ID NO: 525985 - DNA, 19 bp, Mus musculus
  siRNA target sequence for Hdac9 (NM_024124.1,1124-1142).
gccacgttcatgtagcaat

SEQ ID NO: 525986 - DNA, 19 bp, Mus musculus
  siRNA target sequence for Hdac9 (NM_024124.1,1128-1146).
cgttcatgtagcaatggaa

SEQ ID NO: 525987 - DNA, 19 bp, Mus musculus
  siRNA target sequence for Hdac9 (NM_024124.1,1431-1449).
gcagatccacatgaacaaa

SEQ ID NO: 525988 - DNA, 19 bp, Mus musculus
  siRNA target sequence for Hdac9 (NM_024124.1,1446-1464).
caaactgctatcgaaatct

SEQ ID NO: 525989 - DNA, 19 bp, Mus musculus
  siRNA target sequence for Hdac9 (NM_024124.1,1452-1470).
gctatcgaaatctattgaa

SEQ ID NO: 525990 - DNA, 19 bp, Mus musculus
  siRNA target sequence for Hdac9 (NM_024124.1,1457-1475).
cgaaatctattgaacaact

SEQ ID NO: 525991 - DNA, 19 bp, Mus musculus
  siRNA target sequence for Hdac9 (NM_024124.1,1596-1614).
ggacacgctgggacaagtt

SEQ ID NO: 525992 - DNA, 19 bp, Mus musculus
  siRNA target sequence for Hdac9 (NM_024124.1,1640-1658).
ccgtggacagcgatgaaga

SEQ ID NO: 525993 - DNA, 19 bp, Mus musculus
  siRNA target sequence for Hdac9 (NM_024124.1,1650-1668).
cgatgaagatgctcagata

SEQ ID NO: 525994 - DNA, 19 bp, Mus musculus
  siRNA target sequence for Hdac9 (NM_024124.1,1684-1702).
ggggagcaggctgctttta

SEQ ID NO: 525995 - DNA, 19 bp, Mus musculus
  siRNA target sequence for Hdac9 (NM_024124.1,1685-1703).
gggagcaggctgcttttat

SEQ ID NO: 525996 - DNA, 19 bp, Mus musculus
  siRNA target sequence for Hdac9 (NM_024124.1,1689-1707).
gcaggctgcttttatgcaa

SEQ ID NO: 525997 - DNA, 19 bp, Mus musculus
  siRNA target sequence for Hdac9 (NM_024124.1,1708-1726).
caggtaataggcaaagatt

SEQ ID NO: 525998 - DNA, 19 bp, Mus musculus
  siRNA target sequence for Hdac9 (NM_024124.1,1710-1728).
ggtaataggcaaagattta

SEQ ID NO: 525999 - DNA, 19 bp, Mus musculus
  siRNA target sequence for Hdac9 (NM_024124.1,1729-1747).
gctccaggatttgtaatta

SEQ ID NO: 526000 - DNA, 19 bp, Mus musculus
  siRNA target sequence for Hdac9 (NM_024124.1,1730-1748).
ctccaggatttgtaattaa

SEQ ID NO: 526001 - DNA, 19 bp, Mus musculus
  siRNA target sequence for Nrip1 (NM_173440.1,752-770).
gatgtgcatcaggattcta

SEQ ID NO: 526002 - DNA, 19 bp, Mus musculus
  siRNA target sequence for Nrip1 (NM_173440.1,761-779).
caggattctattgtcttaa

SEQ ID NO: 526003 - DNA, 19 bp, Mus musculus
  siRNA target sequence for Nrip1 (NM_173440.1,764-782).
gattctattgtcttaactt

SEQ ID NO: 526004 - DNA, 19 bp, Mus musculus
  siRNA target sequence for Nrip1 (NM_173440.1,787-805).
cgaagggttactaatgcat

SEQ ID NO: 526005 - DNA, 19 bp, Mus musculus
  siRNA target sequence for Nrip1 (NM_173440.1,819-837).
gatcaggcactgccattaa

SEQ ID NO: 526006 - DNA, 19 bp, Mus musculus
  siRNA target sequence for Nrip1 (NM_173440.1,893-911).
gcgtttccctcctgtcaaa

SEQ ID NO: 526007 - DNA, 19 bp, Mus musculus
  siRNA target sequence for Nrip1 (NM_173440.1,953-971).
ggcatgctgcacctcaaaa

SEQ ID NO: 526008 - DNA, 19 bp, Mus musculus
  siRNA target sequence for Nrip1 (NM_173440.1,954-972).
gcatgctgcacctcaaaaa

SEQ ID NO: 526009 - DNA, 19 bp, Mus musculus
  siRNA target sequence for Nrip1 (NM_173440.1,1035-1053).
ccatcgtgaatttaaacgt

SEQ ID NO: 526010 - DNA, 19 bp, Mus musculus
  siRNA target sequence for Nrip1 (NM_173440.1,1036-1054).
catcgtgaatttaaacgta

SEQ ID NO: 526011 - DNA, 19 bp, Mus musculus
  siRNA target sequence for Nrip1 (NM_173440.1,1040-1058).
gtgaatttaaacgtaaaga

SEQ ID NO: 526012 - DNA, 19 bp, Mus musculus
  siRNA target sequence for Nrip1 (NM_173440.1,1213-1231).
cctcagtcacgagtcttta

SEQ ID NO: 526013 - DNA, 19 bp, Mus musculus
  siRNA target sequence for Nrip1 (NM_173440.1,1214-1232).
ctcagtcacgagtctttaa

SEQ ID NO: 526014 - DNA, 19 bp, Mus musculus
  siRNA target sequence for Nrip1 (NM_173440.1,1216-1234).
cagtcacgagtctttaaaa

SEQ ID NO: 526015 - DNA, 19 bp, Mus musculus
  siRNA target sequence for Nrip1 (NM_173440.1,1261-1279).
cgtggcctcaagtcactta

SEQ ID NO: 526016 - DNA, 19 bp, Mus musculus
  siRNA target sequence for Nrip1 (NM_173440.1,1264-1282).
ggcctcaagtcacttaaaa

SEQ ID NO: 526017 - DNA, 19 bp, Mus musculus
  siRNA target sequence for Nrip1 (NM_173440.1,1265-1283).
gcctcaagtcacttaaaaa

SEQ ID NO: 526018 - DNA, 19 bp, Mus musculus
  siRNA target sequence for Nrip1 (NM_173440.1,1267-1285).
ctcaagtcacttaaaaact

SEQ ID NO: 526019 - DNA, 19 bp, Mus musculus
  siRNA target sequence for Nrip1 (NM_173440.1,1337-1355).
gacgtgactccaaacctta

SEQ ID NO: 526020 - DNA, 19 bp, Mus musculus
  siRNA target sequence for Nrip1 (NM_173440.1,1346-1364).
ccaaaccttatcagagata

SEQ ID NO: 526021 - DNA, 19 bp, Mus musculus
  siRNA target sequence for Nrip1 (NM_173440.1,1429-1447).
gtcatgtgctgcaagatta

SEQ ID NO: 526022 - DNA, 19 bp, Mus musculus
  siRNA target sequence for Nrip1 (NM_173440.1,1431-1449).
catgtgctgcaagattaca

SEQ ID NO: 526023 - DNA, 19 bp, Mus musculus
  siRNA target sequence for Nrip1 (NM_173440.1,1686-1704).
gggtgtctggccatctcaa

SEQ ID NO: 526024 - DNA, 19 bp, Mus musculus
  siRNA target sequence for Nrip1 (NM_173440.1,1799-1817).
cccaaaaacacgagctata

SEQ ID NO: 526025 - DNA, 19 bp, Mus musculus
  siRNA target sequence for Nrip1 (NM_173440.1,1800-1818).
ccaaaaacacgagctataa

SEQ ID NO: 526026 - DNA, 19 bp, Mus musculus
  siRNA target sequence for Nrip1 (NM_173440.1,1841-1859).
ctaaagcaggctgctaata

SEQ ID NO: 526027 - DNA, 19 bp, Mus musculus
  siRNA target sequence for Nrip1 (NM_173440.1,1954-1972).
cacgcccaccacgattgat

SEQ ID NO: 526028 - DNA, 19 bp, Mus musculus
  siRNA target sequence for Nrip1 (NM_173440.1,1959-1977).
ccaccacgattgatgagta

SEQ ID NO: 526029 - DNA, 19 bp, Mus musculus
  siRNA target sequence for Nrip1 (NM_173440.1,1970-1988).
gatgagtactccgataaca

SEQ ID NO: 526030 - DNA, 19 bp, Mus musculus
  siRNA target sequence for Nrip1 (NM_173440.1,1982-2000).
gataacaacccgagcttta

SEQ ID NO: 526031 - DNA, 19 bp, Mus musculus
  siRNA target sequence for Nrip1 (NM_173440.1,1987-2005).
caacccgagctttacagat

SEQ ID NO: 526032 - DNA, 19 bp, Mus musculus
  siRNA target sequence for Nrip1 (NM_173440.1,2021-2039).
gaaagctcgtactccaatt

SEQ ID NO: 526033 - DNA, 19 bp, Mus musculus
  siRNA target sequence for Nrip1 (NM_173440.1,2061-2079).
gcaaacaccggatcgaaaa

SEQ ID NO: 526034 - DNA, 19 bp, Mus musculus
  siRNA target sequence for Nrip1 (NM_173440.1,2099-2117).
gtttcgctggagaacctaa

SEQ ID NO: 526035 - DNA, 19 bp, Mus musculus
  siRNA target sequence for Nrip1 (NM_173440.1,2113-2131).
cctaacccagtccttgtta

SEQ ID NO: 526036 - DNA, 19 bp, Mus musculus
  siRNA target sequence for Nrip1 (NM_173440.1,2114-2132).
ctaacccagtccttgttaa

SEQ ID NO: 526037 - DNA, 19 bp, Mus musculus
  siRNA target sequence for Nrip1 (NM_173440.1,2157-2175).
gcgttgacatcaaagaaga

SEQ ID NO: 526038 - DNA, 19 bp, Mus musculus
  siRNA target sequence for Nrip1 (NM_173440.1,2174-2192).
gatcaagatacctcaacaa

SEQ ID NO: 526039 - DNA, 19 bp, Mus musculus
  siRNA target sequence for Nrip1 (NM_173440.1,2233-2251).
gttgctgctcggccataaa

SEQ ID NO: 526040 - DNA, 19 bp, Mus musculus
  siRNA target sequence for Nrip1 (NM_173440.1,2236-2254).
gctgctcggccataaaagt

SEQ ID NO: 526041 - DNA, 19 bp, Mus musculus
  siRNA target sequence for Nrip1 (NM_173440.1,2242-2260).
cggccataaaagtgaagaa

SEQ ID NO: 526042 - DNA, 19 bp, Mus musculus
  siRNA target sequence for Nrip1 (NM_173440.1,2380-2398).
gagcactccaccactgtat

SEQ ID NO: 526043 - DNA, 19 bp, Mus musculus
  siRNA target sequence for Nrip1 (NM_173440.1,2414-2432).
gagtctcccatcaatcttt

SEQ ID NO: 526044 - DNA, 19 bp, Mus musculus
  siRNA target sequence for Nrip1 (NM_173440.1,2531-2549).
ctcacgaaaggcaaagagt

SEQ ID NO: 526045 - DNA, 19 bp, Mus musculus
  siRNA target sequence for Nrip1 (NM_173440.1,2571-2589).
cgagtgaaggtgcacaaaa

SEQ ID NO: 526046 - DNA, 19 bp, Mus musculus
  siRNA target sequence for Nrip1 (NM_173440.1,2572-2590).
gagtgaaggtgcacaaaat

SEQ ID NO: 526047 - DNA, 19 bp, Mus musculus
  siRNA target sequence for Nrip1 (NM_173440.1,2596-2614).
cacgttcagtgccagtaaa

SEQ ID NO: 526048 - DNA, 19 bp, Mus musculus
  siRNA target sequence for Nrip1 (NM_173440.1,2598-2616).
cgttcagtgccagtaaact

SEQ ID NO: 526049 - DNA, 19 bp, Mus musculus
  siRNA target sequence for Nrip1 (NM_173440.1,2602-2620).
cagtgccagtaaactgtta

SEQ ID NO: 526050 - DNA, 19 bp, Mus musculus
  siRNA target sequence for Nrip1 (NM_173440.1,2604-2622).
gtgccagtaaactgttaca

SEQ ID NO: 526051 - DNA, 19 bp, Mus musculus
  siRNA target sequence for Nrip1 (NM_173440.1,2606-2624).
gccagtaaactgttacaaa

SEQ ID NO: 526052 - DNA, 19 bp, Mus musculus
  siRNA target sequence for Nrip1 (NM_173440.1,2677-2695).
ctgcaaacagctgttaagt

SEQ ID NO: 526053 - DNA, 19 bp, Mus musculus
  siRNA target sequence for Nrip1 (NM_173440.1,2714-2732).
ctcggtctgattgatagat

SEQ ID NO: 526054 - DNA, 19 bp, Mus musculus
  siRNA target sequence for Nrip1 (NM_173440.1,2716-2734).
cggtctgattgatagatta

SEQ ID NO: 526055 - DNA, 19 bp, Mus musculus
  siRNA target sequence for Nrip1 (NM_173440.1,2718-2736).
gtctgattgatagattaaa

SEQ ID NO: 526056 - DNA, 19 bp, Mus musculus
  siRNA target sequence for Nrip1 (NM_173440.1,2739-2757).
gccctctgctctcaaataa

SEQ ID NO: 526057 - DNA, 19 bp, Mus musculus
  siRNA target sequence for Nrip1 (NM_173440.1,2740-2758).
ccctctgctctcaaataaa

SEQ ID NO: 526058 - DNA, 19 bp, Mus musculus
  siRNA target sequence for Nrip1 (NM_173440.1,2746-2764).
gctctcaaataaaaccaat

SEQ ID NO: 526059 - DNA, 19 bp, Mus musculus
  siRNA target sequence for Nrip1 (NM_173440.1,2822-2840).
cctggttgtgagatagaaa

SEQ ID NO: 526060 - DNA, 19 bp, Mus musculus
  siRNA target sequence for Nrip1 (NM_173440.1,2826-2844).
gttgtgagatagaaaatct

SEQ ID NO: 526061 - DNA, 19 bp, Mus musculus
  siRNA target sequence for Nrip1 (NM_173440.1,2853-2871).
gacggactgtccttcagtt

SEQ ID NO: 526062 - DNA, 19 bp, Mus musculus
  siRNA target sequence for Nrip1 (NM_173440.1,2958-2976).
gggctgcaaatgaacagat

SEQ ID NO: 526063 - DNA, 19 bp, Mus musculus
  siRNA target sequence for Nrip1 (NM_173440.1,2959-2977).
ggctgcaaatgaacagata

SEQ ID NO: 526064 - DNA, 19 bp, Mus musculus
  siRNA target sequence for Nrip1 (NM_173440.1,2961-2979).
ctgcaaatgaacagatact

SEQ ID NO: 526065 - DNA, 19 bp, Mus musculus
  siRNA target sequence for Nrip1 (NM_173440.1,2963-2981).
gcaaatgaacagatactca

SEQ ID NO: 526066 - DNA, 19 bp, Mus musculus
  siRNA target sequence for Nrip1 (NM_173440.1,3030-3048).
caaacctgcccttaaacca

SEQ ID NO: 526067 - DNA, 19 bp, Mus musculus
  siRNA target sequence for Nrip1 (NM_173440.1,3113-3131).
ccagtgtcggaggacttta

SEQ ID NO: 526068 - DNA, 19 bp, Mus musculus
  siRNA target sequence for Nrip1 (NM_173440.1,3114-3132).
cagtgtcggaggactttaa

SEQ ID NO: 526069 - DNA, 19 bp, Mus musculus
  siRNA target sequence for Nrip1 (NM_173440.1,3116-3134).
gtgtcggaggactttaaat

SEQ ID NO: 526070 - DNA, 19 bp, Mus musculus
  siRNA target sequence for Nrip1 (NM_173440.1,3155-3173).
gatttctctttctcaaaga

SEQ ID NO: 526071 - DNA, 19 bp, Mus musculus
  siRNA target sequence for Nrip1 (NM_173440.1,3190-3208).
cttgctgagacagaatcaa

SEQ ID NO: 526072 - DNA, 19 bp, Mus musculus
  siRNA target sequence for Nrip1 (NM_173440.1,3266-3284).
ctggagtcgaagaacatct

SEQ ID NO: 526073 - DNA, 19 bp, Mus musculus
  siRNA target sequence for Nrip1 (NM_173440.1,3283-3301).
ctgcatggtcccgaagaaa

SEQ ID NO: 526074 - DNA, 19 bp, Mus musculus
  siRNA target sequence for Nrip1 (NM_173440.1,3358-3376).
cgtagatactgccaatcat

SEQ ID NO: 526075 - DNA, 19 bp, Mus musculus
  siRNA target sequence for Nrip1 (NM_173440.1,3435-3453).
gcaggaatgagctcgatta

SEQ ID NO: 526076 - DNA, 19 bp, Mus musculus
  siRNA target sequence for Nrip1 (NM_173440.1,3436-3454).
caggaatgagctcgattat

SEQ ID NO: 526077 - DNA, 19 bp, Mus musculus
  siRNA target sequence for Nrip1 (NM_173440.1,3438-3456).
ggaatgagctcgattataa

SEQ ID NO: 526078 - DNA, 19 bp, Mus musculus
  siRNA target sequence for Nrip1 (NM_173440.1,3439-3457).
gaatgagctcgattataaa

SEQ ID NO: 526079 - DNA, 19 bp, Mus musculus
  siRNA target sequence for Nrip1 (NM_173440.1,3594-3612).
ctgtccccgacacgaaaaa

SEQ ID NO: 526080 - DNA, 19 bp, Mus musculus
  siRNA target sequence for Nrip1 (NM_173440.1,3596-3614).
gtccccgacacgaaaaaga

SEQ ID NO: 526081 - DNA, 19 bp, Mus musculus
  siRNA target sequence for Nrip1 (NM_173440.1,3650-3668).
gaattcggcatttcttctt

SEQ ID NO: 526082 - DNA, 19 bp, Mus musculus
  siRNA target sequence for Nrip1 (NM_173440.1,3712-3730).
gacggatcataggacattt

SEQ ID NO: 526083 - DNA, 19 bp, Mus musculus
  siRNA target sequence for Nrip1 (NM_173440.1,3715-3733).
ggatcataggacattttca

SEQ ID NO: 526084 - DNA, 19 bp, Mus musculus
  siRNA target sequence for Nrip1 (NM_173440.1,3732-3750).
catacccgggaatggtaaa

SEQ ID NO: 526085 - DNA, 19 bp, Mus musculus
  siRNA target sequence for Nrip1 (NM_173440.1,3842-3860).
gagaagggacccattaagt

SEQ ID NO: 526086 - DNA, 19 bp, Mus musculus
  siRNA target sequence for Nrip1 (NM_173440.1,3863-3881).
gtcatcgcagatatggata

SEQ ID NO: 526087 - DNA, 19 bp, Mus musculus
  siRNA target sequence for Nrip1 (NM_173440.1,3868-3886).
cgcagatatggataagaat

SEQ ID NO: 526088 - DNA, 19 bp, Mus musculus
  siRNA target sequence for Nrip1 (NM_173440.1,3872-3890).
gatatggataagaatgaat

SEQ ID NO: 526089 - DNA, 19 bp, Mus musculus
  siRNA target sequence for Nrip1 (NM_173440.1,3921-3939).
ctaatccgatcctctatta

SEQ ID NO: 526090 - DNA, 19 bp, Mus musculus
  siRNA target sequence for Nrip1 (NM_173440.1,3949-3967).
gaagggagggggcaattct

SEQ ID NO: 526091 - DNA, 19 bp, Mus musculus
  siRNA target sequence for Nrip1 (NM_173440.1,3953-3971).
ggagggggcaattctgtta

SEQ ID NO: 526092 - DNA, 19 bp, Mus musculus
  siRNA target sequence for Nrip1 (NM_173440.1,4063-4081).
cgctgcagaaactaaagct

SEQ ID NO: 526093 - DNA, 19 bp, Mus musculus
  siRNA target sequence for Nrip1 (NM_173440.1,4094-4112).
ctaagaagcccgtacaata

SEQ ID NO: 526094 - DNA, 19 bp, Mus musculus
  siRNA target sequence for Nrip1 (NM_173440.1,4134-4152).
ctcgcccacacagtacaaa

SEQ ID NO: 526095 - DNA, 19 bp, Mus musculus
  siRNA target sequence for Nrip1 (NM_173440.1,4175-4193).
ggaaacgcgctcaccataa

SEQ ID NO: 526096 - DNA, 19 bp, Mus musculus
  siRNA target sequence for Nrip1 (NM_173440.1,4176-4194).
gaaacgcgctcaccataaa

SEQ ID NO: 526097 - DNA, 19 bp, Mus musculus
  siRNA target sequence for Nrip1 (NM_173440.1,4182-4200).
cgctcaccataaaaaaaga

SEQ ID NO: 526098 - DNA, 19 bp, Mus musculus
  siRNA target sequence for Strm (NM_011501.1,385-403).
gattgatggccttagtcat

SEQ ID NO: 526099 - DNA, 19 bp, Mus musculus
  siRNA target sequence for Strm (NM_011501.1,431-449).
caggaatcatgggtattta

SEQ ID NO: 526100 - DNA, 19 bp, Mus musculus
  siRNA target sequence for Strm (NM_011501.1,518-536).
ccagtgttcaccgaaacaa

SEQ ID NO: 526101 - DNA, 19 bp, Mus musculus
  siRNA target sequence for Strm (NM_011501.1,519-537).
cagtgttcaccgaaacaaa

SEQ ID NO: 526102 - DNA, 19 bp, Mus musculus
  siRNA target sequence for Strm (NM_011501.1,521-539).
gtgttcaccgaaacaaaaa

SEQ ID NO: 526103 - DNA, 19 bp, Mus musculus
  siRNA target sequence for Tle4 (NM_011600.2,578-596).
cgcgacctgagcaagatgt

SEQ ID NO: 526104 - DNA, 19 bp, Mus musculus
  siRNA target sequence for Tle4 (NM_011600.2,628-646).
gcctgctcaacccttcaaa

SEQ ID NO: 526105 - DNA, 19 bp, Mus musculus
  siRNA target sequence for Tle4 (NM_011600.2,632-650).
gctcaacccttcaaattta

SEQ ID NO: 526106 - DNA, 19 bp, Mus musculus
  siRNA target sequence for Tle4 (NM_011600.2,635-653).
caacccttcaaatttacaa

SEQ ID NO: 526107 - DNA, 19 bp, Mus musculus
  siRNA target sequence for Tle4 (NM_011600.2,638-656).
cccttcaaatttacaattt

SEQ ID NO: 526108 - DNA, 19 bp, Mus musculus
  siRNA target sequence for Tle4 (NM_011600.2,663-681).
cctgtgatcggattaagga

SEQ ID NO: 526109 - DNA, 19 bp, Mus musculus
  siRNA target sequence for Tle4 (NM_011600.2,664-682).
ctgtgatcggattaaggaa

SEQ ID NO: 526110 - DNA, 19 bp, Mus musculus
  siRNA target sequence for Tle4 (NM_011600.2,763-781).
gcggcattatgtcatgtat

SEQ ID NO: 526111 - DNA, 19 bp, Mus musculus
  siRNA target sequence for Tle4 (NM_011600.2,764-782).
cggcattatgtcatgtatt

SEQ ID NO: 526112 - DNA, 19 bp, Mus musculus
  siRNA target sequence for Tle4 (NM_011600.2,792-810).
cctatgggttgaacataga

SEQ ID NO: 526113 - DNA, 19 bp, Mus musculus
  siRNA target sequence for Tle4 (NM_011600.2,798-816).
ggttgaacatagaaatgca

SEQ ID NO: 526114 - DNA, 19 bp, Mus musculus
  siRNA target sequence for Tle4 (NM_011600.2,823-841).
ggcagagattgttaaacga

SEQ ID NO: 526115 - DNA, 19 bp, Mus musculus
  siRNA target sequence for Tle4 (NM_011600.2,829-847).
gattgttaaacgactaaat

SEQ ID NO: 526116 - DNA, 19 bp, Mus musculus
  siRNA target sequence for Tle4 (NM_011600.2,833-851).
gttaaacgactaaatgcta

SEQ ID NO: 526117 - DNA, 19 bp, Mus musculus
  siRNA target sequence for Tle4 (NM_011600.2,1110-1128).
ctcacctcccaattaagga

SEQ ID NO: 526118 - DNA, 19 bp, Mus musculus
  siRNA target sequence for Tle4 (NM_011600.2,1211-1229).
cggggttctgagaaacata

SEQ ID NO: 526119 - DNA, 19 bp, Mus musculus
  siRNA target sequence for Tle4 (NM_011600.2,1414-1432).
gacacgactcctcaagaaa

SEQ ID NO: 526120 - DNA, 19 bp, Mus musculus
  siRNA target sequence for Tle4 (NM_011600.2,1416-1434).
cacgactcctcaagaaaga

SEQ ID NO: 526121 - DNA, 19 bp, Mus musculus
  siRNA target sequence for Tle4 (NM_011600.2,1492-1510).
caaagagcttagccttaat

SEQ ID NO: 526122 - DNA, 19 bp, Mus musculus
  siRNA target sequence for Tle4 (NM_011600.2,1496-1514).
gagcttagccttaatgaaa

SEQ ID NO: 526123 - DNA, 19 bp, Mus musculus
  siRNA target sequence for Tle4 (NM_011600.2,1546-1564).
ccctactccacgaactgat

SEQ ID NO: 526124 - DNA, 19 bp, Mus musculus
  siRNA target sequence for Tle4 (NM_011600.2,1568-1586).
cctacccctggcagtaatt

SEQ ID NO: 526125 - DNA, 19 bp, Mus musculus
  siRNA target sequence for Tle4 (NM_011600.2,1573-1591).
ccctggcagtaattctact

SEQ ID NO: 526126 - DNA, 19 bp, Mus musculus
  siRNA target sequence for Tle4 (NM_011600.2,1625-1643).
ggtgtggaccccttagcat

SEQ ID NO: 526127 - DNA, 19 bp, Mus musculus
  siRNA target sequence for Tle4 (NM_011600.2,1667-1685).
gtaccttgtccatatccaa

SEQ ID NO: 526128 - DNA, 19 bp, Mus musculus
  siRNA target sequence for Tle4 (NM_011600.2,1858-1876).
catgcgagtgccagcaata

SEQ ID NO: 526129 - DNA, 19 bp, Mus musculus
  siRNA target sequence for Tle4 (NM_011600.2,1861-1879).
gcgagtgccagcaatacct

SEQ ID NO: 526130 - DNA, 19 bp, Mus musculus
  siRNA target sequence for Tle4 (NM_011600.2,1869-1887).
cagcaatacctccaaatct

SEQ ID NO: 526131 - DNA, 19 bp, Mus musculus
  siRNA target sequence for Tle4 (NM_011600.2,1871-1889).
gcaatacctccaaatctaa

SEQ ID NO: 526132 - DNA, 19 bp, Mus musculus
  siRNA target sequence for Tle4 (NM_011600.2,2198-2216).
cctgatggtcgcaccttaa

SEQ ID NO: 526133 - DNA, 19 bp, Mus musculus
  siRNA target sequence for Tle4 (NM_011600.2,2616-2634).
gcaatgtggaagtattgca

SEQ ID NO: 526134 - DNA, 19 bp, Mus musculus
  siRNA target sequence for Tle4 (NM_011600.2,2617-2635).
caatgtggaagtattgcat

SEQ ID NO: 526135 - DNA, 19 bp, Mus musculus
  siRNA target sequence for Tle4 (NM_011600.2,2699-2717).
gcccactgtggcaaatggt

SEQ ID NO: 526136 - DNA, 19 bp, Mus musculus
  siRNA target sequence for Tle4 (NM_011600.2,2860-2878).
caagaaagctacggtttat

SEQ ID NO: 526137 - DNA, 19 bp, Mus musculus
  siRNA target sequence for Tle4 (NM_011600.2,2863-2881).
gaaagctacggtttatgaa

SEQ ID NO: 526138 - DNA, 19 bp, Mus musculus
  siRNA target sequence for Tle4 (NM_011600.2,2867-2885).
gctacggtttatgaagtta

SEQ ID NO: 526139 - DNA, 19 bp, Mus musculus
  siRNA target sequence for Tle4 (NM_011600.2,2868-2886).
ctacggtttatgaagttat

SEQ ID NO: 526140 - DNA, 19 bp, Mus musculus
  siRNA target sequence for Tle4 (NM_011600.2,2871-2889).
cggtttatgaagttattta

SEQ ID NO: 526141 - DNA, 19 bp, Mus musculus
  siRNA target sequence for Tob1 (NM_009427.1,19-37).
gtagcactcaattttatta

SEQ ID NO: 526142 - DNA, 19 bp, Mus musculus
  siRNA target sequence for Tob1 (NM_009427.1,41-59).
cttacttgtacaataagct

SEQ ID NO: 526143 - DNA, 19 bp, Mus musculus
  siRNA target sequence for Tob1 (NM_009427.1,62-80).
ccaggagacgtgtcaacat

SEQ ID NO: 526144 - DNA, 19 bp, Mus musculus
  siRNA target sequence for Tob1 (NM_009427.1,63-81).
caggagacgtgtcaacatt

SEQ ID NO: 526145 - DNA, 19 bp, Mus musculus
  siRNA target sequence for Tob1 (NM_009427.1,65-83).
ggagacgtgtcaacatttt

SEQ ID NO: 526146 - DNA, 19 bp, Mus musculus
  siRNA target sequence for Tob1 (NM_009427.1,91-109).
gagcttgaaagacttctta

SEQ ID NO: 526147 - DNA, 19 bp, Mus musculus
  siRNA target sequence for Tob1 (NM_009427.1,125-143).
ggcactggtatcctgaaaa

SEQ ID NO: 526148 - DNA, 19 bp, Mus musculus
  siRNA target sequence for Tob1 (NM_009427.1,154-172).
ggctcagggtttagatgta

SEQ ID NO: 526149 - DNA, 19 bp, Mus musculus
  siRNA target sequence for Tob1 (NM_009427.1,155-173).
gctcagggtttagatgtat

SEQ ID NO: 526150 - DNA, 19 bp, Mus musculus
  siRNA target sequence for Tob1 (NM_009427.1,156-174).
ctcagggtttagatgtata

SEQ ID NO: 526151 - DNA, 19 bp, Mus musculus
  siRNA target sequence for Tob1 (NM_009427.1,158-176).
cagggtttagatgtataca

SEQ ID NO: 526152 - DNA, 19 bp, Mus musculus
  siRNA target sequence for Tob1 (NM_009427.1,201-219).
gatcgagcaggcatccaaa

SEQ ID NO: 526153 - DNA, 19 bp, Mus musculus
  siRNA target sequence for Tob1 (NM_009427.1,251-269).
gcaatctgccacaggattt

SEQ ID NO: 526154 - DNA, 19 bp, Mus musculus
  siRNA target sequence for Tob1 (NM_009427.1,339-357).
cgtggacgacagtagtgaa

SEQ ID NO: 526155 - DNA, 19 bp, Mus musculus
  siRNA target sequence for Tob1 (NM_009427.1,340-358).
gtggacgacagtagtgaaa

SEQ ID NO: 526156 - DNA, 19 bp, Mus musculus
  siRNA target sequence for Tob1 (NM_009427.1,508-526).
cggtccacgcagcctttaa

SEQ ID NO: 526157 - DNA, 19 bp, Mus musculus
  siRNA target sequence for Tob1 (NM_009427.1,512-530).
ccacgcagcctttaacctt

SEQ ID NO: 526158 - DNA, 19 bp, Mus musculus
  siRNA target sequence for Tob1 (NM_009427.1,513-531).
cacgcagcctttaaccttt

SEQ ID NO: 526159 - DNA, 19 bp, Mus musculus
  siRNA target sequence for Tob1 (NM_009427.1,624-642).
cctgggcctgactgtaaat

SEQ ID NO: 526160 - DNA, 19 bp, Mus musculus
  siRNA target sequence for Tob1 (NM_009427.1,628-646).
ggcctgactgtaaatgtga

SEQ ID NO: 526161 - DNA, 19 bp, Mus musculus
  siRNA target sequence for Tob1 (NM_009427.1,891-909).
gcagggtcaaggtagtagt

SEQ ID NO: 526162 - DNA, 19 bp, Mus musculus
  siRNA target sequence for Tob1 (NM_009427.1,892-910).
cagggtcaaggtagtagta

SEQ ID NO: 526163 - DNA, 19 bp, Mus musculus
  siRNA target sequence for Tob1 (NM_009427.1,901-919).
ggtagtagtaccaatggaa

SEQ ID NO: 526164 - DNA, 19 bp, Mus musculus
  siRNA target sequence for Tob1 (NM_009427.1,902-920).
gtagtagtaccaatggaat

SEQ ID NO: 526165 - DNA, 19 bp, Mus musculus
  siRNA target sequence for Tob1 (NM_009427.1,998-1016).
gcctcaacgagaagtcttt

SEQ ID NO: 526166 - DNA, 19 bp, Mus musculus
  siRNA target sequence for Tob1 (NM_009427.1,999-1017).
cctcaacgagaagtctttt

SEQ ID NO: 526167 - DNA, 19 bp, Mus musculus
  siRNA target sequence for Tob1 (NM_009427.1,1002-1020).
caacgagaagtcttttgta

SEQ ID NO: 526168 - DNA, 19 bp, Mus musculus
  siRNA target sequence for Tob1 (NM_009427.1,1018-1036).
gtagacggcttgaatttta

SEQ ID NO: 526169 - DNA, 19 bp, Mus musculus
  siRNA target sequence for Tob1 (NM_009427.1,1021-1039).
gacggcttgaattttagct

SEQ ID NO: 526170 - DNA, 19 bp, Mus musculus
  siRNA target sequence for Tob1 (NM_009427.1,1023-1041).
cggcttgaattttagctta

SEQ ID NO: 526171 - DNA, 19 bp, Mus musculus
  siRNA target sequence for Tob1 (NM_009427.1,1024-1042).
ggcttgaattttagcttaa

SEQ ID NO: 526172 - DNA, 19 bp, Mus musculus
  siRNA target sequence for Zfpm2 (NM_011766.2,1223-1241).
gcctacagctattgtcaat

SEQ ID NO: 526173 - DNA, 19 bp, Mus musculus
  siRNA target sequence for Zfpm2 (NM_011766.2,1230-1248).
gctattgtcaataaggata

SEQ ID NO: 526174 - DNA, 19 bp, Mus musculus
  siRNA target sequence for Zfpm2 (NM_011766.2,1299-1317).
caagcccatttgatgtact

SEQ ID NO: 526175 - DNA, 19 bp, Mus musculus
  siRNA target sequence for Zfpm2 (NM_011766.2,1302-1320).
gcccatttgatgtactact

SEQ ID NO: 526176 - DNA, 19 bp, Mus musculus
  siRNA target sequence for Zfpm2 (NM_011766.2,1305-1323).
catttgatgtactactgta

SEQ ID NO: 526177 - DNA, 19 bp, Mus musculus
  siRNA target sequence for Zfpm2 (NM_011766.2,1468-1486).
gtgtgaaaatggaagagtt

SEQ ID NO: 526178 - DNA, 19 bp, Mus musculus
  siRNA target sequence for Zfpm2 (NM_011766.2,1490-1508).
gccccctggggcgagttta

SEQ ID NO: 526179 - DNA, 19 bp, Mus musculus
  siRNA target sequence for Zfpm2 (NM_011766.2,1491-1509).
ccccctggggcgagtttaa

SEQ ID NO: 526180 - DNA, 19 bp, Mus musculus
  siRNA target sequence for Zfpm2 (NM_011766.2,1492-1510).
cccctggggcgagtttaaa

SEQ ID NO: 526181 - DNA, 19 bp, Mus musculus
  siRNA target sequence for Zfpm2 (NM_011766.2,1497-1515).
ggggcgagtttaaaatgca

SEQ ID NO: 526182 - DNA, 19 bp, Mus musculus
  siRNA target sequence for Zfpm2 (NM_011766.2,1778-1796).
ggccatgccgactaaggat

SEQ ID NO: 526183 - DNA, 19 bp, Mus musculus
  siRNA target sequence for Zfpm2 (NM_011766.2,1889-1907).
gcaaaacttctcttacaca

SEQ ID NO: 526184 - DNA, 19 bp, Mus musculus
  siRNA target sequence for Zfpm2 (NM_011766.2,1895-1913).
cttctcttacacaaaaata

SEQ ID NO: 526185 - DNA, 19 bp, Mus musculus
  siRNA target sequence for Zfpm2 (NM_011766.2,2104-2122).
gctaccctcctgtgattta

SEQ ID NO: 526186 - DNA, 19 bp, Mus musculus
  siRNA target sequence for Zfpm2 (NM_011766.2,2146-2164).
ctacgtgctttgagtgtaa

SEQ ID NO: 526187 - DNA, 19 bp, Mus musculus
  siRNA target sequence for Zfpm2 (NM_011766.2,2153-2171).
ctttgagtgtaacataaca

SEQ ID NO: 526188 - DNA, 19 bp, Mus musculus
  siRNA target sequence for Zfpm2 (NM_011766.2,2157-2175).
gagtgtaacataacattca

SEQ ID NO: 526189 - DNA, 19 bp, Mus musculus
  siRNA target sequence for Zfpm2 (NM_011766.2,2183-2201).
ggataactatctagttcat

SEQ ID NO: 526190 - DNA, 19 bp, Mus musculus
  siRNA target sequence for Zfpm2 (NM_011766.2,2184-2202).
gataactatctagttcata

SEQ ID NO: 526191 - DNA, 19 bp, Mus musculus
  siRNA target sequence for Zfpm2 (NM_011766.2,2237-2255).
ggccaaatcccctgagttt

SEQ ID NO: 526192 - DNA, 19 bp, Mus musculus
  siRNA target sequence for Zfpm2 (NM_011766.2,2247-2265).
cctgagtttccaagtgttt

SEQ ID NO: 526193 - DNA, 19 bp, Mus musculus
  siRNA target sequence for Zfpm2 (NM_011766.2,2299-2317).
ctggccagacttccataaa

SEQ ID NO: 526194 - DNA, 19 bp, Mus musculus
  siRNA target sequence for Zfpm2 (NM_011766.2,2354-2372).
gaacccactccttcaaaca

SEQ ID NO: 526195 - DNA, 19 bp, Mus musculus
  siRNA target sequence for Zfpm2 (NM_011766.2,2386-2404).
cttccaccgttttagattt

SEQ ID NO: 526196 - DNA, 19 bp, Mus musculus
  siRNA target sequence for Zfpm2 (NM_011766.2,2389-2407).
ccaccgttttagatttgat

SEQ ID NO: 526197 - DNA, 19 bp, Mus musculus
  siRNA target sequence for Zfpm2 (NM_011766.2,2390-2408).
caccgttttagatttgatt

SEQ ID NO: 526198 - DNA, 19 bp, Mus musculus
  siRNA target sequence for Zfpm2 (NM_011766.2,2424-2442).
ggccatgagaaggactttt

SEQ ID NO: 526199 - DNA, 19 bp, Mus musculus
  siRNA target sequence for Zfpm2 (NM_011766.2,2438-2456).
cttttccactcaagtcaaa

SEQ ID NO: 526200 - DNA, 19 bp, Mus musculus
  siRNA target sequence for Zfpm2 (NM_011766.2,2443-2461).
ccactcaagtcaaaaagtt

SEQ ID NO: 526201 - DNA, 19 bp, Mus musculus
  siRNA target sequence for Zfpm2 (NM_011766.2,2544-2562).
gaaagtgacccaaataaga

SEQ ID NO: 526202 - DNA, 19 bp, Mus musculus
  siRNA target sequence for Zfpm2 (NM_011766.2,2563-2581).
ctacctgtgaagcttgtaa

SEQ ID NO: 526203 - DNA, 19 bp, Mus musculus
  siRNA target sequence for Zfpm2 (NM_011766.2,2574-2592).
gcttgtaacatcaccttta

SEQ ID NO: 526204 - DNA, 19 bp, Mus musculus
  siRNA target sequence for Zfpm2 (NM_011766.2,2605-2623).
cctatatggtccacaaaca

SEQ ID NO: 526205 - DNA, 19 bp, Mus musculus
  siRNA target sequence for Zfpm2 (NM_011766.2,2613-2631).
gtccacaaacagtattact

SEQ ID NO: 526206 - DNA, 19 bp, Mus musculus
  siRNA target sequence for Zfpm2 (NM_011766.2,2615-2633).
ccacaaacagtattactgt

SEQ ID NO: 526207 - DNA, 19 bp, Mus musculus
  siRNA target sequence for Zfpm2 (NM_011766.2,2643-2661).
catgaccctccgctaaaga

SEQ ID NO: 526208 - DNA, 19 bp, Mus musculus
  siRNA target sequence for Zfpm2 (NM_011766.2,2704-2722).
gcacacgcaagcgaagaaa

SEQ ID NO: 526209 - DNA, 19 bp, Mus musculus
  siRNA target sequence for Zfpm2 (NM_011766.2,2707-2725).
cacgcaagcgaagaaagat

SEQ ID NO: 526210 - DNA, 19 bp, Mus musculus
  siRNA target sequence for Zfpm2 (NM_011766.2,2710-2728).
gcaagcgaagaaagatgta

SEQ ID NO: 526211 - DNA, 19 bp, Mus musculus
  siRNA target sequence for Zfpm2 (NM_011766.2,2715-2733).
cgaagaaagatgtacgaaa

SEQ ID NO: 526212 - DNA, 19 bp, Mus musculus
  siRNA target sequence for Zfpm2 (NM_011766.2,2768-2786).
ggtccagcagagatttctt

SEQ ID NO: 526213 - DNA, 19 bp, Mus musculus
  siRNA target sequence for Zfpm2 (NM_011766.2,2771-2789).
ccagcagagatttcttgat

SEQ ID NO: 526214 - DNA, 19 bp, Mus musculus
  siRNA target sequence for Zfpm2 (NM_011766.2,2784-2802).
cttgatgtagccaacctaa

SEQ ID NO: 526215 - DNA, 19 bp, Mus musculus
  siRNA target sequence for Zfpm2 (NM_011766.2,2793-2811).
gccaacctaagcaatcctt

SEQ ID NO: 526216 - DNA, 19 bp, Mus musculus
  siRNA target sequence for Zfpm2 (NM_011766.2,2912-2930).
ggccatgaacaaatgtgtt

SEQ ID NO: 526217 - DNA, 19 bp, Mus musculus
  siRNA target sequence for Zfpm2 (NM_011766.2,2944-2962).
gtgacacgacccattccaa

SEQ ID NO: 526218 - DNA, 19 bp, Mus musculus
  siRNA target sequence for Zfpm2 (NM_011766.2,2948-2966).
cacgacccattccaatgtt

SEQ ID NO: 526219 - DNA, 19 bp, Mus musculus
  siRNA target sequence for Zfpm2 (NM_011766.2,2988-3006).
cctatagatctcagcaaaa

SEQ ID NO: 526220 - DNA, 19 bp, Mus musculus
  siRNA target sequence for Zfpm2 (NM_011766.2,3043-3061).
ctaagaggctactagacta

SEQ ID NO: 526221 - DNA, 19 bp, Mus musculus
  siRNA target sequence for Zfpm2 (NM_011766.2,3077-3095).
gtgcaagatcagcttcaat

SEQ ID NO: 526222 - DNA, 19 bp, Mus musculus
  siRNA target sequence for Zfpm2 (NM_011766.2,3092-3110).
caataaggtcgagaactat

SEQ ID NO: 526223 - DNA, 19 bp, Mus musculus
  siRNA target sequence for Zfpm2 (NM_011766.2,3111-3129).
ctggcgcacaagcagaatt

SEQ ID NO: 526224 - DNA, 19 bp, Mus musculus
  siRNA target sequence for Zfpm2 (NM_011766.2,3142-3160).
ctgcacatcagcgtaatga

SEQ ID NO: 526225 - DNA, 19 bp, Mus musculus
  siRNA target sequence for Zfpm2 (NM_011766.2,3185-3203).
gtttccgaatccagaaagt

SEQ ID NO: 526226 - DNA, 19 bp, Mus musculus
  siRNA target sequence for Zfpm2 (NM_011766.2,3222-3240).
gtcagctttgaaagaaaca

SEQ ID NO: 526227 - DNA, 19 bp, Mus musculus
  siRNA target sequence for Zfpm2 (NM_011766.2,3242-3260).
gatcaaatgtgagaagaat

SEQ ID NO: 526228 - DNA, 19 bp, Mus musculus
  siRNA target sequence for Zfpm2 (NM_011766.2,3257-3275).
gaatgggaatccaaagcaa

SEQ ID NO: 526229 - DNA, 19 bp, Mus musculus
  siRNA target sequence for Zfpm2 (NM_011766.2,3276-3294).
ccatctcccaacggaaatt

SEQ ID NO: 526230 - DNA, 19 bp, Mus musculus
  siRNA target sequence for Zfpm2 (NM_011766.2,3284-3302).
caacggaaatttgttttca

SEQ ID NO: 526231 - DNA, 19 bp, Mus musculus
  siRNA target sequence for Zfpm2 (NM_011766.2,3349-3367).
ctcagctcattgctacaaa

SEQ ID NO: 526232 - DNA, 19 bp, Mus musculus
  siRNA target sequence for Zfpm2 (NM_011766.2,3448-3466).
ctccatactatgggataaa

SEQ ID NO: 526233 - DNA, 19 bp, Mus musculus
  siRNA target sequence for Zfpm2 (NM_011766.2,3461-3479).
gataaagccaagcgattat

SEQ ID NO: 526234 - DNA, 19 bp, Mus musculus
  siRNA target sequence for Zfpm2 (NM_011766.2,3512-3530).
cgtcgaacaaagcacaaat

SEQ ID NO: 526235 - DNA, 19 bp, Mus musculus
  siRNA target sequence for Zfpm2 (NM_011766.2,3513-3531).
gtcgaacaaagcacaaata

SEQ ID NO: 526236 - DNA, 19 bp, Mus musculus
  siRNA target sequence for Zfpm2 (NM_011766.2,3572-3590).
gtgtgccgtacccaagaaa

SEQ ID NO: 526237 - DNA, 19 bp, Mus musculus
  siRNA target sequence for Zfpm2 (NM_011766.2,3574-3592).
gtgccgtacccaagaaaga

SEQ ID NO: 526238 - DNA, 19 bp, Mus musculus
  siRNA target sequence for Zfpm2 (NM_011766.2,3576-3594).
gccgtacccaagaaagatt

SEQ ID NO: 526239 - DNA, 19 bp, Mus musculus
  siRNA target sequence for Zfpm2 (NM_011766.2,3600-3618).
ccattgttgcccaaaaaca

SEQ ID NO: 526240 - DNA, 19 bp, Mus musculus
  siRNA target sequence for Zfpm2 (NM_011766.2,3642-3660).
ggactcaagcaagatgaaa

SEQ ID NO: 526241 - DNA, 19 bp, Mus musculus
  siRNA target sequence for Zfpm2 (NM_011766.2,3746-3764).
gaacccattagctgcaaat

SEQ ID NO: 526242 - DNA, 19 bp, Mus musculus
  siRNA target sequence for Zfpm2 (NM_011766.2,3750-3768).
ccattagctgcaaatgaga

SEQ ID NO: 526243 - DNA, 19 bp, Mus musculus
  siRNA target sequence for Zfpm2 (NM_011766.2,3787-3805).
cctgcgcagaagaacagtt

SEQ ID NO: 526244 - DNA, 19 bp, Mus musculus
  siRNA target sequence for Zfpm2 (NM_011766.2,3801-3819).
cagttgtctagcatagcaa

SEQ ID NO: 526245 - DNA, 19 bp, Mus musculus
  siRNA target sequence for Zfpm2 (NM_011766.2,3806-3824).
gtctagcatagcaaaaggt

SEQ ID NO: 526246 - DNA, 19 bp, Mus musculus
  siRNA target sequence for Zfpm2 (NM_011766.2,3812-3830).
catagcaaaaggtgtgaat

SEQ ID NO: 526247 - DNA, 19 bp, Mus musculus
  siRNA target sequence for Zfpm2 (NM_011766.2,3844-3862).
ctcccagcagtgggaaata

SEQ ID NO: 526248 - DNA, 19 bp, Mus musculus
  siRNA target sequence for Zfpm2 (NM_011766.2,3865-3883).
gccggctatgcgatatcca

SEQ ID NO: 526249 - DNA, 19 bp, Mus musculus
  siRNA target sequence for Zfpm2 (NM_011766.2,3874-3892).
gcgatatccagttcaataa

SEQ ID NO: 526250 - DNA, 19 bp, Mus musculus
  siRNA target sequence for Zfpm2 (NM_011766.2,3875-3893).
cgatatccagttcaataat

SEQ ID NO: 526251 - DNA, 19 bp, Mus musculus
  siRNA target sequence for Zfpm2 (NM_011766.2,3920-3938).
gttttattgctcatcacat

SEQ ID NO: 526252 - DNA, 19 bp, Mus musculus
  siRNA target sequence for A730011L11 (NM_177821.2,448-466).
gccaagcggcctaaactct

SEQ ID NO: 526253 - DNA, 19 bp, Mus musculus
  siRNA target sequence for A730011L11 (NM_177821.2,490-508).
gccagcgatggcacagatt

SEQ ID NO: 526254 - DNA, 19 bp, Mus musculus
  siRNA target sequence for A730011L11 (NM_177821.2,491-509).
ccagcgatggcacagattt

SEQ ID NO: 526255 - DNA, 19 bp, Mus musculus
  siRNA target sequence for A730011L11 (NM_177821.2,492-510).
cagcgatggcacagatttt

SEQ ID NO: 526256 - DNA, 19 bp, Mus musculus
  siRNA target sequence for A730011L11 (NM_177821.2,535-553).
gacttaccagatgaattaa

SEQ ID NO: 526257 - DNA, 19 bp, Mus musculus
  siRNA target sequence for A730011L11 (NM_177821.2,606-624).
gacaagtcttggcatagta

SEQ ID NO: 526258 - DNA, 19 bp, Mus musculus
  siRNA target sequence for A730011L11 (NM_177821.2,608-626).
caagtcttggcatagtaca

SEQ ID NO: 526259 - DNA, 19 bp, Mus musculus
  siRNA target sequence for A730011L11 (NM_177821.2,628-646).
gatgcagcctcgaaacata

SEQ ID NO: 526260 - DNA, 19 bp, Mus musculus
  siRNA target sequence for A730011L11 (NM_177821.2,677-695).
gctccccaaacctcaacat

SEQ ID NO: 526261 - DNA, 19 bp, Mus musculus
  siRNA target sequence for A730011L11 (NM_177821.2,748-766).
cctggattaagtttgataa

SEQ ID NO: 526262 - DNA, 19 bp, Mus musculus
  siRNA target sequence for A730011L11 (NM_177821.2,918-936).
gatgaatgctggcatgaat

SEQ ID NO: 526263 - DNA, 19 bp, Mus musculus
  siRNA target sequence for A730011L11 (NM_177821.2,929-947).
gcatgaatcctggaatgtt

SEQ ID NO: 526264 - DNA, 19 bp, Mus musculus
  siRNA target sequence for A730011L11 (NM_177821.2,956-974).
gcaatggacaagggataat

SEQ ID NO: 526265 - DNA, 19 bp, Mus musculus
  siRNA target sequence for A730011L11 (NM_177821.2,968-986).
ggataatgcccaatcaagt

SEQ ID NO: 526266 - DNA, 19 bp, Mus musculus
  siRNA target sequence for A730011L11 (NM_177821.2,1138-1156).
cttaagatgggaatgatga

SEQ ID NO: 526267 - DNA, 19 bp, Mus musculus
  siRNA target sequence for A730011L11 (NM_177821.2,1226-1244).
gtctccaaattcagacaaa

SEQ ID NO: 526268 - DNA, 19 bp, Mus musculus
  siRNA target sequence for A730011L11 (NM_177821.2,1247-1265).
ctgttctaccaaataactt

SEQ ID NO: 526269 - DNA, 19 bp, Mus musculus
  siRNA target sequence for A730011L11 (NM_177821.2,1434-1452).
gcagcttgttctcctttta

SEQ ID NO: 526270 - DNA, 19 bp, Mus musculus
  siRNA target sequence for A730011L11 (NM_177821.2,1530-1548).
gaaaaatgtcctaaaccat

SEQ ID NO: 526271 - DNA, 19 bp, Mus musculus
  siRNA target sequence for A730011L11 (NM_177821.2,1540-1558).
ctaaaccatatgacacatt

SEQ ID NO: 526272 - DNA, 19 bp, Mus musculus
  siRNA target sequence for A730011L11 (NM_177821.2,1584-1602).
ggcacattgtgcatcttct

SEQ ID NO: 526273 - DNA, 19 bp, Mus musculus
  siRNA target sequence for A730011L11 (NM_177821.2,1673-1691).
ctggggataagcgaaatca

SEQ ID NO: 526274 - DNA, 19 bp, Mus musculus
  siRNA target sequence for A730011L11 (NM_177821.2,1676-1694).
gggataagcgaaatcaaca

SEQ ID NO: 526275 - DNA, 19 bp, Mus musculus
  siRNA target sequence for A730011L11 (NM_177821.2,1683-1701).
gcgaaatcaacagtcaatt

SEQ ID NO: 526276 - DNA, 19 bp, Mus musculus
  siRNA target sequence for A730011L11 (NM_177821.2,1684-1702).
cgaaatcaacagtcaattt

SEQ ID NO: 526277 - DNA, 19 bp, Mus musculus
  siRNA target sequence for A730011L11 (NM_177821.2,1775-1793).
gcactgttagtcagattga

SEQ ID NO: 526278 - DNA, 19 bp, Mus musculus
  siRNA target sequence for A730011L11 (NM_177821.2,1788-1806).
gattgaccccagctctata

SEQ ID NO: 526279 - DNA, 19 bp, Mus musculus
  siRNA target sequence for A730011L11 (NM_177821.2,1828-1846).
ggactaccctatcaagtaa

SEQ ID NO: 526280 - DNA, 19 bp, Mus musculus
  siRNA target sequence for A730011L11 (NM_177821.2,1919-1937).
gcatgcggtctgtgaacaa

SEQ ID NO: 526281 - DNA, 19 bp, Mus musculus
  siRNA target sequence for A730011L11 (NM_177821.2,1924-1942).
cggtctgtgaacaacatga

SEQ ID NO: 526282 - DNA, 19 bp, Mus musculus
  siRNA target sequence for A730011L11 (NM_177821.2,1976-1994).
gggttcagacgccaaatct

SEQ ID NO: 526283 - DNA, 19 bp, Mus musculus
  siRNA target sequence for A730011L11 (NM_177821.2,1977-1995).
ggttcagacgccaaatctt

SEQ ID NO: 526284 - DNA, 19 bp, Mus musculus
  siRNA target sequence for A730011L11 (NM_177821.2,1985-2003).
cgccaaatcttctttctga

SEQ ID NO: 526285 - DNA, 19 bp, Mus musculus
  siRNA target sequence for A730011L11 (NM_177821.2,2037-2055).
cccaatgatgagtgaaaat

SEQ ID NO: 526286 - DNA, 19 bp, Mus musculus
  siRNA target sequence for A730011L11 (NM_177821.2,2102-2120).
ctagtactggaattcgaaa

SEQ ID NO: 526287 - DNA, 19 bp, Mus musculus
  siRNA target sequence for A730011L11 (NM_177821.2,2124-2142).
gtggcatgaagatattact

SEQ ID NO: 526288 - DNA, 19 bp, Mus musculus
  siRNA target sequence for A730011L11 (NM_177821.2,2126-2144).
ggcatgaagatattactca

SEQ ID NO: 526289 - DNA, 19 bp, Mus musculus
  siRNA target sequence for A730011L11 (NM_177821.2,2152-2170).
cgaaaccaccttgttcata

SEQ ID NO: 526290 - DNA, 19 bp, Mus musculus
  siRNA target sequence for A730011L11 (NM_177821.2,2153-2171).
gaaaccaccttgttcataa

SEQ ID NO: 526291 - DNA, 19 bp, Mus musculus
  siRNA target sequence for A730011L11 (NM_177821.2,2197-2215).
ccggatcctgctgctttaa

SEQ ID NO: 526292 - DNA, 19 bp, Mus musculus
  siRNA target sequence for A730011L11 (NM_177821.2,2220-2238).
ccgacggatggaaaatctt

SEQ ID NO: 526293 - DNA, 19 bp, Mus musculus
  siRNA target sequence for A730011L11 (NM_177821.2,2229-2247).
ggaaaatcttgttgcatat

SEQ ID NO: 526294 - DNA, 19 bp, Mus musculus
  siRNA target sequence for A730011L11 (NM_177821.2,2286-2304).
caatagagcggaatactat

SEQ ID NO: 526295 - DNA, 19 bp, Mus musculus
  siRNA target sequence for A730011L11 (NM_177821.2,2310-2328).
cctagccgagaagatctat

SEQ ID NO: 526296 - DNA, 19 bp, Mus musculus
  siRNA target sequence for A730011L11 (NM_177821.2,2311-2329).
ctagccgagaagatctata

SEQ ID NO: 526297 - DNA, 19 bp, Mus musculus
  siRNA target sequence for A730011L11 (NM_177821.2,2314-2332).
gccgagaagatctataaga

SEQ ID NO: 526298 - DNA, 19 bp, Mus musculus
  siRNA target sequence for A730011L11 (NM_177821.2,2315-2333).
ccgagaagatctataagat

SEQ ID NO: 526299 - DNA, 19 bp, Mus musculus
  siRNA target sequence for A730011L11 (NM_177821.2,2360-2378).
ggactagactacagaaaca

SEQ ID NO: 526300 - DNA, 19 bp, Mus musculus
  siRNA target sequence for A730011L11 (NM_177821.2,2406-2424).
gggtccagttcctatgaat

SEQ ID NO: 526301 - DNA, 19 bp, Mus musculus
  siRNA target sequence for A730011L11 (NM_177821.2,2407-2425).
ggtccagttcctatgaata

SEQ ID NO: 526302 - DNA, 19 bp, Mus musculus
  siRNA target sequence for A730011L11 (NM_177821.2,2476-2494).
gtacctgacccgtctatga

SEQ ID NO: 526303 - DNA, 19 bp, Mus musculus
  siRNA target sequence for A730011L11 (NM_177821.2,2504-2522).
gtgtgccgaaccacatgat

SEQ ID NO: 526304 - DNA, 19 bp, Mus musculus
  siRNA target sequence for Aip (NM_016666.1,215-233).
ggatctcatcgcaagactt

SEQ ID NO: 526305 - DNA, 19 bp, Mus musculus
  siRNA target sequence for Aip (NM_016666.1,234-252).
cgagaggacgggatccaaa

SEQ ID NO: 526306 - DNA, 19 bp, Mus musculus
  siRNA target sequence for Aip (NM_016666.1,235-253).
gagaggacgggatccaaaa

SEQ ID NO: 526307 - DNA, 19 bp, Mus musculus
  siRNA target sequence for Aip (NM_016666.1,245-263).
gatccaaaagcgtgtgata

SEQ ID NO: 526308 - DNA, 19 bp, Mus musculus
  siRNA target sequence for Aip (NM_016666.1,277-295).
gagagttgccggactttca

SEQ ID NO: 526309 - DNA, 19 bp, Mus musculus
  siRNA target sequence for Aip (NM_016666.1,341-359).
caatgaaggctccgttata

SEQ ID NO: 526310 - DNA, 19 bp, Mus musculus
  siRNA target sequence for Aip (NM_016666.1,683-701).
gagtcctggcacctatcaa

SEQ ID NO: 526311 - DNA, 19 bp, Mus musculus
  siRNA target sequence for Aip (NM_016666.1,685-703).
gtcctggcacctatcaaca

SEQ ID NO: 526312 - DNA, 19 bp, Mus musculus
  siRNA target sequence for Aip (NM_016666.1,901-919).
caccactgctactcaacta

SEQ ID NO: 526313 - DNA, 19 bp, Mus musculus
  siRNA target sequence for Aip (NM_016666.1,935-953).
ggtggctcaggagtattat

SEQ ID NO: 526314 - DNA, 19 bp, Mus musculus
  siRNA target sequence for Aip (NM_016666.1,940-958).
ctcaggagtattatgaagt

SEQ ID NO: 526315 - DNA, 19 bp, Mus musculus
  siRNA target sequence for Hdac11 (NM_144919.1,421-439).
gcgaggctgggccatcaat

SEQ ID NO: 526316 - DNA, 19 bp, Mus musculus
  siRNA target sequence for Hdac11 (NM_144919.1,423-441).
gaggctgggccatcaatgt

SEQ ID NO: 526317 - DNA, 19 bp, Mus musculus
  siRNA target sequence for Hdac11 (NM_144919.1,547-565).
ctccagagccaccatcatt

SEQ ID NO: 526318 - DNA, 19 bp, Mus musculus
  siRNA target sequence for Hdac11 (NM_144919.1,552-570).
gagccaccatcattgatct

SEQ ID NO: 526319 - DNA, 19 bp, Mus musculus
  siRNA target sequence for Hdac11 (NM_144919.1,611-629).
ggtgacaagcgagtataca

SEQ ID NO: 526320 - DNA, 19 bp, Mus musculus
  siRNA target sequence for Hdac11 (NM_144919.1,612-630).
gtgacaagcgagtatacat

SEQ ID NO: 526321 - DNA, 19 bp, Mus musculus
  siRNA target sequence for Hdac11 (NM_144919.1,614-632).
gacaagcgagtatacatca

SEQ ID NO: 526322 - DNA, 19 bp, Mus musculus
  siRNA target sequence for Hdac11 (NM_144919.1,659-677).
cctggggatcgctttgcta

SEQ ID NO: 526323 - DNA, 19 bp, Mus musculus
  siRNA target sequence for Hdac11 (NM_144919.1,663-681).
gggatcgctttgctaaaga

SEQ ID NO: 526324 - DNA, 19 bp, Mus musculus
  siRNA target sequence for Hdac11 (NM_144919.1,690-708).
ggcggaaggtggaattgga

SEQ ID NO: 526325 - DNA, 19 bp, Mus musculus
  siRNA target sequence for Hdac11 (NM_144919.1,706-724).
ggagtggggcacagaagat

SEQ ID NO: 526326 - DNA, 19 bp, Mus musculus
  siRNA target sequence for Hdac11 (NM_144919.1,893-911).
gtggtccgagcccatgata

SEQ ID NO: 526327 - DNA, 19 bp, Mus musculus
  siRNA target sequence for Hdac11 (NM_144919.1,895-913).
ggtccgagcccatgatata

SEQ ID NO: 526328 - DNA, 19 bp, Mus musculus
  siRNA target sequence for Hdac2 (NM_008229.1,185-203).
gaggcggcaagaagaaagt

SEQ ID NO: 526329 - DNA, 19 bp, Mus musculus
  siRNA target sequence for Hdac2 (NM_008229.1,210-228).
ctactatgatggtgatatt

SEQ ID NO: 526330 - DNA, 19 bp, Mus musculus
  siRNA target sequence for Hdac2 (NM_008229.1,291-309).
cttgctgctaaattatggt

SEQ ID NO: 526331 - DNA, 19 bp, Mus musculus
  siRNA target sequence for Hdac2 (NM_008229.1,373-391).
cacagcgatgagtatatca

SEQ ID NO: 526332 - DNA, 19 bp, Mus musculus
  siRNA target sequence for Hdac2 (NM_008229.1,377-395).
gcgatgagtatatcaagtt

SEQ ID NO: 526333 - DNA, 19 bp, Mus musculus
  siRNA target sequence for Hdac2 (NM_008229.1,474-492).
ggtgtttgatggactcttt

SEQ ID NO: 526334 - DNA, 19 bp, Mus musculus
  siRNA target sequence for Hdac2 (NM_008229.1,507-525).
ctccacgggtggttcagtt

SEQ ID NO: 526335 - DNA, 19 bp, Mus musculus
  siRNA target sequence for Hdac2 (NM_008229.1,526-544).
gctggggctgtgaaattaa

SEQ ID NO: 526336 - DNA, 19 bp, Mus musculus
  siRNA target sequence for Hdac2 (NM_008229.1,586-604).
ctacatcatgccaagaagt

SEQ ID NO: 526337 - DNA, 19 bp, Mus musculus
  siRNA target sequence for Hdac2 (NM_008229.1,614-632).
cagggttctgctatgttaa

SEQ ID NO: 526338 - DNA, 19 bp, Mus musculus
  siRNA target sequence for Hdac2 (NM_008229.1,642-660).
gcttgccatcctcgaatta

SEQ ID NO: 526339 - DNA, 19 bp, Mus musculus
  siRNA target sequence for Hdac2 (NM_008229.1,646-664).
gccatcctcgaattactta

SEQ ID NO: 526340 - DNA, 19 bp, Mus musculus
  siRNA target sequence for Hdac2 (NM_008229.1,647-665).
ccatcctcgaattacttaa

SEQ ID NO: 526341 - DNA, 19 bp, Mus musculus
  siRNA target sequence for Hdac2 (NM_008229.1,651-669).
cctcgaattacttaagtat

SEQ ID NO: 526342 - DNA, 19 bp, Mus musculus
  siRNA target sequence for Hdac2 (NM_008229.1,654-672).
cgaattacttaagtatcat

SEQ ID NO: 526343 - DNA, 19 bp, Mus musculus
  siRNA target sequence for Hdac2 (NM_008229.1,677-695).
gagtcttatatattgacat

SEQ ID NO: 526344 - DNA, 19 bp, Mus musculus
  siRNA target sequence for Hdac2 (NM_008229.1,746-764).
gcgtgatgaccgtctcatt

SEQ ID NO: 526345 - DNA, 19 bp, Mus musculus
  siRNA target sequence for Hdac2 (NM_008229.1,750-768).
gatgaccgtctcattccat

SEQ ID NO: 526346 - DNA, 19 bp, Mus musculus
  siRNA target sequence for Hdac2 (NM_008229.1,753-771).
gaccgtctcattccataaa

SEQ ID NO: 526347 - DNA, 19 bp, Mus musculus
  siRNA target sequence for Hdac2 (NM_008229.1,852-870).
catgagagatggtatagat

SEQ ID NO: 526348 - DNA, 19 bp, Mus musculus
  siRNA target sequence for Hdac2 (NM_008229.1,859-877).
gatggtatagatgatgaat

SEQ ID NO: 526349 - DNA, 19 bp, Mus musculus
  siRNA target sequence for Hdac2 (NM_008229.1,898-916).
cctatcatctcaaaagtga

SEQ ID NO: 526350 - DNA, 19 bp, Mus musculus
  siRNA target sequence for Hdac2 (NM_008229.1,899-917).
ctatcatctcaaaagtgat

SEQ ID NO: 526351 - DNA, 19 bp, Mus musculus
  siRNA target sequence for Hdac2 (NM_008229.1,980-998).
ggcttggttgtttcaatct

SEQ ID NO: 526352 - DNA, 19 bp, Mus musculus
  siRNA target sequence for Hdac2 (NM_008229.1,981-999).
gcttggttgtttcaatcta

SEQ ID NO: 526353 - DNA, 19 bp, Mus musculus
  siRNA target sequence for Hdac2 (NM_008229.1,1003-1021).
gtcaaaggtcatgctaaat

SEQ ID NO: 526354 - DNA, 19 bp, Mus musculus
  siRNA target sequence for Hdac2 (NM_008229.1,1005-1023).
caaaggtcatgctaaatgt

SEQ ID NO: 526355 - DNA, 19 bp, Mus musculus
  siRNA target sequence for Hdac2 (NM_008229.1,1024-1042).
gtagaagtagcgaaaactt

SEQ ID NO: 526356 - DNA, 19 bp, Mus musculus
  siRNA target sequence for Hdac2 (NM_008229.1,1027-1045).
gaagtagcgaaaactttta

SEQ ID NO: 526357 - DNA, 19 bp, Mus musculus
  siRNA target sequence for Hdac2 (NM_008229.1,1066-1084).
ggtggaggaggctacacaa

SEQ ID NO: 526358 - DNA, 19 bp, Mus musculus
  siRNA target sequence for Hdac2 (NM_008229.1,1067-1085).
gtggaggaggctacacaat

SEQ ID NO: 526359 - DNA, 19 bp, Mus musculus
  siRNA target sequence for Hdac2 (NM_008229.1,1123-1141).
gttgcccttgattgtgaaa

SEQ ID NO: 526360 - DNA, 19 bp, Mus musculus
  siRNA target sequence for Hdac2 (NM_008229.1,1144-1162).
cccaatgagttgccatata

SEQ ID NO: 526361 - DNA, 19 bp, Mus musculus
  siRNA target sequence for Hdac2 (NM_008229.1,1146-1164).
caatgagttgccatataat

SEQ ID NO: 526362 - DNA, 19 bp, Mus musculus
  siRNA target sequence for Hdac2 (NM_008229.1,1150-1168).
gagttgccatataatgatt

SEQ ID NO: 526363 - DNA, 19 bp, Mus musculus
  siRNA target sequence for Hdac2 (NM_008229.1,1189-1207).
gacttcaaactgcatatta

SEQ ID NO: 526364 - DNA, 19 bp, Mus musculus
  siRNA target sequence for Hdac2 (NM_008229.1,1201-1219).
catattagtccttcaaaca

SEQ ID NO: 526365 - DNA, 19 bp, Mus musculus
  siRNA target sequence for Hdac2 (NM_008229.1,1254-1272).
gataaaacagcgtttattt

SEQ ID NO: 526366 - DNA, 19 bp, Mus musculus
  siRNA target sequence for Hdac2 (NM_008229.1,1369-1387).
gacccggacaaaagaattt

SEQ ID NO: 526367 - DNA, 19 bp, Mus musculus
  siRNA target sequence for Hdac2 (NM_008229.1,1389-1407).
cattcgagcatcagacaaa

SEQ ID NO: 526368 - DNA, 19 bp, Mus musculus
  siRNA target sequence for Hdac2 (NM_008229.1,1409-1427).
ggatagcttgcgatgaaga

SEQ ID NO: 526369 - DNA, 19 bp, Mus musculus
  siRNA target sequence for Hdac2 (NM_008229.1,1414-1432).
gcttgcgatgaagagtttt

SEQ ID NO: 526370 - DNA, 19 bp, Mus musculus
  siRNA target sequence for Hdac2 (NM_008229.1,1419-1437).
cgatgaagagttttcagat

SEQ ID NO: 526371 - DNA, 19 bp, Mus musculus
  siRNA target sequence for Hdac2 (NM_008229.1,1466-1484).
ggaatgttgctgatcataa

SEQ ID NO: 526372 - DNA, 19 bp, Mus musculus
  siRNA target sequence for Hdac2 (NM_008229.1,1572-1590).
ggacaatagtggtgagaaa

SEQ ID NO: 526373 - DNA, 19 bp, Mus musculus
  siRNA target sequence for Hdac2 (NM_008229.1,1573-1591).
gacaatagtggtgagaaaa

SEQ ID NO: 526374 - DNA, 19 bp, Mus musculus
  siRNA target sequence for Hdac3 (NM_010411.1,27-45).
ccaagaccgtggcgtattt

SEQ ID NO: 526375 - DNA, 19 bp, Mus musculus
  siRNA target sequence for Hdac3 (NM_010411.1,124-142).
cctagtcctgcattatggt

SEQ ID NO: 526376 - DNA, 19 bp, Mus musculus
  siRNA target sequence for Hdac3 (NM_010411.1,130-148).
cctgcattatggtctctat

SEQ ID NO: 526377 - DNA, 19 bp, Mus musculus
  siRNA target sequence for Hdac3 (NM_010411.1,131-149).
ctgcattatggtctctata

SEQ ID NO: 526378 - DNA, 19 bp, Mus musculus
  siRNA target sequence for Hdac3 (NM_010411.1,134-152).
cattatggtctctataaga

SEQ ID NO: 526379 - DNA, 19 bp, Mus musculus
  siRNA target sequence for Hdac3 (NM_010411.1,141-159).
gtctctataagaagatgat

SEQ ID NO: 526380 - DNA, 19 bp, Mus musculus
  siRNA target sequence for Hdac3 (NM_010411.1,191-209).
gacatgtgccgcttccatt

SEQ ID NO: 526381 - DNA, 19 bp, Mus musculus
  siRNA target sequence for Hdac3 (NM_010411.1,228-246).
ccctgggctgtgatcgatt

SEQ ID NO: 526382 - DNA, 19 bp, Mus musculus
  siRNA target sequence for Hdac3 (NM_010411.1,229-247).
cctgggctgtgatcgatta

SEQ ID NO: 526383 - DNA, 19 bp, Mus musculus
  siRNA target sequence for Hdac3 (NM_010411.1,275-293).
catggggaatgtgttgaat

SEQ ID NO: 526384 - DNA, 19 bp, Mus musculus
  siRNA target sequence for Hdac3 (NM_010411.1,287-305).
gttgaatatgtcaagagtt

SEQ ID NO: 526385 - DNA, 19 bp, Mus musculus
  siRNA target sequence for Hdac3 (NM_010411.1,339-357).
gctacactgtccgaaatgt

SEQ ID NO: 526386 - DNA, 19 bp, Mus musculus
  siRNA target sequence for Hdac3 (NM_010411.1,340-358).
ctacactgtccgaaatgtt

SEQ ID NO: 526387 - DNA, 19 bp, Mus musculus
  siRNA target sequence for Hdac3 (NM_010411.1,412-430).
ggaacttccctatagtgaa

SEQ ID NO: 526388 - DNA, 19 bp, Mus musculus
  siRNA target sequence for Hdac3 (NM_010411.1,416-434).
cttccctatagtgaatact

SEQ ID NO: 526389 - DNA, 19 bp, Mus musculus
  siRNA target sequence for Hdac3 (NM_010411.1,442-460).
ctttgccccagatttcaca

SEQ ID NO: 526390 - DNA, 19 bp, Mus musculus
  siRNA target sequence for Hdac3 (NM_010411.1,477-495).
gcacccgcatcgagaatca

SEQ ID NO: 526391 - DNA, 19 bp, Mus musculus
  siRNA target sequence for Hdac3 (NM_010411.1,480-498).
cccgcatcgagaatcagaa

SEQ ID NO: 526392 - DNA, 19 bp, Mus musculus
  siRNA target sequence for Hdac3 (NM_010411.1,520-538).
gatccgccagacaatcttt

SEQ ID NO: 526393 - DNA, 19 bp, Mus musculus
  siRNA target sequence for Hdac3 (NM_010411.1,523-541).
ccgccagacaatctttgaa

SEQ ID NO: 526394 - DNA, 19 bp, Mus musculus
  siRNA target sequence for Hdac3 (NM_010411.1,524-542).
cgccagacaatctttgaaa

SEQ ID NO: 526395 - DNA, 19 bp, Mus musculus
  siRNA target sequence for Hdac3 (NM_010411.1,596-614).
gacctcctgacgtatgaca

SEQ ID NO: 526396 - DNA, 19 bp, Mus musculus
  siRNA target sequence for Hdac3 (NM_010411.1,644-662).
ggtcccgaggagaactaca

SEQ ID NO: 526397 - DNA, 19 bp, Mus musculus
  siRNA target sequence for Madh2 (NM_010754.2,546-564).
cgaaaactgcgaatatgct

SEQ ID NO: 526398 - DNA, 19 bp, Mus musculus
  siRNA target sequence for Madh2 (NM_010754.2,547-565).
gaaaactgcgaatatgctt

SEQ ID NO: 526399 - DNA, 19 bp, Mus musculus
  siRNA target sequence for Madh2 (NM_010754.2,654-672).
gcacacggagattctaaca

SEQ ID NO: 526400 - DNA, 19 bp, Mus musculus
  siRNA target sequence for Madh2 (NM_010754.2,657-675).
cacggagattctaacagaa

SEQ ID NO: 526401 - DNA, 19 bp, Mus musculus
  siRNA target sequence for Madh2 (NM_010754.2,739-757).
gagccacagagtaattaca

SEQ ID NO: 526402 - DNA, 19 bp, Mus musculus
  siRNA target sequence for Madh2 (NM_010754.2,769-787).
ccaccacctggatatatca

SEQ ID NO: 526403 - DNA, 19 bp, Mus musculus
  siRNA target sequence for Madh2 (NM_010754.2,811-829).
caacagttgaaccaaagta

SEQ ID NO: 526404 - DNA, 19 bp, Mus musculus
  siRNA target sequence for Madh2 (NM_010754.2,877-895).
gttaatcacagcttggatt

SEQ ID NO: 526405 - DNA, 19 bp, Mus musculus
  siRNA target sequence for Madh2 (NM_010754.2,892-910).
gatttgcagccagttactt

SEQ ID NO: 526406 - DNA, 19 bp, Mus musculus
  siRNA target sequence for Madh2 (NM_010754.2,929-947).
ggtgttcaatcgcatacta

SEQ ID NO: 526407 - DNA, 19 bp, Mus musculus
  siRNA target sequence for Madh2 (NM_010754.2,930-948).
gtgttcaatcgcatactat

SEQ ID NO: 526408 - DNA, 19 bp, Mus musculus
  siRNA target sequence for Madh2 (NM_010754.2,941-959).
catactatgaactaaacca

SEQ ID NO: 526409 - DNA, 19 bp, Mus musculus
  siRNA target sequence for Madh2 (NM_010754.2,1109-1127).
ggggagtgcgcttgtatta

SEQ ID NO: 526410 - DNA, 19 bp, Mus musculus
  siRNA target sequence for Madh2 (NM_010754.2,1111-1129).
ggagtgcgcttgtattaca

SEQ ID NO: 526411 - DNA, 19 bp, Mus musculus
  siRNA target sequence for Madh2 (NM_010754.2,1112-1130).
gagtgcgcttgtattacat

SEQ ID NO: 526412 - DNA, 19 bp, Mus musculus
  siRNA target sequence for Madh2 (NM_010754.2,1147-1165).
gctgagtgcctaagtgata

SEQ ID NO: 526413 - DNA, 19 bp, Mus musculus
  siRNA target sequence for Madh2 (NM_010754.2,1160-1178).
gtgatagtgcaatctttgt

SEQ ID NO: 526414 - DNA, 19 bp, Mus musculus
  siRNA target sequence for Madh2 (NM_010754.2,1177-1195).
gtgcagagccccaactgta

SEQ ID NO: 526415 - DNA, 19 bp, Mus musculus
  siRNA target sequence for Madh2 (NM_010754.2,1335-1353).
ccgaatgtgcaccataaga

SEQ ID NO: 526416 - DNA, 19 bp, Mus musculus
  siRNA target sequence for Madh2 (NM_010754.2,1337-1355).
gaatgtgcaccataagaat

SEQ ID NO: 526417 - DNA, 19 bp, Mus musculus
  siRNA target sequence for Madh2 (NM_010754.2,1341-1359).
gtgcaccataagaatgagt

SEQ ID NO: 526418 - DNA, 19 bp, Mus musculus
  siRNA target sequence for Madh2 (NM_010754.2,1392-1410).
gcagacagtaacaagtact

SEQ ID NO: 526419 - DNA, 19 bp, Mus musculus
  siRNA target sequence for Madh2 (NM_010754.2,1409-1427).
ctccttgctggattgaact

SEQ ID NO: 526420 - DNA, 19 bp, Mus musculus
  siRNA target sequence for Madh3 (NM_016769.2,561-579).
gggctccctcacgttatct

SEQ ID NO: 526421 - DNA, 19 bp, Mus musculus
  siRNA target sequence for Madh3 (NM_016769.2,562-580).
ggctccctcacgttatcta

SEQ ID NO: 526422 - DNA, 19 bp, Mus musculus
  siRNA target sequence for Madh3 (NM_016769.2,793-811).
ccattcccgagaacactaa

SEQ ID NO: 526423 - DNA, 19 bp, Mus musculus
  siRNA target sequence for Madh3 (NM_016769.2,1073-1091).
gccatccatgacagtagat

SEQ ID NO: 526424 - DNA, 19 bp, Mus musculus
  siRNA target sequence for Madh3 (NM_016769.2,1131-1149).
ggcctactgtccaatgtca

SEQ ID NO: 526425 - DNA, 19 bp, Mus musculus
  siRNA target sequence for Madh3 (NM_016769.2,1132-1150).
gcctactgtccaatgtcaa

SEQ ID NO: 526426 - DNA, 19 bp, Mus musculus
  siRNA target sequence for Madh3 (NM_016769.2,1192-1210).
gaggtgtgcggctctacta

SEQ ID NO: 526427 - DNA, 19 bp, Mus musculus
  siRNA target sequence for Madh3 (NM_016769.2,1194-1212).
ggtgtgcggctctactaca

SEQ ID NO: 526428 - DNA, 19 bp, Mus musculus
  siRNA target sequence for Madh3 (NM_016769.2,1195-1213).
gtgtgcggctctactacat

SEQ ID NO: 526429 - DNA, 19 bp, Mus musculus
  siRNA target sequence for Add1 (NM_013457.1,250-268).
ccttcgtcaggacttcaat

SEQ ID NO: 526430 - DNA, 19 bp, Mus musculus
  siRNA target sequence for Add1 (NM_013457.1,286-304).
gagggtgtctatgattcta

SEQ ID NO: 526431 - DNA, 19 bp, Mus musculus
  siRNA target sequence for Add1 (NM_013457.1,288-306).
gggtgtctatgattctaca

SEQ ID NO: 526432 - DNA, 19 bp, Mus musculus
  siRNA target sequence for Add1 (NM_013457.1,336-354).
ctatgatacaggaacagtt

SEQ ID NO: 526433 - DNA, 19 bp, Mus musculus
  siRNA target sequence for Add1 (NM_013457.1,395-413).
cagattgcagatttcatga

SEQ ID NO: 526434 - DNA, 19 bp, Mus musculus
  siRNA target sequence for Add1 (NM_013457.1,412-430).
gactgcgagtgtaccaaat

SEQ ID NO: 526435 - DNA, 19 bp, Mus musculus
  siRNA target sequence for Add1 (NM_013457.1,506-524).
cttagagggtcggattcta

SEQ ID NO: 526436 - DNA, 19 bp, Mus musculus
  siRNA target sequence for Add1 (NM_013457.1,516-534).
cggattctatcgcatatga

SEQ ID NO: 526437 - DNA, 19 bp, Mus musculus
  siRNA target sequence for Add1 (NM_013457.1,518-536).
gattctatcgcatatgaca

SEQ ID NO: 526438 - DNA, 19 bp, Mus musculus
  siRNA target sequence for Add1 (NM_013457.1,544-562).
gaagttactgcggtgtaaa

SEQ ID NO: 526439 - DNA, 19 bp, Mus musculus
  siRNA target sequence for Add1 (NM_013457.1,556-574).
gtgtaaactggcagcattt

SEQ ID NO: 526440 - DNA, 19 bp, Mus musculus
  siRNA target sequence for Add1 (NM_013457.1,597-615).
gctggtcccagcttatcta

SEQ ID NO: 526441 - DNA, 19 bp, Mus musculus
  siRNA target sequence for Add1 (NM_013457.1,601-619).
gtcccagcttatctacaat

SEQ ID NO: 526442 - DNA, 19 bp, Mus musculus
  siRNA target sequence for Add1 (NM_013457.1,603-621).
cccagcttatctacaatca

SEQ ID NO: 526443 - DNA, 19 bp, Mus musculus
  siRNA target sequence for Add1 (NM_013457.1,604-622).
ccagcttatctacaatcat

SEQ ID NO: 526444 - DNA, 19 bp, Mus musculus
  siRNA target sequence for Add1 (NM_013457.1,605-623).
cagcttatctacaatcata

SEQ ID NO: 526445 - DNA, 19 bp, Mus musculus
  siRNA target sequence for Add1 (NM_013457.1,608-626).
cttatctacaatcatatca

SEQ ID NO: 526446 - DNA, 19 bp, Mus musculus
  siRNA target sequence for Add1 (NM_013457.1,705-723).
gcttggttaaggtcaatct

SEQ ID NO: 526447 - DNA, 19 bp, Mus musculus
  siRNA target sequence for Add1 (NM_013457.1,709-727).
ggttaaggtcaatctacaa

SEQ ID NO: 526448 - DNA, 19 bp, Mus musculus
  siRNA target sequence for Add1 (NM_013457.1,718-736).
caatctacaaggagatata

SEQ ID NO: 526449 - DNA, 19 bp, Mus musculus
  siRNA target sequence for Add1 (NM_013457.1,737-755).
gtagaccgtggaagtacta

SEQ ID NO: 526450 - DNA, 19 bp, Mus musculus
  siRNA target sequence for Add1 (NM_013457.1,742-760).
ccgtggaagtactaaccta

SEQ ID NO: 526451 - DNA, 19 bp, Mus musculus
  siRNA target sequence for Add1 (NM_013457.1,753-771).
ctaacctaggggtgaatca

SEQ ID NO: 526452 - DNA, 19 bp, Mus musculus
  siRNA target sequence for Add1 (NM_013457.1,809-827).
cgaccagatgccaagtgta

SEQ ID NO: 526453 - DNA, 19 bp, Mus musculus
  siRNA target sequence for Add1 (NM_013457.1,857-875).
gcggtctctgcgatgaagt

SEQ ID NO: 526454 - DNA, 19 bp, Mus musculus
  siRNA target sequence for Add1 (NM_013457.1,915-933).
gagatgttgcttatcatga

SEQ ID NO: 526455 - DNA, 19 bp, Mus musculus
  siRNA target sequence for Add1 (NM_013457.1,1059-1077).
ccttctattacatccataa

SEQ ID NO: 526456 - DNA, 19 bp, Mus musculus
  siRNA target sequence for Add1 (NM_013457.1,1063-1081).
ctattacatccataacctt

SEQ ID NO: 526457 - DNA, 19 bp, Mus musculus
  siRNA target sequence for Add1 (NM_013457.1,1148-1166).
ctggatcctgggaagtaca

SEQ ID NO: 526458 - DNA, 19 bp, Mus musculus
  siRNA target sequence for Add1 (NM_013457.1,1290-1308).
ctggctacccttatcgata

SEQ ID NO: 526459 - DNA, 19 bp, Mus musculus
  siRNA target sequence for Add1 (NM_013457.1,1313-1331).
gctctgagagagagatcta

SEQ ID NO: 526460 - DNA, 19 bp, Mus musculus
  siRNA target sequence for Add1 (NM_013457.1,1314-1332).
ctctgagagagagatctaa

SEQ ID NO: 526461 - DNA, 19 bp, Mus musculus
  siRNA target sequence for Add1 (NM_013457.1,1320-1338).
gagagagatctaaaaagta

SEQ ID NO: 526462 - DNA, 19 bp, Mus musculus
  siRNA target sequence for Add1 (NM_013457.1,1322-1340).
gagagatctaaaaagtaca

SEQ ID NO: 526463 - DNA, 19 bp, Mus musculus
  siRNA target sequence for Add1 (NM_013457.1,1372-1390).
ccactcctttgctagtgat

SEQ ID NO: 526464 - DNA, 19 bp, Mus musculus
  siRNA target sequence for Add1 (NM_013457.1,1410-1428).
cgccgctcaggcacagttt

SEQ ID NO: 526465 - DNA, 19 bp, Mus musculus
  siRNA target sequence for Add1 (NM_013457.1,1411-1429).
gccgctcaggcacagtttt

SEQ ID NO: 526466 - DNA, 19 bp, Mus musculus
  siRNA target sequence for Add1 (NM_013457.1,1413-1431).
cgctcaggcacagttttca

SEQ ID NO: 526467 - DNA, 19 bp, Mus musculus
  siRNA target sequence for Add1 (NM_013457.1,1522-1540).
gaagactaagtggactaaa

SEQ ID NO: 526468 - DNA, 19 bp, Mus musculus
  siRNA target sequence for Add1 (NM_013457.1,1569-1587).
ctgtccctaacctgtttgt

SEQ ID NO: 526469 - DNA, 19 bp, Mus musculus
  siRNA target sequence for Add1 (NM_013457.1,1580-1598).
ctgtttgttccattgaaca

SEQ ID NO: 526470 - DNA, 19 bp, Mus musculus
  siRNA target sequence for Add1 (NM_013457.1,1633-1651).
gattcgagagcagaactta

SEQ ID NO: 526471 - DNA, 19 bp, Mus musculus
  siRNA target sequence for Add1 (NM_013457.1,1769-1787).
cagccccatgtaattgtga

SEQ ID NO: 526472 - DNA, 19 bp, Mus musculus
  siRNA target sequence for Add1 (NM_013457.1,1983-2001).
gagacggatgtgctaaaga

SEQ ID NO: 526473 - DNA, 19 bp, Mus musculus
  siRNA target sequence for Add1 (NM_013457.1,1985-2003).
gacggatgtgctaaagagt

SEQ ID NO: 526474 - DNA, 19 bp, Mus musculus
  siRNA target sequence for Add2 (NM_013458.2,212-230).
ctcaggggcagcactactt

SEQ ID NO: 526475 - DNA, 19 bp, Mus musculus
  siRNA target sequence for Add2 (NM_013458.2,289-307).
ctgcgacaggacttcaact

SEQ ID NO: 526476 - DNA, 19 bp, Mus musculus
  siRNA target sequence for Add2 (NM_013458.2,431-449).
gacagatcgcggacttcat

SEQ ID NO: 526477 - DNA, 19 bp, Mus musculus
  siRNA target sequence for Add2 (NM_013458.2,475-493).
ccagcttcttccatgaact

SEQ ID NO: 526478 - DNA, 19 bp, Mus musculus
  siRNA target sequence for Add2 (NM_013458.2,478-496).
gcttcttccatgaacttct

SEQ ID NO: 526479 - DNA, 19 bp, Mus musculus
  siRNA target sequence for Add2 (NM_013458.2,562-580).
cttatgcggtgcaagatca

SEQ ID NO: 526480 - DNA, 19 bp, Mus musculus
  siRNA target sequence for Add2 (NM_013458.2,713-731).
cctccagcctgattaaagt

SEQ ID NO: 526481 - DNA, 19 bp, Mus musculus
  siRNA target sequence for Add2 (NM_013458.2,719-737).
gcctgattaaagtgaacat

SEQ ID NO: 526482 - DNA, 19 bp, Mus musculus
  siRNA target sequence for Add2 (NM_013458.2,720-738).
cctgattaaagtgaacatt

SEQ ID NO: 526483 - DNA, 19 bp, Mus musculus
  siRNA target sequence for Add2 (NM_013458.2,869-887).
cagcggtgtcagctatgaa

SEQ ID NO: 526484 - DNA, 19 bp, Mus musculus
  siRNA target sequence for Add2 (NM_013458.2,871-889).
gcggtgtcagctatgaagt

SEQ ID NO: 526485 - DNA, 19 bp, Mus musculus
  siRNA target sequence for Add2 (NM_013458.2,897-915).
cctgccggtctcccataat

SEQ ID NO: 526486 - DNA, 19 bp, Mus musculus
  siRNA target sequence for Add2 (NM_013458.2,1243-1261).
cggctgggagagcatgaat

SEQ ID NO: 526487 - DNA, 19 bp, Mus musculus
  siRNA target sequence for Add2 (NM_013458.2,1244-1262).
ggctgggagagcatgaatt

SEQ ID NO: 526488 - DNA, 19 bp, Mus musculus
  siRNA target sequence for Add2 (NM_013458.2,1590-1608).
catgcccatacggattgaa

SEQ ID NO: 526489 - DNA, 19 bp, Mus musculus
  siRNA target sequence for Add2 (NM_013458.2,1680-1698).
gcaaaaccgacaagacata

SEQ ID NO: 526490 - DNA, 19 bp, Mus musculus
  siRNA target sequence for Add2 (NM_013458.2,1681-1699).
caaaaccgacaagacataa

SEQ ID NO: 526491 - DNA, 19 bp, Mus musculus
  siRNA target sequence for Add2 (NM_013458.2,2209-2227).
gacaaaaccgagtcagtta

SEQ ID NO: 526492 - DNA, 19 bp, Mus musculus
  siRNA target sequence for Add2 (NM_013458.2,2248-2266).
gagggctcgccctctaagt

SEQ ID NO: 526493 - DNA, 19 bp, Mus musculus
  siRNA target sequence for Add2 (NM_013458.2,2250-2268).
gggctcgccctctaagtca

SEQ ID NO: 526494 - DNA, 19 bp, Mus musculus
  siRNA target sequence for Add3 (NM_013758.2,162-180).
ccagcatgcctcacaaaga

SEQ ID NO: 526495 - DNA, 19 bp, Mus musculus
  siRNA target sequence for Add3 (NM_013758.2,183-201).
ggtattttgaccgaatcaa

SEQ ID NO: 526496 - DNA, 19 bp, Mus musculus
  siRNA target sequence for Add3 (NM_013758.2,184-202).
gtattttgaccgaatcaat

SEQ ID NO: 526497 - DNA, 19 bp, Mus musculus
  siRNA target sequence for Add3 (NM_013758.2,193-211).
ccgaatcaatgaaagtgat

SEQ ID NO: 526498 - DNA, 19 bp, Mus musculus
  siRNA target sequence for Add3 (NM_013758.2,221-239).
cttcgagagaggaacatgt

SEQ ID NO: 526499 - DNA, 19 bp, Mus musculus
  siRNA target sequence for Add3 (NM_013758.2,232-250).
gaacatgtctcctgatcta

SEQ ID NO: 526500 - DNA, 19 bp, Mus musculus
  siRNA target sequence for Add3 (NM_013758.2,364-382).
caacccaagcggcttatta

SEQ ID NO: 526501 - DNA, 19 bp, Mus musculus
  siRNA target sequence for Add3 (NM_013758.2,455-473).
ggcatggtcacacctatta

SEQ ID NO: 526502 - DNA, 19 bp, Mus musculus
  siRNA target sequence for Add3 (NM_013758.2,456-474).
gcatggtcacacctattaa

SEQ ID NO: 526503 - DNA, 19 bp, Mus musculus
  siRNA target sequence for Add3 (NM_013758.2,457-475).
catggtcacacctattaat

SEQ ID NO: 526504 - DNA, 19 bp, Mus musculus
  siRNA target sequence for Add3 (NM_013758.2,491-509).
gatacatcctcgtatgtga

SEQ ID NO: 526505 - DNA, 19 bp, Mus musculus
  siRNA target sequence for Add3 (NM_013758.2,501-519).
cgtatgtgaagggagaaaa

SEQ ID NO: 526506 - DNA, 19 bp, Mus musculus
  siRNA target sequence for Add3 (NM_013758.2,506-524).
gtgaagggagaaaagctta

SEQ ID NO: 526507 - DNA, 19 bp, Mus musculus
  siRNA target sequence for Add3 (NM_013758.2,520-538).
gcttactcgctgcaaactt

SEQ ID NO: 526508 - DNA, 19 bp, Mus musculus
  siRNA target sequence for Add3 (NM_013758.2,575-593).
gcgcacctggcaaatacgt

SEQ ID NO: 526509 - DNA, 19 bp, Mus musculus
  siRNA target sequence for Add3 (NM_013758.2,576-594).
cgcacctggcaaatacgta

SEQ ID NO: 526510 - DNA, 19 bp, Mus musculus
  siRNA target sequence for Add3 (NM_013758.2,581-599).
ctggcaaatacgtacatct

SEQ ID NO: 526511 - DNA, 19 bp, Mus musculus
  siRNA target sequence for Add3 (NM_013758.2,591-609).
cgtacatctcggtacgaat

SEQ ID NO: 526512 - DNA, 19 bp, Mus musculus
  siRNA target sequence for Add3 (NM_013758.2,592-610).
gtacatctcggtacgaata

SEQ ID NO: 526513 - DNA, 19 bp, Mus musculus
  siRNA target sequence for Add3 (NM_013758.2,595-613).
catctcggtacgaataagt

SEQ ID NO: 526514 - DNA, 19 bp, Mus musculus
  siRNA target sequence for Add3 (NM_013758.2,672-690).
cctccactttggtgaaagt

SEQ ID NO: 526515 - DNA, 19 bp, Mus musculus
  siRNA target sequence for Add3 (NM_013758.2,718-736).
ggggagcactgatctgaaa

SEQ ID NO: 526516 - DNA, 19 bp, Mus musculus
  siRNA target sequence for Add3 (NM_013758.2,719-737).
gggagcactgatctgaaaa

SEQ ID NO: 526517 - DNA, 19 bp, Mus musculus
  siRNA target sequence for Add3 (NM_013758.2,757-775).
cccgcatgctgccatctat

SEQ ID NO: 526518 - DNA, 19 bp, Mus musculus
  siRNA target sequence for Add3 (NM_013758.2,758-776).
ccgcatgctgccatctatt

SEQ ID NO: 526519 - DNA, 19 bp, Mus musculus
  siRNA target sequence for Add3 (NM_013758.2,760-778).
gcatgctgccatctattca

SEQ ID NO: 526520 - DNA, 19 bp, Mus musculus
  siRNA target sequence for Add3 (NM_013758.2,761-779).
catgctgccatctattcaa

SEQ ID NO: 526521 - DNA, 19 bp, Mus musculus
  siRNA target sequence for Add3 (NM_013758.2,847-865).
gtgtgggatccttccaatt

SEQ ID NO: 526522 - DNA, 19 bp, Mus musculus
  siRNA target sequence for Add3 (NM_013758.2,886-904).
gggagatgtcgcctactat

SEQ ID NO: 526523 - DNA, 19 bp, Mus musculus
  siRNA target sequence for Add3 (NM_013758.2,890-908).
gatgtcgcctactatgact

SEQ ID NO: 526524 - DNA, 19 bp, Mus musculus
  siRNA target sequence for Add3 (NM_013758.2,1093-1111).
ggcaggcggagtagacaat

SEQ ID NO: 526525 - DNA, 19 bp, Mus musculus
  siRNA target sequence for Add3 (NM_013758.2,1095-1113).
caggcggagtagacaatct

SEQ ID NO: 526526 - DNA, 19 bp, Mus musculus
  siRNA target sequence for Add3 (NM_013758.2,1127-1145).
cttcagaaatataaagctt

SEQ ID NO: 526527 - DNA, 19 bp, Mus musculus
  siRNA target sequence for Add3 (NM_013758.2,1206-1224).
ggaaggttggcgagattga

SEQ ID NO: 526528 - DNA, 19 bp, Mus musculus
  siRNA target sequence for Add3 (NM_013758.2,1210-1228).
ggttggcgagattgagttt

SEQ ID NO: 526529 - DNA, 19 bp, Mus musculus
  siRNA target sequence for Add3 (NM_013758.2,1409-1427).
cagcagcgtgaaaaaacaa

SEQ ID NO: 526530 - DNA, 19 bp, Mus musculus
  siRNA target sequence for Add3 (NM_013758.2,1411-1429).
gcagcgtgaaaaaacaaga

SEQ ID NO: 526531 - DNA, 19 bp, Mus musculus
  siRNA target sequence for Add3 (NM_013758.2,1527-1545).
cagaagactcctctaaagt

SEQ ID NO: 526532 - DNA, 19 bp, Mus musculus
  siRNA target sequence for Add3 (NM_013758.2,1529-1547).
gaagactcctctaaagtca

SEQ ID NO: 526533 - DNA, 19 bp, Mus musculus
  siRNA target sequence for Add3 (NM_013758.2,1551-1569).
gtgggacaccgatcaaaat

SEQ ID NO: 526534 - DNA, 19 bp, Mus musculus
  siRNA target sequence for Add3 (NM_013758.2,1554-1572).
ggacaccgatcaaaattga

SEQ ID NO: 526535 - DNA, 19 bp, Mus musculus
  siRNA target sequence for Add3 (NM_013758.2,1555-1573).
gacaccgatcaaaattgaa

SEQ ID NO: 526536 - DNA, 19 bp, Mus musculus
  siRNA target sequence for Add3 (NM_013758.2,1557-1575).
caccgatcaaaattgaaga

SEQ ID NO: 526537 - DNA, 19 bp, Mus musculus
  siRNA target sequence for Add3 (NM_013758.2,1719-1737).
cttcgaccatgcagtttga

SEQ ID NO: 526538 - DNA, 19 bp, Mus musculus
  siRNA target sequence for Add3 (NM_013758.2,1802-1820).
gaagagtatacgaagacaa

SEQ ID NO: 526539 - DNA, 19 bp, Mus musculus
  siRNA target sequence for Add3 (NM_013758.2,1871-1889).
gacgacgctgcatctgttt

SEQ ID NO: 526540 - DNA, 19 bp, Mus musculus
  siRNA target sequence for Add3 (NM_013758.2,1873-1891).
cgacgctgcatctgtttca

SEQ ID NO: 526541 - DNA, 19 bp, Mus musculus
  siRNA target sequence for Add3 (NM_013758.2,1877-1895).
gctgcatctgtttcacaaa

SEQ ID NO: 526542 - DNA, 19 bp, Mus musculus
  siRNA target sequence for Add3 (NM_013758.2,1982-2000).
gacgcgcctgtcatgatca

SEQ ID NO: 526543 - DNA, 19 bp, Mus musculus
  siRNA target sequence for Add3 (NM_013758.2,2067-2085).
caagcacgaccatagagaa

SEQ ID NO: 526544 - DNA, 19 bp, Mus musculus
  siRNA target sequence for Add3 (NM_013758.2,2070-2088).
gcacgaccatagagaacat

SEQ ID NO: 526545 - DNA, 19 bp, Mus musculus
  siRNA target sequence for Add3 (NM_013758.2,2184-2202).
gcacgccttcttttctcaa

SEQ ID NO: 526546 - DNA, 19 bp, Mus musculus
  siRNA target sequence for Add3 (NM_013758.2,2185-2203).
cacgccttcttttctcaaa

SEQ ID NO: 526547 - DNA, 19 bp, Mus musculus
  siRNA target sequence for Gap43 (NM_008083.2,219-237).
ggtgtcaagccggaagata

SEQ ID NO: 526548 - DNA, 19 bp, Mus musculus
  siRNA target sequence for Gap43 (NM_008083.2,220-238).
gtgtcaagccggaagataa

SEQ ID NO: 526549 - DNA, 19 bp, Mus musculus
  siRNA target sequence for Gap43 (NM_008083.2,229-247).
cggaagataaggctcataa

SEQ ID NO: 526550 - DNA, 19 bp, Mus musculus
  siRNA target sequence for Gap43 (NM_008083.2,272-290).
cttccgtggacacataaca

SEQ ID NO: 526551 - DNA, 19 bp, Mus musculus
  siRNA target sequence for Gap43 (NM_008083.2,753-771).
gtagacgaagccaaaccta

SEQ ID NO: 526552 - DNA, 19 bp, Mus musculus
  siRNA target sequence for Iqgap1 (NM_016721.1,431-449).
gacacacggataatgtgat

SEQ ID NO: 526553 - DNA, 19 bp, Mus musculus
  siRNA target sequence for Iqgap1 (NM_016721.1,474-492).
gattgggttgcctaagatt

SEQ ID NO: 526554 - DNA, 19 bp, Mus musculus
  siRNA target sequence for Iqgap1 (NM_016721.1,535-553).
ccaagatgcatctactgta

SEQ ID NO: 526555 - DNA, 19 bp, Mus musculus
  siRNA target sequence for Iqgap1 (NM_016721.1,551-569).
gtatccacgccctcagttt

SEQ ID NO: 526556 - DNA, 19 bp, Mus musculus
  siRNA target sequence for Iqgap1 (NM_016721.1,585-603).
gggcctggctcctcagatt

SEQ ID NO: 526557 - DNA, 19 bp, Mus musculus
  siRNA target sequence for Iqgap1 (NM_016721.1,610-628).
ctgtatggaaaggttgatt

SEQ ID NO: 526558 - DNA, 19 bp, Mus musculus
  siRNA target sequence for Iqgap1 (NM_016721.1,746-764).
cgctacatgctgctgttat

SEQ ID NO: 526559 - DNA, 19 bp, Mus musculus
  siRNA target sequence for Iqgap1 (NM_016721.1,754-772).
gctgctgttattgctatta

SEQ ID NO: 526560 - DNA, 19 bp, Mus musculus
  siRNA target sequence for Iqgap1 (NM_016721.1,755-773).
ctgctgttattgctattaa

SEQ ID NO: 526561 - DNA, 19 bp, Mus musculus
  siRNA target sequence for Iqgap1 (NM_016721.1,804-822).
cacttttacggctctaaaa

SEQ ID NO: 526562 - DNA, 19 bp, Mus musculus
  siRNA target sequence for Iqgap1 (NM_016721.1,806-824).
cttttacggctctaaaaaa

SEQ ID NO: 526563 - DNA, 19 bp, Mus musculus
  siRNA target sequence for Iqgap1 (NM_016721.1,833-851).
ccatgctcgtcaatcttga

SEQ ID NO: 526564 - DNA, 19 bp, Mus musculus
  siRNA target sequence for Iqgap1 (NM_016721.1,834-852).
catgctcgtcaatcttgaa

SEQ ID NO: 526565 - DNA, 19 bp, Mus musculus
  siRNA target sequence for Iqgap1 (NM_016721.1,837-855).
gctcgtcaatcttgaagaa

SEQ ID NO: 526566 - DNA, 19 bp, Mus musculus
  siRNA target sequence for Iqgap1 (NM_016721.1,869-887).
cgtaccaagacgtgcttta

SEQ ID NO: 526567 - DNA, 19 bp, Mus musculus
  siRNA target sequence for Iqgap1 (NM_016721.1,987-1005).
ccaagggaatgtaaacaaa

SEQ ID NO: 526568 - DNA, 19 bp, Mus musculus
  siRNA target sequence for Iqgap1 (NM_016721.1,1320-1338).
cgtgttggagctaatgaat

SEQ ID NO: 526569 - DNA, 19 bp, Mus musculus
  siRNA target sequence for Iqgap1 (NM_016721.1,1351-1369).
ctgccccaggtgtatccat

SEQ ID NO: 526570 - DNA, 19 bp, Mus musculus
  siRNA target sequence for Iqgap1 (NM_016721.1,1353-1371).
gccccaggtgtatccattt

SEQ ID NO: 526571 - DNA, 19 bp, Mus musculus
  siRNA target sequence for Iqgap1 (NM_016721.1,1367-1385).
catttgcagctgatctcta

SEQ ID NO: 526572 - DNA, 19 bp, Mus musculus
  siRNA target sequence for Iqgap1 (NM_016721.1,1372-1390).
gcagctgatctctatcaga

SEQ ID NO: 526573 - DNA, 19 bp, Mus musculus
  siRNA target sequence for Iqgap1 (NM_016721.1,1472-1490).
catccgtggccctcatcaa

SEQ ID NO: 526574 - DNA, 19 bp, Mus musculus
  siRNA target sequence for Iqgap1 (NM_016721.1,1531-1549).
cagctgagcagctcagtta

SEQ ID NO: 526575 - DNA, 19 bp, Mus musculus
  siRNA target sequence for Iqgap1 (NM_016721.1,1544-1562).
cagttacgggccttaccaa

SEQ ID NO: 526576 - DNA, 19 bp, Mus musculus
  siRNA target sequence for Iqgap1 (NM_016721.1,1559-1577).
ccaacatcgaggaagaaaa

SEQ ID NO: 526577 - DNA, 19 bp, Mus musculus
  siRNA target sequence for Iqgap1 (NM_016721.1,1620-1638).
ggcacatgccgagaataat

SEQ ID NO: 526578 - DNA, 19 bp, Mus musculus
  siRNA target sequence for Iqgap1 (NM_016721.1,1624-1642).
catgccgagaataatgcat

SEQ ID NO: 526579 - DNA, 19 bp, Mus musculus
  siRNA target sequence for Iqgap1 (NM_016721.1,1629-1647).
cgagaataatgcatttatt

SEQ ID NO: 526580 - DNA, 19 bp, Mus musculus
  siRNA target sequence for Iqgap1 (NM_016721.1,1630-1648).
gagaataatgcatttatta

SEQ ID NO: 526581 - DNA, 19 bp, Mus musculus
  siRNA target sequence for Iqgap1 (NM_016721.1,1719-1737).
ggccatcggcttgattaat

SEQ ID NO: 526582 - DNA, 19 bp, Mus musculus
  siRNA target sequence for Iqgap1 (NM_016721.1,1721-1739).
ccatcggcttgattaatga

SEQ ID NO: 526583 - DNA, 19 bp, Mus musculus
  siRNA target sequence for Iqgap1 (NM_016721.1,1722-1740).
catcggcttgattaatgaa

SEQ ID NO: 526584 - DNA, 19 bp, Mus musculus
  siRNA target sequence for Iqgap1 (NM_016721.1,1884-1902).
ggatgagtcagctgtgtta

SEQ ID NO: 526585 - DNA, 19 bp, Mus musculus
  siRNA target sequence for Iqgap1 (NM_016721.1,1885-1903).
gatgagtcagctgtgttat

SEQ ID NO: 526586 - DNA, 19 bp, Mus musculus
  siRNA target sequence for Iqgap1 (NM_016721.1,1899-1917).
gttatggttggatgaaatt

SEQ ID NO: 526587 - DNA, 19 bp, Mus musculus
  siRNA target sequence for Iqgap1 (NM_016721.1,2072-2090).
ccgaatgtggggaaacgta

SEQ ID NO: 526588 - DNA, 19 bp, Mus musculus
  siRNA target sequence for Iqgap1 (NM_016721.1,2125-2143).
ctggcagcaggagataata

SEQ ID NO: 526589 - DNA, 19 bp, Mus musculus
  siRNA target sequence for Iqgap1 (NM_016721.1,2167-2185).
gtgaaaggcgggtaccatt

SEQ ID NO: 526590 - DNA, 19 bp, Mus musculus
  siRNA target sequence for Iqgap1 (NM_016721.1,2290-2308).
ggagtaaccgctgcatata

SEQ ID NO: 526591 - DNA, 19 bp, Mus musculus
  siRNA target sequence for Iqgap1 (NM_016721.1,2329-2347).
gccaacgaaggcttgatca

SEQ ID NO: 526592 - DNA, 19 bp, Mus musculus
  siRNA target sequence for Iqgap1 (NM_016721.1,2394-2412).
ccgatcccggatgaatttt

SEQ ID NO: 526593 - DNA, 19 bp, Mus musculus
  siRNA target sequence for Iqgap1 (NM_016721.1,2396-2414).
gatcccggatgaattttct

SEQ ID NO: 526594 - DNA, 19 bp, Mus musculus
  siRNA target sequence for Iqgap1 (NM_016721.1,2399-2417).
cccggatgaattttctgaa

SEQ ID NO: 526595 - DNA, 19 bp, Mus musculus
  siRNA target sequence for Iqgap1 (NM_016721.1,2510-2528).
cccataaagacgaagttgt

SEQ ID NO: 526596 - DNA, 19 bp, Mus musculus
  siRNA target sequence for Iqgap1 (NM_016721.1,2576-2594).
gagatcgcctacagtattt

SEQ ID NO: 526597 - DNA, 19 bp, Mus musculus
  siRNA target sequence for Iqgap1 (NM_016721.1,2589-2607).
gtatttccgagaccatata

SEQ ID NO: 526598 - DNA, 19 bp, Mus musculus
  siRNA target sequence for Iqgap1 (NM_016721.1,2597-2615).
gagaccatataaatgacat

SEQ ID NO: 526599 - DNA, 19 bp, Mus musculus
  siRNA target sequence for Iqgap1 (NM_016721.1,2602-2620).
catataaatgacattatca

SEQ ID NO: 526600 - DNA, 19 bp, Mus musculus
  siRNA target sequence for Iqgap1 (NM_016721.1,2681-2699).
ctgaggacccgcctatgat

SEQ ID NO: 526601 - DNA, 19 bp, Mus musculus
  siRNA target sequence for Iqgap1 (NM_016721.1,2884-2902).
gatgtggtttcccatagta

SEQ ID NO: 526602 - DNA, 19 bp, Mus musculus
  siRNA target sequence for Iqgap1 (NM_016721.1,3009-3027).
ggcctatcagcatctcttt

SEQ ID NO: 526603 - DNA, 19 bp, Mus musculus
  siRNA target sequence for Iqgap1 (NM_016721.1,3036-3054).
gcagaccaaccctacctat

SEQ ID NO: 526604 - DNA, 19 bp, Mus musculus
  siRNA target sequence for Iqgap1 (NM_016721.1,3082-3100).
caaaacaagtccaccaaat

SEQ ID NO: 526605 - DNA, 19 bp, Mus musculus
  siRNA target sequence for Iqgap1 (NM_016721.1,3117-3135).
cttcacgctgtacaactat

SEQ ID NO: 526606 - DNA, 19 bp, Mus musculus
  siRNA target sequence for Iqgap1 (NM_016721.1,3204-3222).
gtcaaaggtggatcagatt

SEQ ID NO: 526607 - DNA, 19 bp, Mus musculus
  siRNA target sequence for Iqgap1 (NM_016721.1,3206-3224).
caaaggtggatcagattca

SEQ ID NO: 526608 - DNA, 19 bp, Mus musculus
  siRNA target sequence for Iqgap1 (NM_016721.1,3210-3228).
ggtggatcagattcaagaa

SEQ ID NO: 526609 - DNA, 19 bp, Mus musculus
  siRNA target sequence for Iqgap1 (NM_016721.1,3238-3256).
ggaaaccctacggttatta

SEQ ID NO: 526610 - DNA, 19 bp, Mus musculus
  siRNA target sequence for Iqgap1 (NM_016721.1,3316-3334).
gcccctgtcgtgaaggaaa

SEQ ID NO: 526611 - DNA, 19 bp, Mus musculus
  siRNA target sequence for Iqgap1 (NM_016721.1,3324-3342).
cgtgaaggaaattatggat

SEQ ID NO: 526612 - DNA, 19 bp, Mus musculus
  siRNA target sequence for Iqgap1 (NM_016721.1,3343-3361).
gacaagtctctcaacatca

SEQ ID NO: 526613 - DNA, 19 bp, Mus musculus
  siRNA target sequence for Iqgap1 (NM_016721.1,3345-3363).
caagtctctcaacatcaaa

SEQ ID NO: 526614 - DNA, 19 bp, Mus musculus
  siRNA target sequence for Iqgap1 (NM_016721.1,3365-3383).
ccgaccctgtggatattta

SEQ ID NO: 526615 - DNA, 19 bp, Mus musculus
  siRNA target sequence for Iqgap1 (NM_016721.1,3461-3479).
ccttgtctcatgaagaagt

SEQ ID NO: 526616 - DNA, 19 bp, Mus musculus
  siRNA target sequence for Iqgap1 (NM_016721.1,3670-3688).
ctttactaccgatacatga

SEQ ID NO: 526617 - DNA, 19 bp, Mus musculus
  siRNA target sequence for Iqgap1 (NM_016721.1,3708-3726).
cgatgccttcgacatcatt

SEQ ID NO: 526618 - DNA, 19 bp, Mus musculus
  siRNA target sequence for Iqgap1 (NM_016721.1,3804-3822).
ggcgtccaacaagatgttt

SEQ ID NO: 526619 - DNA, 19 bp, Mus musculus
  siRNA target sequence for Iqgap1 (NM_016721.1,3806-3824).
cgtccaacaagatgtttct

SEQ ID NO: 526620 - DNA, 19 bp, Mus musculus
  siRNA target sequence for Iqgap1 (NM_016721.1,3826-3844).
ggcgataatgcccacttaa

SEQ ID NO: 526621 - DNA, 19 bp, Mus musculus
  siRNA target sequence for Iqgap1 (NM_016721.1,3835-3853).
gcccacttaagcatcatta

SEQ ID NO: 526622 - DNA, 19 bp, Mus musculus
  siRNA target sequence for Iqgap1 (NM_016721.1,3836-3854).
cccacttaagcatcattaa

SEQ ID NO: 526623 - DNA, 19 bp, Mus musculus
  siRNA target sequence for Iqgap1 (NM_016721.1,3837-3855).
ccacttaagcatcattaat

SEQ ID NO: 526624 - DNA, 19 bp, Mus musculus
  siRNA target sequence for Iqgap1 (NM_016721.1,3967-3985).
ctcactaagccagttatct

SEQ ID NO: 526625 - DNA, 19 bp, Mus musculus
  siRNA target sequence for Iqgap1 (NM_016721.1,3971-3989).
ctaagccagttatctacat

SEQ ID NO: 526626 - DNA, 19 bp, Mus musculus
  siRNA target sequence for Iqgap1 (NM_016721.1,3992-4010).
ccattggcgaaatcatcaa

SEQ ID NO: 526627 - DNA, 19 bp, Mus musculus
  siRNA target sequence for Iqgap1 (NM_016721.1,4043-4061).
ccattgctccagagcataa

SEQ ID NO: 526628 - DNA, 19 bp, Mus musculus
  siRNA target sequence for Iqgap1 (NM_016721.1,4104-4122).
caccattgagtcccttata

SEQ ID NO: 526629 - DNA, 19 bp, Mus musculus
  siRNA target sequence for Iqgap1 (NM_016721.1,4107-4125).
cattgagtcccttatagga

SEQ ID NO: 526630 - DNA, 19 bp, Mus musculus
  siRNA target sequence for Iqgap1 (NM_016721.1,4186-4204).
ctcacgttgaccaacaagt

SEQ ID NO: 526631 - DNA, 19 bp, Mus musculus
  siRNA target sequence for Iqgap1 (NM_016721.1,4188-4206).
cacgttgaccaacaagttt

SEQ ID NO: 526632 - DNA, 19 bp, Mus musculus
  siRNA target sequence for Iqgap1 (NM_016721.1,4190-4208).
cgttgaccaacaagtttga

SEQ ID NO: 526633 - DNA, 19 bp, Mus musculus
  siRNA target sequence for Iqgap1 (NM_016721.1,4236-4254).
ggacgctcggaccatctta

SEQ ID NO: 526634 - DNA, 19 bp, Mus musculus
  siRNA target sequence for Iqgap1 (NM_016721.1,4240-4258).
gctcggaccatcttactga

SEQ ID NO: 526635 - DNA, 19 bp, Mus musculus
  siRNA target sequence for Iqgap1 (NM_016721.1,4241-4259).
ctcggaccatcttactgaa

SEQ ID NO: 526636 - DNA, 19 bp, Mus musculus
  siRNA target sequence for Iqgap1 (NM_016721.1,4243-4261).
cggaccatcttactgaata

SEQ ID NO: 526637 - DNA, 19 bp, Mus musculus
  siRNA target sequence for Iqgap1 (NM_016721.1,4255-4273).
ctgaatacaaaacgtttaa

SEQ ID NO: 526638 - DNA, 19 bp, Mus musculus
  siRNA target sequence for Iqgap1 (NM_016721.1,4257-4275).
gaatacaaaacgtttaatt

SEQ ID NO: 526639 - DNA, 19 bp, Mus musculus
  siRNA target sequence for Iqgap1 (NM_016721.1,4268-4286).
gtttaattgtggatgtcat

SEQ ID NO: 526640 - DNA, 19 bp, Mus musculus
  siRNA target sequence for Iqgap1 (NM_016721.1,4305-4323).
gaccttgactgaaattcta

SEQ ID NO: 526641 - DNA, 19 bp, Mus musculus
  siRNA target sequence for Iqgap1 (NM_016721.1,4567-4585).
cggaatcagcggagataca

SEQ ID NO: 526642 - DNA, 19 bp, Mus musculus
  siRNA target sequence for Iqgap1 (NM_016721.1,4661-4679).
gcgagcaggtggactacta

SEQ ID NO: 526643 - DNA, 19 bp, Mus musculus
  siRNA target sequence for Iqgap1 (NM_016721.1,4793-4811).
cagcgaggctgcatgagaa

SEQ ID NO: 526644 - DNA, 19 bp, Mus musculus
  siRNA target sequence for Iqgap1 (NM_016721.1,4814-4832).
gcgtccttctggagattga

SEQ ID NO: 526645 - DNA, 19 bp, Mus musculus
  siRNA target sequence for Iqgap1 (NM_016721.1,4815-4833).
cgtccttctggagattgaa

SEQ ID NO: 526646 - DNA, 19 bp, Mus musculus
  siRNA target sequence for Iqgap1 (NM_016721.1,4837-4855).
cttcaggcaaaccaattta

SEQ ID NO: 526647 - DNA, 19 bp, Mus musculus
  siRNA target sequence for Iqgap1 (NM_016721.1,4903-4921).
gaagtaaaagccaagttca

SEQ ID NO: 526648 - DNA, 19 bp, Mus musculus
  siRNA target sequence for Iqgap1 (NM_016721.1,4938-4956).
gactttcatgttgcattat

SEQ ID NO: 526649 - DNA, 19 bp, Mus musculus
  siRNA target sequence for Iqgap1 (NM_016721.1,4981-4999).
gaaggagttgcagttatga

SEQ ID NO: 526650 - DNA, 19 bp, Mus musculus
  siRNA target sequence for Iqgap1 (NM_016721.1,4987-5005).
gttgcagttatgaaattat

SEQ ID NO: 526651 - DNA, 19 bp, Mus musculus
  siRNA target sequence for Kcnh1 (NM_010600.1,184-202).
ggtccaacgacactaattt

SEQ ID NO: 526652 - DNA, 19 bp, Mus musculus
  siRNA target sequence for Kcnh1 (NM_010600.1,185-203).
gtccaacgacactaatttt

SEQ ID NO: 526653 - DNA, 19 bp, Mus musculus
  siRNA target sequence for Kcnh1 (NM_010600.1,187-205).
ccaacgacactaattttgt

SEQ ID NO: 526654 - DNA, 19 bp, Mus musculus
  siRNA target sequence for Kcnh1 (NM_010600.1,1035-1053).
gtcatcaacgcttttgaga

SEQ ID NO: 526655 - DNA, 19 bp, Mus musculus
  siRNA target sequence for Kcnh1 (NM_010600.1,1079-1097).
gggtgatccagggaagatt

SEQ ID NO: 526656 - DNA, 19 bp, Mus musculus
  siRNA target sequence for Kcnh1 (NM_010600.1,1083-1101).
gatccagggaagattggtt

SEQ ID NO: 526657 - DNA, 19 bp, Mus musculus
  siRNA target sequence for Kcnh1 (NM_010600.1,1209-1227).
cgcaaactggatcattaca

SEQ ID NO: 526658 - DNA, 19 bp, Mus musculus
  siRNA target sequence for Kcnh1 (NM_010600.1,1210-1228).
gcaaactggatcattacat

SEQ ID NO: 526659 - DNA, 19 bp, Mus musculus
  siRNA target sequence for Kcnh1 (NM_010600.1,1392-1410).
ggcactccataccagttta

SEQ ID NO: 526660 - DNA, 19 bp, Mus musculus
  siRNA target sequence for Kcnh1 (NM_010600.1,1393-1411).
gcactccataccagtttaa

SEQ ID NO: 526661 - DNA, 19 bp, Mus musculus
  siRNA target sequence for Kcnh1 (NM_010600.1,1437-1455).
ggtgggccaagcaagaact

SEQ ID NO: 526662 - DNA, 19 bp, Mus musculus
  siRNA target sequence for Kcnh1 (NM_010600.1,1600-1618).
ggaacgtgacaaccatttt

SEQ ID NO: 526663 - DNA, 19 bp, Mus musculus
  siRNA target sequence for Kcnh1 (NM_010600.1,1715-1733).
gcgggtcatggactacatt

SEQ ID NO: 526664 - DNA, 19 bp, Mus musculus
  siRNA target sequence for Kcnh1 (NM_010600.1,1797-1815).
gacatgcgagccgacattt

SEQ ID NO: 526665 - DNA, 19 bp, Mus musculus
  siRNA target sequence for Kcnh1 (NM_010600.1,1821-1839).
cacctgaaccgcaaagtgt

SEQ ID NO: 526666 - DNA, 19 bp, Mus musculus
  siRNA target sequence for Kcnh1 (NM_010600.1,1826-1844).
gaaccgcaaagtgttcaaa

SEQ ID NO: 526667 - DNA, 19 bp, Mus musculus
  siRNA target sequence for Kcnh1 (NM_010600.1,1924-1942).
caggggacctcatctatca

SEQ ID NO: 526668 - DNA, 19 bp, Mus musculus
  siRNA target sequence for Kcnh1 (NM_010600.1,2115-2133).
gacctgcacgtgatcaaga

SEQ ID NO: 526669 - DNA, 19 bp, Mus musculus
  siRNA target sequence for Kcnh1 (NM_010600.1,2142-2160).
cttcagaaagtgctagaat

SEQ ID NO: 526670 - DNA, 19 bp, Mus musculus
  siRNA target sequence for Kcnh1 (NM_010600.1,2145-2163).
cagaaagtgctagaattct

SEQ ID NO: 526671 - DNA, 19 bp, Mus musculus
  siRNA target sequence for Kcnh1 (NM_010600.1,2918-2936).
ggatatcaaggccttgaat

SEQ ID NO: 526672 - DNA, 19 bp, Mus musculus
  siRNA target sequence for Kcnh1 (NM_010600.1,2961-2979).
cagctgtctgagatactca

SEQ ID NO: 526673 - DNA, 19 bp, Mus musculus
  siRNA target sequence for Kcnn1 (NM_032397.1,559-577).
ctgtcctggggtgtataca

SEQ ID NO: 526674 - DNA, 19 bp, Mus musculus
  siRNA target sequence for Kcnn1 (NM_032397.1,582-600).
ggagtcactctgctctttt

SEQ ID NO: 526675 - DNA, 19 bp, Mus musculus
  siRNA target sequence for Kcnn1 (NM_032397.1,620-638).
gcctgtccactgtcatctt

SEQ ID NO: 526676 - DNA, 19 bp, Mus musculus
  siRNA target sequence for Kcnn1 (NM_032397.1,1091-1109).
gtgagaggtaccacgataa

SEQ ID NO: 526677 - DNA, 19 bp, Mus musculus
  siRNA target sequence for Kcnn1 (NM_032397.1,1339-1357).
ctcaccaagcgggtcaaaa

SEQ ID NO: 526678 - DNA, 19 bp, Mus musculus
  siRNA target sequence for Kcnn1 (NM_032397.1,1341-1359).
caccaagcgggtcaaaaat

SEQ ID NO: 526679 - DNA, 19 bp, Mus musculus
  siRNA target sequence for Kcnn1 (NM_032397.1,1344-1362).
caagcgggtcaaaaatgct

SEQ ID NO: 526680 - DNA, 19 bp, Mus musculus
  siRNA target sequence for Kcnn1 (NM_032397.1,1488-1506).
gctccgaagtgtgaagatt

SEQ ID NO: 526681 - DNA, 19 bp, Mus musculus
  siRNA target sequence for Kcnn2 (NM_080465.1,182-200).
cggagatcgtggtgtctaa

SEQ ID NO: 526682 - DNA, 19 bp, Mus musculus
  siRNA target sequence for Kcnn2 (NM_080465.1,197-215).
ctaagccggagcacaacaa

SEQ ID NO: 526683 - DNA, 19 bp, Mus musculus
  siRNA target sequence for Kcnn2 (NM_080465.1,201-219).
gccggagcacaacaattct

SEQ ID NO: 526684 - DNA, 19 bp, Mus musculus
  siRNA target sequence for Kcnn2 (NM_080465.1,202-220).
ccggagcacaacaattcta

SEQ ID NO: 526685 - DNA, 19 bp, Mus musculus
  siRNA target sequence for Kcnn2 (NM_080465.1,301-319).
ggcaccaagtccagcaaaa

SEQ ID NO: 526686 - DNA, 19 bp, Mus musculus
  siRNA target sequence for Kcnn2 (NM_080465.1,302-320).
gcaccaagtccagcaaaaa

SEQ ID NO: 526687 - DNA, 19 bp, Mus musculus
  siRNA target sequence for Kcnn2 (NM_080465.1,424-442).
gtggttatggtcattgaga

SEQ ID NO: 526688 - DNA, 19 bp, Mus musculus
  siRNA target sequence for Kcnn2 (NM_080465.1,466-484).
gacaaggcgtcgctgtatt

SEQ ID NO: 526689 - DNA, 19 bp, Mus musculus
  siRNA target sequence for Kcnn2 (NM_080465.1,468-486).
caaggcgtcgctgtattct

SEQ ID NO: 526690 - DNA, 19 bp, Mus musculus
  siRNA target sequence for Kcnn2 (NM_080465.1,471-489).
ggcgtcgctgtattcttta

SEQ ID NO: 526691 - DNA, 19 bp, Mus musculus
  siRNA target sequence for Kcnn2 (NM_080465.1,474-492).
gtcgctgtattctttagct

SEQ ID NO: 526692 - DNA, 19 bp, Mus musculus
  siRNA target sequence for Kcnn2 (NM_080465.1,552-570).
cgccagggaaatacagtta

SEQ ID NO: 526693 - DNA, 19 bp, Mus musculus
  siRNA target sequence for Kcnn2 (NM_080465.1,553-571).
gccagggaaatacagttat

SEQ ID NO: 526694 - DNA, 19 bp, Mus musculus
  siRNA target sequence for Kcnn2 (NM_080465.1,554-572).
ccagggaaatacagttatt

SEQ ID NO: 526695 - DNA, 19 bp, Mus musculus
  siRNA target sequence for Kcnn2 (NM_080465.1,619-637).
gagcgtattttcttcatct

SEQ ID NO: 526696 - DNA, 19 bp, Mus musculus
  siRNA target sequence for Kcnn2 (NM_080465.1,630-648).
cttcatctgcttggaaata

SEQ ID NO: 526697 - DNA, 19 bp, Mus musculus
  siRNA target sequence for Kcnn2 (NM_080465.1,667-685).
cccatacctgggaattata

SEQ ID NO: 526698 - DNA, 19 bp, Mus musculus
  siRNA target sequence for Kcnn2 (NM_080465.1,676-694).
gggaattatacgttcacat

SEQ ID NO: 526699 - DNA, 19 bp, Mus musculus
  siRNA target sequence for Kcnn2 (NM_080465.1,737-755).
ccgcagatgtggatattat

SEQ ID NO: 526700 - DNA, 19 bp, Mus musculus
  siRNA target sequence for Kcnn2 (NM_080465.1,774-792).
cttaaggctctatctgatt

SEQ ID NO: 526701 - DNA, 19 bp, Mus musculus
  siRNA target sequence for Kcnn2 (NM_080465.1,794-812).
ccagagtcatgctattaca

SEQ ID NO: 526702 - DNA, 19 bp, Mus musculus
  siRNA target sequence for Kcnn2 (NM_080465.1,801-819).
catgctattacatagcaaa

SEQ ID NO: 526703 - DNA, 19 bp, Mus musculus
  siRNA target sequence for Kcnn2 (NM_080465.1,845-863).
gcattggggcacttaataa

SEQ ID NO: 526704 - DNA, 19 bp, Mus musculus
  siRNA target sequence for Kcnn2 (NM_080465.1,854-872).
cacttaataagataaactt

SEQ ID NO: 526705 - DNA, 19 bp, Mus musculus
  siRNA target sequence for Kcnn2 (NM_080465.1,856-874).
cttaataagataaacttca

SEQ ID NO: 526706 - DNA, 19 bp, Mus musculus
  siRNA target sequence for Kcnn2 (NM_080465.1,870-888).
cttcaatacgcgttttgtt

SEQ ID NO: 526707 - DNA, 19 bp, Mus musculus
  siRNA target sequence for Kcnn2 (NM_080465.1,966-984).
gactgtccgagcttgtgaa

SEQ ID NO: 526708 - DNA, 19 bp, Mus musculus
  siRNA target sequence for Kcnn2 (NM_080465.1,1024-1042).
ggagcaatgtggttgatat

SEQ ID NO: 526709 - DNA, 19 bp, Mus musculus
  siRNA target sequence for Kcnn2 (NM_080465.1,1034-1052).
ggttgatatcaataacttt

SEQ ID NO: 526710 - DNA, 19 bp, Mus musculus
  siRNA target sequence for Kcnn2 (NM_080465.1,1109-1127).
gcttgcttactggaatcat

SEQ ID NO: 526711 - DNA, 19 bp, Mus musculus
  siRNA target sequence for Kcnn2 (NM_080465.1,1158-1176).
cgtagtggcaagaaagcta

SEQ ID NO: 526712 - DNA, 19 bp, Mus musculus
  siRNA target sequence for Kcnn2 (NM_080465.1,1164-1182).
ggcaagaaagctagaactt

SEQ ID NO: 526713 - DNA, 19 bp, Mus musculus
  siRNA target sequence for Kcnn2 (NM_080465.1,1165-1183).
gcaagaaagctagaactta

SEQ ID NO: 526714 - DNA, 19 bp, Mus musculus
  siRNA target sequence for Kcnn2 (NM_080465.1,1219-1237).
gatactcagctgaccaaaa

SEQ ID NO: 526715 - DNA, 19 bp, Mus musculus
  siRNA target sequence for Kcnn2 (NM_080465.1,1223-1241).
ctcagctgaccaaaagagt

SEQ ID NO: 526716 - DNA, 19 bp, Mus musculus
  siRNA target sequence for Kcnn2 (NM_080465.1,1278-1296).
gttaatctacaaaaacaca

SEQ ID NO: 526717 - DNA, 19 bp, Mus musculus
  siRNA target sequence for Kcnn2 (NM_080465.1,1311-1329).
gatcgaccacgcaaaagta

SEQ ID NO: 526718 - DNA, 19 bp, Mus musculus
  siRNA target sequence for Kcnn2 (NM_080465.1,1314-1332).
cgaccacgcaaaagtaaga

SEQ ID NO: 526719 - DNA, 19 bp, Mus musculus
  siRNA target sequence for Kcnn2 (NM_080465.1,1315-1333).
gaccacgcaaaagtaagaa

SEQ ID NO: 526720 - DNA, 19 bp, Mus musculus
  siRNA target sequence for Kcnn2 (NM_080465.1,1320-1338).
cgcaaaagtaagaaagcat

SEQ ID NO: 526721 - DNA, 19 bp, Mus musculus
  siRNA target sequence for Kcnn2 (NM_080465.1,1331-1349).
gaaagcatcaacggaaatt

SEQ ID NO: 526722 - DNA, 19 bp, Mus musculus
  siRNA target sequence for Kcnn2 (NM_080465.1,1343-1361).
ggaaattcttgcaagctat

SEQ ID NO: 526723 - DNA, 19 bp, Mus musculus
  siRNA target sequence for Kcnn2 (NM_080465.1,1344-1362).
gaaattcttgcaagctatt

SEQ ID NO: 526724 - DNA, 19 bp, Mus musculus
  siRNA target sequence for Kcnn2 (NM_080465.1,1353-1371).
gcaagctattcatcaatta

SEQ ID NO: 526725 - DNA, 19 bp, Mus musculus
  siRNA target sequence for Kcnn2 (NM_080465.1,1354-1372).
caagctattcatcaattaa

SEQ ID NO: 526726 - DNA, 19 bp, Mus musculus
  siRNA target sequence for Kcnn2 (NM_080465.1,1357-1375).
gctattcatcaattaagaa

SEQ ID NO: 526727 - DNA, 19 bp, Mus musculus
  siRNA target sequence for Kcnn2 (NM_080465.1,1432-1450).
gcaaagacccagaatatca

SEQ ID NO: 526728 - DNA, 19 bp, Mus musculus
  siRNA target sequence for Kcnn2 (NM_080465.1,1439-1457).
cccagaatatcatgtatga

SEQ ID NO: 526729 - DNA, 19 bp, Mus musculus
  siRNA target sequence for Kcnn2 (NM_080465.1,1506-1524).
cgtcaccctggaaacaaaa

SEQ ID NO: 526730 - DNA, 19 bp, Mus musculus
  siRNA target sequence for Kcnn2 (NM_080465.1,1525-1543).
ctagagactttgattggta

SEQ ID NO: 526731 - DNA, 19 bp, Mus musculus
  siRNA target sequence for Kcnn2 (NM_080465.1,1530-1548).
gactttgattggtagcatt

SEQ ID NO: 526732 - DNA, 19 bp, Mus musculus
  siRNA target sequence for Kcnn2 (NM_080465.1,1591-1609).
caaagggacttcattgaga

SEQ ID NO: 526733 - DNA, 19 bp, Mus musculus
  siRNA target sequence for Kcnn3 (NM_080466.1,423-441).
gcaaggcagccagctaaat

SEQ ID NO: 526734 - DNA, 19 bp, Mus musculus
  siRNA target sequence for Kcnn3 (NM_080466.1,553-571).
cccttcacggagatagcta

SEQ ID NO: 526735 - DNA, 19 bp, Mus musculus
  siRNA target sequence for Kcnn3 (NM_080466.1,568-586).
gctatgagctcctgcaaat

SEQ ID NO: 526736 - DNA, 19 bp, Mus musculus
  siRNA target sequence for Kcnn3 (NM_080466.1,569-587).
ctatgagctcctgcaaata

SEQ ID NO: 526737 - DNA, 19 bp, Mus musculus
  siRNA target sequence for Kcnn3 (NM_080466.1,624-642).
cgcctctcggagaaacctt

SEQ ID NO: 526738 - DNA, 19 bp, Mus musculus
  siRNA target sequence for Kcnn3 (NM_080466.1,625-643).
gcctctcggagaaacctta

SEQ ID NO: 526739 - DNA, 19 bp, Mus musculus
  siRNA target sequence for Kcnn3 (NM_080466.1,626-644).
cctctcggagaaaccttat

SEQ ID NO: 526740 - DNA, 19 bp, Mus musculus
  siRNA target sequence for Kcnn3 (NM_080466.1,629-647).
ctcggagaaaccttatcga

SEQ ID NO: 526741 - DNA, 19 bp, Mus musculus
  siRNA target sequence for Kcnn3 (NM_080466.1,689-707).
gcaaccccccagagattat

SEQ ID NO: 526742 - DNA, 19 bp, Mus musculus
  siRNA target sequence for Kcnn3 (NM_080466.1,828-846).
gcggaaaaaccaaaacatt

SEQ ID NO: 526743 - DNA, 19 bp, Mus musculus
  siRNA target sequence for Kcnn3 (NM_080466.1,934-952).
gttgttatggtgatagaga

SEQ ID NO: 526744 - DNA, 19 bp, Mus musculus
  siRNA target sequence for Kcnn3 (NM_080466.1,966-984).
gggtttgtactcaaaggat

SEQ ID NO: 526745 - DNA, 19 bp, Mus musculus
  siRNA target sequence for Kcnn3 (NM_080466.1,1069-1087).
gaagtacagctctttgtga

SEQ ID NO: 526746 - DNA, 19 bp, Mus musculus
  siRNA target sequence for Kcnn3 (NM_080466.1,1186-1204).
ggagagtacaagttcttct

SEQ ID NO: 526747 - DNA, 19 bp, Mus musculus
  siRNA target sequence for Kcnn3 (NM_080466.1,1250-1268).
ctgacgtggacattattct

SEQ ID NO: 526748 - DNA, 19 bp, Mus musculus
  siRNA target sequence for Kcnn3 (NM_080466.1,1252-1270).
gacgtggacattattctgt

SEQ ID NO: 526749 - DNA, 19 bp, Mus musculus
  siRNA target sequence for Kcnn3 (NM_080466.1,1311-1329).
catgctgctccatagcaaa

SEQ ID NO: 526750 - DNA, 19 bp, Mus musculus
  siRNA target sequence for Kcnn3 (NM_080466.1,1507-1525).
cagcaggatgtaactagta

SEQ ID NO: 526751 - DNA, 19 bp, Mus musculus
  siRNA target sequence for Kcnn3 (NM_080466.1,1554-1572).
catcacgttcctttccatt

SEQ ID NO: 526752 - DNA, 19 bp, Mus musculus
  siRNA target sequence for Kcnn3 (NM_080466.1,1738-1756).
ctcaccaaacggatcaaga

SEQ ID NO: 526753 - DNA, 19 bp, Mus musculus
  siRNA target sequence for Kcnn3 (NM_080466.1,1853-1871).
ggaagttcctccaagctat

SEQ ID NO: 526754 - DNA, 19 bp, Mus musculus
  siRNA target sequence for Kcnn3 (NM_080466.1,1885-1903).
ggtgtcaagatggaacaaa

SEQ ID NO: 526755 - DNA, 19 bp, Mus musculus
  siRNA target sequence for Kcnn3 (NM_080466.1,1951-1969).
cagaacgtcatgtatgact

SEQ ID NO: 526756 - DNA, 19 bp, Mus musculus
  siRNA target sequence for Kcnn3 (NM_080466.1,1953-1971).
gaacgtcatgtatgactta

SEQ ID NO: 526757 - DNA, 19 bp, Mus musculus
  siRNA target sequence for Kcnn3 (NM_080466.1,1983-2001).
caatgaccggagtgaagat

SEQ ID NO: 526758 - DNA, 19 bp, Mus musculus
  siRNA target sequence for Kcnn3 (NM_080466.1,1989-2007).
ccggagtgaagatctagaa

SEQ ID NO: 526759 - DNA, 19 bp, Mus musculus
  siRNA target sequence for Kcnn3 (NM_080466.1,1990-2008).
cggagtgaagatctagaaa

SEQ ID NO: 526760 - DNA, 19 bp, Mus musculus
  siRNA target sequence for Kcnn4 (NM_008433.2,299-317).
ctgcacgctgagatgttgt

SEQ ID NO: 526761 - DNA, 19 bp, Mus musculus
  siRNA target sequence for Kcnn4 (NM_008433.2,353-371).
ctggttaagtgtttgatca

SEQ ID NO: 526762 - DNA, 19 bp, Mus musculus
  siRNA target sequence for Kcnn4 (NM_008433.2,948-966).
ccatgtggggcaagattgt

SEQ ID NO: 526763 - DNA, 19 bp, Mus musculus
  siRNA target sequence for Kcnn4 (NM_008433.2,1130-1148).
gaagcctggatgtactaca

SEQ ID NO: 526764 - DNA, 19 bp, Mus musculus
  siRNA target sequence for Kcnn4 (NM_008433.2,1224-1242).
gccaggtacggctgaaaca

SEQ ID NO: 526765 - DNA, 19 bp, Mus musculus
  siRNA target sequence for Kcnn4 (NM_008433.2,1249-1267).
gctccgggaacaagtgaat

SEQ ID NO: 526766 - DNA, 19 bp, Mus musculus
  siRNA target sequence for Kcnn4 (NM_008433.2,1250-1268).
ctccgggaacaagtgaatt

SEQ ID NO: 526767 - DNA, 19 bp, Mus musculus
  siRNA target sequence for Kcnn4 (NM_008433.2,1253-1271).
cgggaacaagtgaattcca

SEQ ID NO: 526768 - DNA, 19 bp, Mus musculus
  siRNA target sequence for Mlp (NM_010807.2,492-510).
cctgtccttcaagagaaat

SEQ ID NO: 526769 - DNA, 19 bp, Mus musculus
  siRNA target sequence for Mtap2 (NM_008632.1,216-234).
ggccgacgagcggaaagat

SEQ ID NO: 526770 - DNA, 19 bp, Mus musculus
  siRNA target sequence for Mtap2 (NM_008632.1,218-236).
ccgacgagcggaaagatga

SEQ ID NO: 526771 - DNA, 19 bp, Mus musculus
  siRNA target sequence for Mtap2 (NM_008632.1,219-237).
cgacgagcggaaagatgaa

SEQ ID NO: 526772 - DNA, 19 bp, Mus musculus
  siRNA target sequence for Mtap2 (NM_008632.1,338-356).
gccgcaacgccaatggatt

SEQ ID NO: 526773 - DNA, 19 bp, Mus musculus
  siRNA target sequence for Mtap2 (NM_008632.1,339-357).
ccgcaacgccaatggattt

SEQ ID NO: 526774 - DNA, 19 bp, Mus musculus
  siRNA target sequence for Mtap2 (NM_008632.1,342-360).
caacgccaatggatttcca

SEQ ID NO: 526775 - DNA, 19 bp, Mus musculus
  siRNA target sequence for Mtap2 (NM_008632.1,399-417).
gtcacagggcacctattca

SEQ ID NO: 526776 - DNA, 19 bp, Mus musculus
  siRNA target sequence for Mtap2 (NM_008632.1,403-421).
cagggcacctattcagata

SEQ ID NO: 526777 - DNA, 19 bp, Mus musculus
  siRNA target sequence for Mtap2 (NM_008632.1,407-425).
gcacctattcagataccaa

SEQ ID NO: 526778 - DNA, 19 bp, Mus musculus
  siRNA target sequence for Mtap2 (NM_008632.1,408-426).
cacctattcagataccaaa

SEQ ID NO: 526779 - DNA, 19 bp, Mus musculus
  siRNA target sequence for Mtap2 (NM_008632.1,477-495).
ggaggtatctgcaaggata

SEQ ID NO: 526780 - DNA, 19 bp, Mus musculus
  siRNA target sequence for Mtap2 (NM_008632.1,488-506).
caaggatagttcaagtagt

SEQ ID NO: 526781 - DNA, 19 bp, Mus musculus
  siRNA target sequence for Mtap2 (NM_008632.1,583-601).
cctctagcagccgaagaaa

SEQ ID NO: 526782 - DNA, 19 bp, Mus musculus
  siRNA target sequence for Mtap2 (NM_008632.1,654-672).
cacagtggaggaagattta

SEQ ID NO: 526783 - DNA, 19 bp, Mus musculus
  siRNA target sequence for Mtap2 (NM_008632.1,658-676).
gtggaggaagatttactta

SEQ ID NO: 526784 - DNA, 19 bp, Mus musculus
  siRNA target sequence for Mtap2 (NM_008632.1,696-714).
ccctgagcaggagaaattt

SEQ ID NO: 526785 - DNA, 19 bp, Mus musculus
  siRNA target sequence for Mtap2 (NM_008632.1,700-718).
gagcaggagaaatttcctt

SEQ ID NO: 526786 - DNA, 19 bp, Mus musculus
  siRNA target sequence for Mtap2 (NM_008632.1,982-1000).
ccaaaagagccaaaagact

SEQ ID NO: 526787 - DNA, 19 bp, Mus musculus
  siRNA target sequence for Mtap2 (NM_008632.1,990-1008).
gccaaaagactggttcatt

SEQ ID NO: 526788 - DNA, 19 bp, Mus musculus
  siRNA target sequence for Mtap2 (NM_008632.1,1032-1050).
ggatgaatggggtttagct

SEQ ID NO: 526789 - DNA, 19 bp, Mus musculus
  siRNA target sequence for Mtap2 (NM_008632.1,1042-1060).
ggtttagctgccccaatat

SEQ ID NO: 526790 - DNA, 19 bp, Mus musculus
  siRNA target sequence for Mtap2 (NM_008632.1,1074-1092).
gacacccatgagggaaaaa

SEQ ID NO: 526791 - DNA, 19 bp, Mus musculus
  siRNA target sequence for Mtap2 (NM_008632.1,1076-1094).
cacccatgagggaaaaaga

SEQ ID NO: 526792 - DNA, 19 bp, Mus musculus
  siRNA target sequence for Mtap2 (NM_008632.1,1231-1249).
gcccctgtcttcttccaat

SEQ ID NO: 526793 - DNA, 19 bp, Mus musculus
  siRNA target sequence for Mtap2 (NM_008632.1,1364-1382).
cagaagttaccactttact

SEQ ID NO: 526794 - DNA, 19 bp, Mus musculus
  siRNA target sequence for Mtap2 (NM_008632.1,1495-1513).
gaacctacactcactgaaa

SEQ ID NO: 526795 - DNA, 19 bp, Mus musculus
  siRNA target sequence for Mtap2 (NM_008632.1,1530-1548).
gcttgatgagaaatcaact

SEQ ID NO: 526796 - DNA, 19 bp, Mus musculus
  siRNA target sequence for Mtap2 (NM_008632.1,1537-1555).
gagaaatcaactgtttcta

SEQ ID NO: 526797 - DNA, 19 bp, Mus musculus
  siRNA target sequence for Mtap2 (NM_008632.1,1625-1643).
cttccaccgagcagtcttt

SEQ ID NO: 526798 - DNA, 19 bp, Mus musculus
  siRNA target sequence for Mtap2 (NM_008632.1,1665-1683).
ccaagaacacacgattgat

SEQ ID NO: 526799 - DNA, 19 bp, Mus musculus
  siRNA target sequence for Mtap2 (NM_008632.1,1672-1690).
cacacgattgatgagttaa

SEQ ID NO: 526800 - DNA, 19 bp, Mus musculus
  siRNA target sequence for Mtap2 (NM_008632.1,1676-1694).
cgattgatgagttaaaaca

SEQ ID NO: 526801 - DNA, 19 bp, Mus musculus
  siRNA target sequence for Mtap2 (NM_008632.1,1749-1767).
caagaccttgggaaaagtt

SEQ ID NO: 526802 - DNA, 19 bp, Mus musculus
  siRNA target sequence for Mtap2 (NM_008632.1,1752-1770).
gaccttgggaaaagttaca

SEQ ID NO: 526803 - DNA, 19 bp, Mus musculus
  siRNA target sequence for Mtap2 (NM_008632.1,1868-1886).
caatagccgaggttgagat

SEQ ID NO: 526804 - DNA, 19 bp, Mus musculus
  siRNA target sequence for Mtap2 (NM_008632.1,1878-1896).
ggttgagatgccgttttat

SEQ ID NO: 526805 - DNA, 19 bp, Mus musculus
  siRNA target sequence for Mtap2 (NM_008632.1,1884-1902).
gatgccgttttatgaagat

SEQ ID NO: 526806 - DNA, 19 bp, Mus musculus
  siRNA target sequence for Mtap2 (NM_008632.1,1887-1905).
gccgttttatgaagataaa

SEQ ID NO: 526807 - DNA, 19 bp, Mus musculus
  siRNA target sequence for Mtap2 (NM_008632.1,1888-1906).
ccgttttatgaagataaat

SEQ ID NO: 526808 - DNA, 19 bp, Mus musculus
  siRNA target sequence for Mtap2 (NM_008632.1,1900-1918).
gataaatcagggatgtcta

SEQ ID NO: 526809 - DNA, 19 bp, Mus musculus
  siRNA target sequence for Mtap2 (NM_008632.1,1910-1928).
ggatgtctaagtactttga

SEQ ID NO: 526810 - DNA, 19 bp, Mus musculus
  siRNA target sequence for Mtap2 (NM_008632.1,1911-1929).
gatgtctaagtactttgaa

SEQ ID NO: 526811 - DNA, 19 bp, Mus musculus
  siRNA target sequence for Mtap2 (NM_008632.1,1914-1932).
gtctaagtactttgaaaca

SEQ ID NO: 526812 - DNA, 19 bp, Mus musculus
  siRNA target sequence for Mtap2 (NM_008632.1,2011-2029).
gcccaggaatctcttgata

SEQ ID NO: 526813 - DNA, 19 bp, Mus musculus
  siRNA target sequence for Mtap2 (NM_008632.1,2014-2032).
caggaatctcttgatacta

SEQ ID NO: 526814 - DNA, 19 bp, Mus musculus
  siRNA target sequence for Mtap2 (NM_008632.1,2016-2034).
ggaatctcttgatactata

SEQ ID NO: 526815 - DNA, 19 bp, Mus musculus
  siRNA target sequence for Mtap2 (NM_008632.1,2017-2035).
gaatctcttgatactatat

SEQ ID NO: 526816 - DNA, 19 bp, Mus musculus
  siRNA target sequence for Mtap2 (NM_008632.1,2117-2135).
gcactcttgctcagagtta

SEQ ID NO: 526817 - DNA, 19 bp, Mus musculus
  siRNA target sequence for Mtap2 (NM_008632.1,2229-2247).
ggaccttcatagtaagaat

SEQ ID NO: 526818 - DNA, 19 bp, Mus musculus
  siRNA target sequence for Mtap2 (NM_008632.1,2230-2248).
gaccttcatagtaagaata

SEQ ID NO: 526819 - DNA, 19 bp, Mus musculus
  siRNA target sequence for Mtap2 (NM_008632.1,2259-2277).
gacacttagtcgaagctta

SEQ ID NO: 526820 - DNA, 19 bp, Mus musculus
  siRNA target sequence for Mtap2 (NM_008632.1,2285-2303).
gtggaaggtctgcaataga

SEQ ID NO: 526821 - DNA, 19 bp, Mus musculus
  siRNA target sequence for Mtap2 (NM_008632.1,2292-2310).
gtctgcaatagaacaaaga

SEQ ID NO: 526822 - DNA, 19 bp, Mus musculus
  siRNA target sequence for Mtap2 (NM_008632.1,2309-2327).
gaagcatgtctatcaactt

SEQ ID NO: 526823 - DNA, 19 bp, Mus musculus
  siRNA target sequence for Mtap2 (NM_008632.1,2539-2557).
gtgactggagggcaaacta

SEQ ID NO: 526824 - DNA, 19 bp, Mus musculus
  siRNA target sequence for Mtap2 (NM_008632.1,2549-2567).
ggcaaactatccaagttga

SEQ ID NO: 526825 - DNA, 19 bp, Mus musculus
  siRNA target sequence for Mtap2 (NM_008632.1,2591-2609).
cagccaaagaatattacaa

SEQ ID NO: 526826 - DNA, 19 bp, Mus musculus
  siRNA target sequence for Mtap2 (NM_008632.1,2700-2718).
ggttgccaggaggaaatca

SEQ ID NO: 526827 - DNA, 19 bp, Mus musculus
  siRNA target sequence for Mtap2 (NM_008632.1,2761-2779).
ccacctgtcgctgatgaaa

SEQ ID NO: 526828 - DNA, 19 bp, Mus musculus
  siRNA target sequence for Mtap2 (NM_008632.1,2776-2794).
gaaagcccagtcactgtaa

SEQ ID NO: 526829 - DNA, 19 bp, Mus musculus
  siRNA target sequence for Mtap2 (NM_008632.1,2787-2805).
cactgtaaaaccagatagt

SEQ ID NO: 526830 - DNA, 19 bp, Mus musculus
  siRNA target sequence for Mtap2 (NM_008632.1,2798-2816).
cagatagtcaacttgaaga

SEQ ID NO: 526831 - DNA, 19 bp, Mus musculus
  siRNA target sequence for Mtap2 (NM_008632.1,2943-2961).
ggccaccgacctttcacta

SEQ ID NO: 526832 - DNA, 19 bp, Mus musculus
  siRNA target sequence for Mtap2 (NM_008632.1,2944-2962).
gccaccgacctttcactaa

SEQ ID NO: 526833 - DNA, 19 bp, Mus musculus
  siRNA target sequence for Mtap2 (NM_008632.1,2945-2963).
ccaccgacctttcactaat

SEQ ID NO: 526834 - DNA, 19 bp, Mus musculus
  siRNA target sequence for Mtap2 (NM_008632.1,2946-2964).
caccgacctttcactaatt

SEQ ID NO: 526835 - DNA, 19 bp, Mus musculus
  siRNA target sequence for Mtap2 (NM_008632.1,2948-2966).
ccgacctttcactaattga

SEQ ID NO: 526836 - DNA, 19 bp, Mus musculus
  siRNA target sequence for Mtap2 (NM_008632.1,2949-2967).
cgacctttcactaattgaa

SEQ ID NO: 526837 - DNA, 19 bp, Mus musculus
  siRNA target sequence for Mtap2 (NM_008632.1,2953-2971).
ctttcactaattgaagtaa

SEQ ID NO: 526838 - DNA, 19 bp, Mus musculus
  siRNA target sequence for Mtap2 (NM_008632.1,3222-3240).
caaagaactgataacaact

SEQ ID NO: 526839 - DNA, 19 bp, Mus musculus
  siRNA target sequence for Mtap2 (NM_008632.1,3229-3247).
ctgataacaactaaggata

SEQ ID NO: 526840 - DNA, 19 bp, Mus musculus
  siRNA target sequence for Mtap2 (NM_008632.1,3320-3338).
ctgatcaaggtctagattt

SEQ ID NO: 526841 - DNA, 19 bp, Mus musculus
  siRNA target sequence for Mtap2 (NM_008632.1,3355-3373).
gagccaagtcagttagata

SEQ ID NO: 526842 - DNA, 19 bp, Mus musculus
  siRNA target sequence for Mtap2 (NM_008632.1,3358-3376).
ccaagtcagttagatataa

SEQ ID NO: 526843 - DNA, 19 bp, Mus musculus
  siRNA target sequence for Mtap2 (NM_008632.1,3362-3380).
gtcagttagatataaaagt

SEQ ID NO: 526844 - DNA, 19 bp, Mus musculus
  siRNA target sequence for Mtap2 (NM_008632.1,3535-3553).
ggtggcaaagtcaatgaaa

SEQ ID NO: 526845 - DNA, 19 bp, Mus musculus
  siRNA target sequence for Mtap2 (NM_008632.1,3671-3689).
ctgatgagggcaagaaaga

SEQ ID NO: 526846 - DNA, 19 bp, Mus musculus
  siRNA target sequence for Mtap2 (NM_008632.1,3843-3861).
cacagagactccggatata

SEQ ID NO: 526847 - DNA, 19 bp, Mus musculus
  siRNA target sequence for Mtap2 (NM_008632.1,3856-3874).
gatatacctgccatacctt

SEQ ID NO: 526848 - DNA, 19 bp, Mus musculus
  siRNA target sequence for Mtap2 (NM_008632.1,3953-3971).
ctgggggagagtatgacaa

SEQ ID NO: 526849 - DNA, 19 bp, Mus musculus
  siRNA target sequence for Mtap2 (NM_008632.1,3956-3974).
ggggagagtatgacaaact

SEQ ID NO: 526850 - DNA, 19 bp, Mus musculus
  siRNA target sequence for Mtap2 (NM_008632.1,4002-4020).
ctccgacctgcttgtttca

SEQ ID NO: 526851 - DNA, 19 bp, Mus musculus
  siRNA target sequence for Mtap2 (NM_008632.1,4327-4345).
gaaacttacgacgattaca

SEQ ID NO: 526852 - DNA, 19 bp, Mus musculus
  siRNA target sequence for Mtap2 (NM_008632.1,4331-4349).
cttacgacgattacaaaga

SEQ ID NO: 526853 - DNA, 19 bp, Mus musculus
  siRNA target sequence for Mtap2 (NM_008632.1,4399-4417).
gacactcaagatgatgata

SEQ ID NO: 526854 - DNA, 19 bp, Mus musculus
  siRNA target sequence for Mtap2 (NM_008632.1,4428-4446).
gacagagcagttagaaact

SEQ ID NO: 526855 - DNA, 19 bp, Mus musculus
  siRNA target sequence for Mtap2 (NM_008632.1,4434-4452).
gcagttagaaactattcct

SEQ ID NO: 526856 - DNA, 19 bp, Mus musculus
  siRNA target sequence for Mtap2 (NM_008632.1,4435-4453).
cagttagaaactattccta

SEQ ID NO: 526857 - DNA, 19 bp, Mus musculus
  siRNA target sequence for Mtap2 (NM_008632.1,4486-4504).
ccgtctctcgagaaacata

SEQ ID NO: 526858 - DNA, 19 bp, Mus musculus
  siRNA target sequence for Mtap2 (NM_008632.1,4488-4506).
gtctctcgagaaacataga

SEQ ID NO: 526859 - DNA, 19 bp, Mus musculus
  siRNA target sequence for Mtap2 (NM_008632.1,4669-4687).
ccttccaggaaactcattt

SEQ ID NO: 526860 - DNA, 19 bp, Mus musculus
  siRNA target sequence for Mtap2 (NM_008632.1,4693-4711).
cctgctatcaaatacacta

SEQ ID NO: 526861 - DNA, 19 bp, Mus musculus
  siRNA target sequence for Mtap2 (NM_008632.1,4775-4793).
ctcctggtgcttttaaaca

SEQ ID NO: 526862 - DNA, 19 bp, Mus musculus
  siRNA target sequence for Mtap2 (NM_008632.1,4792-4810).
caggcgaaggataaagtca

SEQ ID NO: 526863 - DNA, 19 bp, Mus musculus
  siRNA target sequence for Mtap2 (NM_008632.1,4807-4825).
gtcactgatggaataagca

SEQ ID NO: 526864 - DNA, 19 bp, Mus musculus
  siRNA target sequence for Mtap2 (NM_008632.1,4902-4920).
ggaggagaactctttctct

SEQ ID NO: 526865 - DNA, 19 bp, Mus musculus
  siRNA target sequence for Mtap2 (NM_008632.1,4953-4971).
caccaggtcagaaccaatt

SEQ ID NO: 526866 - DNA, 19 bp, Mus musculus
  siRNA target sequence for Mtap2 (NM_008632.1,5193-5211).
gcttcggcttattaaccaa

SEQ ID NO: 526867 - DNA, 19 bp, Mus musculus
  siRNA target sequence for Mtap2 (NM_008632.1,5249-5267).
gatcaactgacaacatcaa

SEQ ID NO: 526868 - DNA, 19 bp, Mus musculus
  siRNA target sequence for Mtap2 (NM_008632.1,5283-5301).
gggtcaggtacaaattgtt

SEQ ID NO: 526869 - DNA, 19 bp, Mus musculus
  siRNA target sequence for Mtap2 (NM_008632.1,5284-5302).
ggtcaggtacaaattgtta

SEQ ID NO: 526870 - DNA, 19 bp, Mus musculus
  siRNA target sequence for Mtap2 (NM_008632.1,5293-5311).
caaattgttactaagaaga

SEQ ID NO: 526871 - DNA, 19 bp, Mus musculus
  siRNA target sequence for Mtap2 (NM_008632.1,5299-5317).
gttactaagaagatagact

SEQ ID NO: 526872 - DNA, 19 bp, Mus musculus
  siRNA target sequence for Mtap2 (NM_008632.1,5339-5357).
gtggctctctaaagaacat

SEQ ID NO: 526873 - DNA, 19 bp, Mus musculus
  siRNA target sequence for Mtap2 (NM_008632.1,5375-5393).
gtggacgtgtgaaaattga

SEQ ID NO: 526874 - DNA, 19 bp, Mus musculus
  siRNA target sequence for Mtap2 (NM_008632.1,5377-5395).
ggacgtgtgaaaattgaga

SEQ ID NO: 526875 - DNA, 19 bp, Mus musculus
  siRNA target sequence for Mtap2 (NM_008632.1,5460-5478).
cgtacctggaggtggtaat

SEQ ID NO: 526876 - DNA, 19 bp, Mus musculus
  siRNA target sequence for Mtap2 (NM_008632.1,5473-5491).
ggtaatgtgaagattgaca

SEQ ID NO: 526877 - DNA, 19 bp, Mus musculus
  siRNA target sequence for Mtap2 (NM_008632.1,5596-5614).
ctcagcaacgtctcatctt

SEQ ID NO: 526878 - DNA, 19 bp, Mus musculus
  siRNA target sequence for Nos1 (NM_008712.1,257-275).
gcagagcggccttatccaa

SEQ ID NO: 526879 - DNA, 19 bp, Mus musculus
  siRNA target sequence for Nos1 (NM_008712.1,287-305).
cattctcgccgtcaatgat

SEQ ID NO: 526880 - DNA, 19 bp, Mus musculus
  siRNA target sequence for Nos1 (NM_008712.1,393-411).
ggccctgagggctttacta

SEQ ID NO: 526881 - DNA, 19 bp, Mus musculus
  siRNA target sequence for Nos1 (NM_008712.1,635-653).
cattgaccccacaatgaaa

SEQ ID NO: 526882 - DNA, 19 bp, Mus musculus
  siRNA target sequence for Nos1 (NM_008712.1,731-749).
caccggtgggggaaaagca

SEQ ID NO: 526883 - DNA, 19 bp, Mus musculus
  siRNA target sequence for Nos1 (NM_008712.1,854-872).
gaatgatcgagtcttcaat

SEQ ID NO: 526884 - DNA, 19 bp, Mus musculus
  siRNA target sequence for Nos1 (NM_008712.1,905-923).
cctcaacaacccgtattca

SEQ ID NO: 526885 - DNA, 19 bp, Mus musculus
  siRNA target sequence for Nos1 (NM_008712.1,939-957).
cccgcctcgggcaaacagt

SEQ ID NO: 526886 - DNA, 19 bp, Mus musculus
  siRNA target sequence for Nos1 (NM_008712.1,985-1003).
ggtgccctcgcttccttaa

SEQ ID NO: 526887 - DNA, 19 bp, Mus musculus
  siRNA target sequence for Nos1 (NM_008712.1,988-1006).
gccctcgcttccttaaggt

SEQ ID NO: 526888 - DNA, 19 bp, Mus musculus
  siRNA target sequence for Nos1 (NM_008712.1,1176-1194).
gaatttctcgaccaatact

SEQ ID NO: 526889 - DNA, 19 bp, Mus musculus
  siRNA target sequence for Nos1 (NM_008712.1,1188-1206).
caatactactcctccatta

SEQ ID NO: 526890 - DNA, 19 bp, Mus musculus
  siRNA target sequence for Nos1 (NM_008712.1,1289-1307).
ggacacggagctcatctat

SEQ ID NO: 526891 - DNA, 19 bp, Mus musculus
  siRNA target sequence for Nos1 (NM_008712.1,1401-1419).
gcccatgggatgttcaact

SEQ ID NO: 526892 - DNA, 19 bp, Mus musculus
  siRNA target sequence for Nos1 (NM_008712.1,1402-1420).
cccatgggatgttcaacta

SEQ ID NO: 526893 - DNA, 19 bp, Mus musculus
  siRNA target sequence for Nos1 (NM_008712.1,1404-1422).
catgggatgttcaactaca

SEQ ID NO: 526894 - DNA, 19 bp, Mus musculus
  siRNA target sequence for Nos1 (NM_008712.1,1407-1425).
gggatgttcaactacatct

SEQ ID NO: 526895 - DNA, 19 bp, Mus musculus
  siRNA target sequence for Nos1 (NM_008712.1,1574-1592).
cttgggcgatccagctaat

SEQ ID NO: 526896 - DNA, 19 bp, Mus musculus
  siRNA target sequence for Nos1 (NM_008712.1,1743-1761).
cccaagttcgactggttta

SEQ ID NO: 526897 - DNA, 19 bp, Mus musculus
  siRNA target sequence for Nos1 (NM_008712.1,1744-1762).
ccaagttcgactggtttaa

SEQ ID NO: 526898 - DNA, 19 bp, Mus musculus
  siRNA target sequence for Nos1 (NM_008712.1,1764-1782).
gacctggggctcaaatggt

SEQ ID NO: 526899 - DNA, 19 bp, Mus musculus
  siRNA target sequence for Nos1 (NM_008712.1,1766-1784).
cctggggctcaaatggtat

SEQ ID NO: 526900 - DNA, 19 bp, Mus musculus
  siRNA target sequence for Nos1 (NM_008712.1,1835-1853).
cagcgcctgtccctttagt

SEQ ID NO: 526901 - DNA, 19 bp, Mus musculus
  siRNA target sequence for Nos1 (NM_008712.1,1930-1948).
ccaagaaaatggatttgga

SEQ ID NO: 526902 - DNA, 19 bp, Mus musculus
  siRNA target sequence for Nos1 (NM_008712.1,1980-1998).
caagccctggtggagatta

SEQ ID NO: 526903 - DNA, 19 bp, Mus musculus
  siRNA target sequence for Nos1 (NM_008712.1,1983-2001).
gccctggtggagattaaca

SEQ ID NO: 526904 - DNA, 19 bp, Mus musculus
  siRNA target sequence for Nos1 (NM_008712.1,1984-2002).
ccctggtggagattaacat

SEQ ID NO: 526905 - DNA, 19 bp, Mus musculus
  siRNA target sequence for Nos1 (NM_008712.1,1985-2003).
cctggtggagattaacatt

SEQ ID NO: 526906 - DNA, 19 bp, Mus musculus
  siRNA target sequence for Nos1 (NM_008712.1,2355-2373).
gtcaaagcgaccattctct

SEQ ID NO: 526907 - DNA, 19 bp, Mus musculus
  siRNA target sequence for Nos1 (NM_008712.1,2638-2656).
gcgtctcctcctattctga

SEQ ID NO: 526908 - DNA, 19 bp, Mus musculus
  siRNA target sequence for Nos1 (NM_008712.1,2712-2730).
ggaccgctggccaatgtga

SEQ ID NO: 526909 - DNA, 19 bp, Mus musculus
  siRNA target sequence for Nos1 (NM_008712.1,2887-2905).
gggctaagaaagtcttcaa

SEQ ID NO: 526910 - DNA, 19 bp, Mus musculus
  siRNA target sequence for Nos1 (NM_008712.1,2930-2948).
gggggatgacgtcaacatt

SEQ ID NO: 526911 - DNA, 19 bp, Mus musculus
  siRNA target sequence for Nos1 (NM_008712.1,2932-2950).
gggatgacgtcaacattga

SEQ ID NO: 526912 - DNA, 19 bp, Mus musculus
  siRNA target sequence for Nos1 (NM_008712.1,2934-2952).
gatgacgtcaacattgaga

SEQ ID NO: 526913 - DNA, 19 bp, Mus musculus
  siRNA target sequence for Nos1 (NM_008712.1,2955-2973).
gcgaacaattccctcatta

SEQ ID NO: 526914 - DNA, 19 bp, Mus musculus
  siRNA target sequence for Nos1 (NM_008712.1,2986-3004).
gctggaagaggaataaatt

SEQ ID NO: 526915 - DNA, 19 bp, Mus musculus
  siRNA target sequence for Nos1 (NM_008712.1,3038-3056).
gacccaaggtctttccaat

SEQ ID NO: 526916 - DNA, 19 bp, Mus musculus
  siRNA target sequence for Nos1 (NM_008712.1,3041-3059).
ccaaggtctttccaatgtt

SEQ ID NO: 526917 - DNA, 19 bp, Mus musculus
  siRNA target sequence for Nos1 (NM_008712.1,3224-3242).
cctcgtgaatgcactcatt

SEQ ID NO: 526918 - DNA, 19 bp, Mus musculus
  siRNA target sequence for Nos1 (NM_008712.1,3227-3245).
cgtgaatgcactcattgaa

SEQ ID NO: 526919 - DNA, 19 bp, Mus musculus
  siRNA target sequence for Nos1 (NM_008712.1,3605-3623).
gctacaacctcgctactat

SEQ ID NO: 526920 - DNA, 19 bp, Mus musculus
  siRNA target sequence for Nos1 (NM_008712.1,3606-3624).
ctacaacctcgctactatt

SEQ ID NO: 526921 - DNA, 19 bp, Mus musculus
  siRNA target sequence for Nos1 (NM_008712.1,3609-3627).
caacctcgctactattcca

SEQ ID NO: 526922 - DNA, 19 bp, Mus musculus
  siRNA target sequence for Nos1 (NM_008712.1,3631-3649).
gctcctctccagacatgta

SEQ ID NO: 526923 - DNA, 19 bp, Mus musculus
  siRNA target sequence for Nos1 (NM_008712.1,3675-3693).
gccatcgtgtcctaccata

SEQ ID NO: 526924 - DNA, 19 bp, Mus musculus
  siRNA target sequence for Nos1 (NM_008712.1,3736-3754).
cctggctcaaccgaataca

SEQ ID NO: 526925 - DNA, 19 bp, Mus musculus
  siRNA target sequence for Nos1 (NM_008712.1,3877-3895).
ggcaacagcgacaatttga

SEQ ID NO: 526926 - DNA, 19 bp, Mus musculus
  siRNA target sequence for Nos1 (NM_008712.1,3879-3897).
caacagcgacaatttgaca

SEQ ID NO: 526927 - DNA, 19 bp, Mus musculus
  siRNA target sequence for Nos1 (NM_008712.1,3894-3912).
gacatccaacacaaaggaa

SEQ ID NO: 526928 - DNA, 19 bp, Mus musculus
  siRNA target sequence for Nos1 (NM_008712.1,3949-3967).
gacaatccaagatagatca

SEQ ID NO: 526929 - DNA, 19 bp, Mus musculus
  siRNA target sequence for Nos1 (NM_008712.1,3951-3969).
caatccaagatagatcata

SEQ ID NO: 526930 - DNA, 19 bp, Mus musculus
  siRNA target sequence for Nos1 (NM_008712.1,4044-4062).
cccgacaggccaaagaaat

SEQ ID NO: 526931 - DNA, 19 bp, Mus musculus
  siRNA target sequence for Nos1 (NM_008712.1,4045-4063).
ccgacaggccaaagaaata

SEQ ID NO: 526932 - DNA, 19 bp, Mus musculus
  siRNA target sequence for Nos1 (NM_008712.1,4046-4064).
cgacaggccaaagaaatat

SEQ ID NO: 526933 - DNA, 19 bp, Mus musculus
  siRNA target sequence for Nos1 (NM_008712.1,4119-4137).
gagcaaggaggccatattt

SEQ ID NO: 526934 - DNA, 19 bp, Mus musculus
  siRNA target sequence for Nos1 (NM_008712.1,4160-4178).
ggccgctgatgtccttaaa

SEQ ID NO: 526935 - DNA, 19 bp, Mus musculus
  siRNA target sequence for Nos1 (NM_008712.1,4284-4302).
ggggtcaccctcagaacat

SEQ ID NO: 526936 - DNA, 19 bp, Mus musculus
  siRNA target sequence for Nos1 (NM_008712.1,4285-4303).
gggtcaccctcagaacata

SEQ ID NO: 526937 - DNA, 19 bp, Mus musculus
  siRNA target sequence for Nos1 (NM_008712.1,4286-4304).
ggtcaccctcagaacatat

SEQ ID NO: 526938 - DNA, 19 bp, Mus musculus
  siRNA target sequence for Nos1 (NM_008712.1,4289-4307).
caccctcagaacatatgaa

SEQ ID NO: 526939 - DNA, 19 bp, Mus musculus
  siRNA target sequence for Nos1 (NM_008712.1,4291-4309).
ccctcagaacatatgaagt

SEQ ID NO: 526940 - DNA, 19 bp, Mus musculus
  siRNA target sequence for Nos1 (NM_008712.1,4308-4326).
gtgaccaaccgccttagat

SEQ ID NO: 526941 - DNA, 19 bp, Mus musculus
  siRNA target sequence for Nos1 (NM_008712.1,4331-4349).
gtccatcgccttcattgaa

SEQ ID NO: 526942 - DNA, 19 bp, Mus musculus
  siRNA target sequence for Nos2 (NM_010927.1,285-303).
ctgttctcagcccaacaat

SEQ ID NO: 526943 - DNA, 19 bp, Mus musculus
  siRNA target sequence for Nos2 (NM_010927.1,292-310).
cagcccaacaatacaagat

SEQ ID NO: 526944 - DNA, 19 bp, Mus musculus
  siRNA target sequence for Nos2 (NM_010927.1,294-312).
gcccaacaatacaagatga

SEQ ID NO: 526945 - DNA, 19 bp, Mus musculus
  siRNA target sequence for Nos2 (NM_010927.1,313-331).
ccctaagagtcaccaaaat

SEQ ID NO: 526946 - DNA, 19 bp, Mus musculus
  siRNA target sequence for Nos2 (NM_010927.1,402-420).
cgacccgtccacagtatgt

SEQ ID NO: 526947 - DNA, 19 bp, Mus musculus
  siRNA target sequence for Nos2 (NM_010927.1,475-493).
ggccacatcggatttcact

SEQ ID NO: 526948 - DNA, 19 bp, Mus musculus
  siRNA target sequence for Nos2 (NM_010927.1,476-494).
gccacatcggatttcactt

SEQ ID NO: 526949 - DNA, 19 bp, Mus musculus
  siRNA target sequence for Nos2 (NM_010927.1,599-617).
gagttcatcaaccagtatt

SEQ ID NO: 526950 - DNA, 19 bp, Mus musculus
  siRNA target sequence for Nos2 (NM_010927.1,611-629).
cagtattatggctccttta

SEQ ID NO: 526951 - DNA, 19 bp, Mus musculus
  siRNA target sequence for Nos2 (NM_010927.1,624-642).
cctttaaagaggcaaaaat

SEQ ID NO: 526952 - DNA, 19 bp, Mus musculus
  siRNA target sequence for Nos2 (NM_010927.1,664-682).
ggaagctgtaacaaaggaa

SEQ ID NO: 526953 - DNA, 19 bp, Mus musculus
  siRNA target sequence for Nos2 (NM_010927.1,665-683).
gaagctgtaacaaaggaaa

SEQ ID NO: 526954 - DNA, 19 bp, Mus musculus
  siRNA target sequence for Nos2 (NM_010927.1,913-931).
gcggagtgacggcaaacat

SEQ ID NO: 526955 - DNA, 19 bp, Mus musculus
  siRNA target sequence for Nos2 (NM_010927.1,915-933).
ggagtgacggcaaacatga

SEQ ID NO: 526956 - DNA, 19 bp, Mus musculus
  siRNA target sequence for Nos2 (NM_010927.1,1057-1075).
ccgctatggccgctttgat

SEQ ID NO: 526957 - DNA, 19 bp, Mus musculus
  siRNA target sequence for Nos2 (NM_010927.1,1319-1337).
gacacacagcgctacaaca

SEQ ID NO: 526958 - DNA, 19 bp, Mus musculus
  siRNA target sequence for Nos2 (NM_010927.1,1405-1423).
ggctgtcacggagatcaat

SEQ ID NO: 526959 - DNA, 19 bp, Mus musculus
  siRNA target sequence for Nos2 (NM_010927.1,1698-1716).
gagagatccgatttagagt

SEQ ID NO: 526960 - DNA, 19 bp, Mus musculus
  siRNA target sequence for Nos2 (NM_010927.1,2020-2038).
cttcaggtatgctgtgttt

SEQ ID NO: 526961 - DNA, 19 bp, Mus musculus
  siRNA target sequence for Nos2 (NM_010927.1,2070-2088).
gcgcctttgctcatgacat

SEQ ID NO: 526962 - DNA, 19 bp, Mus musculus
  siRNA target sequence for Nos2 (NM_010927.1,2173-2191).
ccgcagctgggctgtacaa

SEQ ID NO: 526963 - DNA, 19 bp, Mus musculus
  siRNA target sequence for Nos2 (NM_010927.1,2205-2223).
cctgtgagacctttgatgt

SEQ ID NO: 526964 - DNA, 19 bp, Mus musculus
  siRNA target sequence for Nos2 (NM_010927.1,2251-2269).
gaaacgcttcacttccaat

SEQ ID NO: 526965 - DNA, 19 bp, Mus musculus
  siRNA target sequence for Nos2 (NM_010927.1,2274-2292).
catgggagccacagcaata

SEQ ID NO: 526966 - DNA, 19 bp, Mus musculus
  siRNA target sequence for Nos2 (NM_010927.1,2511-2529).
ccctggtgcagggaatctt

SEQ ID NO: 526967 - DNA, 19 bp, Mus musculus
  siRNA target sequence for Nos2 (NM_010927.1,2595-2613).
gcagctactgggtcaaaga

SEQ ID NO: 526968 - DNA, 19 bp, Mus musculus
  siRNA target sequence for Nos2 (NM_010927.1,2759-2777).
ccctcagagtacaatgact

SEQ ID NO: 526969 - DNA, 19 bp, Mus musculus
  siRNA target sequence for Nos2 (NM_010927.1,3434-3452).
gatgtggctaccacattga

SEQ ID NO: 526970 - DNA, 19 bp, Mus musculus
  siRNA target sequence for Nos2 (NM_010927.1,3515-3533).
ctcaagagccagaaacgtt

SEQ ID NO: 526971 - DNA, 19 bp, Mus musculus
  siRNA target sequence for Nos2 (NM_010927.1,3517-3535).
caagagccagaaacgttat

SEQ ID NO: 526972 - DNA, 19 bp, Mus musculus
  siRNA target sequence for Nos2 (NM_010927.1,3520-3538).
gagccagaaacgttatcat

SEQ ID NO: 526973 - DNA, 19 bp, Mus musculus
  siRNA target sequence for Nos2 (NM_010927.1,3522-3540).
gccagaaacgttatcatga

SEQ ID NO: 526974 - DNA, 19 bp, Mus musculus
  siRNA target sequence for Nos2 (NM_010927.1,3523-3541).
ccagaaacgttatcatgaa

SEQ ID NO: 526975 - DNA, 19 bp, Mus musculus
  siRNA target sequence for Nos2 (NM_010927.1,3530-3548).
cgttatcatgaagatatct

SEQ ID NO: 526976 - DNA, 19 bp, Mus musculus
  siRNA target sequence for Nos2 (NM_010927.1,3531-3549).
gttatcatgaagatatctt

SEQ ID NO: 526977 - DNA, 19 bp, Mus musculus
  siRNA target sequence for Nos2 (NM_010927.1,3550-3568).
cggtgcagtcttttcctat

SEQ ID NO: 526978 - DNA, 19 bp, Mus musculus
  siRNA target sequence for Nos3 (NM_008713.2,215-233).
ccaggtttcctcgagtaaa

SEQ ID NO: 526979 - DNA, 19 bp, Mus musculus
  siRNA target sequence for Nos3 (NM_008713.2,218-236).
ggtttcctcgagtaaagaa

SEQ ID NO: 526980 - DNA, 19 bp, Mus musculus
  siRNA target sequence for Nos3 (NM_008713.2,219-237).
gtttcctcgagtaaagaat

SEQ ID NO: 526981 - DNA, 19 bp, Mus musculus
  siRNA target sequence for Nos3 (NM_008713.2,327-345).
ggtgtttccaaggaagtta

SEQ ID NO: 526982 - DNA, 19 bp, Mus musculus
  siRNA target sequence for Nos3 (NM_008713.2,400-418).
cgggacttcatcaatcagt

SEQ ID NO: 526983 - DNA, 19 bp, Mus musculus
  siRNA target sequence for Nos3 (NM_008713.2,634-652).
gaaatgttcacctacatct

SEQ ID NO: 526984 - DNA, 19 bp, Mus musculus
  siRNA target sequence for Nos3 (NM_008713.2,1123-1141).
gaccctcaccgctacaaca

SEQ ID NO: 526985 - DNA, 19 bp, Mus musculus
  siRNA target sequence for Nos3 (NM_008713.2,1127-1145).
ctcaccgctacaacatact

SEQ ID NO: 526986 - DNA, 19 bp, Mus musculus
  siRNA target sequence for Nos3 (NM_008713.2,1211-1229).
cagcggtggaaattaatgt

SEQ ID NO: 526987 - DNA, 19 bp, Mus musculus
  siRNA target sequence for Nos3 (NM_008713.2,1566-1584).
gcgtgtgaaggcaaccatt

SEQ ID NO: 526988 - DNA, 19 bp, Mus musculus
  siRNA target sequence for Nos3 (NM_008713.2,1572-1590).
gaaggcaaccattctgtat

SEQ ID NO: 526989 - DNA, 19 bp, Mus musculus
  siRNA target sequence for Nos3 (NM_008713.2,1641-1659).
cttccggaaggcgtttgat

SEQ ID NO: 526990 - DNA, 19 bp, Mus musculus
  siRNA target sequence for Nos3 (NM_008713.2,1668-1686).
cctgtgcatggatgagtat

SEQ ID NO: 526991 - DNA, 19 bp, Mus musculus
  siRNA target sequence for Nos3 (NM_008713.2,1671-1689).
gtgcatggatgagtatgat

SEQ ID NO: 526992 - DNA, 19 bp, Mus musculus
  siRNA target sequence for Nos3 (NM_008713.2,1777-1795).
gcagcagcgctcatggaaa

SEQ ID NO: 526993 - DNA, 19 bp, Mus musculus
  siRNA target sequence for Nos3 (NM_008713.2,1778-1796).
cagcagcgctcatggaaat

SEQ ID NO: 526994 - DNA, 19 bp, Mus musculus
  siRNA target sequence for Nos3 (NM_008713.2,2171-2189).
ctgctgcccgagatatctt

SEQ ID NO: 526995 - DNA, 19 bp, Mus musculus
  siRNA target sequence for Nos3 (NM_008713.2,2307-2325).
cctctctgtggaaaaccta

SEQ ID NO: 526996 - DNA, 19 bp, Mus musculus
  siRNA target sequence for Nos3 (NM_008713.2,3101-3119).
gactacacgacattgagat

SEQ ID NO: 526997 - DNA, 19 bp, Mus musculus
  siRNA target sequence for Nos3 (NM_008713.2,3170-3188).
cccaactggaccatctcta

SEQ ID NO: 526998 - DNA, 19 bp, Mus musculus
  siRNA target sequence for Pde1a (NM_016744.1,53-71).
gctcccgtgaggaacatca

SEQ ID NO: 526999 - DNA, 19 bp, Mus musculus
  siRNA target sequence for Pde1a (NM_016744.1,70-88).
catcatggggtctactgat

SEQ ID NO: 527000 - DNA, 19 bp, Mus musculus
  siRNA target sequence for Pde1a (NM_016744.1,86-104).
gatacggacatcgaagaat

SEQ ID NO: 527001 - DNA, 19 bp, Mus musculus
  siRNA target sequence for Pde1a (NM_016744.1,91-109).
ggacatcgaagaattggaa

SEQ ID NO: 527002 - DNA, 19 bp, Mus musculus
  siRNA target sequence for Pde1a (NM_016744.1,113-131).
gccacttacaagtatctca

SEQ ID NO: 527003 - DNA, 19 bp, Mus musculus
  siRNA target sequence for Pde1a (NM_016744.1,114-132).
ccacttacaagtatctcat

SEQ ID NO: 527004 - DNA, 19 bp, Mus musculus
  siRNA target sequence for Pde1a (NM_016744.1,160-178).
gcgcctgaagggaatacta

SEQ ID NO: 527005 - DNA, 19 bp, Mus musculus
  siRNA target sequence for Pde1a (NM_016744.1,161-179).
cgcctgaagggaatactaa

SEQ ID NO: 527006 - DNA, 19 bp, Mus musculus
  siRNA target sequence for Pde1a (NM_016744.1,163-181).
cctgaagggaatactaaga

SEQ ID NO: 527007 - DNA, 19 bp, Mus musculus
  siRNA target sequence for Pde1a (NM_016744.1,169-187).
gggaatactaagatgctta

SEQ ID NO: 527008 - DNA, 19 bp, Mus musculus
  siRNA target sequence for Pde1a (NM_016744.1,207-225).
gtgatgtcaacgttgttga

SEQ ID NO: 527009 - DNA, 19 bp, Mus musculus
  siRNA target sequence for Pde1a (NM_016744.1,218-236).
gttgttgacctaaagaaga

SEQ ID NO: 527010 - DNA, 19 bp, Mus musculus
  siRNA target sequence for Pde1a (NM_016744.1,241-259).
cgaatatgcagcatcagta

SEQ ID NO: 527011 - DNA, 19 bp, Mus musculus
  siRNA target sequence for Pde1a (NM_016744.1,255-273).
cagtactggaagctgttta

SEQ ID NO: 527012 - DNA, 19 bp, Mus musculus
  siRNA target sequence for Pde1a (NM_016744.1,345-363).
cggaagtccgggattggtt

SEQ ID NO: 527013 - DNA, 19 bp, Mus musculus
  siRNA target sequence for Pde1a (NM_016744.1,471-489).
ggatgtacaggaagaacta

SEQ ID NO: 527014 - DNA, 19 bp, Mus musculus
  siRNA target sequence for Pde1a (NM_016744.1,491-509).
cacatggttggtttgacat

SEQ ID NO: 527015 - DNA, 19 bp, Mus musculus
  siRNA target sequence for Pde1a (NM_016744.1,493-511).
catggttggtttgacatat

SEQ ID NO: 527016 - DNA, 19 bp, Mus musculus
  siRNA target sequence for Pde1a (NM_016744.1,496-514).
ggttggtttgacatatcct

SEQ ID NO: 527017 - DNA, 19 bp, Mus musculus
  siRNA target sequence for Pde1a (NM_016744.1,512-530).
cctgcagctgtcatagtga

SEQ ID NO: 527018 - DNA, 19 bp, Mus musculus
  siRNA target sequence for Pde1a (NM_016744.1,533-551).
ctcaaggaagttgataaat

SEQ ID NO: 527019 - DNA, 19 bp, Mus musculus
  siRNA target sequence for Pde1a (NM_016744.1,588-606).
gggagcatagcctgaagtt

SEQ ID NO: 527020 - DNA, 19 bp, Mus musculus
  siRNA target sequence for Pde1a (NM_016744.1,590-608).
gagcatagcctgaagttta

SEQ ID NO: 527021 - DNA, 19 bp, Mus musculus
  siRNA target sequence for Pde1a (NM_016744.1,638-656).
cttatcaaccgcttcaaga

SEQ ID NO: 527022 - DNA, 19 bp, Mus musculus
  siRNA target sequence for Pde1a (NM_016744.1,679-697).
ctttgcagaagccttagaa

SEQ ID NO: 527023 - DNA, 19 bp, Mus musculus
  siRNA target sequence for Pde1a (NM_016744.1,864-882).
caggaacaacaaacaactt

SEQ ID NO: 527024 - DNA, 19 bp, Mus musculus
  siRNA target sequence for Pde1a (NM_016744.1,870-888).
caacaaacaacttccatat

SEQ ID NO: 527025 - DNA, 19 bp, Mus musculus
  siRNA target sequence for Pde1a (NM_016744.1,894-912).
cgaggtcggacgttgctat

SEQ ID NO: 527026 - DNA, 19 bp, Mus musculus
  siRNA target sequence for Pde1a (NM_016744.1,895-913).
gaggtcggacgttgctatt

SEQ ID NO: 527027 - DNA, 19 bp, Mus musculus
  siRNA target sequence for Pde1a (NM_016744.1,897-915).
ggtcggacgttgctattct

SEQ ID NO: 527028 - DNA, 19 bp, Mus musculus
  siRNA target sequence for Pde1a (NM_016744.1,900-918).
cggacgttgctattctgta

SEQ ID NO: 527029 - DNA, 19 bp, Mus musculus
  siRNA target sequence for Pde1a (NM_016744.1,925-943).
ccgctcagtgcttgagaat

SEQ ID NO: 527030 - DNA, 19 bp, Mus musculus
  siRNA target sequence for Pde1a (NM_016744.1,954-972).
gcgcagcctacagacttat

SEQ ID NO: 527031 - DNA, 19 bp, Mus musculus
  siRNA target sequence for Pde1a (NM_016744.1,1021-1039).
gagggatcttcggaactta

SEQ ID NO: 527032 - DNA, 19 bp, Mus musculus
  siRNA target sequence for Pde1a (NM_016744.1,1025-1043).
gatcttcggaacttagtga

SEQ ID NO: 527033 - DNA, 19 bp, Mus musculus
  siRNA target sequence for Pde1a (NM_016744.1,1031-1049).
cggaacttagtgattgaaa

SEQ ID NO: 527034 - DNA, 19 bp, Mus musculus
  siRNA target sequence for Pde1a (NM_016744.1,1126-1144).
gattgacagagccaaaact

SEQ ID NO: 527035 - DNA, 19 bp, Mus musculus
  siRNA target sequence for Pde1a (NM_016744.1,1130-1148).
gacagagccaaaactatgt

SEQ ID NO: 527036 - DNA, 19 bp, Mus musculus
  siRNA target sequence for Pde1a (NM_016744.1,1174-1192).
cagccacccagccaaaact

SEQ ID NO: 527037 - DNA, 19 bp, Mus musculus
  siRNA target sequence for Pde1a (NM_016744.1,1286-1304).
ctttgtgatcggaagtcaa

SEQ ID NO: 527038 - DNA, 19 bp, Mus musculus
  siRNA target sequence for Pde1a (NM_016744.1,1290-1308).
gtgatcggaagtcaacaat

SEQ ID NO: 527039 - DNA, 19 bp, Mus musculus
  siRNA target sequence for Pde1a (NM_016744.1,1309-1327).
ggttgcccagtcgcaaata

SEQ ID NO: 527040 - DNA, 19 bp, Mus musculus
  siRNA target sequence for Pde1a (NM_016744.1,1321-1339).
gcaaataggtttcattgat

SEQ ID NO: 527041 - DNA, 19 bp, Mus musculus
  siRNA target sequence for Pde1a (NM_016744.1,1342-1360).
catagtggagccaacgttt

SEQ ID NO: 527042 - DNA, 19 bp, Mus musculus
  siRNA target sequence for Pde1a (NM_016744.1,1369-1387).
gacggactcaacagagaaa

SEQ ID NO: 527043 - DNA, 19 bp, Mus musculus
  siRNA target sequence for Pde1a (NM_016744.1,1371-1389).
cggactcaacagagaaaat

SEQ ID NO: 527044 - DNA, 19 bp, Mus musculus
  siRNA target sequence for Pde1a (NM_016744.1,1377-1395).
caacagagaaaattgtcat

SEQ ID NO: 527045 - DNA, 19 bp, Mus musculus
  siRNA target sequence for Pde1a (NM_016744.1,1416-1434).
caaagtcacagtcttcaaa

SEQ ID NO: 527046 - DNA, 19 bp, Mus musculus
  siRNA target sequence for Pde1a (NM_016744.1,1447-1465).
cagctcgtccaccatgatt

SEQ ID NO: 527047 - DNA, 19 bp, Mus musculus
  siRNA target sequence for Pde1a (NM_016744.1,1483-1501).
ctctctgaggcggtcaaat

SEQ ID NO: 527048 - DNA, 19 bp, Mus musculus
  siRNA target sequence for Pde1a (NM_016744.1,1553-1571).
gctgtggatctgaagagtt

SEQ ID NO: 527049 - DNA, 19 bp, Mus musculus
  siRNA target sequence for Pde1a (NM_016744.1,1627-1645).
ggctgcccaaggtgaactt

SEQ ID NO: 527050 - DNA, 19 bp, Mus musculus
  siRNA target sequence for Pde1b (NM_008800.1,164-182).
gtcagcccccagcaagaaa

SEQ ID NO: 527051 - DNA, 19 bp, Mus musculus
  siRNA target sequence for Pde1b (NM_008800.1,179-197).
gaaaatgtggattaagcta

SEQ ID NO: 527052 - DNA, 19 bp, Mus musculus
  siRNA target sequence for Pde1b (NM_008800.1,503-521).
gatgttccggagaacgtat

SEQ ID NO: 527053 - DNA, 19 bp, Mus musculus
  siRNA target sequence for Pde1b (NM_008800.1,575-593).
ggacctctggtgctttgat

SEQ ID NO: 527054 - DNA, 19 bp, Mus musculus
  siRNA target sequence for Pde1b (NM_008800.1,581-599).
ctggtgctttgatgtcttt

SEQ ID NO: 527055 - DNA, 19 bp, Mus musculus
  siRNA target sequence for Pde1b (NM_008800.1,627-645).
gctctgaggaccattgttt

SEQ ID NO: 527056 - DNA, 19 bp, Mus musculus
  siRNA target sequence for Pde1b (NM_008800.1,628-646).
ctctgaggaccattgtttt

SEQ ID NO: 527057 - DNA, 19 bp, Mus musculus
  siRNA target sequence for Pde1b (NM_008800.1,694-712).
cagtgtttctgatgagttt

SEQ ID NO: 527058 - DNA, 19 bp, Mus musculus
  siRNA target sequence for Pde1b (NM_008800.1,728-746).
gacaggctatgggaaatat

SEQ ID NO: 527059 - DNA, 19 bp, Mus musculus
  siRNA target sequence for Pde1b (NM_008800.1,730-748).
caggctatgggaaatataa

SEQ ID NO: 527060 - DNA, 19 bp, Mus musculus
  siRNA target sequence for Pde1b (NM_008800.1,732-750).
ggctatgggaaatataaga

SEQ ID NO: 527061 - DNA, 19 bp, Mus musculus
  siRNA target sequence for Pde1b (NM_008800.1,733-751).
gctatgggaaatataagaa

SEQ ID NO: 527062 - DNA, 19 bp, Mus musculus
  siRNA target sequence for Pde1b (NM_008800.1,734-752).
ctatgggaaatataagaat

SEQ ID NO: 527063 - DNA, 19 bp, Mus musculus
  siRNA target sequence for Pde1b (NM_008800.1,977-995).
ccacatcagctctgtcttt

SEQ ID NO: 527064 - DNA, 19 bp, Mus musculus
  siRNA target sequence for Pde1b (NM_008800.1,985-1003).
gctctgtctttcgaatgat

SEQ ID NO: 527065 - DNA, 19 bp, Mus musculus
  siRNA target sequence for Pde1b (NM_008800.1,997-1015).
gaatgatgcaggatgatga

SEQ ID NO: 527066 - DNA, 19 bp, Mus musculus
  siRNA target sequence for Pde1b (NM_008800.1,1008-1026).
gatgatgagatgaacattt

SEQ ID NO: 527067 - DNA, 19 bp, Mus musculus
  siRNA target sequence for Pde1b (NM_008800.1,1146-1164).
cagttggaaaggattgaca

SEQ ID NO: 527068 - DNA, 19 bp, Mus musculus
  siRNA target sequence for Pde1b (NM_008800.1,1428-1446).
cccttggcagatgatgatt

SEQ ID NO: 527069 - DNA, 19 bp, Mus musculus
  siRNA target sequence for Pde1b (NM_008800.1,1475-1493).
gtggcgccagccttcttta

SEQ ID NO: 527070 - DNA, 19 bp, Mus musculus
  siRNA target sequence for Pde1b (NM_008800.1,1477-1495).
ggcgccagccttctttaga

SEQ ID NO: 527071 - DNA, 19 bp, Mus musculus
  siRNA target sequence for Pde1b (NM_008800.1,1478-1496).
gcgccagccttctttagat

SEQ ID NO: 527072 - DNA, 19 bp, Mus musculus
  siRNA target sequence for Pde1b (NM_008800.1,1607-1625).
caaccagatgtccattgat

SEQ ID NO: 527073 - DNA, 19 bp, Mus musculus
  siRNA target sequence for Pde1b (NM_008800.1,1657-1675).
cctcccctgcagaagatga

SEQ ID NO: 527074 - DNA, 19 bp, Mus musculus
  siRNA target sequence for Phka1 (NM_008832.1,319-337).
cagccagctatgatcaaaa

SEQ ID NO: 527075 - DNA, 19 bp, Mus musculus
  siRNA target sequence for Phka1 (NM_008832.1,343-361).
cctgggtccgagataatgt

SEQ ID NO: 527076 - DNA, 19 bp, Mus musculus
  siRNA target sequence for Phka1 (NM_008832.1,351-369).
cgagataatgtgtacagta

SEQ ID NO: 527077 - DNA, 19 bp, Mus musculus
  siRNA target sequence for Phka1 (NM_008832.1,392-410).
cctggcatatcgcaaaaat

SEQ ID NO: 527078 - DNA, 19 bp, Mus musculus
  siRNA target sequence for Phka1 (NM_008832.1,395-413).
ggcatatcgcaaaaatgct

SEQ ID NO: 527079 - DNA, 19 bp, Mus musculus
  siRNA target sequence for Phka1 (NM_008832.1,428-446).
caaggcaaaggcctatgaa

SEQ ID NO: 527080 - DNA, 19 bp, Mus musculus
  siRNA target sequence for Phka1 (NM_008832.1,453-471).
cagagtgtagtgaagttaa

SEQ ID NO: 527081 - DNA, 19 bp, Mus musculus
  siRNA target sequence for Phka1 (NM_008832.1,497-515).
cagacaggtggataaagta

SEQ ID NO: 527082 - DNA, 19 bp, Mus musculus
  siRNA target sequence for Phka1 (NM_008832.1,499-517).
gacaggtggataaagtaga

SEQ ID NO: 527083 - DNA, 19 bp, Mus musculus
  siRNA target sequence for Phka1 (NM_008832.1,560-578).
caagtacaacaccaaaact

SEQ ID NO: 527084 - DNA, 19 bp, Mus musculus
  siRNA target sequence for Phka1 (NM_008832.1,563-581).
gtacaacaccaaaacttgt

SEQ ID NO: 527085 - DNA, 19 bp, Mus musculus
  siRNA target sequence for Phka1 (NM_008832.1,645-663).
ctcttcctagcacaaatga

SEQ ID NO: 527086 - DNA, 19 bp, Mus musculus
  siRNA target sequence for Phka1 (NM_008832.1,691-709).
gcctagacgaagtcaattt

SEQ ID NO: 527087 - DNA, 19 bp, Mus musculus
  siRNA target sequence for Phka1 (NM_008832.1,692-710).
cctagacgaagtcaatttt

SEQ ID NO: 527088 - DNA, 19 bp, Mus musculus
  siRNA target sequence for Phka1 (NM_008832.1,693-711).
ctagacgaagtcaatttta

SEQ ID NO: 527089 - DNA, 19 bp, Mus musculus
  siRNA target sequence for Phka1 (NM_008832.1,699-717).
gaagtcaattttatacaga

SEQ ID NO: 527090 - DNA, 19 bp, Mus musculus
  siRNA target sequence for Phka1 (NM_008832.1,714-732).
cagaacctcgtgttttaca

SEQ ID NO: 527091 - DNA, 19 bp, Mus musculus
  siRNA target sequence for Phka1 (NM_008832.1,719-737).
cctcgtgttttacattgaa

SEQ ID NO: 527092 - DNA, 19 bp, Mus musculus
  siRNA target sequence for Phka1 (NM_008832.1,770-788).
ggaacgtggcgataagaca

SEQ ID NO: 527093 - DNA, 19 bp, Mus musculus
  siRNA target sequence for Phka1 (NM_008832.1,771-789).
gaacgtggcgataagacaa

SEQ ID NO: 527094 - DNA, 19 bp, Mus musculus
  siRNA target sequence for Phka1 (NM_008832.1,792-810).
caaggcatctcggaattga

SEQ ID NO: 527095 - DNA, 19 bp, Mus musculus
  siRNA target sequence for Phka1 (NM_008832.1,878-896).
gaaaggtgggccacaatca

SEQ ID NO: 527096 - DNA, 19 bp, Mus musculus
  siRNA target sequence for Phka1 (NM_008832.1,959-977).
cagggcttcaacatccaaa

SEQ ID NO: 527097 - DNA, 19 bp, Mus musculus
  siRNA target sequence for Phka1 (NM_008832.1,964-982).
cttcaacatccaaagaagt

SEQ ID NO: 527098 - DNA, 19 bp, Mus musculus
  siRNA target sequence for Phka1 (NM_008832.1,1076-1094).
gcttcagggtcgttatggt

SEQ ID NO: 527099 - DNA, 19 bp, Mus musculus
  siRNA target sequence for Phka1 (NM_008832.1,1102-1120).
gttttctgcgagatggata

SEQ ID NO: 527100 - DNA, 19 bp, Mus musculus
  siRNA target sequence for Phka1 (NM_008832.1,1161-1179).
ccagctgagctgaagctat

SEQ ID NO: 527101 - DNA, 19 bp, Mus musculus
  siRNA target sequence for Phka1 (NM_008832.1,1162-1180).
cagctgagctgaagctatt

SEQ ID NO: 527102 - DNA, 19 bp, Mus musculus
  siRNA target sequence for Phka1 (NM_008832.1,1167-1185).
gagctgaagctatttgaaa

SEQ ID NO: 527103 - DNA, 19 bp, Mus musculus
  siRNA target sequence for Phka1 (NM_008832.1,1211-1229).
ctggacatactttatcctt

SEQ ID NO: 527104 - DNA, 19 bp, Mus musculus
  siRNA target sequence for Phka1 (NM_008832.1,1254-1272).
gaacaggttcaagaatata

SEQ ID NO: 527105 - DNA, 19 bp, Mus musculus
  siRNA target sequence for Phka1 (NM_008832.1,1345-1363).
ctcctgacagggttgatga

SEQ ID NO: 527106 - DNA, 19 bp, Mus musculus
  siRNA target sequence for Phka1 (NM_008832.1,1423-1441).
ggggtcagtctctatacat

SEQ ID NO: 527107 - DNA, 19 bp, Mus musculus
  siRNA target sequence for Phka1 (NM_008832.1,1424-1442).
gggtcagtctctatacatt

SEQ ID NO: 527108 - DNA, 19 bp, Mus musculus
  siRNA target sequence for Phka1 (NM_008832.1,1491-1509).
cccctgaatcgtaggtttt

SEQ ID NO: 527109 - DNA, 19 bp, Mus musculus
  siRNA target sequence for Phka1 (NM_008832.1,1493-1511).
cctgaatcgtaggttttct

SEQ ID NO: 527110 - DNA, 19 bp, Mus musculus
  siRNA target sequence for Phka1 (NM_008832.1,1494-1512).
ctgaatcgtaggttttcta

SEQ ID NO: 527111 - DNA, 19 bp, Mus musculus
  siRNA target sequence for Phka1 (NM_008832.1,1496-1514).
gaatcgtaggttttctact

SEQ ID NO: 527112 - DNA, 19 bp, Mus musculus
  siRNA target sequence for Phka1 (NM_008832.1,1638-1656).
cagccagctcgtattctca

SEQ ID NO: 527113 - DNA, 19 bp, Mus musculus
  siRNA target sequence for Phka1 (NM_008832.1,1647-1665).
cgtattctcagccatattt

SEQ ID NO: 527114 - DNA, 19 bp, Mus musculus
  siRNA target sequence for Phka1 (NM_008832.1,1648-1666).
gtattctcagccatattta

SEQ ID NO: 527115 - DNA, 19 bp, Mus musculus
  siRNA target sequence for Phka1 (NM_008832.1,1653-1671).
ctcagccatatttattcta

SEQ ID NO: 527116 - DNA, 19 bp, Mus musculus
  siRNA target sequence for Phka1 (NM_008832.1,1655-1673).
cagccatatttattctagt

SEQ ID NO: 527117 - DNA, 19 bp, Mus musculus
  siRNA target sequence for Phka1 (NM_008832.1,1677-1695).
ggatgcaacagtagaatga

SEQ ID NO: 527118 - DNA, 19 bp, Mus musculus
  siRNA target sequence for Phka1 (NM_008832.1,1725-1743).
ggtgtgcttggaacatcaa

SEQ ID NO: 527119 - DNA, 19 bp, Mus musculus
  siRNA target sequence for Phka1 (NM_008832.1,1730-1748).
gcttggaacatcaaaactt

SEQ ID NO: 527120 - DNA, 19 bp, Mus musculus
  siRNA target sequence for Phka1 (NM_008832.1,1731-1749).
cttggaacatcaaaacttt

SEQ ID NO: 527121 - DNA, 19 bp, Mus musculus
  siRNA target sequence for Phka1 (NM_008832.1,1735-1753).
gaacatcaaaactttatga

SEQ ID NO: 527122 - DNA, 19 bp, Mus musculus
  siRNA target sequence for Phka1 (NM_008832.1,1752-1770).
gacattcgcaaaactatct

SEQ ID NO: 527123 - DNA, 19 bp, Mus musculus
  siRNA target sequence for Phka1 (NM_008832.1,1754-1772).
cattcgcaaaactatcttt

SEQ ID NO: 527124 - DNA, 19 bp, Mus musculus
  siRNA target sequence for Phka1 (NM_008832.1,1820-1838).
ggacaaccagatgatagta

SEQ ID NO: 527125 - DNA, 19 bp, Mus musculus
  siRNA target sequence for Phka1 (NM_008832.1,1891-1909).
gccagcccacgatcacttt

SEQ ID NO: 527126 - DNA, 19 bp, Mus musculus
  siRNA target sequence for Phka1 (NM_008832.1,1918-1936).
cgcacaccatgcttgatga

SEQ ID NO: 527127 - DNA, 19 bp, Mus musculus
  siRNA target sequence for Phka1 (NM_008832.1,1919-1937).
gcacaccatgcttgatgaa

SEQ ID NO: 527128 - DNA, 19 bp, Mus musculus
  siRNA target sequence for Phka1 (NM_008832.1,1948-1966).
gcttgaattcaagtatctt

SEQ ID NO: 527129 - DNA, 19 bp, Mus musculus
  siRNA target sequence for Phka1 (NM_008832.1,1985-2003).
gcaggatggctattttggt

SEQ ID NO: 527130 - DNA, 19 bp, Mus musculus
  siRNA target sequence for Phka1 (NM_008832.1,2009-2027).
caggatccaaacaggtaaa

SEQ ID NO: 527131 - DNA, 19 bp, Mus musculus
  siRNA target sequence for Phka1 (NM_008832.1,2015-2033).
ccaaacaggtaaattgtca

SEQ ID NO: 527132 - DNA, 19 bp, Mus musculus
  siRNA target sequence for Phka1 (NM_008832.1,2053-2071).
gctgcacacacttaagctt

SEQ ID NO: 527133 - DNA, 19 bp, Mus musculus
  siRNA target sequence for Phka1 (NM_008832.1,2156-2174).
ggacagctatgattcaaca

SEQ ID NO: 527134 - DNA, 19 bp, Mus musculus
  siRNA target sequence for Phka1 (NM_008832.1,2161-2179).
gctatgattcaacaagtaa

SEQ ID NO: 527135 - DNA, 19 bp, Mus musculus
  siRNA target sequence for Phka1 (NM_008832.1,2162-2180).
ctatgattcaacaagtaat

SEQ ID NO: 527136 - DNA, 19 bp, Mus musculus
  siRNA target sequence for Phka1 (NM_008832.1,2301-2319).
caaacaacttgcgacttaa

SEQ ID NO: 527137 - DNA, 19 bp, Mus musculus
  siRNA target sequence for Phka1 (NM_008832.1,2336-2354).
ggccaaggagctgcatata

SEQ ID NO: 527138 - DNA, 19 bp, Mus musculus
  siRNA target sequence for Phka1 (NM_008832.1,2398-2416).
ctcgtccttcactcaactt

SEQ ID NO: 527139 - DNA, 19 bp, Mus musculus
  siRNA target sequence for Phka1 (NM_008832.1,2455-2473).
cttccgttcatgtagaagt

SEQ ID NO: 527140 - DNA, 19 bp, Mus musculus
  siRNA target sequence for Phka1 (NM_008832.1,2505-2523).
gacttccagtcattggttt

SEQ ID NO: 527141 - DNA, 19 bp, Mus musculus
  siRNA target sequence for Phka1 (NM_008832.1,2553-2571).
gagcaagctgatatactct

SEQ ID NO: 527142 - DNA, 19 bp, Mus musculus
  siRNA target sequence for Phka1 (NM_008832.1,2598-2616).
gactggaacactgaattgt

SEQ ID NO: 527143 - DNA, 19 bp, Mus musculus
  siRNA target sequence for Phka1 (NM_008832.1,2602-2620).
ggaacactgaattgtatga

SEQ ID NO: 527144 - DNA, 19 bp, Mus musculus
  siRNA target sequence for Phka1 (NM_008832.1,2645-2663).
gcttcttagtgaactgtat

SEQ ID NO: 527145 - DNA, 19 bp, Mus musculus
  siRNA target sequence for Phka1 (NM_008832.1,2649-2667).
cttagtgaactgtatgtca

SEQ ID NO: 527146 - DNA, 19 bp, Mus musculus
  siRNA target sequence for Phka1 (NM_008832.1,2689-2707).
ggggtctgatccgatatat

SEQ ID NO: 527147 - DNA, 19 bp, Mus musculus
  siRNA target sequence for Phka1 (NM_008832.1,2691-2709).
ggtctgatccgatatatct

SEQ ID NO: 527148 - DNA, 19 bp, Mus musculus
  siRNA target sequence for Phka1 (NM_008832.1,2726-2744).
gaaagtggaggcacttgat

SEQ ID NO: 527149 - DNA, 19 bp, Mus musculus
  siRNA target sequence for Phka1 (NM_008832.1,2836-2854).
cgtacgaggcactcactaa

SEQ ID NO: 527150 - DNA, 19 bp, Mus musculus
  siRNA target sequence for Phka1 (NM_008832.1,2896-2914).
cccttacacaggaaataat

SEQ ID NO: 527151 - DNA, 19 bp, Mus musculus
  siRNA target sequence for Phka1 (NM_008832.1,2922-2940).
cttgccatgtatatgagaa

SEQ ID NO: 527152 - DNA, 19 bp, Mus musculus
  siRNA target sequence for Phka1 (NM_008832.1,2971-2989).
gacttcgaatcggtttgat

SEQ ID NO: 527153 - DNA, 19 bp, Mus musculus
  siRNA target sequence for Phka1 (NM_008832.1,2973-2991).
cttcgaatcggtttgatca

SEQ ID NO: 527154 - DNA, 19 bp, Mus musculus
  siRNA target sequence for Phka1 (NM_008832.1,2977-2995).
gaatcggtttgatcataca

SEQ ID NO: 527155 - DNA, 19 bp, Mus musculus
  siRNA target sequence for Phka1 (NM_008832.1,3138-3156).
gttcgtcccactgattcaa

SEQ ID NO: 527156 - DNA, 19 bp, Mus musculus
  siRNA target sequence for Phka1 (NM_008832.1,3142-3160).
gtcccactgattcaaatgt

SEQ ID NO: 527157 - DNA, 19 bp, Mus musculus
  siRNA target sequence for Phka1 (NM_008832.1,3144-3162).
cccactgattcaaatgtga

SEQ ID NO: 527158 - DNA, 19 bp, Mus musculus
  siRNA target sequence for Phka1 (NM_008832.1,3230-3248).
gcagttaaaaagtgagata

SEQ ID NO: 527159 - DNA, 19 bp, Mus musculus
  siRNA target sequence for Phka1 (NM_008832.1,3231-3249).
cagttaaaaagtgagataa

SEQ ID NO: 527160 - DNA, 19 bp, Mus musculus
  siRNA target sequence for Phka1 (NM_008832.1,3309-3327).
ccctcgggtgtagatttga

SEQ ID NO: 527161 - DNA, 19 bp, Mus musculus
  siRNA target sequence for Phka1 (NM_008832.1,3385-3403).
ctacggtgtgtgatcatca

SEQ ID NO: 527162 - DNA, 19 bp, Mus musculus
  siRNA target sequence for Phka1 (NM_008832.1,3394-3412).
gtgatcatcagacatctaa

SEQ ID NO: 527163 - DNA, 19 bp, Mus musculus
  siRNA target sequence for Phka1 (NM_008832.1,3450-3468).
ctagatggagcactaaata

SEQ ID NO: 527164 - DNA, 19 bp, Mus musculus
  siRNA target sequence for Phka1 (NM_008832.1,3460-3478).
cactaaatagagtaccaat

SEQ ID NO: 527165 - DNA, 19 bp, Mus musculus
  siRNA target sequence for Phka1 (NM_008832.1,3469-3487).
gagtaccaattggatttta

SEQ ID NO: 527166 - DNA, 19 bp, Mus musculus
  siRNA target sequence for Phka1 (NM_008832.1,3569-3587).
gatgaccccaggtgagatt

SEQ ID NO: 527167 - DNA, 19 bp, Mus musculus
  siRNA target sequence for Phka1 (NM_008832.1,3572-3590).
gaccccaggtgagattaaa

SEQ ID NO: 527168 - DNA, 19 bp, Mus musculus
  siRNA target sequence for Phka1 (NM_008832.1,3576-3594).
ccaggtgagattaaattct

SEQ ID NO: 527169 - DNA, 19 bp, Mus musculus
  siRNA target sequence for Phka1 (NM_008832.1,3634-3652).
cagaataccgccaacttct

SEQ ID NO: 527170 - DNA, 19 bp, Mus musculus
  siRNA target sequence for Phka1 (NM_173021.1,584-602).
gtacagtcagagtactaaa

SEQ ID NO: 527171 - DNA, 19 bp, Mus musculus
  siRNA target sequence for Phka1 (NM_173021.1,587-605).
cagtcagagtactaaagat

SEQ ID NO: 527172 - DNA, 19 bp, Mus musculus
  siRNA target sequence for Phka1 (NM_173021.1,1194-1212).
gatcccaatcgcctatact

SEQ ID NO: 527173 - DNA, 19 bp, Mus musculus
  siRNA target sequence for Phka1 (NM_173021.1,1198-1216).
ccaatcgcctatactatga

SEQ ID NO: 527174 - DNA, 19 bp, Mus musculus
  siRNA target sequence for Phka1 (NM_173021.1,1199-1217).
caatcgcctatactatgaa

SEQ ID NO: 527175 - DNA, 19 bp, Mus musculus
  siRNA target sequence for Phka1 (NM_173021.1,2230-2248).
caagtaatgatgttcacat

SEQ ID NO: 527176 - DNA, 19 bp, Mus musculus
  siRNA target sequence for Phka1 (NM_173021.1,2233-2251).
gtaatgatgttcacatgta

SEQ ID NO: 527177 - DNA, 19 bp, Mus musculus
  siRNA target sequence for Phka1 (NM_173021.1,2249-2267).
gtatcttcctacaaagtta

SEQ ID NO: 527178 - DNA, 19 bp, Mus musculus
  siRNA target sequence for Phka2 (NM_172783.1,141-159).
gcggagcaggagcaattct

SEQ ID NO: 527179 - DNA, 19 bp, Mus musculus
  siRNA target sequence for Phka2 (NM_172783.1,220-238).
ccagtcactgggctgttat

SEQ ID NO: 527180 - DNA, 19 bp, Mus musculus
  siRNA target sequence for Phka2 (NM_172783.1,262-280).
gcctgggtacgggacaata

SEQ ID NO: 527181 - DNA, 19 bp, Mus musculus
  siRNA target sequence for Phka2 (NM_172783.1,263-281).
cctgggtacgggacaatat

SEQ ID NO: 527182 - DNA, 19 bp, Mus musculus
  siRNA target sequence for Phka2 (NM_172783.1,267-285).
ggtacgggacaatatctat

SEQ ID NO: 527183 - DNA, 19 bp, Mus musculus
  siRNA target sequence for Phka2 (NM_172783.1,268-286).
gtacgggacaatatctata

SEQ ID NO: 527184 - DNA, 19 bp, Mus musculus
  siRNA target sequence for Phka2 (NM_172783.1,271-289).
cgggacaatatctatagca

SEQ ID NO: 527185 - DNA, 19 bp, Mus musculus
  siRNA target sequence for Phka2 (NM_172783.1,272-290).
gggacaatatctatagcat

SEQ ID NO: 527186 - DNA, 19 bp, Mus musculus
  siRNA target sequence for Phka2 (NM_172783.1,274-292).
gacaatatctatagcatat

SEQ ID NO: 527187 - DNA, 19 bp, Mus musculus
  siRNA target sequence for Phka2 (NM_172783.1,312-330).
catggcctaccgcaagaat

SEQ ID NO: 527188 - DNA, 19 bp, Mus musculus
  siRNA target sequence for Phka2 (NM_172783.1,395-413).
gaggtcttctccagtgtat

SEQ ID NO: 527189 - DNA, 19 bp, Mus musculus
  siRNA target sequence for Phka2 (NM_172783.1,586-604).
gcctcaggtttgcgtatta

SEQ ID NO: 527190 - DNA, 19 bp, Mus musculus
  siRNA target sequence for Phka2 (NM_172783.1,592-610).
ggtttgcgtattattttta

SEQ ID NO: 527191 - DNA, 19 bp, Mus musculus
  siRNA target sequence for Phka2 (NM_172783.1,624-642).
ggccttcatacagaatctt

SEQ ID NO: 527192 - DNA, 19 bp, Mus musculus
  siRNA target sequence for Phka2 (NM_172783.1,662-680).
catataaagttgctgatta

SEQ ID NO: 527193 - DNA, 19 bp, Mus musculus
  siRNA target sequence for Phka2 (NM_172783.1,687-705).
gtgggagcgtggagataaa

SEQ ID NO: 527194 - DNA, 19 bp, Mus musculus
  siRNA target sequence for Phka2 (NM_172783.1,691-709).
gagcgtggagataaaacca

SEQ ID NO: 527195 - DNA, 19 bp, Mus musculus
  siRNA target sequence for Phka2 (NM_172783.1,714-732).
gggcattccggaactgaat

SEQ ID NO: 527196 - DNA, 19 bp, Mus musculus
  siRNA target sequence for Phka2 (NM_172783.1,768-786).
ggccattgatgaactagat

SEQ ID NO: 527197 - DNA, 19 bp, Mus musculus
  siRNA target sequence for Phka2 (NM_172783.1,771-789).
cattgatgaactagatctt

SEQ ID NO: 527198 - DNA, 19 bp, Mus musculus
  siRNA target sequence for Phka2 (NM_172783.1,822-840).
ccacgtcctacctgatgaa

SEQ ID NO: 527199 - DNA, 19 bp, Mus musculus
  siRNA target sequence for Phka2 (NM_172783.1,825-843).
cgtcctacctgatgaagtt

SEQ ID NO: 527200 - DNA, 19 bp, Mus musculus
  siRNA target sequence for Phka2 (NM_172783.1,846-864).
gcactgccagtcaattctt

SEQ ID NO: 527201 - DNA, 19 bp, Mus musculus
  siRNA target sequence for Phka2 (NM_172783.1,873-891).
gttgccaagagcatcaaca

SEQ ID NO: 527202 - DNA, 19 bp, Mus musculus
  siRNA target sequence for Phka2 (NM_172783.1,877-895).
ccaagagcatcaacatcta

SEQ ID NO: 527203 - DNA, 19 bp, Mus musculus
  siRNA target sequence for Phka2 (NM_172783.1,887-905).
caacatctaaagaaatcga

SEQ ID NO: 527204 - DNA, 19 bp, Mus musculus
  siRNA target sequence for Phka2 (NM_172783.1,903-921).
cgatgctggacttctttct

SEQ ID NO: 527205 - DNA, 19 bp, Mus musculus
  siRNA target sequence for Phka2 (NM_172783.1,904-922).
gatgctggacttctttcta

SEQ ID NO: 527206 - DNA, 19 bp, Mus musculus
  siRNA target sequence for Phka2 (NM_172783.1,936-954).
ggcctttgcagtagaagat

SEQ ID NO: 527207 - DNA, 19 bp, Mus musculus
  siRNA target sequence for Phka2 (NM_172783.1,961-979).
cttgtgaatgtgaccaaaa

SEQ ID NO: 527208 - DNA, 19 bp, Mus musculus
  siRNA target sequence for Phka2 (NM_172783.1,1056-1074).
ggatccacaccgattgcat

SEQ ID NO: 527209 - DNA, 19 bp, Mus musculus
  siRNA target sequence for Phka2 (NM_172783.1,1057-1075).
gatccacaccgattgcatt

SEQ ID NO: 527210 - DNA, 19 bp, Mus musculus
  siRNA target sequence for Phka2 (NM_172783.1,1061-1079).
cacaccgattgcattatga

SEQ ID NO: 527211 - DNA, 19 bp, Mus musculus
  siRNA target sequence for Phka2 (NM_172783.1,1085-1103).
ccgaacttaagctctttga

SEQ ID NO: 527212 - DNA, 19 bp, Mus musculus
  siRNA target sequence for Phka2 (NM_172783.1,1086-1104).
cgaacttaagctctttgaa

SEQ ID NO: 527213 - DNA, 19 bp, Mus musculus
  siRNA target sequence for Phka2 (NM_172783.1,1123-1141).
cctgtgttctggacttatt

SEQ ID NO: 527214 - DNA, 19 bp, Mus musculus
  siRNA target sequence for Phka2 (NM_172783.1,1124-1142).
ctgtgttctggacttattt

SEQ ID NO: 527215 - DNA, 19 bp, Mus musculus
  siRNA target sequence for Phka2 (NM_172783.1,1131-1149).
ctggacttatttaatcata

SEQ ID NO: 527216 - DNA, 19 bp, Mus musculus
  siRNA target sequence for Phka2 (NM_172783.1,1171-1189).
gctgttcaggtccaagaat

SEQ ID NO: 527217 - DNA, 19 bp, Mus musculus
  siRNA target sequence for Phka2 (NM_172783.1,1172-1190).
ctgttcaggtccaagaata

SEQ ID NO: 527218 - DNA, 19 bp, Mus musculus
  siRNA target sequence for Phka2 (NM_172783.1,1278-1296).
ggatgaagagtataagaat

SEQ ID NO: 527219 - DNA, 19 bp, Mus musculus
  siRNA target sequence for Phka2 (NM_172783.1,1374-1392).
gctagcagagggattcctt

SEQ ID NO: 527220 - DNA, 19 bp, Mus musculus
  siRNA target sequence for Phka2 (NM_172783.1,1400-1418).
gtgaaatcgatcccttaaa

SEQ ID NO: 527221 - DNA, 19 bp, Mus musculus
  siRNA target sequence for Phka2 (NM_172783.1,1402-1420).
gaaatcgatcccttaaata

SEQ ID NO: 527222 - DNA, 19 bp, Mus musculus
  siRNA target sequence for Phka2 (NM_172783.1,1407-1425).
cgatcccttaaatagaaga

SEQ ID NO: 527223 - DNA, 19 bp, Mus musculus
  siRNA target sequence for Phka2 (NM_172783.1,1408-1426).
gatcccttaaatagaagat

SEQ ID NO: 527224 - DNA, 19 bp, Mus musculus
  siRNA target sequence for Phka2 (NM_172783.1,1436-1454).
cagtcaaacctgatgttgt

SEQ ID NO: 527225 - DNA, 19 bp, Mus musculus
  siRNA target sequence for Phka2 (NM_172783.1,1473-1491).
ggcagaaaacagtcacatt

SEQ ID NO: 527226 - DNA, 19 bp, Mus musculus
  siRNA target sequence for Phka2 (NM_172783.1,1560-1578).
gccaggccgaattcttagt

SEQ ID NO: 527227 - DNA, 19 bp, Mus musculus
  siRNA target sequence for Phka2 (NM_172783.1,1562-1580).
caggccgaattcttagtca

SEQ ID NO: 527228 - DNA, 19 bp, Mus musculus
  siRNA target sequence for Phka2 (NM_172783.1,1588-1606).
gccaaacttggacgaaata

SEQ ID NO: 527229 - DNA, 19 bp, Mus musculus
  siRNA target sequence for Phka2 (NM_172783.1,1594-1612).
cttggacgaaataagaata

SEQ ID NO: 527230 - DNA, 19 bp, Mus musculus
  siRNA target sequence for Phka2 (NM_172783.1,1597-1615).
ggacgaaataagaatatga

SEQ ID NO: 527231 - DNA, 19 bp, Mus musculus
  siRNA target sequence for Phka2 (NM_172783.1,1680-1698).
gaatcacatcttcactttt

SEQ ID NO: 527232 - DNA, 19 bp, Mus musculus
  siRNA target sequence for Phka2 (NM_172783.1,1712-1730).
ctgaccagcatcacttcta

SEQ ID NO: 527233 - DNA, 19 bp, Mus musculus
  siRNA target sequence for Phka2 (NM_172783.1,1873-1891).
catcctgcagttctttcta

SEQ ID NO: 527234 - DNA, 19 bp, Mus musculus
  siRNA target sequence for Phka2 (NM_172783.1,1960-1978).
cttactacctcattctaca

SEQ ID NO: 527235 - DNA, 19 bp, Mus musculus
  siRNA target sequence for Phka2 (NM_172783.1,2002-2020).
gactgcgatgagaagttgt

SEQ ID NO: 527236 - DNA, 19 bp, Mus musculus
  siRNA target sequence for Phka2 (NM_172783.1,2004-2022).
ctgcgatgagaagttgttt

SEQ ID NO: 527237 - DNA, 19 bp, Mus musculus
  siRNA target sequence for Phka2 (NM_172783.1,2110-2128).
gatgaacttgaccagtata

SEQ ID NO: 527238 - DNA, 19 bp, Mus musculus
  siRNA target sequence for Phka2 (NM_172783.1,2143-2161).
caaagcacatccttgaagt

SEQ ID NO: 527239 - DNA, 19 bp, Mus musculus
  siRNA target sequence for Phka2 (NM_172783.1,2147-2165).
gcacatccttgaagtgtta

SEQ ID NO: 527240 - DNA, 19 bp, Mus musculus
  siRNA target sequence for Phka2 (NM_172783.1,2261-2279).
gtttggaaactacattttt

SEQ ID NO: 527241 - DNA, 19 bp, Mus musculus
  siRNA target sequence for Phka2 (NM_172783.1,2282-2300).
ccatgattttgccaactaa

SEQ ID NO: 527242 - DNA, 19 bp, Mus musculus
  siRNA target sequence for Phka2 (NM_172783.1,2286-2304).
gattttgccaactaaagtt

SEQ ID NO: 527243 - DNA, 19 bp, Mus musculus
  siRNA target sequence for Phka2 (NM_172783.1,2316-2334).
ccgtaagtcactgaatctt

SEQ ID NO: 527244 - DNA, 19 bp, Mus musculus
  siRNA target sequence for Phka2 (NM_172783.1,2363-2381).
cgactcctgaatatgacta

SEQ ID NO: 527245 - DNA, 19 bp, Mus musculus
  siRNA target sequence for Phka2 (NM_172783.1,2424-2442).
gctagttgggcaactgaaa

SEQ ID NO: 527246 - DNA, 19 bp, Mus musculus
  siRNA target sequence for Phka2 (NM_172783.1,2501-2519).
gtccccgctgggataccaa

SEQ ID NO: 527247 - DNA, 19 bp, Mus musculus
  siRNA target sequence for Phka2 (NM_172783.1,2503-2521).
ccccgctgggataccaatt

SEQ ID NO: 527248 - DNA, 19 bp, Mus musculus
  siRNA target sequence for Phka2 (NM_172783.1,2504-2522).
cccgctgggataccaattt

SEQ ID NO: 527249 - DNA, 19 bp, Mus musculus
  siRNA target sequence for Phka2 (NM_172783.1,2506-2524).
cgctgggataccaatttgt

SEQ ID NO: 527250 - DNA, 19 bp, Mus musculus
  siRNA target sequence for Phka2 (NM_172783.1,2507-2525).
gctgggataccaatttgtt

SEQ ID NO: 527251 - DNA, 19 bp, Mus musculus
  siRNA target sequence for Phka2 (NM_172783.1,2557-2575).
ctcagcgagctctatggaa

SEQ ID NO: 527252 - DNA, 19 bp, Mus musculus
  siRNA target sequence for Phka2 (NM_172783.1,2589-2607).
ccaagaatggagtttgatt

SEQ ID NO: 527253 - DNA, 19 bp, Mus musculus
  siRNA target sequence for Phka2 (NM_172783.1,2679-2697).
ccagaagcagcttacagta

SEQ ID NO: 527254 - DNA, 19 bp, Mus musculus
  siRNA target sequence for Phka2 (NM_172783.1,2716-2734).
cgggagaagaccatatcta

SEQ ID NO: 527255 - DNA, 19 bp, Mus musculus
  siRNA target sequence for Phka2 (NM_172783.1,2752-2770).
gagctcacagaactcatat

SEQ ID NO: 527256 - DNA, 19 bp, Mus musculus
  siRNA target sequence for Phka2 (NM_172783.1,2754-2772).
gctcacagaactcatatat

SEQ ID NO: 527257 - DNA, 19 bp, Mus musculus
  siRNA target sequence for Phka2 (NM_172783.1,2757-2775).
cacagaactcatatatgaa

SEQ ID NO: 527258 - DNA, 19 bp, Mus musculus
  siRNA target sequence for Phka2 (NM_172783.1,2810-2828).
cacaggagatcgtggttta

SEQ ID NO: 527259 - DNA, 19 bp, Mus musculus
  siRNA target sequence for Phka2 (NM_172783.1,2879-2897).
gactccggattggattgat

SEQ ID NO: 527260 - DNA, 19 bp, Mus musculus
  siRNA target sequence for Phka2 (NM_172783.1,2881-2899).
ctccggattggattgatca

SEQ ID NO: 527261 - DNA, 19 bp, Mus musculus
  siRNA target sequence for Phka2 (NM_172783.1,3041-3059).
gaagcgtgcgcccaataca

SEQ ID NO: 527262 - DNA, 19 bp, Mus musculus
  siRNA target sequence for Phka2 (NM_172783.1,3090-3108).
ccatgaggtgggtcatact

SEQ ID NO: 527263 - DNA, 19 bp, Mus musculus
  siRNA target sequence for Phka2 (NM_172783.1,3103-3121).
catactggagccaccaaaa

SEQ ID NO: 527264 - DNA, 19 bp, Mus musculus
  siRNA target sequence for Phka2 (NM_172783.1,3216-3234).
catgtccaacagtttgcat

SEQ ID NO: 527265 - DNA, 19 bp, Mus musculus
  siRNA target sequence for Phka2 (NM_172783.1,3271-3289).
ccgacaggcacatcatcta

SEQ ID NO: 527266 - DNA, 19 bp, Mus musculus
  siRNA target sequence for Phka2 (NM_172783.1,3374-3392).
gggtccccgtgggattcta

SEQ ID NO: 527267 - DNA, 19 bp, Mus musculus
  siRNA target sequence for Phka2 (NM_172783.1,3428-3446).
gcctgtccatcgatggtta

SEQ ID NO: 527268 - DNA, 19 bp, Mus musculus
  siRNA target sequence for Phka2 (NM_172783.1,3577-3595).
ctgactctgctctcagata

SEQ ID NO: 527269 - DNA, 19 bp, Mus musculus
  siRNA target sequence for Phka2 (NM_172783.1,3666-3684).
gcaggaccaggtgtcattt

SEQ ID NO: 527270 - DNA, 19 bp, Mus musculus
  siRNA target sequence for Phka2 (NM_172783.1,3709-3727).
gaccaagccacaggaattt

SEQ ID NO: 527271 - DNA, 19 bp, Mus musculus
  siRNA target sequence for Phka2 (NM_172783.1,3722-3740).
gaatttgccacctctttta

SEQ ID NO: 527272 - DNA, 19 bp, Mus musculus
  siRNA target sequence for Phka2 (NM_172783.1,3751-3769).
cctagtggggcttatggta

SEQ ID NO: 527273 - DNA, 19 bp, Mus musculus
  siRNA target sequence for Phka2 (NM_172783.1,3757-3775).
ggggcttatggtacaatga

SEQ ID NO: 527274 - DNA, 19 bp, Mus musculus
  siRNA target sequence for Phka2 (NM_172783.1,3766-3784).
ggtacaatgacctacctaa

SEQ ID NO: 527275 - DNA, 19 bp, Mus musculus
  siRNA target sequence for Phka2 (NM_172783.1,3770-3788).
caatgacctacctaacaaa

SEQ ID NO: 527276 - DNA, 19 bp, Mus musculus
  siRNA target sequence for Phka2 (NM_172783.1,3791-3809).
cggtcgcttctcatttgca

SEQ ID NO: 527277 - DNA, 19 bp, Mus musculus
  siRNA target sequence for Ppp3cc (NM_008915.1,245-263).
cgaccgagcgcgtcatcaa

SEQ ID NO: 527278 - DNA, 19 bp, Mus musculus
  siRNA target sequence for Ppp3cc (NM_008915.1,246-264).
gaccgagcgcgtcatcaaa

SEQ ID NO: 527279 - DNA, 19 bp, Mus musculus
  siRNA target sequence for Ppp3cc (NM_008915.1,281-299).
caacccgacggctaacttt

SEQ ID NO: 527280 - DNA, 19 bp, Mus musculus
  siRNA target sequence for Ppp3cc (NM_008915.1,495-513).
cctgatgaagttgtttgaa

SEQ ID NO: 527281 - DNA, 19 bp, Mus musculus
  siRNA target sequence for Ppp3cc (NM_008915.1,517-535).
gggggatcacctagtaata

SEQ ID NO: 527282 - DNA, 19 bp, Mus musculus
  siRNA target sequence for Ppp3cc (NM_008915.1,519-537).
gggatcacctagtaatact

SEQ ID NO: 527283 - DNA, 19 bp, Mus musculus
  siRNA target sequence for Ppp3cc (NM_008915.1,605-623).
ggagcttaaagattaacca

SEQ ID NO: 527284 - DNA, 19 bp, Mus musculus
  siRNA target sequence for Ppp3cc (NM_008915.1,606-624).
gagcttaaagattaaccat

SEQ ID NO: 527285 - DNA, 19 bp, Mus musculus
  siRNA target sequence for Ppp3cc (NM_008915.1,615-633).
gattaaccatcctaaaaca

SEQ ID NO: 527286 - DNA, 19 bp, Mus musculus
  siRNA target sequence for Ppp3cc (NM_008915.1,694-712).
caggaatgtcggatcaagt

SEQ ID NO: 527287 - DNA, 19 bp, Mus musculus
  siRNA target sequence for Ppp3cc (NM_008915.1,701-719).
gtcggatcaagtattcaga

SEQ ID NO: 527288 - DNA, 19 bp, Mus musculus
  siRNA target sequence for Ppp3cc (NM_008915.1,812-830).
ctcctgaaattacttgttt

SEQ ID NO: 527289 - DNA, 19 bp, Mus musculus
  siRNA target sequence for Ppp3cc (NM_008915.1,843-861).
gaaattagataggttttct

SEQ ID NO: 527290 - DNA, 19 bp, Mus musculus
  siRNA target sequence for Ppp3cc (NM_008915.1,1060-1078).
gcggggtaccgaatgtata

SEQ ID NO: 527291 - DNA, 19 bp, Mus musculus
  siRNA target sequence for Ppp3cc (NM_008915.1,1094-1112).
ctggctttccgtcacttat

SEQ ID NO: 527292 - DNA, 19 bp, Mus musculus
  siRNA target sequence for Ppp3cc (NM_008915.1,1096-1114).
ggctttccgtcacttatta

SEQ ID NO: 527293 - DNA, 19 bp, Mus musculus
  siRNA target sequence for Ppp3cc (NM_008915.1,1102-1120).
ccgtcacttattacgattt

SEQ ID NO: 527294 - DNA, 19 bp, Mus musculus
  siRNA target sequence for Ppp3cc (NM_008915.1,1103-1121).
cgtcacttattacgatttt

SEQ ID NO: 527295 - DNA, 19 bp, Mus musculus
  siRNA target sequence for Ppp3cc (NM_008915.1,1122-1140).
ctctgcccctaattaccta

SEQ ID NO: 527296 - DNA, 19 bp, Mus musculus
  siRNA target sequence for Ppp3cc (NM_008915.1,1137-1155).
cctagatgtctataacaat

SEQ ID NO: 527297 - DNA, 19 bp, Mus musculus
  siRNA target sequence for Ppp3cc (NM_008915.1,1138-1156).
ctagatgtctataacaata

SEQ ID NO: 527298 - DNA, 19 bp, Mus musculus
  siRNA target sequence for Ppp3cc (NM_008915.1,1324-1342).
gatgaagaaatgaacgtaa

SEQ ID NO: 527299 - DNA, 19 bp, Mus musculus
  siRNA target sequence for Ppp3cc (NM_008915.1,1335-1353).
gaacgtaaccgatgaagaa

SEQ ID NO: 527300 - DNA, 19 bp, Mus musculus
  siRNA target sequence for Ppp3cc (NM_008915.1,1358-1376).
ctactacaggtcgaaaaga

SEQ ID NO: 527301 - DNA, 19 bp, Mus musculus
  siRNA target sequence for Ppp3cc (NM_008915.1,1364-1382).
caggtcgaaaagaagtcat

SEQ ID NO: 527302 - DNA, 19 bp, Mus musculus
  siRNA target sequence for Ppp3cc (NM_008915.1,1367-1385).
gtcgaaaagaagtcatcaa

SEQ ID NO: 527303 - DNA, 19 bp, Mus musculus
  siRNA target sequence for Ppp3cc (NM_008915.1,1369-1387).
cgaaaagaagtcatcaaga

SEQ ID NO: 527304 - DNA, 19 bp, Mus musculus
  siRNA target sequence for Ppp3cc (NM_008915.1,1590-1608).
caggatccgaagttttgaa

SEQ ID NO: 527305 - DNA, 19 bp, Mus musculus
  siRNA target sequence for Ppp3cc (NM_008915.1,1615-1633).
cgaggtctagaccgaatta

SEQ ID NO: 527306 - DNA, 19 bp, Mus musculus
  siRNA target sequence for Ppp3cc (NM_008915.1,1616-1634).
gaggtctagaccgaattaa

SEQ ID NO: 527307 - DNA, 19 bp, Mus musculus
  siRNA target sequence for Ppp3cc (NM_008915.1,1649-1667).
cccgaaaagaggcttcata

SEQ ID NO: 527308 - DNA, 19 bp, Mus musculus
  siRNA target sequence for Ppp3cc (NM_008915.1,1650-1668).
ccgaaaagaggcttcatat

SEQ ID NO: 527309 - DNA, 19 bp, Mus musculus
  siRNA target sequence for Ppp3cc (NM_008915.1,1659-1677).
ggcttcatatcatcatgat

SEQ ID NO: 527310 - DNA, 19 bp, Mus musculus
  siRNA target sequence for Ppp3cc (NM_008915.1,1711-1729).
cacccacaggcgtcaagaa

SEQ ID NO: 527311 - DNA, 19 bp, Mus musculus
  siRNA target sequence for Ppp3cc (NM_008915.1,1727-1745).
gaaggaccgaccatggaaa

SEQ ID NO: 527312 - DNA, 19 bp, Mus musculus
  siRNA target sequence for Ppp3cc (NM_008915.1,1730-1748).
ggaccgaccatggaaagaa

SEQ ID NO: 527313 - DNA, 19 bp, Mus musculus
  siRNA target sequence for Ppp3cc (NM_008915.1,1731-1749).
gaccgaccatggaaagaaa

SEQ ID NO: 527314 - DNA, 19 bp, Mus musculus
  siRNA target sequence for Slc8a1 (NM_011406.1,238-256).
gaatgtactggctcatatt

SEQ ID NO: 527315 - DNA, 19 bp, Mus musculus
  siRNA target sequence for Slc8a1 (NM_011406.1,248-266).
gctcatattactgtaagaa

SEQ ID NO: 527316 - DNA, 19 bp, Mus musculus
  siRNA target sequence for Slc8a1 (NM_011406.1,260-278).
gtaagaaaggggtgatctt

SEQ ID NO: 527317 - DNA, 19 bp, Mus musculus
  siRNA target sequence for Slc8a1 (NM_011406.1,322-340).
gctagagcaactgtgtatt

SEQ ID NO: 527318 - DNA, 19 bp, Mus musculus
  siRNA target sequence for Slc8a1 (NM_011406.1,387-405).
ccggtttatgtcctctata

SEQ ID NO: 527319 - DNA, 19 bp, Mus musculus
  siRNA target sequence for Slc8a1 (NM_011406.1,389-407).
ggtttatgtcctctataga

SEQ ID NO: 527320 - DNA, 19 bp, Mus musculus
  siRNA target sequence for Slc8a1 (NM_011406.1,464-482).
ccaagacgacggtgagaat

SEQ ID NO: 527321 - DNA, 19 bp, Mus musculus
  siRNA target sequence for Slc8a1 (NM_011406.1,559-577).
gaagtgtgcggccataact

SEQ ID NO: 527322 - DNA, 19 bp, Mus musculus
  siRNA target sequence for Slc8a1 (NM_011406.1,562-580).
gtgtgcggccataacttca

SEQ ID NO: 527323 - DNA, 19 bp, Mus musculus
  siRNA target sequence for Slc8a1 (NM_011406.1,736-754).
gcctatacctggctttata

SEQ ID NO: 527324 - DNA, 19 bp, Mus musculus
  siRNA target sequence for Slc8a1 (NM_011406.1,743-761).
cctggctttatataatctt

SEQ ID NO: 527325 - DNA, 19 bp, Mus musculus
  siRNA target sequence for Slc8a1 (NM_011406.1,857-875).
ggcggcttctcttttacaa

SEQ ID NO: 527326 - DNA, 19 bp, Mus musculus
  siRNA target sequence for Slc8a1 (NM_011406.1,906-924).
gcagagggggatgatcatt

SEQ ID NO: 527327 - DNA, 19 bp, Mus musculus
  siRNA target sequence for Slc8a1 (NM_011406.1,909-927).
gagggggatgatcattgaa

SEQ ID NO: 527328 - DNA, 19 bp, Mus musculus
  siRNA target sequence for Slc8a1 (NM_011406.1,911-929).
gggggatgatcattgaaca

SEQ ID NO: 527329 - DNA, 19 bp, Mus musculus
  siRNA target sequence for Slc8a1 (NM_011406.1,912-930).
ggggatgatcattgaacat

SEQ ID NO: 527330 - DNA, 19 bp, Mus musculus
  siRNA target sequence for Slc8a1 (NM_011406.1,914-932).
ggatgatcattgaacatga

SEQ ID NO: 527331 - DNA, 19 bp, Mus musculus
  siRNA target sequence for Slc8a1 (NM_011406.1,984-1002).
caactctcatgttgacaat

SEQ ID NO: 527332 - DNA, 19 bp, Mus musculus
  siRNA target sequence for Slc8a1 (NM_011406.1,1065-1083).
gcgtgagatggcaaggatt

SEQ ID NO: 527333 - DNA, 19 bp, Mus musculus
  siRNA target sequence for Slc8a1 (NM_011406.1,1146-1164).
ctaccaggtcctaagtcaa

SEQ ID NO: 527334 - DNA, 19 bp, Mus musculus
  siRNA target sequence for Slc8a1 (NM_011406.1,1156-1174).
ctaagtcaacagcagaaaa

SEQ ID NO: 527335 - DNA, 19 bp, Mus musculus
  siRNA target sequence for Slc8a1 (NM_011406.1,1167-1185).
gcagaaaagccgagcattt

SEQ ID NO: 527336 - DNA, 19 bp, Mus musculus
  siRNA target sequence for Slc8a1 (NM_011406.1,1214-1232).
ccggagctggcaacatctt

SEQ ID NO: 527337 - DNA, 19 bp, Mus musculus
  siRNA target sequence for Slc8a1 (NM_011406.1,1260-1278).
gaaggctgtcagtatgcat

SEQ ID NO: 527338 - DNA, 19 bp, Mus musculus
  siRNA target sequence for Slc8a1 (NM_011406.1,1265-1283).
ctgtcagtatgcatgaagt

SEQ ID NO: 527339 - DNA, 19 bp, Mus musculus
  siRNA target sequence for Slc8a1 (NM_011406.1,1406-1424).
gcaccactgtgtttgttga

SEQ ID NO: 527340 - DNA, 19 bp, Mus musculus
  siRNA target sequence for Slc8a1 (NM_011406.1,1453-1471).
gctgggtctgattatgaat

SEQ ID NO: 527341 - DNA, 19 bp, Mus musculus
  siRNA target sequence for Slc8a1 (NM_011406.1,1454-1472).
ctgggtctgattatgaatt

SEQ ID NO: 527342 - DNA, 19 bp, Mus musculus
  siRNA target sequence for Slc8a1 (NM_011406.1,1521-1539).
cagagttggcatcattgat

SEQ ID NO: 527343 - DNA, 19 bp, Mus musculus
  siRNA target sequence for Slc8a1 (NM_011406.1,1523-1541).
gagttggcatcattgatga

SEQ ID NO: 527344 - DNA, 19 bp, Mus musculus
  siRNA target sequence for Slc8a1 (NM_011406.1,1573-1591).
gtgcatcttagcaatgtca

SEQ ID NO: 527345 - DNA, 19 bp, Mus musculus
  siRNA target sequence for Slc8a1 (NM_011406.1,1631-1649).
ccaatcacgcttcttcaat

SEQ ID NO: 527346 - DNA, 19 bp, Mus musculus
  siRNA target sequence for Slc8a1 (NM_011406.1,1632-1650).
caatcacgcttcttcaatt

SEQ ID NO: 527347 - DNA, 19 bp, Mus musculus
  siRNA target sequence for Slc8a1 (NM_011406.1,1636-1654).
cacgcttcttcaattgctt

SEQ ID NO: 527348 - DNA, 19 bp, Mus musculus
  siRNA target sequence for Slc8a1 (NM_011406.1,1671-1689).
cactgccaccataaccatt

SEQ ID NO: 527349 - DNA, 19 bp, Mus musculus
  siRNA target sequence for Slc8a1 (NM_011406.1,1676-1694).
ccaccataaccatttttga

SEQ ID NO: 527350 - DNA, 19 bp, Mus musculus
  siRNA target sequence for Slc8a1 (NM_011406.1,1785-1803).
ctctggagctcgaggaaat

SEQ ID NO: 527351 - DNA, 19 bp, Mus musculus
  siRNA target sequence for Slc8a1 (NM_011406.1,1789-1807).
ggagctcgaggaaatgtta

SEQ ID NO: 527352 - DNA, 19 bp, Mus musculus
  siRNA target sequence for Slc8a1 (NM_011406.1,1792-1810).
gctcgaggaaatgttatca

SEQ ID NO: 527353 - DNA, 19 bp, Mus musculus
  siRNA target sequence for Slc8a1 (NM_011406.1,1804-1822).
gttatcattccctacaaaa

SEQ ID NO: 527354 - DNA, 19 bp, Mus musculus
  siRNA target sequence for Slc8a1 (NM_011406.1,1809-1827).
cattccctacaaaactatt

SEQ ID NO: 527355 - DNA, 19 bp, Mus musculus
  siRNA target sequence for Slc8a1 (NM_011406.1,1910-1928).
caatatcagtcaaggtaat

SEQ ID NO: 527356 - DNA, 19 bp, Mus musculus
  siRNA target sequence for Slc8a1 (NM_011406.1,2026-2044).
gagcttggtggcttcacat

SEQ ID NO: 527357 - DNA, 19 bp, Mus musculus
  siRNA target sequence for Slc8a1 (NM_011406.1,2042-2060).
cattaacaggaaaagagat

SEQ ID NO: 527358 - DNA, 19 bp, Mus musculus
  siRNA target sequence for Slc8a1 (NM_011406.1,2154-2172).
gccactgaccagcaaagaa

SEQ ID NO: 527359 - DNA, 19 bp, Mus musculus
  siRNA target sequence for Slc8a1 (NM_011406.1,2241-2259).
catcgaagagtcttacgaa

SEQ ID NO: 527360 - DNA, 19 bp, Mus musculus
  siRNA target sequence for Slc8a1 (NM_011406.1,2245-2263).
gaagagtcttacgaattca

SEQ ID NO: 527361 - DNA, 19 bp, Mus musculus
  siRNA target sequence for Slc8a1 (NM_011406.1,2248-2266).
gagtcttacgaattcaaga

SEQ ID NO: 527362 - DNA, 19 bp, Mus musculus
  siRNA target sequence for Slc8a1 (NM_011406.1,2275-2293).
gacaaactcattaagaaga

SEQ ID NO: 527363 - DNA, 19 bp, Mus musculus
  siRNA target sequence for Slc8a1 (NM_011406.1,2328-2346).
gagagagcagtttatcgaa

SEQ ID NO: 527364 - DNA, 19 bp, Mus musculus
  siRNA target sequence for Slc8a1 (NM_011406.1,2404-2422).
ctgccctcctgttttgatt

SEQ ID NO: 527365 - DNA, 19 bp, Mus musculus
  siRNA target sequence for Slc8a1 (NM_011406.1,2408-2426).
cctcctgttttgattacgt

SEQ ID NO: 527366 - DNA, 19 bp, Mus musculus
  siRNA target sequence for Slc8a1 (NM_011406.1,2466-2484).
cttcgtcccacctacagaa

SEQ ID NO: 527367 - DNA, 19 bp, Mus musculus
  siRNA target sequence for Slc8a1 (NM_011406.1,2532-2550).
cctactgaccgccttcatt

SEQ ID NO: 527368 - DNA, 19 bp, Mus musculus
  siRNA target sequence for Slc8a1 (NM_011406.1,2576-2594).
gcaccattggtctgaaaga

SEQ ID NO: 527369 - DNA, 19 bp, Mus musculus
  siRNA target sequence for Slc8a1 (NM_011406.1,2679-2697).
gtatgcagatgcgtctata

SEQ ID NO: 527370 - DNA, 19 bp, Mus musculus
  siRNA target sequence for Slc8a1 (NM_011406.1,2689-2707).
gcgtctataggcaatgtca

SEQ ID NO: 527371 - DNA, 19 bp, Mus musculus
  siRNA target sequence for Slc8a1 (NM_011406.1,2777-2795).
cggccaacggggaacagtt

SEQ ID NO: 527372 - DNA, 19 bp, Mus musculus
  siRNA target sequence for Slc8a1 (NM_011406.1,2785-2803).
ggggaacagttcaaagtgt

SEQ ID NO: 527373 - DNA, 19 bp, Mus musculus
  siRNA target sequence for Slc8a1 (NM_011406.1,2808-2826).
cggcacgctagctttctct

SEQ ID NO: 527374 - DNA, 19 bp, Mus musculus
  siRNA target sequence for Slc8a1 (NM_011406.1,2900-2918).
ccatcttcggaatgtcaat

SEQ ID NO: 527375 - DNA, 19 bp, Mus musculus
  siRNA target sequence for Slc8a1 (NM_011406.1,2901-2919).
catcttcggaatgtcaata

SEQ ID NO: 527376 - DNA, 19 bp, Mus musculus
  siRNA target sequence for Slc8a1 (NM_011406.1,2904-2922).
cttcggaatgtcaataatt

SEQ ID NO: 527377 - DNA, 19 bp, Mus musculus
  siRNA target sequence for Strn (NM_011500.1,445-463).
caaaatagccagttaatgt

SEQ ID NO: 527378 - DNA, 19 bp, Mus musculus
  siRNA target sequence for Strn (NM_011500.1,558-576).
gttgggcttttcaagtgat

SEQ ID NO: 527379 - DNA, 19 bp, Mus musculus
  siRNA target sequence for Strn (NM_011500.1,623-641).
gcacagaggctgaagttaa

SEQ ID NO: 527380 - DNA, 19 bp, Mus musculus
  siRNA target sequence for Strn (NM_011500.1,693-711).
ggacaatttcaaattcctt

SEQ ID NO: 527381 - DNA, 19 bp, Mus musculus
  siRNA target sequence for Strn (NM_011500.1,771-789).
caagagtgtcattgatact

SEQ ID NO: 527382 - DNA, 19 bp, Mus musculus
  siRNA target sequence for Strn (NM_011500.1,780-798).
cattgatacttccacaatt

SEQ ID NO: 527383 - DNA, 19 bp, Mus musculus
  siRNA target sequence for Strn (NM_011500.1,791-809).
ccacaattgttaggaaaaa

SEQ ID NO: 527384 - DNA, 19 bp, Mus musculus
  siRNA target sequence for Strn (NM_011500.1,889-907).
ggagacaacgaatctagaa

SEQ ID NO: 527385 - DNA, 19 bp, Mus musculus
  siRNA target sequence for Strn (NM_011500.1,979-997).
ggagtgatctccaaactga

SEQ ID NO: 527386 - DNA, 19 bp, Mus musculus
  siRNA target sequence for Strn (NM_011500.1,1036-1054).
gtgaagaggcccaataggt

SEQ ID NO: 527387 - DNA, 19 bp, Mus musculus
  siRNA target sequence for Strn (NM_011500.1,1043-1061).
ggcccaataggtcaaaact

SEQ ID NO: 527388 - DNA, 19 bp, Mus musculus
  siRNA target sequence for Strn (NM_011500.1,1044-1062).
gcccaataggtcaaaacta

SEQ ID NO: 527389 - DNA, 19 bp, Mus musculus
  siRNA target sequence for Strn (NM_011500.1,1083-1101).
gagagacgttgatgaactt

SEQ ID NO: 527390 - DNA, 19 bp, Mus musculus
  siRNA target sequence for Strn (NM_011500.1,1263-1281).
ggggcttggagaattagca

SEQ ID NO: 527391 - DNA, 19 bp, Mus musculus
  siRNA target sequence for Strn (NM_011500.1,1284-1302).
cctcacggtggccaatgaa

SEQ ID NO: 527392 - DNA, 19 bp, Mus musculus
  siRNA target sequence for Strn (NM_011500.1,1306-1324).
gactcactagcttatgata

SEQ ID NO: 527393 - DNA, 19 bp, Mus musculus
  siRNA target sequence for Strn (NM_011500.1,1316-1334).
cttatgatatagcgaataa

SEQ ID NO: 527394 - DNA, 19 bp, Mus musculus
  siRNA target sequence for Strn (NM_011500.1,1359-1377).
gaaccctaagtttacatta

SEQ ID NO: 527395 - DNA, 19 bp, Mus musculus
  siRNA target sequence for Strn (NM_011500.1,1373-1391).
cattaaggagtcactttga

SEQ ID NO: 527396 - DNA, 19 bp, Mus musculus
  siRNA target sequence for Strn (NM_011500.1,1394-1412).
gcatccgagcccttgcttt

SEQ ID NO: 527397 - DNA, 19 bp, Mus musculus
  siRNA target sequence for Strn (NM_011500.1,1450-1468).
gaccatacgctgaaaatgt

SEQ ID NO: 527398 - DNA, 19 bp, Mus musculus
  siRNA target sequence for Strn (NM_011500.1,1489-1507).
ccagccaaaaagagtactt

SEQ ID NO: 527399 - DNA, 19 bp, Mus musculus
  siRNA target sequence for Strn (NM_011500.1,1494-1512).
caaaaagagtacttctcta

SEQ ID NO: 527400 - DNA, 19 bp, Mus musculus
  siRNA target sequence for Strn (NM_011500.1,1513-1531).
gatgtggagcctatctata

SEQ ID NO: 527401 - DNA, 19 bp, Mus musculus
  siRNA target sequence for Strn (NM_011500.1,1516-1534).
gtggagcctatctatacat

SEQ ID NO: 527402 - DNA, 19 bp, Mus musculus
  siRNA target sequence for Strn (NM_011500.1,1771-1789).
ggcactcttcgcttatgga

SEQ ID NO: 527403 - DNA, 19 bp, Mus musculus
  siRNA target sequence for Strn (NM_011500.1,1772-1790).
gcactcttcgcttatggaa

SEQ ID NO: 527404 - DNA, 19 bp, Mus musculus
  siRNA target sequence for Strn (NM_011500.1,1773-1791).
cactcttcgcttatggaat

SEQ ID NO: 527405 - DNA, 19 bp, Mus musculus
  siRNA target sequence for Strn (NM_011500.1,1777-1795).
cttcgcttatggaatacaa

SEQ ID NO: 527406 - DNA, 19 bp, Mus musculus
  siRNA target sequence for Strn (NM_011500.1,1874-1892).
gcgacccgagccatatggt

SEQ ID NO: 527407 - DNA, 19 bp, Mus musculus
  siRNA target sequence for Strn (NM_011500.1,1875-1893).
cgacccgagccatatggta

SEQ ID NO: 527408 - DNA, 19 bp, Mus musculus
  siRNA target sequence for Strn (NM_011500.1,1908-1926).
gggatatacaagcatcttt

SEQ ID NO: 527409 - DNA, 19 bp, Mus musculus
  siRNA target sequence for Strn (NM_011500.1,1909-1927).
ggatatacaagcatcttta

SEQ ID NO: 527410 - DNA, 19 bp, Mus musculus
  siRNA target sequence for Strn (NM_011500.1,1910-1928).
gatatacaagcatctttaa

SEQ ID NO: 527411 - DNA, 19 bp, Mus musculus
  siRNA target sequence for Strn (NM_011500.1,1945-1963).
cgagttctcacgctagaat

SEQ ID NO: 527412 - DNA, 19 bp, Mus musculus
  siRNA target sequence for Strn (NM_011500.1,1953-1971).
cacgctagaatccaatgtt

SEQ ID NO: 527413 - DNA, 19 bp, Mus musculus
  siRNA target sequence for Strn (NM_011500.1,1955-1973).
cgctagaatccaatgttga

SEQ ID NO: 527414 - DNA, 19 bp, Mus musculus
  siRNA target sequence for Strn (NM_011500.1,1956-1974).
gctagaatccaatgttgat

SEQ ID NO: 527415 - DNA, 19 bp, Mus musculus
  siRNA target sequence for Strn (NM_011500.1,1957-1975).
ctagaatccaatgttgatt

SEQ ID NO: 527416 - DNA, 19 bp, Mus musculus
  siRNA target sequence for Strn (NM_011500.1,1960-1978).
gaatccaatgttgattcaa

SEQ ID NO: 527417 - DNA, 19 bp, Mus musculus
  siRNA target sequence for Strn (NM_011500.1,1972-1990).
gattcaacatccagttctt

SEQ ID NO: 527418 - DNA, 19 bp, Mus musculus
  siRNA target sequence for Strn (NM_011500.1,1985-2003).
gttcttcctgccaaataaa

SEQ ID NO: 527419 - DNA, 19 bp, Mus musculus
  siRNA target sequence for Strn (NM_011500.1,2059-2077).
cacatcaagttctacgata

SEQ ID NO: 527420 - DNA, 19 bp, Mus musculus
  siRNA target sequence for Strn (NM_011500.1,2064-2082).
caagttctacgataacaat

SEQ ID NO: 527421 - DNA, 19 bp, Mus musculus
  siRNA target sequence for Strn (NM_011500.1,2171-2189).
gcagtcatgactgttcaat

SEQ ID NO: 527422 - DNA, 19 bp, Mus musculus
  siRNA target sequence for Strn (NM_011500.1,2172-2190).
cagtcatgactgttcaata

SEQ ID NO: 527423 - DNA, 19 bp, Mus musculus
  siRNA target sequence for Strn (NM_011500.1,2183-2201).
gttcaatacgcttatggaa

SEQ ID NO: 527424 - DNA, 19 bp, Mus musculus
  siRNA target sequence for Strn (NM_011500.1,2186-2204).
caatacgcttatggaattt

SEQ ID NO: 527425 - DNA, 19 bp, Mus musculus
  siRNA target sequence for Strn (NM_011500.1,2193-2211).
cttatggaatttagaaagt

SEQ ID NO: 527426 - DNA, 19 bp, Mus musculus
  siRNA target sequence for Strn3 (NM_052973.1,474-492).
gcaggcacggattgcattt

SEQ ID NO: 527427 - DNA, 19 bp, Mus musculus
  siRNA target sequence for Strn3 (NM_052973.1,475-493).
caggcacggattgcatttt

SEQ ID NO: 527428 - DNA, 19 bp, Mus musculus
  siRNA target sequence for Strn3 (NM_052973.1,479-497).
cacggattgcatttttaca

SEQ ID NO: 527429 - DNA, 19 bp, Mus musculus
  siRNA target sequence for Strn3 (NM_052973.1,531-549).
ggatttagtgagaagaata

SEQ ID NO: 527430 - DNA, 19 bp, Mus musculus
  siRNA target sequence for Strn3 (NM_052973.1,545-563).
gaataaagatgttagagta

SEQ ID NO: 527431 - DNA, 19 bp, Mus musculus
  siRNA target sequence for Strn3 (NM_052973.1,552-570).
gatgttagagtatgcatta

SEQ ID NO: 527432 - DNA, 19 bp, Mus musculus
  siRNA target sequence for Strn3 (NM_052973.1,582-600).
ggcaaagtatcacaaatta

SEQ ID NO: 527433 - DNA, 19 bp, Mus musculus
  siRNA target sequence for Strn3 (NM_052973.1,618-636).
gaaccaaggtgatttgaaa

SEQ ID NO: 527434 - DNA, 19 bp, Mus musculus
  siRNA target sequence for Strn3 (NM_052973.1,688-706).
cctcagaatagtcaactaa

SEQ ID NO: 527435 - DNA, 19 bp, Mus musculus
  siRNA target sequence for Strn3 (NM_052973.1,714-732).
gcaaggcagacagctatta

SEQ ID NO: 527436 - DNA, 19 bp, Mus musculus
  siRNA target sequence for Strn3 (NM_052973.1,726-744).
gctattaagacagtatctt

SEQ ID NO: 527437 - DNA, 19 bp, Mus musculus
  siRNA target sequence for Strn3 (NM_052973.1,748-766).
gaagtaggatacacagata

SEQ ID NO: 527438 - DNA, 19 bp, Mus musculus
  siRNA target sequence for Strn3 (NM_052973.1,751-769).
gtaggatacacagatacaa

SEQ ID NO: 527439 - DNA, 19 bp, Mus musculus
  siRNA target sequence for Strn3 (NM_052973.1,754-772).
ggatacacagatacaatat

SEQ ID NO: 527440 - DNA, 19 bp, Mus musculus
  siRNA target sequence for Strn3 (NM_052973.1,761-779).
cagatacaatattagatgt

SEQ ID NO: 527441 - DNA, 19 bp, Mus musculus
  siRNA target sequence for Strn3 (NM_052973.1,825-843).
gccaaatggatctgtagaa

SEQ ID NO: 527442 - DNA, 19 bp, Mus musculus
  siRNA target sequence for Strn3 (NM_052973.1,874-892).
ggtgaatctcctaagcaaa

SEQ ID NO: 527443 - DNA, 19 bp, Mus musculus
  siRNA target sequence for Strn3 (NM_052973.1,875-893).
gtgaatctcctaagcaaaa

SEQ ID NO: 527444 - DNA, 19 bp, Mus musculus
  siRNA target sequence for Strn3 (NM_052973.1,920-938).
gtgatgttctcgagacatt

SEQ ID NO: 527445 - DNA, 19 bp, Mus musculus
  siRNA target sequence for Strn3 (NM_052973.1,925-943).
gttctcgagacattcaatt

SEQ ID NO: 527446 - DNA, 19 bp, Mus musculus
  siRNA target sequence for Strn3 (NM_052973.1,928-946).
ctcgagacattcaatttct

SEQ ID NO: 527447 - DNA, 19 bp, Mus musculus
  siRNA target sequence for Strn3 (NM_052973.1,939-957).
caatttcttagaaaatgct

SEQ ID NO: 527448 - DNA, 19 bp, Mus musculus
  siRNA target sequence for Strn3 (NM_052973.1,1012-1030).
gacaaacttcggatccata

SEQ ID NO: 527449 - DNA, 19 bp, Mus musculus
  siRNA target sequence for Strn3 (NM_052973.1,1021-1039).
cggatccataagcacaaaa

SEQ ID NO: 527450 - DNA, 19 bp, Mus musculus
  siRNA target sequence for Strn3 (NM_052973.1,1027-1045).
cataagcacaaaataggta

SEQ ID NO: 527451 - DNA, 19 bp, Mus musculus
  siRNA target sequence for Strn3 (NM_052973.1,1051-1069).
ggtttagctgctgacttaa

SEQ ID NO: 527452 - DNA, 19 bp, Mus musculus
  siRNA target sequence for Strn3 (NM_052973.1,1098-1116).
gaaagaattcgacttttta

SEQ ID NO: 527453 - DNA, 19 bp, Mus musculus
  siRNA target sequence for Strn3 (NM_052973.1,1219-1237).
gtagaccaggggctaataa

SEQ ID NO: 527454 - DNA, 19 bp, Mus musculus
  siRNA target sequence for Strn3 (NM_052973.1,1222-1240).
gaccaggggctaataagta

SEQ ID NO: 527455 - DNA, 19 bp, Mus musculus
  siRNA target sequence for Strn3 (NM_052973.1,1224-1242).
ccaggggctaataagtaaa

SEQ ID NO: 527456 - DNA, 19 bp, Mus musculus
  siRNA target sequence for Strn3 (NM_052973.1,1228-1246).
gggctaataagtaaactga

SEQ ID NO: 527457 - DNA, 19 bp, Mus musculus
  siRNA target sequence for Strn3 (NM_052973.1,1229-1247).
ggctaataagtaaactgaa

SEQ ID NO: 527458 - DNA, 19 bp, Mus musculus
  siRNA target sequence for Strn3 (NM_052973.1,1304-1322).
caaacctctgcgacatgat

SEQ ID NO: 527459 - DNA, 19 bp, Mus musculus
  siRNA target sequence for Strn3 (NM_052973.1,1377-1395).
gtctaggtcagcttctact

SEQ ID NO: 527460 - DNA, 19 bp, Mus musculus
  siRNA target sequence for Strn3 (NM_052973.1,1382-1400).
ggtcagcttctactagaat

SEQ ID NO: 527461 - DNA, 19 bp, Mus musculus
  siRNA target sequence for Strn3 (NM_052973.1,1429-1447).
gaagctgaaccaataacgt

SEQ ID NO: 527462 - DNA, 19 bp, Mus musculus
  siRNA target sequence for Strn3 (NM_052973.1,1435-1453).
gaaccaataacgtttccat

SEQ ID NO: 527463 - DNA, 19 bp, Mus musculus
  siRNA target sequence for Strn3 (NM_052973.1,1526-1544).
cagacttgacggtaacaaa

SEQ ID NO: 527464 - DNA, 19 bp, Mus musculus
  siRNA target sequence for Strn3 (NM_052973.1,1530-1548).
cttgacggtaacaaatgat

SEQ ID NO: 527465 - DNA, 19 bp, Mus musculus
  siRNA target sequence for Strn3 (NM_052973.1,1549-1567).
gcagactatagttatgatt

SEQ ID NO: 527466 - DNA, 19 bp, Mus musculus
  siRNA target sequence for Strn3 (NM_052973.1,1582-1600).
gatgcctttcgaaagactt

SEQ ID NO: 527467 - DNA, 19 bp, Mus musculus
  siRNA target sequence for Strn3 (NM_052973.1,1614-1632).
cacactacgtagtcatttt

SEQ ID NO: 527468 - DNA, 19 bp, Mus musculus
  siRNA target sequence for Strn3 (NM_052973.1,1693-1711).
gaccacaccctgaaacttt

SEQ ID NO: 527469 - DNA, 19 bp, Mus musculus
  siRNA target sequence for Strn3 (NM_052973.1,1743-1761).
gagtgcctctttagatgta

SEQ ID NO: 527470 - DNA, 19 bp, Mus musculus
  siRNA target sequence for Strn3 (NM_052973.1,1751-1769).
ctttagatgtagaacctat

SEQ ID NO: 527471 - DNA, 19 bp, Mus musculus
  siRNA target sequence for Strn3 (NM_052973.1,1759-1777).
gtagaacctatctacacat

SEQ ID NO: 527472 - DNA, 19 bp, Mus musculus
  siRNA target sequence for Strn3 (NM_052973.1,1762-1780).
gaacctatctacacattta

SEQ ID NO: 527473 - DNA, 19 bp, Mus musculus
  siRNA target sequence for Strn3 (NM_052973.1,1795-1813).
cctgtcctgtcattagcta

SEQ ID NO: 527474 - DNA, 19 bp, Mus musculus
  siRNA target sequence for Strn3 (NM_052973.1,1798-1816).
gtcctgtcattagctatta

SEQ ID NO: 527475 - DNA, 19 bp, Mus musculus
  siRNA target sequence for Strn3 (NM_052973.1,1800-1818).
cctgtcattagctattagt

SEQ ID NO: 527476 - DNA, 19 bp, Mus musculus
  siRNA target sequence for Strn3 (NM_052973.1,1803-1821).
gtcattagctattagttct

SEQ ID NO: 527477 - DNA, 19 bp, Mus musculus
  siRNA target sequence for Strn3 (NM_052973.1,1805-1823).
cattagctattagttctaa

SEQ ID NO: 527478 - DNA, 19 bp, Mus musculus
  siRNA target sequence for Strn3 (NM_052973.1,1872-1890).
gaatatgcctagtcctaat

SEQ ID NO: 527479 - DNA, 19 bp, Mus musculus
  siRNA target sequence for Strn3 (NM_052973.1,1891-1909).
gtggatccctatgatacat

SEQ ID NO: 527480 - DNA, 19 bp, Mus musculus
  siRNA target sequence for Strn3 (NM_052973.1,1893-1911).
ggatccctatgatacatat

SEQ ID NO: 527481 - DNA, 19 bp, Mus musculus
  siRNA target sequence for Strn3 (NM_052973.1,1897-1915).
ccctatgatacatatgagt

SEQ ID NO: 527482 - DNA, 19 bp, Mus musculus
  siRNA target sequence for Strn3 (NM_052973.1,1920-1938).
cgttctagctggcacttta

SEQ ID NO: 527483 - DNA, 19 bp, Mus musculus
  siRNA target sequence for Strn3 (NM_052973.1,1934-1952).
ctttagttgctcatacaga

SEQ ID NO: 527484 - DNA, 19 bp, Mus musculus
  siRNA target sequence for Strn3 (NM_052973.1,1969-1987).
gcctatagtggcataaaaa

SEQ ID NO: 527485 - DNA, 19 bp, Mus musculus
  siRNA target sequence for Strn3 (NM_052973.1,1976-1994).
gtggcataaaaaaccaatt

SEQ ID NO: 527486 - DNA, 19 bp, Mus musculus
  siRNA target sequence for Strn3 (NM_052973.1,1979-1997).
gcataaaaaaccaattact

SEQ ID NO: 527487 - DNA, 19 bp, Mus musculus
  siRNA target sequence for Strn3 (NM_052973.1,2011-2029).
gatggcactattaggttat

SEQ ID NO: 527488 - DNA, 19 bp, Mus musculus
  siRNA target sequence for Strn3 (NM_052973.1,2015-2033).
gcactattaggttatggaa

SEQ ID NO: 527489 - DNA, 19 bp, Mus musculus
  siRNA target sequence for Strn3 (NM_052973.1,2025-2043).
gttatggaacccacaagaa

SEQ ID NO: 527490 - DNA, 19 bp, Mus musculus
  siRNA target sequence for Strn3 (NM_052973.1,2119-2137).
gatccagcccatatggtta

SEQ ID NO: 527491 - DNA, 19 bp, Mus musculus
  siRNA target sequence for Strn3 (NM_052973.1,2128-2146).
catatggttacgtctttca

SEQ ID NO: 527492 - DNA, 19 bp, Mus musculus
  siRNA target sequence for Strn3 (NM_052973.1,2148-2166).
cactggtagtgcggtaatt

SEQ ID NO: 527493 - DNA, 19 bp, Mus musculus
  siRNA target sequence for Strn3 (NM_052973.1,2150-2168).
ctggtagtgcggtaattta

SEQ ID NO: 527494 - DNA, 19 bp, Mus musculus
  siRNA target sequence for Strn3 (NM_052973.1,2153-2171).
gtagtgcggtaatttatga

SEQ ID NO: 527495 - DNA, 19 bp, Mus musculus
  siRNA target sequence for Strn3 (NM_052973.1,2180-2198).
catcacagtcattagtgat

SEQ ID NO: 527496 - DNA, 19 bp, Mus musculus
  siRNA target sequence for Strn3 (NM_052973.1,2185-2203).
cagtcattagtgatgcttt

SEQ ID NO: 527497 - DNA, 19 bp, Mus musculus
  siRNA target sequence for Strn3 (NM_052973.1,2215-2233).
gattctggtttacaatcta

SEQ ID NO: 527498 - DNA, 19 bp, Mus musculus
  siRNA target sequence for Strn3 (NM_052973.1,2302-2320).
cacatcaagttttttgaca

SEQ ID NO: 527499 - DNA, 19 bp, Mus musculus
  siRNA target sequence for Strn3 (NM_052973.1,2329-2347).
ggtaaaatgatccattcta

SEQ ID NO: 527500 - DNA, 19 bp, Mus musculus
  siRNA target sequence for Strn3 (NM_052973.1,2330-2348).
gtaaaatgatccattctat

SEQ ID NO: 527501 - DNA, 19 bp, Mus musculus
  siRNA target sequence for Strn3 (NM_052973.1,2345-2363).
ctatggtagctcatttgga

SEQ ID NO: 527502 - DNA, 19 bp, Mus musculus
  siRNA target sequence for Strn3 (NM_052973.1,2389-2407).
cccaatggaatctatttga

SEQ ID NO: 527503 - DNA, 19 bp, Mus musculus
  siRNA target sequence for Strn3 (NM_052973.1,2390-2408).
ccaatggaatctatttgat

SEQ ID NO: 527504 - DNA, 19 bp, Mus musculus
  siRNA target sequence for Strn3 (NM_052973.1,2418-2436).
ccatgactgttccattaga

SEQ ID NO: 527505 - DNA, 19 bp, Mus musculus
  siRNA target sequence for Strn3 (NM_052973.1,2422-2440).
gactgttccattagactat

SEQ ID NO: 527506 - DNA, 19 bp, Mus musculus
  siRNA target sequence for Strn3 (NM_052973.1,2426-2444).
gttccattagactatggaa

SEQ ID NO: 527507 - DNA, 19 bp, Mus musculus
  siRNA target sequence for Strn3 (NM_052973.1,2448-2466).
ggacagtaagacatgtgta

SEQ ID NO: 527508 - DNA, 19 bp, Mus musculus
  siRNA target sequence for Strn3 (NM_052973.1,2496-2514).
ggatgagtcaatttatgat

SEQ ID NO: 527509 - DNA, 19 bp, Mus musculus
  siRNA target sequence for Strn3 (NM_052973.1,2504-2522).
caatttatgatgttgcttt

SEQ ID NO: 527510 - DNA, 19 bp, Mus musculus
  siRNA target sequence for Strn3 (NM_052973.1,2524-2542).
catccatcaaaggcatata

SEQ ID NO: 527511 - DNA, 19 bp, Mus musculus
  siRNA target sequence for Strn3 (NM_052973.1,2560-2578).
gatgctcttgccaaagtat

SEQ ID NO: 527512 - DNA, 19 bp, Mus musculus
  siRNA target sequence for Strn4 (NM_133789.1,845-863).
ggagagggccaaatatcat

SEQ ID NO: 527513 - DNA, 19 bp, Mus musculus
  siRNA target sequence for Strn4 (NM_133789.1,846-864).
gagagggccaaatatcata

SEQ ID NO: 527514 - DNA, 19 bp, Mus musculus
  siRNA target sequence for Strn4 (NM_133789.1,852-870).
gccaaatatcataaactga

SEQ ID NO: 527515 - DNA, 19 bp, Mus musculus
  siRNA target sequence for Strn4 (NM_133789.1,853-871).
ccaaatatcataaactgaa

SEQ ID NO: 527516 - DNA, 19 bp, Mus musculus
  siRNA target sequence for Strn4 (NM_133789.1,905-923).
gacagatctgtcagaacaa

SEQ ID NO: 527517 - DNA, 19 bp, Mus musculus
  siRNA target sequence for Strn4 (NM_133789.1,1076-1094).
ccgttcactggaactcaat

SEQ ID NO: 527518 - DNA, 19 bp, Mus musculus
  siRNA target sequence for Strn4 (NM_133789.1,1159-1177).
gcgagtctctactggtaaa

SEQ ID NO: 527519 - DNA, 19 bp, Mus musculus
  siRNA target sequence for Strn4 (NM_133789.1,1357-1375).
ccctagtgcctgaaatgga

SEQ ID NO: 527520 - DNA, 19 bp, Mus musculus
  siRNA target sequence for Strn4 (NM_133789.1,1461-1479).
gatcctcgacgttgtactt

SEQ ID NO: 527521 - DNA, 19 bp, Mus musculus
  siRNA target sequence for Strn4 (NM_133789.1,1633-1651).
cctcagacgtcttcatcat

SEQ ID NO: 527522 - DNA, 19 bp, Mus musculus
  siRNA target sequence for Strn4 (NM_133789.1,1749-1767).
gacgctttcaagaagacat

SEQ ID NO: 527523 - DNA, 19 bp, Mus musculus
  siRNA target sequence for Strn4 (NM_133789.1,1892-1910).
ggcagttacggccaagaaa

SEQ ID NO: 527524 - DNA, 19 bp, Mus musculus
  siRNA target sequence for Strn4 (NM_133789.1,2054-2072).
caacatggacccatatgat

SEQ ID NO: 527525 - DNA, 19 bp, Mus musculus
  siRNA target sequence for Strn4 (NM_133789.1,2301-2319).
gtcgtggcctcctttcgtt

SEQ ID NO: 527526 - DNA, 19 bp, Mus musculus
  siRNA target sequence for Strn4 (NM_133789.1,2320-2338).
ctggtgataccgttcttta

SEQ ID NO: 527527 - DNA, 19 bp, Mus musculus
  siRNA target sequence for Strn4 (NM_133789.1,2353-2371).
gcagcgcccttctcacatt

SEQ ID NO: 527528 - DNA, 19 bp, Mus musculus
  siRNA target sequence for Strn4 (NM_133789.1,2469-2487).
cggttcctggacaatcgaa

SEQ ID NO: 527529 - DNA, 19 bp, Mus musculus
  siRNA target sequence for Strn4 (NM_133789.1,2477-2495).
ggacaatcgaacaggtaaa

SEQ ID NO: 527530 - DNA, 19 bp, Mus musculus
  siRNA target sequence for Strn4 (NM_133789.1,2478-2496).
gacaatcgaacaggtaaat

SEQ ID NO: 527531 - DNA, 19 bp, Mus musculus
  siRNA target sequence for Strn4 (NM_133789.1,2480-2498).
caatcgaacaggtaaatct

SEQ ID NO: 527532 - DNA, 19 bp, Mus musculus
  siRNA target sequence for Strn4 (NM_133789.1,2491-2509).
gtaaatctgtgcattccat

SEQ ID NO: 527533 - DNA, 19 bp, Mus musculus
  siRNA target sequence for Strn4 (NM_133789.1,2583-2601).
gactgttctctgcgtttat

SEQ ID NO: 527534 - DNA, 19 bp, Mus musculus
  siRNA target sequence for Strn4 (NM_133789.1,2596-2614).
gtttatggagcctagacaa

SEQ ID NO: 527535 - DNA, 19 bp, Mus musculus
  siRNA target sequence for Strn4 (NM_133789.1,2727-2745).
ctagccaaggtcttcgtat

SEQ ID NO: 527536 - DNA, 19 bp, Mus musculus
  siRNA target sequence for Svs7 (NM_020264.1,28-46).
ctgctcatcgtgattttat

SEQ ID NO: 527537 - DNA, 19 bp, Mus musculus
  siRNA target sequence for Svs7 (NM_020264.1,61-79).
gtggagggtctgatctgta

SEQ ID NO: 527538 - DNA, 19 bp, Mus musculus
  siRNA target sequence for Svs7 (NM_020264.1,63-81).
ggagggtctgatctgtaat

SEQ ID NO: 527539 - DNA, 19 bp, Mus musculus
  siRNA target sequence for Svs7 (NM_020264.1,72-90).
gatctgtaattcatgtgaa

SEQ ID NO: 527540 - DNA, 19 bp, Mus musculus
  siRNA target sequence for Svs7 (NM_020264.1,93-111).
gtcacgagattcaagatgt

SEQ ID NO: 527541 - DNA, 19 bp, Mus musculus
  siRNA target sequence for Svs7 (NM_020264.1,156-174).
cagtaccgtatcacacttt

SEQ ID NO: 527542 - DNA, 19 bp, Mus musculus
  siRNA target sequence for Svs7 (NM_020264.1,158-176).
gtaccgtatcacactttgt

SEQ ID NO: 527543 - DNA, 19 bp, Mus musculus
  siRNA target sequence for Svs7 (NM_020264.1,171-189).
ctttgttggaacaaagcat

SEQ ID NO: 527544 - DNA, 19 bp, Mus musculus
  siRNA target sequence for Svs7 (NM_020264.1,182-200).
caaagcatgtgtactcaaa

SEQ ID NO: 527545 - DNA, 19 bp, Mus musculus
  siRNA target sequence for Svs7 (NM_020264.1,212-230).
cgcctcagtgcaaggaaaa

SEQ ID NO: 527546 - DNA, 19 bp, Mus musculus
  siRNA target sequence for Svs7 (NM_020264.1,225-243).
ggaaaaacagcttaacact

SEQ ID NO: 527547 - DNA, 19 bp, Mus musculus
  siRNA target sequence for Svs7 (NM_020264.1,242-260).
ctggaaagaagttgattta

SEQ ID NO: 527548 - DNA, 19 bp, Mus musculus
  siRNA target sequence for Svs7 (NM_020264.1,272-290).
gcgaaaaaaacttgtgtaa

SEQ ID NO: 527549 - DNA, 19 bp, Mus musculus
  siRNA target sequence for Svs7 (NM_020264.1,273-291).
cgaaaaaaacttgtgtaat

SEQ ID NO: 527550 - DNA, 19 bp, Mus musculus
  siRNA target sequence for Vamp2 (NM_009497.2,159-177).
gcacctcctccaaacctta

SEQ ID NO: 527551 - DNA, 19 bp, Mus musculus
  siRNA target sequence for Vamp2 (NM_009497.2,166-184).
ctccaaaccttactagtaa

SEQ ID NO: 527552 - DNA, 19 bp, Mus musculus
  siRNA target sequence for Vamp2 (NM_009497.2,354-372).
cgcaaatactggtggaaaa

SEQ ID NO: 527553 - DNA, 19 bp, Mus musculus
  siRNA target sequence for Vamp2 (NM_009497.2,375-393).
ctcaagatgatgatcatct

SEQ ID NO: 527554 - DNA, 19 bp, Mus musculus
  siRNA target sequence for AI256711 (NM_023059.1,591-609).
cgatgggaagttatacgat

SEQ ID NO: 527555 - DNA, 19 bp, Mus musculus
  siRNA target sequence for AI256711 (NM_023059.1,632-650).
gcccagaggaccgcaaatt

SEQ ID NO: 527556 - DNA, 19 bp, Mus musculus
  siRNA target sequence for AI256711 (NM_023059.1,637-655).
gaggaccgcaaatttgtaa

SEQ ID NO: 527557 - DNA, 19 bp, Mus musculus
  siRNA target sequence for AI256711 (NM_023059.1,639-657).
ggaccgcaaatttgtaaat

SEQ ID NO: 527558 - DNA, 19 bp, Mus musculus
  siRNA target sequence for AI256711 (NM_023059.1,640-658).
gaccgcaaatttgtaaatt

SEQ ID NO: 527559 - DNA, 19 bp, Mus musculus
  siRNA target sequence for AI256711 (NM_023059.1,642-660).
ccgcaaatttgtaaatttt

SEQ ID NO: 527560 - DNA, 19 bp, Mus musculus
  siRNA target sequence for AI256711 (NM_023059.1,1246-1264).
gagagccacggcagtgaaa

SEQ ID NO: 527561 - DNA, 19 bp, Mus musculus
  siRNA target sequence for Il18r1 (NM_008365.1,384-402).
catcatgaagaattaatct

SEQ ID NO: 527562 - DNA, 19 bp, Mus musculus
  siRNA target sequence for Il18r1 (NM_008365.1,433-451).
cctcaaaaagttgtattca

SEQ ID NO: 527563 - DNA, 19 bp, Mus musculus
  siRNA target sequence for Il18r1 (NM_008365.1,477-495).
ggagaacctttttatctga

SEQ ID NO: 527564 - DNA, 19 bp, Mus musculus
  siRNA target sequence for Il18r1 (NM_008365.1,494-512).
gaagccatgtggcatatct

SEQ ID NO: 527565 - DNA, 19 bp, Mus musculus
  siRNA target sequence for Il18r1 (NM_008365.1,560-578).
cagtgcttcacatgagtat

SEQ ID NO: 527566 - DNA, 19 bp, Mus musculus
  siRNA target sequence for Il18r1 (NM_008365.1,598-616).
gctcgcccagagtcacttt

SEQ ID NO: 527567 - DNA, 19 bp, Mus musculus
  siRNA target sequence for Il18r1 (NM_008365.1,599-617).
ctcgcccagagtcactttt

SEQ ID NO: 527568 - DNA, 19 bp, Mus musculus
  siRNA target sequence for Il18r1 (NM_008365.1,605-623).
cagagtcacttttcatgat

SEQ ID NO: 527569 - DNA, 19 bp, Mus musculus
  siRNA target sequence for Il18r1 (NM_008365.1,656-674).
ggatgagggaacgtacatt

SEQ ID NO: 527570 - DNA, 19 bp, Mus musculus
  siRNA target sequence for Il18r1 (NM_008365.1,662-680).
gggaacgtacatttctcaa

SEQ ID NO: 527571 - DNA, 19 bp, Mus musculus
  siRNA target sequence for Il18r1 (NM_008365.1,787-805).
ctctgcatatcacttgtaa

SEQ ID NO: 527572 - DNA, 19 bp, Mus musculus
  siRNA target sequence for Il18r1 (NM_008365.1,799-817).
cttgtaagaatcctaacta

SEQ ID NO: 527573 - DNA, 19 bp, Mus musculus
  siRNA target sequence for Il18r1 (NM_008365.1,929-947).
gttttctgtccaccataat

SEQ ID NO: 527574 - DNA, 19 bp, Mus musculus
  siRNA target sequence for Il18r1 (NM_008365.1,948-966).
gggacacggtacaacatca

SEQ ID NO: 527575 - DNA, 19 bp, Mus musculus
  siRNA target sequence for Il18r1 (NM_008365.1,1169-1187).
ggagacgacaacatggatt

SEQ ID NO: 527576 - DNA, 19 bp, Mus musculus
  siRNA target sequence for Il18r1 (NM_008365.1,1170-1188).
gagacgacaacatggattt

SEQ ID NO: 527577 - DNA, 19 bp, Mus musculus
  siRNA target sequence for Il18r1 (NM_008365.1,1172-1190).
gacgacaacatggatttct

SEQ ID NO: 527578 - DNA, 19 bp, Mus musculus
  siRNA target sequence for Il18r1 (NM_008365.1,1303-1321).
gcttcgtcttggtgagaaa

SEQ ID NO: 527579 - DNA, 19 bp, Mus musculus
  siRNA target sequence for Il18r1 (NM_008365.1,1349-1367).
ctttacaggaggagtaact

SEQ ID NO: 527580 - DNA, 19 bp, Mus musculus
  siRNA target sequence for Il18r1 (NM_008365.1,1360-1378).
gagtaactgtgcttgttct

SEQ ID NO: 527581 - DNA, 19 bp, Mus musculus
  siRNA target sequence for Il18r1 (NM_008365.1,1390-1408).
cagcagtgtgtatagtgat

SEQ ID NO: 527582 - DNA, 19 bp, Mus musculus
  siRNA target sequence for Il18r1 (NM_008365.1,1395-1413).
gtgtgtatagtgattttgt

SEQ ID NO: 527583 - DNA, 19 bp, Mus musculus
  siRNA target sequence for Il18r1 (NM_008365.1,1450-1468).
ggcgcatagcggaaagaga

SEQ ID NO: 527584 - DNA, 19 bp, Mus musculus
  siRNA target sequence for Il18r1 (NM_008365.1,1461-1479).
gaaagagacgagacactaa

SEQ ID NO: 527585 - DNA, 19 bp, Mus musculus
  siRNA target sequence for Il18r1 (NM_008365.1,1472-1490).
gacactaacagatggtaaa

SEQ ID NO: 527586 - DNA, 19 bp, Mus musculus
  siRNA target sequence for Il18r1 (NM_008365.1,1480-1498).
cagatggtaaaacatatga

SEQ ID NO: 527587 - DNA, 19 bp, Mus musculus
  siRNA target sequence for Il18r1 (NM_008365.1,1531-1549).
ctgagaataaagaagagta

SEQ ID NO: 527588 - DNA, 19 bp, Mus musculus
  siRNA target sequence for Il18r1 (NM_008365.1,1597-1615).
ggtataagttatgcatatt

SEQ ID NO: 527589 - DNA, 19 bp, Mus musculus
  siRNA target sequence for Il18r1 (NM_008365.1,1644-1662).
gttgtcgaggagatccatt

SEQ ID NO: 527590 - DNA, 19 bp, Mus musculus
  siRNA target sequence for Il18r1 (NM_008365.1,1652-1670).
ggagatccattcactgata

SEQ ID NO: 527591 - DNA, 19 bp, Mus musculus
  siRNA target sequence for Il18r1 (NM_008365.1,1771-1789).
ggaagattaagatcatctt

SEQ ID NO: 527592 - DNA, 19 bp, Mus musculus
  siRNA target sequence for Il18r1 (NM_008365.1,1772-1790).
gaagattaagatcatctta

SEQ ID NO: 527593 - DNA, 19 bp, Mus musculus
  siRNA target sequence for Il18r1 (NM_008365.1,1775-1793).
gattaagatcatcttaatt

SEQ ID NO: 527594 - DNA, 19 bp, Mus musculus
  siRNA target sequence for Il18r1 (NM_008365.1,1784-1802).
catcttaattgagtttact

SEQ ID NO: 527595 - DNA, 19 bp, Mus musculus
  siRNA target sequence for Il18r1 (NM_008365.1,1878-1896).
gacagtccctccatgaact

SEQ ID NO: 527596 - DNA, 19 bp, Mus musculus
  siRNA target sequence for Il18r1 (NM_008365.1,1901-1919).
gttctggaagaatcttgtt

SEQ ID NO: 527597 - DNA, 19 bp, Mus musculus
  siRNA target sequence for Il18rap (NM_010553.1,484-502).
gaccacaggatttaatcat

SEQ ID NO: 527598 - DNA, 19 bp, Mus musculus
  siRNA target sequence for Il18rap (NM_010553.1,487-505).
cacaggatttaatcattca

SEQ ID NO: 527599 - DNA, 19 bp, Mus musculus
  siRNA target sequence for Il18rap (NM_010553.1,546-564).
ggggtgcagagaattttgt

SEQ ID NO: 527600 - DNA, 19 bp, Mus musculus
  siRNA target sequence for Il18rap (NM_010553.1,552-570).
cagagaattttgtcctatt

SEQ ID NO: 527601 - DNA, 19 bp, Mus musculus
  siRNA target sequence for Il18rap (NM_010553.1,584-602).
gagcttcaggagcaaaaat

SEQ ID NO: 527602 - DNA, 19 bp, Mus musculus
  siRNA target sequence for Il18rap (NM_010553.1,716-734).
ccactagaggagatcagta

SEQ ID NO: 527603 - DNA, 19 bp, Mus musculus
  siRNA target sequence for Il18rap (NM_010553.1,735-753).
gaaactctccccatatgca

SEQ ID NO: 527604 - DNA, 19 bp, Mus musculus
  siRNA target sequence for Il18rap (NM_010553.1,790-808).
gaacagcatttggtcatat

SEQ ID NO: 527605 - DNA, 19 bp, Mus musculus
  siRNA target sequence for Il18rap (NM_010553.1,836-854).
caggatatggcctgttgta

SEQ ID NO: 527606 - DNA, 19 bp, Mus musculus
  siRNA target sequence for Il18rap (NM_010553.1,839-857).
gatatggcctgttgtatca

SEQ ID NO: 527607 - DNA, 19 bp, Mus musculus
  siRNA target sequence for Il18rap (NM_010553.1,852-870).
gtatcaagacagtcttaga

SEQ ID NO: 527608 - DNA, 19 bp, Mus musculus
  siRNA target sequence for Il18rap (NM_010553.1,906-924).
cagcacaagatgaacaagt

SEQ ID NO: 527609 - DNA, 19 bp, Mus musculus
  siRNA target sequence for Il18rap (NM_010553.1,967-985).
cagctgccaaagtgatgta

SEQ ID NO: 527610 - DNA, 19 bp, Mus musculus
  siRNA target sequence for Il18rap (NM_010553.1,969-987).
gctgccaaagtgatgtaca

SEQ ID NO: 527611 - DNA, 19 bp, Mus musculus
  siRNA target sequence for Il18rap (NM_010553.1,1033-1051).
gcacaagaaaaatccaatt

SEQ ID NO: 527612 - DNA, 19 bp, Mus musculus
  siRNA target sequence for Il18rap (NM_010553.1,1047-1065).
caattgagatggcagatat

SEQ ID NO: 527613 - DNA, 19 bp, Mus musculus
  siRNA target sequence for Il18rap (NM_010553.1,1057-1075).
ggcagatatttatgttttt

SEQ ID NO: 527614 - DNA, 19 bp, Mus musculus
  siRNA target sequence for Il18rap (NM_010553.1,1131-1149).
cagtccgagctgtggttaa

SEQ ID NO: 527615 - DNA, 19 bp, Mus musculus
  siRNA target sequence for Il18rap (NM_010553.1,1225-1243).
gcttggaaagcctttaact

SEQ ID NO: 527616 - DNA, 19 bp, Mus musculus
  siRNA target sequence for Il18rap (NM_010553.1,1246-1264).
cccctgcagagtacagttt

SEQ ID NO: 527617 - DNA, 19 bp, Mus musculus
  siRNA target sequence for Il18rap (NM_010553.1,1256-1274).
gtacagtttggcttccaaa

SEQ ID NO: 527618 - DNA, 19 bp, Mus musculus
  siRNA target sequence for Il18rap (NM_010553.1,1265-1283).
ggcttccaaagactttcaa

SEQ ID NO: 527619 - DNA, 19 bp, Mus musculus
  siRNA target sequence for Il18rap (NM_010553.1,1291-1309).
gataaagtggtatgtcaaa

SEQ ID NO: 527620 - DNA, 19 bp, Mus musculus
  siRNA target sequence for Il18rap (NM_010553.1,1297-1315).
gtggtatgtcaaagaatct

SEQ ID NO: 527621 - DNA, 19 bp, Mus musculus
  siRNA target sequence for Il18rap (NM_010553.1,1576-1594).
ctactggtactggattgaa

SEQ ID NO: 527622 - DNA, 19 bp, Mus musculus
  siRNA target sequence for Il18rap (NM_010553.1,1641-1659).
gggataagaaggaattcga

SEQ ID NO: 527623 - DNA, 19 bp, Mus musculus
  siRNA target sequence for Il18rap (NM_010553.1,1648-1666).
gaaggaattcgatgcattt

SEQ ID NO: 527624 - DNA, 19 bp, Mus musculus
  siRNA target sequence for Il18rap (NM_010553.1,1651-1669).
ggaattcgatgcatttgta

SEQ ID NO: 527625 - DNA, 19 bp, Mus musculus
  siRNA target sequence for Il18rap (NM_010553.1,1667-1685).
gtatcctactcgaattgga

SEQ ID NO: 527626 - DNA, 19 bp, Mus musculus
  siRNA target sequence for Il18rap (NM_010553.1,1774-1792).
gtacagattgtgtttgctt

SEQ ID NO: 527627 - DNA, 19 bp, Mus musculus
  siRNA target sequence for Il18rap (NM_010553.1,1804-1822).
gaccccaggaggagtgtat

SEQ ID NO: 527628 - DNA, 19 bp, Mus musculus
  siRNA target sequence for Il18rap (NM_010553.1,1854-1872).
gccgaagaggaatatttat

SEQ ID NO: 527629 - DNA, 19 bp, Mus musculus
  siRNA target sequence for Il18rap (NM_010553.1,1891-1909).
caatggaccccgtgtcttt

SEQ ID NO: 527630 - DNA, 19 bp, Mus musculus
  siRNA target sequence for Il18rap (NM_010553.1,1912-1930).
gctacaagcagcagtgaat

SEQ ID NO: 527631 - DNA, 19 bp, Mus musculus
  siRNA target sequence for Il18rap (NM_010553.1,2083-2101).
gttctggacccaaattcgt

SEQ ID NO: 527632 - DNA, 19 bp, Mus musculus
  siRNA target sequence for Il1r1 (NM_008362.1,240-258).
gtgctactggggctcattt

SEQ ID NO: 527633 - DNA, 19 bp, Mus musculus
  siRNA target sequence for Il1r1 (NM_008362.1,284-302).
ggagattgacgtatgtaca

SEQ ID NO: 527634 - DNA, 19 bp, Mus musculus
  siRNA target sequence for Il1r1 (NM_008362.1,287-305).
gattgacgtatgtacagaa

SEQ ID NO: 527635 - DNA, 19 bp, Mus musculus
  siRNA target sequence for Il1r1 (NM_008362.1,293-311).
cgtatgtacagaatatcca

SEQ ID NO: 527636 - DNA, 19 bp, Mus musculus
  siRNA target sequence for Il1r1 (NM_008362.1,298-316).
gtacagaatatccaaatca

SEQ ID NO: 527637 - DNA, 19 bp, Mus musculus
  siRNA target sequence for Il1r1 (NM_008362.1,363-381).
cctcttactccaaataaaa

SEQ ID NO: 527638 - DNA, 19 bp, Mus musculus
  siRNA target sequence for Il1r1 (NM_008362.1,364-382).
ctcttactccaaataaaat

SEQ ID NO: 527639 - DNA, 19 bp, Mus musculus
  siRNA target sequence for Il1r1 (NM_008362.1,383-401).
gcacggcgacaccataatt

SEQ ID NO: 527640 - DNA, 19 bp, Mus musculus
  siRNA target sequence for Il1r1 (NM_008362.1,384-402).
cacggcgacaccataattt

SEQ ID NO: 527641 - DNA, 19 bp, Mus musculus
  siRNA target sequence for Il1r1 (NM_008362.1,387-405).
ggcgacaccataatttggt

SEQ ID NO: 527642 - DNA, 19 bp, Mus musculus
  siRNA target sequence for Il1r1 (NM_008362.1,388-406).
gcgacaccataatttggta

SEQ ID NO: 527643 - DNA, 19 bp, Mus musculus
  siRNA target sequence for Il1r1 (NM_008362.1,394-412).
ccataatttggtacaagaa

SEQ ID NO: 527644 - DNA, 19 bp, Mus musculus
  siRNA target sequence for Il1r1 (NM_008362.1,451-469).
ggattcatcagcagaatga

SEQ ID NO: 527645 - DNA, 19 bp, Mus musculus
  siRNA target sequence for Il1r1 (NM_008362.1,495-513).
gtggaggactcaggatatt

SEQ ID NO: 527646 - DNA, 19 bp, Mus musculus
  siRNA target sequence for Il1r1 (NM_008362.1,508-526).
gatattactattgtatagt

SEQ ID NO: 527647 - DNA, 19 bp, Mus musculus
  siRNA target sequence for Il1r1 (NM_008362.1,525-543).
gtaagaaactcaacttact

SEQ ID NO: 527648 - DNA, 19 bp, Mus musculus
  siRNA target sequence for Il1r1 (NM_008362.1,538-556).
cttactgcctcaaaactaa

SEQ ID NO: 527649 - DNA, 19 bp, Mus musculus
  siRNA target sequence for Il1r1 (NM_008362.1,553-571).
ctaaagtaaccgtaactgt

SEQ ID NO: 527650 - DNA, 19 bp, Mus musculus
  siRNA target sequence for Il1r1 (NM_008362.1,651-669).
cttgtgtgcccttatgtga

SEQ ID NO: 527651 - DNA, 19 bp, Mus musculus
  siRNA target sequence for Il1r1 (NM_008362.1,656-674).
gtgcccttatgtgagttat

SEQ ID NO: 527652 - DNA, 19 bp, Mus musculus
  siRNA target sequence for Il1r1 (NM_008362.1,658-676).
gcccttatgtgagttattt

SEQ ID NO: 527653 - DNA, 19 bp, Mus musculus
  siRNA target sequence for Il1r1 (NM_008362.1,659-677).
cccttatgtgagttatttt

SEQ ID NO: 527654 - DNA, 19 bp, Mus musculus
  siRNA target sequence for Il1r1 (NM_008362.1,705-723).
gtccagtggtataagaact

SEQ ID NO: 527655 - DNA, 19 bp, Mus musculus
  siRNA target sequence for Il1r1 (NM_008362.1,749-767).
gagcttcttcggagtaaaa

SEQ ID NO: 527656 - DNA, 19 bp, Mus musculus
  siRNA target sequence for Il1r1 (NM_008362.1,752-770).
cttcttcggagtaaaagat

SEQ ID NO: 527657 - DNA, 19 bp, Mus musculus
  siRNA target sequence for Il1r1 (NM_008362.1,760-778).
gagtaaaagataaactgtt

SEQ ID NO: 527658 - DNA, 19 bp, Mus musculus
  siRNA target sequence for Il1r1 (NM_008362.1,800-818).
gcacagaggggactatata

SEQ ID NO: 527659 - DNA, 19 bp, Mus musculus
  siRNA target sequence for Il1r1 (NM_008362.1,820-838).
gccgtatgtcctatacgtt

SEQ ID NO: 527660 - DNA, 19 bp, Mus musculus
  siRNA target sequence for Il1r1 (NM_008362.1,856-874).
cggtcacacgagtaataca

SEQ ID NO: 527661 - DNA, 19 bp, Mus musculus
  siRNA target sequence for Il1r1 (NM_008362.1,857-875).
ggtcacacgagtaatacaa

SEQ ID NO: 527662 - DNA, 19 bp, Mus musculus
  siRNA target sequence for Il1r1 (NM_008362.1,858-876).
gtcacacgagtaatacaat

SEQ ID NO: 527663 - DNA, 19 bp, Mus musculus
  siRNA target sequence for Il1r1 (NM_008362.1,860-878).
cacacgagtaatacaattt

SEQ ID NO: 527664 - DNA, 19 bp, Mus musculus
  siRNA target sequence for Il1r1 (NM_008362.1,864-882).
cgagtaatacaatttatca

SEQ ID NO: 527665 - DNA, 19 bp, Mus musculus
  siRNA target sequence for Il1r1 (NM_008362.1,1013-1031).
gaagtggaatggatcagaa

SEQ ID NO: 527666 - DNA, 19 bp, Mus musculus
  siRNA target sequence for Il1r1 (NM_008362.1,1048-1066).
catttctagctgaagacta

SEQ ID NO: 527667 - DNA, 19 bp, Mus musculus
  siRNA target sequence for Il1r1 (NM_008362.1,1105-1123).
cactcattacaacacttaa

SEQ ID NO: 527668 - DNA, 19 bp, Mus musculus
  siRNA target sequence for Il1r1 (NM_008362.1,1109-1127).
cattacaacacttaacatt

SEQ ID NO: 527669 - DNA, 19 bp, Mus musculus
  siRNA target sequence for Il1r1 (NM_008362.1,1158-1176).
ccgtttatctgtgttgtta

SEQ ID NO: 527670 - DNA, 19 bp, Mus musculus
  siRNA target sequence for Il1r1 (NM_008362.1,1159-1177).
cgtttatctgtgttgttaa

SEQ ID NO: 527671 - DNA, 19 bp, Mus musculus
  siRNA target sequence for Il1r1 (NM_008362.1,1170-1188).
gttgttaagaacacaaata

SEQ ID NO: 527672 - DNA, 19 bp, Mus musculus
  siRNA target sequence for Il1r1 (NM_008362.1,1198-1216).
cggcgcatgtgcagttaat

SEQ ID NO: 527673 - DNA, 19 bp, Mus musculus
  siRNA target sequence for Il1r1 (NM_008362.1,1199-1217).
ggcgcatgtgcagttaata

SEQ ID NO: 527674 - DNA, 19 bp, Mus musculus
  siRNA target sequence for Il1r1 (NM_008362.1,1200-1218).
gcgcatgtgcagttaatat

SEQ ID NO: 527675 - DNA, 19 bp, Mus musculus
  siRNA target sequence for Il1r1 (NM_008362.1,1222-1240).
cagtccctgacttcaagaa

SEQ ID NO: 527676 - DNA, 19 bp, Mus musculus
  siRNA target sequence for Il1r1 (NM_008362.1,1262-1280).
catcctcacggctacaatt

SEQ ID NO: 527677 - DNA, 19 bp, Mus musculus
  siRNA target sequence for Il1r1 (NM_008362.1,1265-1283).
cctcacggctacaattgta

SEQ ID NO: 527678 - DNA, 19 bp, Mus musculus
  siRNA target sequence for Il1r1 (NM_008362.1,1266-1284).
ctcacggctacaattgtat

SEQ ID NO: 527679 - DNA, 19 bp, Mus musculus
  siRNA target sequence for Il1r1 (NM_008362.1,1294-1312).
gcatctataaagtcttcaa

SEQ ID NO: 527680 - DNA, 19 bp, Mus musculus
  siRNA target sequence for Il1r1 (NM_008362.1,1382-1400).
gacatacgatgcctatatt

SEQ ID NO: 527681 - DNA, 19 bp, Mus musculus
  siRNA target sequence for Il1r1 (NM_008362.1,1384-1402).
catacgatgcctatattct

SEQ ID NO: 527682 - DNA, 19 bp, Mus musculus
  siRNA target sequence for Il1r1 (NM_008362.1,1424-1442).
ggggtccttctcagactta

SEQ ID NO: 527683 - DNA, 19 bp, Mus musculus
  siRNA target sequence for Il1r1 (NM_008362.1,1427-1445).
gtccttctcagacttagat

SEQ ID NO: 527684 - DNA, 19 bp, Mus musculus
  siRNA target sequence for Il1r1 (NM_008362.1,1430-1448).
cttctcagacttagatact

SEQ ID NO: 527685 - DNA, 19 bp, Mus musculus
  siRNA target sequence for Il1r1 (NM_008362.1,1437-1455).
gacttagatacttttgttt

SEQ ID NO: 527686 - DNA, 19 bp, Mus musculus
  siRNA target sequence for Il1r1 (NM_008362.1,1492-1510).
gatacaagctgttcattta

SEQ ID NO: 527687 - DNA, 19 bp, Mus musculus
  siRNA target sequence for Il1r1 (NM_008362.1,1496-1514).
caagctgttcatttatgga

SEQ ID NO: 527688 - DNA, 19 bp, Mus musculus
  siRNA target sequence for Il1r1 (NM_008362.1,1521-1539).
gactatgttggagaagata

SEQ ID NO: 527689 - DNA, 19 bp, Mus musculus
  siRNA target sequence for Il1r1 (NM_008362.1,1540-1558).
ccatcgaggttactaatga

SEQ ID NO: 527690 - DNA, 19 bp, Mus musculus
  siRNA target sequence for Il1r1 (NM_008362.1,1541-1559).
catcgaggttactaatgaa

SEQ ID NO: 527691 - DNA, 19 bp, Mus musculus
  siRNA target sequence for Il1r1 (NM_008362.1,1544-1562).
cgaggttactaatgaaaat

SEQ ID NO: 527692 - DNA, 19 bp, Mus musculus
  siRNA target sequence for Il1r1 (NM_008362.1,1547-1565).
ggttactaatgaaaatgta

SEQ ID NO: 527693 - DNA, 19 bp, Mus musculus
  siRNA target sequence for Il1r1 (NM_008362.1,1579-1597).
ggctgattatcattctagt

SEQ ID NO: 527694 - DNA, 19 bp, Mus musculus
  siRNA target sequence for Il1r1 (NM_008362.1,1631-1649).
gtcatctgaagagcaaata

SEQ ID NO: 527695 - DNA, 19 bp, Mus musculus
  siRNA target sequence for Il1r1 (NM_008362.1,1641-1659).
gagcaaatagccatataca

SEQ ID NO: 527696 - DNA, 19 bp, Mus musculus
  siRNA target sequence for Il1r1 (NM_008362.1,1722-1740).
gagaaaatgccagattcta

SEQ ID NO: 527697 - DNA, 19 bp, Mus musculus
  siRNA target sequence for Il1r1 (NM_008362.1,1732-1750).
cagattctattcagttcat

SEQ ID NO: 527698 - DNA, 19 bp, Mus musculus
  siRNA target sequence for Il1r1 (NM_008362.1,1734-1752).
gattctattcagttcatta

SEQ ID NO: 527699 - DNA, 19 bp, Mus musculus
  siRNA target sequence for Il1r1 (NM_008362.1,1774-1792).
gctggtcaggagactttca

SEQ ID NO: 527700 - DNA, 19 bp, Mus musculus
  siRNA target sequence for Il1r1 (NM_008362.1,1775-1793).
ctggtcaggagactttcaa

SEQ ID NO: 527701 - DNA, 19 bp, Mus musculus
  siRNA target sequence for Il1r1 (NM_008362.1,1777-1795).
ggtcaggagactttcaaga

SEQ ID NO: 527702 - DNA, 19 bp, Mus musculus
  siRNA target sequence for Il1r1 (NM_008362.1,1778-1796).
gtcaggagactttcaagaa

SEQ ID NO: 527703 - DNA, 19 bp, Mus musculus
  siRNA target sequence for Il1r1 (NM_008362.1,1859-1877).
gagatcaccattgtctaaa

SEQ ID NO: 527704 - DNA, 19 bp, Mus musculus
  siRNA target sequence for Il1r1 (NM_008362.1,1871-1889).
gtctaaacaccgcttacta

SEQ ID NO: 527705 - DNA, 19 bp, Mus musculus
  siRNA target sequence for Il1r1 (NM_008362.1,1925-1943).
gccggcagcaacacactta

SEQ ID NO: 527706 - DNA, 19 bp, Mus musculus
  siRNA target sequence for Il1rap (NM_008364.1,138-156).
ggacttctgtggtatttga

SEQ ID NO: 527707 - DNA, 19 bp, Mus musculus
  siRNA target sequence for Il1rap (NM_008364.1,155-173).
gatgagtctgtccttctat

SEQ ID NO: 527708 - DNA, 19 bp, Mus musculus
  siRNA target sequence for Il1rap (NM_008364.1,232-250).
gacaaatccaagtgtttga

SEQ ID NO: 527709 - DNA, 19 bp, Mus musculus
  siRNA target sequence for Il1rap (NM_008364.1,255-273).
gagccggctcgaatcaagt

SEQ ID NO: 527710 - DNA, 19 bp, Mus musculus
  siRNA target sequence for Il1rap (NM_008364.1,274-292).
gccccctctttgaacactt

SEQ ID NO: 527711 - DNA, 19 bp, Mus musculus
  siRNA target sequence for Il1rap (NM_008364.1,369-387).
ctggaggagcccattaact

SEQ ID NO: 527712 - DNA, 19 bp, Mus musculus
  siRNA target sequence for Il1rap (NM_008364.1,386-404).
cttccgcctcccagagaat

SEQ ID NO: 527713 - DNA, 19 bp, Mus musculus
  siRNA target sequence for Il1rap (NM_008364.1,396-414).
ccagagaatcgcatcagta

SEQ ID NO: 527714 - DNA, 19 bp, Mus musculus
  siRNA target sequence for Il1rap (NM_008364.1,397-415).
cagagaatcgcatcagtaa

SEQ ID NO: 527715 - DNA, 19 bp, Mus musculus
  siRNA target sequence for Il1rap (NM_008364.1,497-515).
ctgcagcaaagttgcattt

SEQ ID NO: 527716 - DNA, 19 bp, Mus musculus
  siRNA target sequence for Il1rap (NM_008364.1,562-580).
gattcccagtgcacaagat

SEQ ID NO: 527717 - DNA, 19 bp, Mus musculus
  siRNA target sequence for Il1rap (NM_008364.1,588-606).
gaacatggcattcataaga

SEQ ID NO: 527718 - DNA, 19 bp, Mus musculus
  siRNA target sequence for Il1rap (NM_008364.1,594-612).
ggcattcataagatcacat

SEQ ID NO: 527719 - DNA, 19 bp, Mus musculus
  siRNA target sequence for Il1rap (NM_008364.1,616-634).
caaatgtagacggatactt

SEQ ID NO: 527720 - DNA, 19 bp, Mus musculus
  siRNA target sequence for Il1rap (NM_008364.1,621-639).
gtagacggatactttcctt

SEQ ID NO: 527721 - DNA, 19 bp, Mus musculus
  siRNA target sequence for Il1rap (NM_008364.1,651-669).
ccatcggtcacttggtata

SEQ ID NO: 527722 - DNA, 19 bp, Mus musculus
  siRNA target sequence for Il1rap (NM_008364.1,652-670).
catcggtcacttggtataa

SEQ ID NO: 527723 - DNA, 19 bp, Mus musculus
  siRNA target sequence for Il1rap (NM_008364.1,665-683).
gtataagggttgtactgaa

SEQ ID NO: 527724 - DNA, 19 bp, Mus musculus
  siRNA target sequence for Il1rap (NM_008364.1,705-723).
ctacccgagggcatgaact

SEQ ID NO: 527725 - DNA, 19 bp, Mus musculus
  siRNA target sequence for Il1rap (NM_008364.1,714-732).
ggcatgaacttgagctttt

SEQ ID NO: 527726 - DNA, 19 bp, Mus musculus
  siRNA target sequence for Il1rap (NM_008364.1,838-856).
gctcaccaaaggatgcatt

SEQ ID NO: 527727 - DNA, 19 bp, Mus musculus
  siRNA target sequence for Il1rap (NM_008364.1,857-875).
gccaccccagatctattct

SEQ ID NO: 527728 - DNA, 19 bp, Mus musculus
  siRNA target sequence for Il1rap (NM_008364.1,863-881).
ccagatctattctccaaat

SEQ ID NO: 527729 - DNA, 19 bp, Mus musculus
  siRNA target sequence for Il1rap (NM_008364.1,882-900).
gaccgtgttgtctatgaga

SEQ ID NO: 527730 - DNA, 19 bp, Mus musculus
  siRNA target sequence for Il1rap (NM_008364.1,927-945).
ccctgcaaagtctatttca

SEQ ID NO: 527731 - DNA, 19 bp, Mus musculus
  siRNA target sequence for Il1rap (NM_008364.1,971-989).
ggtctggtggaccattgat

SEQ ID NO: 527732 - DNA, 19 bp, Mus musculus
  siRNA target sequence for Il1rap (NM_008364.1,1010-1028).
cacagtcgacatcactatt

SEQ ID NO: 527733 - DNA, 19 bp, Mus musculus
  siRNA target sequence for Il1rap (NM_008364.1,1012-1030).
cagtcgacatcactattaa

SEQ ID NO: 527734 - DNA, 19 bp, Mus musculus
  siRNA target sequence for Il1rap (NM_008364.1,1016-1034).
cgacatcactattaatgaa

SEQ ID NO: 527735 - DNA, 19 bp, Mus musculus
  siRNA target sequence for Il1rap (NM_008364.1,1017-1035).
gacatcactattaatgaaa

SEQ ID NO: 527736 - DNA, 19 bp, Mus musculus
  siRNA target sequence for Il1rap (NM_008364.1,1106-1124).
ggatctcaggcgcaactat

SEQ ID NO: 527737 - DNA, 19 bp, Mus musculus
  siRNA target sequence for Il1rap (NM_008364.1,1110-1128).
ctcaggcgcaactatgtct

SEQ ID NO: 527738 - DNA, 19 bp, Mus musculus
  siRNA target sequence for Il1rap (NM_008364.1,1125-1143).
gtctgtcatgctcgaaata

SEQ ID NO: 527739 - DNA, 19 bp, Mus musculus
  siRNA target sequence for Il1rap (NM_008364.1,1129-1147).
gtcatgctcgaaataccaa

SEQ ID NO: 527740 - DNA, 19 bp, Mus musculus
  siRNA target sequence for Il1rap (NM_008364.1,1195-1213).
caaggtacacagtagaact

SEQ ID NO: 527741 - DNA, 19 bp, Mus musculus
  siRNA target sequence for Il1rap (NM_008364.1,1260-1278).
gtggtttaccatgtttact

SEQ ID NO: 527742 - DNA, 19 bp, Mus musculus
  siRNA target sequence for Il1rap (NM_008364.1,1281-1299).
ctggagatggtcctctttt

SEQ ID NO: 527743 - DNA, 19 bp, Mus musculus
  siRNA target sequence for Il1rap (NM_008364.1,1310-1328).
ctttggaacagatgaaaca

SEQ ID NO: 527744 - DNA, 19 bp, Mus musculus
  siRNA target sequence for Il1rap (NM_008364.1,1343-1361).
ggagtatgatatttatgtt

SEQ ID NO: 527745 - DNA, 19 bp, Mus musculus
  siRNA target sequence for Il1rap (NM_008364.1,1405-1423).
cgctgcgtggagttttgga

SEQ ID NO: 527746 - DNA, 19 bp, Mus musculus
  siRNA target sequence for Il1rap (NM_008364.1,1413-1431).
ggagttttggagaatgagt

SEQ ID NO: 527747 - DNA, 19 bp, Mus musculus
  siRNA target sequence for Il1rap (NM_008364.1,1497-1515).
ctgagcttcattcagaaaa

SEQ ID NO: 527748 - DNA, 19 bp, Mus musculus
  siRNA target sequence for Il1rap (NM_008364.1,1614-1632).
ggcaacatcaacgtcattt

SEQ ID NO: 527749 - DNA, 19 bp, Mus musculus
  siRNA target sequence for Il1rap (NM_008364.1,1690-1708).
cggtgctcacggtcattaa

SEQ ID NO: 527750 - DNA, 19 bp, Mus musculus
  siRNA target sequence for Il1rap (NM_008364.1,1691-1709).
ggtgctcacggtcattaaa

SEQ ID NO: 527751 - DNA, 19 bp, Mus musculus
  siRNA target sequence for Il1rap (NM_008364.1,1692-1710).
gtgctcacggtcattaaat

SEQ ID NO: 527752 - DNA, 19 bp, Mus musculus
  siRNA target sequence for Il1rap (NM_008364.1,1695-1713).
ctcacggtcattaaatgga

SEQ ID NO: 527753 - DNA, 19 bp, Mus musculus
  siRNA target sequence for Il1rap (NM_008364.1,1792-1810).
ggtggtctagcaatgacaa

SEQ ID NO: 527754 - DNA, 19 bp, Mus musculus
  siRNA target sequence for Il1rap (NM_008364.1,1826-1844).
ctcatccctgaaaaacgta

SEQ ID NO: 527755 - DNA, 19 bp, Mus musculus
  siRNA target sequence for Il1rapl2 (NM_030688.1,161-179).
cagtcagtacaaatttgaa

SEQ ID NO: 527756 - DNA, 19 bp, Mus musculus
  siRNA target sequence for Il1rapl2 (NM_030688.1,224-242).
cggtggatctcaagacata

SEQ ID NO: 527757 - DNA, 19 bp, Mus musculus
  siRNA target sequence for Il1rapl2 (NM_030688.1,278-296).
gtgcccttttctacagtta

SEQ ID NO: 527758 - DNA, 19 bp, Mus musculus
  siRNA target sequence for Il1rapl2 (NM_030688.1,281-299).
cccttttctacagttatat

SEQ ID NO: 527759 - DNA, 19 bp, Mus musculus
  siRNA target sequence for Il1rapl2 (NM_030688.1,334-352).
ctcaggctcatgtggtata

SEQ ID NO: 527760 - DNA, 19 bp, Mus musculus
  siRNA target sequence for Il1rapl2 (NM_030688.1,370-388).
gaagagcccatcatctttt

SEQ ID NO: 527761 - DNA, 19 bp, Mus musculus
  siRNA target sequence for Il1rapl2 (NM_030688.1,409-427).
gaggaagacgccatatggt

SEQ ID NO: 527762 - DNA, 19 bp, Mus musculus
  siRNA target sequence for Il1rapl2 (NM_030688.1,411-429).
ggaagacgccatatggttt

SEQ ID NO: 527763 - DNA, 19 bp, Mus musculus
  siRNA target sequence for Il1rapl2 (NM_030688.1,415-433).
gacgccatatggtttcact

SEQ ID NO: 527764 - DNA, 19 bp, Mus musculus
  siRNA target sequence for Il1rapl2 (NM_030688.1,551-569).
gcaggatccgctacttaga

SEQ ID NO: 527765 - DNA, 19 bp, Mus musculus
  siRNA target sequence for Il1rapl2 (NM_030688.1,554-572).
ggatccgctacttagagaa

SEQ ID NO: 527766 - DNA, 19 bp, Mus musculus
  siRNA target sequence for Il1rapl2 (NM_030688.1,555-573).
gatccgctacttagagaaa

SEQ ID NO: 527767 - DNA, 19 bp, Mus musculus
  siRNA target sequence for Il1rapl2 (NM_030688.1,558-576).
ccgctacttagagaaatct

SEQ ID NO: 527768 - DNA, 19 bp, Mus musculus
  siRNA target sequence for Il1rapl2 (NM_030688.1,607-625).
ccagacatggatgacttta

SEQ ID NO: 527769 - DNA, 19 bp, Mus musculus
  siRNA target sequence for Il1rapl2 (NM_030688.1,649-667).
gtcgtatggtacaaggaat

SEQ ID NO: 527770 - DNA, 19 bp, Mus musculus
  siRNA target sequence for Il1rapl2 (NM_030688.1,664-682).
gaatgcaagccaaaaatgt

SEQ ID NO: 527771 - DNA, 19 bp, Mus musculus
  siRNA target sequence for Il1rapl2 (NM_030688.1,683-701).
ggagaagcataataataca

SEQ ID NO: 527772 - DNA, 19 bp, Mus musculus
  siRNA target sequence for Il1rapl2 (NM_030688.1,742-760).
gatggaggaaattatacat

SEQ ID NO: 527773 - DNA, 19 bp, Mus musculus
  siRNA target sequence for Il1rapl2 (NM_030688.1,791-809).
gacgaacaacagaattgaa

SEQ ID NO: 527774 - DNA, 19 bp, Mus musculus
  siRNA target sequence for Il1rapl2 (NM_030688.1,858-876).
ggaaaatcagccaagtgtt

SEQ ID NO: 527775 - DNA, 19 bp, Mus musculus
  siRNA target sequence for Il1rapl2 (NM_030688.1,938-956).
gggagtctggaccaatgat

SEQ ID NO: 527776 - DNA, 19 bp, Mus musculus
  siRNA target sequence for Il1rapl2 (NM_030688.1,940-958).
gagtctggaccaatgatct

SEQ ID NO: 527777 - DNA, 19 bp, Mus musculus
  siRNA target sequence for Il1rapl2 (NM_030688.1,988-1006).
gaactggcaggtcacatta

SEQ ID NO: 527778 - DNA, 19 bp, Mus musculus
  siRNA target sequence for Il1rapl2 (NM_030688.1,1051-1069).
gaagttgagttgacactta

SEQ ID NO: 527779 - DNA, 19 bp, Mus musculus
  siRNA target sequence for Il1rapl2 (NM_030688.1,1093-1111).
gacttggctaattatacct

SEQ ID NO: 527780 - DNA, 19 bp, Mus musculus
  siRNA target sequence for Il1rapl2 (NM_030688.1,1137-1155).
gaaacacgccagtgttcta

SEQ ID NO: 527781 - DNA, 19 bp, Mus musculus
  siRNA target sequence for Il1rapl2 (NM_030688.1,1156-1174).
ctgcgaaaaaaggatttaa

SEQ ID NO: 527782 - DNA, 19 bp, Mus musculus
  siRNA target sequence for Il1rapl2 (NM_030688.1,1158-1176).
gcgaaaaaaggatttaata

SEQ ID NO: 527783 - DNA, 19 bp, Mus musculus
  siRNA target sequence for Il1rapl2 (NM_030688.1,1159-1177).
cgaaaaaaggatttaatat

SEQ ID NO: 527784 - DNA, 19 bp, Mus musculus
  siRNA target sequence for Il1rapl2 (NM_030688.1,1230-1248).
gctactggtggtctacaaa

SEQ ID NO: 527785 - DNA, 19 bp, Mus musculus
  siRNA target sequence for Il1rapl2 (NM_030688.1,1242-1260).
ctacaaatgctacaacata

SEQ ID NO: 527786 - DNA, 19 bp, Mus musculus
  siRNA target sequence for Il1rapl2 (NM_030688.1,1275-1293).
ctacagacagcgttttgga

SEQ ID NO: 527787 - DNA, 19 bp, Mus musculus
  siRNA target sequence for Il1rapl2 (NM_030688.1,1284-1302).
gcgttttggaggtgatgaa

SEQ ID NO: 527788 - DNA, 19 bp, Mus musculus
  siRNA target sequence for Il1rapl2 (NM_030688.1,1285-1303).
cgttttggaggtgatgaaa

SEQ ID NO: 527789 - DNA, 19 bp, Mus musculus
  siRNA target sequence for Il1rapl2 (NM_030688.1,1321-1339).
gaatatgatgcgtatctct

SEQ ID NO: 527790 - DNA, 19 bp, Mus musculus
  siRNA target sequence for Il1rapl2 (NM_030688.1,1327-1345).
gatgcgtatctctcttaca

SEQ ID NO: 527791 - DNA, 19 bp, Mus musculus
  siRNA target sequence for Il1rapl2 (NM_030688.1,1330-1348).
gcgtatctctcttacacaa

SEQ ID NO: 527792 - DNA, 19 bp, Mus musculus
  siRNA target sequence for Il1rapl2 (NM_030688.1,1344-1362).
cacaaaagtggatcaagat

SEQ ID NO: 527793 - DNA, 19 bp, Mus musculus
  siRNA target sequence for Il1rapl2 (NM_030688.1,1432-1450).
cactatggatataaactct

SEQ ID NO: 527794 - DNA, 19 bp, Mus musculus
  siRNA target sequence for Il1rapl2 (NM_030688.1,1459-1477).
gaaagggatctcattccaa

SEQ ID NO: 527795 - DNA, 19 bp, Mus musculus
  siRNA target sequence for Il1rapl2 (NM_030688.1,1478-1496).
gtggaacatatattgaaga

SEQ ID NO: 527796 - DNA, 19 bp, Mus musculus
  siRNA target sequence for Il1rapl2 (NM_030688.1,1520-1538).
gcagacgacttattatcgt

SEQ ID NO: 527797 - DNA, 19 bp, Mus musculus
  siRNA target sequence for Il1rapl2 (NM_030688.1,1536-1554).
cgtgctaactccagactat

SEQ ID NO: 527798 - DNA, 19 bp, Mus musculus
  siRNA target sequence for Il1rapl2 (NM_030688.1,1539-1557).
gctaactccagactatatt

SEQ ID NO: 527799 - DNA, 19 bp, Mus musculus
  siRNA target sequence for Il1rapl2 (NM_030688.1,1560-1578).
cagacggggatggagtatt

SEQ ID NO: 527800 - DNA, 19 bp, Mus musculus
  siRNA target sequence for Il1rapl2 (NM_030688.1,1566-1584).
gggatggagtattttcgaa

SEQ ID NO: 527801 - DNA, 19 bp, Mus musculus
  siRNA target sequence for Il1rapl2 (NM_030688.1,1673-1691).
gccaggaagtggaatcact

SEQ ID NO: 527802 - DNA, 19 bp, Mus musculus
  siRNA target sequence for Il1rapl2 (NM_030688.1,1674-1692).
ccaggaagtggaatcacta

SEQ ID NO: 527803 - DNA, 19 bp, Mus musculus
  siRNA target sequence for Il1rapl2 (NM_030688.1,1675-1693).
caggaagtggaatcactaa

SEQ ID NO: 527804 - DNA, 19 bp, Mus musculus
  siRNA target sequence for Il1rapl2 (NM_030688.1,1688-1706).
cactaaagcacaacatcaa

SEQ ID NO: 527805 - DNA, 19 bp, Mus musculus
  siRNA target sequence for Il1rapl2 (NM_030688.1,1732-1750).
ggacccaaaagcagcaaat

SEQ ID NO: 527806 - DNA, 19 bp, Mus musculus
  siRNA target sequence for Il1rapl2 (NM_030688.1,1733-1751).
gacccaaaagcagcaaatt

SEQ ID NO: 527807 - DNA, 19 bp, Mus musculus
  siRNA target sequence for Il1rapl2 (NM_030688.1,1735-1753).
cccaaaagcagcaaattaa

SEQ ID NO: 527808 - DNA, 19 bp, Mus musculus
  siRNA target sequence for Il1rapl2 (NM_030688.1,1736-1754).
ccaaaagcagcaaattaaa

SEQ ID NO: 527809 - DNA, 19 bp, Mus musculus
  siRNA target sequence for Il1rapl2 (NM_030688.1,1746-1764).
caaattaaattctaagttt

SEQ ID NO: 527810 - DNA, 19 bp, Mus musculus
  siRNA target sequence for Il1rapl2 (NM_030688.1,1766-1784).
ggaagcacttagtgtatga

SEQ ID NO: 527811 - DNA, 19 bp, Mus musculus
  siRNA target sequence for Il1rapl2 (NM_030688.1,1845-1863).
ggggctttttggagaactt

SEQ ID NO: 527812 - DNA, 19 bp, Mus musculus
  siRNA target sequence for Il1rapl2 (NM_030688.1,1942-1960).
cattcggattcaatgcaaa

SEQ ID NO: 527813 - DNA, 19 bp, Mus musculus
  siRNA target sequence for Il1rapl2 (NM_030688.1,1968-1986).
ctgttgcagaggataccaa

SEQ ID NO: 527814 - DNA, 19 bp, Mus musculus
  siRNA target sequence for Il1rapl2 (NM_030688.1,2026-2044).
ggcaaccaccacacttact

SEQ ID NO: 527815 - DNA, 19 bp, Mus musculus
  siRNA target sequence for Il1rapl2 (NM_030688.1,2028-2046).
caaccaccacacttactgt

SEQ ID NO: 527816 - DNA, 19 bp, Mus musculus
  siRNA target sequence for Il1rapl2 (NM_030688.1,2052-2070).
gccactgacactactcaat

SEQ ID NO: 527817 - DNA, 19 bp, Mus musculus
  siRNA target sequence for Il1rapl2 (NM_030688.1,2071-2089).
ggacagctaccccttaaca

SEQ ID NO: 527818 - DNA, 19 bp, Mus musculus
  siRNA target sequence for Il1rapl2 (NM_030688.1,2074-2092).
cagctaccccttaacaact

SEQ ID NO: 527819 - DNA, 19 bp, Mus musculus
  siRNA target sequence for Il1rapl2 (NM_030688.1,2109-2127).
ggaattttcaaggaacaat

SEQ ID NO: 527820 - DNA, 19 bp, Mus musculus
  siRNA target sequence for Il1rapl2 (NM_030688.1,2128-2146).
cccctactgccattaacat

SEQ ID NO: 527821 - DNA, 19 bp, Mus musculus
  siRNA target sequence for Il1rapl2 (NM_030688.1,2155-2173).
cttagcttcaccagtgata

SEQ ID NO: 527822 - DNA, 19 bp, Mus musculus
  siRNA target sequence for Il1rl1 (NM_010743.1,284-302).
gttacggagggcagtaaat

SEQ ID NO: 527823 - DNA, 19 bp, Mus musculus
  siRNA target sequence for Il1rl1 (NM_010743.1,303-321).
cgtcctggggtctggaaaa

SEQ ID NO: 527824 - DNA, 19 bp, Mus musculus
  siRNA target sequence for Il1rl1 (NM_010743.1,368-386).
cctgtggaatggtattact

SEQ ID NO: 527825 - DNA, 19 bp, Mus musculus
  siRNA target sequence for Il1rl1 (NM_010743.1,378-396).
ggtattactcagatacaaa

SEQ ID NO: 527826 - DNA, 19 bp, Mus musculus
  siRNA target sequence for Il1rl1 (NM_010743.1,438-456).
caagagatcgtctgaagtt

SEQ ID NO: 527827 - DNA, 19 bp, Mus musculus
  siRNA target sequence for Il1rl1 (NM_010743.1,441-459).
gagatcgtctgaagtttct

SEQ ID NO: 527828 - DNA, 19 bp, Mus musculus
  siRNA target sequence for Il1rl1 (NM_010743.1,472-490).
ggaagactctgggatttat

SEQ ID NO: 527829 - DNA, 19 bp, Mus musculus
  siRNA target sequence for Il1rl1 (NM_010743.1,482-500).
gggatttatgcttgtgtta

SEQ ID NO: 527830 - DNA, 19 bp, Mus musculus
  siRNA target sequence for Il1rl1 (NM_010743.1,532-550).
cttgaatgtcaccatacat

SEQ ID NO: 527831 - DNA, 19 bp, Mus musculus
  siRNA target sequence for Il1rl1 (NM_010743.1,535-553).
gaatgtcaccatacataaa

SEQ ID NO: 527832 - DNA, 19 bp, Mus musculus
  siRNA target sequence for Il1rl1 (NM_010743.1,564-582).
gctgcaatatccctgatta

SEQ ID NO: 527833 - DNA, 19 bp, Mus musculus
  siRNA target sequence for Il1rl1 (NM_010743.1,567-585).
gcaatatccctgattattt

SEQ ID NO: 527834 - DNA, 19 bp, Mus musculus
  siRNA target sequence for Il1rl1 (NM_010743.1,575-593).
cctgattatttgatgtact

SEQ ID NO: 527835 - DNA, 19 bp, Mus musculus
  siRNA target sequence for Il1rl1 (NM_010743.1,597-615).
cagtacgtggatcagataa

SEQ ID NO: 527836 - DNA, 19 bp, Mus musculus
  siRNA target sequence for Il1rl1 (NM_010743.1,599-617).
gtacgtggatcagataaaa

SEQ ID NO: 527837 - DNA, 19 bp, Mus musculus
  siRNA target sequence for Il1rl1 (NM_010743.1,602-620).
cgtggatcagataaaaatt

SEQ ID NO: 527838 - DNA, 19 bp, Mus musculus
  siRNA target sequence for Il1rl1 (NM_010743.1,625-643).
gataacgtgtccaacaatt

SEQ ID NO: 527839 - DNA, 19 bp, Mus musculus
  siRNA target sequence for Il1rl1 (NM_010743.1,635-653).
ccaacaattgacctgtata

SEQ ID NO: 527840 - DNA, 19 bp, Mus musculus
  siRNA target sequence for Il1rl1 (NM_010743.1,636-654).
caacaattgacctgtataa

SEQ ID NO: 527841 - DNA, 19 bp, Mus musculus
  siRNA target sequence for Il1rl1 (NM_010743.1,719-737).
cacaggtcctacttgttca

SEQ ID NO: 527842 - DNA, 19 bp, Mus musculus
  siRNA target sequence for Il1rl1 (NM_010743.1,721-739).
caggtcctacttgttcatt

SEQ ID NO: 527843 - DNA, 19 bp, Mus musculus
  siRNA target sequence for Il1rl1 (NM_010743.1,723-741).
ggtcctacttgttcattga

SEQ ID NO: 527844 - DNA, 19 bp, Mus musculus
  siRNA target sequence for Il1rl1 (NM_010743.1,767-785).
gactacacttgtcaattca

SEQ ID NO: 527845 - DNA, 19 bp, Mus musculus
  siRNA target sequence for Il1rl1 (NM_010743.1,826-844).
cagatcattcacagttgaa

SEQ ID NO: 527846 - DNA, 19 bp, Mus musculus
  siRNA target sequence for Il1rl1 (NM_010743.1,828-846).
gatcattcacagttgaaga

SEQ ID NO: 527847 - DNA, 19 bp, Mus musculus
  siRNA target sequence for Il1rl1 (NM_010743.1,895-913).
cacaatggaagtggaaata

SEQ ID NO: 527848 - DNA, 19 bp, Mus musculus
  siRNA target sequence for Il1rl1 (NM_010743.1,979-997).
cctgtggcagattaacaaa

SEQ ID NO: 527849 - DNA, 19 bp, Mus musculus
  siRNA target sequence for Il1rl1 (NM_010743.1,980-998).
ctgtggcagattaacaaaa

SEQ ID NO: 527850 - DNA, 19 bp, Mus musculus
  siRNA target sequence for Il1rl1 (NM_010743.1,982-1000).
gtggcagattaacaaaaca

SEQ ID NO: 527851 - DNA, 19 bp, Mus musculus
  siRNA target sequence for Il1rl1 (NM_010743.1,984-1002).
ggcagattaacaaaacagt

SEQ ID NO: 527852 - DNA, 19 bp, Mus musculus
  siRNA target sequence for Il1rl1 (NM_010743.1,985-1003).
gcagattaacaaaacagta

SEQ ID NO: 527853 - DNA, 19 bp, Mus musculus
  siRNA target sequence for Il1rl1 (NM_010743.1,1063-1081).
caatgacatggattgttta

SEQ ID NO: 527854 - DNA, 19 bp, Mus musculus
  siRNA target sequence for Il1rl1 (NM_010743.1,1067-1085).
gacatggattgtttaacct

SEQ ID NO: 527855 - DNA, 19 bp, Mus musculus
  siRNA target sequence for Il1rl1 (NM_010743.1,1150-1168).
gaaccttcatggcatgata

SEQ ID NO: 527856 - DNA, 19 bp, Mus musculus
  siRNA target sequence for Il1rl1 (NM_010743.1,1207-1225).
ggagtgtccctcacacatt

SEQ ID NO: 527857 - DNA, 19 bp, Mus musculus
  siRNA target sequence for Il1rl2 (NM_133193.1,336-354).
cacatacccgccagaaaca

SEQ ID NO: 527858 - DNA, 19 bp, Mus musculus
  siRNA target sequence for Il1rl2 (NM_133193.1,353-371).
caaacggggcagtaaatct

SEQ ID NO: 527859 - DNA, 19 bp, Mus musculus
  siRNA target sequence for Il1rl2 (NM_133193.1,378-396).
gtacaaaacacctagcaaa

SEQ ID NO: 527860 - DNA, 19 bp, Mus musculus
  siRNA target sequence for Il1rl2 (NM_133193.1,436-454).
gaccagacctggatcttgt

SEQ ID NO: 527861 - DNA, 19 bp, Mus musculus
  siRNA target sequence for Il1rl2 (NM_133193.1,471-489).
ggaggactccggtatctat

SEQ ID NO: 527862 - DNA, 19 bp, Mus musculus
  siRNA target sequence for Il1rl2 (NM_133193.1,475-493).
gactccggtatctatcagt

SEQ ID NO: 527863 - DNA, 19 bp, Mus musculus
  siRNA target sequence for Il1rl2 (NM_133193.1,482-500).
gtatctatcagtgtgttat

SEQ ID NO: 527864 - DNA, 19 bp, Mus musculus
  siRNA target sequence for Il1rl2 (NM_133193.1,508-526).
gcccacaactgctaccaaa

SEQ ID NO: 527865 - DNA, 19 bp, Mus musculus
  siRNA target sequence for Il1rl2 (NM_133193.1,509-527).
cccacaactgctaccaaat

SEQ ID NO: 527866 - DNA, 19 bp, Mus musculus
  siRNA target sequence for Il1rl2 (NM_133193.1,523-541).
caaatagctgtgaacctaa

SEQ ID NO: 527867 - DNA, 19 bp, Mus musculus
  siRNA target sequence for Il1rl2 (NM_133193.1,532-550).
gtgaacctaaccgttttaa

SEQ ID NO: 527868 - DNA, 19 bp, Mus musculus
  siRNA target sequence for Il1rl2 (NM_133193.1,534-552).
gaacctaaccgttttaaaa

SEQ ID NO: 527869 - DNA, 19 bp, Mus musculus
  siRNA target sequence for Il1rl2 (NM_133193.1,576-594).
ggaggggagtcccgtaaat

SEQ ID NO: 527870 - DNA, 19 bp, Mus musculus
  siRNA target sequence for Il1rl2 (NM_133193.1,577-595).
gaggggagtcccgtaaatt

SEQ ID NO: 527871 - DNA, 19 bp, Mus musculus
  siRNA target sequence for Il1rl2 (NM_133193.1,579-597).
ggggagtcccgtaaattca

SEQ ID NO: 527872 - DNA, 19 bp, Mus musculus
  siRNA target sequence for Il1rl2 (NM_133193.1,601-619).
gatgtgtaccagcaaatat

SEQ ID NO: 527873 - DNA, 19 bp, Mus musculus
  siRNA target sequence for Il1rl2 (NM_133193.1,613-631).
caaatattacccataggaa

SEQ ID NO: 527874 - DNA, 19 bp, Mus musculus
  siRNA target sequence for Il1rl2 (NM_133193.1,636-654).
gggcagtctgaattgtcat

SEQ ID NO: 527875 - DNA, 19 bp, Mus musculus
  siRNA target sequence for Il1rl2 (NM_133193.1,641-659).
gtctgaattgtcatctcta

SEQ ID NO: 527876 - DNA, 19 bp, Mus musculus
  siRNA target sequence for Il1rl2 (NM_133193.1,671-689).
gttgtgctttggattcaat

SEQ ID NO: 527877 - DNA, 19 bp, Mus musculus
  siRNA target sequence for Il1rl2 (NM_133193.1,738-756).
cccttcaggagcaaagctt

SEQ ID NO: 527878 - DNA, 19 bp, Mus musculus
  siRNA target sequence for Il1rl2 (NM_133193.1,743-761).
caggagcaaagcttcttgt

SEQ ID NO: 527879 - DNA, 19 bp, Mus musculus
  siRNA target sequence for Il1rl2 (NM_133193.1,746-764).
gagcaaagcttcttgtgaa

SEQ ID NO: 527880 - DNA, 19 bp, Mus musculus
  siRNA target sequence for Il1rl2 (NM_133193.1,823-841).
gggagacacttcaccatta

SEQ ID NO: 527881 - DNA, 19 bp, Mus musculus
  siRNA target sequence for Il1rl2 (NM_133193.1,825-843).
gagacacttcaccattaga

SEQ ID NO: 527882 - DNA, 19 bp, Mus musculus
  siRNA target sequence for Il1rl2 (NM_133193.1,827-845).
gacacttcaccattagaaa

SEQ ID NO: 527883 - DNA, 19 bp, Mus musculus
  siRNA target sequence for Il1rl2 (NM_133193.1,829-847).
cacttcaccattagaaact

SEQ ID NO: 527884 - DNA, 19 bp, Mus musculus
  siRNA target sequence for Il1rl2 (NM_133193.1,881-899).
gaagaaggatccctaacat

SEQ ID NO: 527885 - DNA, 19 bp, Mus musculus
  siRNA target sequence for Il1rl2 (NM_133193.1,893-911).
ctaacatcacgtatccaaa

SEQ ID NO: 527886 - DNA, 19 bp, Mus musculus
  siRNA target sequence for Il1rl2 (NM_133193.1,946-964).
ctcatcgtgaactgcaata

SEQ ID NO: 527887 - DNA, 19 bp, Mus musculus
  siRNA target sequence for Il1rl2 (NM_133193.1,948-966).
catcgtgaactgcaatata

SEQ ID NO: 527888 - DNA, 19 bp, Mus musculus
  siRNA target sequence for Il1rl2 (NM_133193.1,951-969).
cgtgaactgcaatataaca

SEQ ID NO: 527889 - DNA, 19 bp, Mus musculus
  siRNA target sequence for Il1rl2 (NM_133193.1,970-988).
gacacgaaggagaatacaa

SEQ ID NO: 527890 - DNA, 19 bp, Mus musculus
  siRNA target sequence for Il1rl2 (NM_133193.1,995-1013).
ggtgctggagagtcaacaa

SEQ ID NO: 527891 - DNA, 19 bp, Mus musculus
  siRNA target sequence for Il1rl2 (NM_133193.1,1024-1042).
gatgactactacaaagact

SEQ ID NO: 527892 - DNA, 19 bp, Mus musculus
  siRNA target sequence for Il1rl2 (NM_133193.1,1056-1074).
ggaaggaatcgaaaccaat

SEQ ID NO: 527893 - DNA, 19 bp, Mus musculus
  siRNA target sequence for Il1rl2 (NM_133193.1,1077-1095).
gtccttgagggatcaaatt

SEQ ID NO: 527894 - DNA, 19 bp, Mus musculus
  siRNA target sequence for Il1rl2 (NM_133193.1,1096-1114).
cggtacacagtgaacataa

SEQ ID NO: 527895 - DNA, 19 bp, Mus musculus
  siRNA target sequence for Il1rl2 (NM_133193.1,1098-1116).
gtacacagtgaacataaca

SEQ ID NO: 527896 - DNA, 19 bp, Mus musculus
  siRNA target sequence for Il1rl2 (NM_133193.1,1171-1189).
gtgtccgcagcctacatca

SEQ ID NO: 527897 - DNA, 19 bp, Mus musculus
  siRNA target sequence for Il1rl2 (NM_133193.1,1267-1285).
gttctgttcatctacaaca

SEQ ID NO: 527898 - DNA, 19 bp, Mus musculus
  siRNA target sequence for Il1rl2 (NM_133193.1,1286-1304).
gctttaagatcgacatcat

SEQ ID NO: 527899 - DNA, 19 bp, Mus musculus
  siRNA target sequence for Il1rl2 (NM_133193.1,1359-1377).
gtatgatgcctatgtctta

SEQ ID NO: 527900 - DNA, 19 bp, Mus musculus
  siRNA target sequence for Il1rl2 (NM_133193.1,1421-1439).
cactggtactgaagatctt

SEQ ID NO: 527901 - DNA, 19 bp, Mus musculus
  siRNA target sequence for Il1rl2 (NM_133193.1,1591-1609).
ggctttctaaagaacttgt

SEQ ID NO: 527902 - DNA, 19 bp, Mus musculus
  siRNA target sequence for Il1rl2 (NM_133193.1,1652-1670).
gcatgaaggtcattctgat

SEQ ID NO: 527903 - DNA, 19 bp, Mus musculus
  siRNA target sequence for Il1rl2 (NM_133193.1,1671-1689).
cgaactggagaaagtcaaa

SEQ ID NO: 527904 - DNA, 19 bp, Mus musculus
  siRNA target sequence for Il1rl2 (NM_133193.1,1704-1722).
gcccgagtccattcagtat

SEQ ID NO: 527905 - DNA, 19 bp, Mus musculus
  siRNA target sequence for Il1rl2 (NM_133193.1,1705-1723).
cccgagtccattcagtata

SEQ ID NO: 527906 - DNA, 19 bp, Mus musculus
  siRNA target sequence for Il1rl2 (NM_133193.1,1706-1724).
ccgagtccattcagtatat

SEQ ID NO: 527907 - DNA, 19 bp, Mus musculus
  siRNA target sequence for Il1rl2 (NM_133193.1,1799-1817).
ggaagaaagtgagatatca

SEQ ID NO: 527908 - DNA, 19 bp, Mus musculus
  siRNA target sequence for Il1rl2 (NM_133193.1,1864-1882).
ggacacataccctgcaatt

SEQ ID NO: 527909 - DNA, 19 bp, Mus musculus
  siRNA target sequence for Il1rl2 (NM_133193.1,1884-1902).
caaggcaggcaaatgcaat

SEQ ID NO: 527910 - DNA, 19 bp, Mus musculus
  siRNA target sequence for Il1rl2 (NM_133193.1,1903-1921).
gctgccacagggctcataa

SEQ ID NO: 527911 - DNA, 19 bp, Mus musculus
  siRNA target sequence for Tlr1 (NM_030682.1,187-205).
ctcatcttctactgtatca

SEQ ID NO: 527912 - DNA, 19 bp, Mus musculus
  siRNA target sequence for Tlr1 (NM_030682.1,195-213).
ctactgtatcattgtttta

SEQ ID NO: 527913 - DNA, 19 bp, Mus musculus
  siRNA target sequence for Tlr1 (NM_030682.1,208-226).
gttttaggactgacactta

SEQ ID NO: 527914 - DNA, 19 bp, Mus musculus
  siRNA target sequence for Tlr1 (NM_030682.1,219-237).
gacacttatgaaaatccaa

SEQ ID NO: 527915 - DNA, 19 bp, Mus musculus
  siRNA target sequence for Tlr1 (NM_030682.1,244-262).
gaggaatgtgagcttatca

SEQ ID NO: 527916 - DNA, 19 bp, Mus musculus
  siRNA target sequence for Tlr1 (NM_030682.1,301-319).
gacctacccttgcaaacaa

SEQ ID NO: 527917 - DNA, 19 bp, Mus musculus
  siRNA target sequence for Tlr1 (NM_030682.1,303-321).
cctacccttgcaaacaact

SEQ ID NO: 527918 - DNA, 19 bp, Mus musculus
  siRNA target sequence for Tlr1 (NM_030682.1,304-322).
ctacccttgcaaacaacta

SEQ ID NO: 527919 - DNA, 19 bp, Mus musculus
  siRNA target sequence for Tlr1 (NM_030682.1,307-325).
cccttgcaaacaactactt

SEQ ID NO: 527920 - DNA, 19 bp, Mus musculus
  siRNA target sequence for Tlr1 (NM_030682.1,309-327).
cttgcaaacaactacttta

SEQ ID NO: 527921 - DNA, 19 bp, Mus musculus
  siRNA target sequence for Tlr1 (NM_030682.1,312-330).
gcaaacaactactttagat

SEQ ID NO: 527922 - DNA, 19 bp, Mus musculus
  siRNA target sequence for Tlr1 (NM_030682.1,320-338).
ctactttagatctatcaca

SEQ ID NO: 527923 - DNA, 19 bp, Mus musculus
  siRNA target sequence for Tlr1 (NM_030682.1,323-341).
ctttagatctatcacaaaa

SEQ ID NO: 527924 - DNA, 19 bp, Mus musculus
  siRNA target sequence for Tlr1 (NM_030682.1,411-429).
caacagactccagtatctt

SEQ ID NO: 527925 - DNA, 19 bp, Mus musculus
  siRNA target sequence for Tlr1 (NM_030682.1,457-475).
gagctggaatatttggatt

SEQ ID NO: 527926 - DNA, 19 bp, Mus musculus
  siRNA target sequence for Tlr1 (NM_030682.1,487-505).
gagctaaaggtgatcttgt

SEQ ID NO: 527927 - DNA, 19 bp, Mus musculus
  siRNA target sequence for Tlr1 (NM_030682.1,556-574).
gatgccctgcctatatgca

SEQ ID NO: 527928 - DNA, 19 bp, Mus musculus
  siRNA target sequence for Tlr1 (NM_030682.1,561-579).
cctgcctatatgcaaagaa

SEQ ID NO: 527929 - DNA, 19 bp, Mus musculus
  siRNA target sequence for Tlr1 (NM_030682.1,584-602).
gcaacatgtcccaactaca

SEQ ID NO: 527930 - DNA, 19 bp, Mus musculus
  siRNA target sequence for Tlr1 (NM_030682.1,646-664).
cagctgattgctcatttga

SEQ ID NO: 527931 - DNA, 19 bp, Mus musculus
  siRNA target sequence for Tlr1 (NM_030682.1,655-673).
gctcatttgaacatcagta

SEQ ID NO: 527932 - DNA, 19 bp, Mus musculus
  siRNA target sequence for Tlr1 (NM_030682.1,740-758).
gcactgagactctgcatat

SEQ ID NO: 527933 - DNA, 19 bp, Mus musculus
  siRNA target sequence for Tlr1 (NM_030682.1,890-908).
caaagcttggaaagaatct

SEQ ID NO: 527934 - DNA, 19 bp, Mus musculus
  siRNA target sequence for Tlr1 (NM_030682.1,903-921).
gaatctgaagctctcaaat

SEQ ID NO: 527935 - DNA, 19 bp, Mus musculus
  siRNA target sequence for Tlr1 (NM_030682.1,917-935).
caaatcttaccctgaacaa

SEQ ID NO: 527936 - DNA, 19 bp, Mus musculus
  siRNA target sequence for Tlr1 (NM_030682.1,937-955).
gtggaaacaacgtggaatt

SEQ ID NO: 527937 - DNA, 19 bp, Mus musculus
  siRNA target sequence for Tlr1 (NM_030682.1,940-958).
gaaacaacgtggaattcct

SEQ ID NO: 527938 - DNA, 19 bp, Mus musculus
  siRNA target sequence for Tlr1 (NM_030682.1,947-965).
cgtggaattccttcattaa

SEQ ID NO: 527939 - DNA, 19 bp, Mus musculus
  siRNA target sequence for Tlr1 (NM_030682.1,983-1001).
ggcatacgccagtcaaata

SEQ ID NO: 527940 - DNA, 19 bp, Mus musculus
  siRNA target sequence for Tlr1 (NM_030682.1,984-1002).
gcatacgccagtcaaatat

SEQ ID NO: 527941 - DNA, 19 bp, Mus musculus
  siRNA target sequence for Tlr1 (NM_030682.1,985-1003).
catacgccagtcaaatatt

SEQ ID NO: 527942 - DNA, 19 bp, Mus musculus
  siRNA target sequence for Tlr1 (NM_030682.1,1039-1057).
gccttcaggatgttcaatt

SEQ ID NO: 527943 - DNA, 19 bp, Mus musculus
  siRNA target sequence for Tlr1 (NM_030682.1,1044-1062).
caggatgttcaattattct

SEQ ID NO: 527944 - DNA, 19 bp, Mus musculus
  siRNA target sequence for Tlr1 (NM_030682.1,1046-1064).
ggatgttcaattattctga

SEQ ID NO: 527945 - DNA, 19 bp, Mus musculus
  siRNA target sequence for Tlr1 (NM_030682.1,1074-1092).
gaaggctttgtcgatacat

SEQ ID NO: 527946 - DNA, 19 bp, Mus musculus
  siRNA target sequence for Tlr1 (NM_030682.1,1077-1095).
ggctttgtcgatacatcaa

SEQ ID NO: 527947 - DNA, 19 bp, Mus musculus
  siRNA target sequence for Tlr1 (NM_030682.1,1120-1138).
ccccaaagttacatataca

SEQ ID NO: 527948 - DNA, 19 bp, Mus musculus
  siRNA target sequence for Tlr1 (NM_030682.1,1155-1173).
gaacatccaaaactttaca

SEQ ID NO: 527949 - DNA, 19 bp, Mus musculus
  siRNA target sequence for Tlr1 (NM_030682.1,1237-1255).
gactttacagataaccttt

SEQ ID NO: 527950 - DNA, 19 bp, Mus musculus
  siRNA target sequence for Tlr1 (NM_030682.1,1244-1262).
cagataaccttttaacaga

SEQ ID NO: 527951 - DNA, 19 bp, Mus musculus
  siRNA target sequence for Tlr1 (NM_030682.1,1261-1279).
gacatggtttttaaagact

SEQ ID NO: 527952 - DNA, 19 bp, Mus musculus
  siRNA target sequence for Tlr1 (NM_030682.1,1283-1301).
gaaacttagttagattgaa

SEQ ID NO: 527953 - DNA, 19 bp, Mus musculus
  siRNA target sequence for Tlr1 (NM_030682.1,1287-1305).
cttagttagattgaaaaca

SEQ ID NO: 527954 - DNA, 19 bp, Mus musculus
  siRNA target sequence for Tlr1 (NM_030682.1,1351-1369).
ctcacatctgcaaagatga

SEQ ID NO: 527955 - DNA, 19 bp, Mus musculus
  siRNA target sequence for Tlr1 (NM_030682.1,1365-1383).
gatgacatccctacaaaaa

SEQ ID NO: 527956 - DNA, 19 bp, Mus musculus
  siRNA target sequence for Tlr1 (NM_030682.1,1370-1388).
catccctacaaaaactaga

SEQ ID NO: 527957 - DNA, 19 bp, Mus musculus
  siRNA target sequence for Tlr1 (NM_030682.1,1373-1391).
ccctacaaaaactagacat

SEQ ID NO: 527958 - DNA, 19 bp, Mus musculus
  siRNA target sequence for Tlr1 (NM_030682.1,1374-1392).
cctacaaaaactagacatt

SEQ ID NO: 527959 - DNA, 19 bp, Mus musculus
  siRNA target sequence for Tlr1 (NM_030682.1,1375-1393).
ctacaaaaactagacatta

SEQ ID NO: 527960 - DNA, 19 bp, Mus musculus
  siRNA target sequence for Tlr1 (NM_030682.1,1433-1451).
gcgcctggacccagagttt

SEQ ID NO: 527961 - DNA, 19 bp, Mus musculus
  siRNA target sequence for Tlr1 (NM_030682.1,1444-1462).
cagagtttgttagttttaa

SEQ ID NO: 527962 - DNA, 19 bp, Mus musculus
  siRNA target sequence for Tlr1 (NM_030682.1,2463-2481).
gaacaagcatggacttttt

SEQ ID NO: 527963 - DNA, 19 bp, Mus musculus
  siRNA target sequence for Tlr1 (NM_030682.1,2490-2508).
cctaagagcatccattaat

SEQ ID NO: 527964 - DNA, 19 bp, Mus musculus
  siRNA target sequence for Tlr2 (NM_011905.2,538-556).
gatcttggtggccataaca

SEQ ID NO: 527965 - DNA, 19 bp, Mus musculus
  siRNA target sequence for Tlr2 (NM_011905.2,623-641).
ggccgctccaggtctttca

SEQ ID NO: 527966 - DNA, 19 bp, Mus musculus
  siRNA target sequence for Tlr2 (NM_011905.2,631-649).
caggtctttcacctctatt

SEQ ID NO: 527967 - DNA, 19 bp, Mus musculus
  siRNA target sequence for Tlr2 (NM_011905.2,683-701).
gacctgtctttcaacaaga

SEQ ID NO: 527968 - DNA, 19 bp, Mus musculus
  siRNA target sequence for Tlr2 (NM_011905.2,760-778).
gaagtccagcagaatcaat

SEQ ID NO: 527969 - DNA, 19 bp, Mus musculus
  siRNA target sequence for Tlr2 (NM_011905.2,763-781).
gtccagcagaatcaataca

SEQ ID NO: 527970 - DNA, 19 bp, Mus musculus
  siRNA target sequence for Tlr2 (NM_011905.2,810-828).
gcagtcttgaacatttgga

SEQ ID NO: 527971 - DNA, 19 bp, Mus musculus
  siRNA target sequence for Tlr2 (NM_011905.2,813-831).
gtcttgaacatttggattt

SEQ ID NO: 527972 - DNA, 19 bp, Mus musculus
  siRNA target sequence for Tlr2 (NM_011905.2,948-966).
ccaatctcacaaatttaca

SEQ ID NO: 527973 - DNA, 19 bp, Mus musculus
  siRNA target sequence for Tlr2 (NM_011905.2,949-967).
caatctcacaaatttacaa

SEQ ID NO: 527974 - DNA, 19 bp, Mus musculus
  siRNA target sequence for Tlr2 (NM_011905.2,999-1017).
gtgagataaggagaataga

SEQ ID NO: 527975 - DNA, 19 bp, Mus musculus
  siRNA target sequence for Tlr2 (NM_011905.2,1176-1194).
gttctgtgagatatttaga

SEQ ID NO: 527976 - DNA, 19 bp, Mus musculus
  siRNA target sequence for Tlr2 (NM_011905.2,1181-1199).
gtgagatatttagaactaa

SEQ ID NO: 527977 - DNA, 19 bp, Mus musculus
  siRNA target sequence for Tlr2 (NM_011905.2,1183-1201).
gagatatttagaactaaga

SEQ ID NO: 527978 - DNA, 19 bp, Mus musculus
  siRNA target sequence for Tlr2 (NM_011905.2,1193-1211).
gaactaagagatactaact

SEQ ID NO: 527979 - DNA, 19 bp, Mus musculus
  siRNA target sequence for Tlr2 (NM_011905.2,1292-1310).
ctcactgatgaaagcttta

SEQ ID NO: 527980 - DNA, 19 bp, Mus musculus
  siRNA target sequence for Tlr2 (NM_011905.2,1296-1314).
ctgatgaaagctttaacga

SEQ ID NO: 527981 - DNA, 19 bp, Mus musculus
  siRNA target sequence for Tlr2 (NM_011905.2,1422-1440).
gcgagctgggtaaagtaga

SEQ ID NO: 527982 - DNA, 19 bp, Mus musculus
  siRNA target sequence for Tlr2 (NM_011905.2,1423-1441).
cgagctgggtaaagtagaa

SEQ ID NO: 527983 - DNA, 19 bp, Mus musculus
  siRNA target sequence for Tlr2 (NM_011905.2,1449-1467).
ctatccggaggttgcatat

SEQ ID NO: 527984 - DNA, 19 bp, Mus musculus
  siRNA target sequence for Tlr2 (NM_011905.2,1462-1480).
gcatatcccccagttctat

SEQ ID NO: 527985 - DNA, 19 bp, Mus musculus
  siRNA target sequence for Tlr2 (NM_011905.2,1463-1481).
catatcccccagttctatt

SEQ ID NO: 527986 - DNA, 19 bp, Mus musculus
  siRNA target sequence for Tlr2 (NM_011905.2,1468-1486).
cccccagttctatttgttt

SEQ ID NO: 527987 - DNA, 19 bp, Mus musculus
  siRNA target sequence for Tlr2 (NM_011905.2,1490-1508).
gacctgagtactgtctatt

SEQ ID NO: 527988 - DNA, 19 bp, Mus musculus
  siRNA target sequence for Tlr2 (NM_011905.2,1519-1537).
gaaggtgaagcgaatcaca

SEQ ID NO: 527989 - DNA, 19 bp, Mus musculus
  siRNA target sequence for Tlr2 (NM_011905.2,1572-1590).
cgttctcccagcatttaaa

SEQ ID NO: 527990 - DNA, 19 bp, Mus musculus
  siRNA target sequence for Tlr2 (NM_011905.2,1603-1621).
cttagacctcagcgaaaat

SEQ ID NO: 527991 - DNA, 19 bp, Mus musculus
  siRNA target sequence for Tlr2 (NM_011905.2,1607-1625).
gacctcagcgaaaatctga

SEQ ID NO: 527992 - DNA, 19 bp, Mus musculus
  siRNA target sequence for Tlr2 (NM_011905.2,1688-1706).
gttttgagccagaatcatt

SEQ ID NO: 527993 - DNA, 19 bp, Mus musculus
  siRNA target sequence for Tlr2 (NM_011905.2,1693-1711).
gagccagaatcatttgaga

SEQ ID NO: 527994 - DNA, 19 bp, Mus musculus
  siRNA target sequence for Tlr2 (NM_011905.2,1697-1715).
cagaatcatttgagatcaa

SEQ ID NO: 527995 - DNA, 19 bp, Mus musculus
  siRNA target sequence for Tlr2 (NM_011905.2,1703-1721).
catttgagatcaatgcaaa

SEQ ID NO: 527996 - DNA, 19 bp, Mus musculus
  siRNA target sequence for Tlr2 (NM_011905.2,1766-1784).
gacatcagcaggaacactt

SEQ ID NO: 527997 - DNA, 19 bp, Mus musculus
  siRNA target sequence for Tlr2 (NM_011905.2,1848-1866).
cagggatccgggtggtaaa

SEQ ID NO: 527998 - DNA, 19 bp, Mus musculus
  siRNA target sequence for Tlr2 (NM_011905.2,1850-1868).
gggatccgggtggtaaaaa

SEQ ID NO: 527999 - DNA, 19 bp, Mus musculus
  siRNA target sequence for Tlr2 (NM_011905.2,1889-1907).
gaggtgttggatgttagta

SEQ ID NO: 528000 - DNA, 19 bp, Mus musculus
  siRNA target sequence for Tlr2 (NM_011905.2,1897-1915).
ggatgttagtaacaacaat

SEQ ID NO: 528001 - DNA, 19 bp, Mus musculus
  siRNA target sequence for Tlr2 (NM_011905.2,1909-1927).
caacaatcttgactcattt

SEQ ID NO: 528002 - DNA, 19 bp, Mus musculus
  siRNA target sequence for Tlr2 (NM_011905.2,1912-1930).
caatcttgactcattttct

SEQ ID NO: 528003 - DNA, 19 bp, Mus musculus
  siRNA target sequence for Tlr2 (NM_011905.2,1945-1963).
gctgcaagagctctatatt

SEQ ID NO: 528004 - DNA, 19 bp, Mus musculus
  siRNA target sequence for Tlr2 (NM_011905.2,1949-1967).
caagagctctatatttcca

SEQ ID NO: 528005 - DNA, 19 bp, Mus musculus
  siRNA target sequence for Tlr2 (NM_011905.2,1954-1972).
gctctatatttccagaaat

SEQ ID NO: 528006 - DNA, 19 bp, Mus musculus
  siRNA target sequence for Tlr2 (NM_011905.2,1955-1973).
ctctatatttccagaaata

SEQ ID NO: 528007 - DNA, 19 bp, Mus musculus
  siRNA target sequence for Tlr2 (NM_011905.2,2009-2027).
gtgttgctggtcatgaaaa

SEQ ID NO: 528008 - DNA, 19 bp, Mus musculus
  siRNA target sequence for Tlr2 (NM_011905.2,2100-2118).
caggcgacaaccactttgt

SEQ ID NO: 528009 - DNA, 19 bp, Mus musculus
  siRNA target sequence for Tlr2 (NM_011905.2,2102-2120).
ggcgacaaccactttgttt

SEQ ID NO: 528010 - DNA, 19 bp, Mus musculus
  siRNA target sequence for Tlr2 (NM_011905.2,2125-2143).
ctgcgaactcctatccttt

SEQ ID NO: 528011 - DNA, 19 bp, Mus musculus
  siRNA target sequence for Tlr2 (NM_011905.2,2128-2146).
cgaactcctatcctttact

SEQ ID NO: 528012 - DNA, 19 bp, Mus musculus
  siRNA target sequence for Tlr2 (NM_011905.2,2129-2147).
gaactcctatcctttacta

SEQ ID NO: 528013 - DNA, 19 bp, Mus musculus
  siRNA target sequence for Tlr2 (NM_011905.2,2250-2268).
cctccgtcttggaatgtca

SEQ ID NO: 528014 - DNA, 19 bp, Mus musculus
  siRNA target sequence for Tlr2 (NM_011905.2,2415-2433).
cctgcagggacgtttgcta

SEQ ID NO: 528015 - DNA, 19 bp, Mus musculus
  siRNA target sequence for Tlr2 (NM_011905.2,2419-2437).
cagggacgtttgctatgat

SEQ ID NO: 528016 - DNA, 19 bp, Mus musculus
  siRNA target sequence for Tlr2 (NM_011905.2,2590-2608).
cgaaaagagccacaaaact

SEQ ID NO: 528017 - DNA, 19 bp, Mus musculus
  siRNA target sequence for Tlr2 (NM_011905.2,2758-2776).
ctgcaaactgcgcaagata

SEQ ID NO: 528018 - DNA, 19 bp, Mus musculus
  siRNA target sequence for Tlr2 (NM_011905.2,2760-2778).
gcaaactgcgcaagataat

SEQ ID NO: 528019 - DNA, 19 bp, Mus musculus
  siRNA target sequence for Tlr2 (NM_011905.2,2765-2783).
ctgcgcaagataatgaaca

SEQ ID NO: 528020 - DNA, 19 bp, Mus musculus
  siRNA target sequence for Tlr2 (NM_011905.2,2824-2842).
ggaagtgttttgggtaaat

SEQ ID NO: 528021 - DNA, 19 bp, Mus musculus
  siRNA target sequence for Tlr2 (NM_011905.2,2843-2861).
ctgagaactgcaataaagt

SEQ ID NO: 528022 - DNA, 19 bp, Mus musculus
  siRNA target sequence for Tlr6 (NM_011604.1,53-71).
catgagccaagacagaaaa

SEQ ID NO: 528023 - DNA, 19 bp, Mus musculus
  siRNA target sequence for Tlr6 (NM_011604.1,80-98).
ggggagtttccactttgtt

SEQ ID NO: 528024 - DNA, 19 bp, Mus musculus
  siRNA target sequence for Tlr6 (NM_011604.1,124-142).
gcatgaccccgttctctaa

SEQ ID NO: 528025 - DNA, 19 bp, Mus musculus
  siRNA target sequence for Tlr6 (NM_011604.1,125-143).
catgaccccgttctctaat

SEQ ID NO: 528026 - DNA, 19 bp, Mus musculus
  siRNA target sequence for Tlr6 (NM_011604.1,128-146).
gaccccgttctctaatgaa

SEQ ID NO: 528027 - DNA, 19 bp, Mus musculus
  siRNA target sequence for Tlr6 (NM_011604.1,130-148).
ccccgttctctaatgaact

SEQ ID NO: 528028 - DNA, 19 bp, Mus musculus
  siRNA target sequence for Tlr6 (NM_011604.1,131-149).
cccgttctctaatgaactt

SEQ ID NO: 528029 - DNA, 19 bp, Mus musculus
  siRNA target sequence for Tlr6 (NM_011604.1,133-151).
cgttctctaatgaacttga

SEQ ID NO: 528030 - DNA, 19 bp, Mus musculus
  siRNA target sequence for Tlr6 (NM_011604.1,152-170).
gtctatggtagactattca

SEQ ID NO: 528031 - DNA, 19 bp, Mus musculus
  siRNA target sequence for Tlr6 (NM_011604.1,226-244).
gtctgtctcaaaactctat

SEQ ID NO: 528032 - DNA, 19 bp, Mus musculus
  siRNA target sequence for Tlr6 (NM_011604.1,230-248).
gtctcaaaactctatatct

SEQ ID NO: 528033 - DNA, 19 bp, Mus musculus
  siRNA target sequence for Tlr6 (NM_011604.1,232-250).
ctcaaaactctatatctga

SEQ ID NO: 528034 - DNA, 19 bp, Mus musculus
  siRNA target sequence for Tlr6 (NM_011604.1,252-270).
cttcggatgcctgatatca

SEQ ID NO: 528035 - DNA, 19 bp, Mus musculus
  siRNA target sequence for Tlr6 (NM_011604.1,261-279).
cctgatatcagctttctgt

SEQ ID NO: 528036 - DNA, 19 bp, Mus musculus
  siRNA target sequence for Tlr6 (NM_011604.1,378-396).
cacaatcggttgcaaaaca

SEQ ID NO: 528037 - DNA, 19 bp, Mus musculus
  siRNA target sequence for Tlr6 (NM_011604.1,384-402).
cggttgcaaaacatctctt

SEQ ID NO: 528038 - DNA, 19 bp, Mus musculus
  siRNA target sequence for Tlr6 (NM_011604.1,415-433).
cgagcctgaggcatctaga

SEQ ID NO: 528039 - DNA, 19 bp, Mus musculus
  siRNA target sequence for Tlr6 (NM_011604.1,426-444).
catctagacctctcattca

SEQ ID NO: 528040 - DNA, 19 bp, Mus musculus
  siRNA target sequence for Tlr6 (NM_011604.1,549-567).
gttgctcacttgcatctaa

SEQ ID NO: 528041 - DNA, 19 bp, Mus musculus
  siRNA target sequence for Tlr6 (NM_011604.1,571-589).
gcattcttctggacttagt

SEQ ID NO: 528042 - DNA, 19 bp, Mus musculus
  siRNA target sequence for Tlr6 (NM_011604.1,657-675).
gtctttcatccaaatagct

SEQ ID NO: 528043 - DNA, 19 bp, Mus musculus
  siRNA target sequence for Tlr6 (NM_011604.1,663-681).
catccaaatagcttgttct

SEQ ID NO: 528044 - DNA, 19 bp, Mus musculus
  siRNA target sequence for Tlr6 (NM_011604.1,698-716).
gtctgtaaacgctttagga

SEQ ID NO: 528045 - DNA, 19 bp, Mus musculus
  siRNA target sequence for Tlr6 (NM_011604.1,726-744).
ctgagtaatattaaattga

SEQ ID NO: 528046 - DNA, 19 bp, Mus musculus
  siRNA target sequence for Tlr6 (NM_011604.1,793-811).
gaggtccaaccttattgaa

SEQ ID NO: 528047 - DNA, 19 bp, Mus musculus
  siRNA target sequence for Tlr6 (NM_011604.1,815-833).
gaccctccagcacatagaa

SEQ ID NO: 528048 - DNA, 19 bp, Mus musculus
  siRNA target sequence for Tlr6 (NM_011604.1,847-865).
gctcggttaaacttttcca

SEQ ID NO: 528049 - DNA, 19 bp, Mus musculus
  siRNA target sequence for Tlr6 (NM_011604.1,848-866).
ctcggttaaacttttccaa

SEQ ID NO: 528050 - DNA, 19 bp, Mus musculus
  siRNA target sequence for Tlr6 (NM_011604.1,850-868).
cggttaaacttttccaatt

SEQ ID NO: 528051 - DNA, 19 bp, Mus musculus
  siRNA target sequence for Tlr6 (NM_011604.1,883-901).
cggtggagtacctcaatat

SEQ ID NO: 528052 - DNA, 19 bp, Mus musculus
  siRNA target sequence for Tlr6 (NM_011604.1,884-902).
ggtggagtacctcaatatt

SEQ ID NO: 528053 - DNA, 19 bp, Mus musculus
  siRNA target sequence for Tlr6 (NM_011604.1,885-903).
gtggagtacctcaatattt

SEQ ID NO: 528054 - DNA, 19 bp, Mus musculus
  siRNA target sequence for Tlr6 (NM_011604.1,925-943).
gaatcgacagggaagaatt

SEQ ID NO: 528055 - DNA, 19 bp, Mus musculus
  siRNA target sequence for Tlr6 (NM_011604.1,1100-1118).
gccatccccaagctcattt

SEQ ID NO: 528056 - DNA, 19 bp, Mus musculus
  siRNA target sequence for Tlr6 (NM_011604.1,1101-1119).
ccatccccaagctcattta

SEQ ID NO: 528057 - DNA, 19 bp, Mus musculus
  siRNA target sequence for Tlr6 (NM_011604.1,1167-1185).
ggctgttccaccttaaaga

SEQ ID NO: 528058 - DNA, 19 bp, Mus musculus
  siRNA target sequence for Tlr6 (NM_011604.1,1169-1187).
ctgttccaccttaaagaga

SEQ ID NO: 528059 - DNA, 19 bp, Mus musculus
  siRNA target sequence for Tlr6 (NM_011604.1,1195-1213).
cacttatcttacaaaggaa

SEQ ID NO: 528060 - DNA, 19 bp, Mus musculus
  siRNA target sequence for Tlr6 (NM_011604.1,1216-1234).
gtttgaagaacttttttaa

SEQ ID NO: 528061 - DNA, 19 bp, Mus musculus
  siRNA target sequence for Tlr6 (NM_011604.1,1236-1254).
gtagctctcatgactaaga

SEQ ID NO: 528062 - DNA, 19 bp, Mus musculus
  siRNA target sequence for Tlr6 (NM_011604.1,1242-1260).
ctcatgactaagaatatgt

SEQ ID NO: 528063 - DNA, 19 bp, Mus musculus
  siRNA target sequence for Tlr6 (NM_011604.1,1266-1284).
ctggaaactttggatgtta

SEQ ID NO: 528064 - DNA, 19 bp, Mus musculus
  siRNA target sequence for Tlr6 (NM_011604.1,1269-1287).
gaaactttggatgttagtt

SEQ ID NO: 528065 - DNA, 19 bp, Mus musculus
  siRNA target sequence for Tlr6 (NM_011604.1,1277-1295).
ggatgttagtttgaattct

SEQ ID NO: 528066 - DNA, 19 bp, Mus musculus
  siRNA target sequence for Tlr6 (NM_011604.1,1281-1299).
gttagtttgaattctttga

SEQ ID NO: 528067 - DNA, 19 bp, Mus musculus
  siRNA target sequence for Tlr6 (NM_011604.1,1326-1344).
gcctgggctgagagcatat

SEQ ID NO: 528068 - DNA, 19 bp, Mus musculus
  siRNA target sequence for Tlr6 (NM_011604.1,1337-1355).
gagcatattggtgttgaat

SEQ ID NO: 528069 - DNA, 19 bp, Mus musculus
  siRNA target sequence for Tlr6 (NM_011604.1,2265-2283).
cccattctacagaacaaca

SEQ ID NO: 528070 - DNA, 19 bp, Mus musculus
  siRNA target sequence for Tlr6 (NM_011604.1,2266-2284).
ccattctacagaacaacat

SEQ ID NO: 528071 - DNA, 19 bp, Mus musculus
  siRNA target sequence for Tlr6 (NM_011604.1,2267-2285).
cattctacagaacaacatt

SEQ ID NO: 528072 - DNA, 19 bp, Mus musculus
  siRNA target sequence for Tlr6 (NM_011604.1,2322-2340).
cagcggacttacttggaat

SEQ ID NO: 528073 - DNA, 19 bp, Mus musculus
  siRNA target sequence for Tlr6 (NM_011604.1,2355-2373).
ggcaaacgtgggctgtttt

SEQ ID NO: 528074 - DNA, 19 bp, Mus musculus
  siRNA target sequence for Tlr6 (NM_011604.1,2402-2420).
gaagttagccttagtcaat

SEQ ID NO: 528075 - DNA, 19 bp, Mus musculus
  siRNA target sequence for Tlr7 (NM_133211.2,207-225).
gacacggaagagacaaatt

SEQ ID NO: 528076 - DNA, 19 bp, Mus musculus
  siRNA target sequence for Tlr7 (NM_133211.2,211-229).
cggaagagacaaattttga

SEQ ID NO: 528077 - DNA, 19 bp, Mus musculus
  siRNA target sequence for Tlr7 (NM_133211.2,265-283).
gggtttcgatggtttccta

SEQ ID NO: 528078 - DNA, 19 bp, Mus musculus
  siRNA target sequence for Tlr7 (NM_133211.2,266-284).
ggtttcgatggtttcctaa

SEQ ID NO: 528079 - DNA, 19 bp, Mus musculus
  siRNA target sequence for Tlr7 (NM_133211.2,272-290).
gatggtttcctaaaactct

SEQ ID NO: 528080 - DNA, 19 bp, Mus musculus
  siRNA target sequence for Tlr7 (NM_133211.2,392-410).
ccaatcttacccttaccat

SEQ ID NO: 528081 - DNA, 19 bp, Mus musculus
  siRNA target sequence for Tlr7 (NM_133211.2,462-480).
ggaagaaatcgatttaaga

SEQ ID NO: 528082 - DNA, 19 bp, Mus musculus
  siRNA target sequence for Tlr7 (NM_133211.2,471-489).
cgatttaagatgcaattgt

SEQ ID NO: 528083 - DNA, 19 bp, Mus musculus
  siRNA target sequence for Tlr7 (NM_133211.2,528-546).
caagaggctgcagattaga

SEQ ID NO: 528084 - DNA, 19 bp, Mus musculus
  siRNA target sequence for Tlr7 (NM_133211.2,560-578).
gtggactctctgacttaaa

SEQ ID NO: 528085 - DNA, 19 bp, Mus musculus
  siRNA target sequence for Tlr7 (NM_133211.2,581-599).
ccctttacctggatggaaa

SEQ ID NO: 528086 - DNA, 19 bp, Mus musculus
  siRNA target sequence for Tlr7 (NM_133211.2,650-668).
gccttgaggctaacaacat

SEQ ID NO: 528087 - DNA, 19 bp, Mus musculus
  siRNA target sequence for Tlr7 (NM_133211.2,652-670).
cttgaggctaacaacatct

SEQ ID NO: 528088 - DNA, 19 bp, Mus musculus
  siRNA target sequence for Tlr7 (NM_133211.2,674-692).
ccatcacgaaggagaatct

SEQ ID NO: 528089 - DNA, 19 bp, Mus musculus
  siRNA target sequence for Tlr7 (NM_133211.2,675-693).
catcacgaaggagaatcta

SEQ ID NO: 528090 - DNA, 19 bp, Mus musculus
  siRNA target sequence for Tlr7 (NM_133211.2,678-696).
cacgaaggagaatctaaca

SEQ ID NO: 528091 - DNA, 19 bp, Mus musculus
  siRNA target sequence for Tlr7 (NM_133211.2,680-698).
cgaaggagaatctaacaga

SEQ ID NO: 528092 - DNA, 19 bp, Mus musculus
  siRNA target sequence for Tlr7 (NM_133211.2,681-699).
gaaggagaatctaacagaa

SEQ ID NO: 528093 - DNA, 19 bp, Mus musculus
  siRNA target sequence for Tlr7 (NM_133211.2,720-738).
ctacctgggtcaaaactgt

SEQ ID NO: 528094 - DNA, 19 bp, Mus musculus
  siRNA target sequence for Tlr7 (NM_133211.2,726-744).
gggtcaaaactgttattat

SEQ ID NO: 528095 - DNA, 19 bp, Mus musculus
  siRNA target sequence for Tlr7 (NM_133211.2,756-774).
caatgtttcctattctatt

SEQ ID NO: 528096 - DNA, 19 bp, Mus musculus
  siRNA target sequence for Tlr7 (NM_133211.2,781-799).
gatgctttcctagttatga

SEQ ID NO: 528097 - DNA, 19 bp, Mus musculus
  siRNA target sequence for Tlr7 (NM_133211.2,790-808).
ctagttatgagaaatttga

SEQ ID NO: 528098 - DNA, 19 bp, Mus musculus
  siRNA target sequence for Tlr7 (NM_133211.2,811-829).
gttctctcactaaaagata

SEQ ID NO: 528099 - DNA, 19 bp, Mus musculus
  siRNA target sequence for Tlr7 (NM_133211.2,849-867).
caccactttgccacctaat

SEQ ID NO: 528100 - DNA, 19 bp, Mus musculus
  siRNA target sequence for Tlr7 (NM_133211.2,852-870).
cactttgccacctaattta

SEQ ID NO: 528101 - DNA, 19 bp, Mus musculus
  siRNA target sequence for Tlr7 (NM_133211.2,874-892).
gagctctatctttataaca

SEQ ID NO: 528102 - DNA, 19 bp, Mus musculus
  siRNA target sequence for Tlr7 (NM_133211.2,876-894).
gctctatctttataacaat

SEQ ID NO: 528103 - DNA, 19 bp, Mus musculus
  siRNA target sequence for Tlr7 (NM_133211.2,877-895).
ctctatctttataacaata

SEQ ID NO: 528104 - DNA, 19 bp, Mus musculus
  siRNA target sequence for Tlr7 (NM_133211.2,962-980).
gaaattgccctcgatgtta

SEQ ID NO: 528105 - DNA, 19 bp, Mus musculus
  siRNA target sequence for Tlr7 (NM_133211.2,968-986).
gccctcgatgttataatgt

SEQ ID NO: 528106 - DNA, 19 bp, Mus musculus
  siRNA target sequence for Tlr7 (NM_133211.2,995-1013).
cgtgtacaccgtgtgaaaa

SEQ ID NO: 528107 - DNA, 19 bp, Mus musculus
  siRNA target sequence for Tlr7 (NM_133211.2,996-1014).
gtgtacaccgtgtgaaaat

SEQ ID NO: 528108 - DNA, 19 bp, Mus musculus
  siRNA target sequence for Tlr7 (NM_133211.2,998-1016).
gtacaccgtgtgaaaataa

SEQ ID NO: 528109 - DNA, 19 bp, Mus musculus
  siRNA target sequence for Tlr7 (NM_133211.2,1022-1040).
ccttacagatccatgacaa

SEQ ID NO: 528110 - DNA, 19 bp, Mus musculus
  siRNA target sequence for Tlr7 (NM_133211.2,1032-1050).
ccatgacaatgctttcaat

SEQ ID NO: 528111 - DNA, 19 bp, Mus musculus
  siRNA target sequence for Tlr7 (NM_133211.2,1033-1051).
catgacaatgctttcaatt

SEQ ID NO: 528112 - DNA, 19 bp, Mus musculus
  siRNA target sequence for Tlr7 (NM_133211.2,1047-1065).
caattcattgacagaatta

SEQ ID NO: 528113 - DNA, 19 bp, Mus musculus
  siRNA target sequence for Tlr7 (NM_133211.2,1102-1120).
gtgcccccaacatggttta

SEQ ID NO: 528114 - DNA, 19 bp, Mus musculus
  siRNA target sequence for Tlr7 (NM_133211.2,1105-1123).
cccccaacatggtttaaaa

SEQ ID NO: 528115 - DNA, 19 bp, Mus musculus
  siRNA target sequence for Tlr7 (NM_133211.2,1106-1124).
ccccaacatggtttaaaaa

SEQ ID NO: 528116 - DNA, 19 bp, Mus musculus
  siRNA target sequence for Tlr7 (NM_133211.2,1144-1162).
ctagacctctcccaaaact

SEQ ID NO: 528117 - DNA, 19 bp, Mus musculus
  siRNA target sequence for Tlr7 (NM_133211.2,1161-1179).
ctacttggccagagaaatt

SEQ ID NO: 528118 - DNA, 19 bp, Mus musculus
  siRNA target sequence for Tlr7 (NM_133211.2,1183-1201).
gaggccaaatttttgcatt

SEQ ID NO: 528119 - DNA, 19 bp, Mus musculus
  siRNA target sequence for Tlr7 (NM_133211.2,1216-1234).
gttgagttggatttttctt

SEQ ID NO: 528120 - DNA, 19 bp, Mus musculus
  siRNA target sequence for Tlr7 (NM_133211.2,1257-1275).
ccatgcatctataacttta

SEQ ID NO: 528121 - DNA, 19 bp, Mus musculus
  siRNA target sequence for Tlr7 (NM_133211.2,1315-1333).
cgtgtcaaggggtatgtct

SEQ ID NO: 528122 - DNA, 19 bp, Mus musculus
  siRNA target sequence for Tlr7 (NM_133211.2,1316-1334).
gtgtcaaggggtatgtctt

SEQ ID NO: 528123 - DNA, 19 bp, Mus musculus
  siRNA target sequence for Tlr7 (NM_133211.2,1318-1336).
gtcaaggggtatgtcttta

SEQ ID NO: 528124 - DNA, 19 bp, Mus musculus
  siRNA target sequence for Tlr7 (NM_133211.2,1320-1338).
caaggggtatgtctttaaa

SEQ ID NO: 528125 - DNA, 19 bp, Mus musculus
  siRNA target sequence for Tlr7 (NM_133211.2,1379-1397).
ccaggctggaagttcttga

SEQ ID NO: 528126 - DNA, 19 bp, Mus musculus
  siRNA target sequence for Tlr7 (NM_133211.2,1393-1411).
cttgaccttggcactaact

SEQ ID NO: 528127 - DNA, 19 bp, Mus musculus
  siRNA target sequence for Tlr7 (NM_133211.2,1398-1416).
ccttggcactaacttcata

SEQ ID NO: 528128 - DNA, 19 bp, Mus musculus
  siRNA target sequence for Tlr7 (NM_133211.2,1399-1417).
cttggcactaacttcataa

SEQ ID NO: 528129 - DNA, 19 bp, Mus musculus
  siRNA target sequence for Tlr7 (NM_133211.2,1423-1441).
gctgacctcaacatattca

SEQ ID NO: 528130 - DNA, 19 bp, Mus musculus
  siRNA target sequence for Tlr7 (NM_133211.2,1424-1442).
ctgacctcaacatattcaa

SEQ ID NO: 528131 - DNA, 19 bp, Mus musculus
  siRNA target sequence for Tlr7 (NM_133211.2,1564-1582).
gtccttgaggccttacact

SEQ ID NO: 528132 - DNA, 19 bp, Mus musculus
  siRNA target sequence for Tlr7 (NM_133211.2,1566-1584).
ccttgaggccttacactat

SEQ ID NO: 528133 - DNA, 19 bp, Mus musculus
  siRNA target sequence for Tlr7 (NM_133211.2,1567-1585).
cttgaggccttacactatt

SEQ ID NO: 528134 - DNA, 19 bp, Mus musculus
  siRNA target sequence for Tlr7 (NM_133211.2,1587-1605).
ccgatacgatgaatatgca

SEQ ID NO: 528135 - DNA, 19 bp, Mus musculus
  siRNA target sequence for Tlr7 (NM_133211.2,1675-1693).
gggcagaccttagacttaa

SEQ ID NO: 528136 - DNA, 19 bp, Mus musculus
  siRNA target sequence for Tlr7 (NM_133211.2,1677-1695).
gcagaccttagacttaagt

SEQ ID NO: 528137 - DNA, 19 bp, Mus musculus
  siRNA target sequence for Tlr7 (NM_133211.2,1687-1705).
gacttaagtagaaataaca

SEQ ID NO: 528138 - DNA, 19 bp, Mus musculus
  siRNA target sequence for Tlr7 (NM_133211.2,1746-1764).
cctcaaatgcctcaactta

SEQ ID NO: 528139 - DNA, 19 bp, Mus musculus
  siRNA target sequence for Tlr7 (NM_133211.2,1747-1765).
ctcaaatgcctcaacttat

SEQ ID NO: 528140 - DNA, 19 bp, Mus musculus
  siRNA target sequence for Tlr7 (NM_133211.2,1749-1767).
caaatgcctcaacttatca

SEQ ID NO: 528141 - DNA, 19 bp, Mus musculus
  siRNA target sequence for Tlr7 (NM_133211.2,1815-1833).
gagagagttgcggtactta

SEQ ID NO: 528142 - DNA, 19 bp, Mus musculus
  siRNA target sequence for Tlr7 (NM_133211.2,1817-1835).
gagagttgcggtacttaga

SEQ ID NO: 528143 - DNA, 19 bp, Mus musculus
  siRNA target sequence for Tlr7 (NM_133211.2,1819-1837).
gagttgcggtacttagact

SEQ ID NO: 528144 - DNA, 19 bp, Mus musculus
  siRNA target sequence for Tlr7 (NM_133211.2,1842-1860).
caacaaccggcttgattta

SEQ ID NO: 528145 - DNA, 19 bp, Mus musculus
  siRNA target sequence for Tlr7 (NM_133211.2,1897-1915).
gaagttctggatctaagta

SEQ ID NO: 528146 - DNA, 19 bp, Mus musculus
  siRNA target sequence for Tlr7 (NM_133211.2,1913-1931).
gtagtaacagccactattt

SEQ ID NO: 528147 - DNA, 19 bp, Mus musculus
  siRNA target sequence for Tlr7 (NM_133211.2,1951-1969).
cacatgctaaactttacca

SEQ ID NO: 528148 - DNA, 19 bp, Mus musculus
  siRNA target sequence for Tlr7 (NM_133211.2,1978-1996).
cggcttctggacaaactca

SEQ ID NO: 528149 - DNA, 19 bp, Mus musculus
  siRNA target sequence for Tlr7 (NM_133211.2,2026-2044).
gccagcaggaccatggaaa

SEQ ID NO: 528150 - DNA, 19 bp, Mus musculus
  siRNA target sequence for Tlr7 (NM_133211.2,2075-2093).
gcaaccatttagatgttct

SEQ ID NO: 528151 - DNA, 19 bp, Mus musculus
  siRNA target sequence for Tlr7 (NM_133211.2,2101-2119).
gccggtgataacagatact

SEQ ID NO: 528152 - DNA, 19 bp, Mus musculus
  siRNA target sequence for Tlr7 (NM_133211.2,2139-2157).
gttcaatttagaggtatta

SEQ ID NO: 528153 - DNA, 19 bp, Mus musculus
  siRNA target sequence for Tlr7 (NM_133211.2,2142-2160).
caatttagaggtattagat

SEQ ID NO: 528154 - DNA, 19 bp, Mus musculus
  siRNA target sequence for Tlr7 (NM_133211.2,2205-2223).
gggtatgccgccaaatcta

SEQ ID NO: 528155 - DNA, 19 bp, Mus musculus
  siRNA target sequence for Tlr7 (NM_133211.2,2206-2224).
ggtatgccgccaaatctaa

SEQ ID NO: 528156 - DNA, 19 bp, Mus musculus
  siRNA target sequence for Tlr7 (NM_133211.2,2207-2225).
gtatgccgccaaatctaaa

SEQ ID NO: 528157 - DNA, 19 bp, Mus musculus
  siRNA target sequence for Tlr7 (NM_133211.2,2211-2229).
gccgccaaatctaaagaat

SEQ ID NO: 528158 - DNA, 19 bp, Mus musculus
  siRNA target sequence for Tlr7 (NM_133211.2,2213-2231).
cgccaaatctaaagaatct

SEQ ID NO: 528159 - DNA, 19 bp, Mus musculus
  siRNA target sequence for Tlr7 (NM_133211.2,2239-2257).
gccaaaaatgggctcaaat

SEQ ID NO: 528160 - DNA, 19 bp, Mus musculus
  siRNA target sequence for Tlr7 (NM_133211.2,2241-2259).
caaaaatgggctcaaatct

SEQ ID NO: 528161 - DNA, 19 bp, Mus musculus
  siRNA target sequence for Tlr7 (NM_133211.2,2248-2266).
gggctcaaatctttctttt

SEQ ID NO: 528162 - DNA, 19 bp, Mus musculus
  siRNA target sequence for Tlr7 (NM_133211.2,2348-2366).
ccaactgttccaaaagtct

SEQ ID NO: 528163 - DNA, 19 bp, Mus musculus
  siRNA target sequence for Tlr7 (NM_133211.2,2363-2381).
gtctcacaacactgattct

SEQ ID NO: 528164 - DNA, 19 bp, Mus musculus
  siRNA target sequence for Tlr7 (NM_133211.2,2365-2383).
ctcacaacactgattctta

SEQ ID NO: 528165 - DNA, 19 bp, Mus musculus
  siRNA target sequence for Tlr7 (NM_133211.2,2369-2387).
caacactgattcttaagca

SEQ ID NO: 528166 - DNA, 19 bp, Mus musculus
  siRNA target sequence for Tlr7 (NM_133211.2,2380-2398).
cttaagcataatcaaatca

SEQ ID NO: 528167 - DNA, 19 bp, Mus musculus
  siRNA target sequence for Tlr7 (NM_133211.2,2399-2417).
ggcaattgacaaaatattt

SEQ ID NO: 528168 - DNA, 19 bp, Mus musculus
  siRNA target sequence for Tlr7 (NM_133211.2,2419-2437).
ctagaagatgctttgcaat

SEQ ID NO: 528169 - DNA, 19 bp, Mus musculus
  siRNA target sequence for Tlr7 (NM_133211.2,2440-2458).
cgctatctagacatcagtt

SEQ ID NO: 528170 - DNA, 19 bp, Mus musculus
  siRNA target sequence for Tlr7 (NM_133211.2,2533-2551).
catcacaatcgctttcttt

SEQ ID NO: 528171 - DNA, 19 bp, Mus musculus
  siRNA target sequence for Tlr7 (NM_133211.2,2579-2597).
ggtgggttaaccatacaga

SEQ ID NO: 528172 - DNA, 19 bp, Mus musculus
  siRNA target sequence for Tlr7 (NM_133211.2,2580-2598).
gtgggttaaccatacagat

SEQ ID NO: 528173 - DNA, 19 bp, Mus musculus
  siRNA target sequence for Tlr7 (NM_133211.2,2584-2602).
gttaaccatacagatgtta

SEQ ID NO: 528174 - DNA, 19 bp, Mus musculus
  siRNA target sequence for Tlr7 (NM_133211.2,2667-2685).
catatcccttgatctgtat

SEQ ID NO: 528175 - DNA, 19 bp, Mus musculus
  siRNA target sequence for Tlr7 (NM_133211.2,2682-2700).
gtatacgtgtgagttagat

SEQ ID NO: 528176 - DNA, 19 bp, Mus musculus
  siRNA target sequence for Tlr7 (NM_133211.2,2718-2736).
gttctcagtttccatatca

SEQ ID NO: 528177 - DNA, 19 bp, Mus musculus
  siRNA target sequence for Tlr7 (NM_133211.2,2850-2868).
catggagtcttgttatgat

SEQ ID NO: 528178 - DNA, 19 bp, Mus musculus
  siRNA target sequence for Tlr7 (NM_133211.2,2925-2943).
gctggtggcaaaattggaa

SEQ ID NO: 528179 - DNA, 19 bp, Mus musculus
  siRNA target sequence for Tlr7 (NM_133211.2,3039-3057).
cagcaaaaagacagtgttt

SEQ ID NO: 528180 - DNA, 19 bp, Mus musculus
  siRNA target sequence for Tlr7 (NM_133211.2,3287-3305).
ccctgaccacagacaatca

SEQ ID NO: 528181 - DNA, 19 bp, Mus musculus
  siRNA target sequence for Tlr7 (NM_133211.2,3298-3316).
gacaatcatgtggcttata

SEQ ID NO: 528182 - DNA, 19 bp, Mus musculus
  siRNA target sequence for Tlr7 (NM_133211.2,3304-3322).
catgtggcttatagtcaaa

SEQ ID NO: 528183 - DNA, 19 bp, Mus musculus
  siRNA target sequence for Tlr7 (NM_133211.2,3310-3328).
gcttatagtcaaatgttca

SEQ ID NO: 528184 - DNA, 19 bp, Mus musculus
  siRNA target sequence for Il10rb (NM_008349.1,47-65).
gccagctctaggaatgatt

SEQ ID NO: 528185 - DNA, 19 bp, Mus musculus
  siRNA target sequence for Il10rb (NM_008349.1,70-88).
cccctgagaaggtcagaat

SEQ ID NO: 528186 - DNA, 19 bp, Mus musculus
  siRNA target sequence for Il10rb (NM_008349.1,80-98).
ggtcagaatgaattcagtt

SEQ ID NO: 528187 - DNA, 19 bp, Mus musculus
  siRNA target sequence for Il10rb (NM_008349.1,158-176).
cacagctcagtatgaaagt

SEQ ID NO: 528188 - DNA, 19 bp, Mus musculus
  siRNA target sequence for Il10rb (NM_008349.1,162-180).
gctcagtatgaaagttaca

SEQ ID NO: 528189 - DNA, 19 bp, Mus musculus
  siRNA target sequence for Il10rb (NM_008349.1,221-239).
gtgcgacttctctcatctt

SEQ ID NO: 528190 - DNA, 19 bp, Mus musculus
  siRNA target sequence for Il10rb (NM_008349.1,276-294).
gaattggcggatgaacatt

SEQ ID NO: 528191 - DNA, 19 bp, Mus musculus
  siRNA target sequence for Il10rb (NM_008349.1,323-341).
cgtggaagacaccatcatt

SEQ ID NO: 528192 - DNA, 19 bp, Mus musculus
  siRNA target sequence for Il10rb (NM_008349.1,391-409).
gtttctcagccccacaaat

SEQ ID NO: 528193 - DNA, 19 bp, Mus musculus
  siRNA target sequence for Il10rb (NM_008349.1,397-415).
cagccccacaaattgagaa

SEQ ID NO: 528194 - DNA, 19 bp, Mus musculus
  siRNA target sequence for Il10rb (NM_008349.1,427-445).
cgtggaccttgaagaacat

SEQ ID NO: 528195 - DNA, 19 bp, Mus musculus
  siRNA target sequence for Il10rb (NM_008349.1,457-475).
gggcttacagagtgcaata

SEQ ID NO: 528196 - DNA, 19 bp, Mus musculus
  siRNA target sequence for Il10rb (NM_008349.1,546-564).
gagccgtggacaacttact

SEQ ID NO: 528197 - DNA, 19 bp, Mus musculus
  siRNA target sequence for Il10rb (NM_008349.1,556-574).
caacttactgcattcaagt

SEQ ID NO: 528198 - DNA, 19 bp, Mus musculus
  siRNA target sequence for Il10rb (NM_008349.1,729-747).
gtcgtgctgtggctcattt

SEQ ID NO: 528199 - DNA, 19 bp, Mus musculus
  siRNA target sequence for Il10rb (NM_008349.1,868-886).
ccgaggtgttcgacaaact

SEQ ID NO: 528200 - DNA, 19 bp, Mus musculus
  siRNA target sequence for Il10rb (NM_008349.1,870-888).
gaggtgttcgacaaactaa

SEQ ID NO: 528201 - DNA, 19 bp, Mus musculus
  siRNA target sequence for Il10rb (NM_008349.1,879-897).
gacaaactaagcatcatca

SEQ ID NO: 528202 - DNA, 19 bp, Mus musculus
  siRNA target sequence for Il10rb (NM_008349.1,1031-1049).
cacgtcgacctcagaagta

SEQ ID NO: 528203 - DNA, 19 bp, Mus musculus
  siRNA target sequence for Tccr (NM_016671.2,430-448).
ctcaagtggatatttctga

SEQ ID NO: 528204 - DNA, 19 bp, Mus musculus
  siRNA target sequence for Tccr (NM_016671.2,519-537).
cagttccggtacaaggaat

SEQ ID NO: 528205 - DNA, 19 bp, Mus musculus
  siRNA target sequence for Tccr (NM_016671.2,586-604).
ggctgactcctgttgagat

SEQ ID NO: 528206 - DNA, 19 bp, Mus musculus
  siRNA target sequence for Tccr (NM_016671.2,654-672).
gtggagaacggatatccat

SEQ ID NO: 528207 - DNA, 19 bp, Mus musculus
  siRNA target sequence for Tccr (NM_016671.2,697-715).
ccttccagacgccattctt

SEQ ID NO: 528208 - DNA, 19 bp, Mus musculus
  siRNA target sequence for Tccr (NM_016671.2,701-719).
ccagacgccattcttagat

SEQ ID NO: 528209 - DNA, 19 bp, Mus musculus
  siRNA target sequence for Tccr (NM_016671.2,740-758).
ggggaccgtctgtgaaact

SEQ ID NO: 528210 - DNA, 19 bp, Mus musculus
  siRNA target sequence for Tccr (NM_016671.2,741-759).
gggaccgtctgtgaaactt

SEQ ID NO: 528211 - DNA, 19 bp, Mus musculus
  siRNA target sequence for Tccr (NM_016671.2,743-761).
gaccgtctgtgaaacttct

SEQ ID NO: 528212 - DNA, 19 bp, Mus musculus
  siRNA target sequence for Tccr (NM_016671.2,834-852).
ggggctggagatattacta

SEQ ID NO: 528213 - DNA, 19 bp, Mus musculus
  siRNA target sequence for Tccr (NM_016671.2,836-854).
ggctggagatattactaca

SEQ ID NO: 528214 - DNA, 19 bp, Mus musculus
  siRNA target sequence for Tccr (NM_016671.2,837-855).
gctggagatattactacaa

SEQ ID NO: 528215 - DNA, 19 bp, Mus musculus
  siRNA target sequence for Tccr (NM_016671.2,1140-1158).
ggaaacctcagcacattgt

SEQ ID NO: 528216 - DNA, 19 bp, Mus musculus
  siRNA target sequence for Tccr (NM_016671.2,1141-1159).
gaaacctcagcacattgtt

SEQ ID NO: 528217 - DNA, 19 bp, Mus musculus
  siRNA target sequence for Tccr (NM_016671.2,1157-1175).
gttaccaggggagttcaaa

SEQ ID NO: 528218 - DNA, 19 bp, Mus musculus
  siRNA target sequence for Tccr (NM_016671.2,1176-1194).
ggaggggtcccctatcgaa

SEQ ID NO: 528219 - DNA, 19 bp, Mus musculus
  siRNA target sequence for Tccr (NM_016671.2,1177-1195).
gaggggtcccctatcgaat

SEQ ID NO: 528220 - DNA, 19 bp, Mus musculus
  siRNA target sequence for Tccr (NM_016671.2,1179-1197).
ggggtcccctatcgaatta

SEQ ID NO: 528221 - DNA, 19 bp, Mus musculus
  siRNA target sequence for Tccr (NM_016671.2,1181-1199).
ggtcccctatcgaattaca

SEQ ID NO: 528222 - DNA, 19 bp, Mus musculus
  siRNA target sequence for Tccr (NM_016671.2,1238-1256).
ctcagtttggggattcaga

SEQ ID NO: 528223 - DNA, 19 bp, Mus musculus
  siRNA target sequence for Tccr (NM_016671.2,1542-1560).
cacctaccagataatagga

SEQ ID NO: 528224 - DNA, 19 bp, Mus musculus
  siRNA target sequence for Il21r (NM_021887.1,634-652).
catatgcgcttgtctcaat

SEQ ID NO: 528225 - DNA, 19 bp, Mus musculus
  siRNA target sequence for Il21r (NM_021887.1,655-673).
ctgtccgatgaagttttca

SEQ ID NO: 528226 - DNA, 19 bp, Mus musculus
  siRNA target sequence for Il21r (NM_021887.1,657-675).
gtccgatgaagttttcatt

SEQ ID NO: 528227 - DNA, 19 bp, Mus musculus
  siRNA target sequence for Il21r (NM_021887.1,659-677).
ccgatgaagttttcattgt

SEQ ID NO: 528228 - DNA, 19 bp, Mus musculus
  siRNA target sequence for Il21r (NM_021887.1,777-795).
cttctcaggacgctatgat

SEQ ID NO: 528229 - DNA, 19 bp, Mus musculus
  siRNA target sequence for Il21r (NM_021887.1,842-860).
ggggcaagctacaatatga

SEQ ID NO: 528230 - DNA, 19 bp, Mus musculus
  siRNA target sequence for Il21r (NM_021887.1,1003-1021).
cagccaggcacttcattca

SEQ ID NO: 528231 - DNA, 19 bp, Mus musculus
  siRNA target sequence for Il21r (NM_021887.1,1041-1059).
gagtgaccccgtcatcttt

SEQ ID NO: 528232 - DNA, 19 bp, Mus musculus
  siRNA target sequence for Il21r (NM_021887.1,1043-1061).
gtgaccccgtcatctttca

SEQ ID NO: 528233 - DNA, 19 bp, Mus musculus
  siRNA target sequence for Il21r (NM_021887.1,1045-1063).
gaccccgtcatctttcaga

SEQ ID NO: 528234 - DNA, 19 bp, Mus musculus
  siRNA target sequence for Il21r (NM_021887.1,1170-1188).
gaggctatggaaaaagata

SEQ ID NO: 528235 - DNA, 19 bp, Mus musculus
  siRNA target sequence for Il21r (NM_021887.1,1240-1258).
cacagcgggaacttcaaga

SEQ ID NO: 528236 - DNA, 19 bp, Mus musculus
  siRNA target sequence for Il21r (NM_021887.1,1251-1269).
cttcaagaaatgggttaat

SEQ ID NO: 528237 - DNA, 19 bp, Mus musculus
  siRNA target sequence for Il21r (NM_021887.1,1482-1500).
gagagaccggccatatggt

SEQ ID NO: 528238 - DNA, 19 bp, Mus musculus
  siRNA target sequence for Il21r (NM_021887.1,1498-1516).
ggtctggtgtccattgaca

SEQ ID NO: 528239 - DNA, 19 bp, Mus musculus
  siRNA target sequence for Il21r (NM_021887.1,1832-1850).
gtctggacatggacacatt

SEQ ID NO: 528240 - DNA, 19 bp, Mus musculus
  siRNA target sequence for Il18bp (NM_010531.1,250-268).
gacaactgccactgtctta

SEQ ID NO: 528241 - DNA, 19 bp, Mus musculus
  siRNA target sequence for Il18bp (NM_010531.1,265-283).
cttaactggaagctcaaaa

SEQ ID NO: 528242 - DNA, 19 bp, Mus musculus
  siRNA target sequence for Il18bp (NM_010531.1,329-347).
ccagcactggatgtgattt

SEQ ID NO: 528243 - DNA, 19 bp, Mus musculus
  siRNA target sequence for Il18bp (NM_010531.1,439-457).
gggcaatggttccttcatt

SEQ ID NO: 528244 - DNA, 19 bp, Mus musculus
  siRNA target sequence for Il18bp (NM_010531.1,563-581).
ctacgaagtaccaacttct

SEQ ID NO: 528245 - DNA, 19 bp, Mus musculus
  siRNA target sequence for Il18bp (NM_010531.1,662-680).
ccgtccccttctcaagaaa

SEQ ID NO: 528246 - DNA, 19 bp, Mus musculus
  siRNA target sequence for AI464239 (NM_021609.2,344-362).
ctacgactacgactactta

SEQ ID NO: 528247 - DNA, 19 bp, Mus musculus
  siRNA target sequence for AI464239 (NM_021609.2,347-365).
cgactacgactacttagat

SEQ ID NO: 528248 - DNA, 19 bp, Mus musculus
  siRNA target sequence for AI464239 (NM_021609.2,350-368).
ctacgactacttagatgat

SEQ ID NO: 528249 - DNA, 19 bp, Mus musculus
  siRNA target sequence for AI464239 (NM_021609.2,511-529).
gacggacgatggagcttta

SEQ ID NO: 528250 - DNA, 19 bp, Mus musculus
  siRNA target sequence for AI464239 (NM_021609.2,514-532).
ggacgatggagctttacct

SEQ ID NO: 528251 - DNA, 19 bp, Mus musculus
  siRNA target sequence for AI464239 (NM_021609.2,640-658).
gcactctctactctattaa

SEQ ID NO: 528252 - DNA, 19 bp, Mus musculus
  siRNA target sequence for AI464239 (NM_021609.2,645-663).
ctctactctattaactttt

SEQ ID NO: 528253 - DNA, 19 bp, Mus musculus
  siRNA target sequence for AI464239 (NM_021609.2,876-894).
ggcggacatgcgaccattt

SEQ ID NO: 528254 - DNA, 19 bp, Mus musculus
  siRNA target sequence for AI464239 (NM_021609.2,879-897).
ggacatgcgaccatttgga

SEQ ID NO: 528255 - DNA, 19 bp, Mus musculus
  siRNA target sequence for AI464239 (NM_021609.2,880-898).
gacatgcgaccatttggaa

SEQ ID NO: 528256 - DNA, 19 bp, Mus musculus
  siRNA target sequence for AI464239 (NM_021609.2,1140-1158).
caccgtctggactatacgt

SEQ ID NO: 528257 - DNA, 19 bp, Mus musculus
  siRNA target sequence for AI464239 (NM_021609.2,1378-1396).
ctgaggactcccttaacaa

SEQ ID NO: 528258 - DNA, 19 bp, Mus musculus
  siRNA target sequence for Ccr1 (NM_009912.2,362-380).
gaagcctaccccacaacta

SEQ ID NO: 528259 - DNA, 19 bp, Mus musculus
  siRNA target sequence for Ccr1 (NM_009912.2,375-393).
caactacagaatttgacta

SEQ ID NO: 528260 - DNA, 19 bp, Mus musculus
  siRNA target sequence for Ccr1 (NM_009912.2,403-421).
cactccatgccaaaagact

SEQ ID NO: 528261 - DNA, 19 bp, Mus musculus
  siRNA target sequence for Ccr1 (NM_009912.2,412-430).
ccaaaagactgctgtaaga

SEQ ID NO: 528262 - DNA, 19 bp, Mus musculus
  siRNA target sequence for Ccr1 (NM_009912.2,696-714).
gtgagatcttctttatcat

SEQ ID NO: 528263 - DNA, 19 bp, Mus musculus
  siRNA target sequence for Ccr1 (NM_009912.2,788-806).
ggcatcatcaccagtatta

SEQ ID NO: 528264 - DNA, 19 bp, Mus musculus
  siRNA target sequence for Ccr1 (NM_009912.2,789-807).
gcatcatcaccagtattat

SEQ ID NO: 528265 - DNA, 19 bp, Mus musculus
  siRNA target sequence for Ccr1 (NM_009912.2,811-829).
ctgggccctagccatctta

SEQ ID NO: 528266 - DNA, 19 bp, Mus musculus
  siRNA target sequence for Ccr1 (NM_009912.2,815-833).
gccctagccatcttagctt

SEQ ID NO: 528267 - DNA, 19 bp, Mus musculus
  siRNA target sequence for Ccr1 (NM_009912.2,931-949).
gtttcaagctctaaagcta

SEQ ID NO: 528268 - DNA, 19 bp, Mus musculus
  siRNA target sequence for Ccr1 (NM_009912.2,972-990).
ctctgttagtcatgataat

SEQ ID NO: 528269 - DNA, 19 bp, Mus musculus
  siRNA target sequence for Ccr1 (NM_009912.2,1051-1069).
cgtgcgtctgatatttgct

SEQ ID NO: 528270 - DNA, 19 bp, Mus musculus
  siRNA target sequence for Ccr1 (NM_009912.2,1052-1070).
gtgcgtctgatatttgcta

SEQ ID NO: 528271 - DNA, 19 bp, Mus musculus
  siRNA target sequence for Ccr1 (NM_009912.2,1055-1073).
cgtctgatatttgctatta

SEQ ID NO: 528272 - DNA, 19 bp, Mus musculus
  siRNA target sequence for Ccr1 (NM_009912.2,1068-1086).
ctattactcttctattctt

SEQ ID NO: 528273 - DNA, 19 bp, Mus musculus
  siRNA target sequence for Ccr1 (NM_009912.2,1090-1108).
cctctggaccccctacaat

SEQ ID NO: 528274 - DNA, 19 bp, Mus musculus
  siRNA target sequence for Ccr1 (NM_009912.2,1100-1118).
ccctacaatctgagtgtat

SEQ ID NO: 528275 - DNA, 19 bp, Mus musculus
  siRNA target sequence for Ccr1 (NM_009912.2,1101-1119).
cctacaatctgagtgtatt

SEQ ID NO: 528276 - DNA, 19 bp, Mus musculus
  siRNA target sequence for Ccr1 (NM_009912.2,1105-1123).
caatctgagtgtatttgtt

SEQ ID NO: 528277 - DNA, 19 bp, Mus musculus
  siRNA target sequence for Ccr1 (NM_009912.2,1349-1367).
gaaaggaccagttctatat

SEQ ID NO: 528278 - DNA, 19 bp, Mus musculus
  siRNA target sequence for Ccr2 (NM_009915.1,136-154).
ggaagacaataatatgtta

SEQ ID NO: 528279 - DNA, 19 bp, Mus musculus
  siRNA target sequence for Ccr2 (NM_009915.1,160-178).
gttcatccacggcatacta

SEQ ID NO: 528280 - DNA, 19 bp, Mus musculus
  siRNA target sequence for Ccr2 (NM_009915.1,163-181).
catccacggcatactatca

SEQ ID NO: 528281 - DNA, 19 bp, Mus musculus
  siRNA target sequence for Ccr2 (NM_009915.1,166-184).
ccacggcatactatcaaca

SEQ ID NO: 528282 - DNA, 19 bp, Mus musculus
  siRNA target sequence for Ccr2 (NM_009915.1,167-185).
cacggcatactatcaacat

SEQ ID NO: 528283 - DNA, 19 bp, Mus musculus
  siRNA target sequence for Ccr2 (NM_009915.1,169-187).
cggcatactatcaacatct

SEQ ID NO: 528284 - DNA, 19 bp, Mus musculus
  siRNA target sequence for Ccr2 (NM_009915.1,172-190).
catactatcaacatctcat

SEQ ID NO: 528285 - DNA, 19 bp, Mus musculus
  siRNA target sequence for Ccr2 (NM_009915.1,192-210).
ctctatttacacgaagtat

SEQ ID NO: 528286 - DNA, 19 bp, Mus musculus
  siRNA target sequence for Ccr2 (NM_009915.1,230-248).
gccaccacaccgtatgact

SEQ ID NO: 528287 - DNA, 19 bp, Mus musculus
  siRNA target sequence for Ccr2 (NM_009915.1,231-249).
ccaccacaccgtatgacta

SEQ ID NO: 528288 - DNA, 19 bp, Mus musculus
  siRNA target sequence for Ccr2 (NM_009915.1,349-367).
caacatgttggtcattata

SEQ ID NO: 528289 - DNA, 19 bp, Mus musculus
  siRNA target sequence for Ccr2 (NM_009915.1,358-376).
ggtcattataattctgata

SEQ ID NO: 528290 - DNA, 19 bp, Mus musculus
  siRNA target sequence for Ccr2 (NM_009915.1,687-705).
ctctaccaggaatcatatt

SEQ ID NO: 528291 - DNA, 19 bp, Mus musculus
  siRNA target sequence for Ccr2 (NM_009915.1,739-757).
ctgtggcccttattttaca

SEQ ID NO: 528292 - DNA, 19 bp, Mus musculus
  siRNA target sequence for Ccr2 (NM_009915.1,741-759).
gtggcccttattttacaca

SEQ ID NO: 528293 - DNA, 19 bp, Mus musculus
  siRNA target sequence for Ccr2 (NM_009915.1,940-958).
gactccatacaatattgtt

SEQ ID NO: 528294 - DNA, 19 bp, Mus musculus
  siRNA target sequence for Ccr2 (NM_009915.1,942-960).
ctccatacaatattgttct

SEQ ID NO: 528295 - DNA, 19 bp, Mus musculus
  siRNA target sequence for Ccr2 (NM_009915.1,996-1014).
gtaactgtgtgattgacaa

SEQ ID NO: 528296 - DNA, 19 bp, Mus musculus
  siRNA target sequence for Ccr2 (NM_009915.1,1109-1127).
cgaaggtatctctccatat

SEQ ID NO: 528297 - DNA, 19 bp, Mus musculus
  siRNA target sequence for Ccr2 (NM_009915.1,1132-1150).
cagaaagcacattgctaaa

SEQ ID NO: 528298 - DNA, 19 bp, Mus musculus
  siRNA target sequence for Ccr2 (NM_009915.1,1193-1211).
gatcgagtgagctctacat

SEQ ID NO: 528299 - DNA, 19 bp, Mus musculus
  siRNA target sequence for Ccr2 (NM_009915.1,1196-1214).
cgagtgagctctacattca

SEQ ID NO: 528300 - DNA, 19 bp, Mus musculus
  siRNA target sequence for Ccr3 (NM_009914.2,133-151).
gaccacaccctatgaatat

SEQ ID NO: 528301 - DNA, 19 bp, Mus musculus
  siRNA target sequence for Ccr3 (NM_009914.2,159-177).
caccaccctgtgaaaaagt

SEQ ID NO: 528302 - DNA, 19 bp, Mus musculus
  siRNA target sequence for Ccr3 (NM_009914.2,165-183).
cctgtgaaaaagtcagaat

SEQ ID NO: 528303 - DNA, 19 bp, Mus musculus
  siRNA target sequence for Ccr3 (NM_009914.2,263-281).
gtgttgatcctcataaagt

SEQ ID NO: 528304 - DNA, 19 bp, Mus musculus
  siRNA target sequence for Ccr3 (NM_009914.2,314-332).
ctgttcaacttggcaattt

SEQ ID NO: 528305 - DNA, 19 bp, Mus musculus
  siRNA target sequence for Ccr3 (NM_009914.2,316-334).
gttcaacttggcaatttct

SEQ ID NO: 528306 - DNA, 19 bp, Mus musculus
  siRNA target sequence for Ccr3 (NM_009914.2,356-374).
gtcccattctggattcact

SEQ ID NO: 528307 - DNA, 19 bp, Mus musculus
  siRNA target sequence for Ccr3 (NM_009914.2,358-376).
cccattctggattcactat

SEQ ID NO: 528308 - DNA, 19 bp, Mus musculus
  siRNA target sequence for Ccr3 (NM_009914.2,360-378).
cattctggattcactatgt

SEQ ID NO: 528309 - DNA, 19 bp, Mus musculus
  siRNA target sequence for Ccr3 (NM_009914.2,402-420).
gccactacatgtgcaaaat

SEQ ID NO: 528310 - DNA, 19 bp, Mus musculus
  siRNA target sequence for Ccr3 (NM_009914.2,444-462).
ccttgtacagcgagatctt

SEQ ID NO: 528311 - DNA, 19 bp, Mus musculus
  siRNA target sequence for Ccr3 (NM_009914.2,445-463).
cttgtacagcgagatcttt

SEQ ID NO: 528312 - DNA, 19 bp, Mus musculus
  siRNA target sequence for Ccr3 (NM_009914.2,529-547).
ccgaactgtgacttttgct

SEQ ID NO: 528313 - DNA, 19 bp, Mus musculus
  siRNA target sequence for Ccr3 (NM_009914.2,530-548).
cgaactgtgacttttgcta

SEQ ID NO: 528314 - DNA, 19 bp, Mus musculus
  siRNA target sequence for Ccr3 (NM_009914.2,590-608).
gcattgcctgaatttatct

SEQ ID NO: 528315 - DNA, 19 bp, Mus musculus
  siRNA target sequence for Ccr3 (NM_009914.2,591-609).
cattgcctgaatttatctt

SEQ ID NO: 528316 - DNA, 19 bp, Mus musculus
  siRNA target sequence for Ccr3 (NM_009914.2,676-694).
cagctggaaacgtttccat

SEQ ID NO: 528317 - DNA, 19 bp, Mus musculus
  siRNA target sequence for Ccr3 (NM_009914.2,686-704).
cgtttccatgctctaagaa

SEQ ID NO: 528318 - DNA, 19 bp, Mus musculus
  siRNA target sequence for Ccr3 (NM_009914.2,687-705).
gtttccatgctctaagaat

SEQ ID NO: 528319 - DNA, 19 bp, Mus musculus
  siRNA target sequence for Ccr3 (NM_009914.2,692-710).
catgctctaagaatgaata

SEQ ID NO: 528320 - DNA, 19 bp, Mus musculus
  siRNA target sequence for Ccr3 (NM_009914.2,695-713).
gctctaagaatgaatatct

SEQ ID NO: 528321 - DNA, 19 bp, Mus musculus
  siRNA target sequence for Ccr3 (NM_009914.2,728-746).
cctctcctcattatggtta

SEQ ID NO: 528322 - DNA, 19 bp, Mus musculus
  siRNA target sequence for Ccr3 (NM_009914.2,731-749).
ctcctcattatggttatct

SEQ ID NO: 528323 - DNA, 19 bp, Mus musculus
  siRNA target sequence for Ccr3 (NM_009914.2,754-772).
ctcaggaatcattaaaact

SEQ ID NO: 528324 - DNA, 19 bp, Mus musculus
  siRNA target sequence for Ccr3 (NM_009914.2,802-820).
caaggccatccgtcttatt

SEQ ID NO: 528325 - DNA, 19 bp, Mus musculus
  siRNA target sequence for Ccr3 (NM_009914.2,805-823).
ggccatccgtcttattttt

SEQ ID NO: 528326 - DNA, 19 bp, Mus musculus
  siRNA target sequence for Ccr3 (NM_009914.2,807-825).
ccatccgtcttatttttgt

SEQ ID NO: 528327 - DNA, 19 bp, Mus musculus
  siRNA target sequence for Ccr3 (NM_009914.2,808-826).
catccgtcttatttttgtt

SEQ ID NO: 528328 - DNA, 19 bp, Mus musculus
  siRNA target sequence for Ccr3 (NM_009914.2,824-842).
gttgttatgatagtctttt

SEQ ID NO: 528329 - DNA, 19 bp, Mus musculus
  siRNA target sequence for Ccr3 (NM_009914.2,827-845).
gttatgatagtctttttta

SEQ ID NO: 528330 - DNA, 19 bp, Mus musculus
  siRNA target sequence for Ccr3 (NM_009914.2,970-988).
cacccactgctgtattaat

SEQ ID NO: 528331 - DNA, 19 bp, Mus musculus
  siRNA target sequence for Ccr3 (NM_009914.2,973-991).
ccactgctgtattaatcca

SEQ ID NO: 528332 - DNA, 19 bp, Mus musculus
  siRNA target sequence for Ccr3 (NM_009914.2,978-996).
gctgtattaatccagtaat

SEQ ID NO: 528333 - DNA, 19 bp, Mus musculus
  siRNA target sequence for Ccr4 (NM_009916.1,169-187).
gatgaaactgtgtacaata

SEQ ID NO: 528334 - DNA, 19 bp, Mus musculus
  siRNA target sequence for Ccr4 (NM_009916.1,172-190).
gaaactgtgtacaatagtt

SEQ ID NO: 528335 - DNA, 19 bp, Mus musculus
  siRNA target sequence for Ccr4 (NM_009916.1,218-236).
cttgcaccaaggaaggtat

SEQ ID NO: 528336 - DNA, 19 bp, Mus musculus
  siRNA target sequence for Ccr4 (NM_009916.1,221-239).
gcaccaaggaaggtatcaa

SEQ ID NO: 528337 - DNA, 19 bp, Mus musculus
  siRNA target sequence for Ccr4 (NM_009916.1,288-306).
gttgggtctgtttggaaat

SEQ ID NO: 528338 - DNA, 19 bp, Mus musculus
  siRNA target sequence for Ccr4 (NM_009916.1,291-309).
gggtctgtttggaaattct

SEQ ID NO: 528339 - DNA, 19 bp, Mus musculus
  siRNA target sequence for Ccr4 (NM_009916.1,316-334).
gttctggtcctgttcaaat

SEQ ID NO: 528340 - DNA, 19 bp, Mus musculus
  siRNA target sequence for Ccr4 (NM_009916.1,319-337).
ctggtcctgttcaaataca

SEQ ID NO: 528341 - DNA, 19 bp, Mus musculus
  siRNA target sequence for Ccr4 (NM_009916.1,435-453).
cgaccagtgggtttttgga

SEQ ID NO: 528342 - DNA, 19 bp, Mus musculus
  siRNA target sequence for Ccr4 (NM_009916.1,457-475).
ggtctgtgcaagatcgttt

SEQ ID NO: 528343 - DNA, 19 bp, Mus musculus
  siRNA target sequence for Ccr4 (NM_009916.1,503-521).
gcggcatcttcttcatcat

SEQ ID NO: 528344 - DNA, 19 bp, Mus musculus
  siRNA target sequence for Ccr4 (NM_009916.1,851-869).
gagcagtgcgcatgatctt

SEQ ID NO: 528345 - DNA, 19 bp, Mus musculus
  siRNA target sequence for Ccr4 (NM_009916.1,905-923).
cgtacaacgtggtgctttt

SEQ ID NO: 528346 - DNA, 19 bp, Mus musculus
  siRNA target sequence for Ccr4 (NM_009916.1,1030-1048).
cttaaccccgtcatttact

SEQ ID NO: 528347 - DNA, 19 bp, Mus musculus
  siRNA target sequence for Ccr4 (NM_009916.1,1060-1078).
gagaaattccgcaagtaca

SEQ ID NO: 528348 - DNA, 19 bp, Mus musculus
  siRNA target sequence for Ccr5 (NM_009917.2,87-105).
gggtcagttccgacctata

SEQ ID NO: 528349 - DNA, 19 bp, Mus musculus
  siRNA target sequence for Ccr5 (NM_009917.2,91-109).
cagttccgacctatagcta

SEQ ID NO: 528350 - DNA, 19 bp, Mus musculus
  siRNA target sequence for Ccr5 (NM_009917.2,97-115).
cgacctatagctatgacat

SEQ ID NO: 528351 - DNA, 19 bp, Mus musculus
  siRNA target sequence for Ccr5 (NM_009917.2,107-125).
ctatgacatcgattatggt

SEQ ID NO: 528352 - DNA, 19 bp, Mus musculus
  siRNA target sequence for Ccr5 (NM_009917.2,132-150).
gcaccctgccaaaaaatca

SEQ ID NO: 528353 - DNA, 19 bp, Mus musculus
  siRNA target sequence for Ccr5 (NM_009917.2,136-154).
cctgccaaaaaatcaatgt

SEQ ID NO: 528354 - DNA, 19 bp, Mus musculus
  siRNA target sequence for Ccr5 (NM_009917.2,561-579).
ctcccagaaataatcttta

SEQ ID NO: 528355 - DNA, 19 bp, Mus musculus
  siRNA target sequence for Ccr5 (NM_009917.2,627-645).
ccacacactcagtatcatt

SEQ ID NO: 528356 - DNA, 19 bp, Mus musculus
  siRNA target sequence for Ccr5 (NM_009917.2,876-894).
ctgaataactgcagtagtt

SEQ ID NO: 528357 - DNA, 19 bp, Mus musculus
  siRNA target sequence for Ccr5 (NM_009917.2,884-902).
ctgcagtagttctaataga

SEQ ID NO: 528358 - DNA, 19 bp, Mus musculus
  siRNA target sequence for Ccr5 (NM_009917.2,886-904).
gcagtagttctaatagact

SEQ ID NO: 528359 - DNA, 19 bp, Mus musculus
  siRNA target sequence for Ccr5 (NM_009917.2,887-905).
cagtagttctaatagacta

SEQ ID NO: 528360 - DNA, 19 bp, Mus musculus
  siRNA target sequence for Ccr5 (NM_009917.2,1008-1026).
gtgttcttccgaaaacaca

SEQ ID NO: 528361 - DNA, 19 bp, Mus musculus
  siRNA target sequence for Ccr5 (NM_009917.2,1028-1046).
ggtcaaacgcttttgcaaa

SEQ ID NO: 528362 - DNA, 19 bp, Mus musculus
  siRNA target sequence for Ccr5 (NM_009917.2,1080-1098).
cgtgcaagctcagtctata

SEQ ID NO: 528363 - DNA, 19 bp, Mus musculus
  siRNA target sequence for Ccr6 (NM_009835.2,618-636).
ggaacggatgattatgaca

SEQ ID NO: 528364 - DNA, 19 bp, Mus musculus
  siRNA target sequence for Ccr6 (NM_009835.2,619-637).
gaacggatgattatgacaa

SEQ ID NO: 528365 - DNA, 19 bp, Mus musculus
  siRNA target sequence for Ccr6 (NM_009835.2,633-651).
gacaacacagagtattatt

SEQ ID NO: 528366 - DNA, 19 bp, Mus musculus
  siRNA target sequence for Ccr6 (NM_009835.2,638-656).
cacagagtattattctatt

SEQ ID NO: 528367 - DNA, 19 bp, Mus musculus
  siRNA target sequence for Ccr6 (NM_009835.2,811-829).
ctgacgtctacctgttgaa

SEQ ID NO: 528368 - DNA, 19 bp, Mus musculus
  siRNA target sequence for Ccr6 (NM_009835.2,834-852).
gccatcacagacatactct

SEQ ID NO: 528369 - DNA, 19 bp, Mus musculus
  siRNA target sequence for Ccr6 (NM_009835.2,868-886).
cgttctgggcagttactca

SEQ ID NO: 528370 - DNA, 19 bp, Mus musculus
  siRNA target sequence for Ccr6 (NM_009835.2,869-887).
gttctgggcagttactcat

SEQ ID NO: 528371 - DNA, 19 bp, Mus musculus
  siRNA target sequence for Ccr6 (NM_009835.2,937-955).
gcacatatgcggtcaactt

SEQ ID NO: 528372 - DNA, 19 bp, Mus musculus
  siRNA target sequence for Ccr6 (NM_009835.2,938-956).
cacatatgcggtcaacttt

SEQ ID NO: 528373 - DNA, 19 bp, Mus musculus
  siRNA target sequence for Ccr6 (NM_009835.2,940-958).
catatgcggtcaactttaa

SEQ ID NO: 528374 - DNA, 19 bp, Mus musculus
  siRNA target sequence for Ccr6 (NM_009835.2,1007-1025).
catcgtccaggcaaccaaa

SEQ ID NO: 528375 - DNA, 19 bp, Mus musculus
  siRNA target sequence for Ccr6 (NM_009835.2,1105-1123).
caagccctacatttatctt

SEQ ID NO: 528376 - DNA, 19 bp, Mus musculus
  siRNA target sequence for Ccr6 (NM_009835.2,1262-1280).
gttctgctatctgttcatt

SEQ ID NO: 528377 - DNA, 19 bp, Mus musculus
  siRNA target sequence for Ccr6 (NM_009835.2,1429-1447).
gctgcagcaccgagaaagt

SEQ ID NO: 528378 - DNA, 19 bp, Mus musculus
  siRNA target sequence for Ccr6 (NM_009835.2,1498-1516).
gcctcaaccccgtgttgta

SEQ ID NO: 528379 - DNA, 19 bp, Mus musculus
  siRNA target sequence for Ccr6 (NM_009835.2,1507-1525).
ccgtgttgtatgcgtttat

SEQ ID NO: 528380 - DNA, 19 bp, Mus musculus
  siRNA target sequence for Ccr6 (NM_009835.2,1511-1529).
gttgtatgcgtttattgga

SEQ ID NO: 528381 - DNA, 19 bp, Mus musculus
  siRNA target sequence for Ccr6 (NM_009835.2,1565-1583).
ggatgtgtggtgtatgaga

SEQ ID NO: 528382 - DNA, 19 bp, Mus musculus
  siRNA target sequence for Ccr6 (NM_009835.2,1651-1669).
ccagtgagaccgtcgaaaa

SEQ ID NO: 528383 - DNA, 19 bp, Mus musculus
  siRNA target sequence for Ccr6 (NM_009835.2,1652-1670).
cagtgagaccgtcgaaaat

SEQ ID NO: 528384 - DNA, 19 bp, Mus musculus
  siRNA target sequence for Ccr6 (NM_009835.2,1654-1672).
gtgagaccgtcgaaaatga

SEQ ID NO: 528385 - DNA, 19 bp, Mus musculus
  siRNA target sequence for Ccr6 (NM_009835.2,1656-1674).
gagaccgtcgaaaatgata

SEQ ID NO: 528386 - DNA, 19 bp, Mus musculus
  siRNA target sequence for Ccr6 (NM_009835.2,1658-1676).
gaccgtcgaaaatgataat

SEQ ID NO: 528387 - DNA, 19 bp, Mus musculus
  siRNA target sequence for Ccr6 (NM_009835.2,1661-1679).
cgtcgaaaatgataatgca

SEQ ID NO: 528388 - DNA, 19 bp, Mus musculus
  siRNA target sequence for Ccr6 (NM_009835.2,1662-1680).
gtcgaaaatgataatgcat

SEQ ID NO: 528389 - DNA, 19 bp, Mus musculus
  siRNA target sequence for Ccr6 (NM_009835.2,1671-1689).
gataatgcatcgtccttta

SEQ ID NO: 528390 - DNA, 19 bp, Mus musculus
  siRNA target sequence for Ccr7 (NM_007719.1,266-284).
gactacatcggcgagaata

SEQ ID NO: 528391 - DNA, 19 bp, Mus musculus
  siRNA target sequence for Ccr7 (NM_007719.1,325-343).
gaaggatgtgcggaacttt

SEQ ID NO: 528392 - DNA, 19 bp, Mus musculus
  siRNA target sequence for Ccr7 (NM_007719.1,399-417).
gcaacgggctggtgatact

SEQ ID NO: 528393 - DNA, 19 bp, Mus musculus
  siRNA target sequence for Ccr7 (NM_007719.1,410-428).
gtgatactgacgtacatct

SEQ ID NO: 528394 - DNA, 19 bp, Mus musculus
  siRNA target sequence for Ccr7 (NM_007719.1,412-430).
gatactgacgtacatctat

SEQ ID NO: 528395 - DNA, 19 bp, Mus musculus
  siRNA target sequence for Ccr7 (NM_007719.1,416-434).
ctgacgtacatctatttca

SEQ ID NO: 528396 - DNA, 19 bp, Mus musculus
  siRNA target sequence for Ccr7 (NM_007719.1,565-583).
gggcatctttggcatctat

SEQ ID NO: 528397 - DNA, 19 bp, Mus musculus
  siRNA target sequence for Ccr7 (NM_007719.1,566-584).
ggcatctttggcatctata

SEQ ID NO: 528398 - DNA, 19 bp, Mus musculus
  siRNA target sequence for Ccr7 (NM_007719.1,567-585).
gcatctttggcatctataa

SEQ ID NO: 528399 - DNA, 19 bp, Mus musculus
  siRNA target sequence for Ccr7 (NM_007719.1,576-594).
gcatctataagttaagctt

SEQ ID NO: 528400 - DNA, 19 bp, Mus musculus
  siRNA target sequence for Ccr7 (NM_007719.1,877-895).
gcctatgctggctatgagt

SEQ ID NO: 528401 - DNA, 19 bp, Mus musculus
  siRNA target sequence for Ccr7 (NM_007719.1,894-912).
gtttctgctacctcattat

SEQ ID NO: 528402 - DNA, 19 bp, Mus musculus
  siRNA target sequence for Ccr7 (NM_007719.1,975-993).
ccgtggtggtagtcttcat

SEQ ID NO: 528403 - DNA, 19 bp, Mus musculus
  siRNA target sequence for Ccr7 (NM_007719.1,976-994).
cgtggtggtagtcttcata

SEQ ID NO: 528404 - DNA, 19 bp, Mus musculus
  siRNA target sequence for Ccr7 (NM_007719.1,1155-1173).
ccttcatcggcgtcaagtt

SEQ ID NO: 528405 - DNA, 19 bp, Mus musculus
  siRNA target sequence for Ccr8 (NM_007720.1,49-67).
ccgactactaccctgattt

SEQ ID NO: 528406 - DNA, 19 bp, Mus musculus
  siRNA target sequence for Ccr8 (NM_007720.1,51-69).
gactactaccctgatttct

SEQ ID NO: 528407 - DNA, 19 bp, Mus musculus
  siRNA target sequence for Ccr8 (NM_007720.1,128-146).
cttgtactgcgtcttgttt

SEQ ID NO: 528408 - DNA, 19 bp, Mus musculus
  siRNA target sequence for Ccr8 (NM_007720.1,244-262).
catccgacctgctctttgt

SEQ ID NO: 528409 - DNA, 19 bp, Mus musculus
  siRNA target sequence for Ccr8 (NM_007720.1,329-347).
ggtggtctctggcctttat

SEQ ID NO: 528410 - DNA, 19 bp, Mus musculus
  siRNA target sequence for Ccr8 (NM_007720.1,335-353).
ctctggcctttattacatt

SEQ ID NO: 528411 - DNA, 19 bp, Mus musculus
  siRNA target sequence for Ccr8 (NM_007720.1,374-392).
cttcatcaccctaatgagt

SEQ ID NO: 528412 - DNA, 19 bp, Mus musculus
  siRNA target sequence for Ccr8 (NM_007720.1,502-520).
ccatccccttgatggtttt

SEQ ID NO: 528413 - DNA, 19 bp, Mus musculus
  siRNA target sequence for Ccr8 (NM_007720.1,508-526).
ccttgatggttttttacca

SEQ ID NO: 528414 - DNA, 19 bp, Mus musculus
  siRNA target sequence for Ccr8 (NM_007720.1,537-555).
gaagacggcatgctacaat

SEQ ID NO: 528415 - DNA, 19 bp, Mus musculus
  siRNA target sequence for Ccr8 (NM_007720.1,725-743).
ggtgctcaccgtagtcatt

SEQ ID NO: 528416 - DNA, 19 bp, Mus musculus
  siRNA target sequence for Ccr8 (NM_007720.1,733-751).
ccgtagtcattgtgtcttt

SEQ ID NO: 528417 - DNA, 19 bp, Mus musculus
  siRNA target sequence for Ccr8 (NM_007720.1,858-876).
gtcacagaggtcatctctt

SEQ ID NO: 528418 - DNA, 19 bp, Mus musculus
  siRNA target sequence for Ccr8 (NM_007720.1,899-917).
cgtcatctacgcgttcata

SEQ ID NO: 528419 - DNA, 19 bp, Mus musculus
  siRNA target sequence for Ccr8 (NM_007720.1,910-928).
cgttcataggagagaagtt

SEQ ID NO: 528420 - DNA, 19 bp, Mus musculus
  siRNA target sequence for Ccr8 (NM_007720.1,1035-1053).
cagcgatcttcccattctt

SEQ ID NO: 528421 - DNA, 19 bp, Mus musculus
  siRNA target sequence for Ccr9 (NM_009913.2,319-337).
ccttattcctggcatgttt

SEQ ID NO: 528422 - DNA, 19 bp, Mus musculus
  siRNA target sequence for Ccr9 (NM_009913.2,360-378).
ctgcttccacagatgacta

SEQ ID NO: 528423 - DNA, 19 bp, Mus musculus
  siRNA target sequence for Ccr9 (NM_009913.2,430-448).
gtttgcaagccattttctt

SEQ ID NO: 528424 - DNA, 19 bp, Mus musculus
  siRNA target sequence for Ccr9 (NM_009913.2,545-563).
gacatgttccttttgaatt

SEQ ID NO: 528425 - DNA, 19 bp, Mus musculus
  siRNA target sequence for Ccr9 (NM_009913.2,615-633).
ctgctgctggtcaatggat

SEQ ID NO: 528426 - DNA, 19 bp, Mus musculus
  siRNA target sequence for Ccr9 (NM_009913.2,892-910).
catggtctaccctaaggat

SEQ ID NO: 528427 - DNA, 19 bp, Mus musculus
  siRNA target sequence for Ccr9 (NM_009913.2,896-914).
gtctaccctaaggataaga

SEQ ID NO: 528428 - DNA, 19 bp, Mus musculus
  siRNA target sequence for Ccr9 (NM_009913.2,898-916).
ctaccctaaggataagaat

SEQ ID NO: 528429 - DNA, 19 bp, Mus musculus
  siRNA target sequence for Ccr9 (NM_009913.2,908-926).
gataagaatgccaagctaa

SEQ ID NO: 528430 - DNA, 19 bp, Mus musculus
  siRNA target sequence for Ccr9 (NM_009913.2,913-931).
gaatgccaagctaaagtca

SEQ ID NO: 528431 - DNA, 19 bp, Mus musculus
  siRNA target sequence for Ccr9 (NM_009913.2,991-1009).
ctgctataccatcatcatt

SEQ ID NO: 528432 - DNA, 19 bp, Mus musculus
  siRNA target sequence for Ccr9 (NM_009913.2,993-1011).
gctataccatcatcattca

SEQ ID NO: 528433 - DNA, 19 bp, Mus musculus
  siRNA target sequence for Ccr9 (NM_009913.2,1070-1088).
gtcctcactgtcttcatta

SEQ ID NO: 528434 - DNA, 19 bp, Mus musculus
  siRNA target sequence for Ccr9 (NM_009913.2,1101-1119).
cctacaactccattcttgt

SEQ ID NO: 528435 - DNA, 19 bp, Mus musculus
  siRNA target sequence for Ccr9 (NM_009913.2,1102-1120).
ctacaactccattcttgta

SEQ ID NO: 528436 - DNA, 19 bp, Mus musculus
  siRNA target sequence for Ccr9 (NM_009913.2,1133-1151).
gacgcttatgccatgttca

SEQ ID NO: 528437 - DNA, 19 bp, Mus musculus
  siRNA target sequence for Ccr9 (NM_009913.2,1196-1214).
gttactcagactattgcat

SEQ ID NO: 528438 - DNA, 19 bp, Mus musculus
  siRNA target sequence for Ccr9 (NM_009913.2,1291-1309).
gaagaacctgggatgcatt

SEQ ID NO: 528439 - DNA, 19 bp, Mus musculus
  siRNA target sequence for Ccr9 (NM_009913.2,1354-1372).
gaagctttcttctatgcta

SEQ ID NO: 528440 - DNA, 19 bp, Mus musculus
  siRNA target sequence for Ccrl1 (NM_145700.1,810-828).
ccagtcagcggaatactat

SEQ ID NO: 528441 - DNA, 19 bp, Mus musculus
  siRNA target sequence for Ccrl1 (NM_145700.1,811-829).
cagtcagcggaatactatt

SEQ ID NO: 528442 - DNA, 19 bp, Mus musculus
  siRNA target sequence for Ccrl1 (NM_145700.1,813-831).
gtcagcggaatactattat

SEQ ID NO: 528443 - DNA, 19 bp, Mus musculus
  siRNA target sequence for Ccrl1 (NM_145700.1,815-833).
cagcggaatactattatga

SEQ ID NO: 528444 - DNA, 19 bp, Mus musculus
  siRNA target sequence for Ccrl1 (NM_145700.1,873-891).
cgaagtgatctgcataaaa

SEQ ID NO: 528445 - DNA, 19 bp, Mus musculus
  siRNA target sequence for Ccrl1 (NM_145700.1,962-980).
cagggaactccgtagttgt

SEQ ID NO: 528446 - DNA, 19 bp, Mus musculus
  siRNA target sequence for Ccrl1 (NM_145700.1,971-989).
ccgtagttgtggcgattta

SEQ ID NO: 528447 - DNA, 19 bp, Mus musculus
  siRNA target sequence for Ccrl1 (NM_145700.1,982-1000).
gcgatttacgcctattaca

SEQ ID NO: 528448 - DNA, 19 bp, Mus musculus
  siRNA target sequence for Ccrl1 (NM_145700.1,983-1001).
cgatttacgcctattacaa

SEQ ID NO: 528449 - DNA, 19 bp, Mus musculus
  siRNA target sequence for Ccrl1 (NM_145700.1,1010-1028).
ggaccaagaccgatgtgta

SEQ ID NO: 528450 - DNA, 19 bp, Mus musculus
  siRNA target sequence for Ccrl1 (NM_145700.1,1041-1059).
ggctgtagcagacttgtta

SEQ ID NO: 528451 - DNA, 19 bp, Mus musculus
  siRNA target sequence for Ccrl1 (NM_145700.1,1049-1067).
cagacttgttacttctgat

SEQ ID NO: 528452 - DNA, 19 bp, Mus musculus
  siRNA target sequence for Ccrl1 (NM_145700.1,1074-1092).
gcctttctgggcagttaat

SEQ ID NO: 528453 - DNA, 19 bp, Mus musculus
  siRNA target sequence for Ccrl1 (NM_145700.1,1103-1121).
gatggattctaggcaaaat

SEQ ID NO: 528454 - DNA, 19 bp, Mus musculus
  siRNA target sequence for Ccrl1 (NM_145700.1,1141-1159).
gccctgtacacggtaaact

SEQ ID NO: 528455 - DNA, 19 bp, Mus musculus
  siRNA target sequence for Ccrl1 (NM_145700.1,1142-1160).
ccctgtacacggtaaactt

SEQ ID NO: 528456 - DNA, 19 bp, Mus musculus
  siRNA target sequence for Ccrl1 (NM_145700.1,1143-1161).
cctgtacacggtaaacttt

SEQ ID NO: 528457 - DNA, 19 bp, Mus musculus
  siRNA target sequence for Ccrl1 (NM_145700.1,1202-1220).
gatattgggcaattaccaa

SEQ ID NO: 528458 - DNA, 19 bp, Mus musculus
  siRNA target sequence for Ccrl1 (NM_145700.1,1249-1267).
ccctgttggatcatctgtt

SEQ ID NO: 528459 - DNA, 19 bp, Mus musculus
  siRNA target sequence for Ccrl1 (NM_145700.1,1299-1317).
cataccccagctggttttt

SEQ ID NO: 528460 - DNA, 19 bp, Mus musculus
  siRNA target sequence for Ccrl1 (NM_145700.1,1460-1478).
ccgccagggcgctcatcaa

SEQ ID NO: 528461 - DNA, 19 bp, Mus musculus
  siRNA target sequence for Ccrl1 (NM_145700.1,1473-1491).
catcaagatgcccaacatt

SEQ ID NO: 528462 - DNA, 19 bp, Mus musculus
  siRNA target sequence for Ccrl1 (NM_145700.1,1482-1500).
gcccaacattaaaaagtct

SEQ ID NO: 528463 - DNA, 19 bp, Mus musculus
  siRNA target sequence for Ccrl1 (NM_145700.1,1547-1565).
cccagctgccctataacgt

SEQ ID NO: 528464 - DNA, 19 bp, Mus musculus
  siRNA target sequence for Ccrl1 (NM_145700.1,1548-1566).
ccagctgccctataacgtt

SEQ ID NO: 528465 - DNA, 19 bp, Mus musculus
  siRNA target sequence for Ccrl1 (NM_145700.1,1552-1570).
ctgccctataacgttgtta

SEQ ID NO: 528466 - DNA, 19 bp, Mus musculus
  siRNA target sequence for Ccrl1 (NM_145700.1,1556-1574).
cctataacgttgttaagtt

SEQ ID NO: 528467 - DNA, 19 bp, Mus musculus
  siRNA target sequence for Ccrl1 (NM_145700.1,1572-1590).
gttctgccaagccatagat

SEQ ID NO: 528468 - DNA, 19 bp, Mus musculus
  siRNA target sequence for Ccrl1 (NM_145700.1,1714-1732).
gcctccttcaaaaactata

SEQ ID NO: 528469 - DNA, 19 bp, Mus musculus
  siRNA target sequence for Ccrl1 (NM_145700.1,1715-1733).
cctccttcaaaaactatat

SEQ ID NO: 528470 - DNA, 19 bp, Mus musculus
  siRNA target sequence for Ccrl1 (NM_145700.1,1718-1736).
ccttcaaaaactatatcat

SEQ ID NO: 528471 - DNA, 19 bp, Mus musculus
  siRNA target sequence for Ccrl1 (NM_145700.1,1741-1759).
gtggccaagaaatatggat

SEQ ID NO: 528472 - DNA, 19 bp, Mus musculus
  siRNA target sequence for Ccrl1 (NM_145700.1,1819-1837).
gagccaaccagttctttta

SEQ ID NO: 528473 - DNA, 19 bp, Mus musculus
  siRNA target sequence for Gpr2 (NM_007721.3,100-118).
cgctgccagagctctgtta

SEQ ID NO: 528474 - DNA, 19 bp, Mus musculus
  siRNA target sequence for Gpr2 (NM_007721.3,408-426).
ctcttcctagcctgtatca

SEQ ID NO: 528475 - DNA, 19 bp, Mus musculus
  siRNA target sequence for Gpr2 (NM_007721.3,493-511).
gagcgcacttggtttcagt

SEQ ID NO: 528476 - DNA, 19 bp, Mus musculus
  siRNA target sequence for Gpr2 (NM_007721.3,541-559).
ctctacctgcgctcctttt

SEQ ID NO: 528477 - DNA, 19 bp, Mus musculus
  siRNA target sequence for Gpr2 (NM_007721.3,543-561).
ctacctgcgctccttttca

SEQ ID NO: 528478 - DNA, 19 bp, Mus musculus
  siRNA target sequence for Gpr2 (NM_007721.3,588-606).
cgacgctgtcggctcattt

SEQ ID NO: 528479 - DNA, 19 bp, Mus musculus
  siRNA target sequence for Gpr2 (NM_007721.3,589-607).
gacgctgtcggctcatttt

SEQ ID NO: 528480 - DNA, 19 bp, Mus musculus
  siRNA target sequence for Gpr2 (NM_007721.3,617-635).
cctcacgcagactgtgaaa

SEQ ID NO: 528481 - DNA, 19 bp, Mus musculus
  siRNA target sequence for Gpr2 (NM_007721.3,1047-1065).
cgtcgactccgcctttctt

SEQ ID NO: 528482 - DNA, 19 bp, Mus musculus
  siRNA target sequence for Cxcr3 (NM_009910.1,92-110).
gtaccttgaggttagtgaa

SEQ ID NO: 528483 - DNA, 19 bp, Mus musculus
  siRNA target sequence for Cxcr3 (NM_009910.1,157-175).
gcacctctccctacgatta

SEQ ID NO: 528484 - DNA, 19 bp, Mus musculus
  siRNA target sequence for Cxcr3 (NM_009910.1,158-176).
cacctctccctacgattat

SEQ ID NO: 528485 - DNA, 19 bp, Mus musculus
  siRNA target sequence for Cxcr3 (NM_009910.1,462-480).
gtggcaggcgccttgttca

SEQ ID NO: 528486 - DNA, 19 bp, Mus musculus
  siRNA target sequence for Cxcr3 (NM_009910.1,465-483).
gcaggcgccttgttcaaca

SEQ ID NO: 528487 - DNA, 19 bp, Mus musculus
  siRNA target sequence for Cxcr3 (NM_009910.1,466-484).
caggcgccttgttcaacat

SEQ ID NO: 528488 - DNA, 19 bp, Mus musculus
  siRNA target sequence for Cxcr3 (NM_009910.1,469-487).
gcgccttgttcaacatcaa

SEQ ID NO: 528489 - DNA, 19 bp, Mus musculus
  siRNA target sequence for Cxcr3 (NM_009910.1,503-521).
cttcctgctggcttgtata

SEQ ID NO: 528490 - DNA, 19 bp, Mus musculus
  siRNA target sequence for Cxcr3 (NM_009910.1,685-703).
ccacccattgccagtacaa

SEQ ID NO: 528491 - DNA, 19 bp, Mus musculus
  siRNA target sequence for Cxcr3 (NM_009910.1,688-706).
cccattgccagtacaactt

SEQ ID NO: 528492 - DNA, 19 bp, Mus musculus
  siRNA target sequence for Cxcr3 (NM_009910.1,1121-1139).
gcggcagccgtcatcttca

SEQ ID NO: 528493 - DNA, 19 bp, Mus musculus
  siRNA target sequence for Cxcr6 (NM_030712.1,115-133).
ggcactacgagggagattt

SEQ ID NO: 528494 - DNA, 19 bp, Mus musculus
  siRNA target sequence for Cxcr6 (NM_030712.1,117-135).
cactacgagggagatttct

SEQ ID NO: 528495 - DNA, 19 bp, Mus musculus
  siRNA target sequence for Cxcr6 (NM_030712.1,127-145).
gagatttctggctcttcaa

SEQ ID NO: 528496 - DNA, 19 bp, Mus musculus
  siRNA target sequence for Cxcr6 (NM_030712.1,168-186).
gagaacaaacgcttcctaa

SEQ ID NO: 528497 - DNA, 19 bp, Mus musculus
  siRNA target sequence for Cxcr6 (NM_030712.1,251-269).
ctccctggttctgattata

SEQ ID NO: 528498 - DNA, 19 bp, Mus musculus
  siRNA target sequence for Cxcr6 (NM_030712.1,417-435).
cttcgaggcatgtatacaa

SEQ ID NO: 528499 - DNA, 19 bp, Mus musculus
  siRNA target sequence for Cxcr6 (NM_030712.1,420-438).
cgaggcatgtatacaatga

SEQ ID NO: 528500 - DNA, 19 bp, Mus musculus
  siRNA target sequence for Cxcr6 (NM_030712.1,473-491).
cacagtggatcgtttcatt

SEQ ID NO: 528501 - DNA, 19 bp, Mus musculus
  siRNA target sequence for Cxcr6 (NM_030712.1,475-493).
cagtggatcgtttcattgt

SEQ ID NO: 528502 - DNA, 19 bp, Mus musculus
  siRNA target sequence for Cxcr6 (NM_030712.1,539-557).
gatctggggccaagtcatt

SEQ ID NO: 528503 - DNA, 19 bp, Mus musculus
  siRNA target sequence for Cxcr6 (NM_030712.1,544-562).
ggggccaagtcatttgctt

SEQ ID NO: 528504 - DNA, 19 bp, Mus musculus
  siRNA target sequence for Cxcr6 (NM_030712.1,608-626).
ctatggccatgttcaagat

SEQ ID NO: 528505 - DNA, 19 bp, Mus musculus
  siRNA target sequence for Cxcr6 (NM_030712.1,613-631).
gccatgttcaagatattga

SEQ ID NO: 528506 - DNA, 19 bp, Mus musculus
  siRNA target sequence for Cxcr6 (NM_030712.1,651-669).
cacagtgaggagatatcca

SEQ ID NO: 528507 - DNA, 19 bp, Mus musculus
  siRNA target sequence for Cxcr6 (NM_030712.1,659-677).
ggagatatccactatggtt

SEQ ID NO: 528508 - DNA, 19 bp, Mus musculus
  siRNA target sequence for Cxcr6 (NM_030712.1,667-685).
ccactatggttcttgttat

SEQ ID NO: 528509 - DNA, 19 bp, Mus musculus
  siRNA target sequence for Cxcr6 (NM_030712.1,670-688).
ctatggttcttgttataca

SEQ ID NO: 528510 - DNA, 19 bp, Mus musculus
  siRNA target sequence for Cxcr6 (NM_030712.1,783-801).
cacaaatctctaaagatca

SEQ ID NO: 528511 - DNA, 19 bp, Mus musculus
  siRNA target sequence for Cxcr6 (NM_030712.1,842-860).
cttcaaccttgccatgtta

SEQ ID NO: 528512 - DNA, 19 bp, Mus musculus
  siRNA target sequence for Cxcr6 (NM_030712.1,848-866).
ccttgccatgttaatccaa

SEQ ID NO: 528513 - DNA, 19 bp, Mus musculus
  siRNA target sequence for Cxcr6 (NM_030712.1,849-867).
cttgccatgttaatccaaa

SEQ ID NO: 528514 - DNA, 19 bp, Mus musculus
  siRNA target sequence for Cxcr6 (NM_030712.1,852-870).
gccatgttaatccaaagta

SEQ ID NO: 528515 - DNA, 19 bp, Mus musculus
  siRNA target sequence for Cxcr6 (NM_030712.1,868-886).
gtacaagctgggagtacta

SEQ ID NO: 528516 - DNA, 19 bp, Mus musculus
  siRNA target sequence for Cxcr6 (NM_030712.1,874-892).
gctgggagtactataccat

SEQ ID NO: 528517 - DNA, 19 bp, Mus musculus
  siRNA target sequence for Cxcr6 (NM_030712.1,879-897).
gagtactataccataacca

SEQ ID NO: 528518 - DNA, 19 bp, Mus musculus
  siRNA target sequence for Cxcr6 (NM_030712.1,889-907).
ccataaccagctttaagta

SEQ ID NO: 528519 - DNA, 19 bp, Mus musculus
  siRNA target sequence for Cxcr6 (NM_030712.1,890-908).
cataaccagctttaagtat

SEQ ID NO: 528520 - DNA, 19 bp, Mus musculus
  siRNA target sequence for Cxcr6 (NM_030712.1,1038-1056).
ctgggagtctcaagtcaat

SEQ ID NO: 528521 - DNA, 19 bp, Mus musculus
  siRNA target sequence for Cxcr6 (NM_030712.1,1071-1089).
gacagttccaagacttgtt

SEQ ID NO: 528522 - DNA, 19 bp, Mus musculus
  siRNA target sequence for Cxcr6 (NM_030712.1,1087-1105).
gttctgcctcccacaatgt

SEQ ID NO: 528523 - DNA, 19 bp, Mus musculus
  siRNA target sequence for Cxcr6 (NM_030712.1,1111-1129).
ccaccagtatgttccaatt

SEQ ID NO: 528524 - DNA, 19 bp, Mus musculus
  siRNA target sequence for Cx3cr1 (NM_009987.2,165-183).
gacattgtggcctttggaa

SEQ ID NO: 528525 - DNA, 19 bp, Mus musculus
  siRNA target sequence for Cx3cr1 (NM_009987.2,226-244).
gtctggtgggaaatctgtt

SEQ ID NO: 528526 - DNA, 19 bp, Mus musculus
  siRNA target sequence for Cx3cr1 (NM_009987.2,522-540).
cagcacggtgtcaccatta

SEQ ID NO: 528527 - DNA, 19 bp, Mus musculus
  siRNA target sequence for Cx3cr1 (NM_009987.2,524-542).
gcacggtgtcaccattagt

SEQ ID NO: 528528 - DNA, 19 bp, Mus musculus
  siRNA target sequence for Cx3cr1 (NM_009987.2,573-591).
gcgtcaccccagttcatgt

SEQ ID NO: 528529 - DNA, 19 bp, Mus musculus
  siRNA target sequence for Cx3cr1 (NM_009987.2,574-592).
cgtcaccccagttcatgtt

SEQ ID NO: 528530 - DNA, 19 bp, Mus musculus
  siRNA target sequence for Cx3cr1 (NM_009987.2,664-682).
gcaactcggaagtcaacat

SEQ ID NO: 528531 - DNA, 19 bp, Mus musculus
  siRNA target sequence for Cx3cr1 (NM_009987.2,828-846).
ccatacaacatcatgattt

SEQ ID NO: 528532 - DNA, 19 bp, Mus musculus
  siRNA target sequence for Cx3cr1 (NM_009987.2,829-847).
catacaacatcatgatttt

SEQ ID NO: 528533 - DNA, 19 bp, Mus musculus
  siRNA target sequence for Cx3cr1 (NM_009987.2,981-999).
ggggaaaagttcagaagat

SEQ ID NO: 528534 - DNA, 19 bp, Mus musculus
  siRNA target sequence for Cx3cr1 (NM_009987.2,1002-1020).
ctgggacacctgtatagga

SEQ ID NO: 528535 - DNA, 19 bp, Mus musculus
  siRNA target sequence for Xcr1 (NM_011798.2,129-147).
cctctacagccttttatga

SEQ ID NO: 528536 - DNA, 19 bp, Mus musculus
  siRNA target sequence for Xcr1 (NM_011798.2,130-148).
ctctacagccttttatgat

SEQ ID NO: 528537 - DNA, 19 bp, Mus musculus
  siRNA target sequence for Xcr1 (NM_011798.2,132-150).
ctacagccttttatgatta

SEQ ID NO: 528538 - DNA, 19 bp, Mus musculus
  siRNA target sequence for Xcr1 (NM_011798.2,146-164).
gattatcatgataaattga

SEQ ID NO: 528539 - DNA, 19 bp, Mus musculus
  siRNA target sequence for Xcr1 (NM_011798.2,155-173).
gataaattgagtcttctat

SEQ ID NO: 528540 - DNA, 19 bp, Mus musculus
  siRNA target sequence for Xcr1 (NM_011798.2,272-290).
gtcttggtgaagtatgaga

SEQ ID NO: 528541 - DNA, 19 bp, Mus musculus
  siRNA target sequence for Xcr1 (NM_011798.2,277-295).
ggtgaagtatgagaatcta

SEQ ID NO: 528542 - DNA, 19 bp, Mus musculus
  siRNA target sequence for Xcr1 (NM_011798.2,293-311).
ctagagtcactcaccaata

SEQ ID NO: 528543 - DNA, 19 bp, Mus musculus
  siRNA target sequence for Xcr1 (NM_011798.2,354-372).
gtctactgcctgtgttgat

SEQ ID NO: 528544 - DNA, 19 bp, Mus musculus
  siRNA target sequence for Xcr1 (NM_011798.2,542-560).
cgtgtgctggtgacatcat

SEQ ID NO: 528545 - DNA, 19 bp, Mus musculus
  siRNA target sequence for Xcr1 (NM_011798.2,614-632).
gtgatctccttaaattgta

SEQ ID NO: 528546 - DNA, 19 bp, Mus musculus
  siRNA target sequence for Xcr1 (NM_011798.2,616-634).
gatctccttaaattgtaaa

SEQ ID NO: 528547 - DNA, 19 bp, Mus musculus
  siRNA target sequence for Xcr1 (NM_011798.2,630-648).
gtaaatattctgaacatca

SEQ ID NO: 528548 - DNA, 19 bp, Mus musculus
  siRNA target sequence for Xcr1 (NM_011798.2,696-714).
ccatgggaatcatcctatt

SEQ ID NO: 528549 - DNA, 19 bp, Mus musculus
  siRNA target sequence for Xcr1 (NM_011798.2,700-718).
gggaatcatcctattctgt

SEQ ID NO: 528550 - DNA, 19 bp, Mus musculus
  siRNA target sequence for Xcr1 (NM_011798.2,701-719).
ggaatcatcctattctgtt

SEQ ID NO: 528551 - DNA, 19 bp, Mus musculus
  siRNA target sequence for Xcr1 (NM_011798.2,702-720).
gaatcatcctattctgtta

SEQ ID NO: 528552 - DNA, 19 bp, Mus musculus
  siRNA target sequence for Xcr1 (NM_011798.2,771-789).
gaacagtcaggctcatctt

SEQ ID NO: 528553 - DNA, 19 bp, Mus musculus
  siRNA target sequence for Xcr1 (NM_011798.2,792-810).
ccgtcgtggtagcatactt

SEQ ID NO: 528554 - DNA, 19 bp, Mus musculus
  siRNA target sequence for Xcr1 (NM_011798.2,833-851).
ctcacactcttcctgaaaa

SEQ ID NO: 528555 - DNA, 19 bp, Mus musculus
  siRNA target sequence for Xcr1 (NM_011798.2,959-977).
gtctttgttgggatcaagt

SEQ ID NO: 528556 - DNA, 19 bp, Mus musculus
  siRNA target sequence for Xcr1 (NM_011798.2,976-994).
gttccgcagacacctaaaa

SEQ ID NO: 528557 - DNA, 19 bp, Mus musculus
  siRNA target sequence for Xcr1 (NM_011798.2,979-997).
ccgcagacacctaaaacat

SEQ ID NO: 528558 - DNA, 19 bp, Mus musculus
  siRNA target sequence for Xcr1 (NM_011798.2,1050-1068).
cccctggtacctttacata

SEQ ID NO: 528559 - DNA, 19 bp, Mus musculus
  siRNA target sequence for Xcr1 (NM_011798.2,1051-1069).
ccctggtacctttacatat

SEQ ID NO: 528560 - DNA, 19 bp, Mus musculus
  siRNA target sequence for Ifnar2 (NM_010509.1,279-297).
ctgcgagcctagagactat

SEQ ID NO: 528561 - DNA, 19 bp, Mus musculus
  siRNA target sequence for Ifnar2 (NM_010509.1,281-299).
gcgagcctagagactatca

SEQ ID NO: 528562 - DNA, 19 bp, Mus musculus
  siRNA target sequence for Ifnar2 (NM_010509.1,283-301).
gagcctagagactatcaca

SEQ ID NO: 528563 - DNA, 19 bp, Mus musculus
  siRNA target sequence for Ifnar2 (NM_010509.1,326-344).
gatgaaccttgcactataa

SEQ ID NO: 528564 - DNA, 19 bp, Mus musculus
  siRNA target sequence for Ifnar2 (NM_010509.1,329-347).
gaaccttgcactataaaca

SEQ ID NO: 528565 - DNA, 19 bp, Mus musculus
  siRNA target sequence for Ifnar2 (NM_010509.1,356-374).
cgaaattcccggctaattt

SEQ ID NO: 528566 - DNA, 19 bp, Mus musculus
  siRNA target sequence for Ifnar2 (NM_010509.1,399-417).
ctggcccacccgctaacta

SEQ ID NO: 528567 - DNA, 19 bp, Mus musculus
  siRNA target sequence for Ifnar2 (NM_010509.1,401-419).
ggcccacccgctaactaca

SEQ ID NO: 528568 - DNA, 19 bp, Mus musculus
  siRNA target sequence for Ifnar2 (NM_010509.1,449-467).
gaaaatctgacgaaggtta

SEQ ID NO: 528569 - DNA, 19 bp, Mus musculus
  siRNA target sequence for Ifnar2 (NM_010509.1,495-513).
catgtgacgtgacagataa

SEQ ID NO: 528570 - DNA, 19 bp, Mus musculus
  siRNA target sequence for Ifnar2 (NM_010509.1,582-600).
gccgctgctcagactacat

SEQ ID NO: 528571 - DNA, 19 bp, Mus musculus
  siRNA target sequence for Ifnar2 (NM_010509.1,618-636).
ctcttgagccgccagaatt

SEQ ID NO: 528572 - DNA, 19 bp, Mus musculus
  siRNA target sequence for Ifnar2 (NM_010509.1,623-641).
gagccgccagaatttgaga

SEQ ID NO: 528573 - DNA, 19 bp, Mus musculus
  siRNA target sequence for Ifnar2 (NM_010509.1,667-685).
cgtgacgatggaatttcca

SEQ ID NO: 528574 - DNA, 19 bp, Mus musculus
  siRNA target sequence for Ifnar2 (NM_010509.1,723-741).
ctacaccctttgtcatcaa

SEQ ID NO: 528575 - DNA, 19 bp, Mus musculus
  siRNA target sequence for Ifnar2 (NM_010509.1,772-790).
gcacgagcccaaagtgaat

SEQ ID NO: 528576 - DNA, 19 bp, Mus musculus
  siRNA target sequence for Ifnar2 (NM_010509.1,773-791).
cacgagcccaaagtgaata

SEQ ID NO: 528577 - DNA, 19 bp, Mus musculus
  siRNA target sequence for Ifnar2 (NM_010509.1,775-793).
cgagcccaaagtgaataat

SEQ ID NO: 528578 - DNA, 19 bp, Mus musculus
  siRNA target sequence for Ifnar2 (NM_010509.1,869-887).
gatgaccccgcaataaaat

SEQ ID NO: 528579 - DNA, 19 bp, Mus musculus
  siRNA target sequence for Ifnar2 (NM_010509.1,922-940).
ggaatcaggattatcagaa

SEQ ID NO: 528580 - DNA, 19 bp, Mus musculus
  siRNA target sequence for Ifnar2 (NM_010509.1,923-941).
gaatcaggattatcagaat

SEQ ID NO: 528581 - DNA, 19 bp, Mus musculus
  siRNA target sequence for Ifnar2 (NM_010509.1,944-962).
gctatagtaggaataacta

SEQ ID NO: 528582 - DNA, 19 bp, Mus musculus
  siRNA target sequence for Ifnar2 (NM_010509.1,963-981).
cttcgtgtttggtagtgat

SEQ ID NO: 528583 - DNA, 19 bp, Mus musculus
  siRNA target sequence for Ifnar2 (NM_010509.1,1006-1024).
gctgaaacggattggttat

SEQ ID NO: 528584 - DNA, 19 bp, Mus musculus
  siRNA target sequence for Ifnar2 (NM_010509.1,1007-1025).
ctgaaacggattggttata

SEQ ID NO: 528585 - DNA, 19 bp, Mus musculus
  siRNA target sequence for Ifnar2 (NM_010509.1,1057-1075).
gaacttccgccacttttta

SEQ ID NO: 528586 - DNA, 19 bp, Mus musculus
  siRNA target sequence for Ifnar2 (NM_010509.1,1067-1085).
cactttttaacctggataa

SEQ ID NO: 528587 - DNA, 19 bp, Mus musculus
  siRNA target sequence for Ifnar2 (NM_010509.1,1110-1128).
ccatcgatcggctggaaat

SEQ ID NO: 528588 - DNA, 19 bp, Mus musculus
  siRNA target sequence for Ifnar2 (NM_010509.1,1150-1168).
gagactgtggaattacgat

SEQ ID NO: 528589 - DNA, 19 bp, Mus musculus
  siRNA target sequence for Ifnar2 (NM_010509.1,1152-1170).
gactgtggaattacgatta

SEQ ID NO: 528590 - DNA, 19 bp, Mus musculus
  siRNA target sequence for Ifnar2 (NM_010509.1,1311-1329).
caggcgctgaggaatctga

SEQ ID NO: 528591 - DNA, 19 bp, Mus musculus
  siRNA target sequence for Ifnar2 (NM_010509.1,1428-1446).
gtgtgctcgaggactcatt

SEQ ID NO: 528592 - DNA, 19 bp, Mus musculus
  siRNA target sequence for Ifnar2 (NM_010509.1,1478-1496).
cctggggacaacattatct

SEQ ID NO: 528593 - DNA, 19 bp, Mus musculus
  siRNA target sequence for Ifnar2 (NM_010509.1,1479-1497).
ctggggacaacattatctt

SEQ ID NO: 528594 - DNA, 19 bp, Mus musculus
  siRNA target sequence for Ifnar2 (NM_010509.1,1544-1562).
gatgcctcagagacattat

SEQ ID NO: 528595 - DNA, 19 bp, Mus musculus
  siRNA target sequence for Ifnar2 (NM_010509.1,1557-1575).
cattatctctcgaagaaga

SEQ ID NO: 528596 - DNA, 19 bp, Mus musculus
  siRNA target sequence for Ifnar2 (NM_010509.1,1675-1693).
ggatctatggactgaagat

SEQ ID NO: 528597 - DNA, 19 bp, Mus musculus
  siRNA target sequence for Ifnar2 (NM_010509.1,1691-1709).
gatgggtcatctgagaaat

SEQ ID NO: 528598 - DNA, 19 bp, Mus musculus
  siRNA target sequence for Ifnar2 (NM_010509.1,1695-1713).
ggtcatctgagaaatcaga

SEQ ID NO: 528599 - DNA, 19 bp, Mus musculus
  siRNA target sequence for Ifngr (NM_010511.1,116-134).
ggcagctggcaggatgatt

SEQ ID NO: 528600 - DNA, 19 bp, Mus musculus
  siRNA target sequence for Ifngr (NM_010511.1,215-233).
gcctgtaccgacgaatgtt

SEQ ID NO: 528601 - DNA, 19 bp, Mus musculus
  siRNA target sequence for Ifngr (NM_010511.1,217-235).
ctgtaccgacgaatgttct

SEQ ID NO: 528602 - DNA, 19 bp, Mus musculus
  siRNA target sequence for Ifngr (NM_010511.1,219-237).
gtaccgacgaatgttctaa

SEQ ID NO: 528603 - DNA, 19 bp, Mus musculus
  siRNA target sequence for Ifngr (NM_010511.1,222-240).
ccgacgaatgttctaatta

SEQ ID NO: 528604 - DNA, 19 bp, Mus musculus
  siRNA target sequence for Ifngr (NM_010511.1,223-241).
cgacgaatgttctaattaa

SEQ ID NO: 528605 - DNA, 19 bp, Mus musculus
  siRNA target sequence for Ifngr (NM_010511.1,227-245).
gaatgttctaattaagtct

SEQ ID NO: 528606 - DNA, 19 bp, Mus musculus
  siRNA target sequence for Ifngr (NM_010511.1,231-249).
gttctaattaagtcttata

SEQ ID NO: 528607 - DNA, 19 bp, Mus musculus
  siRNA target sequence for Ifngr (NM_010511.1,284-302).
catgtcacagactcctatt

SEQ ID NO: 528608 - DNA, 19 bp, Mus musculus
  siRNA target sequence for Ifngr (NM_010511.1,287-305).
gtcacagactcctattttt

SEQ ID NO: 528609 - DNA, 19 bp, Mus musculus
  siRNA target sequence for Ifngr (NM_010511.1,293-311).
gactcctatttttactgta

SEQ ID NO: 528610 - DNA, 19 bp, Mus musculus
  siRNA target sequence for Ifngr (NM_010511.1,309-327).
gtacaggtaaaggtgtatt

SEQ ID NO: 528611 - DNA, 19 bp, Mus musculus
  siRNA target sequence for Ifngr (NM_010511.1,342-360).
gattcctgcaccaacattt

SEQ ID NO: 528612 - DNA, 19 bp, Mus musculus
  siRNA target sequence for Ifngr (NM_010511.1,373-391).
gtaatatctatgaacaaat

SEQ ID NO: 528613 - DNA, 19 bp, Mus musculus
  siRNA target sequence for Ifngr (NM_010511.1,415-433).
gggccagagttaaagctaa

SEQ ID NO: 528614 - DNA, 19 bp, Mus musculus
  siRNA target sequence for Ifngr (NM_010511.1,463-481).
ggtcaaaagagttccttat

SEQ ID NO: 528615 - DNA, 19 bp, Mus musculus
  siRNA target sequence for Ifngr (NM_010511.1,542-560).
gctctccgtcctcgtattt

SEQ ID NO: 528616 - DNA, 19 bp, Mus musculus
  siRNA target sequence for Ifngr (NM_010511.1,563-581).
ccctgaagtcgttgtgaat

SEQ ID NO: 528617 - DNA, 19 bp, Mus musculus
  siRNA target sequence for Ifngr (NM_010511.1,609-627).
gacgggagcacctgttaca

SEQ ID NO: 528618 - DNA, 19 bp, Mus musculus
  siRNA target sequence for Ifngr (NM_010511.1,611-629).
cgggagcacctgttacaca

SEQ ID NO: 528619 - DNA, 19 bp, Mus musculus
  siRNA target sequence for Ifngr (NM_010511.1,640-658).
ctgtgtatgtggagcataa

SEQ ID NO: 528620 - DNA, 19 bp, Mus musculus
  siRNA target sequence for Ifngr (NM_010511.1,667-685).
gggagatcctacatacgaa

SEQ ID NO: 528621 - DNA, 19 bp, Mus musculus
  siRNA target sequence for Ifngr (NM_010511.1,668-686).
ggagatcctacatacgaaa

SEQ ID NO: 528622 - DNA, 19 bp, Mus musculus
  siRNA target sequence for Ifngr (NM_010511.1,671-689).
gatcctacatacgaaacat

SEQ ID NO: 528623 - DNA, 19 bp, Mus musculus
  siRNA target sequence for Ifngr (NM_010511.1,682-700).
cgaaacatacggtcgaaaa

SEQ ID NO: 528624 - DNA, 19 bp, Mus musculus
  siRNA target sequence for Ifngr (NM_010511.1,746-764).
cacactggattccagatat

SEQ ID NO: 528625 - DNA, 19 bp, Mus musculus
  siRNA target sequence for Ifngr (NM_010511.1,752-770).
ggattccagatattgtatt

SEQ ID NO: 528626 - DNA, 19 bp, Mus musculus
  siRNA target sequence for Ifngr (NM_010511.1,753-771).
gattccagatattgtattt

SEQ ID NO: 528627 - DNA, 19 bp, Mus musculus
  siRNA target sequence for Ifngr (NM_010511.1,774-792).
gtagacggaatctcatctt

SEQ ID NO: 528628 - DNA, 19 bp, Mus musculus
  siRNA target sequence for Ifngr (NM_010511.1,777-795).
gacggaatctcatctttct

SEQ ID NO: 528629 - DNA, 19 bp, Mus musculus
  siRNA target sequence for Ifngr (NM_010511.1,882-900).
gctcctcttaccgtcttta

SEQ ID NO: 528630 - DNA, 19 bp, Mus musculus
  siRNA target sequence for Ifngr (NM_010511.1,901-919).
cagtagttatcctggtatt

SEQ ID NO: 528631 - DNA, 19 bp, Mus musculus
  siRNA target sequence for Ifngr (NM_010511.1,912-930).
ctggtatttgcgtattggt

SEQ ID NO: 528632 - DNA, 19 bp, Mus musculus
  siRNA target sequence for Ifngr (NM_010511.1,914-932).
ggtatttgcgtattggtat

SEQ ID NO: 528633 - DNA, 19 bp, Mus musculus
  siRNA target sequence for Ifngr (NM_010511.1,921-939).
gcgtattggtatactaaga

SEQ ID NO: 528634 - DNA, 19 bp, Mus musculus
  siRNA target sequence for Ifngr (NM_010511.1,922-940).
cgtattggtatactaagaa

SEQ ID NO: 528635 - DNA, 19 bp, Mus musculus
  siRNA target sequence for Ifngr (NM_010511.1,929-947).
gtatactaagaagaattca

SEQ ID NO: 528636 - DNA, 19 bp, Mus musculus
  siRNA target sequence for Ifngr (NM_010511.1,934-952).
ctaagaagaattcattcaa

SEQ ID NO: 528637 - DNA, 19 bp, Mus musculus
  siRNA target sequence for Ifngr (NM_010511.1,979-997).
ccttgctctctgtggtaaa

SEQ ID NO: 528638 - DNA, 19 bp, Mus musculus
  siRNA target sequence for Ifngr (NM_010511.1,1004-1022).
cacgttagagacaaaacct

SEQ ID NO: 528639 - DNA, 19 bp, Mus musculus
  siRNA target sequence for Ifngr (NM_010511.1,1021-1039).
ctgaatcgaagtattcact

SEQ ID NO: 528640 - DNA, 19 bp, Mus musculus
  siRNA target sequence for Ifngr (NM_010511.1,1323-1341).
ggatcgggcagctccatat

SEQ ID NO: 528641 - DNA, 19 bp, Mus musculus
  siRNA target sequence for Ifngr (NM_010511.1,1350-1368).
gaatctctcccaaacaaca

SEQ ID NO: 528642 - DNA, 19 bp, Mus musculus
  siRNA target sequence for Ifngr (NM_010511.1,1420-1438).
ccatggcctccggttatga

SEQ ID NO: 528643 - DNA, 19 bp, Mus musculus
  siRNA target sequence for Ifngr (NM_010511.1,1424-1442).
ggcctccggttatgacaaa

SEQ ID NO: 528644 - DNA, 19 bp, Mus musculus
  siRNA target sequence for Ifngr (NM_010511.1,1487-1505).
gtctctcatggggtataga

SEQ ID NO: 528645 - DNA, 19 bp, Mus musculus
  siRNA target sequence for Ifngr (NM_010511.1,1489-1507).
ctctcatggggtatagact

SEQ ID NO: 528646 - DNA, 19 bp, Mus musculus
  siRNA target sequence for 9530081K03Rik (NM_030127.1,508-526).
ggcacagacgggcatactt

SEQ ID NO: 528647 - DNA, 19 bp, Mus musculus
  siRNA target sequence for 9530081K03Rik (NM_030127.1,509-527).
gcacagacgggcatactta

SEQ ID NO: 528648 - DNA, 19 bp, Mus musculus
  siRNA target sequence for 9530081K03Rik (NM_030127.1,510-528).
cacagacgggcatacttat

SEQ ID NO: 528649 - DNA, 19 bp, Mus musculus
  siRNA target sequence for 9530081K03Rik (NM_030127.1,638-656).
ccagtccgcggtacaagtt

SEQ ID NO: 528650 - DNA, 19 bp, Mus musculus
  siRNA target sequence for 9530081K03Rik (NM_030127.1,641-659).
gtccgcggtacaagttcaa

SEQ ID NO: 528651 - DNA, 19 bp, Mus musculus
  siRNA target sequence for 9530081K03Rik (NM_030127.1,643-661).
ccgcggtacaagttcaact

SEQ ID NO: 528652 - DNA, 19 bp, Mus musculus
  siRNA target sequence for 9530081K03Rik (NM_030127.1,644-662).
cgcggtacaagttcaactt

SEQ ID NO: 528653 - DNA, 19 bp, Mus musculus
  siRNA target sequence for 9530081K03Rik (NM_030127.1,915-933).
ggacattgccacgattgta

SEQ ID NO: 528654 - DNA, 19 bp, Mus musculus
  siRNA target sequence for 9530081K03Rik (NM_030127.1,916-934).
gacattgccacgattgtaa

SEQ ID NO: 528655 - DNA, 19 bp, Mus musculus
  siRNA target sequence for 9530081K03Rik (NM_030127.1,1122-1140).
gaccgatgccatcatcaat

SEQ ID NO: 528656 - DNA, 19 bp, Mus musculus
  siRNA target sequence for 9530081K03Rik (NM_030127.1,1124-1142).
ccgatgccatcatcaatta

SEQ ID NO: 528657 - DNA, 19 bp, Mus musculus
  siRNA target sequence for 9530081K03Rik (NM_030127.1,1322-1340).
ggaccatcacgccaagttt

SEQ ID NO: 528658 - DNA, 19 bp, Mus musculus
  siRNA target sequence for 9530081K03Rik (NM_030127.1,1378-1396).
gcggtcagcagtggaatat

SEQ ID NO: 528659 - DNA, 19 bp, Mus musculus
  siRNA target sequence for 9530081K03Rik (NM_030127.1,1379-1397).
cggtcagcagtggaatata

SEQ ID NO: 528660 - DNA, 19 bp, Mus musculus
  siRNA target sequence for 9530081K03Rik (NM_030127.1,1380-1398).
ggtcagcagtggaatatat

SEQ ID NO: 528661 - DNA, 19 bp, Mus musculus
  siRNA target sequence for 9530081K03Rik (NM_030127.1,1385-1403).
gcagtggaatatatgttca

SEQ ID NO: 528662 - DNA, 19 bp, Mus musculus
  siRNA target sequence for 9530081K03Rik (NM_030127.1,1386-1404).
cagtggaatatatgttcaa

SEQ ID NO: 528663 - DNA, 19 bp, Mus musculus
  siRNA target sequence for 9530081K03Rik (NM_030127.1,1451-1469).
gcgacatcatcgtcaaagt

SEQ ID NO: 528664 - DNA, 19 bp, Mus musculus
  siRNA target sequence for 9530081K03Rik (NM_030127.1,1455-1473).
catcatcgtcaaagtcaat

SEQ ID NO: 528665 - DNA, 19 bp, Mus musculus
  siRNA target sequence for 9530081K03Rik (NM_030127.1,1548-1566).
gcggcgaggcaatgatgat

SEQ ID NO: 528666 - DNA, 19 bp, Mus musculus
  siRNA target sequence for 9530081K03Rik (NM_030127.1,1550-1568).
ggcgaggcaatgatgatct

SEQ ID NO: 528667 - DNA, 19 bp, Mus musculus
  siRNA target sequence for Ctgf (NM_010217.1,762-780).
ccgactggaagacacattt

SEQ ID NO: 528668 - DNA, 19 bp, Mus musculus
  siRNA target sequence for Ctgf (NM_010217.1,877-895).
gttaccaatgacaatacct

SEQ ID NO: 528669 - DNA, 19 bp, Mus musculus
  siRNA target sequence for Ctgf (NM_010217.1,949-967).
gacctggaggaaaacatta

SEQ ID NO: 528670 - DNA, 19 bp, Mus musculus
  siRNA target sequence for Ctgf (NM_010217.1,981-999).
gtgcatccggacacctaaa

SEQ ID NO: 528671 - DNA, 19 bp, Mus musculus
  siRNA target sequence for Ctgf (NM_010217.1,983-1001).
gcatccggacacctaaaat

SEQ ID NO: 528672 - DNA, 19 bp, Mus musculus
  siRNA target sequence for Ctgf (NM_010217.1,1002-1020).
cgccaagcctgtcaagttt

SEQ ID NO: 528673 - DNA, 19 bp, Mus musculus
  siRNA target sequence for Ctgf (NM_010217.1,1004-1022).
ccaagcctgtcaagtttga

SEQ ID NO: 528674 - DNA, 19 bp, Mus musculus
  siRNA target sequence for Ctgf (NM_010217.1,1115-1133).
ctctgccagtggagttcaa

SEQ ID NO: 528675 - DNA, 19 bp, Mus musculus
  siRNA target sequence for Ctgf (NM_010217.1,1136-1154).
gccccgatggcgagatcat

SEQ ID NO: 528676 - DNA, 19 bp, Mus musculus
  siRNA target sequence for Ctgf (NM_010217.1,1139-1157).
ccgatggcgagatcatgaa

SEQ ID NO: 528677 - DNA, 19 bp, Mus musculus
  siRNA target sequence for Ctgf (NM_010217.1,1140-1158).
cgatggcgagatcatgaaa

SEQ ID NO: 528678 - DNA, 19 bp, Mus musculus
  siRNA target sequence for Ctgf (NM_010217.1,1141-1159).
gatggcgagatcatgaaaa

SEQ ID NO: 528679 - DNA, 19 bp, Mus musculus
  siRNA target sequence for Ctgf (NM_010217.1,1146-1164).
cgagatcatgaaaaagaat

SEQ ID NO: 528680 - DNA, 19 bp, Mus musculus
  siRNA target sequence for Ctgf (NM_010217.1,1181-1199).
cctgtgcctgccattacaa

SEQ ID NO: 528681 - DNA, 19 bp, Mus musculus
  siRNA target sequence for Ctgf (NM_010217.1,1202-1220).
gtcctggggacaatgacat

SEQ ID NO: 528682 - DNA, 19 bp, Mus musculus
  siRNA target sequence for Cyr61 (NM_010516.1,347-365).
gtaaggtctgcgctaaaca

SEQ ID NO: 528683 - DNA, 19 bp, Mus musculus
  siRNA target sequence for Cyr61 (NM_010516.1,372-390).
cgaggactgcagcaaaact

SEQ ID NO: 528684 - DNA, 19 bp, Mus musculus
  siRNA target sequence for Cyr61 (NM_010516.1,407-425).
ccaaggggttggaatgcaa

SEQ ID NO: 528685 - DNA, 19 bp, Mus musculus
  siRNA target sequence for Cyr61 (NM_010516.1,408-426).
caaggggttggaatgcaat

SEQ ID NO: 528686 - DNA, 19 bp, Mus musculus
  siRNA target sequence for Cyr61 (NM_010516.1,479-497).
gcagaccctgtgaatataa

SEQ ID NO: 528687 - DNA, 19 bp, Mus musculus
  siRNA target sequence for Cyr61 (NM_010516.1,524-542).
gcttccagcccaactgtaa

SEQ ID NO: 528688 - DNA, 19 bp, Mus musculus
  siRNA target sequence for Cyr61 (NM_010516.1,736-754).
gcctcggaggtggagttaa

SEQ ID NO: 528689 - DNA, 19 bp, Mus musculus
  siRNA target sequence for Cyr61 (NM_010516.1,745-763).
gtggagttaacgagaaaca

SEQ ID NO: 528690 - DNA, 19 bp, Mus musculus
  siRNA target sequence for Cyr61 (NM_010516.1,747-765).
ggagttaacgagaaacaat

SEQ ID NO: 528691 - DNA, 19 bp, Mus musculus
  siRNA target sequence for Cyr61 (NM_010516.1,755-773).
cgagaaacaatgagttaat

SEQ ID NO: 528692 - DNA, 19 bp, Mus musculus
  siRNA target sequence for Cyr61 (NM_010516.1,766-784).
gagttaatcgcaattggaa

SEQ ID NO: 528693 - DNA, 19 bp, Mus musculus
  siRNA target sequence for Cyr61 (NM_010516.1,819-837).
caccgaaccgcgagttctt

SEQ ID NO: 528694 - DNA, 19 bp, Mus musculus
  siRNA target sequence for Cyr61 (NM_010516.1,821-839).
ccgaaccgcgagttctttt

SEQ ID NO: 528695 - DNA, 19 bp, Mus musculus
  siRNA target sequence for Cyr61 (NM_010516.1,850-868).
cacgcccatggccagaaat

SEQ ID NO: 528696 - DNA, 19 bp, Mus musculus
  siRNA target sequence for Cyr61 (NM_010516.1,854-872).
cccatggccagaaatgcat

SEQ ID NO: 528697 - DNA, 19 bp, Mus musculus
  siRNA target sequence for Cyr61 (NM_010516.1,1009-1027).
gtgtacagcagcctaaaaa

SEQ ID NO: 528698 - DNA, 19 bp, Mus musculus
  siRNA target sequence for Cyr61 (NM_010516.1,1059-1077).
cccagaaccagtcagattt

SEQ ID NO: 528699 - DNA, 19 bp, Mus musculus
  siRNA target sequence for Cyr61 (NM_010516.1,1060-1078).
ccagaaccagtcagattta

SEQ ID NO: 528700 - DNA, 19 bp, Mus musculus
  siRNA target sequence for Cyr61 (NM_010516.1,1194-1212).
cgaagatggagagatgttt

SEQ ID NO: 528701 - DNA, 19 bp, Mus musculus
  siRNA target sequence for Cyr61 (NM_010516.1,1198-1216).
gatggagagatgttttcca

SEQ ID NO: 528702 - DNA, 19 bp, Mus musculus
  siRNA target sequence for Cyr61 (NM_010516.1,1230-1248).
gatccagtcctgcaaatgt

SEQ ID NO: 528703 - DNA, 19 bp, Mus musculus
  siRNA target sequence for Cyr61 (NM_010516.1,1285-1303).
cgactgtacagcctattca

SEQ ID NO: 528704 - DNA, 19 bp, Mus musculus
  siRNA target sequence for Cyr61 (NM_010516.1,1286-1304).
gactgtacagcctattcaa

SEQ ID NO: 528705 - DNA, 19 bp, Mus musculus
  siRNA target sequence for Esm1 (NM_023612.3,238-256).
ggcctggagcgccaaatat

SEQ ID NO: 528706 - DNA, 19 bp, Mus musculus
  siRNA target sequence for Esm1 (NM_023612.3,260-278).
gtggattgcccggaacatt

SEQ ID NO: 528707 - DNA, 19 bp, Mus musculus
  siRNA target sequence for Esm1 (NM_023612.3,271-289).
ggaacattgtgacaaaact

SEQ ID NO: 528708 - DNA, 19 bp, Mus musculus
  siRNA target sequence for Esm1 (NM_023612.3,423-441).
ggctgaagtgtcactttta

SEQ ID NO: 528709 - DNA, 19 bp, Mus musculus
  siRNA target sequence for Esm1 (NM_023612.3,497-515).
ggcaccttcgggatggaat

SEQ ID NO: 528710 - DNA, 19 bp, Mus musculus
  siRNA target sequence for Esm1 (NM_023612.3,502-520).
cttcgggatggaatgcaaa

SEQ ID NO: 528711 - DNA, 19 bp, Mus musculus
  siRNA target sequence for Esm1 (NM_023612.3,534-552).
gccagtcgggcatatgtga

SEQ ID NO: 528712 - DNA, 19 bp, Mus musculus
  siRNA target sequence for Esm1 (NM_023612.3,592-610).
gtatgcagcagccaaatct

SEQ ID NO: 528713 - DNA, 19 bp, Mus musculus
  siRNA target sequence for Esm1 (NM_023612.3,702-720).
ctcggccctccgtgatgaa

SEQ ID NO: 528714 - DNA, 19 bp, Mus musculus
  siRNA target sequence for Esm1 (NM_023612.3,704-722).
cggccctccgtgatgaaat

SEQ ID NO: 528715 - DNA, 19 bp, Mus musculus
  siRNA target sequence for Esm1 (NM_023612.3,707-725).
ccctccgtgatgaaatggt

SEQ ID NO: 528716 - DNA, 19 bp, Mus musculus
  siRNA target sequence for Esm1 (NM_023612.3,708-726).
cctccgtgatgaaatggtt

SEQ ID NO: 528717 - DNA, 19 bp, Mus musculus
  siRNA target sequence for Esm1 (NM_023612.3,715-733).
gatgaaatggttaaatcca

SEQ ID NO: 528718 - DNA, 19 bp, Mus musculus
  siRNA target sequence for Igfbp1 (NM_008341.2,206-224).
gcccgagttcctaactgtt

SEQ ID NO: 528719 - DNA, 19 bp, Mus musculus
  siRNA target sequence for Igfbp1 (NM_008341.2,209-227).
cgagttcctaactgttgtt

SEQ ID NO: 528720 - DNA, 19 bp, Mus musculus
  siRNA target sequence for Igfbp1 (NM_008341.2,210-228).
gagttcctaactgttgttt

SEQ ID NO: 528721 - DNA, 19 bp, Mus musculus
  siRNA target sequence for Igfbp1 (NM_008341.2,212-230).
gttcctaactgttgtttct

SEQ ID NO: 528722 - DNA, 19 bp, Mus musculus
  siRNA target sequence for Igfbp1 (NM_008341.2,598-616).
ccgcggatgagctttctga

SEQ ID NO: 528723 - DNA, 19 bp, Mus musculus
  siRNA target sequence for Igfbp1 (NM_008341.2,702-720).
gccatcagcacctatagca

SEQ ID NO: 528724 - DNA, 19 bp, Mus musculus
  siRNA target sequence for Igfbp1 (NM_008341.2,737-755).
gatcgccgacctcaagaaa

SEQ ID NO: 528725 - DNA, 19 bp, Mus musculus
  siRNA target sequence for Igfbp1 (NM_008341.2,770-788).
ccaacgagaactctataaa

SEQ ID NO: 528726 - DNA, 19 bp, Mus musculus
  siRNA target sequence for Igfbp1 (NM_008341.2,849-867).
ctgccaaactgcaacaaga

SEQ ID NO: 528727 - DNA, 19 bp, Mus musculus
  siRNA target sequence for Igfbp1 (NM_008341.2,994-1012).
gccaccagtattttaatgt

SEQ ID NO: 528728 - DNA, 19 bp, Mus musculus
  siRNA target sequence for Igfbp1 (NM_008341.2,995-1013).
ccaccagtattttaatgta

SEQ ID NO: 528729 - DNA, 19 bp, Mus musculus
  siRNA target sequence for Igfbp2 (NM_008342.2,604-622).
ccgggagaaggtcaatgaa

SEQ ID NO: 528730 - DNA, 19 bp, Mus musculus
  siRNA target sequence for Igfbp2 (NM_008342.2,822-840).
gccggtacaaccttaagca

SEQ ID NO: 528731 - DNA, 19 bp, Mus musculus
  siRNA target sequence for Igfbp2 (NM_008342.2,939-957).
ccgagtgccatctcttcta

SEQ ID NO: 528732 - DNA, 19 bp, Mus musculus
  siRNA target sequence for Igfbp3 (NM_008343.1,478-496).
cctgctccaggaaacatca

SEQ ID NO: 528733 - DNA, 19 bp, Mus musculus
  siRNA target sequence for Igfbp3 (NM_008343.1,632-650).
gccagcgctacaaagttga

SEQ ID NO: 528734 - DNA, 19 bp, Mus musculus
  siRNA target sequence for Igfbp3 (NM_008343.1,636-654).
gcgctacaaagttgactat

SEQ ID NO: 528735 - DNA, 19 bp, Mus musculus
  siRNA target sequence for Igfbp3 (NM_008343.1,638-656).
gctacaaagttgactatga

SEQ ID NO: 528736 - DNA, 19 bp, Mus musculus
  siRNA target sequence for Igfbp3 (NM_008343.1,695-713).
ctaagcgggagacagaata

SEQ ID NO: 528737 - DNA, 19 bp, Mus musculus
  siRNA target sequence for Igfbp3 (NM_008343.1,735-753).
ggaggacacactgaatcat

SEQ ID NO: 528738 - DNA, 19 bp, Mus musculus
  siRNA target sequence for Igfbp3 (NM_008343.1,805-823).
gacaagaaggggttctata

SEQ ID NO: 528739 - DNA, 19 bp, Mus musculus
  siRNA target sequence for Igfbp3 (NM_008343.1,919-937).
gggaaagacgacgtacatt

SEQ ID NO: 528740 - DNA, 19 bp, Mus musculus
  siRNA target sequence for Igfbp4 (NM_010517.2,626-644).
cctgcagtgcccatgatca

SEQ ID NO: 528741 - DNA, 19 bp, Mus musculus
  siRNA target sequence for Igfbp4 (NM_010517.2,647-665).
ggtgcctgcagaagcatat

SEQ ID NO: 528742 - DNA, 19 bp, Mus musculus
  siRNA target sequence for Igfbp4 (NM_010517.2,657-675).
gaagcatatggccaaaatt

SEQ ID NO: 528743 - DNA, 19 bp, Mus musculus
  siRNA target sequence for Igfbp4 (NM_010517.2,677-695).
gagatcggagcaagatgaa

SEQ ID NO: 528744 - DNA, 19 bp, Mus musculus
  siRNA target sequence for Igfbp4 (NM_010517.2,679-697).
gatcggagcaagatgaaga

SEQ ID NO: 528745 - DNA, 19 bp, Mus musculus
  siRNA target sequence for Igfbp4 (NM_010517.2,802-820).
cacgaagacctcttcatca

SEQ ID NO: 528746 - DNA, 19 bp, Mus musculus
  siRNA target sequence for Igfbp4 (NM_010517.2,819-837).
catccccattccaaactgt

SEQ ID NO: 528747 - DNA, 19 bp, Mus musculus
  siRNA target sequence for Igfbp5 (NM_010518.1,1036-1054).
ggggtttgcctcaacgaaa

SEQ ID NO: 528748 - DNA, 19 bp, Mus musculus
  siRNA target sequence for Igfbp5 (NM_010518.1,1058-1076).
gctacggcgagcaaaccaa

SEQ ID NO: 528749 - DNA, 19 bp, Mus musculus
  siRNA target sequence for Igfbp5 (NM_010518.1,1062-1080).
cggcgagcaaaccaagata

SEQ ID NO: 528750 - DNA, 19 bp, Mus musculus
  siRNA target sequence for Igfbp5 (NM_010518.1,1063-1081).
ggcgagcaaaccaagataa

SEQ ID NO: 528751 - DNA, 19 bp, Mus musculus
  siRNA target sequence for Igfbp5 (NM_010518.1,1397-1415).
gtgaccgcaaaggattcta

SEQ ID NO: 528752 - DNA, 19 bp, Mus musculus
  siRNA target sequence for Igfbp5 (NM_010518.1,1399-1417).
gaccgcaaaggattctaca

SEQ ID NO: 528753 - DNA, 19 bp, Mus musculus
  siRNA target sequence for Igfbp5 (NM_010518.1,1402-1420).
cgcaaaggattctacaaga

SEQ ID NO: 528754 - DNA, 19 bp, Mus musculus
  siRNA target sequence for Igfbp5 (NM_010518.1,1536-1554).
cttcgacagcagtaacgtt

SEQ ID NO: 528755 - DNA, 19 bp, Mus musculus
  siRNA target sequence for Igfbp7 (NM_008048.1,500-518).
cgagcaaggtccttccata

SEQ ID NO: 528756 - DNA, 19 bp, Mus musculus
  siRNA target sequence for Igfbp7 (NM_008048.1,552-570).
ggtgccaaggtgttcttga

SEQ ID NO: 528757 - DNA, 19 bp, Mus musculus
  siRNA target sequence for Igfbp7 (NM_008048.1,603-621).
ctcatctggaacaaggtaa

SEQ ID NO: 528758 - DNA, 19 bp, Mus musculus
  siRNA target sequence for Igfbp7 (NM_008048.1,695-713).
gggtggtccagaaaagcat

SEQ ID NO: 528759 - DNA, 19 bp, Mus musculus
  siRNA target sequence for Igfbp7 (NM_008048.1,700-718).
gtccagaaaagcatgaagt

SEQ ID NO: 528760 - DNA, 19 bp, Mus musculus
  siRNA target sequence for Igfbp7 (NM_008048.1,702-720).
ccagaaaagcatgaagtaa

SEQ ID NO: 528761 - DNA, 19 bp, Mus musculus
  siRNA target sequence for Igfbp7 (NM_008048.1,731-749).
gctggtatctcctctaagt

SEQ ID NO: 528762 - DNA, 19 bp, Mus musculus
  siRNA target sequence for Igfbp7 (NM_008048.1,732-750).
ctggtatctcctctaagta

SEQ ID NO: 528763 - DNA, 19 bp, Mus musculus
  siRNA target sequence for Igfbp7 (NM_008048.1,861-879).
ggtgaaggtgctcagttat

SEQ ID NO: 528764 - DNA, 19 bp, Mus musculus
  siRNA target sequence for Igfbpl1 (NM_018741.1,472-490).
catgccccctcgagatatt

SEQ ID NO: 528765 - DNA, 19 bp, Mus musculus
  siRNA target sequence for Igfbpl1 (NM_018741.1,477-495).
cccctcgagatattcacaa

SEQ ID NO: 528766 - DNA, 19 bp, Mus musculus
  siRNA target sequence for Igfbpl1 (NM_018741.1,478-496).
ccctcgagatattcacaat

SEQ ID NO: 528767 - DNA, 19 bp, Mus musculus
  siRNA target sequence for Igfbpl1 (NM_018741.1,480-498).
ctcgagatattcacaatgt

SEQ ID NO: 528768 - DNA, 19 bp, Mus musculus
  siRNA target sequence for Igfbpl1 (NM_018741.1,482-500).
cgagatattcacaatgtca

SEQ ID NO: 528769 - DNA, 19 bp, Mus musculus
  siRNA target sequence for Igfbpl1 (NM_018741.1,497-515).
gtcactgggactcaagtat

SEQ ID NO: 528770 - DNA, 19 bp, Mus musculus
  siRNA target sequence for Igfbpl1 (NM_018741.1,610-628).
gcccggagaccatgtcaat

SEQ ID NO: 528771 - DNA, 19 bp, Mus musculus
  siRNA target sequence for Igfbpl1 (NM_018741.1,613-631).
cggagaccatgtcaatata

SEQ ID NO: 528772 - DNA, 19 bp, Mus musculus
  siRNA target sequence for Igfbpl1 (NM_018741.1,776-794).
gtcctcgatctgaacagat

SEQ ID NO: 528773 - DNA, 19 bp, Mus musculus
  siRNA target sequence for Igfbpl1 (NM_018741.1,779-797).
ctcgatctgaacagataca

SEQ ID NO: 528774 - DNA, 19 bp, Mus musculus
  siRNA target sequence for Nov (NM_010930.3,92-110).
cttccatctcttaagtcaa

SEQ ID NO: 528775 - DNA, 19 bp, Mus musculus
  siRNA target sequence for Nov (NM_010930.3,377-395).
ccgcaacggagagaagttt

SEQ ID NO: 528776 - DNA, 19 bp, Mus musculus
  siRNA target sequence for Nov (NM_010930.3,379-397).
gcaacggagagaagtttga

SEQ ID NO: 528777 - DNA, 19 bp, Mus musculus
  siRNA target sequence for Nov (NM_010930.3,399-417).
ccgaactgtcagtacttct

SEQ ID NO: 528778 - DNA, 19 bp, Mus musculus
  siRNA target sequence for Nov (NM_010930.3,519-537).
ggggagtgctgcgaaaagt

SEQ ID NO: 528779 - DNA, 19 bp, Mus musculus
  siRNA target sequence for Nov (NM_010930.3,613-631).
ccaccgtaggagttgaagt

SEQ ID NO: 528780 - DNA, 19 bp, Mus musculus
  siRNA target sequence for Nov (NM_010930.3,732-750).
cgccagtgtgagatggtaa

SEQ ID NO: 528781 - DNA, 19 bp, Mus musculus
  siRNA target sequence for Nov (NM_010930.3,734-752).
ccagtgtgagatggtaaaa

SEQ ID NO: 528782 - DNA, 19 bp, Mus musculus
  siRNA target sequence for Nov (NM_010930.3,767-785).
catcgttcggccttgtgaa

SEQ ID NO: 528783 - DNA, 19 bp, Mus musculus
  siRNA target sequence for Nov (NM_010930.3,770-788).
cgttcggccttgtgaacaa

SEQ ID NO: 528784 - DNA, 19 bp, Mus musculus
  siRNA target sequence for Nov (NM_010930.3,786-804).
caagagcccgaggaagtaa

SEQ ID NO: 528785 - DNA, 19 bp, Mus musculus
  siRNA target sequence for Nov (NM_010930.3,801-819).
gtaacagacaagaaaggta

SEQ ID NO: 528786 - DNA, 19 bp, Mus musculus
  siRNA target sequence for Nov (NM_010930.3,824-842).
gtgtctccgcaccaagaaa

SEQ ID NO: 528787 - DNA, 19 bp, Mus musculus
  siRNA target sequence for Nov (NM_010930.3,858-876).
cacctacagttcgagaatt

SEQ ID NO: 528788 - DNA, 19 bp, Mus musculus
  siRNA target sequence for Nov (NM_010930.3,861-879).
ctacagttcgagaattgca

SEQ ID NO: 528789 - DNA, 19 bp, Mus musculus
  siRNA target sequence for Nov (NM_010930.3,880-898).
ctagcttgtacacctataa

SEQ ID NO: 528790 - DNA, 19 bp, Mus musculus
  siRNA target sequence for Nov (NM_010930.3,1005-1023).
ccagtcatggtcattggaa

SEQ ID NO: 528791 - DNA, 19 bp, Mus musculus
  siRNA target sequence for Nov (NM_010930.3,1039-1057).
ccaactgccctcagaacaa

SEQ ID NO: 528792 - DNA, 19 bp, Mus musculus
  siRNA target sequence for Nov (NM_010930.3,1074-1092).
gatctggagctgaagacaa

SEQ ID NO: 528793 - DNA, 19 bp, Mus musculus
  siRNA target sequence for Prss11 (NM_019564.1,59-77).
gtaccacgctcctgtcttt

SEQ ID NO: 528794 - DNA, 19 bp, Mus musculus
  siRNA target sequence for Prss11 (NM_019564.1,520-538).
caggaagatcccaacagtt

SEQ ID NO: 528795 - DNA, 19 bp, Mus musculus
  siRNA target sequence for Prss11 (NM_019564.1,530-548).
ccaacagtttgcgtcataa

SEQ ID NO: 528796 - DNA, 19 bp, Mus musculus
  siRNA target sequence for Prss11 (NM_019564.1,540-558).
gcgtcataagtacaacttt

SEQ ID NO: 528797 - DNA, 19 bp, Mus musculus
  siRNA target sequence for Prss11 (NM_019564.1,541-559).
cgtcataagtacaacttta

SEQ ID NO: 528798 - DNA, 19 bp, Mus musculus
  siRNA target sequence for Prss11 (NM_019564.1,655-673).
gggtcaggattcatcgtat

SEQ ID NO: 528799 - DNA, 19 bp, Mus musculus
  siRNA target sequence for Prss11 (NM_019564.1,674-692).
cggaggatggactgattgt

SEQ ID NO: 528800 - DNA, 19 bp, Mus musculus
  siRNA target sequence for Prss11 (NM_019564.1,741-759).
gaagaatggagctacctat

SEQ ID NO: 528801 - DNA, 19 bp, Mus musculus
  siRNA target sequence for Prss11 (NM_019564.1,790-808).
gcggacattgcgcttatca

SEQ ID NO: 528802 - DNA, 19 bp, Mus musculus
  siRNA target sequence for Prss11 (NM_019564.1,791-809).
cggacattgcgcttatcaa

SEQ ID NO: 528803 - DNA, 19 bp, Mus musculus
  siRNA target sequence for Prss11 (NM_019564.1,793-811).
gacattgcgcttatcaaga

SEQ ID NO: 528804 - DNA, 19 bp, Mus musculus
  siRNA target sequence for Prss11 (NM_019564.1,795-813).
cattgcgcttatcaagatt

SEQ ID NO: 528805 - DNA, 19 bp, Mus musculus
  siRNA target sequence for Prss11 (NM_019564.1,978-996).
ctccgatatggactacatt

SEQ ID NO: 528806 - DNA, 19 bp, Mus musculus
  siRNA target sequence for Prss11 (NM_019564.1,980-998).
ccgatatggactacattca

SEQ ID NO: 528807 - DNA, 19 bp, Mus musculus
  siRNA target sequence for Prss11 (NM_019564.1,1005-1023).
cgctatcatcaattatgga

SEQ ID NO: 528808 - DNA, 19 bp, Mus musculus
  siRNA target sequence for Prss11 (NM_019564.1,1028-1046).
ccggaggcccgttagtaaa

SEQ ID NO: 528809 - DNA, 19 bp, Mus musculus
  siRNA target sequence for Prss11 (NM_019564.1,1031-1049).
gaggcccgttagtaaacct

SEQ ID NO: 528810 - DNA, 19 bp, Mus musculus
  siRNA target sequence for Prss11 (NM_019564.1,1055-1073).
gcgaggtgattgggattaa

SEQ ID NO: 528811 - DNA, 19 bp, Mus musculus
  siRNA target sequence for Prss11 (NM_019564.1,1105-1123).
gcaattccatccgataaga

SEQ ID NO: 528812 - DNA, 19 bp, Mus musculus
  siRNA target sequence for Prss11 (NM_019564.1,1106-1124).
caattccatccgataagat

SEQ ID NO: 528813 - DNA, 19 bp, Mus musculus
  siRNA target sequence for Prss11 (NM_019564.1,1111-1129).
ccatccgataagataaaaa

SEQ ID NO: 528814 - DNA, 19 bp, Mus musculus
  siRNA target sequence for Prss11 (NM_019564.1,1112-1130).
catccgataagataaaaaa

SEQ ID NO: 528815 - DNA, 19 bp, Mus musculus
  siRNA target sequence for Prss11 (NM_019564.1,1272-1290).
ctctggggcatatatcatt

SEQ ID NO: 528816 - DNA, 19 bp, Mus musculus
  siRNA target sequence for Prss11 (NM_019564.1,1274-1292).
ctggggcatatatcattga

SEQ ID NO: 528817 - DNA, 19 bp, Mus musculus
  siRNA target sequence for Prss11 (NM_019564.1,1320-1338).
cggagggctcaaggaaaat

SEQ ID NO: 528818 - DNA, 19 bp, Mus musculus
  siRNA target sequence for Prss11 (NM_019564.1,1386-1404).
cgtcagcgatgtcatcaaa

SEQ ID NO: 528819 - DNA, 19 bp, Mus musculus
  siRNA target sequence for Prss11 (NM_019564.1,1387-1405).
gtcagcgatgtcatcaaaa

SEQ ID NO: 528820 - DNA, 19 bp, Mus musculus
  siRNA target sequence for Prss11 (NM_019564.1,1433-1451).
gcaggggcaatgaagacat

SEQ ID NO: 528821 - DNA, 19 bp, Mus musculus
  siRNA target sequence for Prss11 (NM_019564.1,1436-1454).
ggggcaatgaagacattgt

SEQ ID NO: 528822 - DNA, 19 bp, Mus musculus
  siRNA target sequence for Prss11 (NM_019564.1,1439-1457).
gcaatgaagacattgtgat

SEQ ID NO: 528823 - DNA, 19 bp, Mus musculus
  siRNA target sequence for Wisp1 (NM_018865.1,363-381).
ctgggcgtcagcctaatca

SEQ ID NO: 528824 - DNA, 19 bp, Mus musculus
  siRNA target sequence for Wisp1 (NM_018865.1,365-383).
gggcgtcagcctaatcaca

SEQ ID NO: 528825 - DNA, 19 bp, Mus musculus
  siRNA target sequence for Wisp1 (NM_018865.1,465-483).
ggcctctactgcgattaca

SEQ ID NO: 528826 - DNA, 19 bp, Mus musculus
  siRNA target sequence for Wisp1 (NM_018865.1,494-512).
cccgaggtacgcaatagga

SEQ ID NO: 528827 - DNA, 19 bp, Mus musculus
  siRNA target sequence for Wisp1 (NM_018865.1,599-617).
caactgtacctgcattgat

SEQ ID NO: 528828 - DNA, 19 bp, Mus musculus
  siRNA target sequence for Wisp1 (NM_018865.1,935-953).
caacctgcggccatgtgat

SEQ ID NO: 528829 - DNA, 19 bp, Mus musculus
  siRNA target sequence for Wisp2 (NM_016873.1,693-711).
cacgccccaggagaataca

SEQ ID NO: 528830 - DNA, 19 bp, Mus musculus
  siRNA target sequence for Fibp (NM_021438.1,5-23).
ccagcgaactagacatttt

SEQ ID NO: 528831 - DNA, 19 bp, Mus musculus
  siRNA target sequence for Fibp (NM_021438.1,8-26).
gcgaactagacattttcgt

SEQ ID NO: 528832 - DNA, 19 bp, Mus musculus
  siRNA target sequence for Fibp (NM_021438.1,29-47).
ggaacacgacccttataga

SEQ ID NO: 528833 - DNA, 19 bp, Mus musculus
  siRNA target sequence for Fibp (NM_021438.1,33-51).
cacgacccttatagatgaa

SEQ ID NO: 528834 - DNA, 19 bp, Mus musculus
  siRNA target sequence for Fibp (NM_021438.1,35-53).
cgacccttatagatgaaga

SEQ ID NO: 528835 - DNA, 19 bp, Mus musculus
  siRNA target sequence for Fibp (NM_021438.1,66-84).
ctggctggatggttactca

SEQ ID NO: 528836 - DNA, 19 bp, Mus musculus
  siRNA target sequence for Fibp (NM_021438.1,107-125).
gagtacgctccggaatctt

SEQ ID NO: 528837 - DNA, 19 bp, Mus musculus
  siRNA target sequence for Fibp (NM_021438.1,175-193).
cactaccgcacctttcaca

SEQ ID NO: 528838 - DNA, 19 bp, Mus musculus
  siRNA target sequence for Fibp (NM_021438.1,282-300).
gaggtactacacctttgat

SEQ ID NO: 528839 - DNA, 19 bp, Mus musculus
  siRNA target sequence for Fibp (NM_021438.1,336-354).
gtccaagggtaccaagaaa

SEQ ID NO: 528840 - DNA, 19 bp, Mus musculus
  siRNA target sequence for Fibp (NM_021438.1,372-390).
caccaaaacaggaattact

SEQ ID NO: 528841 - DNA, 19 bp, Mus musculus
  siRNA target sequence for Fibp (NM_021438.1,398-416).
gctgccggaggcagtttga

SEQ ID NO: 528842 - DNA, 19 bp, Mus musculus
  siRNA target sequence for Fibp (NM_021438.1,401-419).
gccggaggcagtttgacaa

SEQ ID NO: 528843 - DNA, 19 bp, Mus musculus
  siRNA target sequence for Fibp (NM_021438.1,1049-1067).
gccttctgcgcctctatca

SEQ ID NO: 528844 - DNA, 19 bp, Mus musculus
  siRNA target sequence for Fibp (NM_021438.1,1054-1072).
ctgcgcctctatcatgatt

SEQ ID NO: 528845 - DNA, 19 bp, Mus musculus
  siRNA target sequence for Efs (NM_010112.2,538-556).
ccgccgaggggatgttcta

SEQ ID NO: 528846 - DNA, 19 bp, Mus musculus
  siRNA target sequence for Efs (NM_010112.2,574-592).
gggtgctggtggacttgat

SEQ ID NO: 528847 - DNA, 19 bp, Mus musculus
  siRNA target sequence for Efs (NM_010112.2,749-767).
gagcaggaggtgtatgtaa

SEQ ID NO: 528848 - DNA, 19 bp, Mus musculus
  siRNA target sequence for Efs (NM_010112.2,1551-1569).
cagcaggccctcacaatga

SEQ ID NO: 528849 - DNA, 19 bp, Mus musculus
  siRNA target sequence for Efs (NM_010112.2,1553-1571).
gcaggccctcacaatgaat

SEQ ID NO: 528850 - DNA, 19 bp, Mus musculus
  siRNA target sequence for Efs (NM_010112.2,1582-1600).
cccaatggccgaggaatat

SEQ ID NO: 528851 - DNA, 19 bp, Mus musculus
  siRNA target sequence for Efs (NM_010112.2,1584-1602).
caatggccgaggaatatga

SEQ ID NO: 528852 - DNA, 19 bp, Mus musculus
  siRNA target sequence for Efs (NM_010112.2,1638-1656).
gttctagacccctggataa

SEQ ID NO: 528853 - DNA, 19 bp, Mus musculus
  siRNA target sequence for Efs (NM_010112.2,2099-2117).
caggccctacgctttacca

SEQ ID NO: 528854 - DNA, 19 bp, Mus musculus
  siRNA target sequence for Enah (NM_010135.1,188-206).
gatgatgccaataagaagt

SEQ ID NO: 528855 - DNA, 19 bp, Mus musculus
  siRNA target sequence for Enah (NM_010135.1,230-248).
gggttcagcagagtacata

SEQ ID NO: 528856 - DNA, 19 bp, Mus musculus
  siRNA target sequence for Enah (NM_010135.1,232-250).
gttcagcagagtacatata

SEQ ID NO: 528857 - DNA, 19 bp, Mus musculus
  siRNA target sequence for Enah (NM_010135.1,237-255).
gcagagtacatatatatca

SEQ ID NO: 528858 - DNA, 19 bp, Mus musculus
  siRNA target sequence for Enah (NM_010135.1,254-272).
caccatacaggcaacaaca

SEQ ID NO: 528859 - DNA, 19 bp, Mus musculus
  siRNA target sequence for Enah (NM_010135.1,305-323).
catcaggttgtgataaact

SEQ ID NO: 528860 - DNA, 19 bp, Mus musculus
  siRNA target sequence for Enah (NM_010135.1,394-412).
ggtgtatggtctcaacttt

SEQ ID NO: 528861 - DNA, 19 bp, Mus musculus
  siRNA target sequence for Enah (NM_010135.1,455-473).
catgccttagaagtgttaa

SEQ ID NO: 528862 - DNA, 19 bp, Mus musculus
  siRNA target sequence for Enah (NM_010135.1,519-537).
gcactaatttgcgatgtat

SEQ ID NO: 528863 - DNA, 19 bp, Mus musculus
  siRNA target sequence for Enah (NM_010135.1,520-538).
cactaatttgcgatgtatt

SEQ ID NO: 528864 - DNA, 19 bp, Mus musculus
  siRNA target sequence for Enah (NM_010135.1,548-566).
ccaacattgcctagacaaa

SEQ ID NO: 528865 - DNA, 19 bp, Mus musculus
  siRNA target sequence for Enah (NM_010135.1,549-567).
caacattgcctagacaaaa

SEQ ID NO: 528866 - DNA, 19 bp, Mus musculus
  siRNA target sequence for Enah (NM_010135.1,729-747).
gggagcgcctggaacaaga

SEQ ID NO: 528867 - DNA, 19 bp, Mus musculus
  siRNA target sequence for Enah (NM_010135.1,884-902).
gagcgagagcgcagaatgt

SEQ ID NO: 528868 - DNA, 19 bp, Mus musculus
  siRNA target sequence for Enah (NM_010135.1,978-996).
cggcacctcctccatcata

SEQ ID NO: 528869 - DNA, 19 bp, Mus musculus
  siRNA target sequence for Enah (NM_010135.1,984-1002).
ctcctccatcatatgctaa

SEQ ID NO: 528870 - DNA, 19 bp, Mus musculus
  siRNA target sequence for Enah (NM_010135.1,987-1005).
ctccatcatatgctaaagt

SEQ ID NO: 528871 - DNA, 19 bp, Mus musculus
  siRNA target sequence for Enah (NM_010135.1,990-1008).
catcatatgctaaagtcat

SEQ ID NO: 528872 - DNA, 19 bp, Mus musculus
  siRNA target sequence for Enah (NM_010135.1,1100-1118).
gcagcgacacgttttgcaa

SEQ ID NO: 528873 - DNA, 19 bp, Mus musculus
  siRNA target sequence for Enah (NM_010135.1,1105-1123).
gacacgttttgcaacatct

SEQ ID NO: 528874 - DNA, 19 bp, Mus musculus
  siRNA target sequence for Enah (NM_010135.1,1172-1190).
cgtcctctcaacaaaaact

SEQ ID NO: 528875 - DNA, 19 bp, Mus musculus
  siRNA target sequence for Enah (NM_010135.1,1283-1301).
ccatctcctccaataatga

SEQ ID NO: 528876 - DNA, 19 bp, Mus musculus
  siRNA target sequence for Enah (NM_010135.1,1403-1421).
gggtcgctagactctgtaa

SEQ ID NO: 528877 - DNA, 19 bp, Mus musculus
  siRNA target sequence for Enah (NM_010135.1,1405-1423).
gtcgctagactctgtaaca

SEQ ID NO: 528878 - DNA, 19 bp, Mus musculus
  siRNA target sequence for Enah (NM_010135.1,1407-1425).
cgctagactctgtaacata

SEQ ID NO: 528879 - DNA, 19 bp, Mus musculus
  siRNA target sequence for Enah (NM_010135.1,1650-1668).
ctgcggagacccctctaaa

SEQ ID NO: 528880 - DNA, 19 bp, Mus musculus
  siRNA target sequence for Enah (NM_010135.1,1654-1672).
ggagacccctctaaatcct

SEQ ID NO: 528881 - DNA, 19 bp, Mus musculus
  siRNA target sequence for Enah (NM_010135.1,1974-1992).
gatccacgtcagaagacaa

SEQ ID NO: 528882 - DNA, 19 bp, Mus musculus
  siRNA target sequence for Enah (NM_010135.1,1985-2003).
gaagacaatcgccctttaa

SEQ ID NO: 528883 - DNA, 19 bp, Mus musculus
  siRNA target sequence for Enah (NM_010135.1,2025-2043).
cgggagcaaaacttaggaa

SEQ ID NO: 528884 - DNA, 19 bp, Mus musculus
  siRNA target sequence for Enah (NM_010135.1,2026-2044).
gggagcaaaacttaggaaa

SEQ ID NO: 528885 - DNA, 19 bp, Mus musculus
  siRNA target sequence for Enah (NM_010135.1,2071-2089).
cccaggtggagggaatact

SEQ ID NO: 528886 - DNA, 19 bp, Mus musculus
  siRNA target sequence for Enah (NM_010135.1,2154-2172).
ggggtagtggcttaatgga

SEQ ID NO: 528887 - DNA, 19 bp, Mus musculus
  siRNA target sequence for Enah (NM_010135.1,2155-2173).
gggtagtggcttaatggaa

SEQ ID NO: 528888 - DNA, 19 bp, Mus musculus
  siRNA target sequence for Enah (NM_010135.1,2218-2236).
gggatcaacaatagaaaca

SEQ ID NO: 528889 - DNA, 19 bp, Mus musculus
  siRNA target sequence for Enah (NM_010135.1,2279-2297).
gctaaggccccatcaacaa

SEQ ID NO: 528890 - DNA, 19 bp, Mus musculus
  siRNA target sequence for Enah (NM_010135.1,2419-2437).
gacagaaggccttgactat

SEQ ID NO: 528891 - DNA, 19 bp, Mus musculus
  siRNA target sequence for Enah (NM_010135.1,2423-2441).
gaaggccttgactatgaca

SEQ ID NO: 528892 - DNA, 19 bp, Mus musculus
  siRNA target sequence for Enah (NM_010135.1,2443-2461).
gctgaagcaggacatttta

SEQ ID NO: 528893 - DNA, 19 bp, Mus musculus
  siRNA target sequence for Hcls1 (NM_008225.1,73-91).
gtagtggggcatgatgtat

SEQ ID NO: 528894 - DNA, 19 bp, Mus musculus
  siRNA target sequence for Hcls1 (NM_008225.1,253-271).
cacgacatcctcaagaaga

SEQ ID NO: 528895 - DNA, 19 bp, Mus musculus
  siRNA target sequence for Hcls1 (NM_008225.1,353-371).
ccgtgggccacgagtatgt

SEQ ID NO: 528896 - DNA, 19 bp, Mus musculus
  siRNA target sequence for Hcls1 (NM_008225.1,461-479).
cagcggtgggctttgacta

SEQ ID NO: 528897 - DNA, 19 bp, Mus musculus
  siRNA target sequence for Hcls1 (NM_008225.1,536-554).
gccgctacggggtagagaa

SEQ ID NO: 528898 - DNA, 19 bp, Mus musculus
  siRNA target sequence for Hcls1 (NM_008225.1,575-593).
ccctgggatacgactacaa

SEQ ID NO: 528899 - DNA, 19 bp, Mus musculus
  siRNA target sequence for Hcls1 (NM_008225.1,612-630).
cgagtctcagagagattat

SEQ ID NO: 528900 - DNA, 19 bp, Mus musculus
  siRNA target sequence for Hcls1 (NM_008225.1,636-654).
gggctttggtggccaatat

SEQ ID NO: 528901 - DNA, 19 bp, Mus musculus
  siRNA target sequence for Hcls1 (NM_008225.1,710-728).
ccccaaccacggcgtataa

SEQ ID NO: 528902 - DNA, 19 bp, Mus musculus
  siRNA target sequence for Hcls1 (NM_008225.1,713-731).
caaccacggcgtataagaa

SEQ ID NO: 528903 - DNA, 19 bp, Mus musculus
  siRNA target sequence for Hcls1 (NM_008225.1,862-880).
cgaaaggctgtggtaaaga

SEQ ID NO: 528904 - DNA, 19 bp, Mus musculus
  siRNA target sequence for Hcls1 (NM_008225.1,863-881).
gaaaggctgtggtaaagat

SEQ ID NO: 528905 - DNA, 19 bp, Mus musculus
  siRNA target sequence for Hcls1 (NM_008225.1,1058-1076).
ctccattgcagaatcactt

SEQ ID NO: 528906 - DNA, 19 bp, Mus musculus
  siRNA target sequence for Hcls1 (NM_008225.1,1227-1245).
ggatgttggggagttagat

SEQ ID NO: 528907 - DNA, 19 bp, Mus musculus
  siRNA target sequence for Hcls1 (NM_008225.1,1257-1275).
ggatgcagagggagactat

SEQ ID NO: 528908 - DNA, 19 bp, Mus musculus
  siRNA target sequence for Hcls1 (NM_008225.1,1391-1409).
gaagcgatgagctttcctt

SEQ ID NO: 528909 - DNA, 19 bp, Mus musculus
  siRNA target sequence for Sh2bp1 (NM_009431.1,172-190).
ctgacgaggtcattgaact

SEQ ID NO: 528910 - DNA, 19 bp, Mus musculus
  siRNA target sequence for Sh2bp1 (NM_009431.1,208-226).
cggagggagacgaagtcat

SEQ ID NO: 528911 - DNA, 19 bp, Mus musculus
  siRNA target sequence for Sh2bp1 (NM_009431.1,250-268).
cacaactgcacatatggat

SEQ ID NO: 528912 - DNA, 19 bp, Mus musculus
  siRNA target sequence for Sh2bp1 (NM_009431.1,270-288).
gccttggcgctggaatact

SEQ ID NO: 528913 - DNA, 19 bp, Mus musculus
  siRNA target sequence for Sh2bp1 (NM_009431.1,271-289).
ccttggcgctggaatacta

SEQ ID NO: 528914 - DNA, 19 bp, Mus musculus
  siRNA target sequence for Sh2bp1 (NM_009431.1,334-352).
cacggatagatggcaattt

SEQ ID NO: 528915 - DNA, 19 bp, Mus musculus
  siRNA target sequence for Sh2bp1 (NM_009431.1,369-387).
gagaaagaccagatgactt

SEQ ID NO: 528916 - DNA, 19 bp, Mus musculus
  siRNA target sequence for Sh2bp1 (NM_009431.1,401-419).
ggcagcctactatgtacaa

SEQ ID NO: 528917 - DNA, 19 bp, Mus musculus
  siRNA target sequence for Sh2bp1 (NM_009431.1,403-421).
cagcctactatgtacaaca

SEQ ID NO: 528918 - DNA, 19 bp, Mus musculus
  siRNA target sequence for Sh2bp1 (NM_009431.1,466-484).
cgcaggcaactttgttata

SEQ ID NO: 528919 - DNA, 19 bp, Mus musculus
  siRNA target sequence for Sh2bp1 (NM_009431.1,467-485).
gcaggcaactttgttatat

SEQ ID NO: 528920 - DNA, 19 bp, Mus musculus
  siRNA target sequence for Sh2bp1 (NM_009431.1,468-486).
caggcaactttgttatata

SEQ ID NO: 528921 - DNA, 19 bp, Mus musculus
  siRNA target sequence for Sh2bp1 (NM_009431.1,472-490).
caactttgttatatacaat

SEQ ID NO: 528922 - DNA, 19 bp, Mus musculus
  siRNA target sequence for Sh2bp1 (NM_009431.1,572-590).
ccaagctgacgcacagttt

SEQ ID NO: 528923 - DNA, 19 bp, Mus musculus
  siRNA target sequence for Sh2bp1 (NM_009431.1,608-626).
gtctccaaacaatattcca

SEQ ID NO: 528924 - DNA, 19 bp, Mus musculus
  siRNA target sequence for Sh2bp1 (NM_009431.1,637-655).
ggaaagcttgtatttcatt

SEQ ID NO: 528925 - DNA, 19 bp, Mus musculus
  siRNA target sequence for Sh2bp1 (NM_009431.1,642-660).
gcttgtatttcattcaaca

SEQ ID NO: 528926 - DNA, 19 bp, Mus musculus
  siRNA target sequence for Sh2bp1 (NM_009431.1,643-661).
cttgtatttcattcaacaa

SEQ ID NO: 528927 - DNA, 19 bp, Mus musculus
  siRNA target sequence for Sh2bp1 (NM_009431.1,652-670).
cattcaacaagaaggatta

SEQ ID NO: 528928 - DNA, 19 bp, Mus musculus
  siRNA target sequence for Sh2bp1 (NM_009431.1,683-701).
ggcttactataaaaaagca

SEQ ID NO: 528929 - DNA, 19 bp, Mus musculus
  siRNA target sequence for Sh2bp1 (NM_009431.1,684-702).
gcttactataaaaaagcat

SEQ ID NO: 528930 - DNA, 19 bp, Mus musculus
  siRNA target sequence for Sh2bp1 (NM_009431.1,721-739).
gtccagctgaagttcgttt

SEQ ID NO: 528931 - DNA, 19 bp, Mus musculus
  siRNA target sequence for Sh2bp1 (NM_009431.1,726-744).
gctgaagttcgtttaggaa

SEQ ID NO: 528932 - DNA, 19 bp, Mus musculus
  siRNA target sequence for Sh2bp1 (NM_009431.1,727-745).
ctgaagttcgtttaggaat

SEQ ID NO: 528933 - DNA, 19 bp, Mus musculus
  siRNA target sequence for Sh2bp1 (NM_009431.1,852-870).
gttctagaactcaacaata

SEQ ID NO: 528934 - DNA, 19 bp, Mus musculus
  siRNA target sequence for Sh2bp1 (NM_009431.1,875-893).
ggctgattccatcaaaaat

SEQ ID NO: 528935 - DNA, 19 bp, Mus musculus
  siRNA target sequence for Sh2bp1 (NM_009431.1,910-928).
ccagagcctatactattga

SEQ ID NO: 528936 - DNA, 19 bp, Mus musculus
  siRNA target sequence for Sh2bp1 (NM_009431.1,911-929).
cagagcctatactattgat

SEQ ID NO: 528937 - DNA, 19 bp, Mus musculus
  siRNA target sequence for Sh2bp1 (NM_009431.1,934-952).
gcaacccgatggtactgaa

SEQ ID NO: 528938 - DNA, 19 bp, Mus musculus
  siRNA target sequence for Sh2bp1 (NM_009431.1,939-957).
ccgatggtactgaaccatt

SEQ ID NO: 528939 - DNA, 19 bp, Mus musculus
  siRNA target sequence for Sh2bp1 (NM_009431.1,940-958).
cgatggtactgaaccattt

SEQ ID NO: 528940 - DNA, 19 bp, Mus musculus
  siRNA target sequence for Sh2bp1 (NM_009431.1,954-972).
catttggcaaaccactttt

SEQ ID NO: 528941 - DNA, 19 bp, Mus musculus
  siRNA target sequence for Sh2bp1 (NM_009431.1,977-995).
caagaaggattatagtaaa

SEQ ID NO: 528942 - DNA, 19 bp, Mus musculus
  siRNA target sequence for Sh2bp1 (NM_009431.1,1031-1049).
cgaggtggaggctatgcaa

SEQ ID NO: 528943 - DNA, 19 bp, Mus musculus
  siRNA target sequence for Sh2bp1 (NM_009431.1,1072-1090).
ctcggtccttccatgttca

SEQ ID NO: 528944 - DNA, 19 bp, Mus musculus
  siRNA target sequence for Sh2bp1 (NM_009431.1,1104-1122).
caagcctttcagtactact

SEQ ID NO: 528945 - DNA, 19 bp, Mus musculus
  siRNA target sequence for Sh2bp1 (NM_009431.1,1109-1127).
ctttcagtactactatcaa

SEQ ID NO: 528946 - DNA, 19 bp, Mus musculus
  siRNA target sequence for Sh2bp1 (NM_009431.1,1121-1139).
ctatcaagccacacagttt

SEQ ID NO: 528947 - DNA, 19 bp, Mus musculus
  siRNA target sequence for Sh2bp1 (NM_009431.1,1155-1173).
gtcctaccattttttggtt

SEQ ID NO: 528948 - DNA, 19 bp, Mus musculus
  siRNA target sequence for Sh2bp1 (NM_009431.1,1171-1189).
gtttgggacaaatgtatat

SEQ ID NO: 528949 - DNA, 19 bp, Mus musculus
  siRNA target sequence for Sh2bp1 (NM_009431.1,1248-1266).
ccgaacaattatgaaacta

SEQ ID NO: 528950 - DNA, 19 bp, Mus musculus
  siRNA target sequence for Sh2bp1 (NM_009431.1,1286-1304).
ctatgctgcttcagaagat

SEQ ID NO: 528951 - DNA, 19 bp, Mus musculus
  siRNA target sequence for Sh2bp1 (NM_009431.1,1323-1341).
gccaagggccatttgaaga

SEQ ID NO: 528952 - DNA, 19 bp, Mus musculus
  siRNA target sequence for Sh2bp1 (NM_009431.1,1340-1358).
gaaggtcacagaacagtat

SEQ ID NO: 528953 - DNA, 19 bp, Mus musculus
  siRNA target sequence for Sh2bp1 (NM_009431.1,1418-1436).
gggtgccctttcagcttat

SEQ ID NO: 528954 - DNA, 19 bp, Mus musculus
  siRNA target sequence for Sh2bp1 (NM_009431.1,1479-1497).
gtccctcccgagattttga

SEQ ID NO: 528955 - DNA, 19 bp, Mus musculus
  siRNA target sequence for Sh2bp1 (NM_009431.1,1482-1500).
cctcccgagattttgaata

SEQ ID NO: 528956 - DNA, 19 bp, Mus musculus
  siRNA target sequence for Sh2bp1 (NM_009431.1,1486-1504).
ccgagattttgaataatgt

SEQ ID NO: 528957 - DNA, 19 bp, Mus musculus
  siRNA target sequence for Sh2bp1 (NM_009431.1,1487-1505).
cgagattttgaataatgtt

SEQ ID NO: 528958 - DNA, 19 bp, Mus musculus
  siRNA target sequence for Sh2bp1 (NM_009431.1,1588-1606).
ccgagcatgatgaacacta

SEQ ID NO: 528959 - DNA, 19 bp, Mus musculus
  siRNA target sequence for Sh2bp1 (NM_009431.1,1779-1797).
gaagcttcagactggttta

SEQ ID NO: 528960 - DNA, 19 bp, Mus musculus
  siRNA target sequence for Sh2bp1 (NM_009431.1,1828-1846).
cggatgcctggtctttgat

SEQ ID NO: 528961 - DNA, 19 bp, Mus musculus
  siRNA target sequence for Sh2bp1 (NM_009431.1,1833-1851).
gcctggtctttgattggta

SEQ ID NO: 528962 - DNA, 19 bp, Mus musculus
  siRNA target sequence for Sh2bp1 (NM_009431.1,1892-1910).
gaagtttgagaggatatta

SEQ ID NO: 528963 - DNA, 19 bp, Mus musculus
  siRNA target sequence for Sh2bp1 (NM_009431.1,1926-1944).
cagagtgacacctactcta

SEQ ID NO: 528964 - DNA, 19 bp, Mus musculus
  siRNA target sequence for Sh2bp1 (NM_009431.1,1987-2005).
caacccgagaccgagaaaa

SEQ ID NO: 528965 - DNA, 19 bp, Mus musculus
  siRNA target sequence for Sh2bp1 (NM_009431.1,1990-2008).
cccgagaccgagaaaagga

SEQ ID NO: 528966 - DNA, 19 bp, Mus musculus
  siRNA target sequence for Sh2bp1 (NM_009431.1,2030-2048).
cctggccatctacaaacaa

SEQ ID NO: 528967 - DNA, 19 bp, Mus musculus
  siRNA target sequence for Sh2bp1 (NM_009431.1,2100-2118).
gtcttggcccacaaaggat

SEQ ID NO: 528968 - DNA, 19 bp, Mus musculus
  siRNA target sequence for Sh2bp1 (NM_009431.1,2124-2142).
cgtgaagctcgtgatgttt

SEQ ID NO: 528969 - DNA, 19 bp, Mus musculus
  siRNA target sequence for Sh2bp1 (NM_009431.1,2208-2226).
gtggagcagaagcagtata

SEQ ID NO: 528970 - DNA, 19 bp, Mus musculus
  siRNA target sequence for Sh2bp1 (NM_009431.1,2228-2246).
cagcgccgttcagatgtat

SEQ ID NO: 528971 - DNA, 19 bp, Mus musculus
  siRNA target sequence for Sh2bp1 (NM_009431.1,2230-2248).
gcgccgttcagatgtatga

SEQ ID NO: 528972 - DNA, 19 bp, Mus musculus
  siRNA target sequence for Sh2bp1 (NM_009431.1,2233-2251).
ccgttcagatgtatgagaa

SEQ ID NO: 528973 - DNA, 19 bp, Mus musculus
  siRNA target sequence for Sh2bp1 (NM_009431.1,2377-2395).
ccagtgacacagttctgat

SEQ ID NO: 528974 - DNA, 19 bp, Mus musculus
  siRNA target sequence for Sh2bp1 (NM_009431.1,2412-2430).
gtcttgcaaagattagcta

SEQ ID NO: 528975 - DNA, 19 bp, Mus musculus
  siRNA target sequence for Sh2bp1 (NM_009431.1,2428-2446).
ctacctctgtcctgaaaga

SEQ ID NO: 528976 - DNA, 19 bp, Mus musculus
  siRNA target sequence for Sh2bp1 (NM_009431.1,2462-2480).
gaaggaagtccttaatgct

SEQ ID NO: 528977 - DNA, 19 bp, Mus musculus
  siRNA target sequence for Sh2bp1 (NM_009431.1,2496-2514).
ctcgcacacaggtacttca

SEQ ID NO: 528978 - DNA, 19 bp, Mus musculus
  siRNA target sequence for Sh2bp1 (NM_009431.1,2529-2547).
gttggagataaaatgagat

SEQ ID NO: 528979 - DNA, 19 bp, Mus musculus
  siRNA target sequence for Sh2bp1 (NM_009431.1,2535-2553).
gataaaatgagatttgatt

SEQ ID NO: 528980 - DNA, 19 bp, Mus musculus
  siRNA target sequence for Sh2bp1 (NM_009431.1,2788-2806).
ccaaaaatatccttatgtt

SEQ ID NO: 528981 - DNA, 19 bp, Mus musculus
  siRNA target sequence for Sh2bp1 (NM_009431.1,2874-2892).
ggaggcgagtttgatgaat

SEQ ID NO: 528982 - DNA, 19 bp, Mus musculus
  siRNA target sequence for Sh2bp1 (NM_009431.1,2875-2893).
gaggcgagtttgatgaatt

SEQ ID NO: 528983 - DNA, 19 bp, Mus musculus
  siRNA target sequence for Sh2bp1 (NM_009431.1,2919-2937).
ctccctgtatccaaaaaga

SEQ ID NO: 528984 - DNA, 19 bp, Mus musculus
  siRNA target sequence for Sh2bp1 (NM_009431.1,3129-3147).
cgcctgcctccttcaatga

SEQ ID NO: 528985 - DNA, 19 bp, Mus musculus
  siRNA target sequence for Sh2bp1 (NM_009431.1,3164-3182).
caaagccattatatcatca

SEQ ID NO: 528986 - DNA, 19 bp, Mus musculus
  siRNA target sequence for Sh2bp1 (NM_009431.1,3170-3188).
cattatatcatcaagtgat

SEQ ID NO: 528987 - DNA, 19 bp, Mus musculus
  siRNA target sequence for Sh2bp1 (NM_009431.1,3426-3444).
gagcagtcggacaatgagt

SEQ ID NO: 528988 - DNA, 19 bp, Mus musculus
  siRNA target sequence for Sh2bp1 (NM_009431.1,3588-3606).
gaaccagagggctcaaaca

SEQ ID NO: 528989 - DNA, 19 bp, Mus musculus
  siRNA target sequence for Shcbp1 (NM_011369.1,34-52).
gtggagttctggaacctat

SEQ ID NO: 528990 - DNA, 19 bp, Mus musculus
  siRNA target sequence for Shcbp1 (NM_011369.1,39-57).
gttctggaacctatagcta

SEQ ID NO: 528991 - DNA, 19 bp, Mus musculus
  siRNA target sequence for Shcbp1 (NM_011369.1,188-206).
cataccagaaggaaaaact

SEQ ID NO: 528992 - DNA, 19 bp, Mus musculus
  siRNA target sequence for Shcbp1 (NM_011369.1,208-226).
cttttccacgaattatcca

SEQ ID NO: 528993 - DNA, 19 bp, Mus musculus
  siRNA target sequence for Shcbp1 (NM_011369.1,213-231).
ccacgaattatccaaacaa

SEQ ID NO: 528994 - DNA, 19 bp, Mus musculus
  siRNA target sequence for Shcbp1 (NM_011369.1,253-271).
gattcagagcctatcaaga

SEQ ID NO: 528995 - DNA, 19 bp, Mus musculus
  siRNA target sequence for Shcbp1 (NM_011369.1,259-277).
gagcctatcaagattacat

SEQ ID NO: 528996 - DNA, 19 bp, Mus musculus
  siRNA target sequence for Shcbp1 (NM_011369.1,261-279).
gcctatcaagattacattt

SEQ ID NO: 528997 - DNA, 19 bp, Mus musculus
  siRNA target sequence for Shcbp1 (NM_011369.1,289-307).
gtaaggcctctgaggtaaa

SEQ ID NO: 528998 - DNA, 19 bp, Mus musculus
  siRNA target sequence for Shcbp1 (NM_011369.1,359-377).
ggcagtctggcacactaat

SEQ ID NO: 528999 - DNA, 19 bp, Mus musculus
  siRNA target sequence for Shcbp1 (NM_011369.1,361-379).
cagtctggcacactaatgt

SEQ ID NO: 529000 - DNA, 19 bp, Mus musculus
  siRNA target sequence for Shcbp1 (NM_011369.1,363-381).
gtctggcacactaatgtgt

SEQ ID NO: 529001 - DNA, 19 bp, Mus musculus
  siRNA target sequence for Shcbp1 (NM_011369.1,542-560).
gttgtgggtggtatcagat

SEQ ID NO: 529002 - DNA, 19 bp, Mus musculus
  siRNA target sequence for Shcbp1 (NM_011369.1,724-742).
gagttccctcgggacttat

SEQ ID NO: 529003 - DNA, 19 bp, Mus musculus
  siRNA target sequence for Shcbp1 (NM_011369.1,730-748).
cctcgggacttattgttga

SEQ ID NO: 529004 - DNA, 19 bp, Mus musculus
  siRNA target sequence for Shcbp1 (NM_011369.1,744-762).
gttgactaccacaatctgt

SEQ ID NO: 529005 - DNA, 19 bp, Mus musculus
  siRNA target sequence for Shcbp1 (NM_011369.1,755-773).
caatctgttgtctcaatgt

SEQ ID NO: 529006 - DNA, 19 bp, Mus musculus
  siRNA target sequence for Shcbp1 (NM_011369.1,779-797).
gagttacaggaaattttta

SEQ ID NO: 529007 - DNA, 19 bp, Mus musculus
  siRNA target sequence for Shcbp1 (NM_011369.1,809-827).
cagtttgtccaattgtaat

SEQ ID NO: 529008 - DNA, 19 bp, Mus musculus
  siRNA target sequence for Shcbp1 (NM_011369.1,854-872).
catggtggaagggttaaat

SEQ ID NO: 529009 - DNA, 19 bp, Mus musculus
  siRNA target sequence for Shcbp1 (NM_011369.1,858-876).
gtggaagggttaaatttgt

SEQ ID NO: 529010 - DNA, 19 bp, Mus musculus
  siRNA target sequence for Shcbp1 (NM_011369.1,860-878).
ggaagggttaaatttgtat

SEQ ID NO: 529011 - DNA, 19 bp, Mus musculus
  siRNA target sequence for Shcbp1 (NM_011369.1,905-923).
gctaaagctcattgagaat

SEQ ID NO: 529012 - DNA, 19 bp, Mus musculus
  siRNA target sequence for Shcbp1 (NM_011369.1,914-932).
cattgagaatcctttgtta

SEQ ID NO: 529013 - DNA, 19 bp, Mus musculus
  siRNA target sequence for Shcbp1 (NM_011369.1,973-991).
gaaagggtactcgtcaaaa

SEQ ID NO: 529014 - DNA, 19 bp, Mus musculus
  siRNA target sequence for Shcbp1 (NM_011369.1,1035-1053).
ggtctacttcggtctctat

SEQ ID NO: 529015 - DNA, 19 bp, Mus musculus
  siRNA target sequence for Shcbp1 (NM_011369.1,1036-1054).
gtctacttcggtctctatt

SEQ ID NO: 529016 - DNA, 19 bp, Mus musculus
  siRNA target sequence for Shcbp1 (NM_011369.1,1038-1056).
ctacttcggtctctattca

SEQ ID NO: 529017 - DNA, 19 bp, Mus musculus
  siRNA target sequence for Shcbp1 (NM_011369.1,1073-1091).
ggagtcttgcaaagaagaa

SEQ ID NO: 529018 - DNA, 19 bp, Mus musculus
  siRNA target sequence for Shcbp1 (NM_011369.1,1143-1161).
gatggtgacactgtcatta

SEQ ID NO: 529019 - DNA, 19 bp, Mus musculus
  siRNA target sequence for Shcbp1 (NM_011369.1,1168-1186).
ctggccattatgtagttca

SEQ ID NO: 529020 - DNA, 19 bp, Mus musculus
  siRNA target sequence for Shcbp1 (NM_011369.1,1210-1228).
ccattgagttggaaggata

SEQ ID NO: 529021 - DNA, 19 bp, Mus musculus
  siRNA target sequence for Shcbp1 (NM_011369.1,1211-1229).
cattgagttggaaggatat

SEQ ID NO: 529022 - DNA, 19 bp, Mus musculus
  siRNA target sequence for Shcbp1 (NM_011369.1,1231-1249).
gcctaccagatgacattgt

SEQ ID NO: 529023 - DNA, 19 bp, Mus musculus
  siRNA target sequence for Shcbp1 (NM_011369.1,1237-1255).
cagatgacattgtcataga

SEQ ID NO: 529024 - DNA, 19 bp, Mus musculus
  siRNA target sequence for Shcbp1 (NM_011369.1,1264-1282).
gcaaaggagatacttttgt

SEQ ID NO: 529025 - DNA, 19 bp, Mus musculus
  siRNA target sequence for Shcbp1 (NM_011369.1,1283-1301).
ggattgcacgggtatggat

SEQ ID NO: 529026 - DNA, 19 bp, Mus musculus
  siRNA target sequence for Shcbp1 (NM_011369.1,1288-1306).
gcacgggtatggatgttaa

SEQ ID NO: 529027 - DNA, 19 bp, Mus musculus
  siRNA target sequence for Shcbp1 (NM_011369.1,1289-1307).
cacgggtatggatgttaaa

SEQ ID NO: 529028 - DNA, 19 bp, Mus musculus
  siRNA target sequence for Shcbp1 (NM_011369.1,1291-1309).
cgggtatggatgttaaaat

SEQ ID NO: 529029 - DNA, 19 bp, Mus musculus
  siRNA target sequence for Shcbp1 (NM_011369.1,1513-1531).
ccctgactgacaatggaat

SEQ ID NO: 529030 - DNA, 19 bp, Mus musculus
  siRNA target sequence for Shcbp1 (NM_011369.1,1562-1580).
ggacttccttgatgaacat

SEQ ID NO: 529031 - DNA, 19 bp, Mus musculus
  siRNA target sequence for Shcbp1 (NM_011369.1,1613-1631).
cgtcatacacaataatgaa

SEQ ID NO: 529032 - DNA, 19 bp, Mus musculus
  siRNA target sequence for Shcbp1 (NM_011369.1,1660-1678).
caattttctgtgatctaca

SEQ ID NO: 529033 - DNA, 19 bp, Mus musculus
  siRNA target sequence for Shcbp1 (NM_011369.1,1746-1764).
ggattagatctggaagaaa

SEQ ID NO: 529034 - DNA, 19 bp, Mus musculus
  siRNA target sequence for Shcbp1 (NM_011369.1,1747-1765).
gattagatctggaagaaat

SEQ ID NO: 529035 - DNA, 19 bp, Mus musculus
  siRNA target sequence for Shcbp1 (NM_011369.1,1804-1822).
cagctgactttaatgaaca

SEQ ID NO: 529036 - DNA, 19 bp, Mus musculus
  siRNA target sequence for Shcbp1 (NM_011369.1,1824-1842).
gctaagggaaactgtgaaa

SEQ ID NO: 529037 - DNA, 19 bp, Mus musculus
  siRNA target sequence for Shcbp1 (NM_011369.1,1825-1843).
ctaagggaaactgtgaaat

SEQ ID NO: 529038 - DNA, 19 bp, Mus musculus
  siRNA target sequence for Shcbp1 (NM_011369.1,1829-1847).
gggaaactgtgaaattata

SEQ ID NO: 529039 - DNA, 19 bp, Mus musculus
  siRNA target sequence for Shcbp1 (NM_011369.1,1851-1869).
gaactacttgctatttcca

SEQ ID NO: 529040 - DNA, 19 bp, Mus musculus
  siRNA target sequence for Shcbp1 (NM_011369.1,1889-1907).
gaaaagactgagtgaactt

SEQ ID NO: 529041 - DNA, 19 bp, Mus musculus
  siRNA target sequence for Shcbp1 (NM_011369.1,1898-1916).
gagtgaacttgggattaca

SEQ ID NO: 529042 - DNA, 19 bp, Mus musculus
  siRNA target sequence for Shcbp1 (NM_011369.1,1900-1918).
gtgaacttgggattacaca

SEQ ID NO: 529043 - DNA, 19 bp, Mus musculus
  siRNA target sequence for Shcbp1 (NM_011369.1,1915-1933).
cacaagctgatgacaacat

SEQ ID NO: 529044 - DNA, 19 bp, Mus musculus
  siRNA target sequence for Shcbp1 (NM_011369.1,1937-1955).
gtcacaggagatgtttatt

SEQ ID NO: 529045 - DNA, 19 bp, Mus musculus
  siRNA target sequence for Shcbp1 (NM_011369.1,1993-2011).
ggagttttggcacatttct

SEQ ID NO: 529046 - DNA, 19 bp, Mus musculus
  siRNA target sequence for Idb3 (NM_008321.1,265-283).
ctgcagcgtgtcatagact

SEQ ID NO: 529047 - DNA, 19 bp, Mus musculus
  siRNA target sequence for Krt1-14 (NM_016958.1,1053-1071).
gcaagagtgagatttctga

SEQ ID NO: 529048 - DNA, 19 bp, Mus musculus
  siRNA target sequence for Krt1-14 (NM_016958.1,1337-1355).
gaggacgcccacctttcat

SEQ ID NO: 529049 - DNA, 19 bp, Mus musculus
  siRNA target sequence for Krt1-14 (NM_016958.1,1339-1357).
ggacgcccacctttcatct

SEQ ID NO: 529050 - DNA, 19 bp, Mus musculus
  siRNA target sequence for Krt1-17 (NM_010663.1,82-100).
cctgggtggaggttcatct

SEQ ID NO: 529051 - DNA, 19 bp, Mus musculus
  siRNA target sequence for Krt1-17 (NM_010663.1,176-194).
gctcttgggagcaacagtt

SEQ ID NO: 529052 - DNA, 19 bp, Mus musculus
  siRNA target sequence for Krt1-17 (NM_010663.1,179-197).
cttgggagcaacagttatt

SEQ ID NO: 529053 - DNA, 19 bp, Mus musculus
  siRNA target sequence for Krt1-17 (NM_010663.1,182-200).
gggagcaacagttattcca

SEQ ID NO: 529054 - DNA, 19 bp, Mus musculus
  siRNA target sequence for Krt1-17 (NM_010663.1,415-433).
ctacagcgcttattaccat

SEQ ID NO: 529055 - DNA, 19 bp, Mus musculus
  siRNA target sequence for Krt1-17 (NM_010663.1,420-438).
gcgcttattaccataccat

SEQ ID NO: 529056 - DNA, 19 bp, Mus musculus
  siRNA target sequence for Krt1-17 (NM_010663.1,786-804).
cagagatgcgtgatcagta

SEQ ID NO: 529057 - DNA, 19 bp, Mus musculus
  siRNA target sequence for Krt1-17 (NM_010663.1,836-854).
gccgaagactggttcttca

SEQ ID NO: 529058 - DNA, 19 bp, Mus musculus
  siRNA target sequence for Krt1-17 (NM_010663.1,1277-1295).
gatggcaaggtcatctcat

SEQ ID NO: 529059 - DNA, 19 bp, Mus musculus
  siRNA target sequence for Ywhab (NM_018753.3,477-495).
ctgttggacaaatatctca

SEQ ID NO: 529060 - DNA, 19 bp, Mus musculus
  siRNA target sequence for Ywhab (NM_018753.3,479-497).
gttggacaaatatctcatt

SEQ ID NO: 529061 - DNA, 19 bp, Mus musculus
  siRNA target sequence for Ywhab (NM_018753.3,611-629).
ctcccagcaggcttaccaa

SEQ ID NO: 529062 - DNA, 19 bp, Mus musculus
  siRNA target sequence for Ywhab (NM_018753.3,681-699).
ctcggcctggcgctgaatt

SEQ ID NO: 529063 - DNA, 19 bp, Mus musculus
  siRNA target sequence for Ywhab (NM_018753.3,686-704).
cctggcgctgaatttctca

SEQ ID NO: 529064 - DNA, 19 bp, Mus musculus
  siRNA target sequence for Ywhab (NM_018753.3,707-725).
cttttactatgagattcta

SEQ ID NO: 529065 - DNA, 19 bp, Mus musculus
  siRNA target sequence for Ywhab (NM_018753.3,793-811).
ccctgaatgaagagtctta

SEQ ID NO: 529066 - DNA, 19 bp, Mus musculus
  siRNA target sequence for Ywhae (NM_009536.2,151-169).
gacgaaatggtggaatcaa

SEQ ID NO: 529067 - DNA, 19 bp, Mus musculus
  siRNA target sequence for Ywhae (NM_009536.2,205-223).
gttgaagaacgaaaccttt

SEQ ID NO: 529068 - DNA, 19 bp, Mus musculus
  siRNA target sequence for Ywhae (NM_009536.2,208-226).
gaagaacgaaaccttttat

SEQ ID NO: 529069 - DNA, 19 bp, Mus musculus
  siRNA target sequence for Ywhae (NM_009536.2,338-356).
gggagtaccggcaaatggt

SEQ ID NO: 529070 - DNA, 19 bp, Mus musculus
  siRNA target sequence for Ywhae (NM_009536.2,339-357).
ggagtaccggcaaatggtt

SEQ ID NO: 529071 - DNA, 19 bp, Mus musculus
  siRNA target sequence for Ywhae (NM_009536.2,364-382).
gagctcaagttaatctgtt

SEQ ID NO: 529072 - DNA, 19 bp, Mus musculus
  siRNA target sequence for Ywhae (NM_009536.2,431-449).
ctggcgagtccaaggtttt

SEQ ID NO: 529073 - DNA, 19 bp, Mus musculus
  siRNA target sequence for Ywhae (NM_009536.2,434-452).
gcgagtccaaggttttcta

SEQ ID NO: 529074 - DNA, 19 bp, Mus musculus
  siRNA target sequence for Ywhae (NM_009536.2,435-453).
cgagtccaaggttttctat

SEQ ID NO: 529075 - DNA, 19 bp, Mus musculus
  siRNA target sequence for Ywhae (NM_009536.2,531-549).
cagcctcgtggcttacaaa

SEQ ID NO: 529076 - DNA, 19 bp, Mus musculus
  siRNA target sequence for Ywhae (NM_009536.2,584-602).
caacgcaccccattcgttt

SEQ ID NO: 529077 - DNA, 19 bp, Mus musculus
  siRNA target sequence for Ywhae (NM_009536.2,588-606).
gcaccccattcgtttaggt

SEQ ID NO: 529078 - DNA, 19 bp, Mus musculus
  siRNA target sequence for Ywhae (NM_009536.2,613-631).
ctcaacttttccgtattct

SEQ ID NO: 529079 - DNA, 19 bp, Mus musculus
  siRNA target sequence for Ywhae (NM_009536.2,623-641).
ccgtattctactatgaaat

SEQ ID NO: 529080 - DNA, 19 bp, Mus musculus
  siRNA target sequence for Ywhae (NM_009536.2,624-642).
cgtattctactatgaaatt

SEQ ID NO: 529081 - DNA, 19 bp, Mus musculus
  siRNA target sequence for Ywhae (NM_009536.2,630-648).
ctactatgaaattcttaat

SEQ ID NO: 529082 - DNA, 19 bp, Mus musculus
  siRNA target sequence for Ywhag (NM_018871.2,635-653).
ggcctggcgctcaactact

SEQ ID NO: 529083 - DNA, 19 bp, Mus musculus
  siRNA target sequence for Ywhah (NM_011738.1,490-508).
gacaagttccttatcaaga

SEQ ID NO: 529084 - DNA, 19 bp, Mus musculus
  siRNA target sequence for Ywhaz (NM_011740.2,909-927).
gctgaacttgatacattaa

SEQ ID NO: 529085 - DNA, 19 bp, Mus musculus
  siRNA target sequence for Ywhaz (NM_011740.2,952-970).
cgctaataatgcagttact

SEQ ID NO: 529086 - DNA, 19 bp, Mus musculus
  siRNA target sequence for Ywhaz (NM_011740.2,954-972).
ctaataatgcagttactga

SEQ ID NO: 529087 - DNA, 19 bp, Mus musculus
  siRNA target sequence for 2310066P17Rik (NM_025876.1,231-249).
ccactggaccgacttttca

SEQ ID NO: 529088 - DNA, 19 bp, Mus musculus
  siRNA target sequence for 2310066P17Rik (NM_025876.1,237-255).
gaccgacttttcagcattt

SEQ ID NO: 529089 - DNA, 19 bp, Mus musculus
  siRNA target sequence for 2310066P17Rik (NM_025876.1,325-343).
ctcgggggatgaacttcta

SEQ ID NO: 529090 - DNA, 19 bp, Mus musculus
  siRNA target sequence for 2310066P17Rik (NM_025876.1,391-409).
cgtgaacgacacagagata

SEQ ID NO: 529091 - DNA, 19 bp, Mus musculus
  siRNA target sequence for 2310066P17Rik (NM_025876.1,410-428).
gcctggtccatcttacaga

SEQ ID NO: 529092 - DNA, 19 bp, Mus musculus
  siRNA target sequence for 2310066P17Rik (NM_025876.1,479-497).
cttgtcacgtgttctatca

SEQ ID NO: 529093 - DNA, 19 bp, Mus musculus
  siRNA target sequence for 2310066P17Rik (NM_025876.1,794-812).
gccacttctgcctttgtat

SEQ ID NO: 529094 - DNA, 19 bp, Mus musculus
  siRNA target sequence for 2310066P17Rik (NM_025876.1,894-912).
cctccattctcgatgaagt

SEQ ID NO: 529095 - DNA, 19 bp, Mus musculus
  siRNA target sequence for 2310066P17Rik (NM_025876.1,922-940).
gtccgagcagggcctaaaa

SEQ ID NO: 529096 - DNA, 19 bp, Mus musculus
  siRNA target sequence for 2310066P17Rik (NM_025876.1,987-1005).
cggaagtccagttcaataa

SEQ ID NO: 529097 - DNA, 19 bp, Mus musculus
  siRNA target sequence for 2310066P17Rik (NM_025876.1,988-1006).
ggaagtccagttcaataat

SEQ ID NO: 529098 - DNA, 19 bp, Mus musculus
  siRNA target sequence for 2310066P17Rik (NM_025876.1,1033-1051).
ctttaccaccaactataaa

SEQ ID NO: 529099 - DNA, 19 bp, Mus musculus
  siRNA target sequence for 2310066P17Rik (NM_025876.1,1042-1060).
caactataaacccaaacaa

SEQ ID NO: 529100 - DNA, 19 bp, Mus musculus
  siRNA target sequence for 2310066P17Rik (NM_025876.1,1062-1080).
gagggcttcgtttttctca

SEQ ID NO: 529101 - DNA, 19 bp, Mus musculus
  siRNA target sequence for 2310066P17Rik (NM_025876.1,1085-1103).
ctggatcaggtttcaagaa

SEQ ID NO: 529102 - DNA, 19 bp, Mus musculus
  siRNA target sequence for 2310066P17Rik (NM_025876.1,1098-1116).
caagaatcgatcctgaaat

SEQ ID NO: 529103 - DNA, 19 bp, Mus musculus
  siRNA target sequence for 2310066P17Rik (NM_025876.1,1178-1196).
cgtgagagacacaacatct

SEQ ID NO: 529104 - DNA, 19 bp, Mus musculus
  siRNA target sequence for 2310066P17Rik (NM_025876.1,1247-1265).
gccatgcggagaggatatt

SEQ ID NO: 529105 - DNA, 19 bp, Mus musculus
  siRNA target sequence for 2310066P17Rik (NM_025876.1,1249-1267).
catgcggagaggatattca

SEQ ID NO: 529106 - DNA, 19 bp, Mus musculus
  siRNA target sequence for 2310066P17Rik (NM_025876.1,1252-1270).
gcggagaggatattcaaga

SEQ ID NO: 529107 - DNA, 19 bp, Mus musculus
  siRNA target sequence for 2310066P17Rik (NM_025876.1,1383-1401).
cagtgtctttacttagaga

SEQ ID NO: 529108 - DNA, 19 bp, Mus musculus
  siRNA target sequence for 2310066P17Rik (NM_025876.1,1394-1412).
cttagagaagtgcagtata

SEQ ID NO: 529109 - DNA, 19 bp, Mus musculus
  siRNA target sequence for 2310066P17Rik (NM_025876.1,1435-1453).
cagcatgaggcaaaagaca

SEQ ID NO: 529110 - DNA, 19 bp, Mus musculus
  siRNA target sequence for 2310066P17Rik (NM_025876.1,1505-1523).
cgtttggaggaactcatta

SEQ ID NO: 529111 - DNA, 19 bp, Mus musculus
  siRNA target sequence for 2310066P17Rik (NM_025876.1,1592-1610).
gaagggttcagcaaacgtt

SEQ ID NO: 529112 - DNA, 19 bp, Mus musculus
  siRNA target sequence for 2310066P17Rik (NM_025876.1,1621-1639).
cctttgtggccggaatgat

SEQ ID NO: 529113 - DNA, 19 bp, Mus musculus
  siRNA target sequence for 2310066P17Rik (NM_025876.1,1626-1644).
gtggccggaatgatgcaaa

SEQ ID NO: 529114 - DNA, 19 bp, Mus musculus
  siRNA target sequence for 2310066P17Rik (NM_025876.1,1631-1649).
cggaatgatgcaaacctta

SEQ ID NO: 529115 - DNA, 19 bp, Mus musculus
  siRNA target sequence for 2310066P17Rik (NM_025876.1,1763-1781).
ctgaaaggacacattctct

SEQ ID NO: 529116 - DNA, 19 bp, Mus musculus
  siRNA target sequence for 2310066P17Rik (NM_025876.1,1780-1798).
ctgcaggaccactatgaaa

SEQ ID NO: 529117 - DNA, 19 bp, Mus musculus
  siRNA target sequence for 2310066P17Rik (NM_025876.1,1782-1800).
gcaggaccactatgaaaga

SEQ ID NO: 529118 - DNA, 19 bp, Mus musculus
  siRNA target sequence for 2310066P17Rik (NM_025876.1,1799-1817).
gactcattgacgtattgca

SEQ ID NO: 529119 - DNA, 19 bp, Mus musculus
  siRNA target sequence for Cdk5rap3 (NM_030248.1,270-288).
ggatcctacattcattact

SEQ ID NO: 529120 - DNA, 19 bp, Mus musculus
  siRNA target sequence for Cdk5rap3 (NM_030248.1,325-343).
ccgaggcgtccaccaaaaa

SEQ ID NO: 529121 - DNA, 19 bp, Mus musculus
  siRNA target sequence for Cdk5rap3 (NM_030248.1,326-344).
cgaggcgtccaccaaaaat

SEQ ID NO: 529122 - DNA, 19 bp, Mus musculus
  siRNA target sequence for Cdk5rap3 (NM_030248.1,327-345).
gaggcgtccaccaaaaata

SEQ ID NO: 529123 - DNA, 19 bp, Mus musculus
  siRNA target sequence for Cdk5rap3 (NM_030248.1,329-347).
ggcgtccaccaaaaatatt

SEQ ID NO: 529124 - DNA, 19 bp, Mus musculus
  siRNA target sequence for Cdk5rap3 (NM_030248.1,330-348).
gcgtccaccaaaaatattt

SEQ ID NO: 529125 - DNA, 19 bp, Mus musculus
  siRNA target sequence for Cdk5rap3 (NM_030248.1,359-377).
ctcttcacaacggatgaaa

SEQ ID NO: 529126 - DNA, 19 bp, Mus musculus
  siRNA target sequence for Cdk5rap3 (NM_030248.1,361-379).
cttcacaacggatgaaaga

SEQ ID NO: 529127 - DNA, 19 bp, Mus musculus
  siRNA target sequence for Cdk5rap3 (NM_030248.1,378-396).
gattggcaggagatcgtaa

SEQ ID NO: 529128 - DNA, 19 bp, Mus musculus
  siRNA target sequence for Cdk5rap3 (NM_030248.1,405-423).
gagaaggacaacacctatt

SEQ ID NO: 529129 - DNA, 19 bp, Mus musculus
  siRNA target sequence for Cdk5rap3 (NM_030248.1,407-425).
gaaggacaacacctattta

SEQ ID NO: 529130 - DNA, 19 bp, Mus musculus
  siRNA target sequence for Cdk5rap3 (NM_030248.1,450-468).
cggaatgtcagctatgaga

SEQ ID NO: 529131 - DNA, 19 bp, Mus musculus
  siRNA target sequence for Cdk5rap3 (NM_030248.1,451-469).
ggaatgtcagctatgagat

SEQ ID NO: 529132 - DNA, 19 bp, Mus musculus
  siRNA target sequence for Cdk5rap3 (NM_030248.1,558-576).
gagatgcgagagcaattct

SEQ ID NO: 529133 - DNA, 19 bp, Mus musculus
  siRNA target sequence for Cdk5rap3 (NM_030248.1,578-596).
ccactcctgcaaacagtat

SEQ ID NO: 529134 - DNA, 19 bp, Mus musculus
  siRNA target sequence for Cdk5rap3 (NM_030248.1,611-629).
caatgtccgaagagaactt

SEQ ID NO: 529135 - DNA, 19 bp, Mus musculus
  siRNA target sequence for Cdk5rap3 (NM_030248.1,790-808).
gaaactcgacggtgtatga

SEQ ID NO: 529136 - DNA, 19 bp, Mus musculus
  siRNA target sequence for Cdk5rap3 (NM_030248.1,887-905).
gatcgactggggtgacttt

SEQ ID NO: 529137 - DNA, 19 bp, Mus musculus
  siRNA target sequence for Cdk5rap3 (NM_030248.1,1122-1140).
cctgaaactcggaatcagt

SEQ ID NO: 529138 - DNA, 19 bp, Mus musculus
  siRNA target sequence for Cdk5rap3 (NM_030248.1,1129-1147).
ctcggaatcagttcattga

SEQ ID NO: 529139 - DNA, 19 bp, Mus musculus
  siRNA target sequence for Cdk5rap3 (NM_030248.1,1329-1347).
cggatgcagcacctgttta

SEQ ID NO: 529140 - DNA, 19 bp, Mus musculus
  siRNA target sequence for Cdk5rap3 (NM_030248.1,1330-1348).
ggatgcagcacctgtttat

SEQ ID NO: 529141 - DNA, 19 bp, Mus musculus
  siRNA target sequence for Cdk5rap3 (NM_030248.1,1334-1352).
gcagcacctgtttatgatt

SEQ ID NO: 529142 - DNA, 19 bp, Mus musculus
  siRNA target sequence for Cdk5rap3 (NM_030248.1,1546-1564).
ccgacatctccaagagata

SEQ ID NO: 529143 - DNA, 19 bp, Mus musculus
  siRNA target sequence for Gnb2-rs1 (NM_008143.2,136-154).
cttaagggccacaatggat

SEQ ID NO: 529144 - DNA, 19 bp, Mus musculus
  siRNA target sequence for Gnb2-rs1 (NM_008143.2,179-197).
cgcagttcccggacatgat

SEQ ID NO: 529145 - DNA, 19 bp, Mus musculus
  siRNA target sequence for Gnb2-rs1 (NM_008143.2,286-304).
ggtcactcccacttcgtta

SEQ ID NO: 529146 - DNA, 19 bp, Mus musculus
  siRNA target sequence for Gnb2-rs1 (NM_008143.2,297-315).
cttcgttagtgatgttgtt

SEQ ID NO: 529147 - DNA, 19 bp, Mus musculus
  siRNA target sequence for Gnb2-rs1 (NM_008143.2,392-410).
ccaccacaaggcgatttgt

SEQ ID NO: 529148 - DNA, 19 bp, Mus musculus
  siRNA target sequence for Gnb2-rs1 (NM_008143.2,451-469).
gacaaccggcagattgtct

SEQ ID NO: 529149 - DNA, 19 bp, Mus musculus
  siRNA target sequence for Gnb2-rs1 (NM_008143.2,476-494).
cccgagacaagaccataaa

SEQ ID NO: 529150 - DNA, 19 bp, Mus musculus
  siRNA target sequence for Gnb2-rs1 (NM_008143.2,481-499).
gacaagaccataaagttat

SEQ ID NO: 529151 - DNA, 19 bp, Mus musculus
  siRNA target sequence for Gnb2-rs1 (NM_008143.2,486-504).
gaccataaagttatggaat

SEQ ID NO: 529152 - DNA, 19 bp, Mus musculus
  siRNA target sequence for Gnb2-rs1 (NM_008143.2,508-526).
ctgggtgtctgcaagtaca

SEQ ID NO: 529153 - DNA, 19 bp, Mus musculus
  siRNA target sequence for Gnb2-rs1 (NM_008143.2,640-658).
ctggctaactgcaagctaa

SEQ ID NO: 529154 - DNA, 19 bp, Mus musculus
  siRNA target sequence for Gnb2-rs1 (NM_008143.2,777-795).
caagcacctctacacttta

SEQ ID NO: 529155 - DNA, 19 bp, Mus musculus
  siRNA target sequence for Gnb2-rs1 (NM_008143.2,780-798).
gcacctctacactttagat

SEQ ID NO: 529156 - DNA, 19 bp, Mus musculus
  siRNA target sequence for Gnb2-rs1 (NM_008143.2,796-814).
gatggtggggacatcatca

SEQ ID NO: 529157 - DNA, 19 bp, Mus musculus
  siRNA target sequence for Ptprr (NM_011217.1,417-435).
gtttttccagaaacaatga

SEQ ID NO: 529158 - DNA, 19 bp, Mus musculus
  siRNA target sequence for Ptprr (NM_011217.1,424-442).
cagaaacaatgatcacttt

SEQ ID NO: 529159 - DNA, 19 bp, Mus musculus
  siRNA target sequence for Ptprr (NM_011217.1,465-483).
gttggaagccggtgttcat

SEQ ID NO: 529160 - DNA, 19 bp, Mus musculus
  siRNA target sequence for Ptprr (NM_011217.1,469-487).
gaagccggtgttcatttat

SEQ ID NO: 529161 - DNA, 19 bp, Mus musculus
  siRNA target sequence for Ptprr (NM_011217.1,523-541).
cgcacaagaggcatacaaa

SEQ ID NO: 529162 - DNA, 19 bp, Mus musculus
  siRNA target sequence for Ptprr (NM_011217.1,525-543).
cacaagaggcatacaaaca

SEQ ID NO: 529163 - DNA, 19 bp, Mus musculus
  siRNA target sequence for Ptprr (NM_011217.1,527-545).
caagaggcatacaaacata

SEQ ID NO: 529164 - DNA, 19 bp, Mus musculus
  siRNA target sequence for Ptprr (NM_011217.1,557-575).
ccttccgaagttcaaataa

SEQ ID NO: 529165 - DNA, 19 bp, Mus musculus
  siRNA target sequence for Ptprr (NM_011217.1,561-579).
ccgaagttcaaataagcaa

SEQ ID NO: 529166 - DNA, 19 bp, Mus musculus
  siRNA target sequence for Ptprr (NM_011217.1,576-594).
gcaaacatcaccagattat

SEQ ID NO: 529167 - DNA, 19 bp, Mus musculus
  siRNA target sequence for Ptprr (NM_011217.1,577-595).
caaacatcaccagattatt

SEQ ID NO: 529168 - DNA, 19 bp, Mus musculus
  siRNA target sequence for Ptprr (NM_011217.1,617-635).
gcatatgacccgtctctta

SEQ ID NO: 529169 - DNA, 19 bp, Mus musculus
  siRNA target sequence for Ptprr (NM_011217.1,618-636).
catatgacccgtctcttaa

SEQ ID NO: 529170 - DNA, 19 bp, Mus musculus
  siRNA target sequence for Ptprr (NM_011217.1,623-641).
gacccgtctcttaatctgt

SEQ ID NO: 529171 - DNA, 19 bp, Mus musculus
  siRNA target sequence for Ptprr (NM_011217.1,643-661).
ggctgagtctgatcaagat

SEQ ID NO: 529172 - DNA, 19 bp, Mus musculus
  siRNA target sequence for Ptprr (NM_011217.1,706-724).
ggtgacactgcaaatggat

SEQ ID NO: 529173 - DNA, 19 bp, Mus musculus
  siRNA target sequence for Ptprr (NM_011217.1,707-725).
gtgacactgcaaatggata

SEQ ID NO: 529174 - DNA, 19 bp, Mus musculus
  siRNA target sequence for Ptprr (NM_011217.1,795-813).
ctcagcaagtgcacattaa

SEQ ID NO: 529175 - DNA, 19 bp, Mus musculus
  siRNA target sequence for Ptprr (NM_011217.1,808-826).
cattaaccggctcattgaa

SEQ ID NO: 529176 - DNA, 19 bp, Mus musculus
  siRNA target sequence for Ptprr (NM_011217.1,965-983).
gacgtcgcccctgagaaaa

SEQ ID NO: 529177 - DNA, 19 bp, Mus musculus
  siRNA target sequence for Ptprr (NM_011217.1,967-985).
cgtcgcccctgagaaaaat

SEQ ID NO: 529178 - DNA, 19 bp, Mus musculus
  siRNA target sequence for Ptprr (NM_011217.1,970-988).
cgcccctgagaaaaatgtt

SEQ ID NO: 529179 - DNA, 19 bp, Mus musculus
  siRNA target sequence for Ptprr (NM_011217.1,1001-1019).
cacgaagcagacaagatct

SEQ ID NO: 529180 - DNA, 19 bp, Mus musculus
  siRNA target sequence for Ptprr (NM_011217.1,1057-1075).
cagcatctttatcatcata

SEQ ID NO: 529181 - DNA, 19 bp, Mus musculus
  siRNA target sequence for Ptprr (NM_011217.1,1060-1078).
catctttatcatcatagta

SEQ ID NO: 529182 - DNA, 19 bp, Mus musculus
  siRNA target sequence for Ptprr (NM_011217.1,1076-1094).
gtaacctgtttgatgatta

SEQ ID NO: 529183 - DNA, 19 bp, Mus musculus
  siRNA target sequence for Ptprr (NM_011217.1,1273-1291).
ccaatgcactcctgagatt

SEQ ID NO: 529184 - DNA, 19 bp, Mus musculus
  siRNA target sequence for Ptprr (NM_011217.1,1278-1296).
gcactcctgagattcgaaa

SEQ ID NO: 529185 - DNA, 19 bp, Mus musculus
  siRNA target sequence for Ptprr (NM_011217.1,1319-1337).
ccttctcccttcagaatga

SEQ ID NO: 529186 - DNA, 19 bp, Mus musculus
  siRNA target sequence for Ptprr (NM_011217.1,1354-1372).
ggagcgacgaggttccaat

SEQ ID NO: 529187 - DNA, 19 bp, Mus musculus
  siRNA target sequence for Ptprr (NM_011217.1,1357-1375).
gcgacgaggttccaatgta

SEQ ID NO: 529188 - DNA, 19 bp, Mus musculus
  siRNA target sequence for Ptprr (NM_011217.1,1358-1376).
cgacgaggttccaatgtat

SEQ ID NO: 529189 - DNA, 19 bp, Mus musculus
  siRNA target sequence for Ptprr (NM_011217.1,1362-1380).
gaggttccaatgtatctct

SEQ ID NO: 529190 - DNA, 19 bp, Mus musculus
  siRNA target sequence for Ptprr (NM_011217.1,1364-1382).
ggttccaatgtatctctta

SEQ ID NO: 529191 - DNA, 19 bp, Mus musculus
  siRNA target sequence for Ptprr (NM_011217.1,1379-1397).
cttacgctggacatgagta

SEQ ID NO: 529192 - DNA, 19 bp, Mus musculus
  siRNA target sequence for Ptprr (NM_011217.1,1543-1561).
catggaaataccaatgaat

SEQ ID NO: 529193 - DNA, 19 bp, Mus musculus
  siRNA target sequence for Ptprr (NM_011217.1,1590-1608).
cacgtcacggaactaaaaa

SEQ ID NO: 529194 - DNA, 19 bp, Mus musculus
  siRNA target sequence for Ptprr (NM_011217.1,1595-1613).
cacggaactaaaaatcgtt

SEQ ID NO: 529195 - DNA, 19 bp, Mus musculus
  siRNA target sequence for Ptprr (NM_011217.1,1597-1615).
cggaactaaaaatcgttat

SEQ ID NO: 529196 - DNA, 19 bp, Mus musculus
  siRNA target sequence for Ptprr (NM_011217.1,1598-1616).
ggaactaaaaatcgttata

SEQ ID NO: 529197 - DNA, 19 bp, Mus musculus
  siRNA target sequence for Ptprr (NM_011217.1,1599-1617).
gaactaaaaatcgttataa

SEQ ID NO: 529198 - DNA, 19 bp, Mus musculus
  siRNA target sequence for Ptprr (NM_011217.1,1650-1668).
gcttaagaccaaaaaatat

SEQ ID NO: 529199 - DNA, 19 bp, Mus musculus
  siRNA target sequence for Ptprr (NM_011217.1,1671-1689).
ccgattccttgagtactta

SEQ ID NO: 529200 - DNA, 19 bp, Mus musculus
  siRNA target sequence for Ptprr (NM_011217.1,1681-1699).
gagtacttacataaatgct

SEQ ID NO: 529201 - DNA, 19 bp, Mus musculus
  siRNA target sequence for Ptprr (NM_011217.1,1686-1704).
cttacataaatgctaacta

SEQ ID NO: 529202 - DNA, 19 bp, Mus musculus
  siRNA target sequence for Ptprr (NM_011217.1,1802-1820).
gacagtcccgtgattgtga

SEQ ID NO: 529203 - DNA, 19 bp, Mus musculus
  siRNA target sequence for Ptprr (NM_011217.1,1817-1835).
gtgatgatcacgaaactca

SEQ ID NO: 529204 - DNA, 19 bp, Mus musculus
  siRNA target sequence for Ptprr (NM_011217.1,1911-1929).
ccggtgtgaccgaatgtga

SEQ ID NO: 529205 - DNA, 19 bp, Mus musculus
  siRNA target sequence for Ptprr (NM_011217.1,1912-1930).
cggtgtgaccgaatgtgat

SEQ ID NO: 529206 - DNA, 19 bp, Mus musculus
  siRNA target sequence for Ptprr (NM_011217.1,1913-1931).
ggtgtgaccgaatgtgata

SEQ ID NO: 529207 - DNA, 19 bp, Mus musculus
  siRNA target sequence for Ptprr (NM_011217.1,1914-1932).
gtgtgaccgaatgtgataa

SEQ ID NO: 529208 - DNA, 19 bp, Mus musculus
  siRNA target sequence for Ptprr (NM_011217.1,1916-1934).
gtgaccgaatgtgataact

SEQ ID NO: 529209 - DNA, 19 bp, Mus musculus
  siRNA target sequence for Ptprr (NM_011217.1,1944-1962).
gcaacctcgtcttaaagca

SEQ ID NO: 529210 - DNA, 19 bp, Mus musculus
  siRNA target sequence for Ptprr (NM_011217.1,1965-1983).
gaagtcacacccaacatgt

SEQ ID NO: 529211 - DNA, 19 bp, Mus musculus
  siRNA target sequence for Ptprr (NM_011217.1,1988-2006).
cactactggtacacttcat

SEQ ID NO: 529212 - DNA, 19 bp, Mus musculus
  siRNA target sequence for Ptprr (NM_011217.1,2001-2019).
cttcatggccggatcataa

SEQ ID NO: 529213 - DNA, 19 bp, Mus musculus
  siRNA target sequence for Ptprr (NM_011217.1,2189-2207).
gttgtagacgcactaagta

SEQ ID NO: 529214 - DNA, 19 bp, Mus musculus
  siRNA target sequence for Ptprr (NM_011217.1,2195-2213).
gacgcactaagtattgtct

SEQ ID NO: 529215 - DNA, 19 bp, Mus musculus
  siRNA target sequence for Ptprr (NM_011217.1,2251-2269).
cagcgagcagtatgaattt

SEQ ID NO: 529216 - DNA, 19 bp, Mus musculus
  siRNA target sequence for Ptprr (NM_011217.1,2253-2271).
gcgagcagtatgaatttgt

SEQ ID NO: 529217 - DNA, 19 bp, Mus musculus
  siRNA target sequence for Ptprr (NM_011217.1,2290-2308).
gttcgagagcagactttca

SEQ ID NO: 529218 - DNA, 19 bp, Mus musculus
  siRNA target sequence for Ppp1r16b (NM_153089.2,742-760).
ggaatgacgccgaagaagt

SEQ ID NO: 529219 - DNA, 19 bp, Mus musculus
  siRNA target sequence for Ppp1r16b (NM_153089.2,743-761).
gaatgacgccgaagaagtt

SEQ ID NO: 529220 - DNA, 19 bp, Mus musculus
  siRNA target sequence for Ppp1r16b (NM_153089.2,762-780).
cgctacttcctgaagaaca

SEQ ID NO: 529221 - DNA, 19 bp, Mus musculus
  siRNA target sequence for Ppp1r16b (NM_153089.2,835-853).
gcattgacaactttgaaga

SEQ ID NO: 529222 - DNA, 19 bp, Mus musculus
  siRNA target sequence for Ppp1r16b (NM_153089.2,934-952).
ccacctgcggccacatcaa

SEQ ID NO: 529223 - DNA, 19 bp, Mus musculus
  siRNA target sequence for Ppp1r16b (NM_153089.2,959-977).
gaagatcctcgttcagtat

SEQ ID NO: 529224 - DNA, 19 bp, Mus musculus
  siRNA target sequence for Ppp1r16b (NM_153089.2,1061-1079).
gacctgcatggcataccaa

SEQ ID NO: 529225 - DNA, 19 bp, Mus musculus
  siRNA target sequence for Ppp1r16b (NM_153089.2,1574-1592).
caacctataccggaaagaa

SEQ ID NO: 529226 - DNA, 19 bp, Mus musculus
  siRNA target sequence for Ppp1r16b (NM_153089.2,1596-1614).
gagggcgaggccatcttgt

SEQ ID NO: 529227 - DNA, 19 bp, Mus musculus
  siRNA target sequence for Ppp1r16b (NM_153089.2,1635-1653).
gaggaccagcggacttcaa

SEQ ID NO: 529228 - DNA, 19 bp, Mus musculus
  siRNA target sequence for Ppp1r16b (NM_153089.2,1726-1744).
ccgtgctgctctcagaatt

SEQ ID NO: 529229 - DNA, 19 bp, Mus musculus
  siRNA target sequence for Ppp1r16b (NM_153089.2,1731-1749).
ctgctctcagaattctcta

SEQ ID NO: 529230 - DNA, 19 bp, Mus musculus
  siRNA target sequence for Ppp1r16b (NM_153089.2,1740-1758).
gaattctctaccaagatct

SEQ ID NO: 529231 - DNA, 19 bp, Mus musculus
  siRNA target sequence for Ppp1r16b (NM_153089.2,1988-2006).
gctcagtcacccattctta

SEQ ID NO: 529232 - DNA, 19 bp, Mus musculus
  siRNA target sequence for Ppp1r16b (NM_153089.2,1989-2007).
ctcagtcacccattcttaa

SEQ ID NO: 529233 - DNA, 19 bp, Mus musculus
  siRNA target sequence for Ppp1r16b (NM_153089.2,2105-2123).
cgggacctcggtgtattat

SEQ ID NO: 529234 - DNA, 19 bp, Mus musculus
  siRNA target sequence for Ppp1r16b (NM_153089.2,2108-2126).
gacctcggtgtattataca

SEQ ID NO: 529235 - DNA, 19 bp, Mus musculus
  siRNA target sequence for Ppp1r16b (NM_153089.2,2110-2128).
cctcggtgtattatacagt

SEQ ID NO: 529236 - DNA, 19 bp, Mus musculus
  siRNA target sequence for 2300003F07Rik (NM_027971.1,149-167).
ctgcagcaaataataaatt

SEQ ID NO: 529237 - DNA, 19 bp, Mus musculus
  siRNA target sequence for 2300003F07Rik (NM_027971.1,174-192).
cgattttttccgagagatt

SEQ ID NO: 529238 - DNA, 19 bp, Mus musculus
  siRNA target sequence for 2300003F07Rik (NM_027971.1,175-193).
gattttttccgagagatta

SEQ ID NO: 529239 - DNA, 19 bp, Mus musculus
  siRNA target sequence for 2300003F07Rik (NM_027971.1,183-201).
ccgagagattagcaaagat

SEQ ID NO: 529240 - DNA, 19 bp, Mus musculus
  siRNA target sequence for 2300003F07Rik (NM_027971.1,284-302).
gtgcacatcagattgatga

SEQ ID NO: 529241 - DNA, 19 bp, Mus musculus
  siRNA target sequence for 2300003F07Rik (NM_027971.1,294-312).
gattgatgaggcattacat

SEQ ID NO: 529242 - DNA, 19 bp, Mus musculus
  siRNA target sequence for 2300003F07Rik (NM_027971.1,298-316).
gatgaggcattacatttca

SEQ ID NO: 529243 - DNA, 19 bp, Mus musculus
  siRNA target sequence for 2300003F07Rik (NM_027971.1,310-328).
catttcaatgaactttcta

SEQ ID NO: 529244 - DNA, 19 bp, Mus musculus
  siRNA target sequence for 2300003F07Rik (NM_027971.1,443-461).
ctacaaatgaccatcaatt

SEQ ID NO: 529245 - DNA, 19 bp, Mus musculus
  siRNA target sequence for 2300003F07Rik (NM_027971.1,484-502).
cttctctccagaatagaca

SEQ ID NO: 529246 - DNA, 19 bp, Mus musculus
  siRNA target sequence for 2300003F07Rik (NM_027971.1,505-523).
gacaaatcttattacactt

SEQ ID NO: 529247 - DNA, 19 bp, Mus musculus
  siRNA target sequence for 2300003F07Rik (NM_027971.1,547-565).
ggagagcaggaatttccaa

SEQ ID NO: 529248 - DNA, 19 bp, Mus musculus
  siRNA target sequence for 2300003F07Rik (NM_027971.1,548-566).
gagagcaggaatttccaat

SEQ ID NO: 529249 - DNA, 19 bp, Mus musculus
  siRNA target sequence for 2300003F07Rik (NM_027971.1,583-601).
gatgacgtaacggaatttt

SEQ ID NO: 529250 - DNA, 19 bp, Mus musculus
  siRNA target sequence for 2300003F07Rik (NM_027971.1,606-624).
cacaacagtcgaaagtgta

SEQ ID NO: 529251 - DNA, 19 bp, Mus musculus
  siRNA target sequence for 2300003F07Rik (NM_027971.1,611-629).
cagtcgaaagtgtagattt

SEQ ID NO: 529252 - DNA, 19 bp, Mus musculus
  siRNA target sequence for 2300003F07Rik (NM_027971.1,622-640).
gtagatttccagaaggatt

SEQ ID NO: 529253 - DNA, 19 bp, Mus musculus
  siRNA target sequence for 2300003F07Rik (NM_027971.1,666-684).
cttctgggttgaaagtcaa

SEQ ID NO: 529254 - DNA, 19 bp, Mus musculus
  siRNA target sequence for 2300003F07Rik (NM_027971.1,717-735).
ggaggctattgataactca

SEQ ID NO: 529255 - DNA, 19 bp, Mus musculus
  siRNA target sequence for 2300003F07Rik (NM_027971.1,718-736).
gaggctattgataactcaa

SEQ ID NO: 529256 - DNA, 19 bp, Mus musculus
  siRNA target sequence for 2300003F07Rik (NM_027971.1,818-836).
ctttctgtctcaatgagaa

SEQ ID NO: 529257 - DNA, 19 bp, Mus musculus
  siRNA target sequence for 2300003F07Rik (NM_027971.1,861-879).
gaatcagaagggtaagttt

SEQ ID NO: 529258 - DNA, 19 bp, Mus musculus
  siRNA target sequence for 2300003F07Rik (NM_027971.1,910-928).
cagatcctggaaatgaagt

SEQ ID NO: 529259 - DNA, 19 bp, Mus musculus
  siRNA target sequence for 2300003F07Rik (NM_027971.1,1090-1108).
cagttcaacctggaagata

SEQ ID NO: 529260 - DNA, 19 bp, Mus musculus
  siRNA target sequence for 2300003F07Rik (NM_027971.1,1095-1113).
caacctggaagatagctat

SEQ ID NO: 529261 - DNA, 19 bp, Mus musculus
  siRNA target sequence for 2300003F07Rik (NM_027971.1,1098-1116).
cctggaagatagctatgat

SEQ ID NO: 529262 - DNA, 19 bp, Mus musculus
  siRNA target sequence for 2300003F07Rik (NM_027971.1,1344-1362).
cttttttatccgtcacaat

SEQ ID NO: 529263 - DNA, 19 bp, Mus musculus
  siRNA target sequence for Dnmt3l (NM_019448.2,147-165).
ccgggagacaccttcttct

SEQ ID NO: 529264 - DNA, 19 bp, Mus musculus
  siRNA target sequence for Dnmt3l (NM_019448.2,335-353).
cgacaggcagagagatgat

SEQ ID NO: 529265 - DNA, 19 bp, Mus musculus
  siRNA target sequence for Dnmt3l (NM_019448.2,351-369).
gatcaggtacgaagtcaaa

SEQ ID NO: 529266 - DNA, 19 bp, Mus musculus
  siRNA target sequence for Dnmt3l (NM_019448.2,356-374).
ggtacgaagtcaaagtgaa

SEQ ID NO: 529267 - DNA, 19 bp, Mus musculus
  siRNA target sequence for Dnmt3l (NM_019448.2,377-395).
gacggagcattgaagacat

SEQ ID NO: 529268 - DNA, 19 bp, Mus musculus
  siRNA target sequence for Dnmt3l (NM_019448.2,426-444).
cactcggcaccccttgttt

SEQ ID NO: 529269 - DNA, 19 bp, Mus musculus
  siRNA target sequence for Dnmt3l (NM_019448.2,428-446).
ctcggcaccccttgtttga

SEQ ID NO: 529270 - DNA, 19 bp, Mus musculus
  siRNA target sequence for Dnmt3l (NM_019448.2,452-470).
ggttatgtgccccatgtaa

SEQ ID NO: 529271 - DNA, 19 bp, Mus musculus
  siRNA target sequence for Dnmt3l (NM_019448.2,460-478).
gccccatgtaaggataagt

SEQ ID NO: 529272 - DNA, 19 bp, Mus musculus
  siRNA target sequence for Dnmt3l (NM_019448.2,461-479).
ccccatgtaaggataagtt

SEQ ID NO: 529273 - DNA, 19 bp, Mus musculus
  siRNA target sequence for Dnmt3l (NM_019448.2,508-526).
gatggacaccagagttact

SEQ ID NO: 529274 - DNA, 19 bp, Mus musculus
  siRNA target sequence for Dnmt3l (NM_019448.2,627-645).
gacctcagagaggatcaat

SEQ ID NO: 529275 - DNA, 19 bp, Mus musculus
  siRNA target sequence for Dnmt3l (NM_019448.2,732-750).
gaaggccttccatgatcaa

SEQ ID NO: 529276 - DNA, 19 bp, Mus musculus
  siRNA target sequence for Dnmt3l (NM_019448.2,810-828).
gcgggtactgagccttttt

SEQ ID NO: 529277 - DNA, 19 bp, Mus musculus
  siRNA target sequence for Dnmt3l (NM_019448.2,811-829).
cgggtactgagccttttta

SEQ ID NO: 529278 - DNA, 19 bp, Mus musculus
  siRNA target sequence for Dnmt3l (NM_019448.2,813-831).
ggtactgagcctttttaga

SEQ ID NO: 529279 - DNA, 19 bp, Mus musculus
  siRNA target sequence for Dnmt3l (NM_019448.2,814-832).
gtactgagcctttttagaa

SEQ ID NO: 529280 - DNA, 19 bp, Mus musculus
  siRNA target sequence for Dnmt3l (NM_019448.2,906-924).
cgtggaagatgtcacaaat

SEQ ID NO: 529281 - DNA, 19 bp, Mus musculus
  siRNA target sequence for Dnmt3l (NM_019448.2,987-1005).
cctaggcagctcttgtgat

SEQ ID NO: 529282 - DNA, 19 bp, Mus musculus
  siRNA target sequence for Dnmt3l (NM_019448.2,1010-1028).
gtcccggctggtacatgtt

SEQ ID NO: 529283 - DNA, 19 bp, Mus musculus
  siRNA target sequence for Dnmt3l (NM_019448.2,1081-1099).
cccttcttctggatattca

SEQ ID NO: 529284 - DNA, 19 bp, Mus musculus
  siRNA target sequence for 1110014C03Rik (NM_026775.2,322-340).
cctttaccacggaagacta

SEQ ID NO: 529285 - DNA, 19 bp, Mus musculus
  siRNA target sequence for 1110014C03Rik (NM_026775.2,323-341).
ctttaccacggaagactat

SEQ ID NO: 529286 - DNA, 19 bp, Mus musculus
  siRNA target sequence for 1110014C03Rik (NM_026775.2,328-346).
ccacggaagactatgacat

SEQ ID NO: 529287 - DNA, 19 bp, Mus musculus
  siRNA target sequence for 1110014L17Rik (NM_134020.1,51-69).
ggctgctggtgcttactgt

SEQ ID NO: 529288 - DNA, 19 bp, Mus musculus
  siRNA target sequence for 1110014L17Rik (NM_134020.1,123-141).
gctgcttcatcgaggaaat

SEQ ID NO: 529289 - DNA, 19 bp, Mus musculus
  siRNA target sequence for 1110014L17Rik (NM_134020.1,124-142).
ctgcttcatcgaggaaata

SEQ ID NO: 529290 - DNA, 19 bp, Mus musculus
  siRNA target sequence for 1110014L17Rik (NM_134020.1,158-176).
gtcatcggcaactatcgaa

SEQ ID NO: 529291 - DNA, 19 bp, Mus musculus
  siRNA target sequence for 1110014L17Rik (NM_134020.1,255-273).
cggacggcaaggttgtact

SEQ ID NO: 529292 - DNA, 19 bp, Mus musculus
  siRNA target sequence for 1110014L17Rik (NM_134020.1,296-314).
ggccgtttcacgttcacat

SEQ ID NO: 529293 - DNA, 19 bp, Mus musculus
  siRNA target sequence for 1110014L17Rik (NM_134020.1,323-341).
cccggtgaccatcagattt

SEQ ID NO: 529294 - DNA, 19 bp, Mus musculus
  siRNA target sequence for 1110014L17Rik (NM_134020.1,325-343).
cggtgaccatcagatttgt

SEQ ID NO: 529295 - DNA, 19 bp, Mus musculus
  siRNA target sequence for 1110014L17Rik (NM_134020.1,384-402).
gcaaactgcgtgtacactt

SEQ ID NO: 529296 - DNA, 19 bp, Mus musculus
  siRNA target sequence for 1110014L17Rik (NM_134020.1,439-457).
cgagatcgctgctaaggat

SEQ ID NO: 529297 - DNA, 19 bp, Mus musculus
  siRNA target sequence for 1110014L17Rik (NM_134020.1,440-458).
gagatcgctgctaaggata

SEQ ID NO: 529298 - DNA, 19 bp, Mus musculus
  siRNA target sequence for 1110014L17Rik (NM_134020.1,446-464).
gctgctaaggataagttaa

SEQ ID NO: 529299 - DNA, 19 bp, Mus musculus
  siRNA target sequence for 1110014L17Rik (NM_134020.1,450-468).
ctaaggataagttaacaga

SEQ ID NO: 529300 - DNA, 19 bp, Mus musculus
  siRNA target sequence for 1200002G13Rik (NM_025360.1,334-352).
gacagcttcacgtacaaga

SEQ ID NO: 529301 - DNA, 19 bp, Mus musculus
  siRNA target sequence for 1200002G13Rik (NM_025360.1,364-382).
ggcgtctaccggttttgct

SEQ ID NO: 529302 - DNA, 19 bp, Mus musculus
  siRNA target sequence for 1200002G13Rik (NM_025360.1,365-383).
gcgtctaccggttttgctt

SEQ ID NO: 529303 - DNA, 19 bp, Mus musculus
  siRNA target sequence for 1200002G13Rik (NM_025360.1,372-390).
ccggttttgcttcagtaat

SEQ ID NO: 529304 - DNA, 19 bp, Mus musculus
  siRNA target sequence for 1200002G13Rik (NM_025360.1,407-425).
ctcataagaccgtctactt

SEQ ID NO: 529305 - DNA, 19 bp, Mus musculus
  siRNA target sequence for 1200002G13Rik (NM_025360.1,499-517).
gaatctgcctgtgtaacta

SEQ ID NO: 529306 - DNA, 19 bp, Mus musculus
  siRNA target sequence for 1200002G13Rik (NM_025360.1,543-561).
cgactcccagacacactat

SEQ ID NO: 529307 - DNA, 19 bp, Mus musculus
  siRNA target sequence for 1200002G13Rik (NM_025360.1,587-605).
cccgagctgaagaccttaa

SEQ ID NO: 529308 - DNA, 19 bp, Mus musculus
  siRNA target sequence for 1200002G13Rik (NM_025360.1,588-606).
ccgagctgaagaccttaat

SEQ ID NO: 529309 - DNA, 19 bp, Mus musculus
  siRNA target sequence for 1200002G13Rik (NM_025360.1,589-607).
cgagctgaagaccttaata

SEQ ID NO: 529310 - DNA, 19 bp, Mus musculus
  siRNA target sequence for 1200002G13Rik (NM_025360.1,624-642).
gtctgtaggcgagactatt

SEQ ID NO: 529311 - DNA, 19 bp, Mus musculus
  siRNA target sequence for 1200002G13Rik (NM_025360.1,667-685).
caggtgctactgctgaaaa

SEQ ID NO: 529312 - DNA, 19 bp, Mus musculus
  siRNA target sequence for 1200002G13Rik (NM_025360.1,678-696).
gctgaaaagcttctttaca

SEQ ID NO: 529313 - DNA, 19 bp, Mus musculus
  siRNA target sequence for 1200002G13Rik (NM_025360.1,695-713).
cagaaaagcgacctgttaa

SEQ ID NO: 529314 - DNA, 19 bp, Mus musculus
  siRNA target sequence for 1810008K16Rik (NM_026109.1,159-177).
gacattccaagtgatacat

SEQ ID NO: 529315 - DNA, 19 bp, Mus musculus
  siRNA target sequence for 1810008K16Rik (NM_026109.1,263-281).
gactgttacaacttacaat

SEQ ID NO: 529316 - DNA, 19 bp, Mus musculus
  siRNA target sequence for 1810008K16Rik (NM_026109.1,287-305).
ggtattattatccaagtta

SEQ ID NO: 529317 - DNA, 19 bp, Mus musculus
  siRNA target sequence for 1810008K16Rik (NM_026109.1,309-327).
ggtgcacaaggaacattct

SEQ ID NO: 529318 - DNA, 19 bp, Mus musculus
  siRNA target sequence for 1810008K16Rik (NM_026109.1,310-328).
gtgcacaaggaacattcta

SEQ ID NO: 529319 - DNA, 19 bp, Mus musculus
  siRNA target sequence for 1810008K16Rik (NM_026109.1,315-333).
caaggaacattctatttta

SEQ ID NO: 529320 - DNA, 19 bp, Mus musculus
  siRNA target sequence for 1810008K16Rik (NM_026109.1,318-336).
ggaacattctattttactt

SEQ ID NO: 529321 - DNA, 19 bp, Mus musculus
  siRNA target sequence for 1810008K16Rik (NM_026109.1,343-361).
catctggtgaacacatcat

SEQ ID NO: 529322 - DNA, 19 bp, Mus musculus
  siRNA target sequence for 1810008K16Rik (NM_026109.1,356-374).
catcatttgcttagaatct

SEQ ID NO: 529323 - DNA, 19 bp, Mus musculus
  siRNA target sequence for 1810008K16Rik (NM_026109.1,365-383).
cttagaatctaattctaca

SEQ ID NO: 529324 - DNA, 19 bp, Mus musculus
  siRNA target sequence for 1810008K16Rik (NM_026109.1,410-428).
gctgcgcatccacttagat

SEQ ID NO: 529325 - DNA, 19 bp, Mus musculus
  siRNA target sequence for 1810008K16Rik (NM_026109.1,411-429).
ctgcgcatccacttagata

SEQ ID NO: 529326 - DNA, 19 bp, Mus musculus
  siRNA target sequence for 1810008K16Rik (NM_026109.1,416-434).
catccacttagatattcga

SEQ ID NO: 529327 - DNA, 19 bp, Mus musculus
  siRNA target sequence for 1810008K16Rik (NM_026109.1,476-494).
ggataaagttaatgaagta

SEQ ID NO: 529328 - DNA, 19 bp, Mus musculus
  siRNA target sequence for 1810008K16Rik (NM_026109.1,559-577).
gggaccgtgaagaaaattt

SEQ ID NO: 529329 - DNA, 19 bp, Mus musculus
  siRNA target sequence for 1810008K16Rik (NM_026109.1,578-596).
ccgtataaccagtgaagat

SEQ ID NO: 529330 - DNA, 19 bp, Mus musculus
  siRNA target sequence for 1810008K16Rik (NM_026109.1,579-597).
cgtataaccagtgaagata

SEQ ID NO: 529331 - DNA, 19 bp, Mus musculus
  siRNA target sequence for 1810008K16Rik (NM_026109.1,621-639).
gcttttgcacaaatattga

SEQ ID NO: 529332 - DNA, 19 bp, Mus musculus
  siRNA target sequence for 1810008K16Rik (NM_026109.1,622-640).
cttttgcacaaatattgat

SEQ ID NO: 529333 - DNA, 19 bp, Mus musculus
  siRNA target sequence for 2400003B06Rik (NM_026211.1,225-243).
cggacgcagctgtatgaca

SEQ ID NO: 529334 - DNA, 19 bp, Mus musculus
  siRNA target sequence for 2400003B06Rik (NM_026211.1,753-771).
cctcacaggcgatctttct

SEQ ID NO: 529335 - DNA, 19 bp, Mus musculus
  siRNA target sequence for 2400003B06Rik (NM_026211.1,790-808).
ggaggaggactggttttca

SEQ ID NO: 529336 - DNA, 19 bp, Mus musculus
  siRNA target sequence for 3110020O18Rik (NM_028876.1,335-353).
catcgttggagatcgaata

SEQ ID NO: 529337 - DNA, 19 bp, Mus musculus
  siRNA target sequence for 3110020O18Rik (NM_028876.1,338-356).
cgttggagatcgaatacca

SEQ ID NO: 529338 - DNA, 19 bp, Mus musculus
  siRNA target sequence for 3110020O18Rik (NM_028876.1,343-361).
gagatcgaataccaagttt

SEQ ID NO: 529339 - DNA, 19 bp, Mus musculus
  siRNA target sequence for 3110020O18Rik (NM_028876.1,345-363).
gatcgaataccaagtttta

SEQ ID NO: 529340 - DNA, 19 bp, Mus musculus
  siRNA target sequence for 3110020O18Rik (NM_028876.1,348-366).
cgaataccaagttttagat

SEQ ID NO: 529341 - DNA, 19 bp, Mus musculus
  siRNA target sequence for 3110020O18Rik (NM_028876.1,370-388).
ggagaattagatattgatt

SEQ ID NO: 529342 - DNA, 19 bp, Mus musculus
  siRNA target sequence for 3110020O18Rik (NM_028876.1,410-428).
gcagaaccttagtttttga

SEQ ID NO: 529343 - DNA, 19 bp, Mus musculus
  siRNA target sequence for 3110020O18Rik (NM_028876.1,417-435).
cttagtttttgaacaaaga

SEQ ID NO: 529344 - DNA, 19 bp, Mus musculus
  siRNA target sequence for 3110020O18Rik (NM_028876.1,440-458).
cagatggtgttcatactat

SEQ ID NO: 529345 - DNA, 19 bp, Mus musculus
  siRNA target sequence for 3110020O18Rik (NM_028876.1,445-463).
ggtgttcatactatagaga

SEQ ID NO: 529346 - DNA, 19 bp, Mus musculus
  siRNA target sequence for 3110020O18Rik (NM_028876.1,469-487).
gatggtgattacatgttct

SEQ ID NO: 529347 - DNA, 19 bp, Mus musculus
  siRNA target sequence for 3110020O18Rik (NM_028876.1,580-598).
gactggaaaaagtatatta

SEQ ID NO: 529348 - DNA, 19 bp, Mus musculus
  siRNA target sequence for 3110020O18Rik (NM_028876.1,616-634).
gagatgaagctagaagata

SEQ ID NO: 529349 - DNA, 19 bp, Mus musculus
  siRNA target sequence for 3110020O18Rik (NM_028876.1,660-678).
gtccagactaagcaaaagt

SEQ ID NO: 529350 - DNA, 19 bp, Mus musculus
  siRNA target sequence for 3110020O18Rik (NM_028876.1,671-689).
gcaaaagtggccacataca

SEQ ID NO: 529351 - DNA, 19 bp, Mus musculus
  siRNA target sequence for 3110020O18Rik (NM_028876.1,677-695).
gtggccacatacaaactct

SEQ ID NO: 529352 - DNA, 19 bp, Mus musculus
  siRNA target sequence for 3110020O18Rik (NM_028876.1,713-731).
ctcgagatcgaaacataca

SEQ ID NO: 529353 - DNA, 19 bp, Mus musculus
  siRNA target sequence for 3110020O18Rik (NM_028876.1,730-748).
caagaaagcaactttgaca

SEQ ID NO: 529354 - DNA, 19 bp, Mus musculus
  siRNA target sequence for 3110020O18Rik (NM_028876.1,761-779).
ggtctgtggttaacttgat

SEQ ID NO: 529355 - DNA, 19 bp, Mus musculus
  siRNA target sequence for 3110020O18Rik (NM_028876.1,789-807).
ggtggtgtcagctattcaa

SEQ ID NO: 529356 - DNA, 19 bp, Mus musculus
  siRNA target sequence for 3110020O18Rik (NM_028876.1,793-811).
gtgtcagctattcaagttt

SEQ ID NO: 529357 - DNA, 19 bp, Mus musculus
  siRNA target sequence for 3110020O18Rik (NM_028876.1,795-813).
gtcagctattcaagtttat

SEQ ID NO: 529358 - DNA, 19 bp, Mus musculus
  siRNA target sequence for 3110020O18Rik (NM_028876.1,805-823).
caagtttatacgctgaaaa

SEQ ID NO: 529359 - DNA, 19 bp, Mus musculus
  siRNA target sequence for 3110020O18Rik (NM_028876.1,815-833).
cgctgaaaagtctatttga

SEQ ID NO: 529360 - DNA, 19 bp, Mus musculus
  siRNA target sequence for Il1rl1l (NM_010744.1,99-117).
caggacggcgagttcacat

SEQ ID NO: 529361 - DNA, 19 bp, Mus musculus
  siRNA target sequence for Il1rl1l (NM_010744.1,101-119).
ggacggcgagttcacattt

SEQ ID NO: 529362 - DNA, 19 bp, Mus musculus
  siRNA target sequence for Sec14l2 (NM_144520.1,143-161).
ccaatccagatgactactt

SEQ ID NO: 529363 - DNA, 19 bp, Mus musculus
  siRNA target sequence for Sec14l2 (NM_144520.1,174-192).
gctccgagcccgaagcttt

SEQ ID NO: 529364 - DNA, 19 bp, Mus musculus
  siRNA target sequence for Sec14l2 (NM_144520.1,239-257).
ggaagcaaaaggacattga

SEQ ID NO: 529365 - DNA, 19 bp, Mus musculus
  siRNA target sequence for Sec14l2 (NM_144520.1,573-591).
cctcaccatgtttgaagaa

SEQ ID NO: 529366 - DNA, 19 bp, Mus musculus
  siRNA target sequence for Sec14l2 (NM_144520.1,605-623).
cactgaagcgtctgtttgt

SEQ ID NO: 529367 - DNA, 19 bp, Mus musculus
  siRNA target sequence for Sec14l2 (NM_144520.1,609-627).
gaagcgtctgtttgttgtt

SEQ ID NO: 529368 - DNA, 19 bp, Mus musculus
  siRNA target sequence for Sec14l2 (NM_144520.1,661-679).
ctcatcaagcccttcctaa

SEQ ID NO: 529369 - DNA, 19 bp, Mus musculus
  siRNA target sequence for Sec14l2 (NM_144520.1,666-684).
caagcccttcctaagtgaa

SEQ ID NO: 529370 - DNA, 19 bp, Mus musculus
  siRNA target sequence for Sec14l2 (NM_144520.1,726-744).
ggaggttttactcaaacat

SEQ ID NO: 529371 - DNA, 19 bp, Mus musculus
  siRNA target sequence for Sec14l2 (NM_144520.1,730-748).
gttttactcaaacatatca

SEQ ID NO: 529372 - DNA, 19 bp, Mus musculus
  siRNA target sequence for Sec14l2 (NM_144520.1,796-814).
gacggaaatcccaagtgta

SEQ ID NO: 529373 - DNA, 19 bp, Mus musculus
  siRNA target sequence for Sec14l2 (NM_144520.1,798-816).
cggaaatcccaagtgtaaa

SEQ ID NO: 529374 - DNA, 19 bp, Mus musculus
  siRNA target sequence for Sec14l2 (NM_144520.1,1060-1078).
ctgccaaaccagagataca

SEQ ID NO: 529375 - DNA, 19 bp, Mus musculus
  siRNA target sequence for Sec14l2 (NM_144520.1,1062-1080).
gccaaaccagagatacaat

SEQ ID NO: 529376 - DNA, 19 bp, Mus musculus
  siRNA target sequence for Sec14l2 (NM_144520.1,1197-1215).
ggtcctgcttccagacaaa

SEQ ID NO: 529377 - DNA, 19 bp, Mus musculus
  siRNA target sequence for Fcer1a (NM_010184.1,70-88).
ctagcactgctgttcatgt

SEQ ID NO: 529378 - DNA, 19 bp, Mus musculus
  siRNA target sequence for Fcer1a (NM_010184.1,105-123).
gacagccactgagaaatct

SEQ ID NO: 529379 - DNA, 19 bp, Mus musculus
  siRNA target sequence for Fcer1a (NM_010184.1,135-153).
ggacccaccatggattaga

SEQ ID NO: 529380 - DNA, 19 bp, Mus musculus
  siRNA target sequence for Fcer1a (NM_010184.1,182-200).
cctgctatgggaacaatca

SEQ ID NO: 529381 - DNA, 19 bp, Mus musculus
  siRNA target sequence for Fcer1a (NM_010184.1,202-220).
cttcaaatgaactctacta

SEQ ID NO: 529382 - DNA, 19 bp, Mus musculus
  siRNA target sequence for Fcer1a (NM_010184.1,244-262).
gtctctgaggtgaactctt

SEQ ID NO: 529383 - DNA, 19 bp, Mus musculus
  siRNA target sequence for Fcer1a (NM_010184.1,288-306).
cgttcaagacagtggaaaa

SEQ ID NO: 529384 - DNA, 19 bp, Mus musculus
  siRNA target sequence for Fcer1a (NM_010184.1,289-307).
gttcaagacagtggaaaat

SEQ ID NO: 529385 - DNA, 19 bp, Mus musculus
  siRNA target sequence for Fcer1a (NM_010184.1,322-340).
caaggattgtttaagagta

SEQ ID NO: 529386 - DNA, 19 bp, Mus musculus
  siRNA target sequence for Fcer1a (NM_010184.1,406-424).
gtccatggatcctttgaca

SEQ ID NO: 529387 - DNA, 19 bp, Mus musculus
  siRNA target sequence for Fcer1a (NM_010184.1,454-472).
gtccgcaaggtgatctact

SEQ ID NO: 529388 - DNA, 19 bp, Mus musculus
  siRNA target sequence for Fcer1a (NM_010184.1,481-499).
gaccatgctttcaactaca

SEQ ID NO: 529389 - DNA, 19 bp, Mus musculus
  siRNA target sequence for Fcer1a (NM_010184.1,505-523).
gagagccccgtctccatta

SEQ ID NO: 529390 - DNA, 19 bp, Mus musculus
  siRNA target sequence for Fcer1a (NM_010184.1,555-573).
ccactgcaagggctatctt

SEQ ID NO: 529391 - DNA, 19 bp, Mus musculus
  siRNA target sequence for Fcer1a (NM_010184.1,556-574).
cactgcaagggctatctta

SEQ ID NO: 529392 - DNA, 19 bp, Mus musculus
  siRNA target sequence for Fcer1a (NM_010184.1,622-640).
gcttacaaatgcaagtatt

SEQ ID NO: 529393 - DNA, 19 bp, Mus musculus
  siRNA target sequence for Fcer1a (NM_010184.1,636-654).
gtattattggctacaacta

SEQ ID NO: 529394 - DNA, 19 bp, Mus musculus
  siRNA target sequence for Fcer1a (NM_010184.1,666-684).
gttggtggcgattctgttt

SEQ ID NO: 529395 - DNA, 19 bp, Mus musculus
  siRNA target sequence for Fcer1a (NM_010184.1,710-728).
caaccgaagaacagttcaa

SEQ ID NO: 529396 - DNA, 19 bp, Mus musculus
  siRNA target sequence for Fcer1a (NM_010184.1,714-732).
cgaagaacagttcaaatca

SEQ ID NO: 529397 - DNA, 19 bp, Mus musculus
  siRNA target sequence for Fcer2a (NM_013517.1,239-257).
gtgggacacagctcatgtt

SEQ ID NO: 529398 - DNA, 19 bp, Mus musculus
  siRNA target sequence for Fcer2a (NM_013517.1,318-336).
ctgggaaacggagaagaat

SEQ ID NO: 529399 - DNA, 19 bp, Mus musculus
  siRNA target sequence for Fcer2a (NM_013517.1,379-397).
gttaccaaggacttacaaa

SEQ ID NO: 529400 - DNA, 19 bp, Mus musculus
  siRNA target sequence for Fcer2a (NM_013517.1,547-565).
gcccaatcccagaactcaa

SEQ ID NO: 529401 - DNA, 19 bp, Mus musculus
  siRNA target sequence for Fcer2a (NM_013517.1,587-605).
gactccaagacgatctagt

SEQ ID NO: 529402 - DNA, 19 bp, Mus musculus
  siRNA target sequence for Fcer2a (NM_013517.1,595-613).
gacgatctagtcaacatca

SEQ ID NO: 529403 - DNA, 19 bp, Mus musculus
  siRNA target sequence for Fcer2a (NM_013517.1,597-615).
cgatctagtcaacatcaaa

SEQ ID NO: 529404 - DNA, 19 bp, Mus musculus
  siRNA target sequence for Fcer2a (NM_013517.1,645-663).
ctccgattctctagagaaa

SEQ ID NO: 529405 - DNA, 19 bp, Mus musculus
  siRNA target sequence for Fcer2a (NM_013517.1,647-665).
ccgattctctagagaaact

SEQ ID NO: 529406 - DNA, 19 bp, Mus musculus
  siRNA target sequence for Fcer2a (NM_013517.1,712-730).
ggaactgcatgcaacatat

SEQ ID NO: 529407 - DNA, 19 bp, Mus musculus
  siRNA target sequence for Fcer2a (NM_013517.1,743-761).
ggctccatttccaacagaa

SEQ ID NO: 529408 - DNA, 19 bp, Mus musculus
  siRNA target sequence for Fcer2a (NM_013517.1,753-771).
ccaacagaagtgctactat

SEQ ID NO: 529409 - DNA, 19 bp, Mus musculus
  siRNA target sequence for Fcer2a (NM_013517.1,754-772).
caacagaagtgctactatt

SEQ ID NO: 529410 - DNA, 19 bp, Mus musculus
  siRNA target sequence for Fcer2a (NM_013517.1,952-970).
gggagccctgtgggttata

SEQ ID NO: 529411 - DNA, 19 bp, Mus musculus
  siRNA target sequence for Fcer2a (NM_013517.1,1098-1116).
ggcaacatgtgagatatct

SEQ ID NO: 529412 - DNA, 19 bp, Mus musculus
  siRNA target sequence for Fcer2a (NM_013517.1,1145-1163).
ggcccaccccaaaaagtga

SEQ ID NO: 529413 - DNA, 19 bp, Mus musculus
  siRNA target sequence for Lgals3 (NM_010705.1,50-68).
cagcttttcgcttaacgat

SEQ ID NO: 529414 - DNA, 19 bp, Mus musculus
  siRNA target sequence for Lgals3 (NM_010705.1,89-107).
cccaaaccctcaaggatat

SEQ ID NO: 529415 - DNA, 19 bp, Mus musculus
  siRNA target sequence for Lgals3 (NM_010705.1,143-161).
ctacccaggggctgcttat

SEQ ID NO: 529416 - DNA, 19 bp, Mus musculus
  siRNA target sequence for Lgals3 (NM_010705.1,468-486).
cgcatgctgatcacaatca

SEQ ID NO: 529417 - DNA, 19 bp, Mus musculus
  siRNA target sequence for Lgals3 (NM_010705.1,503-521).
caacgcaaacaggattgtt

SEQ ID NO: 529418 - DNA, 19 bp, Mus musculus
  siRNA target sequence for Lgals3 (NM_010705.1,506-524).
cgcaaacaggattgttcta

SEQ ID NO: 529419 - DNA, 19 bp, Mus musculus
  siRNA target sequence for Lgals3 (NM_010705.1,730-748).
ctcacctactgcagtacaa

SEQ ID NO: 529420 - DNA, 19 bp, Mus musculus
  siRNA target sequence for Lgals3 (NM_010705.1,785-803).
ggggatcagtggtgacata

SEQ ID NO: 529421 - DNA, 19 bp, Mus musculus
  siRNA target sequence for Lgals3 (NM_010705.1,816-834).
gctaaccacgccatgatct

SEQ ID NO: 529422 - DNA, 19 bp, Mus musculus
  siRNA target sequence for Ms4a2 (NM_013516.1,139-157).
gcagacatggcggacattt

SEQ ID NO: 529423 - DNA, 19 bp, Mus musculus
  siRNA target sequence for Ms4a2 (NM_013516.1,147-165).
ggcggacatttttgaagaa

SEQ ID NO: 529424 - DNA, 19 bp, Mus musculus
  siRNA target sequence for Ms4a2 (NM_013516.1,208-226).
gatatgcctttgttttgga

SEQ ID NO: 529425 - DNA, 19 bp, Mus musculus
  siRNA target sequence for Ms4a2 (NM_013516.1,235-253).
ctgctccgtactctatgtt

SEQ ID NO: 529426 - DNA, 19 bp, Mus musculus
  siRNA target sequence for Ms4a2 (NM_013516.1,240-258).
ccgtactctatgtttcaga

SEQ ID NO: 529427 - DNA, 19 bp, Mus musculus
  siRNA target sequence for Ms4a2 (NM_013516.1,247-265).
ctatgtttcagactttgat

SEQ ID NO: 529428 - DNA, 19 bp, Mus musculus
  siRNA target sequence for Ms4a2 (NM_013516.1,308-326).
ggtgcagtgctgtttgttt

SEQ ID NO: 529429 - DNA, 19 bp, Mus musculus
  siRNA target sequence for Ms4a2 (NM_013516.1,309-327).
gtgcagtgctgtttgtttt

SEQ ID NO: 529430 - DNA, 19 bp, Mus musculus
  siRNA target sequence for Ms4a2 (NM_013516.1,342-360).
caattatctccgaaagaaa

SEQ ID NO: 529431 - DNA, 19 bp, Mus musculus
  siRNA target sequence for Ms4a2 (NM_013516.1,349-367).
ctccgaaagaaaaaacaca

SEQ ID NO: 529432 - DNA, 19 bp, Mus musculus
  siRNA target sequence for Ms4a2 (NM_013516.1,387-405).
gcctgggagcaaacattgt

SEQ ID NO: 529433 - DNA, 19 bp, Mus musculus
  siRNA target sequence for Ms4a2 (NM_013516.1,389-407).
ctgggagcaaacattgtca

SEQ ID NO: 529434 - DNA, 19 bp, Mus musculus
  siRNA target sequence for Ms4a2 (NM_013516.1,446-464).
ctcaatctgaccaataact

SEQ ID NO: 529435 - DNA, 19 bp, Mus musculus
  siRNA target sequence for Ms4a2 (NM_013516.1,456-474).
ccaataacttcgcttatat

SEQ ID NO: 529436 - DNA, 19 bp, Mus musculus
  siRNA target sequence for Ms4a2 (NM_013516.1,528-546).
ccacagaactggtgttgat

SEQ ID NO: 529437 - DNA, 19 bp, Mus musculus
  siRNA target sequence for Ms4a2 (NM_013516.1,531-549).
cagaactggtgttgatgat

SEQ ID NO: 529438 - DNA, 19 bp, Mus musculus
  siRNA target sequence for Ms4a2 (NM_013516.1,579-597).
gtgctgtgttgttcactat

SEQ ID NO: 529439 - DNA, 19 bp, Mus musculus
  siRNA target sequence for Ms4a2 (NM_013516.1,581-599).
gctgtgttgttcactatct

SEQ ID NO: 529440 - DNA, 19 bp, Mus musculus
  siRNA target sequence for Ms4a2 (NM_013516.1,589-607).
gttcactatctataggatt

SEQ ID NO: 529441 - DNA, 19 bp, Mus musculus
  siRNA target sequence for Ms4a2 (NM_013516.1,603-621).
ggattggacaagagttaga

SEQ ID NO: 529442 - DNA, 19 bp, Mus musculus
  siRNA target sequence for Ms4a2 (NM_013516.1,604-622).
gattggacaagagttagaa

SEQ ID NO: 529443 - DNA, 19 bp, Mus musculus
  siRNA target sequence for Ms4a2 (NM_013516.1,634-652).
cccagatgatcgtctttat

SEQ ID NO: 529444 - DNA, 19 bp, Mus musculus
  siRNA target sequence for Ms4a2 (NM_013516.1,667-685).
gtattcaccaatttacagt

SEQ ID NO: 529445 - DNA, 19 bp, Mus musculus
  siRNA target sequence for Fcgr1 (NM_010186.2,33-51).
gacatgtggcttctaacaa

SEQ ID NO: 529446 - DNA, 19 bp, Mus musculus
  siRNA target sequence for Fcgr1 (NM_010186.2,45-63).
ctaacaactctgctacttt

SEQ ID NO: 529447 - DNA, 19 bp, Mus musculus
  siRNA target sequence for Fcgr1 (NM_010186.2,74-92).
cggtggggaagtggttaat

SEQ ID NO: 529448 - DNA, 19 bp, Mus musculus
  siRNA target sequence for Fcgr1 (NM_010186.2,119-137).
gcctccatgggtcagtatt

SEQ ID NO: 529449 - DNA, 19 bp, Mus musculus
  siRNA target sequence for Fcgr1 (NM_010186.2,120-138).
cctccatgggtcagtattt

SEQ ID NO: 529450 - DNA, 19 bp, Mus musculus
  siRNA target sequence for Fcgr1 (NM_010186.2,121-139).
ctccatgggtcagtatttt

SEQ ID NO: 529451 - DNA, 19 bp, Mus musculus
  siRNA target sequence for Fcgr1 (NM_010186.2,124-142).
catgggtcagtattttcca

SEQ ID NO: 529452 - DNA, 19 bp, Mus musculus
  siRNA target sequence for Fcgr1 (NM_010186.2,147-165).
gaaaatgtcactttatggt

SEQ ID NO: 529453 - DNA, 19 bp, Mus musculus
  siRNA target sequence for Fcgr1 (NM_010186.2,193-211).
gttccacacaatggtttat

SEQ ID NO: 529454 - DNA, 19 bp, Mus musculus
  siRNA target sequence for Fcgr1 (NM_010186.2,230-248).
gatctccacgcctagttat

SEQ ID NO: 529455 - DNA, 19 bp, Mus musculus
  siRNA target sequence for Fcgr1 (NM_010186.2,235-253).
ccacgcctagttatagcat

SEQ ID NO: 529456 - DNA, 19 bp, Mus musculus
  siRNA target sequence for Fcgr1 (NM_010186.2,281-299).
cgaatacaggtgtcagata

SEQ ID NO: 529457 - DNA, 19 bp, Mus musculus
  siRNA target sequence for Fcgr1 (NM_010186.2,329-347).
gttgcaaatccacaatgat

SEQ ID NO: 529458 - DNA, 19 bp, Mus musculus
  siRNA target sequence for Fcgr1 (NM_010186.2,407-425).
gtgtcacggatggaagaat

SEQ ID NO: 529459 - DNA, 19 bp, Mus musculus
  siRNA target sequence for Fcgr1 (NM_010186.2,487-505).
cggaggtcgccattctgaa

SEQ ID NO: 529460 - DNA, 19 bp, Mus musculus
  siRNA target sequence for Fcgr1 (NM_010186.2,488-506).
ggaggtcgccattctgaaa

SEQ ID NO: 529461 - DNA, 19 bp, Mus musculus
  siRNA target sequence for Fcgr1 (NM_010186.2,489-507).
gaggtcgccattctgaaaa

SEQ ID NO: 529462 - DNA, 19 bp, Mus musculus
  siRNA target sequence for Fcgr1 (NM_010186.2,492-510).
gtcgccattctgaaaacca

SEQ ID NO: 529463 - DNA, 19 bp, Mus musculus
  siRNA target sequence for Fcgr1 (NM_010186.2,663-681).
ctgaactgtgagacgaatt

SEQ ID NO: 529464 - DNA, 19 bp, Mus musculus
  siRNA target sequence for Fcgr1 (NM_010186.2,741-759).
ctggagtacaggaacacat

SEQ ID NO: 529465 - DNA, 19 bp, Mus musculus
  siRNA target sequence for Fcgr1 (NM_010186.2,792-810).
gaagatgctggattctact

SEQ ID NO: 529466 - DNA, 19 bp, Mus musculus
  siRNA target sequence for Fcgr1 (NM_010186.2,930-948).
gtgggaataatgttttcgt

SEQ ID NO: 529467 - DNA, 19 bp, Mus musculus
  siRNA target sequence for Fcgr1 (NM_010186.2,946-964).
cgttgaacacggttctcta

SEQ ID NO: 529468 - DNA, 19 bp, Mus musculus
  siRNA target sequence for Fcgr1 (NM_010186.2,947-965).
gttgaacacggttctctat

SEQ ID NO: 529469 - DNA, 19 bp, Mus musculus
  siRNA target sequence for Fcgr1 (NM_010186.2,1063-1081).
gaagcgatggcgtgtatga

SEQ ID NO: 529470 - DNA, 19 bp, Mus musculus
  siRNA target sequence for Fcgr1 (NM_010186.2,1067-1085).
cgatggcgtgtatgaagaa

SEQ ID NO: 529471 - DNA, 19 bp, Mus musculus
  siRNA target sequence for Fcgr1 (NM_010186.2,1071-1089).
ggcgtgtatgaagaagtaa

SEQ ID NO: 529472 - DNA, 19 bp, Mus musculus
  siRNA target sequence for Fcgr1 (NM_010186.2,1073-1091).
cgtgtatgaagaagtaaca

SEQ ID NO: 529473 - DNA, 19 bp, Mus musculus
  siRNA target sequence for Fcgr1 (NM_010186.2,1203-1221).
gcacaaacttcccaaagtt

SEQ ID NO: 529474 - DNA, 19 bp, Mus musculus
  siRNA target sequence for Fcgr2b (NM_010187.1,85-103).
gtgttctcacggactttgt

SEQ ID NO: 529475 - DNA, 19 bp, Mus musculus
  siRNA target sequence for Fcgr2b (NM_010187.1,95-113).
ggactttgtgccatatgct

SEQ ID NO: 529476 - DNA, 19 bp, Mus musculus
  siRNA target sequence for Fcgr2b (NM_010187.1,96-114).
gactttgtgccatatgcta

SEQ ID NO: 529477 - DNA, 19 bp, Mus musculus
  siRNA target sequence for Fcgr2b (NM_010187.1,117-135).
gtggacagccgtgctaaat

SEQ ID NO: 529478 - DNA, 19 bp, Mus musculus
  siRNA target sequence for Fcgr2b (NM_010187.1,119-137).
ggacagccgtgctaaatct

SEQ ID NO: 529479 - DNA, 19 bp, Mus musculus
  siRNA target sequence for Fcgr2b (NM_010187.1,120-138).
gacagccgtgctaaatctt

SEQ ID NO: 529480 - DNA, 19 bp, Mus musculus
  siRNA target sequence for Fcgr2b (NM_010187.1,727-745).
gtcgcagccattgttatta

SEQ ID NO: 529481 - DNA, 19 bp, Mus musculus
  siRNA target sequence for Fcgr2b (NM_010187.1,821-839).
ctgaggctgagaatacgat

SEQ ID NO: 529482 - DNA, 19 bp, Mus musculus
  siRNA target sequence for Fcgrt (NM_010189.1,46-64).
gggccctcagcctcttgtt

SEQ ID NO: 529483 - DNA, 19 bp, Mus musculus
  siRNA target sequence for Fcgrt (NM_010189.1,189-207).
cagtatctgacctacaaca

SEQ ID NO: 529484 - DNA, 19 bp, Mus musculus
  siRNA target sequence for Fcgrt (NM_010189.1,384-402).
gaactggcctcggataatt

SEQ ID NO: 529485 - DNA, 19 bp, Mus musculus
  siRNA target sequence for Fcgrt (NM_010189.1,459-477).
ccaagaatcggcaattgga

SEQ ID NO: 529486 - DNA, 19 bp, Mus musculus
  siRNA target sequence for Fcgrt (NM_010189.1,487-505).
ggcctgagacggaaatcgt

SEQ ID NO: 529487 - DNA, 19 bp, Mus musculus
  siRNA target sequence for Fcgrt (NM_010189.1,488-506).
gcctgagacggaaatcgtt

SEQ ID NO: 529488 - DNA, 19 bp, Mus musculus
  siRNA target sequence for Fcgrt (NM_010189.1,496-514).
cggaaatcgttgctaatct

SEQ ID NO: 529489 - DNA, 19 bp, Mus musculus
  siRNA target sequence for Fcgrt (NM_010189.1,498-516).
gaaatcgttgctaatctgt

SEQ ID NO: 529490 - DNA, 19 bp, Mus musculus
  siRNA target sequence for Fcgrt (NM_010189.1,551-569).
cgagttcctgctaaactct

SEQ ID NO: 529491 - DNA, 19 bp, Mus musculus
  siRNA target sequence for Fcgrt (NM_010189.1,552-570).
gagttcctgctaaactctt

SEQ ID NO: 529492 - DNA, 19 bp, Mus musculus
  siRNA target sequence for Fcgrt (NM_010189.1,826-844).
gtggagatgagcaccatta

SEQ ID NO: 529493 - DNA, 19 bp, Mus musculus
  siRNA target sequence for Fcgrt (NM_010189.1,829-847).
gagatgagcaccattatca

SEQ ID NO: 529494 - DNA, 19 bp, Mus musculus
  siRNA target sequence for Fcgrt (NM_010189.1,884-902).
cactgtggacctagattca

SEQ ID NO: 529495 - DNA, 19 bp, Mus musculus
  siRNA target sequence for Fcgrt (NM_010189.1,930-948).
ggaatcgttcttggtttat

SEQ ID NO: 529496 - DNA, 19 bp, Mus musculus
  siRNA target sequence for Fcgrt (NM_010189.1,931-949).
gaatcgttcttggtttatt

SEQ ID NO: 529497 - DNA, 19 bp, Mus musculus
  siRNA target sequence for Hps4 (NM_138646.1,90-108).
gcagcgtggtggaactact

SEQ ID NO: 529498 - DNA, 19 bp, Mus musculus
  siRNA target sequence for Hps4 (NM_138646.1,91-109).
cagcgtggtggaactactt

SEQ ID NO: 529499 - DNA, 19 bp, Mus musculus
  siRNA target sequence for Hps4 (NM_138646.1,93-111).
gcgtggtggaactacttct

SEQ ID NO: 529500 - DNA, 19 bp, Mus musculus
  siRNA target sequence for Hps4 (NM_138646.1,283-301).
gtatgcggaacctcaagtt

SEQ ID NO: 529501 - DNA, 19 bp, Mus musculus
  siRNA target sequence for Hps4 (NM_138646.1,381-399).
ctggatcagctcattggat

SEQ ID NO: 529502 - DNA, 19 bp, Mus musculus
  siRNA target sequence for Hps4 (NM_138646.1,383-401).
ggatcagctcattggattt

SEQ ID NO: 529503 - DNA, 19 bp, Mus musculus
  siRNA target sequence for Hps4 (NM_138646.1,384-402).
gatcagctcattggatttt

SEQ ID NO: 529504 - DNA, 19 bp, Mus musculus
  siRNA target sequence for Hps4 (NM_138646.1,632-650).
ctgcatcctctataaagga

SEQ ID NO: 529505 - DNA, 19 bp, Mus musculus
  siRNA target sequence for Hps4 (NM_138646.1,638-656).
cctctataaaggactgatt

SEQ ID NO: 529506 - DNA, 19 bp, Mus musculus
  siRNA target sequence for Hps4 (NM_138646.1,839-857).
cccagtagagcatgaaact

SEQ ID NO: 529507 - DNA, 19 bp, Mus musculus
  siRNA target sequence for Hps4 (NM_138646.1,1747-1765).
catacaacttccttcatta

SEQ ID NO: 529508 - DNA, 19 bp, Mus musculus
  siRNA target sequence for S100b (NM_009115.1,92-110).
cagaactgaaggagcttat

SEQ ID NO: 529509 - DNA, 19 bp, Mus musculus
  siRNA target sequence for S100b (NM_009115.1,245-263).
ccacggcctgccatgagtt

SEQ ID NO: 529510 - DNA, 19 bp, Mus musculus
  siRNA target sequence for S100b (NM_009115.1,248-266).
cggcctgccatgagttctt

SEQ ID NO: 529511 - DNA, 19 bp, Mus musculus
  siRNA target sequence for S100b (NM_009115.1,252-270).
ctgccatgagttctttgaa

SEQ ID NO: 529512 - DNA, 19 bp, Mus musculus
  siRNA target sequence for Cdh1 (NM_009864.1,384-402).
cagtgaagcggcatctaaa

SEQ ID NO: 529513 - DNA, 19 bp, Mus musculus
  siRNA target sequence for Cdh1 (NM_009864.1,518-536).
cgcgaccctgcctctgaat

SEQ ID NO: 529514 - DNA, 19 bp, Mus musculus
  siRNA target sequence for Cdh1 (NM_009864.1,613-631).
catcagctgccccgaaaat

SEQ ID NO: 529515 - DNA, 19 bp, Mus musculus
  siRNA target sequence for Cdh1 (NM_009864.1,616-634).
cagctgccccgaaaatgaa

SEQ ID NO: 529516 - DNA, 19 bp, Mus musculus
  siRNA target sequence for Cdh1 (NM_009864.1,618-636).
gctgccccgaaaatgaaaa

SEQ ID NO: 529517 - DNA, 19 bp, Mus musculus
  siRNA target sequence for Cdh1 (NM_009864.1,712-730).
cggccaaggagctgacaaa

SEQ ID NO: 529518 - DNA, 19 bp, Mus musculus
  siRNA target sequence for Cdh1 (NM_009864.1,734-752).
cccgttggcgttttcatca

SEQ ID NO: 529519 - DNA, 19 bp, Mus musculus
  siRNA target sequence for Cdh1 (NM_009864.1,735-753).
ccgttggcgttttcatcat

SEQ ID NO: 529520 - DNA, 19 bp, Mus musculus
  siRNA target sequence for Cdh1 (NM_009864.1,814-832).
gtacatcctctattctcat

SEQ ID NO: 529521 - DNA, 19 bp, Mus musculus
  siRNA target sequence for Cdh1 (NM_009864.1,885-903).
cagtgacagatcagaatga

SEQ ID NO: 529522 - DNA, 19 bp, Mus musculus
  siRNA target sequence for Cdh1 (NM_009864.1,963-981).
caggaacctccgtgatgaa

SEQ ID NO: 529523 - DNA, 19 bp, Mus musculus
  siRNA target sequence for Cdh1 (NM_009864.1,1128-1146).
ggctggaccgagagagtta

SEQ ID NO: 529524 - DNA, 19 bp, Mus musculus
  siRNA target sequence for Cdh1 (NM_009864.1,1139-1157).
gagagttaccctacataca

SEQ ID NO: 529525 - DNA, 19 bp, Mus musculus
  siRNA target sequence for Cdh1 (NM_009864.1,1141-1159).
gagttaccctacatacact

SEQ ID NO: 529526 - DNA, 19 bp, Mus musculus
  siRNA target sequence for Cdh1 (NM_009864.1,1217-1235).
gtgatcactgtcaaggata

SEQ ID NO: 529527 - DNA, 19 bp, Mus musculus
  siRNA target sequence for Cdh1 (NM_009864.1,1219-1237).
gatcactgtcaaggatatt

SEQ ID NO: 529528 - DNA, 19 bp, Mus musculus
  siRNA target sequence for Cdh1 (NM_009864.1,1276-1294).
gggtcaagtgcctgagaat

SEQ ID NO: 529529 - DNA, 19 bp, Mus musculus
  siRNA target sequence for Cdh1 (NM_009864.1,1306-1324).
ccggatcgccacactcaaa

SEQ ID NO: 529530 - DNA, 19 bp, Mus musculus
  siRNA target sequence for Cdh1 (NM_009864.1,1365-1383).
ctgtgtacaccgtagtcaa

SEQ ID NO: 529531 - DNA, 19 bp, Mus musculus
  siRNA target sequence for Cdh1 (NM_009864.1,1422-1440).
cgaccaatgatggcatttt

SEQ ID NO: 529532 - DNA, 19 bp, Mus musculus
  siRNA target sequence for Cdh1 (NM_009864.1,1561-1579).
cgtggtagacgtgaatgaa

SEQ ID NO: 529533 - DNA, 19 bp, Mus musculus
  siRNA target sequence for Cdh1 (NM_009864.1,1612-1630).
cgaagtgcccgaagacttt

SEQ ID NO: 529534 - DNA, 19 bp, Mus musculus
  siRNA target sequence for Cdh1 (NM_009864.1,1631-1649).
ggtgtgggtcaggaaatca

SEQ ID NO: 529535 - DNA, 19 bp, Mus musculus
  siRNA target sequence for Cdh1 (NM_009864.1,1638-1656).
gtcaggaaatcacatctta

SEQ ID NO: 529536 - DNA, 19 bp, Mus musculus
  siRNA target sequence for Cdh1 (NM_009864.1,1677-1695).
cgttcatggatcagaagat

SEQ ID NO: 529537 - DNA, 19 bp, Mus musculus
  siRNA target sequence for Cdh1 (NM_009864.1,1812-1830).
catatgtagctctcatcat

SEQ ID NO: 529538 - DNA, 19 bp, Mus musculus
  siRNA target sequence for Cdh1 (NM_009864.1,1825-1843).
catcatcgccacagatgat

SEQ ID NO: 529539 - DNA, 19 bp, Mus musculus
  siRNA target sequence for Cdh1 (NM_009864.1,1996-2014).
caacacgtccccctttact

SEQ ID NO: 529540 - DNA, 19 bp, Mus musculus
  siRNA target sequence for Cdh1 (NM_009864.1,2039-2057).
gtcaactggaccattgagt

SEQ ID NO: 529541 - DNA, 19 bp, Mus musculus
  siRNA target sequence for Cdh1 (NM_009864.1,2046-2064).
ggaccattgagtataatga

SEQ ID NO: 529542 - DNA, 19 bp, Mus musculus
  siRNA target sequence for Cdh1 (NM_009864.1,2140-2158).
cgcggataaccagaacaaa

SEQ ID NO: 529543 - DNA, 19 bp, Mus musculus
  siRNA target sequence for Cdh1 (NM_009864.1,2142-2160).
cggataaccagaacaaaga

SEQ ID NO: 529544 - DNA, 19 bp, Mus musculus
  siRNA target sequence for Cdh1 (NM_009864.1,2198-2216).
gaagggacggtcaacaact

SEQ ID NO: 529545 - DNA, 19 bp, Mus musculus
  siRNA target sequence for Cdh1 (NM_009864.1,2331-2349).
ggagaacggtggtcaaaga

SEQ ID NO: 529546 - DNA, 19 bp, Mus musculus
  siRNA target sequence for Cdh1 (NM_009864.1,2372-2390).
gatacccgggacaatgtgt

SEQ ID NO: 529547 - DNA, 19 bp, Mus musculus
  siRNA target sequence for Cdh1 (NM_009864.1,2378-2396).
cgggacaatgtgtattact

SEQ ID NO: 529548 - DNA, 19 bp, Mus musculus
  siRNA target sequence for Cdh1 (NM_009864.1,2379-2397).
gggacaatgtgtattacta

SEQ ID NO: 529549 - DNA, 19 bp, Mus musculus
  siRNA target sequence for Cdh1 (NM_009864.1,2389-2407).
gtattactatgatgaagaa

SEQ ID NO: 529550 - DNA, 19 bp, Mus musculus
  siRNA target sequence for Cdh1 (NM_009864.1,2472-2490).
cggaagtgactcgaaatga

SEQ ID NO: 529551 - DNA, 19 bp, Mus musculus
  siRNA target sequence for Cdh1 (NM_009864.1,2473-2491).
ggaagtgactcgaaatgat

SEQ ID NO: 529552 - DNA, 19 bp, Mus musculus
  siRNA target sequence for Cdh1 (NM_009864.1,2534-2552).
cctgccaatcctgatgaaa

SEQ ID NO: 529553 - DNA, 19 bp, Mus musculus
  siRNA target sequence for Cdh1 (NM_009864.1,2555-2573).
ggaaacttcatcgatgaaa

SEQ ID NO: 529554 - DNA, 19 bp, Mus musculus
  siRNA target sequence for Cdh1 (NM_009864.1,2696-2714).
caggaccaggactacgatt

SEQ ID NO: 529555 - DNA, 19 bp, Mus musculus
  siRNA target sequence for Cdh1 (NM_009864.1,2698-2716).
ggaccaggactacgattat

SEQ ID NO: 529556 - DNA, 19 bp, Mus musculus
  siRNA target sequence for Cdh1 (NM_009864.1,2702-2720).
caggactacgattatctga

SEQ ID NO: 529557 - DNA, 19 bp, Mus musculus
  siRNA target sequence for Prkcabp (NM_008837.1,8-26).
cagacttagactatgacat

SEQ ID NO: 529558 - DNA, 19 bp, Mus musculus
  siRNA target sequence for Prkcabp (NM_008837.1,22-40).
gacatcgaagaggataaat

SEQ ID NO: 529559 - DNA, 19 bp, Mus musculus
  siRNA target sequence for Prkcabp (NM_008837.1,27-45).
cgaagaggataaattagga

SEQ ID NO: 529560 - DNA, 19 bp, Mus musculus
  siRNA target sequence for Prkcabp (NM_008837.1,131-149).
gtccttgtctctatatcgt

SEQ ID NO: 529561 - DNA, 19 bp, Mus musculus
  siRNA target sequence for Prkcabp (NM_008837.1,141-159).
ctatatcgtccaggtattt

SEQ ID NO: 529562 - DNA, 19 bp, Mus musculus
  siRNA target sequence for Prkcabp (NM_008837.1,148-166).
gtccaggtatttgataaca

SEQ ID NO: 529563 - DNA, 19 bp, Mus musculus
  siRNA target sequence for Prkcabp (NM_008837.1,214-232).
ggggtcaatggcaagtcaa

SEQ ID NO: 529564 - DNA, 19 bp, Mus musculus
  siRNA target sequence for Prkcabp (NM_008837.1,289-307).
gtgaccatccattacaaca

SEQ ID NO: 529565 - DNA, 19 bp, Mus musculus
  siRNA target sequence for Prkcabp (NM_008837.1,332-350).
gcatgtccctggacattgt

SEQ ID NO: 529566 - DNA, 19 bp, Mus musculus
  siRNA target sequence for Prkcabp (NM_008837.1,423-441).
cgccatcctgtgtaacgat

SEQ ID NO: 529567 - DNA, 19 bp, Mus musculus
  siRNA target sequence for Prkcabp (NM_008837.1,434-452).
gtaacgatggcttggtaaa

SEQ ID NO: 529568 - DNA, 19 bp, Mus musculus
  siRNA target sequence for Prkcabp (NM_008837.1,473-491).
gcactgctgagctgtacaa

SEQ ID NO: 529569 - DNA, 19 bp, Mus musculus
  siRNA target sequence for Prkcabp (NM_008837.1,498-516).
gacggaacacaccaagaat

SEQ ID NO: 529570 - DNA, 19 bp, Mus musculus
  siRNA target sequence for Prkcabp (NM_008837.1,500-518).
cggaacacaccaagaatct

SEQ ID NO: 529571 - DNA, 19 bp, Mus musculus
  siRNA target sequence for Prkcabp (NM_008837.1,611-629).
gtgaagcatttgtgaagtt

SEQ ID NO: 529572 - DNA, 19 bp, Mus musculus
  siRNA target sequence for Prkcabp (NM_008837.1,638-656).
cacaccgcagcattgagaa

SEQ ID NO: 529573 - DNA, 19 bp, Mus musculus
  siRNA target sequence for Prkcabp (NM_008837.1,660-678).
cggcattcggctactgaaa

SEQ ID NO: 529574 - DNA, 19 bp, Mus musculus
  siRNA target sequence for Prkcabp (NM_008837.1,661-679).
ggcattcggctactgaaaa

SEQ ID NO: 529575 - DNA, 19 bp, Mus musculus
  siRNA target sequence for Prkcabp (NM_008837.1,703-721).
ctgaacacgtacctcaata

SEQ ID NO: 529576 - DNA, 19 bp, Mus musculus
  siRNA target sequence for Prkcabp (NM_008837.1,705-723).
gaacacgtacctcaataaa

SEQ ID NO: 529577 - DNA, 19 bp, Mus musculus
  siRNA target sequence for Prkcabp (NM_008837.1,737-755).
cacgcctcaccatcaagaa

SEQ ID NO: 529578 - DNA, 19 bp, Mus musculus
  siRNA target sequence for Prkcabp (NM_008837.1,924-942).
ctcccagatgcgcaaagat

SEQ ID NO: 529579 - DNA, 19 bp, Mus musculus
  siRNA target sequence for Prkcabp (NM_008837.1,926-944).
cccagatgcgcaaagatgt

SEQ ID NO: 529580 - DNA, 19 bp, Mus musculus
  siRNA target sequence for Prkcabp (NM_008837.1,927-945).
ccagatgcgcaaagatgtt

SEQ ID NO: 529581 - DNA, 19 bp, Mus musculus
  siRNA target sequence for Prkcabp (NM_008837.1,1019-1037).
ccatgtccaagtactataa

SEQ ID NO: 529582 - DNA, 19 bp, Mus musculus
  siRNA target sequence for Pclo (NM_011995.2,623-641).
cttagcaaaagcagaacta

SEQ ID NO: 529583 - DNA, 19 bp, Mus musculus
  siRNA target sequence for Pclo (NM_011995.2,708-726).
ccaagtccagaactgattt

SEQ ID NO: 529584 - DNA, 19 bp, Mus musculus
  siRNA target sequence for Pclo (NM_011995.2,734-752).
gaatacaagtctagtatga

SEQ ID NO: 529585 - DNA, 19 bp, Mus musculus
  siRNA target sequence for Pclo (NM_011995.2,791-809).
gtctcctctgttgtaaata

SEQ ID NO: 529586 - DNA, 19 bp, Mus musculus
  siRNA target sequence for Pclo (NM_011995.2,817-835).
cccttttgatttgatatca

SEQ ID NO: 529587 - DNA, 19 bp, Mus musculus
  siRNA target sequence for Pclo (NM_011995.2,845-863).
gcagtccaggaggaaacta

SEQ ID NO: 529588 - DNA, 19 bp, Mus musculus
  siRNA target sequence for Pclo (NM_011995.2,898-916).
gaaatcggaaggaatcaca

SEQ ID NO: 529589 - DNA, 19 bp, Mus musculus
  siRNA target sequence for Pclo (NM_011995.2,932-950).
caaccatcacccaagttga

SEQ ID NO: 529590 - DNA, 19 bp, Mus musculus
  siRNA target sequence for Pclo (NM_011995.2,942-960).
ccaagttgatccctaaaca

SEQ ID NO: 529591 - DNA, 19 bp, Mus musculus
  siRNA target sequence for Pclo (NM_011995.2,1048-1066).
ccctggcacagcaaaacct

SEQ ID NO: 529592 - DNA, 19 bp, Mus musculus
  siRNA target sequence for Pclo (NM_011995.2,1049-1067).
cctggcacagcaaaacctt

SEQ ID NO: 529593 - DNA, 19 bp, Mus musculus
  siRNA target sequence for Pclo (NM_011995.2,1238-1256).
caacaggctggcttagaga

SEQ ID NO: 529594 - DNA, 19 bp, Mus musculus
  siRNA target sequence for Pclo (NM_011995.2,1406-1424).
gtacctgggcctacaaaaa

SEQ ID NO: 529595 - DNA, 19 bp, Mus musculus
  siRNA target sequence for Pclo (NM_011995.2,1703-1721).
caacaaccttctaaatcaa

SEQ ID NO: 529596 - DNA, 19 bp, Mus musculus
  siRNA target sequence for Pclo (NM_011995.2,1750-1768).
gcaagcaccaccaacttct

SEQ ID NO: 529597 - DNA, 19 bp, Mus musculus
  siRNA target sequence for Pclo (NM_011995.2,1782-1800).
cagcacaaggcctctctaa

SEQ ID NO: 529598 - DNA, 19 bp, Mus musculus
  siRNA target sequence for Pclo (NM_011995.2,1850-1868).
gaaaaggccaattttaaca

SEQ ID NO: 529599 - DNA, 19 bp, Mus musculus
  siRNA target sequence for Pclo (NM_011995.2,1923-1941).
ctcacttaactgagatcaa

SEQ ID NO: 529600 - DNA, 19 bp, Mus musculus
  siRNA target sequence for Pclo (NM_011995.2,1939-1957).
caaagagtggctctgttta

SEQ ID NO: 529601 - DNA, 19 bp, Mus musculus
  siRNA target sequence for Pclo (NM_011995.2,2148-2166).
caccgccactggtgaaaca

SEQ ID NO: 529602 - DNA, 19 bp, Mus musculus
  siRNA target sequence for Pclo (NM_011995.2,2283-2301).
cccctgttgcagatgttga

SEQ ID NO: 529603 - DNA, 19 bp, Mus musculus
  siRNA target sequence for Pclo (NM_011995.2,2442-2460).
ccaaaacttcacagagttt

SEQ ID NO: 529604 - DNA, 19 bp, Mus musculus
  siRNA target sequence for Pclo (NM_011995.2,2463-2481).
caccaacaggagatacaat

SEQ ID NO: 529605 - DNA, 19 bp, Mus musculus
  siRNA target sequence for Pclo (NM_011995.2,2465-2483).
ccaacaggagatacaatta

SEQ ID NO: 529606 - DNA, 19 bp, Mus musculus
  siRNA target sequence for Pclo (NM_011995.2,2512-2530).
gcctgcatcagactcaaaa

SEQ ID NO: 529607 - DNA, 19 bp, Mus musculus
  siRNA target sequence for Pclo (NM_011995.2,2514-2532).
ctgcatcagactcaaaaat

SEQ ID NO: 529608 - DNA, 19 bp, Mus musculus
  siRNA target sequence for Pclo (NM_011995.2,2517-2535).
catcagactcaaaaattgt

SEQ ID NO: 529609 - DNA, 19 bp, Mus musculus
  siRNA target sequence for Pclo (NM_011995.2,2614-2632).
gacccctaaaccagataca

SEQ ID NO: 529610 - DNA, 19 bp, Mus musculus
  siRNA target sequence for Pclo (NM_011995.2,2616-2634).
cccctaaaccagatacaaa

SEQ ID NO: 529611 - DNA, 19 bp, Mus musculus
  siRNA target sequence for Pclo (NM_011995.2,2764-2782).
cgctgatgcccccaaatca

SEQ ID NO: 529612 - DNA, 19 bp, Mus musculus
  siRNA target sequence for Pclo (NM_011995.2,2805-2823).
ctgtgacagggaagctatt

SEQ ID NO: 529613 - DNA, 19 bp, Mus musculus
  siRNA target sequence for Pclo (NM_011995.2,2827-2845).
gttcggagcatccatcttt

SEQ ID NO: 529614 - DNA, 19 bp, Mus musculus
  siRNA target sequence for Pclo (NM_011995.2,2847-2865).
gccaagcatcaaacttaat

SEQ ID NO: 529615 - DNA, 19 bp, Mus musculus
  siRNA target sequence for Pclo (NM_011995.2,3036-3054).
cggcagctgaaaacttaga

SEQ ID NO: 529616 - DNA, 19 bp, Mus musculus
  siRNA target sequence for Pclo (NM_011995.2,3264-3282).
gcacagaatgcaagaatca

SEQ ID NO: 529617 - DNA, 19 bp, Mus musculus
  siRNA target sequence for Pclo (NM_011995.2,3265-3283).
cacagaatgcaagaatcaa

SEQ ID NO: 529618 - DNA, 19 bp, Mus musculus
  siRNA target sequence for Pclo (NM_011995.2,3313-3331).
gccccacctgactgagatt

SEQ ID NO: 529619 - DNA, 19 bp, Mus musculus
  siRNA target sequence for Pclo (NM_011995.2,3375-3393).
caggacaacttggagatat

SEQ ID NO: 529620 - DNA, 19 bp, Mus musculus
  siRNA target sequence for Pclo (NM_011995.2,3479-3497).
gctgcccacgcgaaaggta

SEQ ID NO: 529621 - DNA, 19 bp, Mus musculus
  siRNA target sequence for Pclo (NM_011995.2,3480-3498).
ctgcccacgcgaaaggtaa

SEQ ID NO: 529622 - DNA, 19 bp, Mus musculus
  siRNA target sequence for Pclo (NM_011995.2,3482-3500).
gcccacgcgaaaggtaaaa

SEQ ID NO: 529623 - DNA, 19 bp, Mus musculus
  siRNA target sequence for Pclo (NM_011995.2,3485-3503).
cacgcgaaaggtaaaaaga

SEQ ID NO: 529624 - DNA, 19 bp, Mus musculus
  siRNA target sequence for Pclo (NM_011995.2,3581-3599).
gcggtcgccacagatcaaa

SEQ ID NO: 529625 - DNA, 19 bp, Mus musculus
  siRNA target sequence for Pclo (NM_011995.2,3582-3600).
cggtcgccacagatcaaaa

SEQ ID NO: 529626 - DNA, 19 bp, Mus musculus
  siRNA target sequence for Pclo (NM_011995.2,3586-3604).
cgccacagatcaaaaacta

SEQ ID NO: 529627 - DNA, 19 bp, Mus musculus
  siRNA target sequence for Pclo (NM_011995.2,3617-3635).
gtaaccaaaagcctagttt

SEQ ID NO: 529628 - DNA, 19 bp, Mus musculus
  siRNA target sequence for Pclo (NM_011995.2,3675-3693).
ccctgcctgcagacaaaaa

SEQ ID NO: 529629 - DNA, 19 bp, Mus musculus
  siRNA target sequence for Pclo (NM_011995.2,3767-3785).
cccccagacgcaaaaccat

SEQ ID NO: 529630 - DNA, 19 bp, Mus musculus
  siRNA target sequence for Pclo (NM_011995.2,3805-3823).
gaaacgtgatctacttaaa

SEQ ID NO: 529631 - DNA, 19 bp, Mus musculus
  siRNA target sequence for Pclo (NM_011995.2,4145-4163).
ggggaaatccccagtctta

SEQ ID NO: 529632 - DNA, 19 bp, Mus musculus
  siRNA target sequence for Pclo (NM_011995.2,4146-4164).
gggaaatccccagtcttat

SEQ ID NO: 529633 - DNA, 19 bp, Mus musculus
  siRNA target sequence for Pclo (NM_011995.2,4147-4165).
ggaaatccccagtcttata

SEQ ID NO: 529634 - DNA, 19 bp, Mus musculus
  siRNA target sequence for Pclo (NM_011995.2,4172-4190).
gatgagaaagatttgctaa

SEQ ID NO: 529635 - DNA, 19 bp, Mus musculus
  siRNA target sequence for Pclo (NM_011995.2,4263-4281).
gtacagtactgtccatttt

SEQ ID NO: 529636 - DNA, 19 bp, Mus musculus
  siRNA target sequence for Pclo (NM_011995.2,4266-4284).
cagtactgtccattttgga

SEQ ID NO: 529637 - DNA, 19 bp, Mus musculus
  siRNA target sequence for Pclo (NM_011995.2,4390-4408).
cgaaacacgggatatttct

SEQ ID NO: 529638 - DNA, 19 bp, Mus musculus
  siRNA target sequence for Pclo (NM_011995.2,4391-4409).
gaaacacgggatatttcta

SEQ ID NO: 529639 - DNA, 19 bp, Mus musculus
  siRNA target sequence for Pclo (NM_011995.2,4462-4480).
ggatagcgcacaaggtttt

SEQ ID NO: 529640 - DNA, 19 bp, Mus musculus
  siRNA target sequence for Pclo (NM_011995.2,4534-4552).
gcgaagagcatcctatgat

SEQ ID NO: 529641 - DNA, 19 bp, Mus musculus
  siRNA target sequence for Pclo (NM_011995.2,4535-4553).
cgaagagcatcctatgatt

SEQ ID NO: 529642 - DNA, 19 bp, Mus musculus
  siRNA target sequence for Pclo (NM_011995.2,4545-4563).
cctatgattcggttgaaga

SEQ ID NO: 529643 - DNA, 19 bp, Mus musculus
  siRNA target sequence for Pclo (NM_011995.2,4595-4613).
cgcaggaagcggagaacta

SEQ ID NO: 529644 - DNA, 19 bp, Mus musculus
  siRNA target sequence for Pclo (NM_011995.2,4629-4647).
gcagcgaggagtataagca

SEQ ID NO: 529645 - DNA, 19 bp, Mus musculus
  siRNA target sequence for Pclo (NM_011995.2,4673-4691).
gacgaggacttcattcgaa

SEQ ID NO: 529646 - DNA, 19 bp, Mus musculus
  siRNA target sequence for Pclo (NM_011995.2,4688-4706).
cgaaagcagattatagaga

SEQ ID NO: 529647 - DNA, 19 bp, Mus musculus
  siRNA target sequence for Pclo (NM_011995.2,4689-4707).
gaaagcagattatagagat

SEQ ID NO: 529648 - DNA, 19 bp, Mus musculus
  siRNA target sequence for Pclo (NM_011995.2,4847-4865).
cgtctgactcgaaagagta

SEQ ID NO: 529649 - DNA, 19 bp, Mus musculus
  siRNA target sequence for Pclo (NM_011995.2,4850-4868).
ctgactcgaaagagtagta

SEQ ID NO: 529650 - DNA, 19 bp, Mus musculus
  siRNA target sequence for Pclo (NM_011995.2,4897-4915).
ccattcctggcatgatgaa

SEQ ID NO: 529651 - DNA, 19 bp, Mus musculus
  siRNA target sequence for Pclo (NM_011995.2,4919-4937).
gacgaaacttttgatgaaa

SEQ ID NO: 529652 - DNA, 19 bp, Mus musculus
  siRNA target sequence for Pclo (NM_011995.2,4921-4939).
cgaaacttttgatgaaagt

SEQ ID NO: 529653 - DNA, 19 bp, Mus musculus
  siRNA target sequence for Pclo (NM_011995.2,4975-4993).
gagtgaggaactagttgtt

SEQ ID NO: 529654 - DNA, 19 bp, Mus musculus
  siRNA target sequence for Pclo (NM_011995.2,5003-5021).
ggagggttacgtcgattta

SEQ ID NO: 529655 - DNA, 19 bp, Mus musculus
  siRNA target sequence for Pclo (NM_011995.2,5004-5022).
gagggttacgtcgatttaa

SEQ ID NO: 529656 - DNA, 19 bp, Mus musculus
  siRNA target sequence for Pclo (NM_011995.2,5006-5024).
gggttacgtcgatttaaga

SEQ ID NO: 529657 - DNA, 19 bp, Mus musculus
  siRNA target sequence for Pclo (NM_011995.2,5013-5031).
gtcgatttaagactataga

SEQ ID NO: 529658 - DNA, 19 bp, Mus musculus
  siRNA target sequence for Pclo (NM_011995.2,5217-5235).
cagtatcatcacttgatga

SEQ ID NO: 529659 - DNA, 19 bp, Mus musculus
  siRNA target sequence for Pclo (NM_011995.2,5306-5324).
catggccctcttttaccta

SEQ ID NO: 529660 - DNA, 19 bp, Mus musculus
  siRNA target sequence for Pclo (NM_011995.2,5424-5442).
gttctagtaagaaatcgaa

SEQ ID NO: 529661 - DNA, 19 bp, Mus musculus
  siRNA target sequence for Pclo (NM_011995.2,5525-5543).
gcgtctcccacagaagaat

SEQ ID NO: 529662 - DNA, 19 bp, Mus musculus
  siRNA target sequence for Pclo (NM_011995.2,5526-5544).
cgtctcccacagaagaatt

SEQ ID NO: 529663 - DNA, 19 bp, Mus musculus
  siRNA target sequence for Pclo (NM_011995.2,5570-5588).
ctccataggtcctcttgtt

SEQ ID NO: 529664 - DNA, 19 bp, Mus musculus
  siRNA target sequence for Pclo (NM_011995.2,5577-5595).
ggtcctcttgttctgaata

SEQ ID NO: 529665 - DNA, 19 bp, Mus musculus
  siRNA target sequence for Pclo (NM_011995.2,5596-5614).
ctcgcctagcatagaatca

SEQ ID NO: 529666 - DNA, 19 bp, Mus musculus
  siRNA target sequence for Pclo (NM_011995.2,5630-5648).
gagataagccccgagaaaa

SEQ ID NO: 529667 - DNA, 19 bp, Mus musculus
  siRNA target sequence for Pclo (NM_011995.2,5632-5650).
gataagccccgagaaaata

SEQ ID NO: 529668 - DNA, 19 bp, Mus musculus
  siRNA target sequence for Pclo (NM_011995.2,5637-5655).
gccccgagaaaataataga

SEQ ID NO: 529669 - DNA, 19 bp, Mus musculus
  siRNA target sequence for Pclo (NM_011995.2,5638-5656).
ccccgagaaaataatagaa

SEQ ID NO: 529670 - DNA, 19 bp, Mus musculus
  siRNA target sequence for Pclo (NM_011995.2,5640-5658).
ccgagaaaataatagaagt

SEQ ID NO: 529671 - DNA, 19 bp, Mus musculus
  siRNA target sequence for Pclo (NM_011995.2,5654-5672).
gaagttcaaaaagtttata

SEQ ID NO: 529672 - DNA, 19 bp, Mus musculus
  siRNA target sequence for Pclo (NM_011995.2,5657-5675).
gttcaaaaagtttataaat

SEQ ID NO: 529673 - DNA, 19 bp, Mus musculus
  siRNA target sequence for Pclo (NM_011995.2,5677-5695).
gcccacagctgtgtcttta

SEQ ID NO: 529674 - DNA, 19 bp, Mus musculus
  siRNA target sequence for Pclo (NM_011995.2,5735-5753).
ggtgctcagaaggctttaa

SEQ ID NO: 529675 - DNA, 19 bp, Mus musculus
  siRNA target sequence for Pclo (NM_011995.2,5736-5754).
gtgctcagaaggctttaaa

SEQ ID NO: 529676 - DNA, 19 bp, Mus musculus
  siRNA target sequence for Pclo (NM_011995.2,5828-5846).
cgagacgaagtgtttgaaa

SEQ ID NO: 529677 - DNA, 19 bp, Mus musculus
  siRNA target sequence for Pclo (NM_011995.2,5857-5875).
gtatggtggtatgttaata

SEQ ID NO: 529678 - DNA, 19 bp, Mus musculus
  siRNA target sequence for Pclo (NM_011995.2,5869-5887).
gttaatagaggactacatt

SEQ ID NO: 529679 - DNA, 19 bp, Mus musculus
  siRNA target sequence for Pclo (NM_011995.2,5878-5896).
ggactacatttatgaatct

SEQ ID NO: 529680 - DNA, 19 bp, Mus musculus
  siRNA target sequence for Pclo (NM_011995.2,5884-5902).
catttatgaatctttagta

SEQ ID NO: 529681 - DNA, 19 bp, Mus musculus
  siRNA target sequence for Pclo (NM_011995.2,5895-5913).
ctttagtagaggacacata

SEQ ID NO: 529682 - DNA, 19 bp, Mus musculus
  siRNA target sequence for Pclo (NM_011995.2,5908-5926).
cacatacaatggatcagta

SEQ ID NO: 529683 - DNA, 19 bp, Mus musculus
  siRNA target sequence for Pclo (NM_011995.2,6007-6025).
ggagcagatttatgatgat

SEQ ID NO: 529684 - DNA, 19 bp, Mus musculus
  siRNA target sequence for Pclo (NM_011995.2,6020-6038).
gatgatcctatgcagaaaa

SEQ ID NO: 529685 - DNA, 19 bp, Mus musculus
  siRNA target sequence for Pclo (NM_011995.2,6095-6113).
caagaagacattgtttcaa

SEQ ID NO: 529686 - DNA, 19 bp, Mus musculus
  siRNA target sequence for Pclo (NM_011995.2,6107-6125).
gtttcaagctcttatatca

SEQ ID NO: 529687 - DNA, 19 bp, Mus musculus
  siRNA target sequence for Pclo (NM_011995.2,6207-6225).
ctgcttatgaagaactcat

SEQ ID NO: 529688 - DNA, 19 bp, Mus musculus
  siRNA target sequence for Pclo (NM_011995.2,6230-6248).
cggcaacagatgcaagtaa

SEQ ID NO: 529689 - DNA, 19 bp, Mus musculus
  siRNA target sequence for Pclo (NM_011995.2,6232-6250).
gcaacagatgcaagtaaca

SEQ ID NO: 529690 - DNA, 19 bp, Mus musculus
  siRNA target sequence for Pclo (NM_011995.2,6318-6336).
gggtacaagacgcatcttt

SEQ ID NO: 529691 - DNA, 19 bp, Mus musculus
  siRNA target sequence for Pclo (NM_011995.2,6320-6338).
gtacaagacgcatctttga

SEQ ID NO: 529692 - DNA, 19 bp, Mus musculus
  siRNA target sequence for Pclo (NM_011995.2,6323-6341).
caagacgcatctttgacat

SEQ ID NO: 529693 - DNA, 19 bp, Mus musculus
  siRNA target sequence for Pclo (NM_011995.2,6407-6425).
gttaagataacccaacatt

SEQ ID NO: 529694 - DNA, 19 bp, Mus musculus
  siRNA target sequence for Pclo (NM_011995.2,6445-6463).
ggatgaatatgtaactgat

SEQ ID NO: 529695 - DNA, 19 bp, Mus musculus
  siRNA target sequence for Pclo (NM_011995.2,6482-6500).
gagataattgcccatgaat

SEQ ID NO: 529696 - DNA, 19 bp, Mus musculus
  siRNA target sequence for Pclo (NM_011995.2,6625-6643).
cctcgatagcctaacaact

SEQ ID NO: 529697 - DNA, 19 bp, Mus musculus
  siRNA target sequence for Pclo (NM_011995.2,6628-6646).
cgatagcctaacaactgtt

SEQ ID NO: 529698 - DNA, 19 bp, Mus musculus
  siRNA target sequence for Pclo (NM_011995.2,6629-6647).
gatagcctaacaactgttt

SEQ ID NO: 529699 - DNA, 19 bp, Mus musculus
  siRNA target sequence for Pclo (NM_011995.2,6651-6669).
cggagccagcagatgtaat

SEQ ID NO: 529700 - DNA, 19 bp, Mus musculus
  siRNA target sequence for Pclo (NM_011995.2,6652-6670).
ggagccagcagatgtaata

SEQ ID NO: 529701 - DNA, 19 bp, Mus musculus
  siRNA target sequence for Pclo (NM_011995.2,6655-6673).
gccagcagatgtaataact

SEQ ID NO: 529702 - DNA, 19 bp, Mus musculus
  siRNA target sequence for Pclo (NM_011995.2,6656-6674).
ccagcagatgtaataacta

SEQ ID NO: 529703 - DNA, 19 bp, Mus musculus
  siRNA target sequence for Pclo (NM_011995.2,6683-6701).
gactctgaggaaatttctt

SEQ ID NO: 529704 - DNA, 19 bp, Mus musculus
  siRNA target sequence for Pclo (NM_011995.2,6727-6745).
cgactatccagaagatata

SEQ ID NO: 529705 - DNA, 19 bp, Mus musculus
  siRNA target sequence for Pclo (NM_011995.2,6766-6784).
catcacaccagaaagtaga

SEQ ID NO: 529706 - DNA, 19 bp, Mus musculus
  siRNA target sequence for Pclo (NM_011995.2,6783-6801).
gaactaacgctgatcagat

SEQ ID NO: 529707 - DNA, 19 bp, Mus musculus
  siRNA target sequence for Pclo (NM_011995.2,6786-6804).
ctaacgctgatcagattat

SEQ ID NO: 529708 - DNA, 19 bp, Mus musculus
  siRNA target sequence for Pclo (NM_011995.2,6790-6808).
cgctgatcagattatgatt

SEQ ID NO: 529709 - DNA, 19 bp, Mus musculus
  siRNA target sequence for Pclo (NM_011995.2,6791-6809).
gctgatcagattatgattt

SEQ ID NO: 529710 - DNA, 19 bp, Mus musculus
  siRNA target sequence for Pclo (NM_011995.2,6837-6855).
cagaatctgtagcaactaa

SEQ ID NO: 529711 - DNA, 19 bp, Mus musculus
  siRNA target sequence for Pclo (NM_011995.2,6866-6884).
ccacaagctgacacgattt

SEQ ID NO: 529712 - DNA, 19 bp, Mus musculus
  siRNA target sequence for Pclo (NM_011995.2,6877-6895).
cacgatttccactgactta

SEQ ID NO: 529713 - DNA, 19 bp, Mus musculus
  siRNA target sequence for Pclo (NM_011995.2,6888-6906).
ctgacttacctatatctga

SEQ ID NO: 529714 - DNA, 19 bp, Mus musculus
  siRNA target sequence for Pclo (NM_011995.2,6890-6908).
gacttacctatatctgaaa

SEQ ID NO: 529715 - DNA, 19 bp, Mus musculus
  siRNA target sequence for Pclo (NM_011995.2,6903-6921).
ctgaaaaggagttgataaa

SEQ ID NO: 529716 - DNA, 19 bp, Mus musculus
  siRNA target sequence for Pclo (NM_011995.2,6997-7015).
ggctgaactaacaaaaatt

SEQ ID NO: 529717 - DNA, 19 bp, Mus musculus
  siRNA target sequence for Pclo (NM_011995.2,7040-7058).
ccaacaccttcttctcaaa

SEQ ID NO: 529718 - DNA, 19 bp, Mus musculus
  siRNA target sequence for Pclo (NM_011995.2,7139-7157).
ggcggtcttcctgtttcta

SEQ ID NO: 529719 - DNA, 19 bp, Mus musculus
  siRNA target sequence for Pclo (NM_011995.2,7177-7195).
cccatttttccgaagttct

SEQ ID NO: 529720 - DNA, 19 bp, Mus musculus
  siRNA target sequence for Pclo (NM_011995.2,7307-7325).
ccacccacttatcctaaaa

SEQ ID NO: 529721 - DNA, 19 bp, Mus musculus
  siRNA target sequence for Pclo (NM_011995.2,7314-7332).
cttatcctaaaagaaagtt

SEQ ID NO: 529722 - DNA, 19 bp, Mus musculus
  siRNA target sequence for Pclo (NM_011995.2,7352-7370).
gctccaactgctattgtta

SEQ ID NO: 529723 - DNA, 19 bp, Mus musculus
  siRNA target sequence for Pclo (NM_011995.2,7371-7389).
cggcccatgctgatgctat

SEQ ID NO: 529724 - DNA, 19 bp, Mus musculus
  siRNA target sequence for Pclo (NM_011995.2,7428-7446).
ggttacctgcaactaaaat

SEQ ID NO: 529725 - DNA, 19 bp, Mus musculus
  siRNA target sequence for Pclo (NM_011995.2,7429-7447).
gttacctgcaactaaaata

SEQ ID NO: 529726 - DNA, 19 bp, Mus musculus
  siRNA target sequence for Pclo (NM_011995.2,7552-7570).
gccagcagtccctgagatt

SEQ ID NO: 529727 - DNA, 19 bp, Mus musculus
  siRNA target sequence for Pclo (NM_011995.2,7619-7637).
ctacctttaacatcaaata

SEQ ID NO: 529728 - DNA, 19 bp, Mus musculus
  siRNA target sequence for Pclo (NM_011995.2,7700-7718).
ccacactcgaataaatcct

SEQ ID NO: 529729 - DNA, 19 bp, Mus musculus
  siRNA target sequence for Pclo (NM_011995.2,7716-7734).
cctcaccgagatattctaa

SEQ ID NO: 529730 - DNA, 19 bp, Mus musculus
  siRNA target sequence for Pclo (NM_011995.2,7778-7796).
cctgggactccaacagatt

SEQ ID NO: 529731 - DNA, 19 bp, Mus musculus
  siRNA target sequence for Pclo (NM_011995.2,7802-7820).
gctgcccaagccattacaa

SEQ ID NO: 529732 - DNA, 19 bp, Mus musculus
  siRNA target sequence for Pclo (NM_011995.2,7805-7823).
gcccaagccattacaagtt

SEQ ID NO: 529733 - DNA, 19 bp, Mus musculus
  siRNA target sequence for Pclo (NM_011995.2,7919-7937).
cagccaaccctatatacat

SEQ ID NO: 529734 - DNA, 19 bp, Mus musculus
  siRNA target sequence for Pclo (NM_011995.2,8004-8022).
cttcacttacacagtttct

SEQ ID NO: 529735 - DNA, 19 bp, Mus musculus
  siRNA target sequence for Pclo (NM_011995.2,8088-8106).
ggagtgtttccataccaat

SEQ ID NO: 529736 - DNA, 19 bp, Mus musculus
  siRNA target sequence for Pclo (NM_011995.2,8131-8149).
caggcatcagtataaggaa

SEQ ID NO: 529737 - DNA, 19 bp, Mus musculus
  siRNA target sequence for Pclo (NM_011995.2,8178-8196).
ccattgatttgcgtacaat

SEQ ID NO: 529738 - DNA, 19 bp, Mus musculus
  siRNA target sequence for Pclo (NM_011995.2,8179-8197).
cattgatttgcgtacaata

SEQ ID NO: 529739 - DNA, 19 bp, Mus musculus
  siRNA target sequence for Pclo (NM_011995.2,8183-8201).
gatttgcgtacaataccaa

SEQ ID NO: 529740 - DNA, 19 bp, Mus musculus
  siRNA target sequence for Pclo (NM_011995.2,8188-8206).
gcgtacaataccaaaatca

SEQ ID NO: 529741 - DNA, 19 bp, Mus musculus
  siRNA target sequence for Pclo (NM_011995.2,8190-8208).
gtacaataccaaaatcaga

SEQ ID NO: 529742 - DNA, 19 bp, Mus musculus
  siRNA target sequence for Pclo (NM_011995.2,8284-8302).
ggtttacaggcgacaaatt

SEQ ID NO: 529743 - DNA, 19 bp, Mus musculus
  siRNA target sequence for Pclo (NM_011995.2,8285-8303).
gtttacaggcgacaaatta

SEQ ID NO: 529744 - DNA, 19 bp, Mus musculus
  siRNA target sequence for Pclo (NM_011995.2,8309-8327).
gtccaaccttctatcataa

SEQ ID NO: 529745 - DNA, 19 bp, Mus musculus
  siRNA target sequence for Pclo (NM_011995.2,8358-8376).
cagtcaccatggactctaa

SEQ ID NO: 529746 - DNA, 19 bp, Mus musculus
  siRNA target sequence for Pclo (NM_011995.2,8395-8413).
gtgcacagacactacaatt

SEQ ID NO: 529747 - DNA, 19 bp, Mus musculus
  siRNA target sequence for Pclo (NM_011995.2,8402-8420).
gacactacaatttacacaa

SEQ ID NO: 529748 - DNA, 19 bp, Mus musculus
  siRNA target sequence for Pclo (NM_011995.2,8433-8451).
gccaagtgggtatagaaca

SEQ ID NO: 529749 - DNA, 19 bp, Mus musculus
  siRNA target sequence for Pclo (NM_011995.2,8434-8452).
ccaagtgggtatagaacat

SEQ ID NO: 529750 - DNA, 19 bp, Mus musculus
  siRNA target sequence for Pclo (NM_011995.2,8465-8483).
ccactgcagcttactacat

SEQ ID NO: 529751 - DNA, 19 bp, Mus musculus
  siRNA target sequence for Pclo (NM_011995.2,8540-8558).
cgagatgaagcaccaataa

SEQ ID NO: 529752 - DNA, 19 bp, Mus musculus
  siRNA target sequence for Pclo (NM_011995.2,8549-8567).
gcaccaataaacttatcat

SEQ ID NO: 529753 - DNA, 19 bp, Mus musculus
  siRNA target sequence for Pclo (NM_011995.2,8577-8595).
ccactcaggcagtaacatt

SEQ ID NO: 529754 - DNA, 19 bp, Mus musculus
  siRNA target sequence for Pclo (NM_011995.2,8690-8708).
gtagatctcagcacatcaa

SEQ ID NO: 529755 - DNA, 19 bp, Mus musculus
  siRNA target sequence for Pclo (NM_011995.2,8723-8741).
gttgtgacaatggatgaat

SEQ ID NO: 529756 - DNA, 19 bp, Mus musculus
  siRNA target sequence for Pclo (NM_011995.2,8726-8744).
gtgacaatggatgaatcta

SEQ ID NO: 529757 - DNA, 19 bp, Mus musculus
  siRNA target sequence for Pclo (NM_011995.2,8728-8746).
gacaatggatgaatctact

SEQ ID NO: 529758 - DNA, 19 bp, Mus musculus
  siRNA target sequence for Pclo (NM_011995.2,8734-8752).
ggatgaatctacttcaaat

SEQ ID NO: 529759 - DNA, 19 bp, Mus musculus
  siRNA target sequence for Pclo (NM_011995.2,8915-8933).
gaccactatcaatatgata

SEQ ID NO: 529760 - DNA, 19 bp, Mus musculus
  siRNA target sequence for Pclo (NM_011995.2,8918-8936).
cactatcaatatgatagat

SEQ ID NO: 529761 - DNA, 19 bp, Mus musculus
  siRNA target sequence for Pclo (NM_011995.2,8920-8938).
ctatcaatatgatagatca

SEQ ID NO: 529762 - DNA, 19 bp, Mus musculus
  siRNA target sequence for Pclo (NM_011995.2,8980-8998).
catgtcagacactaattta

SEQ ID NO: 529763 - DNA, 19 bp, Mus musculus
  siRNA target sequence for Pclo (NM_011995.2,8983-9001).
gtcagacactaatttagca

SEQ ID NO: 529764 - DNA, 19 bp, Mus musculus
  siRNA target sequence for Pclo (NM_011995.2,9005-9023).
gctggacattttttctata

SEQ ID NO: 529765 - DNA, 19 bp, Mus musculus
  siRNA target sequence for Pclo (NM_011995.2,9141-9159).
cagaaacacgccaagtcat

SEQ ID NO: 529766 - DNA, 19 bp, Mus musculus
  siRNA target sequence for Pclo (NM_011995.2,9143-9161).
gaaacacgccaagtcattt

SEQ ID NO: 529767 - DNA, 19 bp, Mus musculus
  siRNA target sequence for Pclo (NM_011995.2,9252-9270).
catctaatggtgttgtcta

SEQ ID NO: 529768 - DNA, 19 bp, Mus musculus
  siRNA target sequence for Pclo (NM_011995.2,9340-9358).
cacggtcagggatttatct

SEQ ID NO: 529769 - DNA, 19 bp, Mus musculus
  siRNA target sequence for Pclo (NM_011995.2,9365-9383).
catacaacagatgcaataa

SEQ ID NO: 529770 - DNA, 19 bp, Mus musculus
  siRNA target sequence for Pclo (NM_011995.2,9372-9390).
cagatgcaataacttcatt

SEQ ID NO: 529771 - DNA, 19 bp, Mus musculus
  siRNA target sequence for Pclo (NM_011995.2,9374-9392).
gatgcaataacttcattat

SEQ ID NO: 529772 - DNA, 19 bp, Mus musculus
  siRNA target sequence for Pclo (NM_011995.2,9412-9430).
gccaatgcctagatcgtat

SEQ ID NO: 529773 - DNA, 19 bp, Mus musculus
  siRNA target sequence for Pclo (NM_011995.2,9413-9431).
ccaatgcctagatcgtatt

SEQ ID NO: 529774 - DNA, 19 bp, Mus musculus
  siRNA target sequence for Pclo (NM_011995.2,9418-9436).
gcctagatcgtatttcata

SEQ ID NO: 529775 - DNA, 19 bp, Mus musculus
  siRNA target sequence for Pclo (NM_011995.2,9419-9437).
cctagatcgtatttcataa

SEQ ID NO: 529776 - DNA, 19 bp, Mus musculus
  siRNA target sequence for Pclo (NM_011995.2,9488-9506).
gccagcctgcaaactatta

SEQ ID NO: 529777 - DNA, 19 bp, Mus musculus
  siRNA target sequence for Pclo (NM_011995.2,9490-9508).
cagcctgcaaactattact

SEQ ID NO: 529778 - DNA, 19 bp, Mus musculus
  siRNA target sequence for Pclo (NM_011995.2,9492-9510).
gcctgcaaactattactat

SEQ ID NO: 529779 - DNA, 19 bp, Mus musculus
  siRNA target sequence for Pclo (NM_011995.2,9501-9519).
ctattactatggaaactct

SEQ ID NO: 529780 - DNA, 19 bp, Mus musculus
  siRNA target sequence for Pclo (NM_011995.2,9535-9553).
ggactctgttcctacctta

SEQ ID NO: 529781 - DNA, 19 bp, Mus musculus
  siRNA target sequence for Pclo (NM_011995.2,9559-9577).
cgcctctgaggtgttttct

SEQ ID NO: 529782 - DNA, 19 bp, Mus musculus
  siRNA target sequence for Pclo (NM_011995.2,9711-9729).
gggaacgtcaggagattca

SEQ ID NO: 529783 - DNA, 19 bp, Mus musculus
  siRNA target sequence for Pclo (NM_011995.2,9713-9731).
gaacgtcaggagattcaaa

SEQ ID NO: 529784 - DNA, 19 bp, Mus musculus
  siRNA target sequence for Pclo (NM_011995.2,9855-9873).
cgctagctcaacaacagtt

SEQ ID NO: 529785 - DNA, 19 bp, Mus musculus
  siRNA target sequence for Pclo (NM_011995.2,9856-9874).
gctagctcaacaacagtta

SEQ ID NO: 529786 - DNA, 19 bp, Mus musculus
  siRNA target sequence for Pclo (NM_011995.2,9861-9879).
ctcaacaacagttacaact

SEQ ID NO: 529787 - DNA, 19 bp, Mus musculus
  siRNA target sequence for Pclo (NM_011995.2,9941-9959).
cagatctaccagtataact

SEQ ID NO: 529788 - DNA, 19 bp, Mus musculus
  siRNA target sequence for Pclo (NM_011995.2,9993-10011).
ccactgaacaggcaatttt

SEQ ID NO: 529789 - DNA, 19 bp, Mus musculus
  siRNA target sequence for Pclo (NM_011995.2,10045-10063).
gttttgggccactgaagat

SEQ ID NO: 529790 - DNA, 19 bp, Mus musculus
  siRNA target sequence for Pclo (NM_011995.2,10083-10101).
ctgtggtagccattgaaat

SEQ ID NO: 529791 - DNA, 19 bp, Mus musculus
  siRNA target sequence for Pclo (NM_011995.2,10087-10105).
ggtagccattgaaatacca

SEQ ID NO: 529792 - DNA, 19 bp, Mus musculus
  siRNA target sequence for Pclo (NM_011995.2,10189-10207).
gatacctctgacagatgtt

SEQ ID NO: 529793 - DNA, 19 bp, Mus musculus
  siRNA target sequence for Pclo (NM_011995.2,10226-10244).
cagcccaaaaagagaagtt

SEQ ID NO: 529794 - DNA, 19 bp, Mus musculus
  siRNA target sequence for Pclo (NM_011995.2,10237-10255).
gagaagttctggagctaaa

SEQ ID NO: 529795 - DNA, 19 bp, Mus musculus
  siRNA target sequence for Pclo (NM_011995.2,10239-10257).
gaagttctggagctaaagt

SEQ ID NO: 529796 - DNA, 19 bp, Mus musculus
  siRNA target sequence for Pclo (NM_011995.2,10293-10311).
cagatgatccacggaattt

SEQ ID NO: 529797 - DNA, 19 bp, Mus musculus
  siRNA target sequence for Pclo (NM_011995.2,10295-10313).
gatgatccacggaatttaa

SEQ ID NO: 529798 - DNA, 19 bp, Mus musculus
  siRNA target sequence for Pclo (NM_011995.2,10298-10316).
gatccacggaatttaaaaa

SEQ ID NO: 529799 - DNA, 19 bp, Mus musculus
  siRNA target sequence for Pclo (NM_011995.2,10301-10319).
ccacggaatttaaaaaaga

SEQ ID NO: 529800 - DNA, 19 bp, Mus musculus
  siRNA target sequence for Pclo (NM_011995.2,10322-10340).
gtggacagtggtgtacaaa

SEQ ID NO: 529801 - DNA, 19 bp, Mus musculus
  siRNA target sequence for Pclo (NM_011995.2,10324-10342).
ggacagtggtgtacaaact

SEQ ID NO: 529802 - DNA, 19 bp, Mus musculus
  siRNA target sequence for Pclo (NM_011995.2,10358-10376).
gctgatcggacttatgcaa

SEQ ID NO: 529803 - DNA, 19 bp, Mus musculus
  siRNA target sequence for Pclo (NM_011995.2,10519-10537).
gaccaaacccccttccaaa

SEQ ID NO: 529804 - DNA, 19 bp, Mus musculus
  siRNA target sequence for Pclo (NM_011995.2,10540-10558).
ctccagtgtagcagttcaa

SEQ ID NO: 529805 - DNA, 19 bp, Mus musculus
  siRNA target sequence for Pclo (NM_011995.2,10543-10561).
cagtgtagcagttcaaaca

SEQ ID NO: 529806 - DNA, 19 bp, Mus musculus
  siRNA target sequence for Pclo (NM_011995.2,10545-10563).
gtgtagcagttcaaacagt

SEQ ID NO: 529807 - DNA, 19 bp, Mus musculus
  siRNA target sequence for Pclo (NM_011995.2,10560-10578).
cagtcgcagagatatctgt

SEQ ID NO: 529808 - DNA, 19 bp, Mus musculus
  siRNA target sequence for Pclo (NM_011995.2,10586-10604).
gagccattgggaaccataa

SEQ ID NO: 529809 - DNA, 19 bp, Mus musculus
  siRNA target sequence for Pclo (NM_011995.2,10662-10680).
cagcgcctgaaaagactta

SEQ ID NO: 529810 - DNA, 19 bp, Mus musculus
  siRNA target sequence for Pclo (NM_011995.2,10664-10682).
gcgcctgaaaagacttaca

SEQ ID NO: 529811 - DNA, 19 bp, Mus musculus
  siRNA target sequence for Pclo (NM_011995.2,10665-10683).
cgcctgaaaagacttacaa

SEQ ID NO: 529812 - DNA, 19 bp, Mus musculus
  siRNA target sequence for Pclo (NM_011995.2,10681-10699).
caaagggggcagtttagga

SEQ ID NO: 529813 - DNA, 19 bp, Mus musculus
  siRNA target sequence for Pclo (NM_011995.2,10752-10770).
catctccacccaaagacaa

SEQ ID NO: 529814 - DNA, 19 bp, Mus musculus
  siRNA target sequence for Pclo (NM_011995.2,10771-10789).
gaaacgcccaacaccttta

SEQ ID NO: 529815 - DNA, 19 bp, Mus musculus
  siRNA target sequence for Pclo (NM_011995.2,10775-10793).
cgcccaacacctttagaga

SEQ ID NO: 529816 - DNA, 19 bp, Mus musculus
  siRNA target sequence for Pclo (NM_011995.2,10776-10794).
gcccaacacctttagagat

SEQ ID NO: 529817 - DNA, 19 bp, Mus musculus
  siRNA target sequence for Pclo (NM_011995.2,10777-10795).
cccaacacctttagagatt

SEQ ID NO: 529818 - DNA, 19 bp, Mus musculus
  siRNA target sequence for Pclo (NM_011995.2,10782-10800).
cacctttagagattggtta

SEQ ID NO: 529819 - DNA, 19 bp, Mus musculus
  siRNA target sequence for Pclo (NM_011995.2,10790-10808).
gagattggttactcttctt

SEQ ID NO: 529820 - DNA, 19 bp, Mus musculus
  siRNA target sequence for Pclo (NM_011995.2,10897-10915).
cccaggccacgccttagaa

SEQ ID NO: 529821 - DNA, 19 bp, Mus musculus
  siRNA target sequence for Pclo (NM_011995.2,10917-10935).
cagcctttgtaccttatga

SEQ ID NO: 529822 - DNA, 19 bp, Mus musculus
  siRNA target sequence for Pclo (NM_011995.2,10919-10937).
gcctttgtaccttatgaaa

SEQ ID NO: 529823 - DNA, 19 bp, Mus musculus
  siRNA target sequence for Pclo (NM_011995.2,10954-10972).
cataagtccacagaaagta

SEQ ID NO: 529824 - DNA, 19 bp, Mus musculus
  siRNA target sequence for Pclo (NM_011995.2,11026-11044).
gatgcagcgttcaatgtct

SEQ ID NO: 529825 - DNA, 19 bp, Mus musculus
  siRNA target sequence for Pclo (NM_011995.2,11063-11081).
ccaacagcagacgaaagtt

SEQ ID NO: 529826 - DNA, 19 bp, Mus musculus
  siRNA target sequence for Pclo (NM_011995.2,11083-11101).
cagggctccttttcagtat

SEQ ID NO: 529827 - DNA, 19 bp, Mus musculus
  siRNA target sequence for Pclo (NM_011995.2,11107-11125).
gggcttcacggctaaaggt

SEQ ID NO: 529828 - DNA, 19 bp, Mus musculus
  siRNA target sequence for Pclo (NM_011995.2,11108-11126).
ggcttcacggctaaaggtt

SEQ ID NO: 529829 - DNA, 19 bp, Mus musculus
  siRNA target sequence for Pclo (NM_011995.2,11136-11154).
cctctggtactcagaaaaa

SEQ ID NO: 529830 - DNA, 19 bp, Mus musculus
  siRNA target sequence for Pclo (NM_011995.2,11137-11155).
ctctggtactcagaaaaaa

SEQ ID NO: 529831 - DNA, 19 bp, Mus musculus
  siRNA target sequence for Pclo (NM_011995.2,11141-11159).
ggtactcagaaaaaagtga

SEQ ID NO: 529832 - DNA, 19 bp, Mus musculus
  siRNA target sequence for Pclo (NM_011995.2,11201-11219).
ggaacacagtcaacttaca

SEQ ID NO: 529833 - DNA, 19 bp, Mus musculus
  siRNA target sequence for Pclo (NM_011995.2,11265-11283).
ccatggctcgagccaaaat

SEQ ID NO: 529834 - DNA, 19 bp, Mus musculus
  siRNA target sequence for Pclo (NM_011995.2,11266-11284).
catggctcgagccaaaatt

SEQ ID NO: 529835 - DNA, 19 bp, Mus musculus
  siRNA target sequence for Pclo (NM_011995.2,11347-11365).
gcaagcagaacttgatgaa

SEQ ID NO: 529836 - DNA, 19 bp, Mus musculus
  siRNA target sequence for Pclo (NM_011995.2,11480-11498).
gccgaggaccgtgattata

SEQ ID NO: 529837 - DNA, 19 bp, Mus musculus
  siRNA target sequence for Pclo (NM_011995.2,11481-11499).
ccgaggaccgtgattatat

SEQ ID NO: 529838 - DNA, 19 bp, Mus musculus
  siRNA target sequence for Pclo (NM_011995.2,11483-11501).
gaggaccgtgattatatgt

SEQ ID NO: 529839 - DNA, 19 bp, Mus musculus
  siRNA target sequence for Pclo (NM_011995.2,11485-11503).
ggaccgtgattatatgtct

SEQ ID NO: 529840 - DNA, 19 bp, Mus musculus
  siRNA target sequence for Pclo (NM_011995.2,11554-11572).
cattgagcggccaagaaca

SEQ ID NO: 529841 - DNA, 19 bp, Mus musculus
  siRNA target sequence for Pclo (NM_011995.2,11643-11661).
caagtccttacacacaata

SEQ ID NO: 529842 - DNA, 19 bp, Mus musculus
  siRNA target sequence for Pclo (NM_011995.2,11834-11852).
ccacagccatcctatcaat

SEQ ID NO: 529843 - DNA, 19 bp, Mus musculus
  siRNA target sequence for Pclo (NM_011995.2,11835-11853).
cacagccatcctatcaatt

SEQ ID NO: 529844 - DNA, 19 bp, Mus musculus
  siRNA target sequence for Pclo (NM_011995.2,11839-11857).
gccatcctatcaattacca

SEQ ID NO: 529845 - DNA, 19 bp, Mus musculus
  siRNA target sequence for Pclo (NM_011995.2,11885-11903).
cctcggcaaaccacattgt

SEQ ID NO: 529846 - DNA, 19 bp, Mus musculus
  siRNA target sequence for Pclo (NM_011995.2,11886-11904).
ctcggcaaaccacattgta

SEQ ID NO: 529847 - DNA, 19 bp, Mus musculus
  siRNA target sequence for Pclo (NM_011995.2,11888-11906).
cggcaaaccacattgtatt

SEQ ID NO: 529848 - DNA, 19 bp, Mus musculus
  siRNA target sequence for Pclo (NM_011995.2,11889-11907).
ggcaaaccacattgtattt

SEQ ID NO: 529849 - DNA, 19 bp, Mus musculus
  siRNA target sequence for Pclo (NM_011995.2,11902-11920).
gtatttggagcctaagata

SEQ ID NO: 529850 - DNA, 19 bp, Mus musculus
  siRNA target sequence for Pclo (NM_011995.2,11909-11927).
gagcctaagataacttcta

SEQ ID NO: 529851 - DNA, 19 bp, Mus musculus
  siRNA target sequence for Pclo (NM_011995.2,11959-11977).
gattgctccagtttctact

SEQ ID NO: 529852 - DNA, 19 bp, Mus musculus
  siRNA target sequence for Pclo (NM_011995.2,11969-11987).
gtttctactgataatacgt

SEQ ID NO: 529853 - DNA, 19 bp, Mus musculus
  siRNA target sequence for Pclo (NM_011995.2,11997-12015).
cccatctcgggagtaagta

SEQ ID NO: 529854 - DNA, 19 bp, Mus musculus
  siRNA target sequence for Pclo (NM_011995.2,12002-12020).
ctcgggagtaagtacaata

SEQ ID NO: 529855 - DNA, 19 bp, Mus musculus
  siRNA target sequence for Pclo (NM_011995.2,12004-12022).
cgggagtaagtacaatagt

SEQ ID NO: 529856 - DNA, 19 bp, Mus musculus
  siRNA target sequence for Pclo (NM_011995.2,12061-12079).
ggcaagcagtccaatatca

SEQ ID NO: 529857 - DNA, 19 bp, Mus musculus
  siRNA target sequence for Pclo (NM_011995.2,12062-12080).
gcaagcagtccaatatcaa

SEQ ID NO: 529858 - DNA, 19 bp, Mus musculus
  siRNA target sequence for Pclo (NM_011995.2,12067-12085).
cagtccaatatcaagcata

SEQ ID NO: 529859 - DNA, 19 bp, Mus musculus
  siRNA target sequence for Pclo (NM_011995.2,12107-12125).
gacattgaccaccatactt

SEQ ID NO: 529860 - DNA, 19 bp, Mus musculus
  siRNA target sequence for Pclo (NM_011995.2,12115-12133).
ccaccatacttcaaggaat

SEQ ID NO: 529861 - DNA, 19 bp, Mus musculus
  siRNA target sequence for Pclo (NM_011995.2,12116-12134).
caccatacttcaaggaatt

SEQ ID NO: 529862 - DNA, 19 bp, Mus musculus
  siRNA target sequence for Pclo (NM_011995.2,12129-12147).
ggaattatgtcctaataga

SEQ ID NO: 529863 - DNA, 19 bp, Mus musculus
  siRNA target sequence for Pclo (NM_011995.2,12130-12148).
gaattatgtcctaatagat

SEQ ID NO: 529864 - DNA, 19 bp, Mus musculus
  siRNA target sequence for Pclo (NM_011995.2,12151-12169).
cattggagacattaccaaa

SEQ ID NO: 529865 - DNA, 19 bp, Mus musculus
  siRNA target sequence for Pclo (NM_011995.2,12211-12229).
ggatctgtccaaaacagat

SEQ ID NO: 529866 - DNA, 19 bp, Mus musculus
  siRNA target sequence for Pclo (NM_011995.2,12250-12268).
gacacggaggtctcaagaa

SEQ ID NO: 529867 - DNA, 19 bp, Mus musculus
  siRNA target sequence for Pclo (NM_011995.2,12252-12270).
cacggaggtctcaagaagt

SEQ ID NO: 529868 - DNA, 19 bp, Mus musculus
  siRNA target sequence for Pclo (NM_011995.2,12306-12324).
gactgcatagctatgtgaa

SEQ ID NO: 529869 - DNA, 19 bp, Mus musculus
  siRNA target sequence for Pclo (NM_011995.2,12339-12357).
cgatggaggatccttatga

SEQ ID NO: 529870 - DNA, 19 bp, Mus musculus
  siRNA target sequence for Pclo (NM_011995.2,12364-12382).
gcttctgaaacatcagatt

SEQ ID NO: 529871 - DNA, 19 bp, Mus musculus
  siRNA target sequence for Pclo (NM_011995.2,12365-12383).
cttctgaaacatcagatta

SEQ ID NO: 529872 - DNA, 19 bp, Mus musculus
  siRNA target sequence for Pclo (NM_011995.2,12402-12420).
gcacagagagcttagatca

SEQ ID NO: 529873 - DNA, 19 bp, Mus musculus
  siRNA target sequence for Pclo (NM_011995.2,12425-12443).
gctggtctctcacattatt

SEQ ID NO: 529874 - DNA, 19 bp, Mus musculus
  siRNA target sequence for Pclo (NM_011995.2,12426-12444).
ctggtctctcacattatta

SEQ ID NO: 529875 - DNA, 19 bp, Mus musculus
  siRNA target sequence for Pclo (NM_011995.2,12446-12464).
catgctgatactagctata

SEQ ID NO: 529876 - DNA, 19 bp, Mus musculus
  siRNA target sequence for Pclo (NM_011995.2,12450-12468).
ctgatactagctatagaca

SEQ ID NO: 529877 - DNA, 19 bp, Mus musculus
  siRNA target sequence for Pclo (NM_011995.2,12501-12519).
gactcaccctggaaaaaca

SEQ ID NO: 529878 - DNA, 19 bp, Mus musculus
  siRNA target sequence for Pclo (NM_011995.2,12578-12596).
gcattaattgaccctaaaa

SEQ ID NO: 529879 - DNA, 19 bp, Mus musculus
  siRNA target sequence for Pclo (NM_011995.2,12590-12608).
cctaaaatgtctaagtttt

SEQ ID NO: 529880 - DNA, 19 bp, Mus musculus
  siRNA target sequence for Pclo (NM_011995.2,12598-12616).
gtctaagttttcacctatt

SEQ ID NO: 529881 - DNA, 19 bp, Mus musculus
  siRNA target sequence for Pclo (NM_011995.2,12641-12659).
gactatcccacttacttga

SEQ ID NO: 529882 - DNA, 19 bp, Mus musculus
  siRNA target sequence for Pclo (NM_011995.2,12647-12665).
cccacttacttgagttcta

SEQ ID NO: 529883 - DNA, 19 bp, Mus musculus
  siRNA target sequence for Pclo (NM_011995.2,12785-12803).
ggactgggcacgttaggaa

SEQ ID NO: 529884 - DNA, 19 bp, Mus musculus
  siRNA target sequence for Pclo (NM_011995.2,12786-12804).
gactgggcacgttaggaaa

SEQ ID NO: 529885 - DNA, 19 bp, Mus musculus
  siRNA target sequence for Pclo (NM_011995.2,12791-12809).
ggcacgttaggaaatacca

SEQ ID NO: 529886 - DNA, 19 bp, Mus musculus
  siRNA target sequence for Pclo (NM_011995.2,12792-12810).
gcacgttaggaaataccat

SEQ ID NO: 529887 - DNA, 19 bp, Mus musculus
  siRNA target sequence for Pclo (NM_011995.2,12892-12910).
ctatgggcttgatttatca

SEQ ID NO: 529888 - DNA, 19 bp, Mus musculus
  siRNA target sequence for Pclo (NM_011995.2,12896-12914).
gggcttgatttatcaatta

SEQ ID NO: 529889 - DNA, 19 bp, Mus musculus
  siRNA target sequence for Pclo (NM_011995.2,12927-12945).
ccagctcatcactaagatt

SEQ ID NO: 529890 - DNA, 19 bp, Mus musculus
  siRNA target sequence for Pclo (NM_011995.2,12930-12948).
gctcatcactaagattgaa

SEQ ID NO: 529891 - DNA, 19 bp, Mus musculus
  siRNA target sequence for Pclo (NM_011995.2,12931-12949).
ctcatcactaagattgaaa

SEQ ID NO: 529892 - DNA, 19 bp, Mus musculus
  siRNA target sequence for Pclo (NM_011995.2,12976-12994).
ctcttttggccattcttca

SEQ ID NO: 529893 - DNA, 19 bp, Mus musculus
  siRNA target sequence for Pclo (NM_011995.2,13041-13059).
gaggaagaataccaattgt

SEQ ID NO: 529894 - DNA, 19 bp, Mus musculus
  siRNA target sequence for Pclo (NM_011995.2,13154-13172).
gcagatacaagggatcaat

SEQ ID NO: 529895 - DNA, 19 bp, Mus musculus
  siRNA target sequence for Pclo (NM_011995.2,13165-13183).
ggatcaatttggatcaagt

SEQ ID NO: 529896 - DNA, 19 bp, Mus musculus
  siRNA target sequence for Pclo (NM_011995.2,13224-13242).
cacggacaaggggttatga

SEQ ID NO: 529897 - DNA, 19 bp, Mus musculus
  siRNA target sequence for Pclo (NM_011995.2,13314-13332).
gggaggaaacggattggtt

SEQ ID NO: 529898 - DNA, 19 bp, Mus musculus
  siRNA target sequence for Pclo (NM_011995.2,13318-13336).
ggaaacggattggtttgat

SEQ ID NO: 529899 - DNA, 19 bp, Mus musculus
  siRNA target sequence for Pclo (NM_011995.2,13345-13363).
ggagtctcggttggaaaat

SEQ ID NO: 529900 - DNA, 19 bp, Mus musculus
  siRNA target sequence for Pclo (NM_011995.2,13380-13398).
ggaaactgccagaaagact

SEQ ID NO: 529901 - DNA, 19 bp, Mus musculus
  siRNA target sequence for Pclo (NM_011995.2,13413-13431).
ccctcagtcaacatcaaga

SEQ ID NO: 529902 - DNA, 19 bp, Mus musculus
  siRNA target sequence for Pclo (NM_011995.2,13475-13493).
cctcatgcaaggataaaaa

SEQ ID NO: 529903 - DNA, 19 bp, Mus musculus
  siRNA target sequence for Pclo (NM_011995.2,13476-13494).
ctcatgcaaggataaaaat

SEQ ID NO: 529904 - DNA, 19 bp, Mus musculus
  siRNA target sequence for Pclo (NM_011995.2,13524-13542).
caggtaatgggctaggaat

SEQ ID NO: 529905 - DNA, 19 bp, Mus musculus
  siRNA target sequence for Pclo (NM_011995.2,13526-13544).
ggtaatgggctaggaatta

SEQ ID NO: 529906 - DNA, 19 bp, Mus musculus
  siRNA target sequence for Pclo (NM_011995.2,13581-13599).
gagaaattggagcctatat

SEQ ID NO: 529907 - DNA, 19 bp, Mus musculus
  siRNA target sequence for Pclo (NM_011995.2,13593-13611).
cctatattgctaagattct

SEQ ID NO: 529908 - DNA, 19 bp, Mus musculus
  siRNA target sequence for Pclo (NM_011995.2,13633-13651).
ctcagggaaacttatagaa

SEQ ID NO: 529909 - DNA, 19 bp, Mus musculus
  siRNA target sequence for Pclo (NM_011995.2,13657-13675).
gcaagttttggaatggaat

SEQ ID NO: 529910 - DNA, 19 bp, Mus musculus
  siRNA target sequence for Pclo (NM_011995.2,13672-13690).
gaatggaatcccgttaact

SEQ ID NO: 529911 - DNA, 19 bp, Mus musculus
  siRNA target sequence for Pclo (NM_011995.2,13676-13694).
ggaatcccgttaacttcta

SEQ ID NO: 529912 - DNA, 19 bp, Mus musculus
  siRNA target sequence for Pclo (NM_011995.2,13677-13695).
gaatcccgttaacttctaa

SEQ ID NO: 529913 - DNA, 19 bp, Mus musculus
  siRNA target sequence for Pclo (NM_011995.2,13681-13699).
cccgttaacttctaaaaca

SEQ ID NO: 529914 - DNA, 19 bp, Mus musculus
  siRNA target sequence for Pclo (NM_011995.2,13689-13707).
cttctaaaacatatgaaga

SEQ ID NO: 529915 - DNA, 19 bp, Mus musculus
  siRNA target sequence for Pclo (NM_011995.2,13737-13755).
gggaagcagaaatatgtgt

SEQ ID NO: 529916 - DNA, 19 bp, Mus musculus
  siRNA target sequence for Pclo (NM_011995.2,13739-13757).
gaagcagaaatatgtgtaa

SEQ ID NO: 529917 - DNA, 19 bp, Mus musculus
  siRNA target sequence for Pclo (NM_011995.2,13754-13772).
gtaagactggacctcaata

SEQ ID NO: 529918 - DNA, 19 bp, Mus musculus
  siRNA target sequence for Pclo (NM_011995.2,13758-13776).
gactggacctcaatatgtt

SEQ ID NO: 529919 - DNA, 19 bp, Mus musculus
  siRNA target sequence for Pclo (NM_011995.2,13774-13792).
gttgtcagactcggaaaat

SEQ ID NO: 529920 - DNA, 19 bp, Mus musculus
  siRNA target sequence for Pclo (NM_011995.2,13777-13795).
gtcagactcggaaaatcca

SEQ ID NO: 529921 - DNA, 19 bp, Mus musculus
  siRNA target sequence for Pclo (NM_011995.2,14004-14022).
ggtcaccttcagtaagcaa

SEQ ID NO: 529922 - DNA, 19 bp, Mus musculus
  siRNA target sequence for Pclo (NM_011995.2,14035-14053).
cggcagcaagcctactgat

SEQ ID NO: 529923 - DNA, 19 bp, Mus musculus
  siRNA target sequence for Pclo (NM_011995.2,14074-14092).
cccaattacaggagagatt

SEQ ID NO: 529924 - DNA, 19 bp, Mus musculus
  siRNA target sequence for Pclo (NM_011995.2,14076-14094).
caattacaggagagattca

SEQ ID NO: 529925 - DNA, 19 bp, Mus musculus
  siRNA target sequence for Pclo (NM_011995.2,14084-14102).
ggagagattcagcttcaaa

SEQ ID NO: 529926 - DNA, 19 bp, Mus musculus
  siRNA target sequence for Pclo (NM_011995.2,14085-14103).
gagagattcagcttcaaat

SEQ ID NO: 529927 - DNA, 19 bp, Mus musculus
  siRNA target sequence for Pclo (NM_011995.2,14107-14125).
ctacgatcttggaaatctt

SEQ ID NO: 529928 - DNA, 19 bp, Mus musculus
  siRNA target sequence for Pclo (NM_011995.2,14110-14128).
cgatcttggaaatcttata

SEQ ID NO: 529929 - DNA, 19 bp, Mus musculus
  siRNA target sequence for Pclo (NM_011995.2,14111-14129).
gatcttggaaatcttataa

SEQ ID NO: 529930 - DNA, 19 bp, Mus musculus
  siRNA target sequence for Pclo (NM_011995.2,14117-14135).
ggaaatcttataatacata

SEQ ID NO: 529931 - DNA, 19 bp, Mus musculus
  siRNA target sequence for Pclo (NM_011995.2,14257-14275).
caagagaaggactaaatat

SEQ ID NO: 529932 - DNA, 19 bp, Mus musculus
  siRNA target sequence for Pclo (NM_011995.2,14295-14313).
ccgagtggaatcaaacagt

SEQ ID NO: 529933 - DNA, 19 bp, Mus musculus
  siRNA target sequence for Pclo (NM_011995.2,14296-14314).
cgagtggaatcaaacagta

SEQ ID NO: 529934 - DNA, 19 bp, Mus musculus
  siRNA target sequence for Pclo (NM_011995.2,14297-14315).
gagtggaatcaaacagtaa

SEQ ID NO: 529935 - DNA, 19 bp, Mus musculus
  siRNA target sequence for Pclo (NM_011995.2,14301-14319).
ggaatcaaacagtaattta

SEQ ID NO: 529936 - DNA, 19 bp, Mus musculus
  siRNA target sequence for Pclo (NM_011995.2,14375-14393).
gattatgatagattctcat

SEQ ID NO: 529937 - DNA, 19 bp, Mus musculus
  siRNA target sequence for Pclo (NM_011995.2,14404-14422).
ccttggagaggtattgatt

SEQ ID NO: 529938 - DNA, 19 bp, Mus musculus
  siRNA target sequence for Pclo (NM_011995.2,14460-14478).
ggtggtatccgctgaaaga

SEQ ID NO: 529939 - DNA, 19 bp, Mus musculus
  siRNA target sequence for Pclo (NM_011995.2,14461-14479).
gtggtatccgctgaaagaa

SEQ ID NO: 529940 - DNA, 19 bp, Mus musculus
  siRNA target sequence for Pclo (NM_011995.2,14463-14481).
ggtatccgctgaaagaaca

SEQ ID NO: 529941 - DNA, 19 bp, Mus musculus
  siRNA target sequence for Pclo (NM_011995.2,14579-14597).
cccgacccatccaaggata

SEQ ID NO: 529942 - DNA, 19 bp, Mus musculus
  siRNA target sequence for Pclo (NM_011995.2,14580-14598).
ccgacccatccaaggatat

SEQ ID NO: 529943 - DNA, 19 bp, Mus musculus
  siRNA target sequence for Pclo (NM_011995.2,14600-14618).
caggttcccaccattgaga

SEQ ID NO: 529944 - DNA, 19 bp, Mus musculus
  siRNA target sequence for Pclo (NM_011995.2,14602-14620).
ggttcccaccattgagaaa

SEQ ID NO: 529945 - DNA, 19 bp, Mus musculus
  siRNA target sequence for Pclo (NM_011995.2,14636-14654).
ggtagttcaaaatcatcat

SEQ ID NO: 529946 - DNA, 19 bp, Mus musculus
  siRNA target sequence for Pclo (NM_011995.2,14678-14696).
ggaccatctcgcagtcaaa

SEQ ID NO: 529947 - DNA, 19 bp, Mus musculus
  siRNA target sequence for Pclo (NM_011995.2,14682-14700).
catctcgcagtcaaagcaa

SEQ ID NO: 529948 - DNA, 19 bp, Mus musculus
  siRNA target sequence for Pclo (NM_011995.2,14776-14794).
ccgcattcaaccaagtaaa

SEQ ID NO: 529949 - DNA, 19 bp, Mus musculus
  siRNA target sequence for Pclo (NM_011995.2,14777-14795).
cgcattcaaccaagtaaaa

SEQ ID NO: 529950 - DNA, 19 bp, Mus musculus
  siRNA target sequence for Pclo (NM_011995.2,14779-14797).
cattcaaccaagtaaaaga

SEQ ID NO: 529951 - DNA, 19 bp, Mus musculus
  siRNA target sequence for Apbb1 (NM_009685.1,322-340).
gagaccagaaccgaaatgt

SEQ ID NO: 529952 - DNA, 19 bp, Mus musculus
  siRNA target sequence for Apbb1 (NM_009685.1,324-342).
gaccagaaccgaaatgtga

SEQ ID NO: 529953 - DNA, 19 bp, Mus musculus
  siRNA target sequence for Apbb1 (NM_009685.1,394-412).
gtcccaaaggcttaatgca

SEQ ID NO: 529954 - DNA, 19 bp, Mus musculus
  siRNA target sequence for Apbb1 (NM_009685.1,402-420).
ggcttaatgcatctatact

SEQ ID NO: 529955 - DNA, 19 bp, Mus musculus
  siRNA target sequence for Apbb1 (NM_009685.1,404-422).
cttaatgcatctatactct

SEQ ID NO: 529956 - DNA, 19 bp, Mus musculus
  siRNA target sequence for Apbb1 (NM_009685.1,469-487).
gatccgccttgatcatcaa

SEQ ID NO: 529957 - DNA, 19 bp, Mus musculus
  siRNA target sequence for Apbb1 (NM_009685.1,778-796).
cggaggacacagattcctt

SEQ ID NO: 529958 - DNA, 19 bp, Mus musculus
  siRNA target sequence for Apbb1 (NM_009685.1,1068-1086).
cccgaggaggcgacattgt

SEQ ID NO: 529959 - DNA, 19 bp, Mus musculus
  siRNA target sequence for Apbb1 (NM_009685.1,1242-1260).
gtggcagtcaacaattgta

SEQ ID NO: 529960 - DNA, 19 bp, Mus musculus
  siRNA target sequence for Apbb1 (NM_009685.1,1266-1284).
cagctctcctaccacaaaa

SEQ ID NO: 529961 - DNA, 19 bp, Mus musculus
  siRNA target sequence for Apbb1 (NM_009685.1,1269-1287).
ctctcctaccacaaaaaca

SEQ ID NO: 529962 - DNA, 19 bp, Mus musculus
  siRNA target sequence for Apbb1 (NM_009685.1,1274-1292).
ctaccacaaaaacaatcta

SEQ ID NO: 529963 - DNA, 19 bp, Mus musculus
  siRNA target sequence for Apbb1 (NM_009685.1,1459-1477).
cctacgtagctcgagataa

SEQ ID NO: 529964 - DNA, 19 bp, Mus musculus
  siRNA target sequence for Apbb1 (NM_009685.1,1515-1533).
gaggcacctgccaagaaca

SEQ ID NO: 529965 - DNA, 19 bp, Mus musculus
  siRNA target sequence for Apbb1 (NM_009685.1,1612-1630).
ccctagaccactctaaact

SEQ ID NO: 529966 - DNA, 19 bp, Mus musculus
  siRNA target sequence for Apbb1 (NM_009685.1,1631-1649).
cgtggatgtccctttccaa

SEQ ID NO: 529967 - DNA, 19 bp, Mus musculus
  siRNA target sequence for Apbb1 (NM_009685.1,1682-1700).
gcagaagttccaagtctat

SEQ ID NO: 529968 - DNA, 19 bp, Mus musculus
  siRNA target sequence for Apbb1 (NM_009685.1,1708-1726).
gaaatgtgccagttgctaa

SEQ ID NO: 529969 - DNA, 19 bp, Mus musculus
  siRNA target sequence for Apbb1 (NM_009685.1,1731-1749).
gttggggtagacgtgatta

SEQ ID NO: 529970 - DNA, 19 bp, Mus musculus
  siRNA target sequence for Apbb1 (NM_009685.1,1954-1972).
ccttctgctgtcacatgtt

SEQ ID NO: 529971 - DNA, 19 bp, Mus musculus
  siRNA target sequence for Apbb1 (NM_009685.1,1955-1973).
cttctgctgtcacatgttt

SEQ ID NO: 529972 - DNA, 19 bp, Mus musculus
  siRNA target sequence for Bbp (NM_053157.1,156-174).
cctcagggtgggacaatat

SEQ ID NO: 529973 - DNA, 19 bp, Mus musculus
  siRNA target sequence for Bbp (NM_053157.1,157-175).
ctcagggtgggacaatata

SEQ ID NO: 529974 - DNA, 19 bp, Mus musculus
  siRNA target sequence for Bbp (NM_053157.1,159-177).
cagggtgggacaatatatt

SEQ ID NO: 529975 - DNA, 19 bp, Mus musculus
  siRNA target sequence for Bbp (NM_053157.1,162-180).
ggtgggacaatatatttgt

SEQ ID NO: 529976 - DNA, 19 bp, Mus musculus
  siRNA target sequence for Bbp (NM_053157.1,163-181).
gtgggacaatatatttgta

SEQ ID NO: 529977 - DNA, 19 bp, Mus musculus
  siRNA target sequence for Bbp (NM_053157.1,203-221).
ctacgcaagaaccagttaa

SEQ ID NO: 529978 - DNA, 19 bp, Mus musculus
  siRNA target sequence for Bbp (NM_053157.1,207-225).
gcaagaaccagttaattgt

SEQ ID NO: 529979 - DNA, 19 bp, Mus musculus
  siRNA target sequence for Bbp (NM_053157.1,214-232).
ccagttaattgtacaaact

SEQ ID NO: 529980 - DNA, 19 bp, Mus musculus
  siRNA target sequence for Bbp (NM_053157.1,217-235).
gttaattgtacaaactaca

SEQ ID NO: 529981 - DNA, 19 bp, Mus musculus
  siRNA target sequence for Bbp (NM_053157.1,234-252).
cacagctcatgttcaatgt

SEQ ID NO: 529982 - DNA, 19 bp, Mus musculus
  siRNA target sequence for Bbp (NM_053157.1,236-254).
cagctcatgttcaatgttt

SEQ ID NO: 529983 - DNA, 19 bp, Mus musculus
  siRNA target sequence for Bbp (NM_053157.1,251-269).
gttttccagcacccaaaat

SEQ ID NO: 529984 - DNA, 19 bp, Mus musculus
  siRNA target sequence for Bbp (NM_053157.1,259-277).
gcacccaaaataacttgta

SEQ ID NO: 529985 - DNA, 19 bp, Mus musculus
  siRNA target sequence for Bbp (NM_053157.1,260-278).
cacccaaaataacttgtaa

SEQ ID NO: 529986 - DNA, 19 bp, Mus musculus
  siRNA target sequence for Bbp (NM_053157.1,264-282).
caaaataacttgtaaggat

SEQ ID NO: 529987 - DNA, 19 bp, Mus musculus
  siRNA target sequence for Bbp (NM_053157.1,279-297).
ggatttgagtggtaatgaa

SEQ ID NO: 529988 - DNA, 19 bp, Mus musculus
  siRNA target sequence for Bbp (NM_053157.1,287-305).
gtggtaatgaaacacattt

SEQ ID NO: 529989 - DNA, 19 bp, Mus musculus
  siRNA target sequence for Stxbp3 (NM_011504.1,70-88).
cgtcgtgtggcggaagata

SEQ ID NO: 529990 - DNA, 19 bp, Mus musculus
  siRNA target sequence for Stxbp3 (NM_011504.1,71-89).
gtcgtgtggcggaagataa

SEQ ID NO: 529991 - DNA, 19 bp, Mus musculus
  siRNA target sequence for Stxbp3 (NM_011504.1,73-91).
cgtgtggcggaagataaaa

SEQ ID NO: 529992 - DNA, 19 bp, Mus musculus
  siRNA target sequence for Stxbp3 (NM_011504.1,119-137).
gaaggcgaatggaagataa

SEQ ID NO: 529993 - DNA, 19 bp, Mus musculus
  siRNA target sequence for Stxbp3 (NM_011504.1,140-158).
ctgttagatgagtttacca

SEQ ID NO: 529994 - DNA, 19 bp, Mus musculus
  siRNA target sequence for Stxbp3 (NM_011504.1,149-167).
gagtttaccaccaaacttt

SEQ ID NO: 529995 - DNA, 19 bp, Mus musculus
  siRNA target sequence for Stxbp3 (NM_011504.1,200-218).
gaggagggcataactgtta

SEQ ID NO: 529996 - DNA, 19 bp, Mus musculus
  siRNA target sequence for Stxbp3 (NM_011504.1,239-257).
cgtgaacctgtcagacaaa

SEQ ID NO: 529997 - DNA, 19 bp, Mus musculus
  siRNA target sequence for Stxbp3 (NM_011504.1,240-258).
gtgaacctgtcagacaaat

SEQ ID NO: 529998 - DNA, 19 bp, Mus musculus
  siRNA target sequence for Stxbp3 (NM_011504.1,242-260).
gaacctgtcagacaaatga

SEQ ID NO: 529999 - DNA, 19 bp, Mus musculus
  siRNA target sequence for Stxbp3 (NM_011504.1,707-725).
ggcctaataaagggtaaaa

SEQ ID NO: 530000 - DNA, 19 bp, Mus musculus
  siRNA target sequence for Stxbp3 (NM_011504.1,726-744).
ctcagtcccagctcttaat

SEQ ID NO: 530001 - DNA, 19 bp, Mus musculus
  siRNA target sequence for Stxbp3 (NM_011504.1,730-748).
gtcccagctcttaataatt

SEQ ID NO: 530002 - DNA, 19 bp, Mus musculus
  siRNA target sequence for Stxbp3 (NM_011504.1,801-819).
caatggcatatgatctact

SEQ ID NO: 530003 - DNA, 19 bp, Mus musculus
  siRNA target sequence for Stxbp3 (NM_011504.1,812-830).
gatctactaccaattgaga

SEQ ID NO: 530004 - DNA, 19 bp, Mus musculus
  siRNA target sequence for Stxbp3 (NM_011504.1,865-883).
gaaggaggcagttcttgaa

SEQ ID NO: 530005 - DNA, 19 bp, Mus musculus
  siRNA target sequence for Stxbp3 (NM_011504.1,918-936).
ggcacatcgcggttgtgtt

SEQ ID NO: 530006 - DNA, 19 bp, Mus musculus
  siRNA target sequence for Stxbp3 (NM_011504.1,937-955).
ggaggaaattccaaagctt

SEQ ID NO: 530007 - DNA, 19 bp, Mus musculus
  siRNA target sequence for Stxbp3 (NM_011504.1,938-956).
gaggaaattccaaagctta

SEQ ID NO: 530008 - DNA, 19 bp, Mus musculus
  siRNA target sequence for Stxbp3 (NM_011504.1,941-959).
gaaattccaaagcttatga

SEQ ID NO: 530009 - DNA, 19 bp, Mus musculus
  siRNA target sequence for Stxbp3 (NM_011504.1,1011-1029).
ctcttacccagctgatgaa

SEQ ID NO: 530010 - DNA, 19 bp, Mus musculus
  siRNA target sequence for Stxbp3 (NM_011504.1,1017-1035).
cccagctgatgaaaaagat

SEQ ID NO: 530011 - DNA, 19 bp, Mus musculus
  siRNA target sequence for Stxbp3 (NM_011504.1,1095-1113).
gcatgaataagtttaagct

SEQ ID NO: 530012 - DNA, 19 bp, Mus musculus
  siRNA target sequence for Stxbp3 (NM_011504.1,1213-1231).
gctgctcaacaaaaaccat

SEQ ID NO: 530013 - DNA, 19 bp, Mus musculus
  siRNA target sequence for Stxbp3 (NM_011504.1,1229-1247).
catgacaactgcgacaaaa

SEQ ID NO: 530014 - DNA, 19 bp, Mus musculus
  siRNA target sequence for Stxbp3 (NM_011504.1,1251-1269).
gggcagtcctgctctacat

SEQ ID NO: 530015 - DNA, 19 bp, Mus musculus
  siRNA target sequence for Stxbp3 (NM_011504.1,1264-1282).
ctacatcttcgggattaat

SEQ ID NO: 530016 - DNA, 19 bp, Mus musculus
  siRNA target sequence for Stxbp3 (NM_011504.1,1337-1355).
gatagtgatatgattcgta

SEQ ID NO: 530017 - DNA, 19 bp, Mus musculus
  siRNA target sequence for Stxbp3 (NM_011504.1,1455-1473).
ggacaccttttatcaaaga

SEQ ID NO: 530018 - DNA, 19 bp, Mus musculus
  siRNA target sequence for Stxbp3 (NM_011504.1,1456-1474).
gacaccttttatcaaagat

SEQ ID NO: 530019 - DNA, 19 bp, Mus musculus
  siRNA target sequence for Stxbp3 (NM_011504.1,1488-1506).
ccattgataatagattaga

SEQ ID NO: 530020 - DNA, 19 bp, Mus musculus
  siRNA target sequence for Stxbp3 (NM_011504.1,1489-1507).
cattgataatagattagat

SEQ ID NO: 530021 - DNA, 19 bp, Mus musculus
  siRNA target sequence for Stxbp3 (NM_011504.1,1510-1528).
caaagagtggccgtattgt

SEQ ID NO: 530022 - DNA, 19 bp, Mus musculus
  siRNA target sequence for Stxbp3 (NM_011504.1,1584-1602).
ccagaactaactacttaga

SEQ ID NO: 530023 - DNA, 19 bp, Mus musculus
  siRNA target sequence for Stxbp3 (NM_011504.1,1620-1638).
ggtcaaggctgattatttt

SEQ ID NO: 530024 - DNA, 19 bp, Mus musculus
  siRNA target sequence for Stxbp3 (NM_011504.1,1626-1644).
ggctgattatttttgtaat

SEQ ID NO: 530025 - DNA, 19 bp, Mus musculus
  siRNA target sequence for Stxbp3 (NM_011504.1,1630-1648).
gattatttttgtaattgga

SEQ ID NO: 530026 - DNA, 19 bp, Mus musculus
  siRNA target sequence for Stxbp3 (NM_011504.1,1669-1687).
gcggtgtgcttatgaagtt

SEQ ID NO: 530027 - DNA, 19 bp, Mus musculus
  siRNA target sequence for Stxbp3 (NM_011504.1,1670-1688).
cggtgtgcttatgaagttt

SEQ ID NO: 530028 - DNA, 19 bp, Mus musculus
  siRNA target sequence for Stxbp3 (NM_011504.1,1705-1723).
ctgtgaggttattattggt

SEQ ID NO: 530029 - DNA, 19 bp, Mus musculus
  siRNA target sequence for Stxbp3 (NM_011504.1,1721-1739).
ggttccacacatattttaa

SEQ ID NO: 530030 - DNA, 19 bp, Mus musculus
  siRNA target sequence for Stxbp3 (NM_011504.1,1760-1778).
gatataaaaatgctgaata

SEQ ID NO: 530031 - DNA, 19 bp, Mus musculus
  siRNA target sequence for Stx1a (NM_016801.2,91-109).
cgcttcatggatgaattct

SEQ ID NO: 530032 - DNA, 19 bp, Mus musculus
  siRNA target sequence for Stx1a (NM_016801.2,92-110).
gcttcatggatgaattctt

SEQ ID NO: 530033 - DNA, 19 bp, Mus musculus
  siRNA target sequence for Stx1a (NM_016801.2,238-256).
gagctcatgtcggacatta

SEQ ID NO: 530034 - DNA, 19 bp, Mus musculus
  siRNA target sequence for Stx1a (NM_016801.2,372-390).
cacgctgtcccgaaagttt

SEQ ID NO: 530035 - DNA, 19 bp, Mus musculus
  siRNA target sequence for Stx1a (NM_016801.2,485-503).
ccacgaccagtgaggaatt

SEQ ID NO: 530036 - DNA, 19 bp, Mus musculus
  siRNA target sequence for Stx1a (NM_016801.2,488-506).
cgaccagtgaggaattgga

SEQ ID NO: 530037 - DNA, 19 bp, Mus musculus
  siRNA target sequence for Stx1a (NM_016801.2,599-617).
ccagacacagtgagatcat

SEQ ID NO: 530038 - DNA, 19 bp, Mus musculus
  siRNA target sequence for Ipo7 (NM_181517.1,85-103).
gcacacaagtctctgaatt

SEQ ID NO: 530039 - DNA, 19 bp, Mus musculus
  siRNA target sequence for Ipo7 (NM_181517.1,117-135).
gctccagattactatgtca

SEQ ID NO: 530040 - DNA, 19 bp, Mus musculus
  siRNA target sequence for Ipo7 (NM_181517.1,156-174).
gagacaggcaggtgttatt

SEQ ID NO: 530041 - DNA, 19 bp, Mus musculus
  siRNA target sequence for Ipo7 (NM_181517.1,158-176).
gacaggcaggtgttattta

SEQ ID NO: 530042 - DNA, 19 bp, Mus musculus
  siRNA target sequence for Ipo7 (NM_181517.1,234-252).
cgctccatatactattcca

SEQ ID NO: 530043 - DNA, 19 bp, Mus musculus
  siRNA target sequence for Ipo7 (NM_181517.1,301-319).
cactcacctgagcttatca

SEQ ID NO: 530044 - DNA, 19 bp, Mus musculus
  siRNA target sequence for Ipo7 (NM_181517.1,332-350).
ctacgtgcatccatcatat

SEQ ID NO: 530045 - DNA, 19 bp, Mus musculus
  siRNA target sequence for Ipo7 (NM_181517.1,335-353).
cgtgcatccatcatatcat

SEQ ID NO: 530046 - DNA, 19 bp, Mus musculus
  siRNA target sequence for Ipo7 (NM_181517.1,338-356).
gcatccatcatatcatcaa

SEQ ID NO: 530047 - DNA, 19 bp, Mus musculus
  siRNA target sequence for Ipo7 (NM_181517.1,339-357).
catccatcatatcatcaaa

SEQ ID NO: 530048 - DNA, 19 bp, Mus musculus
  siRNA target sequence for Ipo7 (NM_181517.1,342-360).
ccatcatatcatcaaacat

SEQ ID NO: 530049 - DNA, 19 bp, Mus musculus
  siRNA target sequence for Ipo7 (NM_181517.1,390-408).
ggacaagattggcttttat

SEQ ID NO: 530050 - DNA, 19 bp, Mus musculus
  siRNA target sequence for Ipo7 (NM_181517.1,582-600).
ccagtctgtcctcattcaa

SEQ ID NO: 530051 - DNA, 19 bp, Mus musculus
  siRNA target sequence for Ipo7 (NM_181517.1,606-624).
gatattcaagatcttctat

SEQ ID NO: 530052 - DNA, 19 bp, Mus musculus
  siRNA target sequence for Ipo7 (NM_181517.1,654-672).
gctgataaaccaacagaat

SEQ ID NO: 530053 - DNA, 19 bp, Mus musculus
  siRNA target sequence for Ipo7 (NM_181517.1,677-695).
ctgaatgggtagaaatttt

SEQ ID NO: 530054 - DNA, 19 bp, Mus musculus
  siRNA target sequence for Ipo7 (NM_181517.1,679-697).
gaatgggtagaaattttga

SEQ ID NO: 530055 - DNA, 19 bp, Mus musculus
  siRNA target sequence for Ipo7 (NM_181517.1,714-732).
ggatgtacctaatgaaaca

SEQ ID NO: 530056 - DNA, 19 bp, Mus musculus
  siRNA target sequence for Ipo7 (NM_181517.1,722-740).
ctaatgaaacacttcaagt

SEQ ID NO: 530057 - DNA, 19 bp, Mus musculus
  siRNA target sequence for Ipo7 (NM_181517.1,760-778).
gagttaccctggtggaaat

SEQ ID NO: 530058 - DNA, 19 bp, Mus musculus
  siRNA target sequence for Ipo7 (NM_181517.1,762-780).
gttaccctggtggaaatgt

SEQ ID NO: 530059 - DNA, 19 bp, Mus musculus
  siRNA target sequence for Ipo7 (NM_181517.1,767-785).
cctggtggaaatgtaagaa

SEQ ID NO: 530060 - DNA, 19 bp, Mus musculus
  siRNA target sequence for Ipo7 (NM_181517.1,783-801).
gaagtgggccttacatatt

SEQ ID NO: 530061 - DNA, 19 bp, Mus musculus
  siRNA target sequence for Ipo7 (NM_181517.1,786-804).
gtgggccttacatatttta

SEQ ID NO: 530062 - DNA, 19 bp, Mus musculus
  siRNA target sequence for Ipo7 (NM_181517.1,789-807).
ggccttacatattttagca

SEQ ID NO: 530063 - DNA, 19 bp, Mus musculus
  siRNA target sequence for Ipo7 (NM_181517.1,790-808).
gccttacatattttagcaa

SEQ ID NO: 530064 - DNA, 19 bp, Mus musculus
  siRNA target sequence for Ipo7 (NM_181517.1,826-844).
ggaagccctgggaatgttt

SEQ ID NO: 530065 - DNA, 19 bp, Mus musculus
  siRNA target sequence for Ipo7 (NM_181517.1,892-910).
gttggtgtccagcaagttt

SEQ ID NO: 530066 - DNA, 19 bp, Mus musculus
  siRNA target sequence for Ipo7 (NM_181517.1,898-916).
gtccagcaagttttattga

SEQ ID NO: 530067 - DNA, 19 bp, Mus musculus
  siRNA target sequence for Ipo7 (NM_181517.1,904-922).
caagttttattgaaagtgt

SEQ ID NO: 530068 - DNA, 19 bp, Mus musculus
  siRNA target sequence for Ipo7 (NM_181517.1,928-946).
cagtacaaggaaaaacaat

SEQ ID NO: 530069 - DNA, 19 bp, Mus musculus
  siRNA target sequence for Ipo7 (NM_181517.1,1031-1049).
cccatatacaaggcattat

SEQ ID NO: 530070 - DNA, 19 bp, Mus musculus
  siRNA target sequence for Ipo7 (NM_181517.1,1120-1138).
gaatatatacgcatgaagt

SEQ ID NO: 530071 - DNA, 19 bp, Mus musculus
  siRNA target sequence for Ipo7 (NM_181517.1,1134-1152).
gaagttcgatgtgtttgaa

SEQ ID NO: 530072 - DNA, 19 bp, Mus musculus
  siRNA target sequence for Ipo7 (NM_181517.1,1191-1209).
gtttacagcctgtagcaaa

SEQ ID NO: 530073 - DNA, 19 bp, Mus musculus
  siRNA target sequence for Ipo7 (NM_181517.1,1196-1214).
cagcctgtagcaaaaggaa

SEQ ID NO: 530074 - DNA, 19 bp, Mus musculus
  siRNA target sequence for Ipo7 (NM_181517.1,1218-1236).
ggtagtactgcaaaagact

SEQ ID NO: 530075 - DNA, 19 bp, Mus musculus
  siRNA target sequence for Ipo7 (NM_181517.1,1219-1237).
gtagtactgcaaaagacta

SEQ ID NO: 530076 - DNA, 19 bp, Mus musculus
  siRNA target sequence for Ipo7 (NM_181517.1,1247-1265).
gttaccaaattcttactga

SEQ ID NO: 530077 - DNA, 19 bp, Mus musculus
  siRNA target sequence for Ipo7 (NM_181517.1,1274-1292).
ctgatcctcggaaaaaaga

SEQ ID NO: 530078 - DNA, 19 bp, Mus musculus
  siRNA target sequence for Ipo7 (NM_181517.1,1302-1320).
gcatatgattggctcttta

SEQ ID NO: 530079 - DNA, 19 bp, Mus musculus
  siRNA target sequence for Ipo7 (NM_181517.1,1437-1455).
ggttcttcactatttttgt

SEQ ID NO: 530080 - DNA, 19 bp, Mus musculus
  siRNA target sequence for Ipo7 (NM_181517.1,1492-1510).
gctttagagctgacaagaa

SEQ ID NO: 530081 - DNA, 19 bp, Mus musculus
  siRNA target sequence for Ipo7 (NM_181517.1,1561-1579).
gcactacaggtgttgatca

SEQ ID NO: 530082 - DNA, 19 bp, Mus musculus
  siRNA target sequence for Ipo7 (NM_181517.1,1569-1587).
ggtgttgatcagcaatcaa

SEQ ID NO: 530083 - DNA, 19 bp, Mus musculus
  siRNA target sequence for Ipo7 (NM_181517.1,1605-1623).
catcactccatttatcaga

SEQ ID NO: 530084 - DNA, 19 bp, Mus musculus
  siRNA target sequence for Ipo7 (NM_181517.1,1635-1653).
ggctcttcttcatattata

SEQ ID NO: 530085 - DNA, 19 bp, Mus musculus
  siRNA target sequence for Ipo7 (NM_181517.1,1636-1654).
gctcttcttcatattataa

SEQ ID NO: 530086 - DNA, 19 bp, Mus musculus
  siRNA target sequence for Ipo7 (NM_181517.1,1669-1687).
gatgatcttacaaatgtaa

SEQ ID NO: 530087 - DNA, 19 bp, Mus musculus
  siRNA target sequence for Ipo7 (NM_181517.1,1690-1708).
cagaaaatgatctgtgaat

SEQ ID NO: 530088 - DNA, 19 bp, Mus musculus
  siRNA target sequence for Ipo7 (NM_181517.1,1692-1710).
gaaaatgatctgtgaatat

SEQ ID NO: 530089 - DNA, 19 bp, Mus musculus
  siRNA target sequence for Ipo7 (NM_181517.1,1703-1721).
gtgaatatagtgaagaagt

SEQ ID NO: 530090 - DNA, 19 bp, Mus musculus
  siRNA target sequence for Ipo7 (NM_181517.1,1750-1768).
catctggcaatgacattta

SEQ ID NO: 530091 - DNA, 19 bp, Mus musculus
  siRNA target sequence for Ipo7 (NM_181517.1,1823-1841).
ctgctatgggaattctgaa

SEQ ID NO: 530092 - DNA, 19 bp, Mus musculus
  siRNA target sequence for Ipo7 (NM_181517.1,1904-1922).
gaatctgcttacaagtcat

SEQ ID NO: 530093 - DNA, 19 bp, Mus musculus
  siRNA target sequence for Ipo7 (NM_181517.1,1920-1938).
cattgggaccgttctacaa

SEQ ID NO: 530094 - DNA, 19 bp, Mus musculus
  siRNA target sequence for Ipo7 (NM_181517.1,2009-2027).
ctcagatgtggcagttact

SEQ ID NO: 530095 - DNA, 19 bp, Mus musculus
  siRNA target sequence for Ipo7 (NM_181517.1,2085-2103).
gcctcttctacataactat

SEQ ID NO: 530096 - DNA, 19 bp, Mus musculus
  siRNA target sequence for Ipo7 (NM_181517.1,2089-2107).
cttctacataactatgtaa

SEQ ID NO: 530097 - DNA, 19 bp, Mus musculus
  siRNA target sequence for Ipo7 (NM_181517.1,2149-2167).
gagatgatatacagtatgt

SEQ ID NO: 530098 - DNA, 19 bp, Mus musculus
  siRNA target sequence for Ipo7 (NM_181517.1,2206-2224).
gaatgccatgcggcaaaat

SEQ ID NO: 530099 - DNA, 19 bp, Mus musculus
  siRNA target sequence for Ipo7 (NM_181517.1,2210-2228).
gccatgcggcaaaattgtt

SEQ ID NO: 530100 - DNA, 19 bp, Mus musculus
  siRNA target sequence for Ipo7 (NM_181517.1,2259-2277).
gggcattgatcagtgtata

SEQ ID NO: 530101 - DNA, 19 bp, Mus musculus
  siRNA target sequence for Ipo7 (NM_181517.1,2286-2304).
cgtggaagcagctttagaa

SEQ ID NO: 530102 - DNA, 19 bp, Mus musculus
  siRNA target sequence for Ipo7 (NM_181517.1,2308-2326).
ctgaccagagaggttaaaa

SEQ ID NO: 530103 - DNA, 19 bp, Mus musculus
  siRNA target sequence for Ipo7 (NM_181517.1,2346-2364).
gtgcctgcaggttgcaatt

SEQ ID NO: 530104 - DNA, 19 bp, Mus musculus
  siRNA target sequence for Ipo7 (NM_181517.1,2359-2377).
gcaattgcagcattgtatt

SEQ ID NO: 530105 - DNA, 19 bp, Mus musculus
  siRNA target sequence for Ipo7 (NM_181517.1,2360-2378).
caattgcagcattgtatta

SEQ ID NO: 530106 - DNA, 19 bp, Mus musculus
  siRNA target sequence for Ipo7 (NM_181517.1,2388-2406).
cctactgcttaatacttta

SEQ ID NO: 530107 - DNA, 19 bp, Mus musculus
  siRNA target sequence for Ipo7 (NM_181517.1,2434-2452).
gaacctgttacaaatcatt

SEQ ID NO: 530108 - DNA, 19 bp, Mus musculus
  siRNA target sequence for Ipo7 (NM_181517.1,2440-2458).
gttacaaatcattttatca

SEQ ID NO: 530109 - DNA, 19 bp, Mus musculus
  siRNA target sequence for Ipo7 (NM_181517.1,2502-2520).
caggaagatgtgtgttctt

SEQ ID NO: 530110 - DNA, 19 bp, Mus musculus
  siRNA target sequence for Ipo7 (NM_181517.1,2522-2540).
gcctatgcgcccttattga

SEQ ID NO: 530111 - DNA, 19 bp, Mus musculus
  siRNA target sequence for Ipo7 (NM_181517.1,2528-2546).
gcgcccttattgatatgga

SEQ ID NO: 530112 - DNA, 19 bp, Mus musculus
  siRNA target sequence for Ipo7 (NM_181517.1,2939-2957).
ctttgactcacggtcttaa

SEQ ID NO: 530113 - DNA, 19 bp, Mus musculus
  siRNA target sequence for Ipo7 (NM_181517.1,2945-2963).
ctcacggtcttaatgaaga

SEQ ID NO: 530114 - DNA, 19 bp, Mus musculus
  siRNA target sequence for Ipo7 (NM_181517.1,2989-3007).
gcaactctagctgatcaaa

SEQ ID NO: 530115 - DNA, 19 bp, Mus musculus
  siRNA target sequence for Ipo7 (NM_181517.1,3014-3032).
cagcccatgagtccaaaat

SEQ ID NO: 530116 - DNA, 19 bp, Mus musculus
  siRNA target sequence for Ipo7 (NM_181517.1,3100-3118).
ccagcaccggggatgaatt

SEQ ID NO: 530117 - DNA, 19 bp, Mus musculus
  siRNA target sequence for Nasp (NM_016777.2,133-151).
gctggtttccgctgacaaa

SEQ ID NO: 530118 - DNA, 19 bp, Mus musculus
  siRNA target sequence for Nasp (NM_016777.2,134-152).
ctggtttccgctgacaaaa

SEQ ID NO: 530119 - DNA, 19 bp, Mus musculus
  siRNA target sequence for Nasp (NM_016777.2,141-159).
ccgctgacaaaattgaaga

SEQ ID NO: 530120 - DNA, 19 bp, Mus musculus
  siRNA target sequence for Nasp (NM_016777.2,142-160).
cgctgacaaaattgaagat

SEQ ID NO: 530121 - DNA, 19 bp, Mus musculus
  siRNA target sequence for Nasp (NM_016777.2,171-189).
cttctacctcggcagataa

SEQ ID NO: 530122 - DNA, 19 bp, Mus musculus
  siRNA target sequence for Nasp (NM_016777.2,213-231).
gtgaagctaagaaactact

SEQ ID NO: 530123 - DNA, 19 bp, Mus musculus
  siRNA target sequence for Nasp (NM_016777.2,232-250).
gggattaggacagaaacat

SEQ ID NO: 530124 - DNA, 19 bp, Mus musculus
  siRNA target sequence for Nasp (NM_016777.2,289-307).
ccaggaagcagctagtctt

SEQ ID NO: 530125 - DNA, 19 bp, Mus musculus
  siRNA target sequence for Nasp (NM_016777.2,290-308).
caggaagcagctagtcttt

SEQ ID NO: 530126 - DNA, 19 bp, Mus musculus
  siRNA target sequence for Nasp (NM_016777.2,297-315).
cagctagtcttttaggtaa

SEQ ID NO: 530127 - DNA, 19 bp, Mus musculus
  siRNA target sequence for Nasp (NM_016777.2,303-321).
gtcttttaggtaagaagta

SEQ ID NO: 530128 - DNA, 19 bp, Mus musculus
  siRNA target sequence for Nasp (NM_016777.2,323-341).
ggagaaacggctaatgagt

SEQ ID NO: 530129 - DNA, 19 bp, Mus musculus
  siRNA target sequence for Nasp (NM_016777.2,681-699).
cagttgaaccgacttcaaa

SEQ ID NO: 530130 - DNA, 19 bp, Mus musculus
  siRNA target sequence for Nasp (NM_016777.2,689-707).
ccgacttcaaagcagttaa

SEQ ID NO: 530131 - DNA, 19 bp, Mus musculus
  siRNA target sequence for Nasp (NM_016777.2,691-709).
gacttcaaagcagttaact

SEQ ID NO: 530132 - DNA, 19 bp, Mus musculus
  siRNA target sequence for Nasp (NM_016777.2,693-711).
cttcaaagcagttaactga

SEQ ID NO: 530133 - DNA, 19 bp, Mus musculus
  siRNA target sequence for Nasp (NM_016777.2,816-834).
caatttcaggagcttatgt

SEQ ID NO: 530134 - DNA, 19 bp, Mus musculus
  siRNA target sequence for Nasp (NM_016777.2,822-840).
caggagcttatgttcaaaa

SEQ ID NO: 530135 - DNA, 19 bp, Mus musculus
  siRNA target sequence for Nasp (NM_016777.2,865-883).
ggagggagaggaaataata

SEQ ID NO: 530136 - DNA, 19 bp, Mus musculus
  siRNA target sequence for Nasp (NM_016777.2,1017-1035).
gggaggagccaaaagatca

SEQ ID NO: 530137 - DNA, 19 bp, Mus musculus
  siRNA target sequence for Nasp (NM_016777.2,1047-1065).
ctgagagtgaactaggtaa

SEQ ID NO: 530138 - DNA, 19 bp, Mus musculus
  siRNA target sequence for Nasp (NM_016777.2,1058-1076).
ctaggtaaggctgttctta

SEQ ID NO: 530139 - DNA, 19 bp, Mus musculus
  siRNA target sequence for Nasp (NM_016777.2,1084-1102).
gtcagggcaagatgttgaa

SEQ ID NO: 530140 - DNA, 19 bp, Mus musculus
  siRNA target sequence for Nasp (NM_016777.2,1156-1174).
gcaggagattacagttatt

SEQ ID NO: 530141 - DNA, 19 bp, Mus musculus
  siRNA target sequence for Nasp (NM_016777.2,1187-1205).
ccagttgttggacaatcaa

SEQ ID NO: 530142 - DNA, 19 bp, Mus musculus
  siRNA target sequence for Nasp (NM_016777.2,1247-1265).
gaaagactgacagaaacta

SEQ ID NO: 530143 - DNA, 19 bp, Mus musculus
  siRNA target sequence for Nasp (NM_016777.2,1400-1418).
gcacctgaagacaaattta

SEQ ID NO: 530144 - DNA, 19 bp, Mus musculus
  siRNA target sequence for Nasp (NM_016777.2,1449-1467).
gagacgaacagatgaaaga

SEQ ID NO: 530145 - DNA, 19 bp, Mus musculus
  siRNA target sequence for Nasp (NM_016777.2,1530-1548).
caaatgaatcagttcttga

SEQ ID NO: 530146 - DNA, 19 bp, Mus musculus
  siRNA target sequence for Nasp (NM_016777.2,1602-1620).
cctgggatatgctggattt

SEQ ID NO: 530147 - DNA, 19 bp, Mus musculus
  siRNA target sequence for Nasp (NM_016777.2,1603-1621).
ctgggatatgctggattta

SEQ ID NO: 530148 - DNA, 19 bp, Mus musculus
  siRNA target sequence for Nasp (NM_016777.2,1670-1688).
gctgcacaagcccatctta

SEQ ID NO: 530149 - DNA, 19 bp, Mus musculus
  siRNA target sequence for Nasp (NM_016777.2,1671-1689).
ctgcacaagcccatcttaa

SEQ ID NO: 530150 - DNA, 19 bp, Mus musculus
  siRNA target sequence for Nasp (NM_016777.2,1704-1722).
gtgttgaatctgagaatta

SEQ ID NO: 530151 - DNA, 19 bp, Mus musculus
  siRNA target sequence for Nasp (NM_016777.2,1804-1822).
gactcactaccaattaggt

SEQ ID NO: 530152 - DNA, 19 bp, Mus musculus
  siRNA target sequence for Nasp (NM_016777.2,1833-1851).
gttacaactctcagtatga

SEQ ID NO: 530153 - DNA, 19 bp, Mus musculus
  siRNA target sequence for Nasp (NM_016777.2,1867-1885).
gtttggcaaatctatcgat

SEQ ID NO: 530154 - DNA, 19 bp, Mus musculus
  siRNA target sequence for Nasp (NM_016777.2,1872-1890).
gcaaatctatcgatgtcat

SEQ ID NO: 530155 - DNA, 19 bp, Mus musculus
  siRNA target sequence for Nasp (NM_016777.2,1873-1891).
caaatctatcgatgtcatt

SEQ ID NO: 530156 - DNA, 19 bp, Mus musculus
  siRNA target sequence for Nasp (NM_016777.2,1878-1896).
ctatcgatgtcattgaaaa

SEQ ID NO: 530157 - DNA, 19 bp, Mus musculus
  siRNA target sequence for Nasp (NM_016777.2,1928-1946).
gaggccgaaggatcgttta

SEQ ID NO: 530158 - DNA, 19 bp, Mus musculus
  siRNA target sequence for Nasp (NM_016777.2,1930-1948).
ggccgaaggatcgtttact

SEQ ID NO: 530159 - DNA, 19 bp, Mus musculus
  siRNA target sequence for Nasp (NM_016777.2,1932-1950).
ccgaaggatcgtttactga

SEQ ID NO: 530160 - DNA, 19 bp, Mus musculus
  siRNA target sequence for Nasp (NM_016777.2,1933-1951).
cgaaggatcgtttactgaa

SEQ ID NO: 530161 - DNA, 19 bp, Mus musculus
  siRNA target sequence for Nasp (NM_016777.2,1934-1952).
gaaggatcgtttactgaat

SEQ ID NO: 530162 - DNA, 19 bp, Mus musculus
  siRNA target sequence for Nasp (NM_016777.2,2048-2066).
gaactggcactgaaagcta

SEQ ID NO: 530163 - DNA, 19 bp, Mus musculus
  siRNA target sequence for Nasp (NM_016777.2,2069-2087).
ctggtggagagctctactt

SEQ ID NO: 530164 - DNA, 19 bp, Mus musculus
  siRNA target sequence for Nasp (NM_016777.2,2109-2127).
ctggtgcctcagtatccat

SEQ ID NO: 530165 - DNA, 19 bp, Mus musculus
  siRNA target sequence for Nasp (NM_016777.2,2128-2146).
gattgccagtagaaaacca

SEQ ID NO: 530166 - DNA, 19 bp, Mus musculus
  siRNA target sequence for Nasp (NM_016777.2,2229-2247).
cccggaaggatgatgcaaa

SEQ ID NO: 530167 - DNA, 19 bp, Mus musculus
  siRNA target sequence for Dctn6 (NM_011722.1,65-83).
cgaaatcagaggagatgta

SEQ ID NO: 530168 - DNA, 19 bp, Mus musculus
  siRNA target sequence for Dctn6 (NM_011722.1,66-84).
gaaatcagaggagatgtaa

SEQ ID NO: 530169 - DNA, 19 bp, Mus musculus
  siRNA target sequence for Dctn6 (NM_011722.1,101-119).
ggtgatccaccctaaagca

SEQ ID NO: 530170 - DNA, 19 bp, Mus musculus
  siRNA target sequence for Dctn6 (NM_011722.1,107-125).
ccaccctaaagcacgaatt

SEQ ID NO: 530171 - DNA, 19 bp, Mus musculus
  siRNA target sequence for Dctn6 (NM_011722.1,108-126).
caccctaaagcacgaatta

SEQ ID NO: 530172 - DNA, 19 bp, Mus musculus
  siRNA target sequence for Dctn6 (NM_011722.1,154-172).
gtgaaggaaacctgataga

SEQ ID NO: 530173 - DNA, 19 bp, Mus musculus
  siRNA target sequence for Dctn6 (NM_011722.1,179-197).
ggccctcatcataaatgct

SEQ ID NO: 530174 - DNA, 19 bp, Mus musculus
  siRNA target sequence for Dctn6 (NM_011722.1,195-213).
gctcatccggataacatca

SEQ ID NO: 530175 - DNA, 19 bp, Mus musculus
  siRNA target sequence for Dctn6 (NM_011722.1,196-214).
ctcatccggataacatcat

SEQ ID NO: 530176 - DNA, 19 bp, Mus musculus
  siRNA target sequence for Dctn6 (NM_011722.1,234-252).
gagcccaaacctatgatta

SEQ ID NO: 530177 - DNA, 19 bp, Mus musculus
  siRNA target sequence for Dctn6 (NM_011722.1,236-254).
gcccaaacctatgattatt

SEQ ID NO: 530178 - DNA, 19 bp, Mus musculus
  siRNA target sequence for Dctn6 (NM_011722.1,256-274).
gcaccaacaacgtatttga

SEQ ID NO: 530179 - DNA, 19 bp, Mus musculus
  siRNA target sequence for Dctn6 (NM_011722.1,257-275).
caccaacaacgtatttgaa

SEQ ID NO: 530180 - DNA, 19 bp, Mus musculus
  siRNA target sequence for Dctn6 (NM_011722.1,259-277).
ccaacaacgtatttgaagt

SEQ ID NO: 530181 - DNA, 19 bp, Mus musculus
  siRNA target sequence for Dctn6 (NM_011722.1,305-323).
gggagacaataatgtcatt

SEQ ID NO: 530182 - DNA, 19 bp, Mus musculus
  siRNA target sequence for Dctn6 (NM_011722.1,359-377).
gaccagcggctgcatcatt

SEQ ID NO: 530183 - DNA, 19 bp, Mus musculus
  siRNA target sequence for Dctn6 (NM_011722.1,470-488).
gccacagccccagacttta

SEQ ID NO: 530184 - DNA, 19 bp, Mus musculus
  siRNA target sequence for Dctn6 (NM_011722.1,472-490).
cacagccccagactttaca

SEQ ID NO: 530185 - DNA, 19 bp, Mus musculus
  siRNA target sequence for Dctn6 (NM_011722.1,550-568).
gcagctccaccccagttaa

SEQ ID NO: 530186 - DNA, 19 bp, Mus musculus
  siRNA target sequence for Dctn6 (NM_011722.1,553-571).
gctccaccccagttaagaa

SEQ ID NO: 530187 - DNA, 19 bp, Mus musculus
  siRNA target sequence for Nxt1 (NM_019761.4,260-278).
gcatcagtagatttcaaga

SEQ ID NO: 530188 - DNA, 19 bp, Mus musculus
  siRNA target sequence for Nxt1 (NM_019761.4,325-343).
ctattacacgactatggat

SEQ ID NO: 530189 - DNA, 19 bp, Mus musculus
  siRNA target sequence for Nxt1 (NM_019761.4,373-391).
catgggcacagccacttta

SEQ ID NO: 530190 - DNA, 19 bp, Mus musculus
  siRNA target sequence for Nxt1 (NM_019761.4,376-394).
gggcacagccactttagta

SEQ ID NO: 530191 - DNA, 19 bp, Mus musculus
  siRNA target sequence for Nxt1 (NM_019761.4,377-395).
ggcacagccactttagtat

SEQ ID NO: 530192 - DNA, 19 bp, Mus musculus
  siRNA target sequence for Nxt1 (NM_019761.4,422-440).
gaatccttgagtgagtttt

SEQ ID NO: 530193 - DNA, 19 bp, Mus musculus
  siRNA target sequence for Nxt1 (NM_019761.4,452-470).
ccttccagtgagttccaaa

SEQ ID NO: 530194 - DNA, 19 bp, Mus musculus
  siRNA target sequence for Nxt1 (NM_019761.4,608-626).
caggcgtcacccagtaaca

SEQ ID NO: 530195 - DNA, 19 bp, Mus musculus
  siRNA target sequence for Snx17 (NM_153680.1,280-298).
ccaaagaagctgttctctt

SEQ ID NO: 530196 - DNA, 19 bp, Mus musculus
  siRNA target sequence for Snx17 (NM_153680.1,468-486).
cagcaatggacagaaagtt

SEQ ID NO: 530197 - DNA, 19 bp, Mus musculus
  siRNA target sequence for Snx17 (NM_153680.1,470-488).
gcaatggacagaaagttct

SEQ ID NO: 530198 - DNA, 19 bp, Mus musculus
  siRNA target sequence for Snx17 (NM_153680.1,559-577).
gatgacttgatcggatatt

SEQ ID NO: 530199 - DNA, 19 bp, Mus musculus
  siRNA target sequence for Snx17 (NM_153680.1,562-580).
gacttgatcggatatttta

SEQ ID NO: 530200 - DNA, 19 bp, Mus musculus
  siRNA target sequence for Snx17 (NM_153680.1,564-582).
cttgatcggatattttagt

SEQ ID NO: 530201 - DNA, 19 bp, Mus musculus
  siRNA target sequence for Snx17 (NM_153680.1,671-689).
gtcttcggagtcaagagta

SEQ ID NO: 530202 - DNA, 19 bp, Mus musculus
  siRNA target sequence for Snx17 (NM_153680.1,673-691).
cttcggagtcaagagtata

SEQ ID NO: 530203 - DNA, 19 bp, Mus musculus
  siRNA target sequence for Snx17 (NM_153680.1,676-694).
cggagtcaagagtataaga

SEQ ID NO: 530204 - DNA, 19 bp, Mus musculus
  siRNA target sequence for Snx17 (NM_153680.1,677-695).
ggagtcaagagtataagat

SEQ ID NO: 530205 - DNA, 19 bp, Mus musculus
  siRNA target sequence for Snx17 (NM_153680.1,678-696).
gagtcaagagtataagatt

SEQ ID NO: 530206 - DNA, 19 bp, Mus musculus
  siRNA target sequence for Snx17 (NM_153680.1,680-698).
gtcaagagtataagattgt

SEQ ID NO: 530207 - DNA, 19 bp, Mus musculus
  siRNA target sequence for Snx17 (NM_153680.1,693-711).
gattgtgctcagaaagagt

SEQ ID NO: 530208 - DNA, 19 bp, Mus musculus
  siRNA target sequence for Snx17 (NM_153680.1,697-715).
gtgctcagaaagagttatt

SEQ ID NO: 530209 - DNA, 19 bp, Mus musculus
  siRNA target sequence for Snx17 (NM_153680.1,725-743).
cctatgacgacgatgtcat

SEQ ID NO: 530210 - DNA, 19 bp, Mus musculus
  siRNA target sequence for Snx17 (NM_153680.1,828-846).
gcaccggcagctcaaatct

SEQ ID NO: 530211 - DNA, 19 bp, Mus musculus
  siRNA target sequence for Snx17 (NM_153680.1,1196-1214).
gcccacaggctatcatgat

SEQ ID NO: 530212 - DNA, 19 bp, Mus musculus
  siRNA target sequence for Snx17 (NM_153680.1,1386-1404).
ggtgaaactctcaagtaaa

SEQ ID NO: 530213 - DNA, 19 bp, Mus musculus
  siRNA target sequence for Snx17 (NM_153680.1,1460-1478).
gtgccgtccacggcaattt

SEQ ID NO: 530214 - DNA, 19 bp, Mus musculus
  siRNA target sequence for Apc (NM_007462.1,8-26).
cagcttcatatgatcagtt

SEQ ID NO: 530215 - DNA, 19 bp, Mus musculus
  siRNA target sequence for Apc (NM_007462.1,78-96).
gctagaagataattccaat

SEQ ID NO: 530216 - DNA, 19 bp, Mus musculus
  siRNA target sequence for Apc (NM_007462.1,92-110).
ccaatcatcttacaaaact

SEQ ID NO: 530217 - DNA, 19 bp, Mus musculus
  siRNA target sequence for Apc (NM_007462.1,111-129).
ggaaactgaggcatctaat

SEQ ID NO: 530218 - DNA, 19 bp, Mus musculus
  siRNA target sequence for Apc (NM_007462.1,116-134).
ctgaggcatctaatatgaa

SEQ ID NO: 530219 - DNA, 19 bp, Mus musculus
  siRNA target sequence for Apc (NM_007462.1,125-143).
ctaatatgaaggaagtact

SEQ ID NO: 530220 - DNA, 19 bp, Mus musculus
  siRNA target sequence for Apc (NM_007462.1,161-179).
gtattgaagatgagactat

SEQ ID NO: 530221 - DNA, 19 bp, Mus musculus
  siRNA target sequence for Apc (NM_007462.1,166-184).
gaagatgagactatgactt

SEQ ID NO: 530222 - DNA, 19 bp, Mus musculus
  siRNA target sequence for Apc (NM_007462.1,185-203).
ctggacagattgacttact

SEQ ID NO: 530223 - DNA, 19 bp, Mus musculus
  siRNA target sequence for Apc (NM_007462.1,188-206).
gacagattgacttactaga

SEQ ID NO: 530224 - DNA, 19 bp, Mus musculus
  siRNA target sequence for Apc (NM_007462.1,198-216).
cttactagagcgtcttaaa

SEQ ID NO: 530225 - DNA, 19 bp, Mus musculus
  siRNA target sequence for Apc (NM_007462.1,205-223).
gagcgtcttaaagaattta

SEQ ID NO: 530226 - DNA, 19 bp, Mus musculus
  siRNA target sequence for Apc (NM_007462.1,217-235).
gaatttaacttagatagta

SEQ ID NO: 530227 - DNA, 19 bp, Mus musculus
  siRNA target sequence for Apc (NM_007462.1,247-265).
gtgaaactacgctcaaaaa

SEQ ID NO: 530228 - DNA, 19 bp, Mus musculus
  siRNA target sequence for Apc (NM_007462.1,339-357).
ggggtcattcccaagaaga

SEQ ID NO: 530229 - DNA, 19 bp, Mus musculus
  siRNA target sequence for Apc (NM_007462.1,381-399).
gagtactgggtatctagaa

SEQ ID NO: 530230 - DNA, 19 bp, Mus musculus
  siRNA target sequence for Apc (NM_007462.1,426-444).
ccttgctgatcttgacaaa

SEQ ID NO: 530231 - DNA, 19 bp, Mus musculus
  siRNA target sequence for Apc (NM_007462.1,462-480).
ctggtattatgctcaactt

SEQ ID NO: 530232 - DNA, 19 bp, Mus musculus
  siRNA target sequence for Apc (NM_007462.1,464-482).
ggtattatgctcaacttca

SEQ ID NO: 530233 - DNA, 19 bp, Mus musculus
  siRNA target sequence for Apc (NM_007462.1,486-504).
cctcacaaaaagaatagat

SEQ ID NO: 530234 - DNA, 19 bp, Mus musculus
  siRNA target sequence for Apc (NM_007462.1,630-648).
gcgtgcacagcgaagaata

SEQ ID NO: 530235 - DNA, 19 bp, Mus musculus
  siRNA target sequence for Apc (NM_007462.1,681-699).
gcgcgtgcgccagctttta

SEQ ID NO: 530236 - DNA, 19 bp, Mus musculus
  siRNA target sequence for Apc (NM_007462.1,683-701).
gcgtgcgccagcttttaca

SEQ ID NO: 530237 - DNA, 19 bp, Mus musculus
  siRNA target sequence for Apc (NM_007462.1,685-703).
gtgcgccagcttttacagt

SEQ ID NO: 530238 - DNA, 19 bp, Mus musculus
  siRNA target sequence for Apc (NM_007462.1,850-868).
cacgaaacagccagtgttt

SEQ ID NO: 530239 - DNA, 19 bp, Mus musculus
  siRNA target sequence for Apc (NM_007462.1,937-955).
gtgtattccttgttgtcaa

SEQ ID NO: 530240 - DNA, 19 bp, Mus musculus
  siRNA target sequence for Apc (NM_007462.1,951-969).
gtcaatgcttggtactcat

SEQ ID NO: 530241 - DNA, 19 bp, Mus musculus
  siRNA target sequence for Apc (NM_007462.1,967-985).
catgataaggacgatatgt

SEQ ID NO: 530242 - DNA, 19 bp, Mus musculus
  siRNA target sequence for Apc (NM_007462.1,986-1004).
cacgaactttgctagctat

SEQ ID NO: 530243 - DNA, 19 bp, Mus musculus
  siRNA target sequence for Apc (NM_007462.1,1015-1033).
caagacagctgtatatcca

SEQ ID NO: 530244 - DNA, 19 bp, Mus musculus
  siRNA target sequence for Apc (NM_007462.1,1069-1087).
cttttacatggcaatgaca

SEQ ID NO: 530245 - DNA, 19 bp, Mus musculus
  siRNA target sequence for Apc (NM_007462.1,1145-1163).
gtgcagcactccacaacat

SEQ ID NO: 530246 - DNA, 19 bp, Mus musculus
  siRNA target sequence for Apc (NM_007462.1,1382-1400).
ggcatgcaatgaatgaact

SEQ ID NO: 530247 - DNA, 19 bp, Mus musculus
  siRNA target sequence for Apc (NM_007462.1,1434-1452).
ggtggactgtgagatgtat

SEQ ID NO: 530248 - DNA, 19 bp, Mus musculus
  siRNA target sequence for Apc (NM_007462.1,1444-1462).
gagatgtatgggcttacta

SEQ ID NO: 530249 - DNA, 19 bp, Mus musculus
  siRNA target sequence for Apc (NM_007462.1,1446-1464).
gatgtatgggcttactaat

SEQ ID NO: 530250 - DNA, 19 bp, Mus musculus
  siRNA target sequence for Apc (NM_007462.1,1543-1561).
gctacgctgtgttctatga

SEQ ID NO: 530251 - DNA, 19 bp, Mus musculus
  siRNA target sequence for Apc (NM_007462.1,1577-1595).
cacttgtggcccagttaaa

SEQ ID NO: 530252 - DNA, 19 bp, Mus musculus
  siRNA target sequence for Apc (NM_007462.1,1611-1629).
cttacagcaggttattgca

SEQ ID NO: 530253 - DNA, 19 bp, Mus musculus
  siRNA target sequence for Apc (NM_007462.1,1654-1672).
cgagcagatgtaaatagca

SEQ ID NO: 530254 - DNA, 19 bp, Mus musculus
  siRNA target sequence for Apc (NM_007462.1,1746-1764).
cctcaaaagcgttttgagt

SEQ ID NO: 530255 - DNA, 19 bp, Mus musculus
  siRNA target sequence for Apc (NM_007462.1,1756-1774).
gttttgagtgccttatgga

SEQ ID NO: 530256 - DNA, 19 bp, Mus musculus
  siRNA target sequence for Apc (NM_007462.1,1783-1801).
gcacactgcactgagaata

SEQ ID NO: 530257 - DNA, 19 bp, Mus musculus
  siRNA target sequence for Apc (NM_007462.1,1856-1874).
cttaccggagccagacaaa

SEQ ID NO: 530258 - DNA, 19 bp, Mus musculus
  siRNA target sequence for Apc (NM_007462.1,1860-1878).
ccggagccagacaaatact

SEQ ID NO: 530259 - DNA, 19 bp, Mus musculus
  siRNA target sequence for Apc (NM_007462.1,1871-1889).
caaatactttagccattat

SEQ ID NO: 530260 - DNA, 19 bp, Mus musculus
  siRNA target sequence for Apc (NM_007462.1,1903-1921).
gggatattacggaatgtgt

SEQ ID NO: 530261 - DNA, 19 bp, Mus musculus
  siRNA target sequence for Apc (NM_007462.1,1918-1936).
gtgtccagcttgatagcta

SEQ ID NO: 530262 - DNA, 19 bp, Mus musculus
  siRNA target sequence for Apc (NM_007462.1,1926-1944).
cttgatagctacaaacgaa

SEQ ID NO: 530263 - DNA, 19 bp, Mus musculus
  siRNA target sequence for Apc (NM_007462.1,1968-1986).
gaacaattgcctacaaact

SEQ ID NO: 530264 - DNA, 19 bp, Mus musculus
  siRNA target sequence for Apc (NM_007462.1,1976-1994).
gcctacaaactttattaca

SEQ ID NO: 530265 - DNA, 19 bp, Mus musculus
  siRNA target sequence for Apc (NM_007462.1,2012-2030).
gcttgacaatagtcagtaa

SEQ ID NO: 530266 - DNA, 19 bp, Mus musculus
  siRNA target sequence for Apc (NM_007462.1,2027-2045).
gtaatgcatgtggaacttt

SEQ ID NO: 530267 - DNA, 19 bp, Mus musculus
  siRNA target sequence for Apc (NM_007462.1,2055-2073).
ctcagcaagaaatcctaaa

SEQ ID NO: 530268 - DNA, 19 bp, Mus musculus
  siRNA target sequence for Apc (NM_007462.1,2112-2130).
gctcaagaacctcattcat

SEQ ID NO: 530269 - DNA, 19 bp, Mus musculus
  siRNA target sequence for Apc (NM_007462.1,2243-2261).
catcccttcacgttaggaa

SEQ ID NO: 530270 - DNA, 19 bp, Mus musculus
  siRNA target sequence for Apc (NM_007462.1,2309-2327).
ccttcgacaacattgacaa

SEQ ID NO: 530271 - DNA, 19 bp, Mus musculus
  siRNA target sequence for Apc (NM_007462.1,2400-2418).
cgccaatcgacatgatgat

SEQ ID NO: 530272 - DNA, 19 bp, Mus musculus
  siRNA target sequence for Apc (NM_007462.1,2401-2419).
gccaatcgacatgatgata

SEQ ID NO: 530273 - DNA, 19 bp, Mus musculus
  siRNA target sequence for Apc (NM_007462.1,2403-2421).
caatcgacatgatgatagt

SEQ ID NO: 530274 - DNA, 19 bp, Mus musculus
  siRNA target sequence for Apc (NM_007462.1,2420-2438).
gtaggtcagacaatttcaa

SEQ ID NO: 530275 - DNA, 19 bp, Mus musculus
  siRNA target sequence for Apc (NM_007462.1,2424-2442).
gtcagacaatttcaatact

SEQ ID NO: 530276 - DNA, 19 bp, Mus musculus
  siRNA target sequence for Apc (NM_007462.1,2501-2519).
cctcaaggggaagtttaga

SEQ ID NO: 530277 - DNA, 19 bp, Mus musculus
  siRNA target sequence for Apc (NM_007462.1,2583-2601).
ccatccaacaacagaaaat

SEQ ID NO: 530278 - DNA, 19 bp, Mus musculus
  siRNA target sequence for Apc (NM_007462.1,2620-2638).
cgaggtctgcagatcacta

SEQ ID NO: 530279 - DNA, 19 bp, Mus musculus
  siRNA target sequence for Apc (NM_007462.1,2647-2665).
gcccagatagccaaagtta

SEQ ID NO: 530280 - DNA, 19 bp, Mus musculus
  siRNA target sequence for Apc (NM_007462.1,2652-2670).
gatagccaaagttatggaa

SEQ ID NO: 530281 - DNA, 19 bp, Mus musculus
  siRNA target sequence for Apc (NM_007462.1,2694-2712).
ccaggacgacagaagttct

SEQ ID NO: 530282 - DNA, 19 bp, Mus musculus
  siRNA target sequence for Apc (NM_007462.1,2720-2738).
ccaccgagttccattgtgt

SEQ ID NO: 530283 - DNA, 19 bp, Mus musculus
  siRNA target sequence for Apc (NM_007462.1,2805-2823).
cactaagtcggaaaattca

SEQ ID NO: 530284 - DNA, 19 bp, Mus musculus
  siRNA target sequence for Apc (NM_007462.1,2856-2874).
ggaatataaacgatcttca

SEQ ID NO: 530285 - DNA, 19 bp, Mus musculus
  siRNA target sequence for Apc (NM_007462.1,2857-2875).
gaatataaacgatcttcaa

SEQ ID NO: 530286 - DNA, 19 bp, Mus musculus
  siRNA target sequence for Apc (NM_007462.1,2895-2913).
cactagtagtgatggatat

SEQ ID NO: 530287 - DNA, 19 bp, Mus musculus
  siRNA target sequence for Apc (NM_007462.1,2900-2918).
gtagtgatggatatggtaa

SEQ ID NO: 530288 - DNA, 19 bp, Mus musculus
  siRNA target sequence for Apc (NM_007462.1,2914-2932).
ggtaaaagaggccaaatga

SEQ ID NO: 530289 - DNA, 19 bp, Mus musculus
  siRNA target sequence for Apc (NM_007462.1,2915-2933).
gtaaaagaggccaaatgaa

SEQ ID NO: 530290 - DNA, 19 bp, Mus musculus
  siRNA target sequence for Apc (NM_007462.1,2935-2953).
ccctcagttgaatcctatt

SEQ ID NO: 530291 - DNA, 19 bp, Mus musculus
  siRNA target sequence for Apc (NM_007462.1,2937-2955).
ctcagttgaatcctattct

SEQ ID NO: 530292 - DNA, 19 bp, Mus musculus
  siRNA target sequence for Apc (NM_007462.1,3004-3022).
ctagcccataagatacaca

SEQ ID NO: 530293 - DNA, 19 bp, Mus musculus
  siRNA target sequence for Apc (NM_007462.1,3021-3039).
cagtgcaaatcatatggat

SEQ ID NO: 530294 - DNA, 19 bp, Mus musculus
  siRNA target sequence for Apc (NM_007462.1,3026-3044).
caaatcatatggatgataa

SEQ ID NO: 530295 - DNA, 19 bp, Mus musculus
  siRNA target sequence for Apc (NM_007462.1,3052-3070).
gaactggatacaccaataa

SEQ ID NO: 530296 - DNA, 19 bp, Mus musculus
  siRNA target sequence for Apc (NM_007462.1,3064-3082).
ccaataaattacagtctta

SEQ ID NO: 530297 - DNA, 19 bp, Mus musculus
  siRNA target sequence for Apc (NM_007462.1,3143-3161).
caagaccaaagcatgtgat

SEQ ID NO: 530298 - DNA, 19 bp, Mus musculus
  siRNA target sequence for Apc (NM_007462.1,3274-3292).
ggacaacaagaatgtgttt

SEQ ID NO: 530299 - DNA, 19 bp, Mus musculus
  siRNA target sequence for Apc (NM_007462.1,3339-3357).
gggttctagtcatgcaatt

SEQ ID NO: 530300 - DNA, 19 bp, Mus musculus
  siRNA target sequence for Apc (NM_007462.1,3340-3358).
ggttctagtcatgcaatta

SEQ ID NO: 530301 - DNA, 19 bp, Mus musculus
  siRNA target sequence for Apc (NM_007462.1,3341-3359).
gttctagtcatgcaattaa

SEQ ID NO: 530302 - DNA, 19 bp, Mus musculus
  siRNA target sequence for Apc (NM_007462.1,3344-3362).
ctagtcatgcaattaatca

SEQ ID NO: 530303 - DNA, 19 bp, Mus musculus
  siRNA target sequence for Apc (NM_007462.1,3347-3365).
gtcatgcaattaatcaaaa

SEQ ID NO: 530304 - DNA, 19 bp, Mus musculus
  siRNA target sequence for Apc (NM_007462.1,3381-3399).
gtgtcaggaagatgattat

SEQ ID NO: 530305 - DNA, 19 bp, Mus musculus
  siRNA target sequence for Apc (NM_007462.1,3406-3424).
gataaacctaccaactaca

SEQ ID NO: 530306 - DNA, 19 bp, Mus musculus
  siRNA target sequence for Apc (NM_007462.1,3416-3434).
ccaactacagtgaacgtta

SEQ ID NO: 530307 - DNA, 19 bp, Mus musculus
  siRNA target sequence for Apc (NM_007462.1,3420-3438).
ctacagtgaacgttattct

SEQ ID NO: 530308 - DNA, 19 bp, Mus musculus
  siRNA target sequence for Apc (NM_007462.1,3463-3481).
gaagagagaccgacaaatt

SEQ ID NO: 530309 - DNA, 19 bp, Mus musculus
  siRNA target sequence for Apc (NM_007462.1,3470-3488).
gaccgacaaattatagcat

SEQ ID NO: 530310 - DNA, 19 bp, Mus musculus
  siRNA target sequence for Apc (NM_007462.1,3472-3490).
ccgacaaattatagcataa

SEQ ID NO: 530311 - DNA, 19 bp, Mus musculus
  siRNA target sequence for Apc (NM_007462.1,3473-3491).
cgacaaattatagcataaa

SEQ ID NO: 530312 - DNA, 19 bp, Mus musculus
  siRNA target sequence for Apc (NM_007462.1,3476-3494).
caaattatagcataaaata

SEQ ID NO: 530313 - DNA, 19 bp, Mus musculus
  siRNA target sequence for Apc (NM_007462.1,3517-3535).
gatcagcctattgattata

SEQ ID NO: 530314 - DNA, 19 bp, Mus musculus
  siRNA target sequence for Apc (NM_007462.1,3520-3538).
cagcctattgattatagtt

SEQ ID NO: 530315 - DNA, 19 bp, Mus musculus
  siRNA target sequence for Apc (NM_007462.1,3522-3540).
gcctattgattatagttta

SEQ ID NO: 530316 - DNA, 19 bp, Mus musculus
  siRNA target sequence for Apc (NM_007462.1,3524-3542).
ctattgattatagtttaaa

SEQ ID NO: 530317 - DNA, 19 bp, Mus musculus
  siRNA target sequence for Apc (NM_007462.1,3753-3771).
catcaaccaagaaacaata

SEQ ID NO: 530318 - DNA, 19 bp, Mus musculus
  siRNA target sequence for Apc (NM_007462.1,3787-3805).
gaagacaccccaatatgtt

SEQ ID NO: 530319 - DNA, 19 bp, Mus musculus
  siRNA target sequence for Apc (NM_007462.1,3790-3808).
gacaccccaatatgttttt

SEQ ID NO: 530320 - DNA, 19 bp, Mus musculus
  siRNA target sequence for Apc (NM_007462.1,3836-3854).
catcagctgacgatgaaat

SEQ ID NO: 530321 - DNA, 19 bp, Mus musculus
  siRNA target sequence for Apc (NM_007462.1,3846-3864).
cgatgaaataggatgtgat

SEQ ID NO: 530322 - DNA, 19 bp, Mus musculus
  siRNA target sequence for Apc (NM_007462.1,4006-4024).
caggcttctggcttatctt

SEQ ID NO: 530323 - DNA, 19 bp, Mus musculus
  siRNA target sequence for Apc (NM_007462.1,4027-4045).
gaatcaaccaggcataata

SEQ ID NO: 530324 - DNA, 19 bp, Mus musculus
  siRNA target sequence for Apc (NM_007462.1,4109-4127).
gtcccccagaacactatgt

SEQ ID NO: 530325 - DNA, 19 bp, Mus musculus
  siRNA target sequence for Apc (NM_007462.1,4132-4150).
gagactccgctcgtattca

SEQ ID NO: 530326 - DNA, 19 bp, Mus musculus
  siRNA target sequence for Apc (NM_007462.1,4144-4162).
gtattcagcaggtgtactt

SEQ ID NO: 530327 - DNA, 19 bp, Mus musculus
  siRNA target sequence for Apc (NM_007462.1,4445-4463).
cagacgtggatactttgtt

SEQ ID NO: 530328 - DNA, 19 bp, Mus musculus
  siRNA target sequence for Apc (NM_007462.1,4465-4483).
cacttcgccacagaaagta

SEQ ID NO: 530329 - DNA, 19 bp, Mus musculus
  siRNA target sequence for Apc (NM_007462.1,4527-4545).
cctggatgagccatttata

SEQ ID NO: 530330 - DNA, 19 bp, Mus musculus
  siRNA target sequence for Apc (NM_007462.1,4598-4616).
ggaatgaaactgaatcaga

SEQ ID NO: 530331 - DNA, 19 bp, Mus musculus
  siRNA target sequence for Apc (NM_007462.1,4642-4660).
caggataaagaggtagaaa

SEQ ID NO: 530332 - DNA, 19 bp, Mus musculus
  siRNA target sequence for Apc (NM_007462.1,4664-4682).
ctgactctgaaaaagactt

SEQ ID NO: 530333 - DNA, 19 bp, Mus musculus
  siRNA target sequence for Apc (NM_007462.1,4757-4775).
cacgcaaagccaaaaaact

SEQ ID NO: 530334 - DNA, 19 bp, Mus musculus
  siRNA target sequence for Apc (NM_007462.1,4823-4841).
gtcagctacctgtgtataa

SEQ ID NO: 530335 - DNA, 19 bp, Mus musculus
  siRNA target sequence for Apc (NM_007462.1,4863-4881).
gctgcaggcacaaaaacat

SEQ ID NO: 530336 - DNA, 19 bp, Mus musculus
  siRNA target sequence for Apc (NM_007462.1,4867-4885).
caggcacaaaaacatgtta

SEQ ID NO: 530337 - DNA, 19 bp, Mus musculus
  siRNA target sequence for Apc (NM_007462.1,4873-4891).
caaaaacatgttagcttta

SEQ ID NO: 530338 - DNA, 19 bp, Mus musculus
  siRNA target sequence for Apc (NM_007462.1,4927-4945).
gaagggacacctataaact

SEQ ID NO: 530339 - DNA, 19 bp, Mus musculus
  siRNA target sequence for Apc (NM_007462.1,4952-4970).
cagcaacgtctctaagtga

SEQ ID NO: 530340 - DNA, 19 bp, Mus musculus
  siRNA target sequence for Apc (NM_007462.1,4981-4999).
gagtcccctccaaatgaat

SEQ ID NO: 530341 - DNA, 19 bp, Mus musculus
  siRNA target sequence for Apc (NM_007462.1,5015-5033).
gggtcagagcgggtataca

SEQ ID NO: 530342 - DNA, 19 bp, Mus musculus
  siRNA target sequence for Apc (NM_007462.1,5017-5035).
gtcagagcgggtatacagt

SEQ ID NO: 530343 - DNA, 19 bp, Mus musculus
  siRNA target sequence for Apc (NM_007462.1,5092-5110).
gctcagcgaggaaaaatct

SEQ ID NO: 530344 - DNA, 19 bp, Mus musculus
  siRNA target sequence for Apc (NM_007462.1,5095-5113).
cagcgaggaaaaatctcat

SEQ ID NO: 530345 - DNA, 19 bp, Mus musculus
  siRNA target sequence for Apc (NM_007462.1,5098-5116).
cgaggaaaaatctcatcta

SEQ ID NO: 530346 - DNA, 19 bp, Mus musculus
  siRNA target sequence for Apc (NM_007462.1,5164-5182).
cttgcagaatgtatcaatt

SEQ ID NO: 530347 - DNA, 19 bp, Mus musculus
  siRNA target sequence for Apc (NM_007462.1,5208-5226).
caagcctttccgagtgaaa

SEQ ID NO: 530348 - DNA, 19 bp, Mus musculus
  siRNA target sequence for Apc (NM_007462.1,5212-5230).
cctttccgagtgaaaaaga

SEQ ID NO: 530349 - DNA, 19 bp, Mus musculus
  siRNA target sequence for Apc (NM_007462.1,5213-5231).
ctttccgagtgaaaaagat

SEQ ID NO: 530350 - DNA, 19 bp, Mus musculus
  siRNA target sequence for Apc (NM_007462.1,5270-5288).
gagctaacaaaaatcaagt

SEQ ID NO: 530351 - DNA, 19 bp, Mus musculus
  siRNA target sequence for Apc (NM_007462.1,5273-5291).
ctaacaaaaatcaagtaga

SEQ ID NO: 530352 - DNA, 19 bp, Mus musculus
  siRNA target sequence for Apc (NM_007462.1,5325-5343).
gcccatgccacaaaatact

SEQ ID NO: 530353 - DNA, 19 bp, Mus musculus
  siRNA target sequence for Apc (NM_007462.1,5367-5385).
gaatacagactcaaaagtt

SEQ ID NO: 530354 - DNA, 19 bp, Mus musculus
  siRNA target sequence for Apc (NM_007462.1,5374-5392).
gactcaaaagttaatgtaa

SEQ ID NO: 530355 - DNA, 19 bp, Mus musculus
  siRNA target sequence for Apc (NM_007462.1,5457-5475).
ggccttcaatgaaaagcta

SEQ ID NO: 530356 - DNA, 19 bp, Mus musculus
  siRNA target sequence for Apc (NM_007462.1,5545-5563).
gggacgccgtactgctttt

SEQ ID NO: 530357 - DNA, 19 bp, Mus musculus
  siRNA target sequence for Apc (NM_007462.1,5566-5584).
cgaaatgactccttgagtt

SEQ ID NO: 530358 - DNA, 19 bp, Mus musculus
  siRNA target sequence for Apc (NM_007462.1,5622-5640).
ggaaaaggccgagttaaga

SEQ ID NO: 530359 - DNA, 19 bp, Mus musculus
  siRNA target sequence for Apc (NM_007462.1,5658-5676).
ggattccgaagccaaagtt

SEQ ID NO: 530360 - DNA, 19 bp, Mus musculus
  siRNA target sequence for Apc (NM_007462.1,5659-5677).
gattccgaagccaaagtta

SEQ ID NO: 530361 - DNA, 19 bp, Mus musculus
  siRNA target sequence for Apc (NM_007462.1,5721-5739).
gtcacaagccagtataaaa

SEQ ID NO: 530362 - DNA, 19 bp, Mus musculus
  siRNA target sequence for Apc (NM_007462.1,5825-5843).
gggcagcaactgacgaaaa

SEQ ID NO: 530363 - DNA, 19 bp, Mus musculus
  siRNA target sequence for Apc (NM_007462.1,5828-5846).
cagcaactgacgaaaaact

SEQ ID NO: 530364 - DNA, 19 bp, Mus musculus
  siRNA target sequence for Apc (NM_007462.1,5836-5854).
gacgaaaaactgcagaatt

SEQ ID NO: 530365 - DNA, 19 bp, Mus musculus
  siRNA target sequence for Apc (NM_007462.1,5901-5919).
gagttcccttagtgacatt

SEQ ID NO: 530366 - DNA, 19 bp, Mus musculus
  siRNA target sequence for Apc (NM_007462.1,5903-5921).
gttcccttagtgacattga

SEQ ID NO: 530367 - DNA, 19 bp, Mus musculus
  siRNA target sequence for Apc (NM_007462.1,5912-5930).
gtgacattgaccaggaaaa

SEQ ID NO: 530368 - DNA, 19 bp, Mus musculus
  siRNA target sequence for Apc (NM_007462.1,5920-5938).
gaccaggaaaacaacaata

SEQ ID NO: 530369 - DNA, 19 bp, Mus musculus
  siRNA target sequence for Apc (NM_007462.1,6098-6116).
ctgaggacgacctgttaca

SEQ ID NO: 530370 - DNA, 19 bp, Mus musculus
  siRNA target sequence for Apc (NM_007462.1,6108-6126).
cctgttacaggagtgtata

SEQ ID NO: 530371 - DNA, 19 bp, Mus musculus
  siRNA target sequence for Apc (NM_007462.1,6109-6127).
ctgttacaggagtgtataa

SEQ ID NO: 530372 - DNA, 19 bp, Mus musculus
  siRNA target sequence for Apc (NM_007462.1,6128-6146).
gttctgccatgccaaaaaa

SEQ ID NO: 530373 - DNA, 19 bp, Mus musculus
  siRNA target sequence for Apc (NM_007462.1,6194-6212).
gaaaagtgggtggcatatt

SEQ ID NO: 530374 - DNA, 19 bp, Mus musculus
  siRNA target sequence for Apc (NM_007462.1,6217-6235).
gaagacctgacgcttgatt

SEQ ID NO: 530375 - DNA, 19 bp, Mus musculus
  siRNA target sequence for Apc (NM_007462.1,6220-6238).
gacctgacgcttgatttga

SEQ ID NO: 530376 - DNA, 19 bp, Mus musculus
  siRNA target sequence for Apc (NM_007462.1,6222-6240).
cctgacgcttgatttgaaa

SEQ ID NO: 530377 - DNA, 19 bp, Mus musculus
  siRNA target sequence for Apc (NM_007462.1,6228-6246).
gcttgatttgaaagatcta

SEQ ID NO: 530378 - DNA, 19 bp, Mus musculus
  siRNA target sequence for Apc (NM_007462.1,6318-6336).
cgcaaactccatagtaagt

SEQ ID NO: 530379 - DNA, 19 bp, Mus musculus
  siRNA target sequence for Apc (NM_007462.1,6319-6337).
gcaaactccatagtaagta

SEQ ID NO: 530380 - DNA, 19 bp, Mus musculus
  siRNA target sequence for Apc (NM_007462.1,6363-6381).
cgcgtgcttatctagacaa

SEQ ID NO: 530381 - DNA, 19 bp, Mus musculus
  siRNA target sequence for Apc (NM_007462.1,6382-6400).
gcgtcatccgactcagatt

SEQ ID NO: 530382 - DNA, 19 bp, Mus musculus
  siRNA target sequence for Apc (NM_007462.1,6482-6500).
gcaataaaggcccaagaat

SEQ ID NO: 530383 - DNA, 19 bp, Mus musculus
  siRNA target sequence for Apc (NM_007462.1,6569-6587).
gcgggaaaaaggtttataa

SEQ ID NO: 530384 - DNA, 19 bp, Mus musculus
  siRNA target sequence for Apc (NM_007462.1,6570-6588).
cgggaaaaaggtttataaa

SEQ ID NO: 530385 - DNA, 19 bp, Mus musculus
  siRNA target sequence for Apc (NM_007462.1,6601-6619).
ggaaagattcgctccaatt

SEQ ID NO: 530386 - DNA, 19 bp, Mus musculus
  siRNA target sequence for Apc (NM_007462.1,6606-6624).
gattcgctccaattcagaa

SEQ ID NO: 530387 - DNA, 19 bp, Mus musculus
  siRNA target sequence for Apc (NM_007462.1,6610-6628).
cgctccaattcagaaattt

SEQ ID NO: 530388 - DNA, 19 bp, Mus musculus
  siRNA target sequence for Apc (NM_007462.1,6653-6671).
cgacaaacatgccttcaat

SEQ ID NO: 530389 - DNA, 19 bp, Mus musculus
  siRNA target sequence for Apc (NM_007462.1,6677-6695).
gaggcaggacgatgattca

SEQ ID NO: 530390 - DNA, 19 bp, Mus musculus
  siRNA target sequence for Apc (NM_007462.1,6680-6698).
gcaggacgatgattcacat

SEQ ID NO: 530391 - DNA, 19 bp, Mus musculus
  siRNA target sequence for Apc (NM_007462.1,6700-6718).
ccagggcttcggaatagct

SEQ ID NO: 530392 - DNA, 19 bp, Mus musculus
  siRNA target sequence for Apc (NM_007462.1,6709-6727).
cggaatagctcctctagta

SEQ ID NO: 530393 - DNA, 19 bp, Mus musculus
  siRNA target sequence for Apc (NM_007462.1,6711-6729).
gaatagctcctctagtaca

SEQ ID NO: 530394 - DNA, 19 bp, Mus musculus
  siRNA target sequence for Apc (NM_007462.1,6806-6824).
cttctcctcgaggaactaa

SEQ ID NO: 530395 - DNA, 19 bp, Mus musculus
  siRNA target sequence for Apc (NM_007462.1,6850-6868).
cctatcaccaggcaaactt

SEQ ID NO: 530396 - DNA, 19 bp, Mus musculus
  siRNA target sequence for Apc (NM_007462.1,6871-6889).
caaatcagtgggtcaaata

SEQ ID NO: 530397 - DNA, 19 bp, Mus musculus
  siRNA target sequence for Apc (NM_007462.1,6966-6984).
gtctccagggcgaaactca

SEQ ID NO: 530398 - DNA, 19 bp, Mus musculus
  siRNA target sequence for Apc (NM_007462.1,6983-7001).
caatttcccctggtagaaa

SEQ ID NO: 530399 - DNA, 19 bp, Mus musculus
  siRNA target sequence for Apc (NM_007462.1,6989-7007).
cccctggtagaaatggaat

SEQ ID NO: 530400 - DNA, 19 bp, Mus musculus
  siRNA target sequence for Apc (NM_007462.1,7004-7022).
gaataagccctcctaacaa

SEQ ID NO: 530401 - DNA, 19 bp, Mus musculus
  siRNA target sequence for Apc (NM_007462.1,7073-7091).
cctccggttctgggaaaat

SEQ ID NO: 530402 - DNA, 19 bp, Mus musculus
  siRNA target sequence for Apc (NM_007462.1,8256-8274).
gactgctgagacgtgtata

SEQ ID NO: 530403 - DNA, 19 bp, Mus musculus
  siRNA target sequence for Apc (NM_007462.1,8343-8361).
cagagtgacaccttttaat

SEQ ID NO: 530404 - DNA, 19 bp, Mus musculus
  siRNA target sequence for Pkp1 (NM_019645.1,38-56).
cgctggcgtacgaatgctt

SEQ ID NO: 530405 - DNA, 19 bp, Mus musculus
  siRNA target sequence for Pkp1 (NM_019645.1,83-101).
ctttgccctctgaccaaaa

SEQ ID NO: 530406 - DNA, 19 bp, Mus musculus
  siRNA target sequence for Pkp1 (NM_019645.1,89-107).
cctctgaccaaaagatgaa

SEQ ID NO: 530407 - DNA, 19 bp, Mus musculus
  siRNA target sequence for Pkp1 (NM_019645.1,131-149).
gcgtgcaggagcaagtgat

SEQ ID NO: 530408 - DNA, 19 bp, Mus musculus
  siRNA target sequence for Pkp1 (NM_019645.1,163-181).
cggcagaagtccaagtctt

SEQ ID NO: 530409 - DNA, 19 bp, Mus musculus
  siRNA target sequence for Pkp1 (NM_019645.1,207-225).
caaccgaggttccatgtat

SEQ ID NO: 530410 - DNA, 19 bp, Mus musculus
  siRNA target sequence for Pkp1 (NM_019645.1,210-228).
ccgaggttccatgtatgat

SEQ ID NO: 530411 - DNA, 19 bp, Mus musculus
  siRNA target sequence for Pkp1 (NM_019645.1,235-253).
gctgacaattacaacaact

SEQ ID NO: 530412 - DNA, 19 bp, Mus musculus
  siRNA target sequence for Pkp1 (NM_019645.1,236-254).
ctgacaattacaacaacta

SEQ ID NO: 530413 - DNA, 19 bp, Mus musculus
  siRNA target sequence for Pkp1 (NM_019645.1,311-329).
ggggatatccgatctacaa

SEQ ID NO: 530414 - DNA, 19 bp, Mus musculus
  siRNA target sequence for Pkp1 (NM_019645.1,312-330).
gggatatccgatctacaat

SEQ ID NO: 530415 - DNA, 19 bp, Mus musculus
  siRNA target sequence for Pkp1 (NM_019645.1,803-821).
ccatcggagcctattacat

SEQ ID NO: 530416 - DNA, 19 bp, Mus musculus
  siRNA target sequence for Pkp1 (NM_019645.1,851-869).
ccaagcaacaggtctatca

SEQ ID NO: 530417 - DNA, 19 bp, Mus musculus
  siRNA target sequence for Pkp1 (NM_019645.1,1039-1057).
gggagcacggagatccaaa

SEQ ID NO: 530418 - DNA, 19 bp, Mus musculus
  siRNA target sequence for Pkp1 (NM_019645.1,1041-1059).
gagcacggagatccaaaaa

SEQ ID NO: 530419 - DNA, 19 bp, Mus musculus
  siRNA target sequence for Pkp1 (NM_019645.1,1144-1162).
gaccgggtcatcattcctt

SEQ ID NO: 530420 - DNA, 19 bp, Mus musculus
  siRNA target sequence for Pkp1 (NM_019645.1,1496-1514).
gcaacaggggtgacaagat

SEQ ID NO: 530421 - DNA, 19 bp, Mus musculus
  siRNA target sequence for Pkp1 (NM_019645.1,1695-1713).
gatgtccaatggtatgagt

SEQ ID NO: 530422 - DNA, 19 bp, Mus musculus
  siRNA target sequence for Pkp1 (NM_019645.1,1710-1728).
gagtcagttaattggaata

SEQ ID NO: 530423 - DNA, 19 bp, Mus musculus
  siRNA target sequence for Pkp1 (NM_019645.1,2118-2136).
caggcagcaaggtttcgat

SEQ ID NO: 530424 - DNA, 19 bp, Mus musculus
  siRNA target sequence for Pkp1 (NM_019645.1,2124-2142).
gcaaggtttcgataggaat

SEQ ID NO: 530425 - DNA, 19 bp, Mus musculus
  siRNA target sequence for Pkp1 (NM_019645.1,2125-2143).
caaggtttcgataggaata

SEQ ID NO: 530426 - DNA, 19 bp, Mus musculus
  siRNA target sequence for Pkp1 (NM_019645.1,2128-2146).
ggtttcgataggaatatga

SEQ ID NO: 530427 - DNA, 19 bp, Mus musculus
  siRNA target sequence for Pkp1 (NM_019645.1,2129-2147).
gtttcgataggaatatgat

SEQ ID NO: 530428 - DNA, 19 bp, Mus musculus
  siRNA target sequence for Pkp1 (NM_019645.1,2162-2180).
gggccaacaacctcagaaa

SEQ ID NO: 530429 - DNA, 19 bp, Mus musculus
  siRNA target sequence for Frzb (NM_011356.2,910-928).
ggctgcgagcccattctca

SEQ ID NO: 530430 - DNA, 19 bp, Mus musculus
  siRNA target sequence for Frzb (NM_011356.2,911-929).
gctgcgagcccattctcat

SEQ ID NO: 530431 - DNA, 19 bp, Mus musculus
  siRNA target sequence for Frzb (NM_011356.2,1023-1041).
cgcggacggagcggatttt

SEQ ID NO: 530432 - DNA, 19 bp, Mus musculus
  siRNA target sequence for Frzb (NM_011356.2,1027-1045).
gacggagcggattttccta

SEQ ID NO: 530433 - DNA, 19 bp, Mus musculus
  siRNA target sequence for Frzb (NM_011356.2,1080-1098).
cagcgaacgttgcaaatgt

SEQ ID NO: 530434 - DNA, 19 bp, Mus musculus
  siRNA target sequence for Frzb (NM_011356.2,1082-1100).
gcgaacgttgcaaatgtaa

SEQ ID NO: 530435 - DNA, 19 bp, Mus musculus
  siRNA target sequence for Frzb (NM_011356.2,1131-1149).
ccggaacaattacaactat

SEQ ID NO: 530436 - DNA, 19 bp, Mus musculus
  siRNA target sequence for Frzb (NM_011356.2,1150-1168).
gtcatccgggctaaagtta

SEQ ID NO: 530437 - DNA, 19 bp, Mus musculus
  siRNA target sequence for Frzb (NM_011356.2,1152-1170).
catccgggctaaagttaaa

SEQ ID NO: 530438 - DNA, 19 bp, Mus musculus
  siRNA target sequence for Frzb (NM_011356.2,1204-1222).
gttgtggaagtgaaggaaa

SEQ ID NO: 530439 - DNA, 19 bp, Mus musculus
  siRNA target sequence for Frzb (NM_011356.2,1250-1268).
caagggacaccgtcaatct

SEQ ID NO: 530440 - DNA, 19 bp, Mus musculus
  siRNA target sequence for Frzb (NM_011356.2,1253-1271).
gggacaccgtcaatcttta

SEQ ID NO: 530441 - DNA, 19 bp, Mus musculus
  siRNA target sequence for Frzb (NM_011356.2,1254-1272).
ggacaccgtcaatctttat

SEQ ID NO: 530442 - DNA, 19 bp, Mus musculus
  siRNA target sequence for Frzb (NM_011356.2,1255-1273).
gacaccgtcaatctttata

SEQ ID NO: 530443 - DNA, 19 bp, Mus musculus
  siRNA target sequence for Frzb (NM_011356.2,1295-1313).
ctccacttactgtcaatga

SEQ ID NO: 530444 - DNA, 19 bp, Mus musculus
  siRNA target sequence for Frzb (NM_011356.2,1306-1324).
gtcaatgaggaatatgtca

SEQ ID NO: 530445 - DNA, 19 bp, Mus musculus
  siRNA target sequence for Frzb (NM_011356.2,1345-1363).
gaacgttccaggttactct

SEQ ID NO: 530446 - DNA, 19 bp, Mus musculus
  siRNA target sequence for Frzb (NM_011356.2,1362-1380).
cttggtagaaggctctata

SEQ ID NO: 530447 - DNA, 19 bp, Mus musculus
  siRNA target sequence for Frzb (NM_011356.2,1395-1413).
ggatcggcttggtaagaaa

SEQ ID NO: 530448 - DNA, 19 bp, Mus musculus
  siRNA target sequence for Frzb (NM_011356.2,1399-1417).
cggcttggtaagaaagtca

SEQ ID NO: 530449 - DNA, 19 bp, Mus musculus
  siRNA target sequence for Frzb (NM_011356.2,1416-1434).
caagcgctgggatatgaaa

SEQ ID NO: 530450 - DNA, 19 bp, Mus musculus
  siRNA target sequence for Frzb (NM_011356.2,1471-1489).
gattccactcagaatcaga

SEQ ID NO: 530451 - DNA, 19 bp, Mus musculus
  siRNA target sequence for Frzb (NM_011356.2,1491-1509).
gtctggcaggaactctaat

SEQ ID NO: 530452 - DNA, 19 bp, Mus musculus
  siRNA target sequence for Tnfrsf22 (NM_023680.2,160-178).
gtgaatactggtctaaaga

SEQ ID NO: 530453 - DNA, 19 bp, Mus musculus
  siRNA target sequence for Tnfrsf22 (NM_023680.2,196-214).
gttctgcaggtacatttgt

SEQ ID NO: 530454 - DNA, 19 bp, Mus musculus
  siRNA target sequence for Crhbp (NM_198408.1,578-596).
ggtccacgaaccaggaaat

SEQ ID NO: 530455 - DNA, 19 bp, Mus musculus
  siRNA target sequence for Crhbp (NM_198408.1,597-615).
ggattcacgataaccataa

SEQ ID NO: 530456 - DNA, 19 bp, Mus musculus
  siRNA target sequence for Crhbp (NM_198408.1,598-616).
gattcacgataaccataaa

SEQ ID NO: 530457 - DNA, 19 bp, Mus musculus
  siRNA target sequence for Crhbp (NM_198408.1,656-674).
gactccgagtggaaggttt

SEQ ID NO: 530458 - DNA, 19 bp, Mus musculus
  siRNA target sequence for Crhbp (NM_198408.1,664-682).
gtggaaggtttactttagt

SEQ ID NO: 530459 - DNA, 19 bp, Mus musculus
  siRNA target sequence for Crhbp (NM_198408.1,722-740).
ctatccagtggcaatcaaa

SEQ ID NO: 530460 - DNA, 19 bp, Mus musculus
  siRNA target sequence for Crhbp (NM_198408.1,764-782).
cttgcatggccttcagtta

SEQ ID NO: 530461 - DNA, 19 bp, Mus musculus
  siRNA target sequence for Crhbp (NM_198408.1,947-965).
ctccagtgggaaacacatt

SEQ ID NO: 530462 - DNA, 19 bp, Mus musculus
  siRNA target sequence for Crhbp (NM_198408.1,962-980).
cattaaccgtgtgacattt

SEQ ID NO: 530463 - DNA, 19 bp, Mus musculus
  siRNA target sequence for Crhbp (NM_198408.1,968-986).
ccgtgtgacatttgagtat

SEQ ID NO: 530464 - DNA, 19 bp, Mus musculus
  siRNA target sequence for Crhbp (NM_198408.1,1030-1048).
gcatcccagaatactgttt

SEQ ID NO: 530465 - DNA, 19 bp, Mus musculus
  siRNA target sequence for Cse1l (NM_023565.1,98-116).
gctcagcgatgcgaattta

SEQ ID NO: 530466 - DNA, 19 bp, Mus musculus
  siRNA target sequence for Cse1l (NM_023565.1,108-126).
gcgaatttacagacactaa

SEQ ID NO: 530467 - DNA, 19 bp, Mus musculus
  siRNA target sequence for Cse1l (NM_023565.1,117-135).
cagacactaacagagtatt

SEQ ID NO: 530468 - DNA, 19 bp, Mus musculus
  siRNA target sequence for Cse1l (NM_023565.1,169-187).
gacggccagctgagaagtt

SEQ ID NO: 530469 - DNA, 19 bp, Mus musculus
  siRNA target sequence for Cse1l (NM_023565.1,286-304).
ccttcaagaactatattaa

SEQ ID NO: 530470 - DNA, 19 bp, Mus musculus
  siRNA target sequence for Cse1l (NM_023565.1,351-369).
gctgatcgagtagctatta

SEQ ID NO: 530471 - DNA, 19 bp, Mus musculus
  siRNA target sequence for Cse1l (NM_023565.1,352-370).
ctgatcgagtagctattaa

SEQ ID NO: 530472 - DNA, 19 bp, Mus musculus
  siRNA target sequence for Cse1l (NM_023565.1,364-382).
ctattaaagccaacatagt

SEQ ID NO: 530473 - DNA, 19 bp, Mus musculus
  siRNA target sequence for Cse1l (NM_023565.1,420-438).
cagctgagtgatgctatta

SEQ ID NO: 530474 - DNA, 19 bp, Mus musculus
  siRNA target sequence for Cse1l (NM_023565.1,423-441).
ctgagtgatgctattagca

SEQ ID NO: 530475 - DNA, 19 bp, Mus musculus
  siRNA target sequence for Cse1l (NM_023565.1,453-471).
gaagatttccctcagaaat

SEQ ID NO: 530476 - DNA, 19 bp, Mus musculus
  siRNA target sequence for Cse1l (NM_023565.1,474-492).
cctgacttgttgacagaaa

SEQ ID NO: 530477 - DNA, 19 bp, Mus musculus
  siRNA target sequence for Cse1l (NM_023565.1,513-531).
ggagattttcacgtcatta

SEQ ID NO: 530478 - DNA, 19 bp, Mus musculus
  siRNA target sequence for Cse1l (NM_023565.1,514-532).
gagattttcacgtcattaa

SEQ ID NO: 530479 - DNA, 19 bp, Mus musculus
  siRNA target sequence for Cse1l (NM_023565.1,543-561).
cgtacagcgcactcactat

SEQ ID NO: 530480 - DNA, 19 bp, Mus musculus
  siRNA target sequence for Cse1l (NM_023565.1,547-565).
cagcgcactcactatttaa

SEQ ID NO: 530481 - DNA, 19 bp, Mus musculus
  siRNA target sequence for Cse1l (NM_023565.1,552-570).
cactcactatttaagagat

SEQ ID NO: 530482 - DNA, 19 bp, Mus musculus
  siRNA target sequence for Cse1l (NM_023565.1,568-586).
gataccggcatgagttcaa

SEQ ID NO: 530483 - DNA, 19 bp, Mus musculus
  siRNA target sequence for Cse1l (NM_023565.1,604-622).
ctgaaattaaacttgtctt

SEQ ID NO: 530484 - DNA, 19 bp, Mus musculus
  siRNA target sequence for Cse1l (NM_023565.1,639-657).
cctttgactaatctattca

SEQ ID NO: 530485 - DNA, 19 bp, Mus musculus
  siRNA target sequence for Cse1l (NM_023565.1,700-718).
ctgccctgaggattctttt

SEQ ID NO: 530486 - DNA, 19 bp, Mus musculus
  siRNA target sequence for Cse1l (NM_023565.1,845-863).
gctcttgcagactgatgat

SEQ ID NO: 530487 - DNA, 19 bp, Mus musculus
  siRNA target sequence for Cse1l (NM_023565.1,848-866).
cttgcagactgatgatgaa

SEQ ID NO: 530488 - DNA, 19 bp, Mus musculus
  siRNA target sequence for Cse1l (NM_023565.1,876-894).
ggcttactggagcttttaa

SEQ ID NO: 530489 - DNA, 19 bp, Mus musculus
  siRNA target sequence for Cse1l (NM_023565.1,896-914).
gtctcagatctgtgataat

SEQ ID NO: 530490 - DNA, 19 bp, Mus musculus
  siRNA target sequence for Cse1l (NM_023565.1,918-936).
gctctctatgcacagaaat

SEQ ID NO: 530491 - DNA, 19 bp, Mus musculus
  siRNA target sequence for Cse1l (NM_023565.1,986-1004).
gaacttactcgttacaaca

SEQ ID NO: 530492 - DNA, 19 bp, Mus musculus
  siRNA target sequence for Cse1l (NM_023565.1,1000-1018).
caacagggcgagaagttaa

SEQ ID NO: 530493 - DNA, 19 bp, Mus musculus
  siRNA target sequence for Cse1l (NM_023565.1,1003-1021).
cagggcgagaagttaaata

SEQ ID NO: 530494 - DNA, 19 bp, Mus musculus
  siRNA target sequence for Cse1l (NM_023565.1,1028-1046).
gttggttagcaatgcaatt

SEQ ID NO: 530495 - DNA, 19 bp, Mus musculus
  siRNA target sequence for Cse1l (NM_023565.1,1053-1071).
ctggcttcagtttgtgaaa

SEQ ID NO: 530496 - DNA, 19 bp, Mus musculus
  siRNA target sequence for Cse1l (NM_023565.1,1066-1084).
gtgaaaggccacattataa

SEQ ID NO: 530497 - DNA, 19 bp, Mus musculus
  siRNA target sequence for Cse1l (NM_023565.1,1110-1128).
ctgacaagtatctgtgaaa

SEQ ID NO: 530498 - DNA, 19 bp, Mus musculus
  siRNA target sequence for Cse1l (NM_023565.1,1117-1135).
gtatctgtgaaaaagttat

SEQ ID NO: 530499 - DNA, 19 bp, Mus musculus
  siRNA target sequence for Cse1l (NM_023565.1,1137-1155).
gtgcctaacatggaattta

SEQ ID NO: 530500 - DNA, 19 bp, Mus musculus
  siRNA target sequence for Cse1l (NM_023565.1,1139-1157).
gcctaacatggaatttaga

SEQ ID NO: 530501 - DNA, 19 bp, Mus musculus
  siRNA target sequence for Cse1l (NM_023565.1,1214-1232).
ggaaggctctgatattgat

SEQ ID NO: 530502 - DNA, 19 bp, Mus musculus
  siRNA target sequence for Cse1l (NM_023565.1,1215-1233).
gaaggctctgatattgata

SEQ ID NO: 530503 - DNA, 19 bp, Mus musculus
  siRNA target sequence for Cse1l (NM_023565.1,1218-1236).
ggctctgatattgatacta

SEQ ID NO: 530504 - DNA, 19 bp, Mus musculus
  siRNA target sequence for Cse1l (NM_023565.1,1220-1238).
ctctgatattgatactaga

SEQ ID NO: 530505 - DNA, 19 bp, Mus musculus
  siRNA target sequence for Cse1l (NM_023565.1,1243-1261).
gggctgcttgtgatcttgt

SEQ ID NO: 530506 - DNA, 19 bp, Mus musculus
  siRNA target sequence for Cse1l (NM_023565.1,1244-1262).
ggctgcttgtgatcttgta

SEQ ID NO: 530507 - DNA, 19 bp, Mus musculus
  siRNA target sequence for Cse1l (NM_023565.1,1257-1275).
cttgtacgaggattatgca

SEQ ID NO: 530508 - DNA, 19 bp, Mus musculus
  siRNA target sequence for Cse1l (NM_023565.1,1309-1327).
ctggttatgttaattccat

SEQ ID NO: 530509 - DNA, 19 bp, Mus musculus
  siRNA target sequence for Cse1l (NM_023565.1,1328-1346).
gctccaggagtatgcaaaa

SEQ ID NO: 530510 - DNA, 19 bp, Mus musculus
  siRNA target sequence for Cse1l (NM_023565.1,1436-1454).
cacgcaagccaatgaactt

SEQ ID NO: 530511 - DNA, 19 bp, Mus musculus
  siRNA target sequence for Cse1l (NM_023565.1,1438-1456).
cgcaagccaatgaacttgt

SEQ ID NO: 530512 - DNA, 19 bp, Mus musculus
  siRNA target sequence for Cse1l (NM_023565.1,1444-1462).
ccaatgaacttgtaaacct

SEQ ID NO: 530513 - DNA, 19 bp, Mus musculus
  siRNA target sequence for Cse1l (NM_023565.1,1467-1485).
gaatttttcgtgaatcaca

SEQ ID NO: 530514 - DNA, 19 bp, Mus musculus
  siRNA target sequence for Cse1l (NM_023565.1,1536-1554).
gctgatggtatcaaatata

SEQ ID NO: 530515 - DNA, 19 bp, Mus musculus
  siRNA target sequence for Cse1l (NM_023565.1,1537-1555).
ctgatggtatcaaatatat

SEQ ID NO: 530516 - DNA, 19 bp, Mus musculus
  siRNA target sequence for Cse1l (NM_023565.1,1567-1585).
ggaatcaagtaccaaaaga

SEQ ID NO: 530517 - DNA, 19 bp, Mus musculus
  siRNA target sequence for Cse1l (NM_023565.1,1668-1686).
ctcgaaaggctgttcacta

SEQ ID NO: 530518 - DNA, 19 bp, Mus musculus
  siRNA target sequence for Cse1l (NM_023565.1,1671-1689).
gaaaggctgttcactatga

SEQ ID NO: 530519 - DNA, 19 bp, Mus musculus
  siRNA target sequence for Cse1l (NM_023565.1,1696-1714).
caaacaataccactctttt

SEQ ID NO: 530520 - DNA, 19 bp, Mus musculus
  siRNA target sequence for Cse1l (NM_023565.1,1700-1718).
caataccactctttttaca

SEQ ID NO: 530521 - DNA, 19 bp, Mus musculus
  siRNA target sequence for Cse1l (NM_023565.1,1730-1748).
cgcaccgtttgttgagatt

SEQ ID NO: 530522 - DNA, 19 bp, Mus musculus
  siRNA target sequence for Cse1l (NM_023565.1,1740-1758).
gttgagattctgctaacaa

SEQ ID NO: 530523 - DNA, 19 bp, Mus musculus
  siRNA target sequence for Cse1l (NM_023565.1,1749-1767).
ctgctaacaaaccttttca

SEQ ID NO: 530524 - DNA, 19 bp, Mus musculus
  siRNA target sequence for Cse1l (NM_023565.1,1898-1916).
gctggctgttagtaagaat

SEQ ID NO: 530525 - DNA, 19 bp, Mus musculus
  siRNA target sequence for Cse1l (NM_023565.1,1972-1990).
gaataacctgcaaagctaa

SEQ ID NO: 530526 - DNA, 19 bp, Mus musculus
  siRNA target sequence for Cse1l (NM_023565.1,2033-2051).
gttcactgagatcttacaa

SEQ ID NO: 530527 - DNA, 19 bp, Mus musculus
  siRNA target sequence for Cse1l (NM_023565.1,2042-2060).
gatcttacaaaatgatgta

SEQ ID NO: 530528 - DNA, 19 bp, Mus musculus
  siRNA target sequence for Cse1l (NM_023565.1,2045-2063).
cttacaaaatgatgtacaa

SEQ ID NO: 530529 - DNA, 19 bp, Mus musculus
  siRNA target sequence for Cse1l (NM_023565.1,2064-2082).
gagtttatcccatatgtct

SEQ ID NO: 530530 - DNA, 19 bp, Mus musculus
  siRNA target sequence for Cse1l (NM_023565.1,2066-2084).
gtttatcccatatgtcttt

SEQ ID NO: 530531 - DNA, 19 bp, Mus musculus
  siRNA target sequence for Cse1l (NM_023565.1,2074-2092).
catatgtctttcaagtgat

SEQ ID NO: 530532 - DNA, 19 bp, Mus musculus
  siRNA target sequence for Cse1l (NM_023565.1,2079-2097).
gtctttcaagtgatgtctt

SEQ ID NO: 530533 - DNA, 19 bp, Mus musculus
  siRNA target sequence for Cse1l (NM_023565.1,2081-2099).
ctttcaagtgatgtcttta

SEQ ID NO: 530534 - DNA, 19 bp, Mus musculus
  siRNA target sequence for Cse1l (NM_023565.1,2121-2139).
gatatcccgtcttcctata

SEQ ID NO: 530535 - DNA, 19 bp, Mus musculus
  siRNA target sequence for Cse1l (NM_023565.1,2317-2335).
caaacgatcaccaaggttt

SEQ ID NO: 530536 - DNA, 19 bp, Mus musculus
  siRNA target sequence for Cse1l (NM_023565.1,2321-2339).
cgatcaccaaggtttctat

SEQ ID NO: 530537 - DNA, 19 bp, Mus musculus
  siRNA target sequence for Cse1l (NM_023565.1,2363-2381).
catgcctcctgaatcagtt

SEQ ID NO: 530538 - DNA, 19 bp, Mus musculus
  siRNA target sequence for Cse1l (NM_023565.1,2373-2391).
gaatcagttgaccagtata

SEQ ID NO: 530539 - DNA, 19 bp, Mus musculus
  siRNA target sequence for Cse1l (NM_023565.1,2377-2395).
cagttgaccagtataggaa

SEQ ID NO: 530540 - DNA, 19 bp, Mus musculus
  siRNA target sequence for Cse1l (NM_023565.1,2393-2411).
gaagcagatcttcattcta

SEQ ID NO: 530541 - DNA, 19 bp, Mus musculus
  siRNA target sequence for Cse1l (NM_023565.1,2492-2510).
gtatggggcactagcatta

SEQ ID NO: 530542 - DNA, 19 bp, Mus musculus
  siRNA target sequence for Cse1l (NM_023565.1,2497-2515).
gggcactagcattacaaga

SEQ ID NO: 530543 - DNA, 19 bp, Mus musculus
  siRNA target sequence for Cse1l (NM_023565.1,2498-2516).
ggcactagcattacaagaa

SEQ ID NO: 530544 - DNA, 19 bp, Mus musculus
  siRNA target sequence for Cse1l (NM_023565.1,2502-2520).
ctagcattacaagaaatat

SEQ ID NO: 530545 - DNA, 19 bp, Mus musculus
  siRNA target sequence for Cse1l (NM_023565.1,2523-2541).
gatggcatacaaccaaaaa

SEQ ID NO: 530546 - DNA, 19 bp, Mus musculus
  siRNA target sequence for Cse1l (NM_023565.1,2543-2561).
gtttggaatggttttggaa

SEQ ID NO: 530547 - DNA, 19 bp, Mus musculus
  siRNA target sequence for Cse1l (NM_023565.1,2593-2611).
ctgggaacgtggagaaaaa

SEQ ID NO: 530548 - DNA, 19 bp, Mus musculus
  siRNA target sequence for Cse1l (NM_023565.1,2617-2635).
gtgcagttggcataaccaa

SEQ ID NO: 530549 - DNA, 19 bp, Mus musculus
  siRNA target sequence for Cse1l (NM_023565.1,2625-2643).
ggcataaccaaattactca

SEQ ID NO: 530550 - DNA, 19 bp, Mus musculus
  siRNA target sequence for Cse1l (NM_023565.1,2644-2662).
cagagtgtccaccaatgat

SEQ ID NO: 530551 - DNA, 19 bp, Mus musculus
  siRNA target sequence for Cse1l (NM_023565.1,2681-2699).
gctgtggactcctttgtta

SEQ ID NO: 530552 - DNA, 19 bp, Mus musculus
  siRNA target sequence for Cse1l (NM_023565.1,2684-2702).
gtggactcctttgttacaa

SEQ ID NO: 530553 - DNA, 19 bp, Mus musculus
  siRNA target sequence for Cse1l (NM_023565.1,2687-2705).
gactcctttgttacaatct

SEQ ID NO: 530554 - DNA, 19 bp, Mus musculus
  siRNA target sequence for Cse1l (NM_023565.1,2704-2722).
ctctcattggcctgtttga

SEQ ID NO: 530555 - DNA, 19 bp, Mus musculus
  siRNA target sequence for Cse1l (NM_023565.1,2807-2825).
gctggcatttgctggtaaa

SEQ ID NO: 530556 - DNA, 19 bp, Mus musculus
  siRNA target sequence for Cse1l (NM_023565.1,2808-2826).
ctggcatttgctggtaaaa

SEQ ID NO: 530557 - DNA, 19 bp, Mus musculus
  siRNA target sequence for 0610011D15Rik (NM_133879.1,201-219).
cgcgagaagggccagtatt

SEQ ID NO: 530558 - DNA, 19 bp, Mus musculus
  siRNA target sequence for 0610011D15Rik (NM_133879.1,276-294).
gcgtgttgcagccatttct

SEQ ID NO: 530559 - DNA, 19 bp, Mus musculus
  siRNA target sequence for 0610011D15Rik (NM_133879.1,342-360).
gcgggctttgctgagattt

SEQ ID NO: 530560 - DNA, 19 bp, Mus musculus
  siRNA target sequence for 0610011D15Rik (NM_133879.1,429-447).
ctcttggcagccaaagagt

SEQ ID NO: 530561 - DNA, 19 bp, Mus musculus
  siRNA target sequence for 0610011D15Rik (NM_133879.1,842-860).
cagggacggtgattacgta

SEQ ID NO: 530562 - DNA, 19 bp, Mus musculus
  siRNA target sequence for 0610011D15Rik (NM_133879.1,886-904).
gaaggaagtcaaaagtgat

SEQ ID NO: 530563 - DNA, 19 bp, Mus musculus
  siRNA target sequence for 0610011D15Rik (NM_133879.1,1002-1020).
cccacatgtcacaaaaagt

SEQ ID NO: 530564 - DNA, 19 bp, Mus musculus
  siRNA target sequence for 0610011D15Rik (NM_133879.1,1003-1021).
ccacatgtcacaaaaagtt

SEQ ID NO: 530565 - DNA, 19 bp, Mus musculus
  siRNA target sequence for 0610011D15Rik (NM_133879.1,1027-1045).
gcaaatattacctgaaagt

SEQ ID NO: 530566 - DNA, 19 bp, Mus musculus
  siRNA target sequence for 0610011D15Rik (NM_133879.1,1131-1149).
catgaagccaggaattgca

SEQ ID NO: 530567 - DNA, 19 bp, Mus musculus
  siRNA target sequence for 0610011D15Rik (NM_133879.1,1487-1505).
cagctgcacgaggctttta

SEQ ID NO: 530568 - DNA, 19 bp, Mus musculus
  siRNA target sequence for 0610020I02Rik (NM_026495.2,454-472).
cagctcgtggtcatgtaca

SEQ ID NO: 530569 - DNA, 19 bp, Mus musculus
  siRNA target sequence for 0610020I02Rik (NM_026495.2,659-677).
cgcttctgacccgtgtaaa

SEQ ID NO: 530570 - DNA, 19 bp, Mus musculus
  siRNA target sequence for 0610020I02Rik (NM_026495.2,813-831).
gcctcgagtctcctactat

SEQ ID NO: 530571 - DNA, 19 bp, Mus musculus
  siRNA target sequence for 0610020I02Rik (NM_026495.2,1002-1020).
gcagtatggccagatgtat

SEQ ID NO: 530572 - DNA, 19 bp, Mus musculus
  siRNA target sequence for 0610020I02Rik (NM_026495.2,1003-1021).
cagtatggccagatgtata

SEQ ID NO: 530573 - DNA, 19 bp, Mus musculus
  siRNA target sequence for 0610020I02Rik (NM_026495.2,1005-1023).
gtatggccagatgtatatt

SEQ ID NO: 530574 - DNA, 19 bp, Mus musculus
  siRNA target sequence for 0610020I02Rik (NM_026495.2,1210-1228).
ggctccggggtctacatca

SEQ ID NO: 530575 - DNA, 19 bp, Mus musculus
  siRNA target sequence for 0610020I02Rik (NM_026495.2,1428-1446).
ctttgcccccagcttcaaa

SEQ ID NO: 530576 - DNA, 19 bp, Mus musculus
  siRNA target sequence for 0610020I02Rik (NM_026495.2,1470-1488).
cgcagacatgtgtaccaat

SEQ ID NO: 530577 - DNA, 19 bp, Mus musculus
  siRNA target sequence for 0610020I02Rik (NM_026495.2,1616-1634).
cggctccacaggtgtttga

SEQ ID NO: 530578 - DNA, 19 bp, Mus musculus
  siRNA target sequence for 0610020I02Rik (NM_026495.2,1629-1647).
gtttgagcagcgcatctat

SEQ ID NO: 530579 - DNA, 19 bp, Mus musculus
  siRNA target sequence for 0610020I02Rik (NM_026495.2,1688-1706).
gaactgatgcggtgaatgt

SEQ ID NO: 530580 - DNA, 19 bp, Mus musculus
  siRNA target sequence for 0610020I02Rik (NM_026495.2,1760-1778).
ggggtggctctgttatcca

SEQ ID NO: 530581 - DNA, 19 bp, Mus musculus
  siRNA target sequence for 0610041O14Rik (NM_026156.1,83-101).
cttccctatgaggaagaaa

SEQ ID NO: 530582 - DNA, 19 bp, Mus musculus
  siRNA target sequence for 0610041O14Rik (NM_026156.1,113-131).
cagttctccgtcaaatgct

SEQ ID NO: 530583 - DNA, 19 bp, Mus musculus
  siRNA target sequence for 0610041O14Rik (NM_026156.1,136-154).
ccgctacatcgagttcaaa

SEQ ID NO: 530584 - DNA, 19 bp, Mus musculus
  siRNA target sequence for 0610041O14Rik (NM_026156.1,171-189).
cccgactcaaccagttgta

SEQ ID NO: 530585 - DNA, 19 bp, Mus musculus
  siRNA target sequence for 0610041O14Rik (NM_026156.1,172-190).
ccgactcaaccagttgtat

SEQ ID NO: 530586 - DNA, 19 bp, Mus musculus
  siRNA target sequence for 0610041O14Rik (NM_026156.1,227-245).
ctctggtaccgatatctga

SEQ ID NO: 530587 - DNA, 19 bp, Mus musculus
  siRNA target sequence for 0610041O14Rik (NM_026156.1,288-306).
ctgcctatgaagatgtcaa

SEQ ID NO: 530588 - DNA, 19 bp, Mus musculus
  siRNA target sequence for 0610041O14Rik (NM_026156.1,347-365).
ccacgcctgtggttagact

SEQ ID NO: 530589 - DNA, 19 bp, Mus musculus
  siRNA target sequence for 0610041O14Rik (NM_026156.1,348-366).
cacgcctgtggttagacta

SEQ ID NO: 530590 - DNA, 19 bp, Mus musculus
  siRNA target sequence for 0610041O14Rik (NM_026156.1,385-403).
ccagggaagggtaacacat

SEQ ID NO: 530591 - DNA, 19 bp, Mus musculus
  siRNA target sequence for 0610041O14Rik (NM_026156.1,465-483).
ggcccctgtatctacgttt

SEQ ID NO: 530592 - DNA, 19 bp, Mus musculus
  siRNA target sequence for 0610041O14Rik (NM_026156.1,563-581).
gaatacatcgagtatctca

SEQ ID NO: 530593 - DNA, 19 bp, Mus musculus
  siRNA target sequence for 0610041O14Rik (NM_026156.1,619-637).
ggccaccgtggtgaatgat

SEQ ID NO: 530594 - DNA, 19 bp, Mus musculus
  siRNA target sequence for 0610041O14Rik (NM_026156.1,631-649).
gaatgatgagcgctttgta

SEQ ID NO: 530595 - DNA, 19 bp, Mus musculus
  siRNA target sequence for 0610041O14Rik (NM_026156.1,651-669).
ccaaggctggtaaatccaa

SEQ ID NO: 530596 - DNA, 19 bp, Mus musculus
  siRNA target sequence for 0610041O14Rik (NM_026156.1,798-816).
gctctttggcagactacta

SEQ ID NO: 530597 - DNA, 19 bp, Mus musculus
  siRNA target sequence for 0610041O14Rik (NM_026156.1,799-817).
ctctttggcagactactat

SEQ ID NO: 530598 - DNA, 19 bp, Mus musculus
  siRNA target sequence for 0610041O14Rik (NM_026156.1,1128-1146).
gccctcgggagattatcaa

SEQ ID NO: 530599 - DNA, 19 bp, Mus musculus
  siRNA target sequence for 0610041O14Rik (NM_026156.1,1130-1148).
cctcgggagattatcaaca

SEQ ID NO: 530600 - DNA, 19 bp, Mus musculus
  siRNA target sequence for 0610041O14Rik (NM_026156.1,1133-1151).
cgggagattatcaacacat

SEQ ID NO: 530601 - DNA, 19 bp, Mus musculus
  siRNA target sequence for 0610041O14Rik (NM_026156.1,1134-1152).
gggagattatcaacacata

SEQ ID NO: 530602 - DNA, 19 bp, Mus musculus
  siRNA target sequence for 0610041O14Rik (NM_026156.1,1136-1154).
gagattatcaacacataca

SEQ ID NO: 530603 - DNA, 19 bp, Mus musculus
  siRNA target sequence for 0610041O14Rik (NM_026156.1,1213-1231).
ggttgcattcgccaagttt

SEQ ID NO: 530604 - DNA, 19 bp, Mus musculus
  siRNA target sequence for 0610041O14Rik (NM_026156.1,1214-1232).
gttgcattcgccaagtttt

SEQ ID NO: 530605 - DNA, 19 bp, Mus musculus
  siRNA target sequence for 0610041O14Rik (NM_026156.1,1218-1236).
cattcgccaagttttacga

SEQ ID NO: 530606 - DNA, 19 bp, Mus musculus
  siRNA target sequence for 0610041O14Rik (NM_026156.1,1224-1242).
ccaagttttacgaagacaa

SEQ ID NO: 530607 - DNA, 19 bp, Mus musculus
  siRNA target sequence for 0610041O14Rik (NM_026156.1,1225-1243).
caagttttacgaagacaat

SEQ ID NO: 530608 - DNA, 19 bp, Mus musculus
  siRNA target sequence for 0610041O14Rik (NM_026156.1,1260-1278).
ctcgtgtcatcctagagaa

SEQ ID NO: 530609 - DNA, 19 bp, Mus musculus
  siRNA target sequence for 0610041O14Rik (NM_026156.1,1346-1364).
gagctcaggcacgagaatt

SEQ ID NO: 530610 - DNA, 19 bp, Mus musculus
  siRNA target sequence for 0610041O14Rik (NM_026156.1,1445-1463).
gtgcagaaccgtgtatata

SEQ ID NO: 530611 - DNA, 19 bp, Mus musculus
  siRNA target sequence for 0610041O14Rik (NM_026156.1,1524-1542).
caaccaaggccgtgtatga

SEQ ID NO: 530612 - DNA, 19 bp, Mus musculus
  siRNA target sequence for 0610041O14Rik (NM_026156.1,1565-1583).
gccacgccacagatcgtta

SEQ ID NO: 530613 - DNA, 19 bp, Mus musculus
  siRNA target sequence for 0610041O14Rik (NM_026156.1,1566-1584).
ccacgccacagatcgttat

SEQ ID NO: 530614 - DNA, 19 bp, Mus musculus
  siRNA target sequence for 0610041O14Rik (NM_026156.1,1567-1585).
cacgccacagatcgttatt

SEQ ID NO: 530615 - DNA, 19 bp, Mus musculus
  siRNA target sequence for 0610041O14Rik (NM_026156.1,1569-1587).
cgccacagatcgttattaa

SEQ ID NO: 530616 - DNA, 19 bp, Mus musculus
  siRNA target sequence for 0610041O14Rik (NM_026156.1,1571-1589).
ccacagatcgttattaact

SEQ ID NO: 530617 - DNA, 19 bp, Mus musculus
  siRNA target sequence for 0610041O14Rik (NM_026156.1,1572-1590).
cacagatcgttattaacta

SEQ ID NO: 530618 - DNA, 19 bp, Mus musculus
  siRNA target sequence for 0610041O14Rik (NM_026156.1,1649-1667).
ggcatctcactgttcaagt

SEQ ID NO: 530619 - DNA, 19 bp, Mus musculus
  siRNA target sequence for 0610041O14Rik (NM_026156.1,1692-1710).
gcacctacctgaccaaatt

SEQ ID NO: 530620 - DNA, 19 bp, Mus musculus
  siRNA target sequence for 0610041O14Rik (NM_026156.1,1741-1759).
gcgtgcacgggatctcttt

SEQ ID NO: 530621 - DNA, 19 bp, Mus musculus
  siRNA target sequence for 0610041O14Rik (NM_026156.1,1743-1761).
gtgcacgggatctctttga

SEQ ID NO: 530622 - DNA, 19 bp, Mus musculus
  siRNA target sequence for 0610041O14Rik (NM_026156.1,1771-1789).
cgatggctgcccaccaaaa

SEQ ID NO: 530623 - DNA, 19 bp, Mus musculus
  siRNA target sequence for 0610041O14Rik (NM_026156.1,1896-1914).
cacagcagtacgacatgtt

SEQ ID NO: 530624 - DNA, 19 bp, Mus musculus
  siRNA target sequence for 0610041O14Rik (NM_026156.1,1898-1916).
cagcagtacgacatgttta

SEQ ID NO: 530625 - DNA, 19 bp, Mus musculus
  siRNA target sequence for 0610041O14Rik (NM_026156.1,1901-1919).
cagtacgacatgtttaaca

SEQ ID NO: 530626 - DNA, 19 bp, Mus musculus
  siRNA target sequence for 0610041O14Rik (NM_026156.1,1930-1948).
gcgagctgctgagatctat

SEQ ID NO: 530627 - DNA, 19 bp, Mus musculus
  siRNA target sequence for 0610041O14Rik (NM_026156.1,2046-2064).
gcaagctcggtgaaatcga

SEQ ID NO: 530628 - DNA, 19 bp, Mus musculus
  siRNA target sequence for 0610041O14Rik (NM_026156.1,2209-2227).
gcaggccacatacaatact

SEQ ID NO: 530629 - DNA, 19 bp, Mus musculus
  siRNA target sequence for 0610041O14Rik (NM_026156.1,2388-2406).
gggcccagagcaagatctt

SEQ ID NO: 530630 - DNA, 19 bp, Mus musculus
  siRNA target sequence for 0610041O14Rik (NM_026156.1,2563-2581).
gttcgggagcctaaaggaa

SEQ ID NO: 530631 - DNA, 19 bp, Mus musculus
  siRNA target sequence for 1110001A05Rik (NM_019808.1,252-270).
gggaatgacgcatcttgaa

SEQ ID NO: 530632 - DNA, 19 bp, Mus musculus
  siRNA target sequence for 1110001A05Rik (NM_019808.1,293-311).
gtacgggctccttgaatat

SEQ ID NO: 530633 - DNA, 19 bp, Mus musculus
  siRNA target sequence for 1110001A05Rik (NM_019808.1,297-315).
gggctccttgaatatgact

SEQ ID NO: 530634 - DNA, 19 bp, Mus musculus
  siRNA target sequence for 1110001A05Rik (NM_019808.1,368-386).
gtgaacctaaggaagtagt

SEQ ID NO: 530635 - DNA, 19 bp, Mus musculus
  siRNA target sequence for 1110001A05Rik (NM_019808.1,390-408).
gcctgtgcccattacatct

SEQ ID NO: 530636 - DNA, 19 bp, Mus musculus
  siRNA target sequence for 1110001A05Rik (NM_019808.1,437-455).
ccaacatggcctacaataa

SEQ ID NO: 530637 - DNA, 19 bp, Mus musculus
  siRNA target sequence for 1110001A05Rik (NM_019808.1,438-456).
caacatggcctacaataaa

SEQ ID NO: 530638 - DNA, 19 bp, Mus musculus
  siRNA target sequence for 1110001A05Rik (NM_019808.1,478-496).
gtgtcttcaccaaaagtca

SEQ ID NO: 530639 - DNA, 19 bp, Mus musculus
  siRNA target sequence for 1110001A05Rik (NM_019808.1,534-552).
ccatgccgccacttcatca

SEQ ID NO: 530640 - DNA, 19 bp, Mus musculus
  siRNA target sequence for 1110001A05Rik (NM_019808.1,601-619).
gcatccggactgcatgtta

SEQ ID NO: 530641 - DNA, 19 bp, Mus musculus
  siRNA target sequence for 1110001A05Rik (NM_019808.1,613-631).
catgttagtgccaatctta

SEQ ID NO: 530642 - DNA, 19 bp, Mus musculus
  siRNA target sequence for 1110001A05Rik (NM_019808.1,665-683).
gtaaacctgcagttaatgt

SEQ ID NO: 530643 - DNA, 19 bp, Mus musculus
  siRNA target sequence for 1110001A05Rik (NM_019808.1,755-773).
gatcccagggtgacattaa

SEQ ID NO: 530644 - DNA, 19 bp, Mus musculus
  siRNA target sequence for 1110001A05Rik (NM_019808.1,764-782).
gtgacattaagcagcaaaa

SEQ ID NO: 530645 - DNA, 19 bp, Mus musculus
  siRNA target sequence for 1110001A05Rik (NM_019808.1,786-804).
cccaccaagaaaacacatt

SEQ ID NO: 530646 - DNA, 19 bp, Mus musculus
  siRNA target sequence for 1110001A05Rik (NM_019808.1,810-828).
gcgcaacacggagttttat

SEQ ID NO: 530647 - DNA, 19 bp, Mus musculus
  siRNA target sequence for 1110001A05Rik (NM_019808.1,816-834).
cacggagttttatcacata

SEQ ID NO: 530648 - DNA, 19 bp, Mus musculus
  siRNA target sequence for 1110001A05Rik (NM_019808.1,854-872).
gcaagaaacggctgattga

SEQ ID NO: 530649 - DNA, 19 bp, Mus musculus
  siRNA target sequence for 1110001A05Rik (NM_019808.1,905-923).
cgactcagtctcgttcttt

SEQ ID NO: 530650 - DNA, 19 bp, Mus musculus
  siRNA target sequence for 1110001A05Rik (NM_019808.1,968-986).
ctgaaaatgacaatacgaa

SEQ ID NO: 530651 - DNA, 19 bp, Mus musculus
  siRNA target sequence for 1110001A05Rik (NM_019808.1,1106-1124).
gctccgctgctgctttcaa

SEQ ID NO: 530652 - DNA, 19 bp, Mus musculus
  siRNA target sequence for 1110001A05Rik (NM_019808.1,1158-1176).
ctggcagcgtccaaaccaa

SEQ ID NO: 530653 - DNA, 19 bp, Mus musculus
  siRNA target sequence for 1110001A05Rik (NM_019808.1,1173-1191).
ccaagcagcaccttctact

SEQ ID NO: 530654 - DNA, 19 bp, Mus musculus
  siRNA target sequence for 1110001A05Rik (NM_019808.1,1183-1201).
ccttctactgggagaattt

SEQ ID NO: 530655 - DNA, 19 bp, Mus musculus
  siRNA target sequence for 1110001A05Rik (NM_019808.1,1275-1293).
gcagagagcggaacacatt

SEQ ID NO: 530656 - DNA, 19 bp, Mus musculus
  siRNA target sequence for 1110001A05Rik (NM_019808.1,1321-1339).
gcccactgcaaccaagtta

SEQ ID NO: 530657 - DNA, 19 bp, Mus musculus
  siRNA target sequence for 1110001A05Rik (NM_019808.1,1376-1394).
ggcatccagaagaatttaa

SEQ ID NO: 530658 - DNA, 19 bp, Mus musculus
  siRNA target sequence for 1110001A05Rik (NM_019808.1,1465-1483).
ctatgctatgagaagttct

SEQ ID NO: 530659 - DNA, 19 bp, Mus musculus
  siRNA target sequence for 1110001A05Rik (NM_019808.1,1496-1514).
gtggccggtgccaaaggaa

SEQ ID NO: 530660 - DNA, 19 bp, Mus musculus
  siRNA target sequence for 1110001A05Rik (NM_019808.1,1585-1603).
ggaaaacccattcgtaata

SEQ ID NO: 530661 - DNA, 19 bp, Mus musculus
  siRNA target sequence for 1110001A05Rik (NM_019808.1,1586-1604).
gaaaacccattcgtaataa

SEQ ID NO: 530662 - DNA, 19 bp, Mus musculus
  siRNA target sequence for 1110001A05Rik (NM_019808.1,1591-1609).
cccattcgtaataatgttt

SEQ ID NO: 530663 - DNA, 19 bp, Mus musculus
  siRNA target sequence for 1110001A05Rik (NM_019808.1,1592-1610).
ccattcgtaataatgtttt

SEQ ID NO: 530664 - DNA, 19 bp, Mus musculus
  siRNA target sequence for 1110001A05Rik (NM_019808.1,1647-1665).
ctactacgccctttttgga

SEQ ID NO: 530665 - DNA, 19 bp, Mus musculus
  siRNA target sequence for 1110001A05Rik (NM_019808.1,1656-1674).
cctttttggaacaatatgt

SEQ ID NO: 530666 - DNA, 19 bp, Mus musculus
  siRNA target sequence for 1110001A05Rik (NM_019808.1,1716-1734).
ggaagctctgggatacact

SEQ ID NO: 530667 - DNA, 19 bp, Mus musculus
  siRNA target sequence for 1110001A05Rik (NM_019808.1,1726-1744).
ggatacacttggcatgata

SEQ ID NO: 530668 - DNA, 19 bp, Mus musculus
  siRNA target sequence for 1110001A05Rik (NM_019808.1,1764-1782).
gtgttgtgaaagtttggaa

SEQ ID NO: 530669 - DNA, 19 bp, Mus musculus
  siRNA target sequence for 1110001A05Rik (NM_019808.1,1812-1830).
gccactttgcaaaaaacat

SEQ ID NO: 530670 - DNA, 19 bp, Mus musculus
  siRNA target sequence for 1110001A05Rik (NM_019808.1,1821-1839).
caaaaaacatgctcattct

SEQ ID NO: 530671 - DNA, 19 bp, Mus musculus
  siRNA target sequence for 1110001A05Rik (NM_019809.1,1026-1044).
caaatacacaaaattacgt

SEQ ID NO: 530672 - DNA, 19 bp, Mus musculus
  siRNA target sequence for 1110001A05Rik (NM_019809.1,1067-1085).
cacgtgctcttaatgtaca

SEQ ID NO: 530673 - DNA, 19 bp, Mus musculus
  siRNA target sequence for 1110001A05Rik (NM_022554.1,441-459).
ccctggcactgtgaaaatt

SEQ ID NO: 530674 - DNA, 19 bp, Mus musculus
  siRNA target sequence for 1110001A05Rik (NM_022554.1,464-482).
ctaaacgcccaccaagaaa

SEQ ID NO: 530675 - DNA, 19 bp, Mus musculus
  siRNA target sequence for 1110056N09Rik (NM_133700.1,360-378).
cggcctcatccctatgaca

SEQ ID NO: 530676 - DNA, 19 bp, Mus musculus
  siRNA target sequence for 1110056N09Rik (NM_133700.1,366-384).
catccctatgacagtaact

SEQ ID NO: 530677 - DNA, 19 bp, Mus musculus
  siRNA target sequence for 1110056N09Rik (NM_133700.1,416-434).
gcatagtagacctcgtaaa

SEQ ID NO: 530678 - DNA, 19 bp, Mus musculus
  siRNA target sequence for 1110056N09Rik (NM_133700.1,478-496).
gagtcgaccacaccaaaat

SEQ ID NO: 530679 - DNA, 19 bp, Mus musculus
  siRNA target sequence for 1110056N09Rik (NM_133700.1,482-500).
cgaccacaccaaaatgagt

SEQ ID NO: 530680 - DNA, 19 bp, Mus musculus
  siRNA target sequence for 1110056N09Rik (NM_133700.1,597-615).
cttactccttgtattcgaa

SEQ ID NO: 530681 - DNA, 19 bp, Mus musculus
  siRNA target sequence for 1110056N09Rik (NM_133700.1,768-786).
gatggtagctgtaaaacat

SEQ ID NO: 530682 - DNA, 19 bp, Mus musculus
  siRNA target sequence for 1110056N09Rik (NM_133700.1,885-903).
gttgtggacccgtccattt

SEQ ID NO: 530683 - DNA, 19 bp, Mus musculus
  siRNA target sequence for 1110056N09Rik (NM_133700.1,1101-1119).
gcatgtgattacctttgta

SEQ ID NO: 530684 - DNA, 19 bp, Mus musculus
  siRNA target sequence for 1110056N09Rik (NM_133700.1,1185-1203).
gatggtgctcgtagacaat

SEQ ID NO: 530685 - DNA, 19 bp, Mus musculus
  siRNA target sequence for 1110056N09Rik (NM_133700.1,1189-1207).
gtgctcgtagacaatttga

SEQ ID NO: 530686 - DNA, 19 bp, Mus musculus
  siRNA target sequence for 1110056N09Rik (NM_133700.1,1191-1209).
gctcgtagacaatttgaat

SEQ ID NO: 530687 - DNA, 19 bp, Mus musculus
  siRNA target sequence for 1110056N09Rik (NM_133700.1,1192-1210).
ctcgtagacaatttgaatt

SEQ ID NO: 530688 - DNA, 19 bp, Mus musculus
  siRNA target sequence for 1110056N09Rik (NM_133700.1,1583-1601).
gagtcggcatgtagacttt

SEQ ID NO: 530689 - DNA, 19 bp, Mus musculus
  siRNA target sequence for 1110056N09Rik (NM_133700.1,1585-1603).
gtcggcatgtagactttca

SEQ ID NO: 530690 - DNA, 19 bp, Mus musculus
  siRNA target sequence for 1110056N09Rik (NM_133700.1,1593-1611).
gtagactttcagtgtgtaa

SEQ ID NO: 530691 - DNA, 19 bp, Mus musculus
  siRNA target sequence for 1110056N09Rik (NM_133700.1,1596-1614).
gactttcagtgtgtaaaga

SEQ ID NO: 530692 - DNA, 19 bp, Mus musculus
  siRNA target sequence for 1110056N09Rik (NM_133700.1,1608-1626).
gtaaagagtaaatccatta

SEQ ID NO: 530693 - DNA, 19 bp, Mus musculus
  siRNA target sequence for 1110056N09Rik (NM_133700.1,1613-1631).
gagtaaatccattaccaat

SEQ ID NO: 530694 - DNA, 19 bp, Mus musculus
  siRNA target sequence for 1110056N09Rik (NM_133700.1,1697-1715).
ggacgagctggatatcctt

SEQ ID NO: 530695 - DNA, 19 bp, Mus musculus
  siRNA target sequence for 1110056N09Rik (NM_133700.1,1724-1742).
ccctgcctcgggcaacaat

SEQ ID NO: 530696 - DNA, 19 bp, Mus musculus
  siRNA target sequence for 1110056N09Rik (NM_133700.1,1726-1744).
ctgcctcgggcaacaatga

SEQ ID NO: 530697 - DNA, 19 bp, Mus musculus
  siRNA target sequence for 1190002H23Rik (NM_025427.1,471-489).
ctcctcggaaagccaaatt

SEQ ID NO: 530698 - DNA, 19 bp, Mus musculus
  siRNA target sequence for 1190002H23Rik (NM_025427.1,527-545).
ctggacaggaccttagcaa

SEQ ID NO: 530699 - DNA, 19 bp, Mus musculus
  siRNA target sequence for 1300003D20Rik (NM_023622.2,218-236).
ccgacaccttccttcatta

SEQ ID NO: 530700 - DNA, 19 bp, Mus musculus
  siRNA target sequence for 1300003D20Rik (NM_023622.2,506-524).
gttcttggctgcgaaatca

SEQ ID NO: 530701 - DNA, 19 bp, Mus musculus
  siRNA target sequence for 1300003D20Rik (NM_023622.2,537-555).
ccgggatccccctgatcat

SEQ ID NO: 530702 - DNA, 19 bp, Mus musculus
  siRNA target sequence for 1300003D20Rik (NM_023622.2,615-633).
cagggaagcagagaaactt

SEQ ID NO: 530703 - DNA, 19 bp, Mus musculus
  siRNA target sequence for 1300003D20Rik (NM_023622.2,1020-1038).
ggcacagcgcatcgaaaaa

SEQ ID NO: 530704 - DNA, 19 bp, Mus musculus
  siRNA target sequence for 1300003D20Rik (NM_023622.2,1021-1039).
gcacagcgcatcgaaaaat

SEQ ID NO: 530705 - DNA, 19 bp, Mus musculus
  siRNA target sequence for 1300003D20Rik (NM_023622.2,1024-1042).
cagcgcatcgaaaaatgga

SEQ ID NO: 530706 - DNA, 19 bp, Mus musculus
  siRNA target sequence for 1300003D20Rik (NM_023622.2,1026-1044).
gcgcatcgaaaaatggatt

SEQ ID NO: 530707 - DNA, 19 bp, Mus musculus
  siRNA target sequence for 1300003D20Rik (NM_023622.2,1059-1077).
gtgcagggaactacgaaat

SEQ ID NO: 530708 - DNA, 19 bp, Mus musculus
  siRNA target sequence for 1300003D20Rik (NM_023622.2,1061-1079).
gcagggaactacgaaattt

SEQ ID NO: 530709 - DNA, 19 bp, Mus musculus
  siRNA target sequence for 1300003D20Rik (NM_023622.2,1069-1087).
ctacgaaatttctcttcat

SEQ ID NO: 530710 - DNA, 19 bp, Mus musculus
  siRNA target sequence for 1300003D20Rik (NM_023622.2,1099-1117).
ctgtccgccctgcaatcta

SEQ ID NO: 530711 - DNA, 19 bp, Mus musculus
  siRNA target sequence for 1300003D20Rik (NM_023622.2,1111-1129).
caatctaaccccatctaca

SEQ ID NO: 530712 - DNA, 19 bp, Mus musculus
  siRNA target sequence for 1300003D20Rik (NM_023622.2,1159-1177).
cgggaaccgctgtctgttt

SEQ ID NO: 530713 - DNA, 19 bp, Mus musculus
  siRNA target sequence for 1300003D20Rik (NM_023622.2,1221-1239).
cagcagccgagcgattctt

SEQ ID NO: 530714 - DNA, 19 bp, Mus musculus
  siRNA target sequence for 1300003D20Rik (NM_023622.2,1358-1376).
cagccttaccggatacgtt

SEQ ID NO: 530715 - DNA, 19 bp, Mus musculus
  siRNA target sequence for 1300003D20Rik (NM_023622.2,1539-1557).
ccgagtctcccgtgttatt

SEQ ID NO: 530716 - DNA, 19 bp, Mus musculus
  siRNA target sequence for 1300003D20Rik (NM_023622.2,1541-1559).
gagtctcccgtgttattga

SEQ ID NO: 530717 - DNA, 19 bp, Mus musculus
  siRNA target sequence for 1300003D20Rik (NM_023622.2,1907-1925).
gagtcagcatcaacaataa

SEQ ID NO: 530718 - DNA, 19 bp, Mus musculus
  siRNA target sequence for 1300003D20Rik (NM_023622.2,1942-1960).
cggagcatcttgcttactt

SEQ ID NO: 530719 - DNA, 19 bp, Mus musculus
  siRNA target sequence for 1300003D20Rik (NM_023622.2,1994-2012).
ccctggagaagcacaatgt

SEQ ID NO: 530720 - DNA, 19 bp, Mus musculus
  siRNA target sequence for 1300013C10Rik (NM_175174.2,237-255).
caactgtgtgacgtcattt

SEQ ID NO: 530721 - DNA, 19 bp, Mus musculus
  siRNA target sequence for 1300013C10Rik (NM_175174.2,301-319).
cttccgtctcagattattt

SEQ ID NO: 530722 - DNA, 19 bp, Mus musculus
  siRNA target sequence for 1300013C10Rik (NM_175174.2,351-369).
gcgaggcaagaggaaatca

SEQ ID NO: 530723 - DNA, 19 bp, Mus musculus
  siRNA target sequence for 1300013C10Rik (NM_175174.2,352-370).
cgaggcaagaggaaatcaa

SEQ ID NO: 530724 - DNA, 19 bp, Mus musculus
  siRNA target sequence for 1300013C10Rik (NM_175174.2,394-412).
ccttgtggtccttaattca

SEQ ID NO: 530725 - DNA, 19 bp, Mus musculus
  siRNA target sequence for 1300013C10Rik (NM_175174.2,507-525).
gcctgctgcaagttcttga

SEQ ID NO: 530726 - DNA, 19 bp, Mus musculus
  siRNA target sequence for 1300013C10Rik (NM_175174.2,583-601).
gctgcacagatctgcataa

SEQ ID NO: 530727 - DNA, 19 bp, Mus musculus
  siRNA target sequence for 1300013C10Rik (NM_175174.2,586-604).
gcacagatctgcataaagt

SEQ ID NO: 530728 - DNA, 19 bp, Mus musculus
  siRNA target sequence for 1700017G21Rik (NM_027955.1,290-308).
catctaatgatgcttatca

SEQ ID NO: 530729 - DNA, 19 bp, Mus musculus
  siRNA target sequence for 1700017G21Rik (NM_027955.1,325-343).
gggcatgatagcgacatta

SEQ ID NO: 530730 - DNA, 19 bp, Mus musculus
  siRNA target sequence for 1700017G21Rik (NM_027955.1,326-344).
ggcatgatagcgacattaa

SEQ ID NO: 530731 - DNA, 19 bp, Mus musculus
  siRNA target sequence for 1700017G21Rik (NM_027955.1,327-345).
gcatgatagcgacattaaa

SEQ ID NO: 530732 - DNA, 19 bp, Mus musculus
  siRNA target sequence for 1700017G21Rik (NM_027955.1,328-346).
catgatagcgacattaaaa

SEQ ID NO: 530733 - DNA, 19 bp, Mus musculus
  siRNA target sequence for 1700017G21Rik (NM_027955.1,405-423).
ctttgctaacattctcaaa

SEQ ID NO: 530734 - DNA, 19 bp, Mus musculus
  siRNA target sequence for 1700017G21Rik (NM_027955.1,449-467).
gtgttataaatctgatcat

SEQ ID NO: 530735 - DNA, 19 bp, Mus musculus
  siRNA target sequence for 1700017G21Rik (NM_027955.1,451-469).
gttataaatctgatcatta

SEQ ID NO: 530736 - DNA, 19 bp, Mus musculus
  siRNA target sequence for 1700017G21Rik (NM_027955.1,488-506).
cccgatctctgcattttgt

SEQ ID NO: 530737 - DNA, 19 bp, Mus musculus
  siRNA target sequence for 1700017G21Rik (NM_027955.1,522-540).
cacggatgcggatttgtca

SEQ ID NO: 530738 - DNA, 19 bp, Mus musculus
  siRNA target sequence for 1700017G21Rik (NM_027955.1,524-542).
cggatgcggatttgtcaat

SEQ ID NO: 530739 - DNA, 19 bp, Mus musculus
  siRNA target sequence for 1700017G21Rik (NM_027955.1,525-543).
ggatgcggatttgtcaata

SEQ ID NO: 530740 - DNA, 19 bp, Mus musculus
  siRNA target sequence for 1700017G21Rik (NM_027955.1,526-544).
gatgcggatttgtcaataa

SEQ ID NO: 530741 - DNA, 19 bp, Mus musculus
  siRNA target sequence for 1700017G21Rik (NM_027955.1,590-608).
gggtggatcgagtaattca

SEQ ID NO: 530742 - DNA, 19 bp, Mus musculus
  siRNA target sequence for 1700017G21Rik (NM_027955.1,619-637).
ggaatcatgaaagaaacta

SEQ ID NO: 530743 - DNA, 19 bp, Mus musculus
  siRNA target sequence for 1700017G21Rik (NM_027955.1,670-688).
gcagcagaaacctatagat

SEQ ID NO: 530744 - DNA, 19 bp, Mus musculus
  siRNA target sequence for 1700017G21Rik (NM_027955.1,671-689).
cagcagaaacctatagatt

SEQ ID NO: 530745 - DNA, 19 bp, Mus musculus
  siRNA target sequence for 1700017G21Rik (NM_027955.1,673-691).
gcagaaacctatagattaa

SEQ ID NO: 530746 - DNA, 19 bp, Mus musculus
  siRNA target sequence for 1700017G21Rik (NM_027955.1,719-737).
ggcttctttgcaatttgat

SEQ ID NO: 530747 - DNA, 19 bp, Mus musculus
  siRNA target sequence for 1700017G21Rik (NM_027955.1,745-763).
ccaagtgtggcactttaca

SEQ ID NO: 530748 - DNA, 19 bp, Mus musculus
  siRNA target sequence for 1700017G21Rik (NM_027955.1,746-764).
caagtgtggcactttacaa

SEQ ID NO: 530749 - DNA, 19 bp, Mus musculus
  siRNA target sequence for 1700017G21Rik (NM_027955.1,755-773).
cactttacaaggaagtaga

SEQ ID NO: 530750 - DNA, 19 bp, Mus musculus
  siRNA target sequence for 1700017G21Rik (NM_027955.1,835-853).
gatgtatataccacactaa

SEQ ID NO: 530751 - DNA, 19 bp, Mus musculus
  siRNA target sequence for 1700017G21Rik (NM_027955.1,860-878).
ggatgttcctttatcttaa

SEQ ID NO: 530752 - DNA, 19 bp, Mus musculus
  siRNA target sequence for 1700017G21Rik (NM_027955.1,861-879).
gatgttcctttatcttaat

SEQ ID NO: 530753 - DNA, 19 bp, Mus musculus
  siRNA target sequence for 1700017G21Rik (NM_027955.1,938-956).
cccacatggcatatgttga

SEQ ID NO: 530754 - DNA, 19 bp, Mus musculus
  siRNA target sequence for 1700017G21Rik (NM_027955.1,946-964).
gcatatgttgataacatca

SEQ ID NO: 530755 - DNA, 19 bp, Mus musculus
  siRNA target sequence for 1700017G21Rik (NM_027955.1,977-995).
gtgaagaaggactaatatt

SEQ ID NO: 530756 - DNA, 19 bp, Mus musculus
  siRNA target sequence for 1700017G21Rik (NM_027955.1,1039-1057).
gacttgacttccacaacta

SEQ ID NO: 530757 - DNA, 19 bp, Mus musculus
  siRNA target sequence for 1700017G21Rik (NM_027955.1,1049-1067).
ccacaactattcttgaaca

SEQ ID NO: 530758 - DNA, 19 bp, Mus musculus
  siRNA target sequence for 1700017G21Rik (NM_027955.1,1052-1070).
caactattcttgaacaaga

SEQ ID NO: 530759 - DNA, 19 bp, Mus musculus
  siRNA target sequence for 1700017G21Rik (NM_027955.1,1066-1084).
caagatcgactaataccta

SEQ ID NO: 530760 - DNA, 19 bp, Mus musculus
  siRNA target sequence for 1700017G21Rik (NM_027955.1,1088-1106).
catggttgtcacccattta

SEQ ID NO: 530761 - DNA, 19 bp, Mus musculus
  siRNA target sequence for 1700017G21Rik (NM_027955.1,1122-1140).
gactttgctgcgaacacaa

SEQ ID NO: 530762 - DNA, 19 bp, Mus musculus
  siRNA target sequence for 1700017G21Rik (NM_027955.1,1128-1146).
gctgcgaacacaagaatat

SEQ ID NO: 530763 - DNA, 19 bp, Mus musculus
  siRNA target sequence for 1700017G21Rik (NM_027955.1,1149-1167).
ggtaattggaccacaagtt

SEQ ID NO: 530764 - DNA, 19 bp, Mus musculus
  siRNA target sequence for 1700017G21Rik (NM_027955.1,1150-1168).
gtaattggaccacaagtta

SEQ ID NO: 530765 - DNA, 19 bp, Mus musculus
  siRNA target sequence for 1700017G21Rik (NM_027955.1,1157-1175).
gaccacaagttatcaatga

SEQ ID NO: 530766 - DNA, 19 bp, Mus musculus
  siRNA target sequence for 1700017G21Rik (NM_027955.1,1196-1214).
ccatgaggtgtggtacaat

SEQ ID NO: 530767 - DNA, 19 bp, Mus musculus
  siRNA target sequence for 1700017G21Rik (NM_027955.1,1255-1273).
ggacgacttggctttcctt

SEQ ID NO: 530768 - DNA, 19 bp, Mus musculus
  siRNA target sequence for 1700017G21Rik (NM_027955.1,1256-1274).
gacgacttggctttccttt

SEQ ID NO: 530769 - DNA, 19 bp, Mus musculus
  siRNA target sequence for 1700017G21Rik (NM_027955.1,1270-1288).
cctttacgtgtgaccttta

SEQ ID NO: 530770 - DNA, 19 bp, Mus musculus
  siRNA target sequence for 1700017G21Rik (NM_027955.1,1289-1307).
ccaggcagtgtgtaatttt

SEQ ID NO: 530771 - DNA, 19 bp, Mus musculus
  siRNA target sequence for 1700017G21Rik (NM_027955.1,1350-1368).
ccatatccgaaatgtcata

SEQ ID NO: 530772 - DNA, 19 bp, Mus musculus
  siRNA target sequence for 1700017G21Rik (NM_027955.1,1363-1381).
gtcatattcagaataactt

SEQ ID NO: 530773 - DNA, 19 bp, Mus musculus
  siRNA target sequence for 1700017G21Rik (NM_027955.1,1459-1477).
gaggagcaaattgtaatga

SEQ ID NO: 530774 - DNA, 19 bp, Mus musculus
  siRNA target sequence for 1700023F20Rik (NM_172618.1,68-86).
ccctcttcgcccctttact

SEQ ID NO: 530775 - DNA, 19 bp, Mus musculus
  siRNA target sequence for 1700023F20Rik (NM_172618.1,126-144).
catattggtgccttgttga

SEQ ID NO: 530776 - DNA, 19 bp, Mus musculus
  siRNA target sequence for 1700023F20Rik (NM_172618.1,140-158).
gttgattggtgaagaatat

SEQ ID NO: 530777 - DNA, 19 bp, Mus musculus
  siRNA target sequence for 1700023F20Rik (NM_172618.1,143-161).
gattggtgaagaatatggt

SEQ ID NO: 530778 - DNA, 19 bp, Mus musculus
  siRNA target sequence for 1700023F20Rik (NM_172618.1,195-213).
cctgcccacagggtaattt

SEQ ID NO: 530779 - DNA, 19 bp, Mus musculus
  siRNA target sequence for 1700023F20Rik (NM_172618.1,216-234).
gcagcgaggtgccaatatt

SEQ ID NO: 530780 - DNA, 19 bp, Mus musculus
  siRNA target sequence for 1700023F20Rik (NM_172618.1,217-235).
cagcgaggtgccaatattt

SEQ ID NO: 530781 - DNA, 19 bp, Mus musculus
  siRNA target sequence for 1700023F20Rik (NM_172618.1,221-239).
gaggtgccaatattttcga

SEQ ID NO: 530782 - DNA, 19 bp, Mus musculus
  siRNA target sequence for 1700023F20Rik (NM_172618.1,227-245).
ccaatattttcgagcatta

SEQ ID NO: 530783 - DNA, 19 bp, Mus musculus
  siRNA target sequence for 1700023F20Rik (NM_172618.1,317-335).
cacgatgctcctcagatat

SEQ ID NO: 530784 - DNA, 19 bp, Mus musculus
  siRNA target sequence for 1700023F20Rik (NM_172618.1,319-337).
cgatgctcctcagatatat

SEQ ID NO: 530785 - DNA, 19 bp, Mus musculus
  siRNA target sequence for 1700023F20Rik (NM_172618.1,352-370).
cgacgctcactgatgagaa

SEQ ID NO: 530786 - DNA, 19 bp, Mus musculus
  siRNA target sequence for 1700023F20Rik (NM_172618.1,506-524).
ctactcgcttcccaagtta

SEQ ID NO: 530787 - DNA, 19 bp, Mus musculus
  siRNA target sequence for 1700023F20Rik (NM_172618.1,509-527).
ctcgcttcccaagttaact

SEQ ID NO: 530788 - DNA, 19 bp, Mus musculus
  siRNA target sequence for 1700023F20Rik (NM_172618.1,529-547).
gtatgtgctgcatgttcat

SEQ ID NO: 530789 - DNA, 19 bp, Mus musculus
  siRNA target sequence for 1700023F20Rik (NM_172618.1,604-622).
cagcactcctgaatatcgt

SEQ ID NO: 530790 - DNA, 19 bp, Mus musculus
  siRNA target sequence for 1700023F20Rik (NM_172618.1,609-627).
ctcctgaatatcgtcttaa

SEQ ID NO: 530791 - DNA, 19 bp, Mus musculus
  siRNA target sequence for 1700023F20Rik (NM_172618.1,620-638).
cgtcttaagagattcgttt

SEQ ID NO: 530792 - DNA, 19 bp, Mus musculus
  siRNA target sequence for 1700023F20Rik (NM_172618.1,642-660).
gctcctgagaaagatattt

SEQ ID NO: 530793 - DNA, 19 bp, Mus musculus
  siRNA target sequence for 1700023F20Rik (NM_172618.1,645-663).
cctgagaaagatattttct

SEQ ID NO: 530794 - DNA, 19 bp, Mus musculus
  siRNA target sequence for 1700023F20Rik (NM_172618.1,682-700).
gtaagcacaatgcaaaaga

SEQ ID NO: 530795 - DNA, 19 bp, Mus musculus
  siRNA target sequence for 1700023F20Rik (NM_172618.1,726-744).
gtgcgcttacctctaatga

SEQ ID NO: 530796 - DNA, 19 bp, Mus musculus
  siRNA target sequence for 1700023F20Rik (NM_172618.1,785-803).
cttgtctccggatgctatt

SEQ ID NO: 530797 - DNA, 19 bp, Mus musculus
  siRNA target sequence for 1700023F20Rik (NM_172618.1,788-806).
gtctccggatgctattctt

SEQ ID NO: 530798 - DNA, 19 bp, Mus musculus
  siRNA target sequence for 1700023F20Rik (NM_172618.1,826-844).
cggagagccgggatatgga

SEQ ID NO: 530799 - DNA, 19 bp, Mus musculus
  siRNA target sequence for 1700023F20Rik (NM_172618.1,835-853).
gggatatggacctcaacta

SEQ ID NO: 530800 - DNA, 19 bp, Mus musculus
  siRNA target sequence for 1700023F20Rik (NM_172618.1,837-855).
gatatggacctcaactaca

SEQ ID NO: 530801 - DNA, 19 bp, Mus musculus
  siRNA target sequence for 1700023F20Rik (NM_172618.1,860-878).
catgctcatacctgaagaa

SEQ ID NO: 530802 - DNA, 19 bp, Mus musculus
  siRNA target sequence for 1700023F20Rik (NM_172618.1,939-957).
ctggatggtgacactcaaa

SEQ ID NO: 530803 - DNA, 19 bp, Mus musculus
  siRNA target sequence for 1700023F20Rik (NM_172618.1,946-964).
gtgacactcaaaactatga

SEQ ID NO: 530804 - DNA, 19 bp, Mus musculus
  siRNA target sequence for 1700023F20Rik (NM_172618.1,982-1000).
cccggcaccccattgatga

SEQ ID NO: 530805 - DNA, 19 bp, Mus musculus
  siRNA target sequence for 1700023F20Rik (NM_172618.1,983-1001).
ccggcaccccattgatgat

SEQ ID NO: 530806 - DNA, 19 bp, Mus musculus
  siRNA target sequence for 1700023F20Rik (NM_172618.1,1029-1047).
cttggccagccgtccatta

SEQ ID NO: 530807 - DNA, 19 bp, Mus musculus
  siRNA target sequence for 1700023F20Rik (NM_172618.1,1032-1050).
ggccagccgtccattataa

SEQ ID NO: 530808 - DNA, 19 bp, Mus musculus
  siRNA target sequence for 1700023F20Rik (NM_172618.1,1033-1051).
gccagccgtccattataaa

SEQ ID NO: 530809 - DNA, 19 bp, Mus musculus
  siRNA target sequence for 1700023F20Rik (NM_172618.1,1076-1094).
ccgtgacagccggtcttat

SEQ ID NO: 530810 - DNA, 19 bp, Mus musculus
  siRNA target sequence for 1700023F20Rik (NM_172618.1,1077-1095).
cgtgacagccggtcttatt

SEQ ID NO: 530811 - DNA, 19 bp, Mus musculus
  siRNA target sequence for 1700023F20Rik (NM_172618.1,1080-1098).
gacagccggtcttattcct

SEQ ID NO: 530812 - DNA, 19 bp, Mus musculus
  siRNA target sequence for 1700023F20Rik (NM_172618.1,1085-1103).
ccggtcttattcctacttt

SEQ ID NO: 530813 - DNA, 19 bp, Mus musculus
  siRNA target sequence for 1700023F20Rik (NM_172618.1,1090-1108).
cttattcctactttattga

SEQ ID NO: 530814 - DNA, 19 bp, Mus musculus
  siRNA target sequence for 1700023F20Rik (NM_172618.1,1112-1130).
gtccatggacgaacttgat

SEQ ID NO: 530815 - DNA, 19 bp, Mus musculus
  siRNA target sequence for 1700023F20Rik (NM_172618.1,1140-1158).
gtgatcgatcactcacatt

SEQ ID NO: 530816 - DNA, 19 bp, Mus musculus
  siRNA target sequence for 1700023F20Rik (NM_172618.1,1165-1183).
gtcggtcttggcaaaagtt

SEQ ID NO: 530817 - DNA, 19 bp, Mus musculus
  siRNA target sequence for 1700023F20Rik (NM_172618.1,1167-1185).
cggtcttggcaaaagttgt

SEQ ID NO: 530818 - DNA, 19 bp, Mus musculus
  siRNA target sequence for 1700023F20Rik (NM_172618.1,1168-1186).
ggtcttggcaaaagttgta

SEQ ID NO: 530819 - DNA, 19 bp, Mus musculus
  siRNA target sequence for 1700023F20Rik (NM_172618.1,1171-1189).
cttggcaaaagttgtattt

SEQ ID NO: 530820 - DNA, 19 bp, Mus musculus
  siRNA target sequence for 1700023F20Rik (NM_172618.1,1204-1222).
gcaggtatatccgaatagt

SEQ ID NO: 530821 - DNA, 19 bp, Mus musculus
  siRNA target sequence for 1700023F20Rik (NM_172618.1,1205-1223).
caggtatatccgaatagtt

SEQ ID NO: 530822 - DNA, 19 bp, Mus musculus
  siRNA target sequence for 1700023F20Rik (NM_172618.1,1334-1352).
ggcaacgatcgcagattgt

SEQ ID NO: 530823 - DNA, 19 bp, Mus musculus
  siRNA target sequence for 1700023F20Rik (NM_172618.1,1395-1413).
ctgaatggggacactaaga

SEQ ID NO: 530824 - DNA, 19 bp, Mus musculus
  siRNA target sequence for 1700023F20Rik (NM_172618.1,1397-1415).
gaatggggacactaagaat

SEQ ID NO: 530825 - DNA, 19 bp, Mus musculus
  siRNA target sequence for 1700023F20Rik (NM_172618.1,1402-1420).
gggacactaagaattatga

SEQ ID NO: 530826 - DNA, 19 bp, Mus musculus
  siRNA target sequence for 1700023F20Rik (NM_172618.1,1478-1496).
ggcacagccatacataatt

SEQ ID NO: 530827 - DNA, 19 bp, Mus musculus
  siRNA target sequence for 1700023F20Rik (NM_172618.1,1498-1516).
gctcaatacggttattact

SEQ ID NO: 530828 - DNA, 19 bp, Mus musculus
  siRNA target sequence for 1700023F20Rik (NM_172618.1,1586-1604).
ggtggccgacagaacgaaa

SEQ ID NO: 530829 - DNA, 19 bp, Mus musculus
  siRNA target sequence for 1700023F20Rik (NM_172618.1,1590-1608).
gccgacagaacgaaagtgt

SEQ ID NO: 530830 - DNA, 19 bp, Mus musculus
  siRNA target sequence for 1700023F20Rik (NM_172618.1,1622-1640).
gcagtcagtcacttttgaa

SEQ ID NO: 530831 - DNA, 19 bp, Mus musculus
  siRNA target sequence for 1700023F20Rik (NM_172618.1,1872-1890).
cccaaccaacagaaccaat

SEQ ID NO: 530832 - DNA, 19 bp, Mus musculus
  siRNA target sequence for 2310003F20Rik (NM_019994.3,502-520).
catcgagaatgcagaatct

SEQ ID NO: 530833 - DNA, 19 bp, Mus musculus
  siRNA target sequence for 2310003F20Rik (NM_019994.3,505-523).
cgagaatgcagaatctatt

SEQ ID NO: 530834 - DNA, 19 bp, Mus musculus
  siRNA target sequence for 2310003F20Rik (NM_019994.3,519-537).
ctattgaccttaaacagtt

SEQ ID NO: 530835 - DNA, 19 bp, Mus musculus
  siRNA target sequence for 2310003F20Rik (NM_019994.3,542-560).
gaccaacatttttcacata

SEQ ID NO: 530836 - DNA, 19 bp, Mus musculus
  siRNA target sequence for 2310003F20Rik (NM_019994.3,591-609).
ctattgaagctagtcttaa

SEQ ID NO: 530837 - DNA, 19 bp, Mus musculus
  siRNA target sequence for 2310003F20Rik (NM_019994.3,618-636).
gtcacaagtctcaaagaga

SEQ ID NO: 530838 - DNA, 19 bp, Mus musculus
  siRNA target sequence for 2310003F20Rik (NM_019994.3,637-655).
ggaattagatgctatactt

SEQ ID NO: 530839 - DNA, 19 bp, Mus musculus
  siRNA target sequence for 2310003F20Rik (NM_019994.3,701-719).
cagcgatggcaattccata

SEQ ID NO: 530840 - DNA, 19 bp, Mus musculus
  siRNA target sequence for 2310003F20Rik (NM_019994.3,704-722).
cgatggcaattccatagta

SEQ ID NO: 530841 - DNA, 19 bp, Mus musculus
  siRNA target sequence for 2310003F20Rik (NM_019994.3,705-723).
gatggcaattccatagtat

SEQ ID NO: 530842 - DNA, 19 bp, Mus musculus
  siRNA target sequence for 2310003F20Rik (NM_019994.3,715-733).
ccatagtattgggttgatt

SEQ ID NO: 530843 - DNA, 19 bp, Mus musculus
  siRNA target sequence for 2310003F20Rik (NM_019994.3,727-745).
gttgattttaaagaaacta

SEQ ID NO: 530844 - DNA, 19 bp, Mus musculus
  siRNA target sequence for 2310003F20Rik (NM_019994.3,749-767).
cacacaggaaactccttaa

SEQ ID NO: 530845 - DNA, 19 bp, Mus musculus
  siRNA target sequence for 2310003F20Rik (NM_019994.3,783-801).
gtgttcgtctcttcttgtt

SEQ ID NO: 530846 - DNA, 19 bp, Mus musculus
  siRNA target sequence for 2310003F20Rik (NM_019994.3,785-803).
gttcgtctcttcttgttat

SEQ ID NO: 530847 - DNA, 19 bp, Mus musculus
  siRNA target sequence for 2310003F20Rik (NM_019994.3,788-806).
cgtctcttcttgttatggt

SEQ ID NO: 530848 - DNA, 19 bp, Mus musculus
  siRNA target sequence for 2310003F20Rik (NM_019994.3,896-914).
ggacctcggactttagata

SEQ ID NO: 530849 - DNA, 19 bp, Mus musculus
  siRNA target sequence for 2310003F20Rik (NM_019994.3,897-915).
gacctcggactttagataa

SEQ ID NO: 530850 - DNA, 19 bp, Mus musculus
  siRNA target sequence for 2310003F20Rik (NM_019994.3,902-920).
cggactttagataatctta

SEQ ID NO: 530851 - DNA, 19 bp, Mus musculus
  siRNA target sequence for 2310003F20Rik (NM_019994.3,903-921).
ggactttagataatcttat

SEQ ID NO: 530852 - DNA, 19 bp, Mus musculus
  siRNA target sequence for 2310003F20Rik (NM_019994.3,1010-1028).
gaagacctcacaagctatt

SEQ ID NO: 530853 - DNA, 19 bp, Mus musculus
  siRNA target sequence for 2310003F20Rik (NM_019994.3,1096-1114).
ccaagaaaggggattttca

SEQ ID NO: 530854 - DNA, 19 bp, Mus musculus
  siRNA target sequence for 2310003F20Rik (NM_019994.3,1149-1167).
cttatattttcccaaacat

SEQ ID NO: 530855 - DNA, 19 bp, Mus musculus
  siRNA target sequence for 2310003F20Rik (NM_019994.3,1165-1183).
catttgcaaggagaatagt

SEQ ID NO: 530856 - DNA, 19 bp, Mus musculus
  siRNA target sequence for 2310003F20Rik (NM_019994.3,1174-1192).
ggagaatagtttgtatcat

SEQ ID NO: 530857 - DNA, 19 bp, Mus musculus
  siRNA target sequence for 2310003F20Rik (NM_019994.3,1220-1238).
ccaaagcctcattatgtga

SEQ ID NO: 530858 - DNA, 19 bp, Mus musculus
  siRNA target sequence for 2310003F20Rik (NM_019994.3,1225-1243).
gcctcattatgtgatgata

SEQ ID NO: 530859 - DNA, 19 bp, Mus musculus
  siRNA target sequence for 2310003F20Rik (NM_019994.3,1261-1279).
caatgaaacaatatattgt

SEQ ID NO: 530860 - DNA, 19 bp, Mus musculus
  siRNA target sequence for 2310003F20Rik (NM_019994.3,1269-1287).
caatatattgtacaaaaga

SEQ ID NO: 530861 - DNA, 19 bp, Mus musculus
  siRNA target sequence for 2310003F20Rik (NM_019994.3,1294-1312).
catccaggctcgggttatt

SEQ ID NO: 530862 - DNA, 19 bp, Mus musculus
  siRNA target sequence for 2310003F20Rik (NM_019994.3,1298-1316).
caggctcgggttattgtca

SEQ ID NO: 530863 - DNA, 19 bp, Mus musculus
  siRNA target sequence for 2310003F20Rik (NM_019994.3,1300-1318).
ggctcgggttattgtcatt

SEQ ID NO: 530864 - DNA, 19 bp, Mus musculus
  siRNA target sequence for 2310003F20Rik (NM_019994.3,1304-1322).
cgggttattgtcattcgtt

SEQ ID NO: 530865 - DNA, 19 bp, Mus musculus
  siRNA target sequence for 2310003F20Rik (NM_019994.3,1352-1370).
ccacattcaggacctaata

SEQ ID NO: 530866 - DNA, 19 bp, Mus musculus
  siRNA target sequence for 2310003F20Rik (NM_019994.3,1353-1371).
cacattcaggacctaatat

SEQ ID NO: 530867 - DNA, 19 bp, Mus musculus
  siRNA target sequence for 2310003F20Rik (NM_019994.3,1415-1433).
gcagctgctagtttggttt

SEQ ID NO: 530868 - DNA, 19 bp, Mus musculus
  siRNA target sequence for 2310003F20Rik (NM_019994.3,1484-1502).
gagcctgagcagtctcatt

SEQ ID NO: 530869 - DNA, 19 bp, Mus musculus
  siRNA target sequence for 2310003F20Rik (NM_019994.3,1573-1591).
cacagacatcgaaattgtt

SEQ ID NO: 530870 - DNA, 19 bp, Mus musculus
  siRNA target sequence for 2310003F20Rik (NM_019994.3,1593-1611).
gcagagtgttttcatctaa

SEQ ID NO: 530871 - DNA, 19 bp, Mus musculus
  siRNA target sequence for 2310003F20Rik (NM_019994.3,1612-1630).
gagaagcaatgtaaacttt

SEQ ID NO: 530872 - DNA, 19 bp, Mus musculus
  siRNA target sequence for 2310003F20Rik (NM_019994.3,1760-1778).
gacactgcgatcacttgtt

SEQ ID NO: 530873 - DNA, 19 bp, Mus musculus
  siRNA target sequence for 2310003F20Rik (NM_019994.3,1766-1784).
gcgatcacttgttcagata

SEQ ID NO: 530874 - DNA, 19 bp, Mus musculus
  siRNA target sequence for 2310003F20Rik (NM_019994.3,1767-1785).
cgatcacttgttcagatat

SEQ ID NO: 530875 - DNA, 19 bp, Mus musculus
  siRNA target sequence for 2310003F20Rik (NM_019994.3,1768-1786).
gatcacttgttcagatata

SEQ ID NO: 530876 - DNA, 19 bp, Mus musculus
  siRNA target sequence for 2310003F20Rik (NM_019994.3,1850-1868).
gaaaatgggaccagtactt

SEQ ID NO: 530877 - DNA, 19 bp, Mus musculus
  siRNA target sequence for 2310003F20Rik (NM_019994.3,1858-1876).
gaccagtacttctgaacat

SEQ ID NO: 530878 - DNA, 19 bp, Mus musculus
  siRNA target sequence for 2310003F20Rik (NM_019994.3,1871-1889).
gaacatgttcgcaattcta

SEQ ID NO: 530879 - DNA, 19 bp, Mus musculus
  siRNA target sequence for 2310003F20Rik (NM_019994.3,1965-1983).
gcactcaggccgttttgca

SEQ ID NO: 530880 - DNA, 19 bp, Mus musculus
  siRNA target sequence for 2310003F20Rik (NM_019994.3,1973-1991).
gccgttttgcaggtgttta

SEQ ID NO: 530881 - DNA, 19 bp, Mus musculus
  siRNA target sequence for 2310003F20Rik (NM_019994.3,1975-1993).
cgttttgcaggtgtttatt

SEQ ID NO: 530882 - DNA, 19 bp, Mus musculus
  siRNA target sequence for 2310003F20Rik (NM_019994.3,1984-2002).
ggtgtttattataaactca

SEQ ID NO: 530883 - DNA, 19 bp, Mus musculus
  siRNA target sequence for 2310003F20Rik (NM_019994.3,2004-2022).
cgaacatatttcttcttga

SEQ ID NO: 530884 - DNA, 19 bp, Mus musculus
  siRNA target sequence for 2310003F20Rik (NM_019994.3,2070-2088).
gtaaacgcattcttaatat

SEQ ID NO: 530885 - DNA, 19 bp, Mus musculus
  siRNA target sequence for 2310003F20Rik (NM_019994.3,2077-2095).
cattcttaatatttatcga

SEQ ID NO: 530886 - DNA, 19 bp, Mus musculus
  siRNA target sequence for 2310003F20Rik (NM_019994.3,2098-2116).
catggttgtgcaagtatca

SEQ ID NO: 530887 - DNA, 19 bp, Mus musculus
  siRNA target sequence for 2310003F20Rik (NM_019994.3,2166-2184).
cggagtccgtactgaagat

SEQ ID NO: 530888 - DNA, 19 bp, Mus musculus
  siRNA target sequence for 2310003F20Rik (NM_019994.3,2182-2200).
gatgtcgtcacaagctttt

SEQ ID NO: 530889 - DNA, 19 bp, Mus musculus
  siRNA target sequence for 2310003F20Rik (NM_019994.3,2269-2287).
cattgttgcctggatcaaa

SEQ ID NO: 530890 - DNA, 19 bp, Mus musculus
  siRNA target sequence for 2310003F20Rik (NM_019994.3,2278-2296).
ctggatcaaagcaaatcta

SEQ ID NO: 530891 - DNA, 19 bp, Mus musculus
  siRNA target sequence for 2310003F20Rik (NM_019994.3,2281-2299).
gatcaaagcaaatctaaat

SEQ ID NO: 530892 - DNA, 19 bp, Mus musculus
  siRNA target sequence for 2310003F20Rik (NM_019994.3,2284-2302).
caaagcaaatctaaatgta

SEQ ID NO: 530893 - DNA, 19 bp, Mus musculus
  siRNA target sequence for 2310003F20Rik (NM_019994.3,2327-2345).
gacttactttcggtattgt

SEQ ID NO: 530894 - DNA, 19 bp, Mus musculus
  siRNA target sequence for 2310003F20Rik (NM_019994.3,2329-2347).
cttactttcggtattgtca

SEQ ID NO: 530895 - DNA, 19 bp, Mus musculus
  siRNA target sequence for 2310003F20Rik (NM_019994.3,2333-2351).
ctttcggtattgtcatcat

SEQ ID NO: 530896 - DNA, 19 bp, Mus musculus
  siRNA target sequence for 2310003F20Rik (NM_019994.3,2416-2434).
ggctagaaatttatatagt

SEQ ID NO: 530897 - DNA, 19 bp, Mus musculus
  siRNA target sequence for 2310003F20Rik (NM_019994.3,2443-2461).
cagtgatttgccattggat

SEQ ID NO: 530898 - DNA, 19 bp, Mus musculus
  siRNA target sequence for 2310003F20Rik (NM_019994.3,2504-2522).
gttggacacgaatttcaga

SEQ ID NO: 530899 - DNA, 19 bp, Mus musculus
  siRNA target sequence for 2310003F20Rik (NM_019994.3,2512-2530).
cgaatttcagaaagtttca

SEQ ID NO: 530900 - DNA, 19 bp, Mus musculus
  siRNA target sequence for 2310003F20Rik (NM_019994.3,2525-2543).
gtttcagttgacaagtcat

SEQ ID NO: 530901 - DNA, 19 bp, Mus musculus
  siRNA target sequence for 2310003F20Rik (NM_019994.3,2638-2656).
gagtatagtacggcaaaaa

SEQ ID NO: 530902 - DNA, 19 bp, Mus musculus
  siRNA target sequence for 2310003F20Rik (NM_019994.3,2648-2666).
cggcaaaaaactgttgata

SEQ ID NO: 530903 - DNA, 19 bp, Mus musculus
  siRNA target sequence for 2310003F20Rik (NM_019994.3,2793-2811).
ctgacatcttggaaccatt

SEQ ID NO: 530904 - DNA, 19 bp, Mus musculus
  siRNA target sequence for 2310003F20Rik (NM_019994.3,2797-2815).
catcttggaaccattcact

SEQ ID NO: 530905 - DNA, 19 bp, Mus musculus
  siRNA target sequence for 2310003F20Rik (NM_019994.3,2854-2872).
caaactgcctcctcttaat

SEQ ID NO: 530906 - DNA, 19 bp, Mus musculus
  siRNA target sequence for 2310003F20Rik (NM_019994.3,2945-2963).
ggcaatgcctcgactatga

SEQ ID NO: 530907 - DNA, 19 bp, Mus musculus
  siRNA target sequence for 2310003F20Rik (NM_019994.3,2947-2965).
caatgcctcgactatgaca

SEQ ID NO: 530908 - DNA, 19 bp, Mus musculus
  siRNA target sequence for 2310003F20Rik (NM_019994.3,3000-3018).
cgaaagacctccctgatat

SEQ ID NO: 530909 - DNA, 19 bp, Mus musculus
  siRNA target sequence for 2310003F20Rik (NM_019994.3,3001-3019).
gaaagacctccctgatatt

SEQ ID NO: 530910 - DNA, 19 bp, Mus musculus
  siRNA target sequence for 2310003F20Rik (NM_019994.3,3005-3023).
gacctccctgatattctaa

SEQ ID NO: 530911 - DNA, 19 bp, Mus musculus
  siRNA target sequence for 2310003F20Rik (NM_019994.3,3008-3026).
ctccctgatattctaaaca

SEQ ID NO: 530912 - DNA, 19 bp, Mus musculus
  siRNA target sequence for 2310003F20Rik (NM_019994.3,3034-3052).
ccagatgcggcctgttgat

SEQ ID NO: 530913 - DNA, 19 bp, Mus musculus
  siRNA target sequence for 2310003F20Rik (NM_019994.3,3151-3169).
gtgtgagggacgaaaattt

SEQ ID NO: 530914 - DNA, 19 bp, Mus musculus
  siRNA target sequence for 2310003F20Rik (NM_019994.3,3153-3171).
gtgagggacgaaaatttga

SEQ ID NO: 530915 - DNA, 19 bp, Mus musculus
  siRNA target sequence for 2310003F20Rik (NM_019994.3,3155-3173).
gagggacgaaaatttgaca

SEQ ID NO: 530916 - DNA, 19 bp, Mus musculus
  siRNA target sequence for 2310003F20Rik (NM_019994.3,3227-3245).
ggttctggccatcatcaaa

SEQ ID NO: 530917 - DNA, 19 bp, Mus musculus
  siRNA target sequence for 2310003F20Rik (NM_019994.3,3260-3278).
gaagtggccagcctaacta

SEQ ID NO: 530918 - DNA, 19 bp, Mus musculus
  siRNA target sequence for 2310003F20Rik (NM_019994.3,3270-3288).
gcctaactacgcttcattt

SEQ ID NO: 530919 - DNA, 19 bp, Mus musculus
  siRNA target sequence for 2310003F20Rik (NM_019994.3,3271-3289).
cctaactacgcttcattta

SEQ ID NO: 530920 - DNA, 19 bp, Mus musculus
  siRNA target sequence for 2310003F20Rik (NM_019994.3,3279-3297).
cgcttcatttagattcaga

SEQ ID NO: 530921 - DNA, 19 bp, Mus musculus
  siRNA target sequence for 2310003F20Rik (NM_019994.3,3281-3299).
cttcatttagattcagaaa

SEQ ID NO: 530922 - DNA, 19 bp, Mus musculus
  siRNA target sequence for 2310003F20Rik (NM_019994.3,3423-3441).
gcagagctcacatagaaca

SEQ ID NO: 530923 - DNA, 19 bp, Mus musculus
  siRNA target sequence for 2310003F20Rik (NM_019994.3,3489-3507).
cgccggatgacctagaaat

SEQ ID NO: 530924 - DNA, 19 bp, Mus musculus
  siRNA target sequence for 2310003F20Rik (NM_019994.3,3594-3612).
gcagaatgctgggcatttt

SEQ ID NO: 530925 - DNA, 19 bp, Mus musculus
  siRNA target sequence for 2310003F20Rik (NM_019994.3,3606-3624).
gcattttgggagatgtcaa

SEQ ID NO: 530926 - DNA, 19 bp, Mus musculus
  siRNA target sequence for 2310003F20Rik (NM_019994.3,3627-3645).
ctattatggatcctgaaat

SEQ ID NO: 530927 - DNA, 19 bp, Mus musculus
  siRNA target sequence for 2310003F20Rik (NM_019994.3,3651-3669).
ctcaagtttttgattacct

SEQ ID NO: 530928 - DNA, 19 bp, Mus musculus
  siRNA target sequence for 2310003F20Rik (NM_019994.3,3683-3701).
cagaatctagccaagatca

SEQ ID NO: 530929 - DNA, 19 bp, Mus musculus
  siRNA target sequence for 2310003F20Rik (NM_019994.3,3689-3707).
ctagccaagatcagagata

SEQ ID NO: 530930 - DNA, 19 bp, Mus musculus
  siRNA target sequence for 2310003F20Rik (NM_019994.3,3805-3823).
gttgactgataagtataaa

SEQ ID NO: 530931 - DNA, 19 bp, Mus musculus
  siRNA target sequence for 2310003F20Rik (NM_019994.3,3827-3845).
ggtaaattacatgcatata

SEQ ID NO: 530932 - DNA, 19 bp, Mus musculus
  siRNA target sequence for 2310003F20Rik (NM_019994.3,3881-3899).
gtatctccaaatagagatt

SEQ ID NO: 530933 - DNA, 19 bp, Mus musculus
  siRNA target sequence for 2310003F20Rik (NM_019994.3,3926-3944).
cattgtggattgcttcata

SEQ ID NO: 530934 - DNA, 19 bp, Mus musculus
  siRNA target sequence for 2310003F20Rik (NM_019994.3,3947-3965).
gaccaggacattgtcaata

SEQ ID NO: 530935 - DNA, 19 bp, Mus musculus
  siRNA target sequence for 2310003F20Rik (NM_019994.3,3979-3997).
ctgctcacctcagtttttt
